United States Patent Application Publication US 2025/0171800 A1 - sequence listing, part 2

SEQ ID NO: 22225 - DNA, 20 bp, synthetic construct
  misc_feature 1..20: note = chemically synthesized
  source 1..20: mol_type = other DNA
tagtgtgaattaccctcttg

SEQ ID NO: 22226 - DNA, 20 bp, synthetic construct
  misc_feature 1..20: note = chemically synthesized
  source 1..20: mol_type = other DNA
taccctcttgtagaatcctt

SEQ ID NO: 22227 - DNA, 20 bp, synthetic construct
  misc_feature 1..20: note = chemically synthesized
  source 1..20: mol_type = other DNA
ctactcactacttgtgacaa

SEQ ID NO: 22228 - DNA, 20 bp, synthetic construct
  misc_feature 1..20: note = chemically synthesized
  source 1..20: mol_type = other DNA
cactacttgtgacaatagct

SEQ ID NO: 22229 - DNA, 20 bp, synthetic construct
  misc_feature 1..20: note = chemically synthesized
  source 1..20: mol_type = other DNA
caatagctcagtctaattat

SEQ ID NO: 22230 - DNA, 20 bp, synthetic construct
  misc_feature 1..20: note = chemically synthesized
  source 1..20: mol_type = other DNA
agctcagtctaattataagt

SEQ ID NO: 22231 - DNA, 20 bp, synthetic construct
  misc_feature 1..20: note = chemically synthesized
  source 1..20: mol_type = other DNA
tctaattataagttagactt

SEQ ID NO: 22232 - DNA, 20 bp, synthetic construct
  misc_feature 1..20: note = chemically synthesized
  source 1..20: mol_type = other DNA
ctaattataagttagacttt

SEQ ID NO: 22233 - DNA, 20 bp, synthetic construct
  misc_feature 1..20: note = chemically synthesized
  source 1..20: mol_type = other DNA
taattataagttagactttg

SEQ ID NO: 22234 - DNA, 20 bp, synthetic construct
  misc_feature 1..20: note = chemically synthesized
  source 1..20: mol_type = other DNA
tataagttagactttggggc

SEQ ID NO: 22235 - DNA, 20 bp, synthetic construct
  misc_feature 1..20: note = chemically synthesized
  source 1..20: mol_type = other DNA
ttggggctggaataaatgat

SEQ ID NO: 22236 - DNA, 20 bp, synthetic construct
  misc_feature 1..20: note = chemically synthesized
  source 1..20: mol_type = other DNA
tggggctggaataaatgatt

SEQ ID NO: 22237 - DNA, 20 bp, synthetic construct
  misc_feature 1..20: note = chemically synthesized
  source 1..20: mol_type = other DNA
gctggaataaatgattaggc

SEQ ID NO: 22238 - DNA, 20 bp, synthetic construct
  misc_feature 1..20: note = chemically synthesized
  source 1..20: mol_type = other DNA
ataaatgattaggccagcca

SEQ ID NO: 22239 - DNA, 20 bp, synthetic construct
  misc_feature 1..20: note = chemically synthesized
  source 1..20: mol_type = other DNA
gccaaagacatcacttataa

SEQ ID NO: 22240 - DNA, 20 bp, synthetic construct
  misc_feature 1..20: note = chemically synthesized
  source 1..20: mol_type = other DNA
ttataatagtgtatctcctt

SEQ ID NO: 22241 - DNA, 20 bp, synthetic construct
  misc_feature 1..20: note = chemically synthesized
  source 1..20: mol_type = other DNA
tcttactgtttcttatttac

SEQ ID NO: 22242 - DNA, 20 bp, synthetic construct
  misc_feature 1..20: note = chemically synthesized
  source 1..20: mol_type = other DNA
tactgtttcttatttacaag

SEQ ID NO: 22243 - DNA, 20 bp, synthetic construct
  misc_feature 1..20: note = chemically synthesized
  source 1..20: mol_type = other DNA
ctttttaaattatttttcta

SEQ ID NO: 22244 - DNA, 20 bp, synthetic construct
  misc_feature 1..20: note = chemically synthesized
  source 1..20: mol_type = other DNA
tttttaaattatttttctat

SEQ ID NO: 22245 - DNA, 20 bp, synthetic construct
  misc_feature 1..20: note = chemically synthesized
  source 1..20: mol_type = other DNA
atttttctataggcctactg

SEQ ID NO: 22246 - DNA, 20 bp, synthetic construct
  misc_feature 1..20: note = chemically synthesized
  source 1..20: mol_type = other DNA
ggcctactgaagtaattccc

SEQ ID NO: 22247 - DNA, 20 bp, synthetic construct
  misc_feature 1..20: note = chemically synthesized
  source 1..20: mol_type = other DNA
aatctgacctctctcatttc

SEQ ID NO: 22248 - DNA, 20 bp, synthetic construct
  misc_feature 1..20: note = chemically synthesized
  source 1..20: mol_type = other DNA
tatttaaacatccatcttcc

SEQ ID NO: 22249 - DNA, 20 bp, synthetic construct
  misc_feature 1..20: note = chemically synthesized
  source 1..20: mol_type = other DNA
ggtttccttccctttatccc

SEQ ID NO: 22250 - DNA, 20 bp, synthetic construct
  misc_feature 1..20: note = chemically synthesized
  source 1..20: mol_type = other DNA
cttccctttatccccagcca

SEQ ID NO: 22251 - DNA, 20 bp, synthetic construct
  misc_feature 1..20: note = chemically synthesized
  source 1..20: mol_type = other DNA
ttccctttatccccagccat

SEQ ID NO: 22252 - DNA, 20 bp, synthetic construct
  misc_feature 1..20: note = chemically synthesized
  source 1..20: mol_type = other DNA
aatctgttctccccaatact

SEQ ID NO: 22253 - DNA, 20 bp, synthetic construct
  misc_feature 1..20: note = chemically synthesized
  source 1..20: mol_type = other DNA
tgttctccccaatactgagt

SEQ ID NO: 22254 - DNA, 20 bp, synthetic construct
  misc_feature 1..20: note = chemically synthesized
  source 1..20: mol_type = other DNA
ttctccccaatactgagtga

SEQ ID NO: 22255 - DNA, 20 bp, synthetic construct
  misc_feature 1..20: note = chemically synthesized
  source 1..20: mol_type = other DNA
gctatttccctgcttaaacg

SEQ ID NO: 22256 - DNA, 20 bp, synthetic construct
  misc_feature 1..20: note = chemically synthesized
  source 1..20: mol_type = other DNA
cgtggtgctgtcttttactg

SEQ ID NO: 22257 - DNA, 20 bp, synthetic construct
  misc_feature 1..20: note = chemically synthesized
  source 1..20: mol_type = other DNA
tggtgctgtcttttactgaa

SEQ ID NO: 22258 - DNA, 20 bp, synthetic construct
  misc_feature 1..20: note = chemically synthesized
  source 1..20: mol_type = other DNA
tgctgtcttttactgaagag

SEQ ID NO: 22259 - DNA, 20 bp, synthetic construct
  misc_feature 1..20: note = chemically synthesized
  source 1..20: mol_type = other DNA
ctgtcttttactgaagagaa

SEQ ID NO: 22260 - DNA, 20 bp, synthetic construct
  misc_feature 1..20: note = chemically synthesized
  source 1..20: mol_type = other DNA
ttttactgaagagaagagat

SEQ ID NO: 22261 - DNA, 20 bp, synthetic construct
  misc_feature 1..20: note = chemically synthesized
  source 1..20: mol_type = other DNA
agagaagagattagtccttt

SEQ ID NO: 22262 - DNA, 20 bp, synthetic construct
  misc_feature 1..20: note = chemically synthesized
  source 1..20: mol_type = other DNA
gaagagattagtcctttgag

SEQ ID NO: 22263 - DNA, 20 bp, synthetic construct
  misc_feature 1..20: note = chemically synthesized
  source 1..20: mol_type = other DNA
aagagattagtcctttgaga

SEQ ID NO: 22264 - DNA, 20 bp, synthetic construct
  misc_feature 1..20: note = chemically synthesized
  source 1..20: mol_type = other DNA
tttaatattccttctgccac

SEQ ID NO: 22265 - DNA, 20 bp, synthetic construct
  misc_feature 1..20: note = chemically synthesized
  source 1..20: mol_type = other DNA
tattccttctgccactagac

SEQ ID NO: 22266 - DNA, 20 bp, synthetic construct
  misc_feature 1..20: note = chemically synthesized
  source 1..20: mol_type = other DNA
attccttctgccactagact

SEQ ID NO: 22267 - DNA, 20 bp, synthetic construct
  misc_feature 1..20: note = chemically synthesized
  source 1..20: mol_type = other DNA
ttccttctgccactagacta

SEQ ID NO: 22268 - DNA, 20 bp, synthetic construct
  misc_feature 1..20: note = chemically synthesized
  source 1..20: mol_type = other DNA
tccttctgccactagactag

SEQ ID NO: 22269 - DNA, 20 bp, synthetic construct
  misc_feature 1..20: note = chemically synthesized
  source 1..20: mol_type = other DNA
gactaggggcttcttgcata

SEQ ID NO: 22270 - DNA, 20 bp, synthetic construct
  misc_feature 1..20: note = chemically synthesized
  source 1..20: mol_type = other DNA
gggcttcttgcatatagaca

SEQ ID NO: 22271 - DNA, 20 bp, synthetic construct
  misc_feature 1..20: note = chemically synthesized
  source 1..20: mol_type = other DNA
gctttgctcaacaccttgca

SEQ ID NO: 22272 - DNA, 20 bp, synthetic construct
  misc_feature 1..20: note = chemically synthesized
  source 1..20: mol_type = other DNA
tgtgactgataaacatttct

SEQ ID NO: 22273 - DNA, 20 bp, synthetic construct
  misc_feature 1..20: note = chemically synthesized
  source 1..20: mol_type = other DNA
tgtgaacacgcatcatgtga

SEQ ID NO: 22274 - DNA, 20 bp, synthetic construct
  misc_feature 1..20: note = chemically synthesized
  source 1..20: mol_type = other DNA
tgtgacagccatgatattta

SEQ ID NO: 22275 - DNA, 20 bp, synthetic construct
  misc_feature 1..20: note = chemically synthesized
  source 1..20: mol_type = other DNA
ccatgatatttaaagctctc

SEQ ID NO: 22276 - DNA, 20 bp, synthetic construct
  misc_feature 1..20: note = chemically synthesized
  source 1..20: mol_type = other DNA
taaagctctctggaattaaa

SEQ ID NO: 22277 - DNA, 20 bp, synthetic construct
  misc_feature 1..20: note = chemically synthesized
  source 1..20: mol_type = other DNA
ctctggaattaaatggtaat

SEQ ID NO: 22278 - DNA, 20 bp, synthetic construct
  misc_feature 1..20: note = chemically synthesized
  source 1..20: mol_type = other DNA
aattaaatggtaataagaca

SEQ ID NO: 22279 - DNA, 20 bp, synthetic construct
  misc_feature 1..20: note = chemically synthesized
  source 1..20: mol_type = other DNA
aatcttataaaccataaatt

SEQ ID NO: 22280 - DNA, 20 bp, synthetic construct
  misc_feature 1..20: note = chemically synthesized
  source 1..20: mol_type = other DNA
aattaagttgaaaaataaat

SEQ ID NO: 22281 - DNA, 20 bp, synthetic construct
  misc_feature 1..20: note = chemically synthesized
  source 1..20: mol_type = other DNA
ttttaaacaaatataaatgc

SEQ ID NO: 22282 - DNA, 20 bp, synthetic construct
  misc_feature 1..20: note = chemically synthesized
  source 1..20: mol_type = other DNA
aatgcaagtttaacataaaa

SEQ ID NO: 22283 - DNA, 20 bp, synthetic construct
  misc_feature 1..20: note = chemically synthesized
  source 1..20: mol_type = other DNA
taaaacagtactacttgatg

SEQ ID NO: 22284 - DNA, 20 bp, synthetic construct
  misc_feature 1..20: note = chemically synthesized
  source 1..20: mol_type = other DNA
actacttgatgtagattaat

SEQ ID NO: 22285 - DNA, 20 bp, synthetic construct
  misc_feature 1..20: note = chemically synthesized
  source 1..20: mol_type = other DNA
cttgatgtagattaattgga

SEQ ID NO: 22286 - DNA, 20 bp, synthetic construct
  misc_feature 1..20: note = chemically synthesized
  source 1..20: mol_type = other DNA
aattggatggtattgtatac

SEQ ID NO: 22287 - DNA, 20 bp, synthetic construct
  misc_feature 1..20: note = chemically synthesized
  source 1..20: mol_type = other DNA
ggatggtattgtatacaaga

SEQ ID NO: 22288 - DNA, 20 bp, synthetic construct
  misc_feature 1..20: note = chemically synthesized
  source 1..20: mol_type = other DNA
gtattgtatacaagatagta

SEQ ID NO: 22289 - DNA, 20 bp, synthetic construct
  misc_feature 1..20: note = chemically synthesized
  source 1..20: mol_type = other DNA
ttgtatacaagatagtatag

SEQ ID NO: 22290 - DNA, 20 bp, synthetic construct
  misc_feature 1..20: note = chemically synthesized
  source 1..20: mol_type = other DNA
acaagatagtatagcagttt

SEQ ID NO: 22291 - DNA, 20 bp, synthetic construct
  misc_feature 1..20: note = chemically synthesized
  source 1..20: mol_type = other DNA
caagatagtatagcagtttg

SEQ ID NO: 22292 - DNA, 20 bp, synthetic construct
  misc_feature 1..20: note = chemically synthesized
  source 1..20: mol_type = other DNA
aagatagtatagcagtttga

SEQ ID NO: 22293 - DNA, 20 bp, synthetic construct
  misc_feature 1..20: note = chemically synthesized
  source 1..20: mol_type = other DNA
agatagtatagcagtttgag

SEQ ID NO: 22294 - DNA, 20 bp, synthetic construct
  misc_feature 1..20: note = chemically synthesized
  source 1..20: mol_type = other DNA
gtatagcagtttgaggggcc

SEQ ID NO: 22295 - DNA, 20 bp, synthetic construct
  misc_feature 1..20: note = chemically synthesized
  source 1..20: mol_type = other DNA
gggcctagaactgcacctat

SEQ ID NO: 22296 - DNA, 20 bp, synthetic construct
  misc_feature 1..20: note = chemically synthesized
  source 1..20: mol_type = other DNA
ggcctagaactgcacctatg

SEQ ID NO: 22297 - DNA, 20 bp, synthetic construct
  misc_feature 1..20: note = chemically synthesized
  source 1..20: mol_type = other DNA
cctagaactgcacctatgag

SEQ ID NO: 22298 - DNA, 20 bp, synthetic construct
  misc_feature 1..20: note = chemically synthesized
  source 1..20: mol_type = other DNA
ctagaactgcacctatgagg

SEQ ID NO: 22299 - DNA, 20 bp, synthetic construct
  misc_feature 1..20: note = chemically synthesized
  source 1..20: mol_type = other DNA
gaggaggtcccatttgaact

SEQ ID NO: 22300 - DNA, 20 bp, synthetic construct
  misc_feature 1..20: note = chemically synthesized
  source 1..20: mol_type = other DNA
gaactgagacctcaatacaa

SEQ ID NO: 22301 - DNA, 20 bp, synthetic construct
  misc_feature 1..20: note = chemically synthesized
  source 1..20: mol_type = other DNA
aaagaaaacctgaccgtata

SEQ ID NO: 22302 - DNA, 20 bp, synthetic construct
  misc_feature 1..20: note = chemically synthesized
  source 1..20: mol_type = other DNA
aacctgaccgtatacagacc

SEQ ID NO: 22303 - DNA, 20 bp, synthetic construct
  misc_feature 1..20: note = chemically synthesized
  source 1..20: mol_type = other DNA
cctgaccgtatacagaccta

SEQ ID NO: 22304 - DNA, 20 bp, synthetic construct
  misc_feature 1..20: note = chemically synthesized
  source 1..20: mol_type = other DNA
ctgaccgtatacagacctag

SEQ ID NO: 22305 - DNA, 20 bp, synthetic construct
  misc_feature 1..20: note = chemically synthesized
  source 1..20: mol_type = other DNA
gacctagaggaaaactgttc

SEQ ID NO: 22306 - DNA, 20 bp, synthetic construct
  misc_feature 1..20: note = chemically synthesized
  source 1..20: mol_type = other DNA
cctagaggaaaactgttcca

SEQ ID NO: 22307 - DNA, 20 bp, synthetic construct
  misc_feature 1..20: note = chemically synthesized
  source 1..20: mol_type = other DNA
ctagaggaaaactgttccag

SEQ ID NO: 22308 - DNA, 20 bp, synthetic construct
  misc_feature 1..20: note = chemically synthesized
  source 1..20: mol_type = other DNA
tagaggaaaactgttccaga

SEQ ID NO: 22309 - DNA, 20 bp, synthetic construct
  misc_feature 1..20: note = chemically synthesized
  source 1..20: mol_type = other DNA
aactgttccagagggaaaat

SEQ ID NO: 22310 - DNA, 20 bp, synthetic construct
  misc_feature 1..20: note = chemically synthesized
  source 1..20: mol_type = other DNA
agagggaaaatcagcatgac

SEQ ID NO: 22311 - DNA, 20 bp, synthetic construct
  misc_feature 1..20: note = chemically synthesized
  source 1..20: mol_type = other DNA
cagcatgactggcatttgat

SEQ ID NO: 22312 - DNA, 20 bp, synthetic construct
  misc_feature 1..20: note = chemically synthesized
  source 1..20: mol_type = other DNA
actggcatttgataagaaaa

SEQ ID NO: 22313 - DNA, 20 bp, synthetic construct
  misc_feature 1..20: note = chemically synthesized
  source 1..20: mol_type = other DNA
ctggcatttgataagaaaac

SEQ ID NO: 22314 - DNA, 20 bp, synthetic construct
  misc_feature 1..20: note = chemically synthesized
  source 1..20: mol_type = other DNA
ggcatttgataagaaaacag

SEQ ID NO: 22315 - DNA, 20 bp, synthetic construct
  misc_feature 1..20: note = chemically synthesized
  source 1..20: mol_type = other DNA
catttgataagaaaacagga

SEQ ID NO: 22316 - DNA, 20 bp, synthetic construct
  misc_feature 1..20: note = chemically synthesized
  source 1..20: mol_type = other DNA
atttgataagaaaacaggag

SEQ ID NO: 22317 - DNA, 20 bp, synthetic construct
  misc_feature 1..20: note = chemically synthesized
  source 1..20: mol_type = other DNA
tttgataagaaaacaggaga

SEQ ID NO: 22318 - DNA, 20 bp, synthetic construct
  misc_feature 1..20: note = chemically synthesized
  source 1..20: mol_type = other DNA
agaaaacaggagagggacaa

SEQ ID NO: 22319 - DNA, 20 bp, synthetic construct
  misc_feature 1..20: note = chemically synthesized
  source 1..20: mol_type = other DNA
agggacaatagatgatgtca

SEQ ID NO: 22320 - DNA, 20 bp, synthetic construct
  misc_feature 1..20: note = chemically synthesized
  source 1..20: mol_type = other DNA
gacaatagatgatgtcaaag

SEQ ID NO: 22321 - DNA, 20 bp, synthetic construct
  misc_feature 1..20: note = chemically synthesized
  source 1..20: mol_type = other DNA
aatagatgatgtcaaagaag

SEQ ID NO: 22322 - DNA, 20 bp, synthetic construct
  misc_feature 1..20: note = chemically synthesized
  source 1..20: mol_type = other DNA
atagatgatgtcaaagaagc

SEQ ID NO: 22323 - DNA, 20 bp, synthetic construct
  misc_feature 1..20: note = chemically synthesized
  source 1..20: mol_type = other DNA
gatgatgtcaaagaagcagg

SEQ ID NO: 22324 - DNA, 20 bp, synthetic construct
  misc_feature 1..20: note = chemically synthesized
  source 1..20: mol_type = other DNA
caaagaagcaggtagtaatc

SEQ ID NO: 22325 - DNA, 20 bp, synthetic construct
  misc_feature 1..20: note = chemically synthesized
  source 1..20: mol_type = other DNA
caggtagtaatcaagtgtca

SEQ ID NO: 22326 - DNA, 20 bp, synthetic construct
  misc_feature 1..20: note = chemically synthesized
  source 1..20: mol_type = other DNA
aggtagtaatcaagtgtcat

SEQ ID NO: 22327 - DNA, 20 bp, synthetic construct
  misc_feature 1..20: note = chemically synthesized
  source 1..20: mol_type = other DNA
ggtagtaatcaagtgtcata

SEQ ID NO: 22328 - DNA, 20 bp, synthetic construct
  misc_feature 1..20: note = chemically synthesized
  source 1..20: mol_type = other DNA
tcaagtgtcatagggcctta

SEQ ID NO: 22329 - DNA, 20 bp, synthetic construct
  misc_feature 1..20: note = chemically synthesized
  source 1..20: mol_type = other DNA
tagggccttacagaccacca

SEQ ID NO: 22330 - DNA, 20 bp, synthetic construct
  misc_feature 1..20: note = chemically synthesized
  source 1..20: mol_type = other DNA
ttttcttcttactataaatg

SEQ ID NO: 22331 - DNA, 20 bp, synthetic construct
  misc_feature 1..20: note = chemically synthesized
  source 1..20: mol_type = other DNA
ttcttactataaatgtagta

SEQ ID NO: 22332 - DNA, 20 bp, synthetic construct
  misc_feature 1..20: note = chemically synthesized
  source 1..20: mol_type = other DNA
tataaatgtagtaaagacat

SEQ ID NO: 22333 - DNA, 20 bp, synthetic construct
  misc_feature 1..20: note = chemically synthesized
  source 1..20: mol_type = other DNA
ataaatgtagtaaagacatt

SEQ ID NO: 22334 - DNA, 20 bp, synthetic construct
  misc_feature 1..20: note = chemically synthesized
  source 1..20: mol_type = other DNA
ggacactttgaaaatcacaa

SEQ ID NO: 22335 - DNA, 20 bp, synthetic construct
  misc_feature 1..20: note = chemically synthesized
  source 1..20: mol_type = other DNA
ttgaaaatcacaatggaaaa

SEQ ID NO: 22336 - DNA, 20 bp, synthetic construct
  misc_feature 1..20: note = chemically synthesized
  source 1..20: mol_type = other DNA
aatcacaatggaaaatagtg

SEQ ID NO: 22337 - DNA, 20 bp, synthetic construct
  misc_feature 1..20: note = chemically synthesized
  source 1..20: mol_type = other DNA
gtatttttaaattactcact

SEQ ID NO: 22338 - DNA, 20 bp, synthetic construct
  misc_feature 1..20: note = chemically synthesized
  source 1..20: mol_type = other DNA
ctcacttagactgctatgtg

SEQ ID NO: 22339 - DNA, 20 bp, synthetic construct
  misc_feature 1..20: note = chemically synthesized
  source 1..20: mol_type = other DNA
acttagactgctatgtgaag

SEQ ID NO: 22340 - DNA, 20 bp, synthetic construct
  misc_feature 1..20: note = chemically synthesized
  source 1..20: mol_type = other DNA
actgctatgtgaagaagact

SEQ ID NO: 22341 - DNA, 20 bp, synthetic construct
  misc_feature 1..20: note = chemically synthesized
  source 1..20: mol_type = other DNA
ctatgtgaagaagactaagc

SEQ ID NO: 22342 - DNA, 20 bp, synthetic construct
  misc_feature 1..20: note = chemically synthesized
  source 1..20: mol_type = other DNA
atgtgaagaagactaagcaa

SEQ ID NO: 22343 - DNA, 20 bp, synthetic construct
  misc_feature 1..20: note = chemically synthesized
  source 1..20: mol_type = other DNA
aagaagactaagcaagagac

SEQ ID NO: 22344 - DNA, 20 bp, synthetic construct
  misc_feature 1..20: note = chemically synthesized
  source 1..20: mol_type = other DNA
gactaagcaagagacaagaa

SEQ ID NO: 22345 - DNA, 20 bp, synthetic construct
  misc_feature 1..20: note = chemically synthesized
  source 1..20: mol_type = other DNA
ctaagcaagagacaagaaaa

SEQ ID NO: 22346 - DNA, 20 bp, synthetic construct
  misc_feature 1..20: note = chemically synthesized
  source 1..20: mol_type = other DNA
caagagacaagaaaagagat

SEQ ID NO: 22347 - DNA, 20 bp, synthetic construct
  misc_feature 1..20: note = chemically synthesized
  source 1..20: mol_type = other DNA
agacaagaaaagagatgagt

SEQ ID NO: 22348 - DNA, 20 bp, synthetic construct
  misc_feature 1..20: note = chemically synthesized
  source 1..20: mol_type = other DNA
aagaaaagagatgagttaga

SEQ ID NO: 22349 - DNA, 20 bp, synthetic construct
  misc_feature 1..20: note = chemically synthesized
  source 1..20: mol_type = other DNA
ctattttaaaaatccatatg

SEQ ID NO: 22350 - DNA, 20 bp, synthetic construct
  misc_feature 1..20: note = chemically synthesized
  source 1..20: mol_type = other DNA
attttaaaaatccatatgaa

SEQ ID NO: 22351 - DNA, 20 bp, synthetic construct
  misc_feature 1..20: note = chemically synthesized
  source 1..20: mol_type = other DNA
aaaatccatatgaagagtca

SEQ ID NO: 22352 - DNA, 20 bp, synthetic construct
  misc_feature 1..20: note = chemically synthesized
  source 1..20: mol_type = other DNA
agagtcatggtgaccttgac

SEQ ID NO: 22353 - DNA, 20 bp, synthetic construct
  misc_feature 1..20: note = chemically synthesized
  source 1..20: mol_type = other DNA
gagtcatggtgaccttgact

SEQ ID NO: 22354 - DNA, 20 bp, synthetic construct
  misc_feature 1..20: note = chemically synthesized
  source 1..20: mol_type = other DNA
gtcatggtgaccttgactag

SEQ ID NO: 22355 - DNA, 20 bp, synthetic construct
  misc_feature 1..20: note = chemically synthesized
  source 1..20: mol_type = other DNA
catggtgaccttgactagga

SEQ ID NO: 22356 - DNA, 20 bp, synthetic construct
  misc_feature 1..20: note = chemically synthesized
  source 1..20: mol_type = other DNA
ggtgaccttgactaggagag

SEQ ID NO: 22357 - DNA, 20 bp, synthetic construct
  misc_feature 1..20: note = chemically synthesized
  source 1..20: mol_type = other DNA
gaccttgactaggagagaag

SEQ ID NO: 22358 - DNA, 20 bp, synthetic construct
  misc_feature 1..20: note = chemically synthesized
  source 1..20: mol_type = other DNA
accttgactaggagagaagc

SEQ ID NO: 22359 - DNA, 20 bp, synthetic construct
  misc_feature 1..20: note = chemically synthesized
  source 1..20: mol_type = other DNA
ccttgactaggagagaagca

SEQ ID NO: 22360 - DNA, 20 bp, synthetic construct
  misc_feature 1..20: note = chemically synthesized
  source 1..20: mol_type = other DNA
cttgactaggagagaagcag

SEQ ID NO: 22361 - DNA, 20 bp, synthetic construct
  misc_feature 1..20: note = chemically synthesized
  source 1..20: mol_type = other DNA
gaagcaggggaaatgaaaaa

SEQ ID NO: 22362 - DNA, 20 bp, synthetic construct
  misc_feature 1..20: note = chemically synthesized
  source 1..20: mol_type = other DNA
agcaggggaaatgaaaaaaa

SEQ ID NO: 22363 - DNA, 20 bp, synthetic construct
  misc_feature 1..20: note = chemically synthesized
  source 1..20: mol_type = other DNA
aaatgaaaaaaagagaaaaa

SEQ ID NO: 22364 - DNA, 20 bp, synthetic construct
  misc_feature 1..20: note = chemically synthesized
  source 1..20: mol_type = other DNA
gaaaaatagaaaaacttaaa

SEQ ID NO: 22365 - DNA, 20 bp, synthetic construct
  misc_feature 1..20: note = chemically synthesized
  source 1..20: mol_type = other DNA
aaaatagaaaaacttaaaca

SEQ ID NO: 22366 - DNA, 20 bp, synthetic construct
  misc_feature 1..20: note = chemically synthesized
  source 1..20: mol_type = other DNA
tagaaaaacttaaacagaga

SEQ ID NO: 22367 - DNA, 20 bp, synthetic construct
  misc_feature 1..20: note = chemically synthesized
  source 1..20: mol_type = other DNA
cagagacagatgcatttttg

SEQ ID NO: 22368 - DNA, 20 bp, synthetic construct
  misc_feature 1..20: note = chemically synthesized
  source 1..20: mol_type = other DNA
agacagatgcatttttgaag

SEQ ID NO: 22369 - DNA, 20 bp, synthetic construct
  misc_feature 1..20: note = chemically synthesized
  source 1..20: mol_type = other DNA
tgcatttttgaagtagtgcc

SEQ ID NO: 22370 - DNA, 20 bp, synthetic construct
  misc_feature 1..20: note = chemically synthesized
  source 1..20: mol_type = other DNA
atttgctgatatattaaaaa

SEQ ID NO: 22371 - DNA, 20 bp, synthetic construct
  misc_feature 1..20: note = chemically synthesized
  source 1..20: mol_type = other DNA
tttgctgatatattaaaaat

SEQ ID NO: 22372 - DNA, 20 bp, synthetic construct
  misc_feature 1..20: note = chemically synthesized
  source 1..20: mol_type = other DNA
tgctgatatattaaaaatgg

SEQ ID NO: 22373 - DNA, 20 bp, synthetic construct
  misc_feature 1..20: note = chemically synthesized
  source 1..20: mol_type = other DNA
gatatattaaaaatgggagt

SEQ ID NO: 22374 - DNA, 20 bp, synthetic construct
  misc_feature 1..20: note = chemically synthesized
  source 1..20: mol_type = other DNA
atatattaaaaatgggagtg

SEQ ID NO: 22375 - DNA, 20 bp, synthetic construct
  misc_feature 1..20: note = chemically synthesized
  source 1..20: mol_type = other DNA
tatattaaaaatgggagtga

SEQ ID NO: 22376 - DNA, 20 bp, synthetic construct
  misc_feature 1..20: note = chemically synthesized
  source 1..20: mol_type = other DNA
gagtgagggaaaaatcaaat

SEQ ID NO: 22377 - DNA, 20 bp, synthetic construct
  misc_feature 1..20: note = chemically synthesized
  source 1..20: mol_type = other DNA
agtgagggaaaaatcaaatg

SEQ ID NO: 22378 - DNA, 20 bp, synthetic construct
  misc_feature 1..20: note = chemically synthesized
  source 1..20: mol_type = other DNA
aaatcaaatgaggtttcccc

SEQ ID NO: 22379 - DNA, 20 bp, synthetic construct
  misc_feature 1..20: note = chemically synthesized
  source 1..20: mol_type = other DNA
atttctgtttgaacaaatga

SEQ ID NO: 22380 - DNA, 20 bp, synthetic construct
  misc_feature 1..20: note = chemically synthesized
  source 1..20: mol_type = other DNA
tgtttgaacaaatgaaagaa

SEQ ID NO: 22381 - DNA, 20 bp, synthetic construct
  misc_feature 1..20: note = chemically synthesized
  source 1..20: mol_type = other DNA
gaacaaatgaaagaatggtg

SEQ ID NO: 22382 - DNA, 20 bp, synthetic construct
  misc_feature 1..20: note = chemically synthesized
  source 1..20: mol_type = other DNA
gtgaagccatttactcaaaa

SEQ ID NO: 22383 - DNA, 20 bp, synthetic construct
  misc_feature 1..20: note = chemically synthesized
  source 1..20: mol_type = other DNA
aagccatttactcaaaatgg

SEQ ID NO: 22384 - DNA, 20 bp, synthetic construct
  misc_feature 1..20: note = chemically synthesized
  source 1..20: mol_type = other DNA
tttactcaaaatggaagtct

SEQ ID NO: 22385 - DNA, 20 bp, synthetic construct
  misc_feature 1..20: note = chemically synthesized
  source 1..20: mol_type = other DNA
ttactcaaaatggaagtctg

SEQ ID NO: 22386 - DNA, 20 bp, synthetic construct
  misc_feature 1..20: note = chemically synthesized
  source 1..20: mol_type = other DNA
tactcaaaatggaagtctga

SEQ ID NO: 22387 - DNA, 20 bp, synthetic construct
  misc_feature 1..20: note = chemically synthesized
  source 1..20: mol_type = other DNA
actcaaaatggaagtctgag

SEQ ID NO: 22388 - DNA, 20 bp, synthetic construct
  misc_feature 1..20: note = chemically synthesized
  source 1..20: mol_type = other DNA
ctcaaaatggaagtctgagg

SEQ ID NO: 22389 - DNA, 20 bp, synthetic construct
  misc_feature 1..20: note = chemically synthesized
  source 1..20: mol_type = other DNA
ggggatacatattcacttgt

SEQ ID NO: 22390 - DNA, 20 bp, synthetic construct
  misc_feature 1..20: note = chemically synthesized
  source 1..20: mol_type = other DNA
gggatacatattcacttgtg

SEQ ID NO: 22391 - DNA, 20 bp, synthetic construct
  misc_feature 1..20: note = chemically synthesized
  source 1..20: mol_type = other DNA
tattcacttgtgaggaaatc

SEQ ID NO: 22392 - DNA, 20 bp, synthetic construct
  misc_feature 1..20: note = chemically synthesized
  source 1..20: mol_type = other DNA
ttcacttgtgaggaaatcaa

SEQ ID NO: 22393 - DNA, 20 bp, synthetic construct
  misc_feature 1..20: note = chemically synthesized
  source 1..20: mol_type = other DNA
gtgaggaaatcaagagtcat

SEQ ID NO: 22394 - DNA, 20 bp, synthetic construct
  misc_feature 1..20: note = chemically synthesized
  source 1..20: mol_type = other DNA
tcaagagtcattagtaaata

SEQ ID NO: 22395 - DNA, 20 bp, synthetic construct
  misc_feature 1..20: note = chemically synthesized
  source 1..20: mol_type = other DNA
attagtaaatatagctgaat

SEQ ID NO: 22396 - DNA, 20 bp, synthetic construct
  misc_feature 1..20: note = chemically synthesized
  source 1..20: mol_type = other DNA
tagtaaatatagctgaatta

SEQ ID NO: 22397 - DNA, 20 bp, synthetic construct
  misc_feature 1..20: note = chemically synthesized
  source 1..20: mol_type = other DNA
ttttttttcttgtcacatgc

SEQ ID NO: 22398 - DNA, 20 bp, synthetic construct
  misc_feature 1..20: note = chemically synthesized
  source 1..20: mol_type = other DNA
catgccagaacaacttcttg

SEQ ID NO: 22399 - DNA, 20 bp, synthetic construct
  misc_feature 1..20: note = chemically synthesized
  source 1..20: mol_type = other DNA
cttgaagttgtttttatcct

SEQ ID NO: 22400 - DNA, 20 bp, synthetic construct
  misc_feature 1..20: note = chemically synthesized
  source 1..20: mol_type = other DNA
tgtttttatcctaagttaaa

SEQ ID NO: 22401 - DNA, 20 bp, synthetic construct
  misc_feature 1..20: note = chemically synthesized
  source 1..20: mol_type = other DNA
tttatcctaagttaaaaaga

SEQ ID NO: 22402 - DNA, 20 bp, synthetic construct
  misc_feature 1..20: note = chemically synthesized
  source 1..20: mol_type = other DNA
cgtatccaaatatacccctt

SEQ ID NO: 22403 - DNA, 20 bp, synthetic construct
  misc_feature 1..20: note = chemically synthesized
  source 1..20: mol_type = other DNA
tatccaaatataccccttca

SEQ ID NO: 22404 - DNA, 20 bp, synthetic construct
  misc_feature 1..20: note = chemically synthesized
  source 1..20: mol_type = other DNA
ccccttcagagttactttgt

SEQ ID NO: 22405 - DNA, 20 bp, synthetic construct
  misc_feature 1..20: note = chemically synthesized
  source 1..20: mol_type = other DNA
cagagttactttgtcagtgt

SEQ ID NO: 22406 - DNA, 20 bp, synthetic construct
  misc_feature 1..20: note = chemically synthesized
  source 1..20: mol_type = other DNA
agagttactttgtcagtgta

SEQ ID NO: 22407 - DNA, 20 bp, synthetic construct
  misc_feature 1..20: note = chemically synthesized
  source 1..20: mol_type = other DNA
cagtgtaaggcactacccta

SEQ ID NO: 22408 - DNA, 20 bp, synthetic construct
  misc_feature 1..20: note = chemically synthesized
  source 1..20: mol_type = other DNA
ctaccctaaagatgccacca

SEQ ID NO: 22409 - DNA, 20 bp, synthetic construct
  misc_feature 1..20: note = chemically synthesized
  source 1..20: mol_type = other DNA
taccctaaagatgccaccaa

SEQ ID NO: 22410 - DNA, 20 bp, synthetic construct
  misc_feature 1..20: note = chemically synthesized
  source 1..20: mol_type = other DNA
atcctcttaccttccaccca

SEQ ID NO: 22411 - DNA, 20 bp, synthetic construct
  misc_feature 1..20: note = chemically synthesized
  source 1..20: mol_type = other DNA
cctcttaccttccacccata

SEQ ID NO: 22412 - DNA, 20 bp, synthetic construct
  misc_feature 1..20: note = chemically synthesized
  source 1..20: mol_type = other DNA
taccttccacccatagagat

SEQ ID NO: 22413 - DNA, 20 bp, synthetic construct
  misc_feature 1..20: note = chemically synthesized
  source 1..20: mol_type = other DNA
gagatgagatctaactgtaa

SEQ ID NO: 22414 - DNA, 20 bp, synthetic construct
  misc_feature 1..20: note = chemically synthesized
  source 1..20: mol_type = other DNA
agatctaactgtaatagttt

SEQ ID NO: 22415 - DNA, 20 bp, synthetic construct
  misc_feature 1..20: note = chemically synthesized
  source 1..20: mol_type = other DNA
taactgtaatagtttcagtg

SEQ ID NO: 22416 - DNA, 20 bp, synthetic construct
  misc_feature 1..20: note = chemically synthesized
  source 1..20: mol_type = other DNA
actgtaatagtttcagtgaa

SEQ ID NO: 22417 - DNA, 20 bp, synthetic construct
  misc_feature 1..20: note = chemically synthesized
  source 1..20: mol_type = other DNA
tagtttcagtgaagagatgc

SEQ ID NO: 22418 - DNA, 20 bp, synthetic construct
  misc_feature 1..20: note = chemically synthesized
  source 1..20: mol_type = other DNA
gtgaagagatgccagacaac

SEQ ID NO: 22419 - DNA, 20 bp, synthetic construct
  misc_feature 1..20: note = chemically synthesized
  source 1..20: mol_type = other DNA
tgaagagatgccagacaact

SEQ ID NO: 22420 - DNA, 20 bp, synthetic construct
  misc_feature 1..20: note = chemically synthesized
  source 1..20: mol_type = other DNA
gatgccagacaactgggcgt

SEQ ID NO: 22421 - DNA, 20 bp, synthetic construct
  misc_feature 1..20: note = chemically synthesized
  source 1..20: mol_type = other DNA
atgccagacaactgggcgtg

SEQ ID NO: 22422 - DNA, 20 bp, synthetic construct
  misc_feature 1..20: note = chemically synthesized
  source 1..20: mol_type = other DNA
ctgggcgtgaggcaacaact

SEQ ID NO: 22423 - DNA, 20 bp, synthetic construct
  misc_feature 1..20: note = chemically synthesized
  source 1..20: mol_type = other DNA
gcaacaactcagcactttga

SEQ ID NO: 22424 - DNA, 20 bp, synthetic construct
  misc_feature 1..20: note = chemically synthesized
  source 1..20: mol_type = other DNA
actttgaaagaatcattttt

SEQ ID NO: 22425 - DNA, 20 bp, synthetic construct
  misc_feature 1..20: note = chemically synthesized
  source 1..20: mol_type = other DNA
tcagcatccatattctgtcc

SEQ ID NO: 22426 - DNA, 20 bp, synthetic construct
  misc_feature 1..20: note = chemically synthesized
  source 1..20: mol_type = other DNA
cagcatccatattctgtcct

SEQ ID NO: 22427 - DNA, 20 bp, synthetic construct
  misc_feature 1..20: note = chemically synthesized
  source 1..20: mol_type = other DNA
ccatattctgtcctaggact

SEQ ID NO: 22428 - DNA, 20 bp, synthetic construct
  misc_feature 1..20: note = chemically synthesized
  source 1..20: mol_type = other DNA
atattctgtcctaggactga

SEQ ID NO: 22429 - DNA, 20 bp, synthetic construct
  misc_feature 1..20: note = chemically synthesized
  source 1..20: mol_type = other DNA
taggactgagagacataaac

SEQ ID NO: 22430 - DNA, 20 bp, synthetic construct
  misc_feature 1..20: note = chemically synthesized
  source 1..20: mol_type = other DNA
gagagacataaaccagaatt

SEQ ID NO: 22431 - DNA, 20 bp, synthetic construct
  misc_feature 1..20: note = chemically synthesized
  source 1..20: mol_type = other DNA
gtgcctactgaacatacaat

SEQ ID NO: 22432 - DNA, 20 bp, synthetic construct
  misc_feature 1..20: note = chemically synthesized
  source 1..20: mol_type = other DNA
aatgagtgatgtatattctt

SEQ ID NO: 22433 - DNA, 20 bp, synthetic construct
  misc_feature 1..20: note = chemically synthesized
  source 1..20: mol_type = other DNA
gatgtatattcttcagttac

SEQ ID NO: 22434 - DNA, 20 bp, synthetic construct
  misc_feature 1..20: note = chemically synthesized
  source 1..20: mol_type = other DNA
ttcttcagttactagacgca

SEQ ID NO: 22435 - DNA, 20 bp, synthetic construct
  misc_feature 1..20: note = chemically synthesized
  source 1..20: mol_type = other DNA
tactagacgcaaagataatc

SEQ ID NO: 22436 - DNA, 20 bp, synthetic construct
  misc_feature 1..20: note = chemically synthesized
  source 1..20: mol_type = other DNA
gacgcaaagataatccagct

SEQ ID NO: 22437 - DNA, 20 bp, synthetic construct
  misc_feature 1..20: note = chemically synthesized
  source 1..20: mol_type = other DNA
ctcttacttctctgacgttt

SEQ ID NO: 22438 - DNA, 20 bp, synthetic construct
  misc_feature 1..20: note = chemically synthesized
  source 1..20: mol_type = other DNA
tgtgaaaaattccttcttat

SEQ ID NO: 22439 - DNA, 20 bp, synthetic construct
  misc_feature 1..20: note = chemically synthesized
  source 1..20: mol_type = other DNA
tgaaaaattccttcttatca

SEQ ID NO: 22440 - DNA, 20 bp, synthetic construct
  misc_feature 1..20: note = chemically synthesized
  source 1..20: mol_type = other DNA
ccttcttatcagagaatatg

SEQ ID NO: 22441 - DNA, 20 bp, synthetic construct
  misc_feature 1..20: note = chemically synthesized
  source 1..20: mol_type = other DNA
tatcagagaatatgcagcac

SEQ ID NO: 22442 - DNA, 20 bp, synthetic construct
  misc_feature 1..20: note = chemically synthesized
  source 1..20: mol_type = other DNA
gcacaagtgatgaatcacta

SEQ ID NO: 22443 - DNA, 20 bp, synthetic construct
  misc_feature 1..20: note = chemically synthesized
  source 1..20: mol_type = other DNA
cacaagtgatgaatcactac

SEQ ID NO: 22444 - DNA, 20 bp, synthetic construct
  misc_feature 1..20: note = chemically synthesized
  source 1..20: mol_type = other DNA
acaagtgatgaatcactaca

SEQ ID NO: 22445 - DNA, 20 bp, synthetic construct
  misc_feature 1..20: note = chemically synthesized
  source 1..20: mol_type = other DNA
gtgatgaatcactacaggga

SEQ ID NO: 22446 - DNA, 20 bp, synthetic construct
  misc_feature 1..20: note = chemically synthesized
  source 1..20: mol_type = other DNA
gggaaagctaaccaaactgt

SEQ ID NO: 22447 - DNA, 20 bp, synthetic construct
  misc_feature 1..20: note = chemically synthesized
  source 1..20: mol_type = other DNA
ggaaagctaaccaaactgta

SEQ ID NO: 22448 - DNA, 20 bp, synthetic construct
  misc_feature 1..20: note = chemically synthesized
  source 1..20: mol_type = other DNA
caataataacctgcaactta

SEQ ID NO: 22449 - DNA, 20 bp, synthetic construct
  misc_feature 1..20: note = chemically synthesized
  source 1..20: mol_type = other DNA
tttcctccttctccattccc

SEQ ID NO: 22450 - DNA, 20 bp, synthetic construct
  misc_feature 1..20: note = chemically synthesized
  source 1..20: mol_type = other DNA
ccattcccaagaattccatg

SEQ ID NO: 22451 - DNA, 20 bp, synthetic construct
  misc_feature 1..20: note = chemically synthesized
  source 1..20: mol_type = other DNA
gaattccatgcagacatacc

SEQ ID NO: 22452 - DNA, 20 bp, synthetic construct
  misc_feature 1..20: note = chemically synthesized
  source 1..20: mol_type = other DNA
tgcagacatacctggtaatg

SEQ ID NO: 22453 - DNA, 20 bp, synthetic construct
  misc_feature 1..20: note = chemically synthesized
  source 1..20: mol_type = other DNA
acctggtaatgcagctataa

SEQ ID NO: 22454 - DNA, 20 bp, synthetic construct
  misc_feature 1..20: note = chemically synthesized
  source 1..20: mol_type = other DNA
gcagctataatagtgatcta

SEQ ID NO: 22455 - DNA, 20 bp, synthetic construct
  misc_feature 1..20: note = chemically synthesized
  source 1..20: mol_type = other DNA
tgtgaaaattcttgtgtcct

SEQ ID NO: 22456 - DNA, 20 bp, synthetic construct
  misc_feature 1..20: note = chemically synthesized
  source 1..20: mol_type = other DNA
aaaattcttgtgtcctcagc

SEQ ID NO: 22457 - DNA, 20 bp, synthetic construct
  misc_feature 1..20: note = chemically synthesized
  source 1..20: mol_type = other DNA
cttgtgtcctcagctagtcg

SEQ ID NO: 22458 - DNA, 20 bp, synthetic construct
  misc_feature 1..20: note = chemically synthesized
  source 1..20: mol_type = other DNA
cctcagctagtcgtggctct

SEQ ID NO: 22459 - DNA, 20 bp, synthetic construct
  misc_feature 1..20: note = chemically synthesized
  source 1..20: mol_type = other DNA
agtcgtggctcttggtttct

SEQ ID NO: 22460 - DNA, 20 bp, synthetic construct
  misc_feature 1..20: note = chemically synthesized
  source 1..20: mol_type = other DNA
cgtggctcttggtttctgag

SEQ ID NO: 22461 - DNA, 20 bp, synthetic construct
  misc_feature 1..20: note = chemically synthesized
  source 1..20: mol_type = other DNA
gctcttggtttctgagaaga

SEQ ID NO: 22462 - DNA, 20 bp, synthetic construct
  misc_feature 1..20: note = chemically synthesized
  source 1..20: mol_type = other DNA
tttctgagaagaaagacaat

SEQ ID NO: 22463 - DNA, 20 bp, synthetic construct
  misc_feature 1..20: note = chemically synthesized
  source 1..20: mol_type = other DNA
tctgagaagaaagacaatga

SEQ ID NO: 22464 - DNA, 20 bp, synthetic construct
  misc_feature 1..20: note = chemically synthesized
  source 1..20: mol_type = other DNA
gagaagaaagacaatgagag

SEQ ID NO: 22465 - DNA, 20 bp, synthetic construct
  misc_feature 1..20: note = chemically synthesized
  source 1..20: mol_type = other DNA
gaagaaagacaatgagagaa

SEQ ID NO: 22466 - DNA, 20 bp, synthetic construct
  misc_feature 1..20: note = chemically synthesized
  source 1..20: mol_type = other DNA
gacaatgagagaagagataa

SEQ ID NO: 22467 - DNA, 20 bp, synthetic construct
  misc_feature 1..20: note = chemically synthesized
  source 1..20: mol_type = other DNA
tgagagaagagataaaagct

SEQ ID NO: 22468 - DNA, 20 bp, synthetic construct
  misc_feature 1..20: note = chemically synthesized
  source 1..20: mol_type = other DNA
gagagaagagataaaagctg

SEQ ID NO: 22469 - DNA, 20 bp, synthetic construct
  misc_feature 1..20: note = chemically synthesized
  source 1..20: mol_type = other DNA
aaagctgaggaaaaaaaata

SEQ ID NO: 22470 - DNA, 20 bp, synthetic construct
  misc_feature 1..20: note = chemically synthesized
  source 1..20: mol_type = other DNA
aagctgaggaaaaaaaatat

SEQ ID NO: 22471 - DNA, 20 bp, synthetic construct
  misc_feature 1..20: note = chemically synthesized
  source 1..20: mol_type = other DNA
agctgaggaaaaaaaatata

SEQ ID NO: 22472 - DNA, 20 bp, synthetic construct
  misc_feature 1..20: note = chemically synthesized
  source 1..20: mol_type = other DNA
tgaggaaaaaaaatataggg

SEQ ID NO: 22473 - DNA, 20 bp, synthetic construct
  misc_feature 1..20: note = chemically synthesized
  source 1..20: mol_type = other DNA
gaggaaaaaaaatataggga

SEQ ID NO: 22474 - DNA, 20 bp, synthetic construct
  misc_feature 1..20: note = chemically synthesized
  source 1..20: mol_type = other DNA
aaaaaaaatatagggaagga

SEQ ID NO: 22475 - DNA, 20 bp, synthetic construct
  misc_feature 1..20: note = chemically synthesized
  source 1..20: mol_type = other DNA
aaaaaatatagggaaggaaa

SEQ ID NO: 22476 - DNA, 20 bp, synthetic construct
  misc_feature 1..20: note = chemically synthesized
  source 1..20: mol_type = other DNA
agggaaggaaagagatcata

SEQ ID NO: 22477 - DNA, 20 bp, synthetic construct
  misc_feature 1..20: note = chemically synthesized
  source 1..20: mol_type = other DNA
ggaaagagatcataaagact

SEQ ID NO: 22478 - DNA, 20 bp, synthetic construct
  misc_feature 1..20: note = chemically synthesized
  source 1..20: mol_type = other DNA
gaaagagatcataaagactg

SEQ ID NO: 22479 - DNA, 20 bp, synthetic construct
  misc_feature 1..20: note = chemically synthesized
  source 1..20: mol_type = other DNA
gagatcataaagactgagga

SEQ ID NO: 22480 - DNA, 20 bp, synthetic construct
  misc_feature 1..20: note = chemically synthesized
  source 1..20: mol_type = other DNA
atcataaagactgaggatag

SEQ ID NO: 22481 - DNA, 20 bp, synthetic construct
  misc_feature 1..20: note = chemically synthesized
  source 1..20: mol_type = other DNA
taaagactgaggatagaagc

SEQ ID NO: 22482 - DNA, 20 bp, synthetic construct
  misc_feature 1..20: note = chemically synthesized
  source 1..20: mol_type = other DNA
agactgaggatagaagcaag

SEQ ID NO: 22483 - DNA, 20 bp, synthetic construct
  misc_feature 1..20: note = chemically synthesized
  source 1..20: mol_type = other DNA
gaagcaagaagattctataa

SEQ ID NO: 22484 - DNA, 20 bp, synthetic construct
  misc_feature 1..20: note = chemically synthesized
  source 1..20: mol_type = other DNA
agattctataatggaacacc

SEQ ID NO: 22485 - DNA, 20 bp, synthetic construct
  misc_feature 1..20: note = chemically synthesized
  source 1..20: mol_type = other DNA
taatggaacacctagaaaat

SEQ ID NO: 22486 - DNA, 20 bp, synthetic construct
  misc_feature 1..20: note = chemically synthesized
  source 1..20: mol_type = other DNA
agataaacttctaacattta

SEQ ID NO: 22487 - DNA, 20 bp, synthetic construct
  misc_feature 1..20: note = chemically synthesized
  source 1..20: mol_type = other DNA
ttttctctgctttgtttaaa

SEQ ID NO: 22488 - DNA, 20 bp, synthetic construct
  misc_feature 1..20: note = chemically synthesized
  source 1..20: mol_type = other DNA
tttgtttaaaaagtaaaatg

SEQ ID NO: 22489 - DNA, 20 bp, synthetic construct
  misc_feature 1..20: note = chemically synthesized
  source 1..20: mol_type = other DNA
gtttaaaaagtaaaatgtag

SEQ ID NO: 22490 - DNA, 20 bp, synthetic construct
  misc_feature 1..20: note = chemically synthesized
  source 1..20: mol_type = other DNA
aaagtaaaatgtagtagaat

SEQ ID NO: 22491 - DNA, 20 bp, synthetic construct
  misc_feature 1..20: note = chemically synthesized
  source 1..20: mol_type = other DNA
agtaaaatgtagtagaataa

SEQ ID NO: 22492 - DNA, 20 bp, synthetic construct
  misc_feature 1..20: note = chemically synthesized
  source 1..20: mol_type = other DNA
gtaaaatgtagtagaataag

SEQ ID NO: 22493 - DNA, 20 bp, synthetic construct
  misc_feature 1..20: note = chemically synthesized
  source 1..20: mol_type = other DNA
gtgccttcctgttcatcttt

SEQ ID NO: 22494 - DNA, 20 bp, synthetic construct
  misc_feature 1..20: note = chemically synthesized
  source 1..20: mol_type = other DNA
cttcctgttcatcttttaga

SEQ ID NO: 22495 - DNA, 20 bp, synthetic construct
  misc_feature 1..20: note = chemically synthesized
  source 1..20: mol_type = other DNA
ttcctgttcatcttttagaa

SEQ ID NO: 22496 - DNA, 20 bp, synthetic construct
  misc_feature 1..20: note = chemically synthesized
  source 1..20: mol_type = other DNA
tgttcatcttttagaaagga

SEQ ID NO: 22497 - DNA, 20 bp, synthetic construct
  misc_feature 1..20: note = chemically synthesized
  source 1..20: mol_type = other DNA
tcatcttttagaaaggaaag

SEQ ID NO: 22498 - DNA, 20 bp, synthetic construct
  misc_feature 1..20: note = chemically synthesized
  source 1..20: mol_type = other DNA
agaaaggaaagaagacatat

SEQ ID NO: 22499 - DNA, 20 bp, synthetic construct
  misc_feature 1..20: note = chemically synthesized
  source 1..20: mol_type = other DNA
aaaggaaagaagacatatga

SEQ ID NO: 22500 - DNA, 20 bp, synthetic construct
  misc_feature 1..20: note = chemically synthesized
  source 1..20: mol_type = other DNA
aaggaaagaagacatatgag

SEQ ID NO: 22501 - DNA, 20 bp, synthetic construct
  misc_feature 1..20: note = chemically synthesized
  source 1..20: mol_type = other DNA
aggaaagaagacatatgaga

SEQ ID NO: 22502 - DNA, 20 bp, synthetic construct
  misc_feature 1..20: note = chemically synthesized
  source 1..20: mol_type = other DNA
tcaatcatattcacatcact

SEQ ID NO: 22503 - DNA, 20 bp, synthetic construct
  misc_feature 1..20: note = chemically synthesized
  source 1..20: mol_type = other DNA
catattcacatcactgagta

SEQ ID NO: 22504 - DNA, 20 bp, synthetic construct
  misc_feature 1..20: note = chemically synthesized
  source 1..20: mol_type = other DNA
attcacatcactgagtacag

SEQ ID NO: 22505 - DNA, 20 bp, synthetic construct
  misc_feature 1..20: note = chemically synthesized
  source 1..20: mol_type = other DNA
ttcacatcactgagtacaga

SEQ ID NO: 22506 - DNA, 20 bp, synthetic construct
  misc_feature 1..20: note = chemically synthesized
  source 1..20: mol_type = other DNA
tcactgagtacagaaggtct

SEQ ID NO: 22507 - DNA, 20 bp, synthetic construct
  misc_feature 1..20: note = chemically synthesized
  source 1..20: mol_type = other DNA
cactgagtacagaaggtctt

SEQ ID NO: 22508 - DNA, 20 bp, synthetic construct
  misc_feature 1..20: note = chemically synthesized
  source 1..20: mol_type = other DNA
tgagtacagaaggtcttagg

SEQ ID NO: 22509 - DNA, 20 bp, synthetic construct
  misc_feature 1..20: note = chemically synthesized
  source 1..20: mol_type = other DNA
tacagaaggtcttaggtagt

SEQ ID NO: 22510 - DNA, 20 bp, synthetic construct
  misc_feature 1..20: note = chemically synthesized
  source 1..20: mol_type = other DNA
gaaggtcttaggtagttggt

SEQ ID NO: 22511 - DNA, 20 bp, synthetic construct
  misc_feature 1..20: note = chemically synthesized
  source 1..20: mol_type = other DNA
ggtcttaggtagttggttgg

SEQ ID NO: 22512 - DNA, 20 bp, synthetic construct
  misc_feature 1..20: note = chemically synthesized
  source 1..20: mol_type = other DNA
ggtagttggttggtagcact

SEQ ID NO: 22513 - DNA, 20 bp, synthetic construct
  misc_feature 1..20: note = chemically synthesized
  source 1..20: mol_type = other DNA
agcacttggaattgcttttg

SEQ ID NO: 22514 - DNA, 20 bp, synthetic construct
  misc_feature 1..20: note = chemically synthesized
  source 1..20: mol_type = other DNA
ttttgaagttctatcaactt

SEQ ID NO: 22515 - DNA, 20 bp, synthetic construct
  misc_feature 1..20: note = chemically synthesized
  source 1..20: mol_type = other DNA
gaaatctgtgcacacatcca

SEQ ID NO: 22516 - DNA, 20 bp, synthetic construct
  misc_feature 1..20: note = chemically synthesized
  source 1..20: mol_type = other DNA
tgtgcacacatccaaagctg

SEQ ID NO: 22517 - DNA, 20 bp, synthetic construct
  misc_feature 1..20: note = chemically synthesized
  source 1..20: mol_type = other DNA
atccaaagctgtggactatt

SEQ ID NO: 22518 - DNA, 20 bp, synthetic construct
  misc_feature 1..20: note = chemically synthesized
  source 1..20: mol_type = other DNA
ttcttctccgtatctttctc

SEQ ID NO: 22519 - DNA, 20 bp, synthetic construct
  misc_feature 1..20: note = chemically synthesized
  source 1..20: mol_type = other DNA
cttctccgtatctttctctg

SEQ ID NO: 22520 - DNA, 20 bp, synthetic construct
  misc_feature 1..20: note = chemically synthesized
  source 1..20: mol_type = other DNA
tctccgtatctttctctgga

SEQ ID NO: 22521 - DNA, 20 bp, synthetic construct
  misc_feature 1..20: note = chemically synthesized
  source 1..20: mol_type = other DNA
atctttctctggagagctta

SEQ ID NO: 22522 - DNA, 20 bp, synthetic construct
  misc_feature 1..20: note = chemically synthesized
  source 1..20: mol_type = other DNA
ctttctctggagagcttata

SEQ ID NO: 22523 - DNA, 20 bp, synthetic construct
  misc_feature 1..20: note = chemically synthesized
  source 1..20: mol_type = other DNA
tttctctggagagcttatag

SEQ ID NO: 22524 - DNA, 20 bp, synthetic construct
  misc_feature 1..20: note = chemically synthesized
  source 1..20: mol_type = other DNA
tctctggagagcttatagag

SEQ ID NO: 22525 - DNA, 20 bp, synthetic construct
  misc_feature 1..20: note = chemically synthesized
  source 1..20: mol_type = other DNA
gagcttatagaggagtctcc

SEQ ID NO: 22526 - DNA, 20 bp, synthetic construct
  misc_feature 1..20: note = chemically synthesized
  source 1..20: mol_type = other DNA
tagtacactctttatatatc

SEQ ID NO: 22527 - DNA, 20 bp, synthetic construct
  misc_feature 1..20: note = chemically synthesized
  source 1..20: mol_type = other DNA
agtacactctttatatatct

SEQ ID NO: 22528 - DNA, 20 bp, synthetic construct
  misc_feature 1..20: note = chemically synthesized
  source 1..20: mol_type = other DNA
tacactctttatatatctag

SEQ ID NO: 22529 - DNA, 20 bp, synthetic construct
  misc_feature 1..20: note = chemically synthesized
  source 1..20: mol_type = other DNA
ggagtatttcaccatactcc

SEQ ID NO: 22530 - DNA, 20 bp, synthetic construct
  misc_feature 1..20: note = chemically synthesized
  source 1..20: mol_type = other DNA
gagtatttcaccatactccc

SEQ ID NO: 22531 - DNA, 20 bp, synthetic construct
  misc_feature 1..20: note = chemically synthesized
  source 1..20: mol_type = other DNA
aggtaccataacttgtttga

SEQ ID NO: 22532 - DNA, 20 bp, synthetic construct
  misc_feature 1..20: note = chemically synthesized
  source 1..20: mol_type = other DNA
accataacttgtttgatggt

SEQ ID NO: 22533 - DNA, 20 bp, synthetic construct
  misc_feature 1..20: note = chemically synthesized
  source 1..20: mol_type = other DNA
ccataacttgtttgatggtg

SEQ ID NO: 22534 - DNA, 20 bp, synthetic construct
  misc_feature 1..20: note = chemically synthesized
  source 1..20: mol_type = other DNA
taacttgtttgatggtgagg

SEQ ID NO: 22535 - DNA, 20 bp, synthetic construct
  misc_feature 1..20: note = chemically synthesized
  source 1..20: mol_type = other DNA
acttgtttgatggtgaggaa

SEQ ID NO: 22536 - DNA, 20 bp, synthetic construct
  misc_feature 1..20: note = chemically synthesized
  source 1..20: mol_type = other DNA
tgtttgatggtgaggaagag

SEQ ID NO: 22537 - DNA, 20 bp, synthetic construct
  misc_feature 1..20: note = chemically synthesized
  source 1..20: mol_type = other DNA
gtttgatggtgaggaagagc

SEQ ID NO: 22538 - DNA, 20 bp, synthetic construct
  misc_feature 1..20: note = chemically synthesized
  source 1..20: mol_type = other DNA
tttgatggtgaggaagagca

SEQ ID NO: 22539 - DNA, 20 bp, synthetic construct
  misc_feature 1..20: note = chemically synthesized
  source 1..20: mol_type = other DNA
gggttcttgtgtcttaccta

SEQ ID NO: 22540 - DNA, 20 bp, synthetic construct
  misc_feature 1..20: note = chemically synthesized
  source 1..20: mol_type = other DNA
ttgtgtcttacctaaagact

SEQ ID NO: 22541 - DNA, 20 bp, synthetic construct
  misc_feature 1..20: note = chemically synthesized
  source 1..20: mol_type = other DNA
gttccttctcaacatctgtg

SEQ ID NO: 22542 - DNA, 20 bp, synthetic construct
  misc_feature 1..20: note = chemically synthesized
  source 1..20: mol_type = other DNA
tccttctcaacatctgtgaa

SEQ ID NO: 22543 - DNA, 20 bp, synthetic construct
  misc_feature 1..20: note = chemically synthesized
  source 1..20: mol_type = other DNA
ttctcaacatctgtgaagag

SEQ ID NO: 22544 - DNA, 20 bp, synthetic construct
  misc_feature 1..20: note = chemically synthesized
  source 1..20: mol_type = other DNA
tcaacatctgtgaagagaag

SEQ ID NO: 22545 - DNA, 20 bp, synthetic construct
  misc_feature 1..20: note = chemically synthesized
  source 1..20: mol_type = other DNA
gtgaagagaagcagtcactg

SEQ ID NO: 22546 - DNA, 20 bp, synthetic construct
  misc_feature 1..20: note = chemically synthesized
  source 1..20: mol_type = other DNA
agtcactgtggttattaata

SEQ ID NO: 22547 - DNA, 20 bp, synthetic construct
  misc_feature 1..20: note = chemically synthesized
  source 1..20: mol_type = other DNA
actgtggttattaataaaga

SEQ ID NO: 22548 - DNA, 20 bp, synthetic construct
  misc_feature 1..20: note = chemically synthesized
  source 1..20: mol_type = other DNA
taataaagatagcaccttcc

SEQ ID NO: 22549 - DNA, 20 bp, synthetic construct
  misc_feature 1..20: note = chemically synthesized
  source 1..20: mol_type = other DNA
tcccagatgtctccctttta

SEQ ID NO: 22550 - DNA, 20 bp, synthetic construct
  misc_feature 1..20: note = chemically synthesized
  source 1..20: mol_type = other DNA
tctcccttttatagccaact

SEQ ID NO: 22551 - DNA, 20 bp, synthetic construct
  misc_feature 1..20: note = chemically synthesized
  source 1..20: mol_type = other DNA
ttatagccaacttggatctt

SEQ ID NO: 22552 - DNA, 20 bp, synthetic construct
  misc_feature 1..20: note = chemically synthesized
  source 1..20: mol_type = other DNA
actctgtattaactcctcct

SEQ ID NO: 22553 - DNA, 20 bp, synthetic construct
  misc_feature 1..20: note = chemically synthesized
  source 1..20: mol_type = other DNA
tctgtattaactcctcctta

SEQ ID NO: 22554 - DNA, 20 bp, synthetic construct
  misc_feature 1..20: note = chemically synthesized
  source 1..20: mol_type = other DNA
ctgtattaactcctccttag

SEQ ID NO: 22555 - DNA, 20 bp, synthetic construct
  misc_feature 1..20: note = chemically synthesized
  source 1..20: mol_type = other DNA
tgtattaactcctccttaga

SEQ ID NO: 22556 - DNA, 20 bp, synthetic construct
  misc_feature 1..20: note = chemically synthesized
  source 1..20: mol_type = other DNA
tattaactcctccttagagg

SEQ ID NO: 22557 - DNA, 20 bp, synthetic construct
  misc_feature 1..20: note = chemically synthesized
  source 1..20: mol_type = other DNA
aactcctccttagagggagc

SEQ ID NO: 22558 - DNA, 20 bp, synthetic construct
  misc_feature 1..20: note = chemically synthesized
  source 1..20: mol_type = other DNA
agggagctggaacacttaat

SEQ ID NO: 22559 - DNA, 20 bp, synthetic construct
  misc_feature 1..20: note = chemically synthesized
  source 1..20: mol_type = other DNA
aacacttaattagtcccccc

SEQ ID NO: 22560 - DNA, 20 bp, synthetic construct
  misc_feature 1..20: note = chemically synthesized
  source 1..20: mol_type = other DNA
taatctttcttttttcaaat

SEQ ID NO: 22561 - DNA, 20 bp, synthetic construct
  misc_feature 1..20: note = chemically synthesized
  source 1..20: mol_type = other DNA
tcttttttcaaataagttac

SEQ ID NO: 22562 - DNA, 20 bp, synthetic construct
  misc_feature 1..20: note = chemically synthesized
  source 1..20: mol_type = other DNA
aataagttactggctgaatc

SEQ ID NO: 22563 - DNA, 20 bp, synthetic construct
  misc_feature 1..20: note = chemically synthesized
  source 1..20: mol_type = other DNA
tactggctgaatcaagccac

SEQ ID NO: 22564 - DNA, 20 bp, synthetic construct
  misc_feature 1..20: note = chemically synthesized
  source 1..20: mol_type = other DNA
tggctgaatcaagccactgg

SEQ ID NO: 22565 - DNA, 20 bp, synthetic construct
  misc_feature 1..20: note = chemically synthesized
  source 1..20: mol_type = other DNA
ggctgaatcaagccactggt

SEQ ID NO: 22566 - DNA, 20 bp, synthetic construct
  misc_feature 1..20: note = chemically synthesized
  source 1..20: mol_type = other DNA
actggtaggacctttatgtg

SEQ ID NO: 22567 - DNA, 20 bp, synthetic construct
  misc_feature 1..20: note = chemically synthesized
  source 1..20: mol_type = other DNA
ctggtaggacctttatgtgt

SEQ ID NO: 22568 - DNA, 20 bp, synthetic construct
  misc_feature 1..20: note = chemically synthesized
  source 1..20: mol_type = other DNA
tggtaggacctttatgtgtg

SEQ ID NO: 22569 - DNA, 20 bp, synthetic construct
  misc_feature 1..20: note = chemically synthesized
  source 1..20: mol_type = other DNA
gacctttatgtgtggggaat

SEQ ID NO: 22570 - DNA, 20 bp, synthetic construct
  misc_feature 1..20: note = chemically synthesized
  source 1..20: mol_type = other DNA
tttatgtgtggggaatcaga

SEQ ID NO: 22571 - DNA, 20 bp, synthetic construct
  misc_feature 1..20: note = chemically synthesized
  source 1..20: mol_type = other DNA
aatcagacagcctgtcttca

SEQ ID NO: 22572 - DNA, 20 bp, synthetic construct
  misc_feature 1..20: note = chemically synthesized
  source 1..20: mol_type = other DNA
acagcctgtcttcatagccc

SEQ ID NO: 22573 - DNA, 20 bp, synthetic construct
  misc_feature 1..20: note = chemically synthesized
  source 1..20: mol_type = other DNA
gcctgtcttcatagccccag

SEQ ID NO: 22574 - DNA, 20 bp, synthetic construct
  misc_feature 1..20: note = chemically synthesized
  source 1..20: mol_type = other DNA
ttcatagccccagcagactc

SEQ ID NO: 22575 - DNA, 20 bp, synthetic construct
  misc_feature 1..20: note = chemically synthesized
  source 1..20: mol_type = other DNA
gcagactctggtatcacctc

SEQ ID NO: 22576 - DNA, 20 bp, synthetic construct
  misc_feature 1..20: note = chemically synthesized
  source 1..20: mol_type = other DNA
cagactctggtatcacctct

SEQ ID NO: 22577 - DNA, 20 bp, synthetic construct
  misc_feature 1..20: note = chemically synthesized
  source 1..20: mol_type = other DNA
gactctggtatcacctctgg

SEQ ID NO: 22578 - DNA, 20 bp, synthetic construct
  misc_feature 1..20: note = chemically synthesized
  source 1..20: mol_type = other DNA
actctggtatcacctctggg

SEQ ID NO: 22579 - DNA, 20 bp, synthetic construct
  misc_feature 1..20: note = chemically synthesized
  source 1..20: mol_type = other DNA
attccctacatttacttcaa

SEQ ID NO: 22580 - DNA, 20 bp, synthetic construct
  misc_feature 1..20: note = chemically synthesized
  source 1..20: mol_type = other DNA
ttcaacagtcaaatctttcc

SEQ ID NO: 22581 - DNA, 20 bp, synthetic construct
  misc_feature 1..20: note = chemically synthesized
  source 1..20: mol_type = other DNA
aatctttcccagtttatctc

SEQ ID NO: 22582 - DNA, 20 bp, synthetic construct
  misc_feature 1..20: note = chemically synthesized
  source 1..20: mol_type = other DNA
tctttcccagtttatctcaa

SEQ ID NO: 22583 - DNA, 20 bp, synthetic construct
  misc_feature 1..20: note = chemically synthesized
  source 1..20: mol_type = other DNA
tcccagtttatctcaagaga

SEQ ID NO: 22584 - DNA, 20 bp, synthetic construct
  misc_feature 1..20: note = chemically synthesized
  source 1..20: mol_type = other DNA
agaaagcctatatatcttct

SEQ ID NO: 22585 - DNA, 20 bp, synthetic construct
  misc_feature 1..20: note = chemically synthesized
  source 1..20: mol_type = other DNA
tttctactatatttcctgct

SEQ ID NO: 22586 - DNA, 20 bp, synthetic construct
  misc_feature 1..20: note = chemically synthesized
  source 1..20: mol_type = other DNA
actatatttcctgcttggtt

SEQ ID NO: 22587 - DNA, 20 bp, synthetic construct
  misc_feature 1..20: note = chemically synthesized
  source 1..20: mol_type = other DNA
atttcctgcttggtttagat

SEQ ID NO: 22588 - DNA, 20 bp, synthetic construct
  misc_feature 1..20: note = chemically synthesized
  source 1..20: mol_type = other DNA
ttcctgcttggtttagatca

SEQ ID NO: 22589 - DNA, 20 bp, synthetic construct
  misc_feature 1..20: note = chemically synthesized
  source 1..20: mol_type = other DNA
tgcttggtttagatcagaga

SEQ ID NO: 22590 - DNA, 20 bp, synthetic construct
  misc_feature 1..20: note = chemically synthesized
  source 1..20: mol_type = other DNA
ttagatcagagaaagcttga

SEQ ID NO: 22591 - DNA, 20 bp, synthetic construct
  misc_feature 1..20: note = chemically synthesized
  source 1..20: mol_type = other DNA
gatcagagaaagcttgaaag

SEQ ID NO: 22592 - DNA, 20 bp, synthetic construct
  misc_feature 1..20: note = chemically synthesized
  source 1..20: mol_type = other DNA
tcagagaaagcttgaaagca

SEQ ID NO: 22593 - DNA, 20 bp, synthetic construct
  misc_feature 1..20: note = chemically synthesized
  source 1..20: mol_type = other DNA
agagaaagcttgaaagcaga

SEQ ID NO: 22594 - DNA, 20 bp, synthetic construct
  misc_feature 1..20: note = chemically synthesized
  source 1..20: mol_type = other DNA
aaagcttgaaagcagagagc

SEQ ID NO: 22595 - DNA, 20 bp, synthetic construct
  misc_feature 1..20: note = chemically synthesized
  source 1..20: mol_type = other DNA
cttgaaagcagagagctaga

SEQ ID NO: 22596 - DNA, 20 bp, synthetic construct
  misc_feature 1..20: note = chemically synthesized
  source 1..20: mol_type = other DNA
aagcagagagctagatagac

SEQ ID NO: 22597 - DNA, 20 bp, synthetic construct
  misc_feature 1..20: note = chemically synthesized
  source 1..20: mol_type = other DNA
gcagagagctagatagacta

SEQ ID NO: 22598 - DNA, 20 bp, synthetic construct
  misc_feature 1..20: note = chemically synthesized
  source 1..20: mol_type = other DNA
agagtcaatataataaaatt

SEQ ID NO: 22599 - DNA, 20 bp, synthetic construct
  misc_feature 1..20: note = chemically synthesized
  source 1..20: mol_type = other DNA
gagtcaatataataaaattc

SEQ ID NO: 22600 - DNA, 20 bp, synthetic construct
  misc_feature 1..20: note = chemically synthesized
  source 1..20: mol_type = other DNA
tcaatataataaaattcagg

SEQ ID NO: 22601 - DNA, 20 bp, synthetic construct
  misc_feature 1..20: note = chemically synthesized
  source 1..20: mol_type = other DNA
aaaattcaggcagccttctc

SEQ ID NO: 22602 - DNA, 20 bp, synthetic construct
  misc_feature 1..20: note = chemically synthesized
  source 1..20: mol_type = other DNA
caacgtgaacgcacattctg

SEQ ID NO: 22603 - DNA, 20 bp, synthetic construct
  misc_feature 1..20: note = chemically synthesized
  source 1..20: mol_type = other DNA
tcactaactattcccttctt

SEQ ID NO: 22604 - DNA, 20 bp, synthetic construct
  misc_feature 1..20: note = chemically synthesized
  source 1..20: mol_type = other DNA
aactattcccttcttgagtt

SEQ ID NO: 22605 - DNA, 20 bp, synthetic construct
  misc_feature 1..20: note = chemically synthesized
  source 1..20: mol_type = other DNA
ccttcttgagtttagcctac

SEQ ID NO: 22606 - DNA, 20 bp, synthetic construct
  misc_feature 1..20: note = chemically synthesized
  source 1..20: mol_type = other DNA
tcttgagtttagcctaccag

SEQ ID NO: 22607 - DNA, 20 bp, synthetic construct
  misc_feature 1..20: note = chemically synthesized
  source 1..20: mol_type = other DNA
accagaagttttctcttttc

SEQ ID NO: 22608 - DNA, 20 bp, synthetic construct
  misc_feature 1..20: note = chemically synthesized
  source 1..20: mol_type = other DNA
ccagaagttttctcttttcc

SEQ ID NO: 22609 - DNA, 20 bp, synthetic construct
  misc_feature 1..20: note = chemically synthesized
  source 1..20: mol_type = other DNA
cagaagttttctcttttcca

SEQ ID NO: 22610 - DNA, 20 bp, synthetic construct
  misc_feature 1..20: note = chemically synthesized
  source 1..20: mol_type = other DNA
agaagttttctcttttccag

SEQ ID NO: 22611 - DNA, 20 bp, synthetic construct
  misc_feature 1..20: note = chemically synthesized
  source 1..20: mol_type = other DNA
tttctcttttccaggggatg

SEQ ID NO: 22612 - DNA, 20 bp, synthetic construct
  misc_feature 1..20: note = chemically synthesized
  source 1..20: mol_type = other DNA
ctcttttccaggggatgcag

SEQ ID NO: 22613 - DNA, 20 bp, synthetic construct
  misc_feature 1..20: note = chemically synthesized
  source 1..20: mol_type = other DNA
tcttttccaggggatgcagc

SEQ ID NO: 22614 - DNA, 20 bp, synthetic construct
  misc_feature 1..20: note = chemically synthesized
  source 1..20: mol_type = other DNA
cagcaggcatactcatcaca

SEQ ID NO: 22615 - DNA, 20 bp, synthetic construct
  misc_feature 1..20: note = chemically synthesized
  source 1..20: mol_type = other DNA
atactcatcacatggtgctt

SEQ ID NO: 22616 - DNA, 20 bp, synthetic construct
  misc_feature 1..20: note = chemically synthesized
  source 1..20: mol_type = other DNA
catcacatggtgcttcagcc

SEQ ID NO: 22617 - DNA, 20 bp, synthetic construct
  misc_feature 1..20: note = chemically synthesized
  source 1..20: mol_type = other DNA
cacaccacatcactttgtga

SEQ ID NO: 22618 - DNA, 20 bp, synthetic construct
  misc_feature 1..20: note = chemically synthesized
  source 1..20: mol_type = other DNA
caattattatatgcgtttta

SEQ ID NO: 22619 - DNA, 20 bp, synthetic construct
  misc_feature 1..20: note = chemically synthesized
  source 1..20: mol_type = other DNA
tattatatgcgttttacagt

SEQ ID NO: 22620 - DNA, 20 bp, synthetic construct
  misc_feature 1..20: note = chemically synthesized
  source 1..20: mol_type = other DNA
attatatgcgttttacagta

SEQ ID NO: 22621 - DNA, 20 bp, synthetic construct
  misc_feature 1..20: note = chemically synthesized
  source 1..20: mol_type = other DNA
taaggactatgaaatgcaat

SEQ ID NO: 22622 - DNA, 20 bp, synthetic construct
  misc_feature 1..20: note = chemically synthesized
  source 1..20: mol_type = other DNA
aatgagataaaataattcca

SEQ ID NO: 22623 - DNA, 20 bp, synthetic construct
  misc_feature 1..20: note = chemically synthesized
  source 1..20: mol_type = other DNA
gagataaaataattccaaag

SEQ ID NO: 22624 - DNA, 20 bp, synthetic construct
  misc_feature 1..20: note = chemically synthesized
  source 1..20: mol_type = other DNA
aaaataattccaaagtagca

SEQ ID NO: 22625 - DNA, 20 bp, synthetic construct
  misc_feature 1..20: note = chemically synthesized
  source 1..20: mol_type = other DNA
taattccaaagtagcacagc

SEQ ID NO: 22626 - DNA, 20 bp, synthetic construct
  misc_feature 1..20: note = chemically synthesized
  source 1..20: mol_type = other DNA
attccaaagtagcacagcaa

SEQ ID NO: 22627 - DNA, 20 bp, synthetic construct
  misc_feature 1..20: note = chemically synthesized
  source 1..20: mol_type = other DNA
aagtagcacagcaagagcca

SEQ ID NO: 22628 - DNA, 20 bp, synthetic construct
  misc_feature 1..20: note = chemically synthesized
  source 1..20: mol_type = other DNA
caagagccaaagccacaatg

SEQ ID NO: 22629 - DNA, 20 bp, synthetic construct
  misc_feature 1..20: note = chemically synthesized
  source 1..20: mol_type = other DNA
acaaaatattcaacctccaa

SEQ ID NO: 22630 - DNA, 20 bp, synthetic construct
  misc_feature 1..20: note = chemically synthesized
  source 1..20: mol_type = other DNA
aaaatattcaacctccaaca

SEQ ID NO: 22631 - DNA, 20 bp, synthetic construct
  misc_feature 1..20: note = chemically synthesized
  source 1..20: mol_type = other DNA
aaatattcaacctccaacag

SEQ ID NO: 22632 - DNA, 20 bp, synthetic construct
  misc_feature 1..20: note = chemically synthesized
  source 1..20: mol_type = other DNA
ctccaacagaggaaaacctc

SEQ ID NO: 22633 - DNA, 20 bp, synthetic construct
  misc_feature 1..20: note = chemically synthesized
  source 1..20: mol_type = other DNA
cagaggaaaacctccagtaa

SEQ ID NO: 22634 - DNA, 20 bp, synthetic construct
  misc_feature 1..20: note = chemically synthesized
  source 1..20: mol_type = other DNA
ggaaaacctccagtaaaagc

SEQ ID NO: 22635 - DNA, 20 bp, synthetic construct
  misc_feature 1..20: note = chemically synthesized
  source 1..20: mol_type = other DNA
gaaaacctccagtaaaagcc

SEQ ID NO: 22636 - DNA, 20 bp, synthetic construct
  misc_feature 1..20: note = chemically synthesized
  source 1..20: mol_type = other DNA
acctccagtaaaagccagga

SEQ ID NO: 22637 - DNA, 20 bp, synthetic construct
  misc_feature 1..20: note = chemically synthesized
  source 1..20: mol_type = other DNA
ctccagtaaaagccaggaca

SEQ ID NO: 22638 - DNA, 20 bp, synthetic construct
  misc_feature 1..20: note = chemically synthesized
  source 1..20: mol_type = other DNA
agtaaaagccaggacagaga

SEQ ID NO: 22639 - DNA, 20 bp, synthetic construct
  misc_feature 1..20: note = chemically synthesized
  source 1..20: mol_type = other DNA
taaaagccaggacagagaca

SEQ ID NO: 22640 - DNA, 20 bp, synthetic construct
  misc_feature 1..20: note = chemically synthesized
  source 1..20: mol_type = other DNA
aggacagagacagagatctt

SEQ ID NO: 22641 - DNA, 20 bp, synthetic construct
  misc_feature 1..20: note = chemically synthesized
  source 1..20: mol_type = other DNA
atcttgagttgtgctgttca

SEQ ID NO: 22642 - DNA, 20 bp, synthetic construct
  misc_feature 1..20: note = chemically synthesized
  source 1..20: mol_type = other DNA
gttcaaagcccaatacccac

SEQ ID NO: 22643 - DNA, 20 bp, synthetic construct
  misc_feature 1..20: note = chemically synthesized
  source 1..20: mol_type = other DNA
ttcaaagcccaatacccaca

SEQ ID NO: 22644 - DNA, 20 bp, synthetic construct
  misc_feature 1..20: note = chemically synthesized
  source 1..20: mol_type = other DNA
agcccaatacccacaaggct

SEQ ID NO: 22645 - DNA, 20 bp, synthetic construct
  misc_feature 1..20: note = chemically synthesized
  source 1..20: mol_type = other DNA
gcccaatacccacaaggctg

SEQ ID NO: 22646 - DNA, 20 bp, synthetic construct
  misc_feature 1..20: note = chemically synthesized
  source 1..20: mol_type = other DNA
cccaatacccacaaggctga

SEQ ID NO: 22647 - DNA, 20 bp, synthetic construct
  misc_feature 1..20: note = chemically synthesized
  source 1..20: mol_type = other DNA
aaggctgagggcacaaataa

SEQ ID NO: 22648 - DNA, 20 bp, synthetic construct
  misc_feature 1..20: note = chemically synthesized
  source 1..20: mol_type = other DNA
ggctgagggcacaaataata

SEQ ID NO: 22649 - DNA, 20 bp, synthetic construct
  misc_feature 1..20: note = chemically synthesized
  source 1..20: mol_type = other DNA
gggcacaaataatagagaaa

SEQ ID NO: 22650 - DNA, 20 bp, synthetic construct
  misc_feature 1..20: note = chemically synthesized
  source 1..20: mol_type = other DNA
acaaataatagagaaaaaga

SEQ ID NO: 22651 - DNA, 20 bp, synthetic construct
  misc_feature 1..20: note = chemically synthesized
  source 1..20: mol_type = other DNA
aataatagagaaaaagatgg

SEQ ID NO: 22652 - DNA, 20 bp, synthetic construct
  misc_feature 1..20: note = chemically synthesized
  source 1..20: mol_type = other DNA
ataatagagaaaaagatgga

SEQ ID NO: 22653 - DNA, 20 bp, synthetic construct
  misc_feature 1..20: note = chemically synthesized
  source 1..20: mol_type = other DNA
atagagaaaaagatggaagg

SEQ ID NO: 22654 - DNA, 20 bp, synthetic construct
  misc_feature 1..20: note = chemically synthesized
  source 1..20: mol_type = other DNA
tagagaaaaagatggaagga

SEQ ID NO: 22655 - DNA, 20 bp, synthetic construct
  misc_feature 1..20: note = chemically synthesized
  source 1..20: mol_type = other DNA
gagaaaaagatggaaggaag

SEQ ID NO: 22656 - DNA, 20 bp, synthetic construct
  misc_feature 1..20: note = chemically synthesized
  source 1..20: mol_type = other DNA
agaaaaagatggaaggaagg

SEQ ID NO: 22657 - DNA, 20 bp, synthetic construct
  misc_feature 1..20: note = chemically synthesized
  source 1..20: mol_type = other DNA
aaaagatggaaggaaggagg

SEQ ID NO: 22658 - DNA, 20 bp, synthetic construct
  misc_feature 1..20: note = chemically synthesized
  source 1..20: mol_type = other DNA
aaagatggaaggaaggaggt

SEQ ID NO: 22659 - DNA, 20 bp, synthetic construct
  misc_feature 1..20: note = chemically synthesized
  source 1..20: mol_type = other DNA
aagatggaaggaaggaggta

SEQ ID NO: 22660 - DNA, 20 bp, synthetic construct
  misc_feature 1..20: note = chemically synthesized
  source 1..20: mol_type = other DNA
gatggaaggaaggaggtagg

SEQ ID NO: 22661 - DNA, 20 bp, synthetic construct
  misc_feature 1..20: note = chemically synthesized
  source 1..20: mol_type = other DNA
tggaaggaaggaggtaggga

SEQ ID NO: 22662 - DNA, 20 bp, synthetic construct
  misc_feature 1..20: note = chemically synthesized
  source 1..20: mol_type = other DNA
gaaggaaggaggtagggaga

SEQ ID NO: 22663 - DNA, 20 bp, synthetic construct
  misc_feature 1..20: note = chemically synthesized
  source 1..20: mol_type = other DNA
aaggaaggaggtagggagag

SEQ ID NO: 22664 - DNA, 20 bp, synthetic construct
  misc_feature 1..20: note = chemically synthesized
  source 1..20: mol_type = other DNA
aggaaggaggtagggagaga

SEQ ID NO: 22665 - DNA, 20 bp, synthetic construct
  misc_feature 1..20: note = chemically synthesized
  source 1..20: mol_type = other DNA
aaggaggtagggagagaggg

SEQ ID NO: 22666 - DNA, 20 bp, synthetic construct
  misc_feature 1..20: note = chemically synthesized
  source 1..20: mol_type = other DNA
ggaggtagggagagagggaa

SEQ ID NO: 22667 - DNA, 20 bp, synthetic construct
  misc_feature 1..20: note = chemically synthesized
  source 1..20: mol_type = other DNA
aggtagggagagagggaaga

SEQ ID NO: 22668 - DNA, 20 bp, synthetic construct
  misc_feature 1..20: note = chemically synthesized
  source 1..20: mol_type = other DNA
ggtagggagagagggaagag

SEQ ID NO: 22669 - DNA, 20 bp, synthetic construct
  misc_feature 1..20: note = chemically synthesized
  source 1..20: mol_type = other DNA
tagggagagagggaagagag

SEQ ID NO: 22670 - DNA, 20 bp, synthetic construct
  misc_feature 1..20: note = chemically synthesized
  source 1..20: mol_type = other DNA
agggagagagggaagagagg

SEQ ID NO: 22671 - DNA, 20 bp, synthetic construct
  misc_feature 1..20: note = chemically synthesized
  source 1..20: mol_type = other DNA
gggagagagggaagagagga

SEQ ID NO: 22672 - DNA, 20 bp, synthetic construct
  misc_feature 1..20: note = chemically synthesized
  source 1..20: mol_type = other DNA
gagagagggaagagaggagg

SEQ ID NO: 22673 - DNA, 20 bp, synthetic construct
  misc_feature 1..20: note = chemically synthesized
  source 1..20: mol_type = other DNA
agagggaagagaggagggag

SEQ ID NO: 22674 - DNA, 20 bp, synthetic construct
  misc_feature 1..20: note = chemically synthesized
  source 1..20: mol_type = other DNA
gggaagagaggagggagcag

SEQ ID NO: 22675 - DNA, 20 bp, synthetic construct
  misc_feature 1..20: note = chemically synthesized
  source 1..20: mol_type = other DNA
gaagagaggagggagcagaa

SEQ ID NO: 22676 - DNA, 20 bp, synthetic construct
  misc_feature 1..20: note = chemically synthesized
  source 1..20: mol_type = other DNA
aagagaggagggagcagaag

SEQ ID NO: 22677 - DNA, 20 bp, synthetic construct
  misc_feature 1..20: note = chemically synthesized
  source 1..20: mol_type = other DNA
agagaggagggagcagaaga

SEQ ID NO: 22678 - DNA, 20 bp, synthetic construct
  misc_feature 1..20: note = chemically synthesized
  source 1..20: mol_type = other DNA
agaggagggagcagaagagg

SEQ ID NO: 22679 - DNA, 20 bp, synthetic construct
  misc_feature 1..20: note = chemically synthesized
  source 1..20: mol_type = other DNA
gaggagggagcagaagaggg

SEQ ID NO: 22680 - DNA, 20 bp, synthetic construct
  misc_feature 1..20: note = chemically synthesized
  source 1..20: mol_type = other DNA
aggagggagcagaagaggga

SEQ ID NO: 22681 - DNA, 20 bp, synthetic construct
  misc_feature 1..20: note = chemically synthesized
  source 1..20: mol_type = other DNA
gagggagcagaagagggagg

SEQ ID NO: 22682 - DNA, 20 bp, synthetic construct
  misc_feature 1..20: note = chemically synthesized
  source 1..20: mol_type = other DNA
agggagcagaagagggaggg

SEQ ID NO: 22683 - DNA, 20 bp, synthetic construct
  misc_feature 1..20: note = chemically synthesized
  source 1..20: mol_type = other DNA
gggagcagaagagggaggga

SEQ ID NO: 22684 - DNA, 20 bp, synthetic construct
  misc_feature 1..20: note = chemically synthesized
  source 1..20: mol_type = other DNA
agcagaagagggagggaggg

SEQ ID NO: 22685 - DNA, 20 bp, synthetic construct
  misc_feature 1..20: note = chemically synthesized
  source 1..20: mol_type = other DNA
agaacaataattatctaaat

SEQ ID NO: 22686 - DNA, 20 bp, synthetic construct
  misc_feature 1..20: note = chemically synthesized
  source 1..20: mol_type = other DNA
gaacaataattatctaaatc

SEQ ID NO: 22687 - DNA, 20 bp, synthetic construct
  misc_feature 1..20: note = chemically synthesized
  source 1..20: mol_type = other DNA
ataattatctaaatcaggaa

SEQ ID NO: 22688 - DNA, 20 bp, synthetic construct
  misc_feature 1..20: note = chemically synthesized
  source 1..20: mol_type = other DNA
tctaaatcaggaatggtctc

SEQ ID NO: 22689 - DNA, 20 bp, synthetic construct
  misc_feature 1..20: note = chemically synthesized
  source 1..20: mol_type = other DNA
ctaaatcaggaatggtctct

SEQ ID NO: 22690 - DNA, 20 bp, synthetic construct
  misc_feature 1..20: note = chemically synthesized
  source 1..20: mol_type = other DNA
taaatcaggaatggtctctg

SEQ ID NO: 22691 - DNA, 20 bp, synthetic construct
  misc_feature 1..20: note = chemically synthesized
  source 1..20: mol_type = other DNA
aatcaggaatggtctctggg

SEQ ID NO: 22692 - DNA, 20 bp, synthetic construct
  misc_feature 1..20: note = chemically synthesized
  source 1..20: mol_type = other DNA
atcaggaatggtctctgggg

SEQ ID NO: 22693 - DNA, 20 bp, synthetic construct
  misc_feature 1..20: note = chemically synthesized
  source 1..20: mol_type = other DNA
caggaatggtctctggggag

SEQ ID NO: 22694 - DNA, 20 bp, synthetic construct
  misc_feature 1..20: note = chemically synthesized
  source 1..20: mol_type = other DNA
tctaaaataaatgttcctac

SEQ ID NO: 22695 - DNA, 20 bp, synthetic construct
  misc_feature 1..20: note = chemically synthesized
  source 1..20: mol_type = other DNA
aaataaatgttcctaccagc

SEQ ID NO: 22696 - DNA, 20 bp, synthetic construct
  misc_feature 1..20: note = chemically synthesized
  source 1..20: mol_type = other DNA
aataaatgttcctaccagcc

SEQ ID NO: 22697 - DNA, 20 bp, synthetic construct
  misc_feature 1..20: note = chemically synthesized
  source 1..20: mol_type = other DNA
ctaccagccaggctcatgtg

SEQ ID NO: 22698 - DNA, 20 bp, synthetic construct
  misc_feature 1..20: note = chemically synthesized
  source 1..20: mol_type = other DNA
gctcatgtgcagattctgaa

SEQ ID NO: 22699 - DNA, 20 bp, synthetic construct
  misc_feature 1..20: note = chemically synthesized
  source 1..20: mol_type = other DNA
tgatgcccaaatctttcata

SEQ ID NO: 22700 - DNA, 20 bp, synthetic construct
  misc_feature 1..20: note = chemically synthesized
  source 1..20: mol_type = other DNA
ccaaatctttcatacggcta

SEQ ID NO: 22701 - DNA, 20 bp, synthetic construct
  misc_feature 1..20: note = chemically synthesized
  source 1..20: mol_type = other DNA
tttcatacggctaaagatgt

SEQ ID NO: 22702 - DNA, 20 bp, synthetic construct
  misc_feature 1..20: note = chemically synthesized
  source 1..20: mol_type = other DNA
agatgtgagatacatgacta

SEQ ID NO: 22703 - DNA, 20 bp, synthetic construct
  misc_feature 1..20: note = chemically synthesized
  source 1..20: mol_type = other DNA
gatacatgactatggaactg

SEQ ID NO: 22704 - DNA, 20 bp, synthetic construct
  misc_feature 1..20: note = chemically synthesized
  source 1..20: mol_type = other DNA
atgactatggaactgaagaa

SEQ ID NO: 22705 - DNA, 20 bp, synthetic construct
  misc_feature 1..20: note = chemically synthesized
  source 1..20: mol_type = other DNA
actatggaactgaagaatgg

SEQ ID NO: 22706 - DNA, 20 bp, synthetic construct
  misc_feature 1..20: note = chemically synthesized
  source 1..20: mol_type = other DNA
ctatggaactgaagaatgga

SEQ ID NO: 22707 - DNA, 20 bp, synthetic construct
  misc_feature 1..20: note = chemically synthesized
  source 1..20: mol_type = other DNA
tatggaactgaagaatggaa

SEQ ID NO: 22708 - DNA, 20 bp, synthetic construct
  misc_feature 1..20: note = chemically synthesized
  source 1..20: mol_type = other DNA
ctgaagaatggaagggaaca

SEQ ID NO: 22709 - DNA, 20 bp, synthetic construct
  misc_feature 1..20: note = chemically synthesized
  source 1..20: mol_type = other DNA
aatggaagggaacaaagttt

SEQ ID NO: 22710 - DNA, 20 bp, synthetic construct
  misc_feature 1..20: note = chemically synthesized
  source 1..20: mol_type = other DNA
atggaagggaacaaagtttc

SEQ ID NO: 22711 - DNA, 20 bp, synthetic construct
  misc_feature 1..20: note = chemically synthesized
  source 1..20: mol_type = other DNA
aagggaacaaagtttcaggt

SEQ ID NO: 22712 - DNA, 20 bp, synthetic construct
  misc_feature 1..20: note = chemically synthesized
  source 1..20: mol_type = other DNA
gaacaaagtttcaggtcagt

SEQ ID NO: 22713 - DNA, 20 bp, synthetic construct
  misc_feature 1..20: note = chemically synthesized
  source 1..20: mol_type = other DNA
aacaaagtttcaggtcagtg

SEQ ID NO: 22714 - DNA, 20 bp, synthetic construct
  misc_feature 1..20: note = chemically synthesized
  source 1..20: mol_type = other DNA
acaaagtttcaggtcagtga

SEQ ID NO: 22715 - DNA, 20 bp, synthetic construct
  misc_feature 1..20: note = chemically synthesized
  source 1..20: mol_type = other DNA
atttaatgaatctcctctgt

SEQ ID NO: 22716 - DNA, 20 bp, synthetic construct
  misc_feature 1..20: note = chemically synthesized
  source 1..20: mol_type = other DNA
tcctctgtaagatctcattg

SEQ ID NO: 22717 - DNA, 20 bp, synthetic construct
  misc_feature 1..20: note = chemically synthesized
  source 1..20: mol_type = other DNA
cctctgtaagatctcattgc

SEQ ID NO: 22718 - DNA, 20 bp, synthetic construct
  misc_feature 1..20: note = chemically synthesized
  source 1..20: mol_type = other DNA
aagatctcattgcaggaacc

SEQ ID NO: 22719 - DNA, 20 bp, synthetic construct
  misc_feature 1..20: note = chemically synthesized
  source 1..20: mol_type = other DNA
agatctcattgcaggaacca

SEQ ID NO: 22720 - DNA, 20 bp, synthetic construct
  misc_feature 1..20: note = chemically synthesized
  source 1..20: mol_type = other DNA
gaaccaaggcaaaaaaaaaa

SEQ ID NO: 22721 - DNA, 20 bp, synthetic construct
  misc_feature 1..20: note = chemically synthesized
  source 1..20: mol_type = other DNA
accaaggcaaaaaaaaaaca

SEQ ID NO: 22722 - DNA, 20 bp, synthetic construct
  misc_feature 1..20: note = chemically synthesized
  source 1..20: mol_type = other DNA
caaggcaaaaaaaaaacaga

SEQ ID NO: 22723 - DNA, 20 bp, synthetic construct
  misc_feature 1..20: note = chemically synthesized
  source 1..20: mol_type = other DNA
aaaaaaaaacagagagatcg

SEQ ID NO: 22724 - DNA, 20 bp, synthetic construct
  misc_feature 1..20: note = chemically synthesized
  source 1..20: mol_type = other DNA
agagatcgaagctgatttct

SEQ ID NO: 22725 - DNA, 20 bp, synthetic construct
  misc_feature 1..20: note = chemically synthesized
  source 1..20: mol_type = other DNA
atcgaagctgatttcttagc

SEQ ID NO: 22726 - DNA, 20 bp, synthetic construct
  misc_feature 1..20: note = chemically synthesized
  source 1..20: mol_type = other DNA
cgaagctgatttcttagcaa

SEQ ID NO: 22727 - DNA, 20 bp, synthetic construct
  misc_feature 1..20: note = chemically synthesized
  source 1..20: mol_type = other DNA
ctgatttcttagcaagagaa

SEQ ID NO: 22728 - DNA, 20 bp, synthetic construct
  misc_feature 1..20: note = chemically synthesized
  source 1..20: mol_type = other DNA
tcttagcaagagaaaagtaa

SEQ ID NO: 22729 - DNA, 20 bp, synthetic construct
  misc_feature 1..20: note = chemically synthesized
  source 1..20: mol_type = other DNA
aagtaatagtgttgtctgct

SEQ ID NO: 22730 - DNA, 20 bp, synthetic construct
  misc_feature 1..20: note = chemically synthesized
  source 1..20: mol_type = other DNA
gtaatagtgttgtctgctaa

SEQ ID NO: 22731 - DNA, 20 bp, synthetic construct
  misc_feature 1..20: note = chemically synthesized
  source 1..20: mol_type = other DNA
atagtgttgtctgctaagag

SEQ ID NO: 22732 - DNA, 20 bp, synthetic construct
  misc_feature 1..20: note = chemically synthesized
  source 1..20: mol_type = other DNA
ctgctaagagtagatatatg

SEQ ID NO: 22733 - DNA, 20 bp, synthetic construct
  misc_feature 1..20: note = chemically synthesized
  source 1..20: mol_type = other DNA
ctaagagtagatatatgtag

SEQ ID NO: 22734 - DNA, 20 bp, synthetic construct
  misc_feature 1..20: note = chemically synthesized
  source 1..20: mol_type = other DNA
taagagtagatatatgtagt

SEQ ID NO: 22735 - DNA, 20 bp, synthetic construct
  misc_feature 1..20: note = chemically synthesized
  source 1..20: mol_type = other DNA
gtagatatatgtagtaggca

SEQ ID NO: 22736 - DNA, 20 bp, synthetic construct
  misc_feature 1..20: note = chemically synthesized
  source 1..20: mol_type = other DNA
tagatatatgtagtaggcat

SEQ ID NO: 22737 - DNA, 20 bp, synthetic construct
  misc_feature 1..20: note = chemically synthesized
  source 1..20: mol_type = other DNA
tgtagtaggcatgggtccta

SEQ ID NO: 22738 - DNA, 20 bp, synthetic construct
  misc_feature 1..20: note = chemically synthesized
  source 1..20: mol_type = other DNA
tccctgacatctctaaaact

SEQ ID NO: 22739 - DNA, 20 bp, synthetic construct
  misc_feature 1..20: note = chemically synthesized
  source 1..20: mol_type = other DNA
ctctaaaacttggtttcttt

SEQ ID NO: 22740 - DNA, 20 bp, synthetic construct
  misc_feature 1..20: note = chemically synthesized
  source 1..20: mol_type = other DNA
ctaaaacttggtttctttga

SEQ ID NO: 22741 - DNA, 20 bp, synthetic construct
  misc_feature 1..20: note = chemically synthesized
  source 1..20: mol_type = other DNA
ttacctcttcaaatataaaa

SEQ ID NO: 22742 - DNA, 20 bp, synthetic construct
  misc_feature 1..20: note = chemically synthesized
  source 1..20: mol_type = other DNA
tcttcaaatataaaaaagtg

SEQ ID NO: 22743 - DNA, 20 bp, synthetic construct
  misc_feature 1..20: note = chemically synthesized
  source 1..20: mol_type = other DNA
cttcaaatataaaaaagtga

SEQ ID NO: 22744 - DNA, 20 bp, synthetic construct
  misc_feature 1..20: note = chemically synthesized
  source 1..20: mol_type = other DNA
aaatataaaaaagtgaagga

SEQ ID NO: 22745 - DNA, 20 bp, synthetic construct
  misc_feature 1..20: note = chemically synthesized
  source 1..20: mol_type = other DNA
aaaaagtgaaggatagattc

SEQ ID NO: 22746 - DNA, 20 bp, synthetic construct
  misc_feature 1..20: note = chemically synthesized
  source 1..20: mol_type = other DNA
ggatagattctggaacacat

SEQ ID NO: 22747 - DNA, 20 bp, synthetic construct
  misc_feature 1..20: note = chemically synthesized
  source 1..20: mol_type = other DNA
gatagattctggaacacata

SEQ ID NO: 22748 - DNA, 20 bp, synthetic construct
  misc_feature 1..20: note = chemically synthesized
  source 1..20: mol_type = other DNA
aaacaattctacgaacaaac

SEQ ID NO: 22749 - DNA, 20 bp, synthetic construct
  misc_feature 1..20: note = chemically synthesized
  source 1..20: mol_type = other DNA
acaattctacgaacaaacca

SEQ ID NO: 22750 - DNA, 20 bp, synthetic construct
  misc_feature 1..20: note = chemically synthesized
  source 1..20: mol_type = other DNA
tctacgaacaaaccagagca

SEQ ID NO: 22751 - DNA, 20 bp, synthetic construct
  misc_feature 1..20: note = chemically synthesized
  source 1..20: mol_type = other DNA
ctacgaacaaaccagagcat

SEQ ID NO: 22752 - DNA, 20 bp, synthetic construct
  misc_feature 1..20: note = chemically synthesized
  source 1..20: mol_type = other DNA
ccagagcatgggtgttgact

SEQ ID NO: 22753 - DNA, 20 bp, synthetic construct
  misc_feature 1..20: note = chemically synthesized
  source 1..20: mol_type = other DNA
cagagcatgggtgttgactc

SEQ ID NO: 22754 - DNA, 20 bp, synthetic construct
  misc_feature 1..20: note = chemically synthesized
  source 1..20: mol_type = other DNA
gttgactcaggcatgaatta

SEQ ID NO: 22755 - DNA, 20 bp, synthetic construct
  misc_feature 1..20: note = chemically synthesized
  source 1..20: mol_type = other DNA
ttgactcaggcatgaattat

SEQ ID NO: 22756 - DNA, 20 bp, synthetic construct
  misc_feature 1..20: note = chemically synthesized
  source 1..20: mol_type = other DNA
tgactcaggcatgaattatg

SEQ ID NO: 22757 - DNA, 20 bp, synthetic construct
  misc_feature 1..20: note = chemically synthesized
  source 1..20: mol_type = other DNA
aggcatgaattatggggttg

SEQ ID NO: 22758 - DNA, 20 bp, synthetic construct
  misc_feature 1..20: note = chemically synthesized
  source 1..20: mol_type = other DNA
gactgattctttaatctctc

SEQ ID NO: 22759 - DNA, 20 bp, synthetic construct
  misc_feature 1..20: note = chemically synthesized
  source 1..20: mol_type = other DNA
ctggcttccattctaaccct

SEQ ID NO: 22760 - DNA, 20 bp, synthetic construct
  misc_feature 1..20: note = chemically synthesized
  source 1..20: mol_type = other DNA
ggcttccattctaaccctga

SEQ ID NO: 22761 - DNA, 20 bp, synthetic construct
  misc_feature 1..20: note = chemically synthesized
  source 1..20: mol_type = other DNA
caaccccatgtcttttacct

SEQ ID NO: 22762 - DNA, 20 bp, synthetic construct
  misc_feature 1..20: note = chemically synthesized
  source 1..20: mol_type = other DNA
ccccatgtcttttaccttag

SEQ ID NO: 22763 - DNA, 20 bp, synthetic construct
  misc_feature 1..20: note = chemically synthesized
  source 1..20: mol_type = other DNA
tgtcttttaccttagaagtc

SEQ ID NO: 22764 - DNA, 20 bp, synthetic construct
  misc_feature 1..20: note = chemically synthesized
  source 1..20: mol_type = other DNA
tttaccttagaagtccagat

SEQ ID NO: 22765 - DNA, 20 bp, synthetic construct
  misc_feature 1..20: note = chemically synthesized
  source 1..20: mol_type = other DNA
gtccagataagtgccaaata

SEQ ID NO: 22766 - DNA, 20 bp, synthetic construct
  misc_feature 1..20: note = chemically synthesized
  source 1..20: mol_type = other DNA
atcaactcttccaaattctt

SEQ ID NO: 22767 - DNA, 20 bp, synthetic construct
  misc_feature 1..20: note = chemically synthesized
  source 1..20: mol_type = other DNA
tcaactcttccaaattcttg

SEQ ID NO: 22768 - DNA, 20 bp, synthetic construct
  misc_feature 1..20: note = chemically synthesized
  source 1..20: mol_type = other DNA
aactcttccaaattcttgag

SEQ ID NO: 22769 - DNA, 20 bp, synthetic construct
  misc_feature 1..20: note = chemically synthesized
  source 1..20: mol_type = other DNA
actcttccaaattcttgagg

SEQ ID NO: 22770 - DNA, 20 bp, synthetic construct
  misc_feature 1..20: note = chemically synthesized
  source 1..20: mol_type = other DNA
aggtatacctctgtaatcat

SEQ ID NO: 22771 - DNA, 20 bp, synthetic construct
  misc_feature 1..20: note = chemically synthesized
  source 1..20: mol_type = other DNA
gtatacctctgtaatcatca

SEQ ID NO: 22772 - DNA, 20 bp, synthetic construct
  misc_feature 1..20: note = chemically synthesized
  source 1..20: mol_type = other DNA
tatacctctgtaatcatcag

SEQ ID NO: 22773 - DNA, 20 bp, synthetic construct
  misc_feature 1..20: note = chemically synthesized
  source 1..20: mol_type = other DNA
tcagaggttcaaatactttc

SEQ ID NO: 22774 - DNA, 20 bp, synthetic construct
  misc_feature 1..20: note = chemically synthesized
  source 1..20: mol_type = other DNA
tcaaatactttctagaaaaa

SEQ ID NO: 22775 - DNA, 20 bp, synthetic construct
  misc_feature 1..20: note = chemically synthesized
  source 1..20: mol_type = other DNA
taataaaccaattcaaaatt

SEQ ID NO: 22776 - DNA, 20 bp, synthetic construct
  misc_feature 1..20: note = chemically synthesized
  source 1..20: mol_type = other DNA
aaccaattcaaaattaagct

SEQ ID NO: 22777 - DNA, 20 bp, synthetic construct
  misc_feature 1..20: note = chemically synthesized
  source 1..20: mol_type = other DNA
aattcaaaattaagcttgga

SEQ ID NO: 22778 - DNA, 20 bp, synthetic construct
  misc_feature 1..20: note = chemically synthesized
  source 1..20: mol_type = other DNA
ttcaaaattaagcttggacg

SEQ ID NO: 22779 - DNA, 20 bp, synthetic construct
  misc_feature 1..20: note = chemically synthesized
  source 1..20: mol_type = other DNA
aattaagcttggacggagct

SEQ ID NO: 22780 - DNA, 20 bp, synthetic construct
  misc_feature 1..20: note = chemically synthesized
  source 1..20: mol_type = other DNA
attaagcttggacggagctt

SEQ ID NO: 22781 - DNA, 20 bp, synthetic construct
  misc_feature 1..20: note = chemically synthesized
  source 1..20: mol_type = other DNA
gcttgggttatgtgtgcctc

SEQ ID NO: 22782 - DNA, 20 bp, synthetic construct
  misc_feature 1..20: note = chemically synthesized
  source 1..20: mol_type = other DNA
ggttatgtgtgcctctggat

SEQ ID NO: 22783 - DNA, 20 bp, synthetic construct
  misc_feature 1..20: note = chemically synthesized
  source 1..20: mol_type = other DNA
gttatgtgtgcctctggatc

SEQ ID NO: 22784 - DNA, 20 bp, synthetic construct
  misc_feature 1..20: note = chemically synthesized
  source 1..20: mol_type = other DNA
ttatgtgtgcctctggatca

SEQ ID NO: 22785 - DNA, 20 bp, synthetic construct
  misc_feature 1..20: note = chemically synthesized
  source 1..20: mol_type = other DNA
tatgtgtgcctctggatcag

SEQ ID NO: 22786 - DNA, 20 bp, synthetic construct
  misc_feature 1..20: note = chemically synthesized
  source 1..20: mol_type = other DNA
gtgcctctggatcaggggta

SEQ ID NO: 22787 - DNA, 20 bp, synthetic construct
  misc_feature 1..20: note = chemically synthesized
  source 1..20: mol_type = other DNA
atcaggggtacagattcaca

SEQ ID NO: 22788 - DNA, 20 bp, synthetic construct
  misc_feature 1..20: note = chemically synthesized
  source 1..20: mol_type = other DNA
tcacatagcctgtgtgactt

SEQ ID NO: 22789 - DNA, 20 bp, synthetic construct
  misc_feature 1..20: note = chemically synthesized
  source 1..20: mol_type = other DNA
gcctgtgtgactttagcacc

SEQ ID NO: 22790 - DNA, 20 bp, synthetic construct
  misc_feature 1..20: note = chemically synthesized
  source 1..20: mol_type = other DNA
gtgtgactttagcacctgga

SEQ ID NO: 22791 - DNA, 20 bp, synthetic construct
  misc_feature 1..20: note = chemically synthesized
  source 1..20: mol_type = other DNA
tgtgactttagcacctggaa

SEQ ID NO: 22792 - DNA, 20 bp, synthetic construct
  misc_feature 1..20: note = chemically synthesized
  source 1..20: mol_type = other DNA
gaaaggtttatattgtgtaa

SEQ ID NO: 22793 - DNA, 20 bp, synthetic construct
  misc_feature 1..20: note = chemically synthesized
  source 1..20: mol_type = other DNA
aaaggtttatattgtgtaac

SEQ ID NO: 22794 - DNA, 20 bp, synthetic construct
  misc_feature 1..20: note = chemically synthesized
  source 1..20: mol_type = other DNA
ttcttttgcctgctttcttc

SEQ ID NO: 22795 - DNA, 20 bp, synthetic construct
  misc_feature 1..20: note = chemically synthesized
  source 1..20: mol_type = other DNA
ctgctttcttctagccgccc

SEQ ID NO: 22796 - DNA, 20 bp, synthetic construct
  misc_feature 1..20: note = chemically synthesized
  source 1..20: mol_type = other DNA
ctttcttctagccgccctgg

SEQ ID NO: 22797 - DNA, 20 bp, synthetic construct
  misc_feature 1..20: note = chemically synthesized
  source 1..20: mol_type = other DNA
tagccgccctggcagctgat

SEQ ID NO: 22798 - DNA, 20 bp, synthetic construct
  misc_feature 1..20: note = chemically synthesized
  source 1..20: mol_type = other DNA
cgccctggcagctgattaga

SEQ ID NO: 22799 - DNA, 20 bp, synthetic construct
  misc_feature 1..20: note = chemically synthesized
  source 1..20: mol_type = other DNA
ctgattagatagtacccacc

SEQ ID NO: 22800 - DNA, 20 bp, synthetic construct
  misc_feature 1..20: note = chemically synthesized
  source 1..20: mol_type = other DNA
ttagatagtacccacccaga

SEQ ID NO: 22801 - DNA, 20 bp, synthetic construct
  misc_feature 1..20: note = chemically synthesized
  source 1..20: mol_type = other DNA
agatagtacccacccagacg

SEQ ID NO: 22802 - DNA, 20 bp, synthetic construct
  misc_feature 1..20: note = chemically synthesized
  source 1..20: mol_type = other DNA
gatagtacccacccagacgg

SEQ ID NO: 22803 - DNA, 20 bp, synthetic construct
  misc_feature 1..20: note = chemically synthesized
  source 1..20: mol_type = other DNA
atagtacccacccagacgga

SEQ ID NO: 22804 - DNA, 20 bp, synthetic construct
  misc_feature 1..20: note = chemically synthesized
  source 1..20: mol_type = other DNA
gtacccacccagacggaggg

SEQ ID NO: 22805 - DNA, 20 bp, synthetic construct
  misc_feature 1..20: note = chemically synthesized
  source 1..20: mol_type = other DNA
tacccacccagacggagggt

SEQ ID NO: 22806 - DNA, 20 bp, synthetic construct
  misc_feature 1..20: note = chemically synthesized
  source 1..20: mol_type = other DNA
ccacccagacggagggtggg

SEQ ID NO: 22807 - DNA, 20 bp, synthetic construct
  misc_feature 1..20: note = chemically synthesized
  source 1..20: mol_type = other DNA
cacccagacggagggtgggt

SEQ ID NO: 22808 - DNA, 20 bp, synthetic construct
  misc_feature 1..20: note = chemically synthesized
  source 1..20: mol_type = other DNA
gtgggtgggtctgcctctcc

SEQ ID NO: 22809 - DNA, 20 bp, synthetic construct
  misc_feature 1..20: note = chemically synthesized
  source 1..20: mol_type = other DNA
actcaaatgttaatctcctt

SEQ ID NO: 22810 - DNA, 20 bp, synthetic construct
  misc_feature 1..20: note = chemically synthesized
  source 1..20: mol_type = other DNA
ctcctttggcaacaccctta

SEQ ID NO: 22811 - DNA, 20 bp, synthetic construct
  misc_feature 1..20: note = chemically synthesized
  source 1..20: mol_type = other DNA
caacacccttacagcacacc

SEQ ID NO: 22812 - DNA, 20 bp, synthetic construct
  misc_feature 1..20: note = chemically synthesized
  source 1..20: mol_type = other DNA
aacacccttacagcacaccc

SEQ ID NO: 22813 - DNA, 20 bp, synthetic construct
  misc_feature 1..20: note = chemically synthesized
  source 1..20: mol_type = other DNA
ttgcatccttcaatccaatc

SEQ ID NO: 22814 - DNA, 20 bp, synthetic construct
  misc_feature 1..20: note = chemically synthesized
  source 1..20: mol_type = other DNA
gcactcaatattaaccatca

SEQ ID NO: 22815 - DNA, 20 bp, synthetic construct
  misc_feature 1..20: note = chemically synthesized
  source 1..20: mol_type = other DNA
tcaatattaaccatcacaga

SEQ ID NO: 22816 - DNA, 20 bp, synthetic construct
  misc_feature 1..20: note = chemically synthesized
  source 1..20: mol_type = other DNA
caatattaaccatcacagaa

SEQ ID NO: 22817 - DNA, 20 bp, synthetic construct
  misc_feature 1..20: note = chemically synthesized
  source 1..20: mol_type = other DNA
aaccatcacagaaaggataa

SEQ ID NO: 22818 - DNA, 20 bp, synthetic construct
  misc_feature 1..20: note = chemically synthesized
  source 1..20: mol_type = other DNA
cacagaaaggataatagcca

SEQ ID NO: 22819 - DNA, 20 bp, synthetic construct
  misc_feature 1..20: note = chemically synthesized
  source 1..20: mol_type = other DNA
acagaaaggataatagccaa

SEQ ID NO: 22820 - DNA, 20 bp, synthetic construct
  misc_feature 1..20: note = chemically synthesized
  source 1..20: mol_type = other DNA
aaaggataatagccaaaggt

SEQ ID NO: 22821 - DNA, 20 bp, synthetic construct
  misc_feature 1..20: note = chemically synthesized
  source 1..20: mol_type = other DNA
aaggataatagccaaaggta

SEQ ID NO: 22822 - DNA, 20 bp, synthetic construct
  misc_feature 1..20: note = chemically synthesized
  source 1..20: mol_type = other DNA
aggataatagccaaaggtaa

SEQ ID NO: 22823 - DNA, 20 bp, synthetic construct
  misc_feature 1..20: note = chemically synthesized
  source 1..20: mol_type = other DNA
ggataatagccaaaggtaag

SEQ ID NO: 22824 - DNA, 20 bp, synthetic construct
  misc_feature 1..20: note = chemically synthesized
  source 1..20: mol_type = other DNA
gataatagccaaaggtaagg

SEQ ID NO: 22825 - DNA, 20 bp, synthetic construct
  misc_feature 1..20: note = chemically synthesized
  source 1..20: mol_type = other DNA
caaaggtaagggggtaaaaa

SEQ ID NO: 22826 - DNA, 20 bp, synthetic construct
  misc_feature 1..20: note = chemically synthesized
  source 1..20: mol_type = other DNA
aaaggtaagggggtaaaaaa

SEQ ID NO: 22827 - DNA, 20 bp, synthetic construct
  misc_feature 1..20: note = chemically synthesized
  source 1..20: mol_type = other DNA
gtaagggggtaaaaaaagga

SEQ ID NO: 22828 - DNA, 20 bp, synthetic construct
  misc_feature 1..20: note = chemically synthesized
  source 1..20: mol_type = other DNA
aagggggtaaaaaaaggatg

SEQ ID NO: 22829 - DNA, 20 bp, synthetic construct
  misc_feature 1..20: note = chemically synthesized
  source 1..20: mol_type = other DNA
aaaaaaaggatggagatact

SEQ ID NO: 22830 - DNA, 20 bp, synthetic construct
  misc_feature 1..20: note = chemically synthesized
  source 1..20: mol_type = other DNA
gatggagatactaagtgctt

SEQ ID NO: 22831 - DNA, 20 bp, synthetic construct
  misc_feature 1..20: note = chemically synthesized
  source 1..20: mol_type = other DNA
gagatactaagtgcttgaga

SEQ ID NO: 22832 - DNA, 20 bp, synthetic construct
  misc_feature 1..20: note = chemically synthesized
  source 1..20: mol_type = other DNA
actaagtgcttgagacagaa

SEQ ID NO: 22833 - DNA, 20 bp, synthetic construct
  misc_feature 1..20: note = chemically synthesized
  source 1..20: mol_type = other DNA
taagtgcttgagacagaaaa

SEQ ID NO: 22834 - DNA, 20 bp, synthetic construct
  misc_feature 1..20: note = chemically synthesized
  source 1..20: mol_type = other DNA
cttgagacagaaaagagtgt

SEQ ID NO: 22835 - DNA, 20 bp, synthetic construct
  misc_feature 1..20: note = chemically synthesized
  source 1..20: mol_type = other DNA
ttgagacagaaaagagtgtc

SEQ ID NO: 22836 - DNA, 20 bp, synthetic construct
  misc_feature 1..20: note = chemically synthesized
  source 1..20: mol_type = other DNA
acagaaaagagtgtcaggaa

SEQ ID NO: 22837 - DNA, 20 bp, synthetic construct
  misc_feature 1..20: note = chemically synthesized
  source 1..20: mol_type = other DNA
aaagagtgtcaggaaaagtg

SEQ ID NO: 22838 - DNA, 20 bp, synthetic construct
  misc_feature 1..20: note = chemically synthesized
  source 1..20: mol_type = other DNA
aagagtgtcaggaaaagtga

SEQ ID NO: 22839 - DNA, 20 bp, synthetic construct
  misc_feature 1..20: note = chemically synthesized
  source 1..20: mol_type = other DNA
tcaggaaaagtgaaggaaaa

SEQ ID NO: 22840 - DNA, 20 bp, synthetic construct
  misc_feature 1..20: note = chemically synthesized
  source 1..20: mol_type = other DNA
aaagtgaaggaaaaaagcca

SEQ ID NO: 22841 - DNA, 20 bp, synthetic construct
  misc_feature 1..20: note = chemically synthesized
  source 1..20: mol_type = other DNA
aagtgaaggaaaaaagccaa

SEQ ID NO: 22842 - DNA, 20 bp, synthetic construct
  misc_feature 1..20: note = chemically synthesized
  source 1..20: mol_type = other DNA
agtgaaggaaaaaagccaaa

SEQ ID NO: 22843 - DNA, 20 bp, synthetic construct
  misc_feature 1..20: note = chemically synthesized
  source 1..20: mol_type = other DNA
gaaggaaaaaagccaaaggg

SEQ ID NO: 22844 - DNA, 20 bp, synthetic construct
  misc_feature 1..20: note = chemically synthesized
  source 1..20: mol_type = other DNA
aaggaaaaaagccaaaggga

SEQ ID NO: 22845 - DNA, 20 bp, synthetic construct
  misc_feature 1..20: note = chemically synthesized
  source 1..20: mol_type = other DNA
aaaaaagccaaagggaaggt

SEQ ID NO: 22846 - DNA, 20 bp, synthetic construct
  misc_feature 1..20: note = chemically synthesized
  source 1..20: mol_type = other DNA
aaaagccaaagggaaggtga

SEQ ID NO: 22847 - DNA, 20 bp, synthetic construct
  misc_feature 1..20: note = chemically synthesized
  source 1..20: mol_type = other DNA
gaaggtgagagaatatatga

SEQ ID NO: 22848 - DNA, 20 bp, synthetic construct
  misc_feature 1..20: note = chemically synthesized
  source 1..20: mol_type = other DNA
tatgaaagttaacatctgaa

SEQ ID NO: 22849 - DNA, 20 bp, synthetic construct
  misc_feature 1..20: note = chemically synthesized
  source 1..20: mol_type = other DNA
atgaaagttaacatctgaat

SEQ ID NO: 22850 - DNA, 20 bp, synthetic construct
  misc_feature 1..20: note = chemically synthesized
  source 1..20: mol_type = other DNA
catctgaatgggctcctgct

SEQ ID NO: 22851 - DNA, 20 bp, synthetic construct
  misc_feature 1..20: note = chemically synthesized
  source 1..20: mol_type = other DNA
atctgaatgggctcctgctg

SEQ ID NO: 22852 - DNA, 20 bp, synthetic construct
  misc_feature 1..20: note = chemically synthesized
  source 1..20: mol_type = other DNA
ctcctgctgaggtgtctgca

SEQ ID NO: 22853 - DNA, 20 bp, synthetic construct
  misc_feature 1..20: note = chemically synthesized
  source 1..20: mol_type = other DNA
cctgctgaggtgtctgcata

SEQ ID NO: 22854 - DNA, 20 bp, synthetic construct
  misc_feature 1..20: note = chemically synthesized
  source 1..20: mol_type = other DNA
aggtgtctgcatagagccat

SEQ ID NO: 22855 - DNA, 20 bp, synthetic construct
  misc_feature 1..20: note = chemically synthesized
  source 1..20: mol_type = other DNA
catagagccatcagtttatg

SEQ ID NO: 22856 - DNA, 20 bp, synthetic construct
  misc_feature 1..20: note = chemically synthesized
  source 1..20: mol_type = other DNA
agagccatcagtttatgcgg

SEQ ID NO: 22857 - DNA, 20 bp, synthetic construct
  misc_feature 1..20: note = chemically synthesized
  source 1..20: mol_type = other DNA
agccatcagtttatgcggca

SEQ ID NO: 22858 - DNA, 20 bp, synthetic construct
  misc_feature 1..20: note = chemically synthesized
  source 1..20: mol_type = other DNA
cagtttatgcggcagagttt

SEQ ID NO: 22859 - DNA, 20 bp, synthetic construct
  misc_feature 1..20: note = chemically synthesized
  source 1..20: mol_type = other DNA
gcggcagagtttgagacttt

SEQ ID NO: 22860 - DNA, 20 bp, synthetic construct
  misc_feature 1..20: note = chemically synthesized
  source 1..20: mol_type = other DNA
gagtttgagactttgagaat

SEQ ID NO: 22861 - DNA, 20 bp, synthetic construct
  misc_feature 1..20: note = chemically synthesized
  source 1..20: mol_type = other DNA
tttctcattaataaaaactc

SEQ ID NO: 22862 - DNA, 20 bp, synthetic construct
  misc_feature 1..20: note = chemically synthesized
  source 1..20: mol_type = other DNA
aactcaagtctattctatga

SEQ ID NO: 22863 - DNA, 20 bp, synthetic construct
  misc_feature 1..20: note = chemically synthesized
  source 1..20: mol_type = other DNA
ctcaagtctattctatgaca

SEQ ID NO: 22864 - DNA, 20 bp, synthetic construct
  misc_feature 1..20: note = chemically synthesized
  source 1..20: mol_type = other DNA
ctattctatgacagagaccc

SEQ ID NO: 22865 - DNA, 20 bp, synthetic construct
  misc_feature 1..20: note = chemically synthesized
  source 1..20: mol_type = other DNA
ttctatgacagagaccctgg

SEQ ID NO: 22866 - DNA, 20 bp, synthetic construct
  misc_feature 1..20: note = chemically synthesized
  source 1..20: mol_type = other DNA
ctatgacagagaccctggaa

SEQ ID NO: 22867 - DNA, 20 bp, synthetic construct
  misc_feature 1..20: note = chemically synthesized
  source 1..20: mol_type = other DNA
tatgacagagaccctggaag

SEQ ID NO: 22868 - DNA, 20 bp, synthetic construct
  misc_feature 1..20: note = chemically synthesized
  source 1..20: mol_type = other DNA
atgacagagaccctggaaga

SEQ ID NO: 22869 - DNA, 20 bp, synthetic construct
  misc_feature 1..20: note = chemically synthesized
  source 1..20: mol_type = other DNA
agaccctggaagagggtgaa

SEQ ID NO: 22870 - DNA, 20 bp, synthetic construct
  misc_feature 1..20: note = chemically synthesized
  source 1..20: mol_type = other DNA
tggaagagggtgaatggctg

SEQ ID NO: 22871 - DNA, 20 bp, synthetic construct
  misc_feature 1..20: note = chemically synthesized
  source 1..20: mol_type = other DNA
ggaagagggtgaatggctgc

SEQ ID NO: 22872 - DNA, 20 bp, synthetic construct
  misc_feature 1..20: note = chemically synthesized
  source 1..20: mol_type = other DNA
gaagagggtgaatggctgca

SEQ ID NO: 22873 - DNA, 20 bp, synthetic construct
  misc_feature 1..20: note = chemically synthesized
  source 1..20: mol_type = other DNA
gggtgaatggctgcagggat

SEQ ID NO: 22874 - DNA, 20 bp, synthetic construct
  misc_feature 1..20: note = chemically synthesized
  source 1..20: mol_type = other DNA
ggtgaatggctgcagggatg

SEQ ID NO: 22875 - DNA, 20 bp, synthetic construct
  misc_feature 1..20: note = chemically synthesized
  source 1..20: mol_type = other DNA
atggctgcagggatgaggca

SEQ ID NO: 22876 - DNA, 20 bp, synthetic construct
  misc_feature 1..20: note = chemically synthesized
  source 1..20: mol_type = other DNA
tggctgcagggatgaggcaa

SEQ ID NO: 22877 - DNA, 20 bp, synthetic construct
  misc_feature 1..20: note = chemically synthesized
  source 1..20: mol_type = other DNA
cagggatgaggcaaaggttt

SEQ ID NO: 22878 - DNA, 20 bp, synthetic construct
  misc_feature 1..20: note = chemically synthesized
  source 1..20: mol_type = other DNA
tttatcccctctgaaactca

SEQ ID NO: 22879 - DNA, 20 bp, synthetic construct
  misc_feature 1..20: note = chemically synthesized
  source 1..20: mol_type = other DNA
gatcatctcatataccacaa

SEQ ID NO: 22880 - DNA, 20 bp, synthetic construct
  misc_feature 1..20: note = chemically synthesized
  source 1..20: mol_type = other DNA
catataccacaaaagcaact

SEQ ID NO: 22881 - DNA, 20 bp, synthetic construct
  misc_feature 1..20: note = chemically synthesized
  source 1..20: mol_type = other DNA
caaaagcaactgagtgaatc

SEQ ID NO: 22882 - DNA, 20 bp, synthetic construct
  misc_feature 1..20: note = chemically synthesized
  source 1..20: mol_type = other DNA
caactgagtgaatcaagtga

SEQ ID NO: 22883 - DNA, 20 bp, synthetic construct
  misc_feature 1..20: note = chemically synthesized
  source 1..20: mol_type = other DNA
gtgaatcaagtgaaagcact

SEQ ID NO: 22884 - DNA, 20 bp, synthetic construct
  misc_feature 1..20: note = chemically synthesized
  source 1..20: mol_type = other DNA
ctcagttttcaatatgaaaa

SEQ ID NO: 22885 - DNA, 20 bp, synthetic construct
  misc_feature 1..20: note = chemically synthesized
  source 1..20: mol_type = other DNA
ttttcaatatgaaaacagac

SEQ ID NO: 22886 - DNA, 20 bp, synthetic construct
  misc_feature 1..20: note = chemically synthesized
  source 1..20: mol_type = other DNA
atgaaaacagacaagacaaa

SEQ ID NO: 22887 - DNA, 20 bp, synthetic construct
  misc_feature 1..20: note = chemically synthesized
  source 1..20: mol_type = other DNA
acaagacaaacagctatttt

SEQ ID NO: 22888 - DNA, 20 bp, synthetic construct
  misc_feature 1..20: note = chemically synthesized
  source 1..20: mol_type = other DNA
caagacaaacagctatttta

SEQ ID NO: 22889 - DNA, 20 bp, synthetic construct
  misc_feature 1..20: note = chemically synthesized
  source 1..20: mol_type = other DNA
aaggattcttcccaaaaaat

SEQ ID NO: 22890 - DNA, 20 bp, synthetic construct
  misc_feature 1..20: note = chemically synthesized
  source 1..20: mol_type = other DNA
aggattcttcccaaaaaatg

SEQ ID NO: 22891 - DNA, 20 bp, synthetic construct
  misc_feature 1..20: note = chemically synthesized
  source 1..20: mol_type = other DNA
atgaggtgtatataatgccc

SEQ ID NO: 22892 - DNA, 20 bp, synthetic construct
  misc_feature 1..20: note = chemically synthesized
  source 1..20: mol_type = other DNA
ccagtccaatacttgacaca

SEQ ID NO: 22893 - DNA, 20 bp, synthetic construct
  misc_feature 1..20: note = chemically synthesized
  source 1..20: mol_type = other DNA
gtccaatacttgacacacgg

SEQ ID NO: 22894 - DNA, 20 bp, synthetic construct
  misc_feature 1..20: note = chemically synthesized
  source 1..20: mol_type = other DNA
tgttccatacatttgtttct

SEQ ID NO: 22895 - DNA, 20 bp, synthetic construct
  misc_feature 1..20: note = chemically synthesized
  source 1..20: mol_type = other DNA
tcagctttattttccctatc

SEQ ID NO: 22896 - DNA, 20 bp, synthetic construct
  misc_feature 1..20: note = chemically synthesized
  source 1..20: mol_type = other DNA
ttatcaattatatgtttatt

SEQ ID NO: 22897 - DNA, 20 bp, synthetic construct
  misc_feature 1..20: note = chemically synthesized
  source 1..20: mol_type = other DNA
tcaattatatgtttatttag

SEQ ID NO: 22898 - DNA, 20 bp, synthetic construct
  misc_feature 1..20: note = chemically synthesized
  source 1..20: mol_type = other DNA
agtaatataacacaattaac

SEQ ID NO: 22899 - DNA, 20 bp, synthetic construct
  misc_feature 1..20: note = chemically synthesized
  source 1..20: mol_type = other DNA
ctgtattatcttttccctcc

SEQ ID NO: 22900 - DNA, 20 bp, synthetic construct
  misc_feature 1..20: note = chemically synthesized
  source 1..20: mol_type = other DNA
ttttccctcccagctttatt

SEQ ID NO: 22901 - DNA, 20 bp, synthetic construct
  misc_feature 1..20: note = chemically synthesized
  source 1..20: mol_type = other DNA
tttccctcccagctttattt

SEQ ID NO: 22902 - DNA, 20 bp, synthetic construct
  misc_feature 1..20: note = chemically synthesized
  source 1..20: mol_type = other DNA
aggtatatttaaaatttgct

SEQ ID NO: 22903 - DNA, 20 bp, synthetic construct
  misc_feature 1..20: note = chemically synthesized
  source 1..20: mol_type = other DNA
atatttaaaatttgctaaga

SEQ ID NO: 22904 - DNA, 20 bp, synthetic construct
  misc_feature 1..20: note = chemically synthesized
  source 1..20: mol_type = other DNA
tttaaaatttgctaagaaag

SEQ ID NO: 22905 - DNA, 20 bp, synthetic construct
  misc_feature 1..20: note = chemically synthesized
  source 1..20: mol_type = other DNA
ttttactaccaaaaaaatta

SEQ ID NO: 22906 - DNA, 20 bp, synthetic construct
  misc_feature 1..20: note = chemically synthesized
  source 1..20: mol_type = other DNA
aaaaattaaagttattatgt

SEQ ID NO: 22907 - DNA, 20 bp, synthetic construct
  misc_feature 1..20: note = chemically synthesized
  source 1..20: mol_type = other DNA
aaaattaaagttattatgtg

SEQ ID NO: 22908 - DNA, 20 bp, synthetic construct
  misc_feature 1..20: note = chemically synthesized
  source 1..20: mol_type = other DNA
aaagttattatgtgaggtga

SEQ ID NO: 22909 - DNA, 20 bp, synthetic construct
  misc_feature 1..20: note = chemically synthesized
  source 1..20: mol_type = other DNA
gaggtgatagatatattaat

SEQ ID NO: 22910 - DNA, 20 bp, synthetic construct
  misc_feature 1..20: note = chemically synthesized
  source 1..20: mol_type = other DNA
tatattaattagtttgatta

SEQ ID NO: 22911 - DNA, 20 bp, synthetic construct
  misc_feature 1..20: note = chemically synthesized
  source 1..20: mol_type = other DNA
aatacctataataaaacaat

SEQ ID NO: 22912 - DNA, 20 bp, synthetic construct
  misc_feature 1..20: note = chemically synthesized
  source 1..20: mol_type = other DNA
ctgcttctttaatcctgcat

SEQ ID NO: 22913 - DNA, 20 bp, synthetic construct
  misc_feature 1..20: note = chemically synthesized
  source 1..20: mol_type = other DNA
tctttaatcctgcataagct

SEQ ID NO: 22914 - DNA, 20 bp, synthetic construct
  misc_feature 1..20: note = chemically synthesized
  source 1..20: mol_type = other DNA
gtattgtctgaacctctcac

SEQ ID NO: 22915 - DNA, 20 bp, synthetic construct
  misc_feature 1..20: note = chemically synthesized
  source 1..20: mol_type = other DNA
ttgtctgaacctctcactgg

SEQ ID NO: 22916 - DNA, 20 bp, synthetic construct
  misc_feature 1..20: note = chemically synthesized
  source 1..20: mol_type = other DNA
tgtctgaacctctcactggc

SEQ ID NO: 22917 - DNA, 20 bp, synthetic construct
  misc_feature 1..20: note = chemically synthesized
  source 1..20: mol_type = other DNA
ctgaacctctcactggcagg

SEQ ID NO: 22918 - DNA, 20 bp, synthetic construct
  misc_feature 1..20: note = chemically synthesized
  source 1..20: mol_type = other DNA
ctctcactggcaggcagatt

SEQ ID NO: 22919 - DNA, 20 bp, synthetic construct
  misc_feature 1..20: note = chemically synthesized
  source 1..20: mol_type = other DNA
acctccttttctcacttttt

SEQ ID NO: 22920 - DNA, 20 bp, synthetic construct
  misc_feature 1..20: note = chemically synthesized
  source 1..20: mol_type = other DNA
cctccttttctcactttttg

SEQ ID NO: 22921 - DNA, 20 bp, synthetic construct
  misc_feature 1..20: note = chemically synthesized
  source 1..20: mol_type = other DNA
cttttctcactttttgagga

SEQ ID NO: 22922 - DNA, 20 bp, synthetic construct
  misc_feature 1..20: note = chemically synthesized
  source 1..20: mol_type = other DNA
tttctcactttttgaggaca

SEQ ID NO: 22923 - DNA, 20 bp, synthetic construct
  misc_feature 1..20: note = chemically synthesized
  source 1..20: mol_type = other DNA
gctttcccctctacttccct

SEQ ID NO: 22924 - DNA, 20 bp, synthetic construct
  misc_feature 1..20: note = chemically synthesized
  source 1..20: mol_type = other DNA
ttccctcagtcccaatgccc

SEQ ID NO: 22925 - DNA, 20 bp, synthetic construct
  misc_feature 1..20: note = chemically synthesized
  source 1..20: mol_type = other DNA
tccctcagtcccaatgcccc

SEQ ID NO: 22926 - DNA, 20 bp, synthetic construct
  misc_feature 1..20: note = chemically synthesized
  source 1..20: mol_type = other DNA
cccaggctcaacgttacttt

SEQ ID NO: 22927 - DNA, 20 bp, synthetic construct
  misc_feature 1..20: note = chemically synthesized
  source 1..20: mol_type = other DNA
aacgttacttttagctatgt

SEQ ID NO: 22928 - DNA, 20 bp, synthetic construct
  misc_feature 1..20: note = chemically synthesized
  source 1..20: mol_type = other DNA
gttacttttagctatgtcag

SEQ ID NO: 22929 - DNA, 20 bp, synthetic construct
  misc_feature 1..20: note = chemically synthesized
  source 1..20: mol_type = other DNA
tatgtcagaagttcccacat

SEQ ID NO: 22930 - DNA, 20 bp, synthetic construct
  misc_feature 1..20: note = chemically synthesized
  source 1..20: mol_type = other DNA
tctcctttccctttcccacc

SEQ ID NO: 22931 - DNA, 20 bp, synthetic construct
  misc_feature 1..20: note = chemically synthesized
  source 1..20: mol_type = other DNA
atcacattttatctgctgat

SEQ ID NO: 22932 - DNA, 20 bp, synthetic construct
  misc_feature 1..20: note = chemically synthesized
  source 1..20: mol_type = other DNA
cacattttatctgctgatta

SEQ ID NO: 22933 - DNA, 20 bp, synthetic construct
  misc_feature 1..20: note = chemically synthesized
  source 1..20: mol_type = other DNA
tctgctgattagagaaacta

SEQ ID NO: 22934 - DNA, 20 bp, synthetic construct
  misc_feature 1..20: note = chemically synthesized
  source 1..20: mol_type = other DNA
tagtttaatatctttattta

SEQ ID NO: 22935 - DNA, 20 bp, synthetic construct
  misc_feature 1..20: note = chemically synthesized
  source 1..20: mol_type = other DNA
tctttatttaaagtcaaaca

SEQ ID NO: 22936 - DNA, 20 bp, synthetic construct
  misc_feature 1..20: note = chemically synthesized
  source 1..20: mol_type = other DNA
ctttatttaaagtcaaacac

SEQ ID NO: 22937 - DNA, 20 bp, synthetic construct
  misc_feature 1..20: note = chemically synthesized
  source 1..20: mol_type = other DNA
atcatcttatatctgttccc

SEQ ID NO: 22938 - DNA, 20 bp, synthetic construct
  misc_feature 1..20: note = chemically synthesized
  source 1..20: mol_type = other DNA
tcatcttatatctgttccca

SEQ ID NO: 22939 - DNA, 20 bp, synthetic construct
  misc_feature 1..20: note = chemically synthesized
  source 1..20: mol_type = other DNA
atctgttcccaaggcttcca

SEQ ID NO: 22940 - DNA, 20 bp, synthetic construct
  misc_feature 1..20: note = chemically synthesized
  source 1..20: mol_type = other DNA
ccaaggcttccacagaaaaa

SEQ ID NO: 22941 - DNA, 20 bp, synthetic construct
  misc_feature 1..20: note = chemically synthesized
  source 1..20: mol_type = other DNA
caaggcttccacagaaaaaa

SEQ ID NO: 22942 - DNA, 20 bp, synthetic construct
  misc_feature 1..20: note = chemically synthesized
  source 1..20: mol_type = other DNA
gaaatcatttgacacacctc

SEQ ID NO: 22943 - DNA, 20 bp, synthetic construct
  misc_feature 1..20: note = chemically synthesized
  source 1..20: mol_type = other DNA
aaatcatttgacacacctct

SEQ ID NO: 22944 - DNA, 20 bp, synthetic construct
  misc_feature 1..20: note = chemically synthesized
  source 1..20: mol_type = other DNA
taatcctgacatgtactcac

SEQ ID NO: 22945 - DNA, 20 bp, synthetic construct
  misc_feature 1..20: note = chemically synthesized
  source 1..20: mol_type = other DNA
atcctgacatgtactcacta

SEQ ID NO: 22946 - DNA, 20 bp, synthetic construct
  misc_feature 1..20: note = chemically synthesized
  source 1..20: mol_type = other DNA
tgacatgtactcactagaga

SEQ ID NO: 22947 - DNA, 20 bp, synthetic construct
  misc_feature 1..20: note = chemically synthesized
  source 1..20: mol_type = other DNA
acatgtactcactagagaaa

SEQ ID NO: 22948 - DNA, 20 bp, synthetic construct
  misc_feature 1..20: note = chemically synthesized
  source 1..20: mol_type = other DNA
gtactcactagagaaagaga

SEQ ID NO: 22949 - DNA, 20 bp, synthetic construct
  misc_feature 1..20: note = chemically synthesized
  source 1..20: mol_type = other DNA
tactcactagagaaagagaa

SEQ ID NO: 22950 - DNA, 20 bp, synthetic construct
  misc_feature 1..20: note = chemically synthesized
  source 1..20: mol_type = other DNA
ctcactagagaaagagaaag

SEQ ID NO: 22951 - DNA, 20 bp, synthetic construct
  misc_feature 1..20: note = chemically synthesized
  source 1..20: mol_type = other DNA
tcactagagaaagagaaagg

SEQ ID NO: 22952 - DNA, 20 bp, synthetic construct
  misc_feature 1..20: note = chemically synthesized
  source 1..20: mol_type = other DNA
atttccccttactttgtgtc

SEQ ID NO: 22953 - DNA, 20 bp, synthetic construct
  misc_feature 1..20: note = chemically synthesized
  source 1..20: mol_type = other DNA
ttccccttactttgtgtcaa

SEQ ID NO: 22954 - DNA, 20 bp, synthetic construct
  misc_feature 1..20: note = chemically synthesized
  source 1..20: mol_type = other DNA
tttgtgtcaagagaatgact

SEQ ID NO: 22955 - DNA, 20 bp, synthetic construct
  misc_feature 1..20: note = chemically synthesized
  source 1..20: mol_type = other DNA
gtgtcaagagaatgactgag

SEQ ID NO: 22956 - DNA, 20 bp, synthetic construct
  misc_feature 1..20: note = chemically synthesized
  source 1..20: mol_type = other DNA
caagagaatgactgagaaga

SEQ ID NO: 22957 - DNA, 20 bp, synthetic construct
  misc_feature 1..20: note = chemically synthesized
  source 1..20: mol_type = other DNA
actgagaagacagaaatcac

SEQ ID NO: 22958 - DNA, 20 bp, synthetic construct
  misc_feature 1..20: note = chemically synthesized
  source 1..20: mol_type = other DNA
gagaagacagaaatcactag

SEQ ID NO: 22959 - DNA, 20 bp, synthetic construct
  misc_feature 1..20: note = chemically synthesized
  source 1..20: mol_type = other DNA
gaaatcactagtagtcttta

SEQ ID NO: 22960 - DNA, 20 bp, synthetic construct
  misc_feature 1..20: note = chemically synthesized
  source 1..20: mol_type = other DNA
aaatcactagtagtctttac

SEQ ID NO: 22961 - DNA, 20 bp, synthetic construct
  misc_feature 1..20: note = chemically synthesized
  source 1..20: mol_type = other DNA
aggttatgtaaccaaatctc

SEQ ID NO: 22962 - DNA, 20 bp, synthetic construct
  misc_feature 1..20: note = chemically synthesized
  source 1..20: mol_type = other DNA
caagattaaattactttccc

SEQ ID NO: 22963 - DNA, 20 bp, synthetic construct
  misc_feature 1..20: note = chemically synthesized
  source 1..20: mol_type = other DNA
tttcccaagatcattattgt

SEQ ID NO: 22964 - DNA, 20 bp, synthetic construct
  misc_feature 1..20: note = chemically synthesized
  source 1..20: mol_type = other DNA
ccaagatcattattgttaga

SEQ ID NO: 22965 - DNA, 20 bp, synthetic construct
  misc_feature 1..20: note = chemically synthesized
  source 1..20: mol_type = other DNA
aagatcattattgttagaaa

SEQ ID NO: 22966 - DNA, 20 bp, synthetic construct
  misc_feature 1..20: note = chemically synthesized
  source 1..20: mol_type = other DNA
atcattattgttagaaagag

SEQ ID NO: 22967 - DNA, 20 bp, synthetic construct
  misc_feature 1..20: note = chemically synthesized
  source 1..20: mol_type = other DNA
cattattgttagaaagagca

SEQ ID NO: 22968 - DNA, 20 bp, synthetic construct
  misc_feature 1..20: note = chemically synthesized
  source 1..20: mol_type = other DNA
acaaattcttctgaaaatga

SEQ ID NO: 22969 - DNA, 20 bp, synthetic construct
  misc_feature 1..20: note = chemically synthesized
  source 1..20: mol_type = other DNA
ttcttctgaaaatgaaagtc

SEQ ID NO: 22970 - DNA, 20 bp, synthetic construct
  misc_feature 1..20: note = chemically synthesized
  source 1..20: mol_type = other DNA
aaatgaaagtccagtaatct

SEQ ID NO: 22971 - DNA, 20 bp, synthetic construct
  misc_feature 1..20: note = chemically synthesized
  source 1..20: mol_type = other DNA
tcttggatgcattcttttca

SEQ ID NO: 22972 - DNA, 20 bp, synthetic construct
  misc_feature 1..20: note = chemically synthesized
  source 1..20: mol_type = other DNA
ggatgcattcttttcatgga

SEQ ID NO: 22973 - DNA, 20 bp, synthetic construct
  misc_feature 1..20: note = chemically synthesized
  source 1..20: mol_type = other DNA
gcattcttttcatggacaga

SEQ ID NO: 22974 - DNA, 20 bp, synthetic construct
  misc_feature 1..20: note = chemically synthesized
  source 1..20: mol_type = other DNA
attcttttcatggacagaaa

SEQ ID NO: 22975 - DNA, 20 bp, synthetic construct
  misc_feature 1..20: note = chemically synthesized
  source 1..20: mol_type = other DNA
ttcttttcatggacagaaag

SEQ ID NO: 22976 - DNA, 20 bp, synthetic construct
  misc_feature 1..20: note = chemically synthesized
  source 1..20: mol_type = other DNA
acatcaatatgctctttcaa

SEQ ID NO: 22977 - DNA, 20 bp, synthetic construct
  misc_feature 1..20: note = chemically synthesized
  source 1..20: mol_type = other DNA
atgctctttcaatagtatat

SEQ ID NO: 22978 - DNA, 20 bp, synthetic construct
  misc_feature 1..20: note = chemically synthesized
  source 1..20: mol_type = other DNA
tcaatagtatatgagatgta

SEQ ID NO: 22979 - DNA, 20 bp, synthetic construct
  misc_feature 1..20: note = chemically synthesized
  source 1..20: mol_type = other DNA
gtatagtccaaaccaaccat

SEQ ID NO: 22980 - DNA, 20 bp, synthetic construct
  misc_feature 1..20: note = chemically synthesized
  source 1..20: mol_type = other DNA
atagtccaaaccaaccataa

SEQ ID NO: 22981 - DNA, 20 bp, synthetic construct
  misc_feature 1..20: note = chemically synthesized
  source 1..20: mol_type = other DNA
gtccaaaccaaccataagag

SEQ ID NO: 22982 - DNA, 20 bp, synthetic construct
  misc_feature 1..20: note = chemically synthesized
  source 1..20: mol_type = other DNA
tccaaaccaaccataagaga

SEQ ID NO: 22983 - DNA, 20 bp, synthetic construct
  misc_feature 1..20: note = chemically synthesized
  source 1..20: mol_type = other DNA
aaaccaaccataagagaagg

SEQ ID NO: 22984 - DNA, 20 bp, synthetic construct
  misc_feature 1..20: note = chemically synthesized
  source 1..20: mol_type = other DNA
aaccaaccataagagaaggt

SEQ ID NO: 22985 - DNA, 20 bp, synthetic construct
  misc_feature 1..20: note = chemically synthesized
  source 1..20: mol_type = other DNA
gaaggtgggcctattttctc

SEQ ID NO: 22986 - DNA, 20 bp, synthetic construct
  misc_feature 1..20: note = chemically synthesized
  source 1..20: mol_type = other DNA
acacacaatttatgtattct

SEQ ID NO: 22987 - DNA, 20 bp, synthetic construct
  misc_feature 1..20: note = chemically synthesized
  source 1..20: mol_type = other DNA
acacaatttatgtattctca

SEQ ID NO: 22988 - DNA, 20 bp, synthetic construct
  misc_feature 1..20: note = chemically synthesized
  source 1..20: mol_type = other DNA
cacaatttatgtattctcag

SEQ ID NO: 22989 - DNA, 20 bp, synthetic construct
  misc_feature 1..20: note = chemically synthesized
  source 1..20: mol_type = other DNA
atttatgtattctcagaggt

SEQ ID NO: 22990 - DNA, 20 bp, synthetic construct
  misc_feature 1..20: note = chemically synthesized
  source 1..20: mol_type = other DNA
cagaggttggctgcctgcac

SEQ ID NO: 22991 - DNA, 20 bp, synthetic construct
  misc_feature 1..20: note = chemically synthesized
  source 1..20: mol_type = other DNA
gcctgcaccagctgaaatct

SEQ ID NO: 22992 - DNA, 20 bp, synthetic construct
  misc_feature 1..20: note = chemically synthesized
  source 1..20: mol_type = other DNA
tgaaatcttagaattctaat

SEQ ID NO: 22993 - DNA, 20 bp, synthetic construct
  misc_feature 1..20: note = chemically synthesized
  source 1..20: mol_type = other DNA
cttagaattctaatgagtca

SEQ ID NO: 22994 - DNA, 20 bp, synthetic construct
  misc_feature 1..20: note = chemically synthesized
  source 1..20: mol_type = other DNA
tagaattctaatgagtcaca

SEQ ID NO: 22995 - DNA, 20 bp, synthetic construct
  misc_feature 1..20: note = chemically synthesized
  source 1..20: mol_type = other DNA
tcacttttgtcaaatcccat

SEQ ID NO: 22996 - DNA, 20 bp, synthetic construct
  misc_feature 1..20: note = chemically synthesized
  source 1..20: mol_type = other DNA
tcaaatcccatcagattcca

SEQ ID NO: 22997 - DNA, 20 bp, synthetic construct
  misc_feature 1..20: note = chemically synthesized
  source 1..20: mol_type = other DNA
atttttatttttgcatcacc

SEQ ID NO: 22998 - DNA, 20 bp, synthetic construct
  misc_feature 1..20: note = chemically synthesized
  source 1..20: mol_type = other DNA
tttatttttgcatcaccaag

SEQ ID NO: 22999 - DNA, 20 bp, synthetic construct
  misc_feature 1..20: note = chemically synthesized
  source 1..20: mol_type = other DNA
ttatttttgcatcaccaagt

SEQ ID NO: 23000 - DNA, 20 bp, synthetic construct
  misc_feature 1..20: note = chemically synthesized
  source 1..20: mol_type = other DNA
accaagtaggtgatatgcaa

SEQ ID NO: 23001 - DNA, 20 bp, synthetic construct
  misc_feature 1..20: note = chemically synthesized
  source 1..20: mol_type = other DNA
aagtaggtgatatgcaacag

SEQ ID NO: 23002 - DNA, 20 bp, synthetic construct
  misc_feature 1..20: note = chemically synthesized
  source 1..20: mol_type = other DNA
ggtgatatgcaacagtagtt

SEQ ID NO: 23003 - DNA, 20 bp, synthetic construct
  misc_feature 1..20: note = chemically synthesized
  source 1..20: mol_type = other DNA
agtttggtgctattatcaat

SEQ ID NO: 23004 - DNA, 20 bp, synthetic construct
  misc_feature 1..20: note = chemically synthesized
  source 1..20: mol_type = other DNA
ttatcaattagtgccttcaa

SEQ ID NO: 23005 - DNA, 20 bp, synthetic construct
  misc_feature 1..20: note = chemically synthesized
  source 1..20: mol_type = other DNA
atgaaaatttgaattctttg

SEQ ID NO: 23006 - DNA, 20 bp, synthetic construct
  misc_feature 1..20: note = chemically synthesized
  source 1..20: mol_type = other DNA
aaaatttgaattctttgaag

SEQ ID NO: 23007 - DNA, 20 bp, synthetic construct
  misc_feature 1..20: note = chemically synthesized
  source 1..20: mol_type = other DNA
tgaagcagtgtatcaataac

SEQ ID NO: 23008 - DNA, 20 bp, synthetic construct
  misc_feature 1..20: note = chemically synthesized
  source 1..20: mol_type = other DNA
gaagcagtgtatcaataact

SEQ ID NO: 23009 - DNA, 20 bp, synthetic construct
  misc_feature 1..20: note = chemically synthesized
  source 1..20: mol_type = other DNA
aagcagtgtatcaataacta

SEQ ID NO: 23010 - DNA, 20 bp, synthetic construct
  misc_feature 1..20: note = chemically synthesized
  source 1..20: mol_type = other DNA
tatcaataactagggttata

SEQ ID NO: 23011 - DNA, 20 bp, synthetic construct
  misc_feature 1..20: note = chemically synthesized
  source 1..20: mol_type = other DNA
aataactagggttataaagc

SEQ ID NO: 23012 - DNA, 20 bp, synthetic construct
  misc_feature 1..20: note = chemically synthesized
  source 1..20: mol_type = other DNA
ataactagggttataaagct

SEQ ID NO: 23013 - DNA, 20 bp, synthetic construct
  misc_feature 1..20: note = chemically synthesized
  source 1..20: mol_type = other DNA
ggttataaagctgggcaact

SEQ ID NO: 23014 - DNA, 20 bp, synthetic construct
  misc_feature 1..20: note = chemically synthesized
  source 1..20: mol_type = other DNA
ttataaagctgggcaactta

SEQ ID NO: 23015 - DNA, 20 bp, synthetic construct
  misc_feature 1..20: note = chemically synthesized
  source 1..20: mol_type = other DNA
acttagagttctatgtgctt

SEQ ID NO: 23016 - DNA, 20 bp, synthetic construct
  misc_feature 1..20: note = chemically synthesized
  source 1..20: mol_type = other DNA
atgtgctttggaaacacaca

SEQ ID NO: 23017 - DNA, 20 bp, synthetic construct
  misc_feature 1..20: note = chemically synthesized
  source 1..20: mol_type = other DNA
tgtgctttggaaacacacac

SEQ ID NO: 23018 - DNA, 20 bp, synthetic construct
  misc_feature 1..20: note = chemically synthesized
  source 1..20: mol_type = other DNA
ctttggaaacacacacaggt

SEQ ID NO: 23019 - DNA, 20 bp, synthetic construct
  misc_feature 1..20: note = chemically synthesized
  source 1..20: mol_type = other DNA
gtcattttctaactacccaa

SEQ ID NO: 23020 - DNA, 20 bp, synthetic construct
  misc_feature 1..20: note = chemically synthesized
  source 1..20: mol_type = other DNA
tctaactacccaaaagtctc

SEQ ID NO: 23021 - DNA, 20 bp, synthetic construct
  misc_feature 1..20: note = chemically synthesized
  source 1..20: mol_type = other DNA
taactacccaaaagtctctg

SEQ ID NO: 23022 - DNA, 20 bp, synthetic construct
  misc_feature 1..20: note = chemically synthesized
  source 1..20: mol_type = other DNA
catcaattgaattttccctc

SEQ ID NO: 23023 - DNA, 20 bp, synthetic construct
  misc_feature 1..20: note = chemically synthesized
  source 1..20: mol_type = other DNA
atcaattgaattttccctcc

SEQ ID NO: 23024 - DNA, 20 bp, synthetic construct
  misc_feature 1..20: note = chemically synthesized
  source 1..20: mol_type = other DNA
ttttccctccaggaatattg

SEQ ID NO: 23025 - DNA, 20 bp, synthetic construct
  misc_feature 1..20: note = chemically synthesized
  source 1..20: mol_type = other DNA
cctccaggaatattgaagaa

SEQ ID NO: 23026 - DNA, 20 bp, synthetic construct
  misc_feature 1..20: note = chemically synthesized
  source 1..20: mol_type = other DNA
ctttatatctgcttttccaa

SEQ ID NO: 23027 - DNA, 20 bp, synthetic construct
  misc_feature 1..20: note = chemically synthesized
  source 1..20: mol_type = other DNA
tctgcttttccaatagtgct

SEQ ID NO: 23028 - DNA, 20 bp, synthetic construct
  misc_feature 1..20: note = chemically synthesized
  source 1..20: mol_type = other DNA
ccatttttctactgatcttt

SEQ ID NO: 23029 - DNA, 20 bp, synthetic construct
  misc_feature 1..20: note = chemically synthesized
  source 1..20: mol_type = other DNA
catttttctactgatctttt

SEQ ID NO: 23030 - DNA, 20 bp, synthetic construct
  misc_feature 1..20: note = chemically synthesized
  source 1..20: mol_type = other DNA
ctgatcttttaggtctcaca

SEQ ID NO: 23031 - DNA, 20 bp, synthetic construct
  misc_feature 1..20: note = chemically synthesized
  source 1..20: mol_type = other DNA
cttttaggtctcacatagcc

SEQ ID NO: 23032 - DNA, 20 bp, synthetic construct
  misc_feature 1..20: note = chemically synthesized
  source 1..20: mol_type = other DNA
ttttaggtctcacatagcct

SEQ ID NO: 23033 - DNA, 20 bp, synthetic construct
  misc_feature 1..20: note = chemically synthesized
  source 1..20: mol_type = other DNA
catccaccctataataccac

SEQ ID NO: 23034 - DNA, 20 bp, synthetic construct
  misc_feature 1..20: note = chemically synthesized
  source 1..20: mol_type = other DNA
caccctataataccaccagt

SEQ ID NO: 23035 - DNA, 20 bp, synthetic construct
  misc_feature 1..20: note = chemically synthesized
  source 1..20: mol_type = other DNA
accctataataccaccagtc

SEQ ID NO: 23036 - DNA, 20 bp, synthetic construct
  misc_feature 1..20: note = chemically synthesized
  source 1..20: mol_type = other DNA
taataccaccagtcaggatg

SEQ ID NO: 23037 - DNA, 20 bp, synthetic construct
  misc_feature 1..20: note = chemically synthesized
  source 1..20: mol_type = other DNA
ataccaccagtcaggatgaa

SEQ ID NO: 23038 - DNA, 20 bp, synthetic construct
  misc_feature 1..20: note = chemically synthesized
  source 1..20: mol_type = other DNA
aggatgaagagcaccatgaa

SEQ ID NO: 23039 - DNA, 20 bp, synthetic construct
  misc_feature 1..20: note = chemically synthesized
  source 1..20: mol_type = other DNA
caccatgaaaagtgacctat

SEQ ID NO: 23040 - DNA, 20 bp, synthetic construct
  misc_feature 1..20: note = chemically synthesized
  source 1..20: mol_type = other DNA
gaaaagtgacctataagttt

SEQ ID NO: 23041 - DNA, 20 bp, synthetic construct
  misc_feature 1..20: note = chemically synthesized
  source 1..20: mol_type = other DNA
aaaagtgacctataagtttc

SEQ ID NO: 23042 - DNA, 20 bp, synthetic construct
  misc_feature 1..20: note = chemically synthesized
  source 1..20: mol_type = other DNA
ctataagtttcaggccatta

SEQ ID NO: 23043 - DNA, 20 bp, synthetic construct
  misc_feature 1..20: note = chemically synthesized
  source 1..20: mol_type = other DNA
attacagcactattcaaata

SEQ ID NO: 23044 - DNA, 20 bp, synthetic construct
  misc_feature 1..20: note = chemically synthesized
  source 1..20: mol_type = other DNA
ttcattttgtttttattttc

SEQ ID NO: 23045 - DNA, 20 bp, synthetic construct
  misc_feature 1..20: note = chemically synthesized
  source 1..20: mol_type = other DNA
tcattttgtttttattttct

SEQ ID NO: 23046 - DNA, 20 bp, synthetic construct
  misc_feature 1..20: note = chemically synthesized
  source 1..20: mol_type = other DNA
caatgtttattctgcatgaa

SEQ ID NO: 23047 - DNA, 20 bp, synthetic construct
  misc_feature 1..20: note = chemically synthesized
  source 1..20: mol_type = other DNA
gaatagctgtatccccaacg

SEQ ID NO: 23048 - DNA, 20 bp, synthetic construct
  misc_feature 1..20: note = chemically synthesized
  source 1..20: mol_type = other DNA
tagtatccaataatcttaca

SEQ ID NO: 23049 - DNA, 20 bp, synthetic construct
  misc_feature 1..20: note = chemically synthesized
  source 1..20: mol_type = other DNA
gtatccaataatcttacata

SEQ ID NO: 23050 - DNA, 20 bp, synthetic construct
  misc_feature 1..20: note = chemically synthesized
  source 1..20: mol_type = other DNA
acattctattttcccatacc

SEQ ID NO: 23051 - DNA, 20 bp, synthetic construct
  misc_feature 1..20: note = chemically synthesized
  source 1..20: mol_type = other DNA
cattctattttcccatacct

SEQ ID NO: 23052 - DNA, 20 bp, synthetic construct
  misc_feature 1..20: note = chemically synthesized
  source 1..20: mol_type = other DNA
ttcccatacctaggatctcc

SEQ ID NO: 23053 - DNA, 20 bp, synthetic construct
  misc_feature 1..20: note = chemically synthesized
  source 1..20: mol_type = other DNA
tcccatacctaggatctccc

SEQ ID NO: 23054 - DNA, 20 bp, synthetic construct
  misc_feature 1..20: note = chemically synthesized
  source 1..20: mol_type = other DNA
atcatccttgctgtcactga

SEQ ID NO: 23055 - DNA, 20 bp, synthetic construct
  misc_feature 1..20: note = chemically synthesized
  source 1..20: mol_type = other DNA
tccttgctgtcactgaaagt

SEQ ID NO: 23056 - DNA, 20 bp, synthetic construct
  misc_feature 1..20: note = chemically synthesized
  source 1..20: mol_type = other DNA
ccttgctgtcactgaaagtc

SEQ ID NO: 23057 - DNA, 20 bp, synthetic construct
  misc_feature 1..20: note = chemically synthesized
  source 1..20: mol_type = other DNA
ctgtcactgaaagtcaggac

SEQ ID NO: 23058 - DNA, 20 bp, synthetic construct
  misc_feature 1..20: note = chemically synthesized
  source 1..20: mol_type = other DNA
actggtgaacatcttatgaa

SEQ ID NO: 23059 - DNA, 20 bp, synthetic construct
  misc_feature 1..20: note = chemically synthesized
  source 1..20: mol_type = other DNA
ctggtgaacatcttatgaac

SEQ ID NO: 23060 - DNA, 20 bp, synthetic construct
  misc_feature 1..20: note = chemically synthesized
  source 1..20: mol_type = other DNA
gtgaacatcttatgaacagg

SEQ ID NO: 23061 - DNA, 20 bp, synthetic construct
  misc_feature 1..20: note = chemically synthesized
  source 1..20: mol_type = other DNA
tatgaacaggtagaattctc

SEQ ID NO: 23062 - DNA, 20 bp, synthetic construct
  misc_feature 1..20: note = chemically synthesized
  source 1..20: mol_type = other DNA
atgaacaggtagaattctca

SEQ ID NO: 23063 - DNA, 20 bp, synthetic construct
  misc_feature 1..20: note = chemically synthesized
  source 1..20: mol_type = other DNA
gaacaggtagaattctcaag

SEQ ID NO: 23064 - DNA, 20 bp, synthetic construct
  misc_feature 1..20: note = chemically synthesized
  source 1..20: mol_type = other DNA
ctgattactattgctttacc

SEQ ID NO: 23065 - DNA, 20 bp, synthetic construct
  misc_feature 1..20: note = chemically synthesized
  source 1..20: mol_type = other DNA
gattactattgctttacctg

SEQ ID NO: 23066 - DNA, 20 bp, synthetic construct
  misc_feature 1..20: note = chemically synthesized
  source 1..20: mol_type = other DNA
taaatatttgcctctttgca

SEQ ID NO: 23067 - DNA, 20 bp, synthetic construct
  misc_feature 1..20: note = chemically synthesized
  source 1..20: mol_type = other DNA
tatttgcctctttgcaaagc

SEQ ID NO: 23068 - DNA, 20 bp, synthetic construct
  misc_feature 1..20: note = chemically synthesized
  source 1..20: mol_type = other DNA
cctctttgcaaagctggcaa

SEQ ID NO: 23069 - DNA, 20 bp, synthetic construct
  misc_feature 1..20: note = chemically synthesized
  source 1..20: mol_type = other DNA
ctctttgcaaagctggcaat

SEQ ID NO: 23070 - DNA, 20 bp, synthetic construct
  misc_feature 1..20: note = chemically synthesized
  source 1..20: mol_type = other DNA
tctttgcaaagctggcaatg

SEQ ID NO: 23071 - DNA, 20 bp, synthetic construct
  misc_feature 1..20: note = chemically synthesized
  source 1..20: mol_type = other DNA
agctggcaatggggctcaat

SEQ ID NO: 23072 - DNA, 20 bp, synthetic construct
  misc_feature 1..20: note = chemically synthesized
  source 1..20: mol_type = other DNA
ataagtctgcttccaccttc

SEQ ID NO: 23073 - DNA, 20 bp, synthetic construct
  misc_feature 1..20: note = chemically synthesized
  source 1..20: mol_type = other DNA
gcttccaccttccagcttac

SEQ ID NO: 23074 - DNA, 20 bp, synthetic construct
  misc_feature 1..20: note = chemically synthesized
  source 1..20: mol_type = other DNA
cttccagcttactggcttcc

SEQ ID NO: 23075 - DNA, 20 bp, synthetic construct
  misc_feature 1..20: note = chemically synthesized
  source 1..20: mol_type = other DNA
ttccagcttactggcttccc

SEQ ID NO: 23076 - DNA, 20 bp, synthetic construct
  misc_feature 1..20: note = chemically synthesized
  source 1..20: mol_type = other DNA
gcttactggcttcccaggca

SEQ ID NO: 23077 - DNA, 20 bp, synthetic construct
  misc_feature 1..20: note = chemically synthesized
  source 1..20: mol_type = other DNA
ttactggcttcccaggcatg

SEQ ID NO: 23078 - DNA, 20 bp, synthetic construct
  misc_feature 1..20: note = chemically synthesized
  source 1..20: mol_type = other DNA
ctggcttcccaggcatggag

SEQ ID NO: 23079 - DNA, 20 bp, synthetic construct
  misc_feature 1..20: note = chemically synthesized
  source 1..20: mol_type = other DNA
tggcttcccaggcatggaga

SEQ ID NO: 23080 - DNA, 20 bp, synthetic construct
  misc_feature 1..20: note = chemically synthesized
  source 1..20: mol_type = other DNA
gcatggagaaggcacatcac

SEQ ID NO: 23081 - DNA, 20 bp, synthetic construct
  misc_feature 1..20: note = chemically synthesized
  source 1..20: mol_type = other DNA
ctggatattcatcccattat

SEQ ID NO: 23082 - DNA, 20 bp, synthetic construct
  misc_feature 1..20: note = chemically synthesized
  source 1..20: mol_type = other DNA
gatattcatcccattattgg

SEQ ID NO: 23083 - DNA, 20 bp, synthetic construct
  misc_feature 1..20: note = chemically synthesized
  source 1..20: mol_type = other DNA
gcctacatctccatacttct

SEQ ID NO: 23084 - DNA, 20 bp, synthetic construct
  misc_feature 1..20: note = chemically synthesized
  source 1..20: mol_type = other DNA
atctccatacttcttggcaa

SEQ ID NO: 23085 - DNA, 20 bp, synthetic construct
  misc_feature 1..20: note = chemically synthesized
  source 1..20: mol_type = other DNA
ggcactcttctctttctcat

SEQ ID NO: 23086 - DNA, 20 bp, synthetic construct
  misc_feature 1..20: note = chemically synthesized
  source 1..20: mol_type = other DNA
gcactcttctctttctcatc

SEQ ID NO: 23087 - DNA, 20 bp, synthetic construct
  misc_feature 1..20: note = chemically synthesized
  source 1..20: mol_type = other DNA
ggaatgatcataacctccat

SEQ ID NO: 23088 - DNA, 20 bp, synthetic construct
  misc_feature 1..20: note = chemically synthesized
  source 1..20: mol_type = other DNA
tgagcccatgtactatttct

SEQ ID NO: 23089 - DNA, 20 bp, synthetic construct
  misc_feature 1..20: note = chemically synthesized
  source 1..20: mol_type = other DNA
gtactatttcttagctatgt

SEQ ID NO: 23090 - DNA, 20 bp, synthetic construct
  misc_feature 1..20: note = chemically synthesized
  source 1..20: mol_type = other DNA
ctatttcttagctatgttgg

SEQ ID NO: 23091 - DNA, 20 bp, synthetic construct
  misc_feature 1..20: note = chemically synthesized
  source 1..20: mol_type = other DNA
cttagctatgttggcagcta

SEQ ID NO: 23092 - DNA, 20 bp, synthetic construct
  misc_feature 1..20: note = chemically synthesized
  source 1..20: mol_type = other DNA
atgttggcagctacagacct

SEQ ID NO: 23093 - DNA, 20 bp, synthetic construct
  misc_feature 1..20: note = chemically synthesized
  source 1..20: mol_type = other DNA
gttggcagctacagacctcg

SEQ ID NO: 23094 - DNA, 20 bp, synthetic construct
  misc_feature 1..20: note = chemically synthesized
  source 1..20: mol_type = other DNA
gacattgaccacaatgccca

SEQ ID NO: 23095 - DNA, 20 bp, synthetic construct
  misc_feature 1..20: note = chemically synthesized
  source 1..20: mol_type = other DNA
gaccacaatgcccacagtgc

SEQ ID NO: 23096 - DNA, 20 bp, synthetic construct
  misc_feature 1..20: note = chemically synthesized
  source 1..20: mol_type = other DNA
accacaatgcccacagtgct

SEQ ID NO: 23097 - DNA, 20 bp, synthetic construct
  misc_feature 1..20: note = chemically synthesized
  source 1..20: mol_type = other DNA
ccacagtgctaggtgttctg

SEQ ID NO: 23098 - DNA, 20 bp, synthetic construct
  misc_feature 1..20: note = chemically synthesized
  source 1..20: mol_type = other DNA
agtgctaggtgttctgtggt

SEQ ID NO: 23099 - DNA, 20 bp, synthetic construct
  misc_feature 1..20: note = chemically synthesized
  source 1..20: mol_type = other DNA
ggtgttctgtggttagatca

SEQ ID NO: 23100 - DNA, 20 bp, synthetic construct
  misc_feature 1..20: note = chemically synthesized
  source 1..20: mol_type = other DNA
gtgttctgtggttagatcac

SEQ ID NO: 23101 - DNA, 20 bp, synthetic construct
  misc_feature 1..20: note = chemically synthesized
  source 1..20: mol_type = other DNA
tgttctgtggttagatcaca

SEQ ID NO: 23102 - DNA, 20 bp, synthetic construct
  misc_feature 1..20: note = chemically synthesized
  source 1..20: mol_type = other DNA
ttctgtggttagatcacagg

SEQ ID NO: 23103 - DNA, 20 bp, synthetic construct
  misc_feature 1..20: note = chemically synthesized
  source 1..20: mol_type = other DNA
tggttagatcacagggagat

SEQ ID NO: 23104 - DNA, 20 bp, synthetic construct
  misc_feature 1..20: note = chemically synthesized
  source 1..20: mol_type = other DNA
gatcacagggagattggcca

SEQ ID NO: 23105 - DNA, 20 bp, synthetic construct
  misc_feature 1..20: note = chemically synthesized
  source 1..20: mol_type = other DNA
tcacagggagattggccatg

SEQ ID NO: 23106 - DNA, 20 bp, synthetic construct
  misc_feature 1..20: note = chemically synthesized
  source 1..20: mol_type = other DNA
gccatggagcctgcttctct

SEQ ID NO: 23107 - DNA, 20 bp, synthetic construct
  misc_feature 1..20: note = chemically synthesized
  source 1..20: mol_type = other DNA
ccatggagcctgcttctctc

SEQ ID NO: 23108 - DNA, 20 bp, synthetic construct
  misc_feature 1..20: note = chemically synthesized
  source 1..20: mol_type = other DNA
tatccatactctttctgtca

SEQ ID NO: 23109 - DNA, 20 bp, synthetic construct
  misc_feature 1..20: note = chemically synthesized
  source 1..20: mol_type = other DNA
tccatactctttctgtcatg

SEQ ID NO: 23110 - DNA, 20 bp, synthetic construct
  misc_feature 1..20: note = chemically synthesized
  source 1..20: mol_type = other DNA
tactctttctgtcatggagt

SEQ ID NO: 23111 - DNA, 20 bp, synthetic construct
  misc_feature 1..20: note = chemically synthesized
  source 1..20: mol_type = other DNA
actctttctgtcatggagtc

SEQ ID NO: 23112 - DNA, 20 bp, synthetic construct
  misc_feature 1..20: note = chemically synthesized
  source 1..20: mol_type = other DNA
gtcaggtgtcttgcttgcca

SEQ ID NO: 23113 - DNA, 20 bp, synthetic construct
  misc_feature 1..20: note = chemically synthesized
  source 1..20: mol_type = other DNA
gactgtttcattaccatccg

SEQ ID NO: 23114 - DNA, 20 bp, synthetic construct
  misc_feature 1..20: note = chemically synthesized
  source 1..20: mol_type = other DNA
attaccatccgcagcccctt

SEQ ID NO: 23115 - DNA, 20 bp, synthetic construct
  misc_feature 1..20: note = chemically synthesized
  source 1..20: mol_type = other DNA
cctctatcctgaccaacacc

SEQ ID NO: 23116 - DNA, 20 bp, synthetic construct
  misc_feature 1..20: note = chemically synthesized
  source 1..20: mol_type = other DNA
ctctatcctgaccaacaccc

SEQ ID NO: 23117 - DNA, 20 bp, synthetic construct
  misc_feature 1..20: note = chemically synthesized
  source 1..20: mol_type = other DNA
tgaccaacacccaggtaatg

SEQ ID NO: 23118 - DNA, 20 bp, synthetic construct
  misc_feature 1..20: note = chemically synthesized
  source 1..20: mol_type = other DNA
aacacccaggtaatgaagat

SEQ ID NO: 23119 - DNA, 20 bp, synthetic construct
  misc_feature 1..20: note = chemically synthesized
  source 1..20: mol_type = other DNA
aggtaatgaagattggtgtg

SEQ ID NO: 23120 - DNA, 20 bp, synthetic construct
  misc_feature 1..20: note = chemically synthesized
  source 1..20: mol_type = other DNA
ggtaatgaagattggtgtgc

SEQ ID NO: 23121 - DNA, 20 bp, synthetic construct
  misc_feature 1..20: note = chemically synthesized
  source 1..20: mol_type = other DNA
attggtgtgcgggtattgac

SEQ ID NO: 23122 - DNA, 20 bp, synthetic construct
  misc_feature 1..20: note = chemically synthesized
  source 1..20: mol_type = other DNA
ttggtgtgcgggtattgaca

SEQ ID NO: 23123 - DNA, 20 bp, synthetic construct
  misc_feature 1..20: note = chemically synthesized
  source 1..20: mol_type = other DNA
tggtgtgcgggtattgacaa

SEQ ID NO: 23124 - DNA, 20 bp, synthetic construct
  misc_feature 1..20: note = chemically synthesized
  source 1..20: mol_type = other DNA
gtgcgggtattgacaagggc

SEQ ID NO: 23125 - DNA, 20 bp, synthetic construct
  misc_feature 1..20: note = chemically synthesized
  source 1..20: mol_type = other DNA
tggtctgtccattatgccaa

SEQ ID NO: 23126 - DNA, 20 bp, synthetic construct
  misc_feature 1..20: note = chemically synthesized
  source 1..20: mol_type = other DNA
caatagttgttcgcctacac

SEQ ID NO: 23127 - DNA, 20 bp, synthetic construct
  misc_feature 1..20: note = chemically synthesized
  source 1..20: mol_type = other DNA
ccatgctttctgtctacacc

SEQ ID NO: 23128 - DNA, 20 bp, synthetic construct
  misc_feature 1..20: note = chemically synthesized
  source 1..20: mol_type = other DNA
gtctacaccaagatgtcatc

SEQ ID NO: 23129 - DNA, 20 bp, synthetic construct
  misc_feature 1..20: note = chemically synthesized
  source 1..20: mol_type = other DNA
acaccaagatgtcatcaagc

SEQ ID NO: 23130 - DNA, 20 bp, synthetic construct
  misc_feature 1..20: note = chemically synthesized
  source 1..20: mol_type = other DNA
caccttcaaccgtctctatc

SEQ ID NO: 23131 - DNA, 20 bp, synthetic construct
  misc_feature 1..20: note = chemically synthesized
  source 1..20: mol_type = other DNA
caaccgtctctatccagttg

SEQ ID NO: 23132 - DNA, 20 bp, synthetic construct
  misc_feature 1..20: note = chemically synthesized
  source 1..20: mol_type = other DNA
agttgtagttttatttgcaa

SEQ ID NO: 23133 - DNA, 20 bp, synthetic construct
  misc_feature 1..20: note = chemically synthesized
  source 1..20: mol_type = other DNA
tttatttgcaatggtcttgt

SEQ ID NO: 23134 - DNA, 20 bp, synthetic construct
  misc_feature 1..20: note = chemically synthesized
  source 1..20: mol_type = other DNA
tctcctacattttgattctc

SEQ ID NO: 23135 - DNA, 20 bp, synthetic construct
  misc_feature 1..20: note = chemically synthesized
  source 1..20: mol_type = other DNA
tttgattctcaagactgtca

SEQ ID NO: 23136 - DNA, 20 bp, synthetic construct
  misc_feature 1..20: note = chemically synthesized
  source 1..20: mol_type = other DNA
ttgattctcaagactgtcat

SEQ ID NO: 23137 - DNA, 20 bp, synthetic construct
  misc_feature 1..20: note = chemically synthesized
  source 1..20: mol_type = other DNA
ctcaagactgtcatgggcat

SEQ ID NO: 23138 - DNA, 20 bp, synthetic construct
  misc_feature 1..20: note = chemically synthesized
  source 1..20: mol_type = other DNA
actgtcatgggcattggttc

SEQ ID NO: 23139 - DNA, 20 bp, synthetic construct
  misc_feature 1..20: note = chemically synthesized
  source 1..20: mol_type = other DNA
tgtcatgggcattggttctg

SEQ ID NO: 23140 - DNA, 20 bp, synthetic construct
  misc_feature 1..20: note = chemically synthesized
  source 1..20: mol_type = other DNA
gtcatgggcattggttctgg

SEQ ID NO: 23141 - DNA, 20 bp, synthetic construct
  misc_feature 1..20: note = chemically synthesized
  source 1..20: mol_type = other DNA
catgggcattggttctggag

SEQ ID NO: 23142 - DNA, 20 bp, synthetic construct
  misc_feature 1..20: note = chemically synthesized
  source 1..20: mol_type = other DNA
ggcattggttctggaggaga

SEQ ID NO: 23143 - DNA, 20 bp, synthetic construct
  misc_feature 1..20: note = chemically synthesized
  source 1..20: mol_type = other DNA
gcattggttctggaggagaa

SEQ ID NO: 23144 - DNA, 20 bp, synthetic construct
  misc_feature 1..20: note = chemically synthesized
  source 1..20: mol_type = other DNA
cattggttctggaggagaaa

SEQ ID NO: 23145 - DNA, 20 bp, synthetic construct
  misc_feature 1..20: note = chemically synthesized
  source 1..20: mol_type = other DNA
gttctggaggagaaagggcc

SEQ ID NO: 23146 - DNA, 20 bp, synthetic construct
  misc_feature 1..20: note = chemically synthesized
  source 1..20: mol_type = other DNA
ttctggaggagaaagggcca

SEQ ID NO: 23147 - DNA, 20 bp, synthetic construct
  misc_feature 1..20: note = chemically synthesized
  source 1..20: mol_type = other DNA
ctctcatatctgctgcatcc

SEQ ID NO: 23148 - DNA, 20 bp, synthetic construct
  misc_feature 1..20: note = chemically synthesized
  source 1..20: mol_type = other DNA
cctggtcttctatgtcactg

SEQ ID NO: 23149 - DNA, 20 bp, synthetic construct
  misc_feature 1..20: note = chemically synthesized
  source 1..20: mol_type = other DNA
gtttgtctgacatttattca

SEQ ID NO: 23150 - DNA, 20 bp, synthetic construct
  misc_feature 1..20: note = chemically synthesized
  source 1..20: mol_type = other DNA
tttgtctgacatttattcat

SEQ ID NO: 23151 - DNA, 20 bp, synthetic construct
  misc_feature 1..20: note = chemically synthesized
  source 1..20: mol_type = other DNA
ctgacatttattcataggtt

SEQ ID NO: 23152 - DNA, 20 bp, synthetic construct
  misc_feature 1..20: note = chemically synthesized
  source 1..20: mol_type = other DNA
catttattcataggtttgga

SEQ ID NO: 23153 - DNA, 20 bp, synthetic construct
  misc_feature 1..20: note = chemically synthesized
  source 1..20: mol_type = other DNA
catgtcgttcacatcacaat

SEQ ID NO: 23154 - DNA, 20 bp, synthetic construct
  misc_feature 1..20: note = chemically synthesized
  source 1..20: mol_type = other DNA
tttatgaacccatttatcta

SEQ ID NO: 23155 - DNA, 20 bp, synthetic construct
  misc_feature 1..20: note = chemically synthesized
  source 1..20: mol_type = other DNA
ttatctatagcattaaaact

SEQ ID NO: 23156 - DNA, 20 bp, synthetic construct
  misc_feature 1..20: note = chemically synthesized
  source 1..20: mol_type = other DNA
tctatagcattaaaactaag

SEQ ID NO: 23157 - DNA, 20 bp, synthetic construct
  misc_feature 1..20: note = chemically synthesized
  source 1..20: mol_type = other DNA
gcattaaaactaagcagatt

SEQ ID NO: 23158 - DNA, 20 bp, synthetic construct
  misc_feature 1..20: note = chemically synthesized
  source 1..20: mol_type = other DNA
attaaaactaagcagattca

SEQ ID NO: 23159 - DNA, 20 bp, synthetic construct
  misc_feature 1..20: note = chemically synthesized
  source 1..20: mol_type = other DNA
aaaactaagcagattcagag

SEQ ID NO: 23160 - DNA, 20 bp, synthetic construct
  misc_feature 1..20: note = chemically synthesized
  source 1..20: mol_type = other DNA
ttattctctctgcctcactc

SEQ ID NO: 23161 - DNA, 20 bp, synthetic construct
  misc_feature 1..20: note = chemically synthesized
  source 1..20: mol_type = other DNA
attctctctgcctcactcta

SEQ ID NO: 23162 - DNA, 20 bp, synthetic construct
  misc_feature 1..20: note = chemically synthesized
  source 1..20: mol_type = other DNA
agagcatgacattgtttcac

SEQ ID NO: 23163 - DNA, 20 bp, synthetic construct
  misc_feature 1..20: note = chemically synthesized
  source 1..20: mol_type = other DNA
acattgtttcactggtctct

SEQ ID NO: 23164 - DNA, 20 bp, synthetic construct
  misc_feature 1..20: note = chemically synthesized
  source 1..20: mol_type = other DNA
cattgtttcactggtctctg

SEQ ID NO: 23165 - DNA, 20 bp, synthetic construct
  misc_feature 1..20: note = chemically synthesized
  source 1..20: mol_type = other DNA
ctggtctctgaggaataatt

SEQ ID NO: 23166 - DNA, 20 bp, synthetic construct
  misc_feature 1..20: note = chemically synthesized
  source 1..20: mol_type = other DNA
tggtctctgaggaataattc

SEQ ID NO: 23167 - DNA, 20 bp, synthetic construct
  misc_feature 1..20: note = chemically synthesized
  source 1..20: mol_type = other DNA
ggtctctgaggaataattca

SEQ ID NO: 23168 - DNA, 20 bp, synthetic construct
  misc_feature 1..20: note = chemically synthesized
  source 1..20: mol_type = other DNA
gtctctgaggaataattcag

SEQ ID NO: 23169 - DNA, 20 bp, synthetic construct
  misc_feature 1..20: note = chemically synthesized
  source 1..20: mol_type = other DNA
gaggaataattcaggggacc

SEQ ID NO: 23170 - DNA, 20 bp, synthetic construct
  misc_feature 1..20: note = chemically synthesized
  source 1..20: mol_type = other DNA
aataattcaggggacctgga

SEQ ID NO: 23171 - DNA, 20 bp, synthetic construct
  misc_feature 1..20: note = chemically synthesized
  source 1..20: mol_type = other DNA
ataattcaggggacctggac

SEQ ID NO: 23172 - DNA, 20 bp, synthetic construct
  misc_feature 1..20: note = chemically synthesized
  source 1..20: mol_type = other DNA
ggacaggatgacaatgttgc

SEQ ID NO: 23173 - DNA, 20 bp, synthetic construct
  misc_feature 1..20: note = chemically synthesized
  source 1..20: mol_type = other DNA
gatgacaatgttgccagcat

SEQ ID NO: 23174 - DNA, 20 bp, synthetic construct
  misc_feature 1..20: note = chemically synthesized
  source 1..20: mol_type = other DNA
atgttgccagcataagtaac

SEQ ID NO: 23175 - DNA, 20 bp, synthetic construct
  misc_feature 1..20: note = chemically synthesized
  source 1..20: mol_type = other DNA
tgttgccagcataagtaact

SEQ ID NO: 23176 - DNA, 20 bp, synthetic construct
  misc_feature 1..20: note = chemically synthesized
  source 1..20: mol_type = other DNA
gttgccagcataagtaacta

SEQ ID NO: 23177 - DNA, 20 bp, synthetic construct
  misc_feature 1..20: note = chemically synthesized
  source 1..20: mol_type = other DNA
ccagcataagtaactaggga

SEQ ID NO: 23178 - DNA, 20 bp, synthetic construct
  misc_feature 1..20: note = chemically synthesized
  source 1..20: mol_type = other DNA
ctagggaaagtcatttcaat

SEQ ID NO: 23179 - DNA, 20 bp, synthetic construct
  misc_feature 1..20: note = chemically synthesized
  source 1..20: mol_type = other DNA
atgagaactaatcaatccct

SEQ ID NO: 23180 - DNA, 20 bp, synthetic construct
  misc_feature 1..20: note = chemically synthesized
  source 1..20: mol_type = other DNA
taatcaatccctgagcattt

SEQ ID NO: 23181 - DNA, 20 bp, synthetic construct
  misc_feature 1..20: note = chemically synthesized
  source 1..20: mol_type = other DNA
tcaatccctgagcatttcag

SEQ ID NO: 23182 - DNA, 20 bp, synthetic construct
  misc_feature 1..20: note = chemically synthesized
  source 1..20: mol_type = other DNA
ctgagcatttcagtggaaat

SEQ ID NO: 23183 - DNA, 20 bp, synthetic construct
  misc_feature 1..20: note = chemically synthesized
  source 1..20: mol_type = other DNA
cagtcaatccctctgctact

SEQ ID NO: 23184 - DNA, 20 bp, synthetic construct
  misc_feature 1..20: note = chemically synthesized
  source 1..20: mol_type = other DNA
tgtctattgctgatttgtat

SEQ ID NO: 23185 - DNA, 20 bp, synthetic construct
  misc_feature 1..20: note = chemically synthesized
  source 1..20: mol_type = other DNA
taagatatatgtacaacact

SEQ ID NO: 23186 - DNA, 20 bp, synthetic construct
  misc_feature 1..20: note = chemically synthesized
  source 1..20: mol_type = other DNA
acaacactaagtacatatct

SEQ ID NO: 23187 - DNA, 20 bp, synthetic construct
  misc_feature 1..20: note = chemically synthesized
  source 1..20: mol_type = other DNA
ctcaactgatattgttttct

SEQ ID NO: 23188 - DNA, 20 bp, synthetic construct
  misc_feature 1..20: note = chemically synthesized
  source 1..20: mol_type = other DNA
tcaactgatattgttttctc

SEQ ID NO: 23189 - DNA, 20 bp, synthetic construct
  misc_feature 1..20: note = chemically synthesized
  source 1..20: mol_type = other DNA
tttaactcacattgtttgat

SEQ ID NO: 23190 - DNA, 20 bp, synthetic construct
  misc_feature 1..20: note = chemically synthesized
  source 1..20: mol_type = other DNA
cacattgtttgattagctta

SEQ ID NO: 23191 - DNA, 20 bp, synthetic construct
  misc_feature 1..20: note = chemically synthesized
  source 1..20: mol_type = other DNA
ttgtttgattagcttatggc

SEQ ID NO: 23192 - DNA, 20 bp, synthetic construct
  misc_feature 1..20: note = chemically synthesized
  source 1..20: mol_type = other DNA
cacacatacatatacacaca

SEQ ID NO: 23193 - DNA, 20 bp, synthetic construct
  misc_feature 1..20: note = chemically synthesized
  source 1..20: mol_type = other DNA
tatatatacttaatatataa

SEQ ID NO: 23194 - DNA, 20 bp, synthetic construct
  misc_feature 1..20: note = chemically synthesized
  source 1..20: mol_type = other DNA
ccaattatatatataattct

SEQ ID NO: 23195 - DNA, 20 bp, synthetic construct
  misc_feature 1..20: note = chemically synthesized
  source 1..20: mol_type = other DNA
caattatatatataattctt

SEQ ID NO: 23196 - DNA, 20 bp, synthetic construct
  misc_feature 1..20: note = chemically synthesized
  source 1..20: mol_type = other DNA
taattcttgggtctatgatt

SEQ ID NO: 23197 - DNA, 20 bp, synthetic construct
  misc_feature 1..20: note = chemically synthesized
  source 1..20: mol_type = other DNA
aattcttgggtctatgattt

SEQ ID NO: 23198 - DNA, 20 bp, synthetic construct
  misc_feature 1..20: note = chemically synthesized
  source 1..20: mol_type = other DNA
gggtctatgatttgggtcac

SEQ ID NO: 23199 - DNA, 20 bp, synthetic construct
  misc_feature 1..20: note = chemically synthesized
  source 1..20: mol_type = other DNA
gatttgggtcaccggcattt

SEQ ID NO: 23200 - DNA, 20 bp, synthetic construct
  misc_feature 1..20: note = chemically synthesized
  source 1..20: mol_type = other DNA
aatgcccattgctctccata

SEQ ID NO: 23201 - DNA, 20 bp, synthetic construct
  misc_feature 1..20: note = chemically synthesized
  source 1..20: mol_type = other DNA
tccatatggcttgcatatat

SEQ ID NO: 23202 - DNA, 20 bp, synthetic construct
  misc_feature 1..20: note = chemically synthesized
  source 1..20: mol_type = other DNA
tatattagtcctgttataca

SEQ ID NO: 23203 - DNA, 20 bp, synthetic construct
  misc_feature 1..20: note = chemically synthesized
  source 1..20: mol_type = other DNA
atattagtcctgttatacat

SEQ ID NO: 23204 - DNA, 20 bp, synthetic construct
  misc_feature 1..20: note = chemically synthesized
  source 1..20: mol_type = other DNA
gtcctgttatacataggaat

SEQ ID NO: 23205 - DNA, 20 bp, synthetic construct
  misc_feature 1..20: note = chemically synthesized
  source 1..20: mol_type = other DNA
tcctgttatacataggaata

SEQ ID NO: 23206 - DNA, 20 bp, synthetic construct
  misc_feature 1..20: note = chemically synthesized
  source 1..20: mol_type = other DNA
acataggaataaggcatttt

SEQ ID NO: 23207 - DNA, 20 bp, synthetic construct
  misc_feature 1..20: note = chemically synthesized
  source 1..20: mol_type = other DNA
gaataaggcatttttggctt

SEQ ID NO: 23208 - DNA, 20 bp, synthetic construct
  misc_feature 1..20: note = chemically synthesized
  source 1..20: mol_type = other DNA
tttggcttcagacatacatc

SEQ ID NO: 23209 - DNA, 20 bp, synthetic construct
  misc_feature 1..20: note = chemically synthesized
  source 1..20: mol_type = other DNA
atccagttctcttgcatata

SEQ ID NO: 23210 - DNA, 20 bp, synthetic construct
  misc_feature 1..20: note = chemically synthesized
  source 1..20: mol_type = other DNA
ccagttctcttgcatatatg

SEQ ID NO: 23211 - DNA, 20 bp, synthetic construct
  misc_feature 1..20: note = chemically synthesized
  source 1..20: mol_type = other DNA
ttctcttgcatatatggagc

SEQ ID NO: 23212 - DNA, 20 bp, synthetic construct
  misc_feature 1..20: note = chemically synthesized
  source 1..20: mol_type = other DNA
atggagctggctgctgtttc

SEQ ID NO: 23213 - DNA, 20 bp, synthetic construct
  misc_feature 1..20: note = chemically synthesized
  source 1..20: mol_type = other DNA
tttctagaaaattgcacgtg

SEQ ID NO: 23214 - DNA, 20 bp, synthetic construct
  misc_feature 1..20: note = chemically synthesized
  source 1..20: mol_type = other DNA
aaaattgcacgtgaagaaat

SEQ ID NO: 23215 - DNA, 20 bp, synthetic construct
  misc_feature 1..20: note = chemically synthesized
  source 1..20: mol_type = other DNA
gaaatgagactttcttcaat

SEQ ID NO: 23216 - DNA, 20 bp, synthetic construct
  misc_feature 1..20: note = chemically synthesized
  source 1..20: mol_type = other DNA
aatgagactttcttcaatga

SEQ ID NO: 23217 - DNA, 20 bp, synthetic construct
  misc_feature 1..20: note = chemically synthesized
  source 1..20: mol_type = other DNA
agactttcttcaatgagagt

SEQ ID NO: 23218 - DNA, 20 bp, synthetic construct
  misc_feature 1..20: note = chemically synthesized
  source 1..20: mol_type = other DNA
cctcaattactttcttcaat

SEQ ID NO: 23219 - DNA, 20 bp, synthetic construct
  misc_feature 1..20: note = chemically synthesized
  source 1..20: mol_type = other DNA
ctcaattactttcttcaatg

SEQ ID NO: 23220 - DNA, 20 bp, synthetic construct
  misc_feature 1..20: note = chemically synthesized
  source 1..20: mol_type = other DNA
tcaattactttcttcaatga

SEQ ID NO: 23221 - DNA, 20 bp, synthetic construct
  misc_feature 1..20: note = chemically synthesized
  source 1..20: mol_type = other DNA
ttccctcaattcaaaatgat

SEQ ID NO: 23222 - DNA, 20 bp, synthetic construct
  misc_feature 1..20: note = chemically synthesized
  source 1..20: mol_type = other DNA
tcaattcaaaatgatgagtc

SEQ ID NO: 23223 - DNA, 20 bp, synthetic construct
  misc_feature 1..20: note = chemically synthesized
  source 1..20: mol_type = other DNA
caattcaaaatgatgagtct

SEQ ID NO: 23224 - DNA, 20 bp, synthetic construct
  misc_feature 1..20: note = chemically synthesized
  source 1..20: mol_type = other DNA
aattcaaaatgatgagtcta

SEQ ID NO: 23225 - DNA, 20 bp, synthetic construct
  misc_feature 1..20: note = chemically synthesized
  source 1..20: mol_type = other DNA
caaaatgatgagtctaggga

SEQ ID NO: 23226 - DNA, 20 bp, synthetic construct
  misc_feature 1..20: note = chemically synthesized
  source 1..20: mol_type = other DNA
tctagggaaagtatctctat

SEQ ID NO: 23227 - DNA, 20 bp, synthetic construct
  misc_feature 1..20: note = chemically synthesized
  source 1..20: mol_type = other DNA
atctctatgagaaatgtgtt

SEQ ID NO: 23228 - DNA, 20 bp, synthetic construct
  misc_feature 1..20: note = chemically synthesized
  source 1..20: mol_type = other DNA
aatgtgttcagttaaaactt

SEQ ID NO: 23229 - DNA, 20 bp, synthetic construct
  misc_feature 1..20: note = chemically synthesized
  source 1..20: mol_type = other DNA
tattgataataatttgaaaa

SEQ ID NO: 23230 - DNA, 20 bp, synthetic construct
  misc_feature 1..20: note = chemically synthesized
  source 1..20: mol_type = other DNA
ttgataataatttgaaaaca

SEQ ID NO: 23231 - DNA, 20 bp, synthetic construct
  misc_feature 1..20: note = chemically synthesized
  source 1..20: mol_type = other DNA
cagagatataatttctaatt

SEQ ID NO: 23232 - DNA, 20 bp, synthetic construct
  misc_feature 1..20: note = chemically synthesized
  source 1..20: mol_type = other DNA
tcagatgaccattgtcttga

SEQ ID NO: 23233 - DNA, 20 bp, synthetic construct
  misc_feature 1..20: note = chemically synthesized
  source 1..20: mol_type = other DNA
attgtcttgatagttaattc

SEQ ID NO: 23234 - DNA, 20 bp, synthetic construct
  misc_feature 1..20: note = chemically synthesized
  source 1..20: mol_type = other DNA
taattccagttactactgaa

SEQ ID NO: 23235 - DNA, 20 bp, synthetic construct
  misc_feature 1..20: note = chemically synthesized
  source 1..20: mol_type = other DNA
attccagttactactgaaca

SEQ ID NO: 23236 - DNA, 20 bp, synthetic construct
  misc_feature 1..20: note = chemically synthesized
  source 1..20: mol_type = other DNA
tccagttactactgaacaga

SEQ ID NO: 23237 - DNA, 20 bp, synthetic construct
  misc_feature 1..20: note = chemically synthesized
  source 1..20: mol_type = other DNA
cagagagatgcattttcata

SEQ ID NO: 23238 - DNA, 20 bp, synthetic construct
  misc_feature 1..20: note = chemically synthesized
  source 1..20: mol_type = other DNA
agagatgcattttcataaag

SEQ ID NO: 23239 - DNA, 20 bp, synthetic construct
  misc_feature 1..20: note = chemically synthesized
  source 1..20: mol_type = other DNA
gcattttcataaagtggtat

SEQ ID NO: 23240 - DNA, 20 bp, synthetic construct
  misc_feature 1..20: note = chemically synthesized
  source 1..20: mol_type = other DNA
attttcataaagtggtatga

SEQ ID NO: 23241 - DNA, 20 bp, synthetic construct
  misc_feature 1..20: note = chemically synthesized
  source 1..20: mol_type = other DNA
ttttcataaagtggtatgag

SEQ ID NO: 23242 - DNA, 20 bp, synthetic construct
  misc_feature 1..20: note = chemically synthesized
  source 1..20: mol_type = other DNA
ataaagtggtatgagaggtc

SEQ ID NO: 23243 - DNA, 20 bp, synthetic construct
  misc_feature 1..20: note = chemically synthesized
  source 1..20: mol_type = other DNA
gtggtatgagaggtctggtt

SEQ ID NO: 23244 - DNA, 20 bp, synthetic construct
  misc_feature 1..20: note = chemically synthesized
  source 1..20: mol_type = other DNA
tggtatgagaggtctggttt

SEQ ID NO: 23245 - DNA, 20 bp, synthetic construct
  misc_feature 1..20: note = chemically synthesized
  source 1..20: mol_type = other DNA
ggtatgagaggtctggttta

SEQ ID NO: 23246 - DNA, 20 bp, synthetic construct
  misc_feature 1..20: note = chemically synthesized
  source 1..20: mol_type = other DNA
gtatgagaggtctggtttag

SEQ ID NO: 23247 - DNA, 20 bp, synthetic construct
  misc_feature 1..20: note = chemically synthesized
  source 1..20: mol_type = other DNA
ggtctggtttaggggaacat

SEQ ID NO: 23248 - DNA, 20 bp, synthetic construct
  misc_feature 1..20: note = chemically synthesized
  source 1..20: mol_type = other DNA
tctggtttaggggaacatca

SEQ ID NO: 23249 - DNA, 20 bp, synthetic construct
  misc_feature 1..20: note = chemically synthesized
  source 1..20: mol_type = other DNA
tttaggggaacatcagagat

SEQ ID NO: 23250 - DNA, 20 bp, synthetic construct
  misc_feature 1..20: note = chemically synthesized
  source 1..20: mol_type = other DNA
gggaacatcagagataagac

SEQ ID NO: 23251 - DNA, 20 bp, synthetic construct
  misc_feature 1..20: note = chemically synthesized
  source 1..20: mol_type = other DNA
acatcagagataagactaga

SEQ ID NO: 23252 - DNA, 20 bp, synthetic construct
  misc_feature 1..20: note = chemically synthesized
  source 1..20: mol_type = other DNA
catcagagataagactagat

SEQ ID NO: 23253 - DNA, 20 bp, synthetic construct
  misc_feature 1..20: note = chemically synthesized
  source 1..20: mol_type = other DNA
atcagagataagactagata

SEQ ID NO: 23254 - DNA, 20 bp, synthetic construct
  misc_feature 1..20: note = chemically synthesized
  source 1..20: mol_type = other DNA
tcagagataagactagatag

SEQ ID NO: 23255 - DNA, 20 bp, synthetic construct
  misc_feature 1..20: note = chemically synthesized
  source 1..20: mol_type = other DNA
taagactagataggggtgtc

SEQ ID NO: 23256 - DNA, 20 bp, synthetic construct
  misc_feature 1..20: note = chemically synthesized
  source 1..20: mol_type = other DNA
ggtgtctggcatgtgcaaaa

SEQ ID NO: 23257 - DNA, 20 bp, synthetic construct
  misc_feature 1..20: note = chemically synthesized
  source 1..20: mol_type = other DNA
gtctggcatgtgcaaaatag

SEQ ID NO: 23258 - DNA, 20 bp, synthetic construct
  misc_feature 1..20: note = chemically synthesized
  source 1..20: mol_type = other DNA
ctggcatgtgcaaaatagca

SEQ ID NO: 23259 - DNA, 20 bp, synthetic construct
  misc_feature 1..20: note = chemically synthesized
  source 1..20: mol_type = other DNA
tagcagagttgaaaaacaaa

SEQ ID NO: 23260 - DNA, 20 bp, synthetic construct
  misc_feature 1..20: note = chemically synthesized
  source 1..20: mol_type = other DNA
agagttgaaaaacaaacagt

SEQ ID NO: 23261 - DNA, 20 bp, synthetic construct
  misc_feature 1..20: note = chemically synthesized
  source 1..20: mol_type = other DNA
aacaaacagttggtcatatg

SEQ ID NO: 23262 - DNA, 20 bp, synthetic construct
  misc_feature 1..20: note = chemically synthesized
  source 1..20: mol_type = other DNA
caaacagttggtcatatgtg

SEQ ID NO: 23263 - DNA, 20 bp, synthetic construct
  misc_feature 1..20: note = chemically synthesized
  source 1..20: mol_type = other DNA
aacagttggtcatatgtgga

SEQ ID NO: 23264 - DNA, 20 bp, synthetic construct
  misc_feature 1..20: note = chemically synthesized
  source 1..20: mol_type = other DNA
agttggtcatatgtggagag

SEQ ID NO: 23265 - DNA, 20 bp, synthetic construct
  misc_feature 1..20: note = chemically synthesized
  source 1..20: mol_type = other DNA
gttggtcatatgtggagagt

SEQ ID NO: 23266 - DNA, 20 bp, synthetic construct
  misc_feature 1..20: note = chemically synthesized
  source 1..20: mol_type = other DNA
ttggtcatatgtggagagtg

SEQ ID NO: 23267 - DNA, 20 bp, synthetic construct
  misc_feature 1..20: note = chemically synthesized
  source 1..20: mol_type = other DNA
ggtcatatgtggagagtggg

SEQ ID NO: 23268 - DNA, 20 bp, synthetic construct
  misc_feature 1..20: note = chemically synthesized
  source 1..20: mol_type = other DNA
gtcatatgtggagagtgggg

SEQ ID NO: 23269 - DNA, 20 bp, synthetic construct
  misc_feature 1..20: note = chemically synthesized
  source 1..20: mol_type = other DNA
atatgtggagagtggggagg

SEQ ID NO: 23270 - DNA, 20 bp, synthetic construct
  misc_feature 1..20: note = chemically synthesized
  source 1..20: mol_type = other DNA
tatgtggagagtggggagga

SEQ ID NO: 23271 - DNA, 20 bp, synthetic construct
  misc_feature 1..20: note = chemically synthesized
  source 1..20: mol_type = other DNA
atgtggagagtggggaggaa

SEQ ID NO: 23272 - DNA, 20 bp, synthetic construct
  misc_feature 1..20: note = chemically synthesized
  source 1..20: mol_type = other DNA
gtggagagtggggaggaagg

SEQ ID NO: 23273 - DNA, 20 bp, synthetic construct
  misc_feature 1..20: note = chemically synthesized
  source 1..20: mol_type = other DNA
ggagagtggggaggaaggga

SEQ ID NO: 23274 - DNA, 20 bp, synthetic construct
  misc_feature 1..20: note = chemically synthesized
  source 1..20: mol_type = other DNA
gagagtggggaggaagggag

SEQ ID NO: 23275 - DNA, 20 bp, synthetic construct
  misc_feature 1..20: note = chemically synthesized
  source 1..20: mol_type = other DNA
gtggggaggaagggagagga

SEQ ID NO: 23276 - DNA, 20 bp, synthetic construct
  misc_feature 1..20: note = chemically synthesized
  source 1..20: mol_type = other DNA
ggggaggaagggagaggatg

SEQ ID NO: 23277 - DNA, 20 bp, synthetic construct
  misc_feature 1..20: note = chemically synthesized
  source 1..20: mol_type = other DNA
gggaggaagggagaggatgg

SEQ ID NO: 23278 - DNA, 20 bp, synthetic construct
  misc_feature 1..20: note = chemically synthesized
  source 1..20: mol_type = other DNA
atggaggcaatgctcataac

SEQ ID NO: 23279 - DNA, 20 bp, synthetic construct
  misc_feature 1..20: note = chemically synthesized
  source 1..20: mol_type = other DNA
gaggcaatgctcataactag

SEQ ID NO: 23280 - DNA, 20 bp, synthetic construct
  misc_feature 1..20: note = chemically synthesized
  source 1..20: mol_type = other DNA
ctcataactagaagataaaa

SEQ ID NO: 23281 - DNA, 20 bp, synthetic construct
  misc_feature 1..20: note = chemically synthesized
  source 1..20: mol_type = other DNA
gaagataaaatggccttttc

SEQ ID NO: 23282 - DNA, 20 bp, synthetic construct
  misc_feature 1..20: note = chemically synthesized
  source 1..20: mol_type = other DNA
caaatacttttgattctttt

SEQ ID NO: 23283 - DNA, 20 bp, synthetic construct
  misc_feature 1..20: note = chemically synthesized
  source 1..20: mol_type = other DNA
aatacttttgattcttttca

SEQ ID NO: 23284 - DNA, 20 bp, synthetic construct
  misc_feature 1..20: note = chemically synthesized
  source 1..20: mol_type = other DNA
ttttgattcttttcagagtc

SEQ ID NO: 23285 - DNA, 20 bp, synthetic construct
  misc_feature 1..20: note = chemically synthesized
  source 1..20: mol_type = other DNA
tttgattcttttcagagtct

SEQ ID NO: 23286 - DNA, 20 bp, synthetic construct
  misc_feature 1..20: note = chemically synthesized
  source 1..20: mol_type = other DNA
tcttttcagagtctaggcat

SEQ ID NO: 23287 - DNA, 20 bp, synthetic construct
  misc_feature 1..20: note = chemically synthesized
  source 1..20: mol_type = other DNA
tttcagagtctaggcatgag

SEQ ID NO: 23288 - DNA, 20 bp, synthetic construct
  misc_feature 1..20: note = chemically synthesized
  source 1..20: mol_type = other DNA
tcagagtctaggcatgagaa

SEQ ID NO: 23289 - DNA, 20 bp, synthetic construct
  misc_feature 1..20: note = chemically synthesized
  source 1..20: mol_type = other DNA
cagagtctaggcatgagaag

SEQ ID NO: 23290 - DNA, 20 bp, synthetic construct
  misc_feature 1..20: note = chemically synthesized
  source 1..20: mol_type = other DNA
agagtctaggcatgagaaga

SEQ ID NO: 23291 - DNA, 20 bp, synthetic construct
  misc_feature 1..20: note = chemically synthesized
  source 1..20: mol_type = other DNA
gagtctaggcatgagaagag

SEQ ID NO: 23292 - DNA, 20 bp, synthetic construct
  misc_feature 1..20: note = chemically synthesized
  source 1..20: mol_type = other DNA
agtctaggcatgagaagagg

SEQ ID NO: 23293 - DNA, 20 bp, synthetic construct
  misc_feature 1..20: note = chemically synthesized
  source 1..20: mol_type = other DNA
gcatgagaagagggggtttg

SEQ ID NO: 23294 - DNA, 20 bp, synthetic construct
  misc_feature 1..20: note = chemically synthesized
  source 1..20: mol_type = other DNA
agagggggtttgtggtccta

SEQ ID NO: 23295 - DNA, 20 bp, synthetic construct
  misc_feature 1..20: note = chemically synthesized
  source 1..20: mol_type = other DNA
ggggtttgtggtcctatggc

SEQ ID NO: 23296 - DNA, 20 bp, synthetic construct
  misc_feature 1..20: note = chemically synthesized
  source 1..20: mol_type = other DNA
gggtttgtggtcctatggcc

SEQ ID NO: 23297 - DNA, 20 bp, synthetic construct
  misc_feature 1..20: note = chemically synthesized
  source 1..20: mol_type = other DNA
tgtggtcctatggccaggtg

SEQ ID NO: 23298 - DNA, 20 bp, synthetic construct
  misc_feature 1..20: note = chemically synthesized
  source 1..20: mol_type = other DNA
tggtcctatggccaggtgaa

SEQ ID NO: 23299 - DNA, 20 bp, synthetic construct
  misc_feature 1..20: note = chemically synthesized
  source 1..20: mol_type = other DNA
cctatggccaggtgaagagc

SEQ ID NO: 23300 - DNA, 20 bp, synthetic construct
  misc_feature 1..20: note = chemically synthesized
  source 1..20: mol_type = other DNA
gtatccatgactcaaatgat

SEQ ID NO: 23301 - DNA, 20 bp, synthetic construct
  misc_feature 1..20: note = chemically synthesized
  source 1..20: mol_type = other DNA
aagttttaaattaattttaa

SEQ ID NO: 23302 - DNA, 20 bp, synthetic construct
  misc_feature 1..20: note = chemically synthesized
  source 1..20: mol_type = other DNA
tttaaattaattttaaaaga

SEQ ID NO: 23303 - DNA, 20 bp, synthetic construct
  misc_feature 1..20: note = chemically synthesized
  source 1..20: mol_type = other DNA
atattcttttgaccaaaata

SEQ ID NO: 23304 - DNA, 20 bp, synthetic construct
  misc_feature 1..20: note = chemically synthesized
  source 1..20: mol_type = other DNA
tattcttttgaccaaaatac

SEQ ID NO: 23305 - DNA, 20 bp, synthetic construct
  misc_feature 1..20: note = chemically synthesized
  source 1..20: mol_type = other DNA
attcttttgaccaaaataca

SEQ ID NO: 23306 - DNA, 20 bp, synthetic construct
  misc_feature 1..20: note = chemically synthesized
  source 1..20: mol_type = other DNA
aatacagggtatgatgtgct

SEQ ID NO: 23307 - DNA, 20 bp, synthetic construct
  misc_feature 1..20: note = chemically synthesized
  source 1..20: mol_type = other DNA
atgatgtgcttggactacac

SEQ ID NO: 23308 - DNA, 20 bp, synthetic construct
  misc_feature 1..20: note = chemically synthesized
  source 1..20: mol_type = other DNA
tgatgtgcttggactacaca

SEQ ID NO: 23309 - DNA, 20 bp, synthetic construct
  misc_feature 1..20: note = chemically synthesized
  source 1..20: mol_type = other DNA
gatgtgcttggactacacaa

SEQ ID NO: 23310 - DNA, 20 bp, synthetic construct
  misc_feature 1..20: note = chemically synthesized
  source 1..20: mol_type = other DNA
atgtgcttggactacacaag

SEQ ID NO: 23311 - DNA, 20 bp, synthetic construct
  misc_feature 1..20: note = chemically synthesized
  source 1..20: mol_type = other DNA
ggactacacaaggggccacc

SEQ ID NO: 23312 - DNA, 20 bp, synthetic construct
  misc_feature 1..20: note = chemically synthesized
  source 1..20: mol_type = other DNA
acaaggggccacccagtgac

SEQ ID NO: 23313 - DNA, 20 bp, synthetic construct
  misc_feature 1..20: note = chemically synthesized
  source 1..20: mol_type = other DNA
ggggccacccagtgaccagt

SEQ ID NO: 23314 - DNA, 20 bp, synthetic construct
  misc_feature 1..20: note = chemically synthesized
  source 1..20: mol_type = other DNA
ccacccagtgaccagtcagc

SEQ ID NO: 23315 - DNA, 20 bp, synthetic construct
  misc_feature 1..20: note = chemically synthesized
  source 1..20: mol_type = other DNA
agctggatgcccctcatctc

SEQ ID NO: 23316 - DNA, 20 bp, synthetic construct
  misc_feature 1..20: note = chemically synthesized
  source 1..20: mol_type = other DNA
gcctctgtcatactgacact

SEQ ID NO: 23317 - DNA, 20 bp, synthetic construct
  misc_feature 1..20: note = chemically synthesized
  source 1..20: mol_type = other DNA
tactgacactcagtgatcta

SEQ ID NO: 23318 - DNA, 20 bp, synthetic construct
  misc_feature 1..20: note = chemically synthesized
  source 1..20: mol_type = other DNA
tgcccacctactcttcatca

SEQ ID NO: 23319 - DNA, 20 bp, synthetic construct
  misc_feature 1..20: note = chemically synthesized
  source 1..20: mol_type = other DNA
cacctactcttcatcacaga

SEQ ID NO: 23320 - DNA, 20 bp, synthetic construct
  misc_feature 1..20: note = chemically synthesized
  source 1..20: mol_type = other DNA
acctactcttcatcacagaa

SEQ ID NO: 23321 - DNA, 20 bp, synthetic construct
  misc_feature 1..20: note = chemically synthesized
  source 1..20: mol_type = other DNA
tactcttcatcacagaaagg

SEQ ID NO: 23322 - DNA, 20 bp, synthetic construct
  misc_feature 1..20: note = chemically synthesized
  source 1..20: mol_type = other DNA
actcttcatcacagaaaggt

SEQ ID NO: 23323 - DNA, 20 bp, synthetic construct
  misc_feature 1..20: note = chemically synthesized
  source 1..20: mol_type = other DNA
ctcttcatcacagaaaggtg

SEQ ID NO: 23324 - DNA, 20 bp, synthetic construct
  misc_feature 1..20: note = chemically synthesized
  source 1..20: mol_type = other DNA
acagaaaggtggggattttt

SEQ ID NO: 23325 - DNA, 20 bp, synthetic construct
  misc_feature 1..20: note = chemically synthesized
  source 1..20: mol_type = other DNA
cagaaaggtggggatttttt

SEQ ID NO: 23326 - DNA, 20 bp, synthetic construct
  misc_feature 1..20: note = chemically synthesized
  source 1..20: mol_type = other DNA
tggggattttttaggattct

SEQ ID NO: 23327 - DNA, 20 bp, synthetic construct
  misc_feature 1..20: note = chemically synthesized
  source 1..20: mol_type = other DNA
ggggattttttaggattctt

SEQ ID NO: 23328 - DNA, 20 bp, synthetic construct
  misc_feature 1..20: note = chemically synthesized
  source 1..20: mol_type = other DNA
cttgggatgtataaataaca

SEQ ID NO: 23329 - DNA, 20 bp, synthetic construct
  misc_feature 1..20: note = chemically synthesized
  source 1..20: mol_type = other DNA
tgggatgtataaataacaca

SEQ ID NO: 23330 - DNA, 20 bp, synthetic construct
  misc_feature 1..20: note = chemically synthesized
  source 1..20: mol_type = other DNA
ataaaataataccttcacaa

SEQ ID NO: 23331 - DNA, 20 bp, synthetic construct
  misc_feature 1..20: note = chemically synthesized
  source 1..20: mol_type = other DNA
aataccttcacaatagtttc

SEQ ID NO: 23332 - DNA, 20 bp, synthetic construct
  misc_feature 1..20: note = chemically synthesized
  source 1..20: mol_type = other DNA
ataccttcacaatagtttcc

SEQ ID NO: 23333 - DNA, 20 bp, synthetic construct
  misc_feature 1..20: note = chemically synthesized
  source 1..20: mol_type = other DNA
cttcacaatagtttccaggc

SEQ ID NO: 23334 - DNA, 20 bp, synthetic construct
  misc_feature 1..20: note = chemically synthesized
  source 1..20: mol_type = other DNA
gtaaatgatctttatctgat

SEQ ID NO: 23335 - DNA, 20 bp, synthetic construct
  misc_feature 1..20: note = chemically synthesized
  source 1..20: mol_type = other DNA
tctttatctgattagaccaa

SEQ ID NO: 23336 - DNA, 20 bp, synthetic construct
  misc_feature 1..20: note = chemically synthesized
  source 1..20: mol_type = other DNA
tttgtttgttttactcaact

SEQ ID NO: 23337 - DNA, 20 bp, synthetic construct
  misc_feature 1..20: note = chemically synthesized
  source 1..20: mol_type = other DNA
aaatttgcctttctcttttg

SEQ ID NO: 23338 - DNA, 20 bp, synthetic construct
  misc_feature 1..20: note = chemically synthesized
  source 1..20: mol_type = other DNA
agcttcttgactgtgtgctc

SEQ ID NO: 23339 - DNA, 20 bp, synthetic construct
  misc_feature 1..20: note = chemically synthesized
  source 1..20: mol_type = other DNA
gcttcttgactgtgtgctcg

SEQ ID NO: 23340 - DNA, 20 bp, synthetic construct
  misc_feature 1..20: note = chemically synthesized
  source 1..20: mol_type = other DNA
cttgactgtgtgctcgagga

SEQ ID NO: 23341 - DNA, 20 bp, synthetic construct
  misc_feature 1..20: note = chemically synthesized
  source 1..20: mol_type = other DNA
cgaggatggtaaatataaca

SEQ ID NO: 23342 - DNA, 20 bp, synthetic construct
  misc_feature 1..20: note = chemically synthesized
  source 1..20: mol_type = other DNA
tcttattccctactgtatta

SEQ ID NO: 23343 - DNA, 20 bp, synthetic construct
  misc_feature 1..20: note = chemically synthesized
  source 1..20: mol_type = other DNA
gtattacagaacttctcaca

SEQ ID NO: 23344 - DNA, 20 bp, synthetic construct
  misc_feature 1..20: note = chemically synthesized
  source 1..20: mol_type = other DNA
aaatgaataaataaaattta

SEQ ID NO: 23345 - DNA, 20 bp, synthetic construct
  misc_feature 1..20: note = chemically synthesized
  source 1..20: mol_type = other DNA
atgtctttctgtgtgtctgc

SEQ ID NO: 23346 - DNA, 20 bp, synthetic construct
  misc_feature 1..20: note = chemically synthesized
  source 1..20: mol_type = other DNA
tgctctctgtattgtcttcc

SEQ ID NO: 23347 - DNA, 20 bp, synthetic construct
  misc_feature 1..20: note = chemically synthesized
  source 1..20: mol_type = other DNA
ctgtattgtcttccaagata

SEQ ID NO: 23348 - DNA, 20 bp, synthetic construct
  misc_feature 1..20: note = chemically synthesized
  source 1..20: mol_type = other DNA
tgtattgtcttccaagatat

SEQ ID NO: 23349 - DNA, 20 bp, synthetic construct
  misc_feature 1..20: note = chemically synthesized
  source 1..20: mol_type = other DNA
aatcctgttctttcttccct

SEQ ID NO: 23350 - DNA, 20 bp, synthetic construct
  misc_feature 1..20: note = chemically synthesized
  source 1..20: mol_type = other DNA
atcctgttctttcttccctt

SEQ ID NO: 23351 - DNA, 20 bp, synthetic construct
  misc_feature 1..20: note = chemically synthesized
  source 1..20: mol_type = other DNA
tctttcttcccttgggcttt

SEQ ID NO: 23352 - DNA, 20 bp, synthetic construct
  misc_feature 1..20: note = chemically synthesized
  source 1..20: mol_type = other DNA
ctttcttcccttgggctttt

SEQ ID NO: 23353 - DNA, 20 bp, synthetic construct
  misc_feature 1..20: note = chemically synthesized
  source 1..20: mol_type = other DNA
tgggcttttgggaatgaatt

SEQ ID NO: 23354 - DNA, 20 bp, synthetic construct
  misc_feature 1..20: note = chemically synthesized
  source 1..20: mol_type = other DNA
gggcttttgggaatgaattc

SEQ ID NO: 23355 - DNA, 20 bp, synthetic construct
  misc_feature 1..20: note = chemically synthesized
  source 1..20: mol_type = other DNA
ggcttttgggaatgaattca

SEQ ID NO: 23356 - DNA, 20 bp, synthetic construct
  misc_feature 1..20: note = chemically synthesized
  source 1..20: mol_type = other DNA
gcttttgggaatgaattcag

SEQ ID NO: 23357 - DNA, 20 bp, synthetic construct
  misc_feature 1..20: note = chemically synthesized
  source 1..20: mol_type = other DNA
cttttgggaatgaattcagg

SEQ ID NO: 23358 - DNA, 20 bp, synthetic construct
  misc_feature 1..20: note = chemically synthesized
  source 1..20: mol_type = other DNA
gaatgaattcagggggatct

SEQ ID NO: 23359 - DNA, 20 bp, synthetic construct
  misc_feature 1..20: note = chemically synthesized
  source 1..20: mol_type = other DNA
gggggatctaagccacatca

SEQ ID NO: 23360 - DNA, 20 bp, synthetic construct
  misc_feature 1..20: note = chemically synthesized
  source 1..20: mol_type = other DNA
atctttcttgactcaccctc

SEQ ID NO: 23361 - DNA, 20 bp, synthetic construct
  misc_feature 1..20: note = chemically synthesized
  source 1..20: mol_type = other DNA
tctttcttgactcaccctct

SEQ ID NO: 23362 - DNA, 20 bp, synthetic construct
  misc_feature 1..20: note = chemically synthesized
  source 1..20: mol_type = other DNA
cttgactcaccctctaggtc

SEQ ID NO: 23363 - DNA, 20 bp, synthetic construct
  misc_feature 1..20: note = chemically synthesized
  source 1..20: mol_type = other DNA
agtgatcctgaaacctgcca

SEQ ID NO: 23364 - DNA, 20 bp, synthetic construct
  misc_feature 1..20: note = chemically synthesized
  source 1..20: mol_type = other DNA
gatcctgaaacctgccatag

SEQ ID NO: 23365 - DNA, 20 bp, synthetic construct
  misc_feature 1..20: note = chemically synthesized
  source 1..20: mol_type = other DNA
atcctgaaacctgccatagc

SEQ ID NO: 23366 - DNA, 20 bp, synthetic construct
  misc_feature 1..20: note = chemically synthesized
  source 1..20: mol_type = other DNA
tgaaacctgccatagcaggc

SEQ ID NO: 23367 - DNA, 20 bp, synthetic construct
  misc_feature 1..20: note = chemically synthesized
  source 1..20: mol_type = other DNA
tgccatagcaggctagtata

SEQ ID NO: 23368 - DNA, 20 bp, synthetic construct
  misc_feature 1..20: note = chemically synthesized
  source 1..20: mol_type = other DNA
caggctagtataaagataac

SEQ ID NO: 23369 - DNA, 20 bp, synthetic construct
  misc_feature 1..20: note = chemically synthesized
  source 1..20: mol_type = other DNA
aggctagtataaagataact

SEQ ID NO: 23370 - DNA, 20 bp, synthetic construct
  misc_feature 1..20: note = chemically synthesized
  source 1..20: mol_type = other DNA
cattttataaattctgtaaa

SEQ ID NO: 23371 - DNA, 20 bp, synthetic construct
  misc_feature 1..20: note = chemically synthesized
  source 1..20: mol_type = other DNA
cacatttgactgacaaccct

SEQ ID NO: 23372 - DNA, 20 bp, synthetic construct
  misc_feature 1..20: note = chemically synthesized
  source 1..20: mol_type = other DNA
ttctgttcttccttatactg

SEQ ID NO: 23373 - DNA, 20 bp, synthetic construct
  misc_feature 1..20: note = chemically synthesized
  source 1..20: mol_type = other DNA
ctgttcttccttatactgaa

SEQ ID NO: 23374 - DNA, 20 bp, synthetic construct
  misc_feature 1..20: note = chemically synthesized
  source 1..20: mol_type = other DNA
tatactgaagagatgtgatg

SEQ ID NO: 23375 - DNA, 20 bp, synthetic construct
  misc_feature 1..20: note = chemically synthesized
  source 1..20: mol_type = other DNA
tactgaagagatgtgatgaa

SEQ ID NO: 23376 - DNA, 20 bp, synthetic construct
  misc_feature 1..20: note = chemically synthesized
  source 1..20: mol_type = other DNA
aagagatgtgatgaagagac

SEQ ID NO: 23377 - DNA, 20 bp, synthetic construct
  misc_feature 1..20: note = chemically synthesized
  source 1..20: mol_type = other DNA
tgatgaagagacaagataaa

SEQ ID NO: 23378 - DNA, 20 bp, synthetic construct
  misc_feature 1..20: note = chemically synthesized
  source 1..20: mol_type = other DNA
agagacaagataaaaagtcc

SEQ ID NO: 23379 - DNA, 20 bp, synthetic construct
  misc_feature 1..20: note = chemically synthesized
  source 1..20: mol_type = other DNA
agacaagataaaaagtccaa

SEQ ID NO: 23380 - DNA, 20 bp, synthetic construct
  misc_feature 1..20: note = chemically synthesized
  source 1..20: mol_type = other DNA
acaagataaaaagtccaaga

SEQ ID NO: 23381 - DNA, 20 bp, synthetic construct
  misc_feature 1..20: note = chemically synthesized
  source 1..20: mol_type = other DNA
caagataaaaagtccaagag

SEQ ID NO: 23382 - DNA, 20 bp, synthetic construct
  misc_feature 1..20: note = chemically synthesized
  source 1..20: mol_type = other DNA
aaaaagtccaagagaggtga

SEQ ID NO: 23383 - DNA, 20 bp, synthetic construct
  misc_feature 1..20: note = chemically synthesized
  source 1..20: mol_type = other DNA
gtccaagagaggtgaaagac

SEQ ID NO: 23384 - DNA, 20 bp, synthetic construct
  misc_feature 1..20: note = chemically synthesized
  source 1..20: mol_type = other DNA
tccaagagaggtgaaagact

SEQ ID NO: 23385 - DNA, 20 bp, synthetic construct
  misc_feature 1..20: note = chemically synthesized
  source 1..20: mol_type = other DNA
aggtgaaagactgggacttg

SEQ ID NO: 23386 - DNA, 20 bp, synthetic construct
  misc_feature 1..20: note = chemically synthesized
  source 1..20: mol_type = other DNA
gggacttgcagttctctttg

SEQ ID NO: 23387 - DNA, 20 bp, synthetic construct
  misc_feature 1..20: note = chemically synthesized
  source 1..20: mol_type = other DNA
gacttgcagttctctttgtg

SEQ ID NO: 23388 - DNA, 20 bp, synthetic construct
  misc_feature 1..20: note = chemically synthesized
  source 1..20: mol_type = other DNA
ctttgtggagtcccgtgaaa

SEQ ID NO: 23389 - DNA, 20 bp, synthetic construct
  misc_feature 1..20: note = chemically synthesized
  source 1..20: mol_type = other DNA
ttgtggagtcccgtgaaaca

SEQ ID NO: 23390 - DNA, 20 bp, synthetic construct
  misc_feature 1..20: note = chemically synthesized
  source 1..20: mol_type = other DNA
tggagtcccgtgaaacagag

SEQ ID NO: 23391 - DNA, 20 bp, synthetic construct
  misc_feature 1..20: note = chemically synthesized
  source 1..20: mol_type = other DNA
gagtcccgtgaaacagagca

SEQ ID NO: 23392 - DNA, 20 bp, synthetic construct
  misc_feature 1..20: note = chemically synthesized
  source 1..20: mol_type = other DNA
cgtgaaacagagcagagctc

SEQ ID NO: 23393 - DNA, 20 bp, synthetic construct
  misc_feature 1..20: note = chemically synthesized
  source 1..20: mol_type = other DNA
gtgaaacagagcagagctct

SEQ ID NO: 23394 - DNA, 20 bp, synthetic construct
  misc_feature 1..20: note = chemically synthesized
  source 1..20: mol_type = other DNA
gcagagctctgggctcccga

SEQ ID NO: 23395 - DNA, 20 bp, synthetic construct
  misc_feature 1..20: note = chemically synthesized
  source 1..20: mol_type = other DNA
gtccctgaacaacatatcaa

SEQ ID NO: 23396 - DNA, 20 bp, synthetic construct
  misc_feature 1..20: note = chemically synthesized
  source 1..20: mol_type = other DNA
cctgaacaacatatcaacag

SEQ ID NO: 23397 - DNA, 20 bp, synthetic construct
  misc_feature 1..20: note = chemically synthesized
  source 1..20: mol_type = other DNA
ctgaacaacatatcaacagt

SEQ ID NO: 23398 - DNA, 20 bp, synthetic construct
  misc_feature 1..20: note = chemically synthesized
  source 1..20: mol_type = other DNA
tgaacaacatatcaacagta

SEQ ID NO: 23399 - DNA, 20 bp, synthetic construct
  misc_feature 1..20: note = chemically synthesized
  source 1..20: mol_type = other DNA
acatatcaacagtagggtcg

SEQ ID NO: 23400 - DNA, 20 bp, synthetic construct
  misc_feature 1..20: note = chemically synthesized
  source 1..20: mol_type = other DNA
ctcccgcccctccacgccac

SEQ ID NO: 23401 - DNA, 20 bp, synthetic construct
  misc_feature 1..20: note = chemically synthesized
  source 1..20: mol_type = other DNA
tccacgccaccagccacact

SEQ ID NO: 23402 - DNA, 20 bp, synthetic construct
  misc_feature 1..20: note = chemically synthesized
  source 1..20: mol_type = other DNA
caccagccacactgagcgct

SEQ ID NO: 23403 - DNA, 20 bp, synthetic construct
  misc_feature 1..20: note = chemically synthesized
  source 1..20: mol_type = other DNA
actgagcgctcagctcctcc

SEQ ID NO: 23404 - DNA, 20 bp, synthetic construct
  misc_feature 1..20: note = chemically synthesized
  source 1..20: mol_type = other DNA
ctgagcgctcagctcctccc

SEQ ID NO: 23405 - DNA, 20 bp, synthetic construct
  misc_feature 1..20: note = chemically synthesized
  source 1..20: mol_type = other DNA
gctcagctcctcccaggtcc

SEQ ID NO: 23406 - DNA, 20 bp, synthetic construct
  misc_feature 1..20: note = chemically synthesized
  source 1..20: mol_type = other DNA
cctcccaggtcctggacctg

SEQ ID NO: 23407 - DNA, 20 bp, synthetic construct
  misc_feature 1..20: note = chemically synthesized
  source 1..20: mol_type = other DNA
aggtcctggacctgcagccc

SEQ ID NO: 23408 - DNA, 20 bp, synthetic construct
  misc_feature 1..20: note = chemically synthesized
  source 1..20: mol_type = other DNA
ctgcagccctggccaacatc

SEQ ID NO: 23409 - DNA, 20 bp, synthetic construct
  misc_feature 1..20: note = chemically synthesized
  source 1..20: mol_type = other DNA
gcagccctggccaacatcaa

SEQ ID NO: 23410 - DNA, 20 bp, synthetic construct
  misc_feature 1..20: note = chemically synthesized
  source 1..20: mol_type = other DNA
cagccctggccaacatcaag

SEQ ID NO: 23411 - DNA, 20 bp, synthetic construct
  misc_feature 1..20: note = chemically synthesized
  source 1..20: mol_type = other DNA
agccctggccaacatcaaga

SEQ ID NO: 23412 - DNA, 20 bp, synthetic construct
  misc_feature 1..20: note = chemically synthesized
  source 1..20: mol_type = other DNA
atcaagagggcatctttgcc

SEQ ID NO: 23413 - DNA, 20 bp, synthetic construct
  misc_feature 1..20: note = chemically synthesized
  source 1..20: mol_type = other DNA
gcatctttgccaagaatgcc

SEQ ID NO: 23414 - DNA, 20 bp, synthetic construct
  misc_feature 1..20: note = chemically synthesized
  source 1..20: mol_type = other DNA
tctttgccaagaatgcctgg

SEQ ID NO: 23415 - DNA, 20 bp, synthetic construct
  misc_feature 1..20: note = chemically synthesized
  source 1..20: mol_type = other DNA
tttgccaagaatgcctggaa

SEQ ID NO: 23416 - DNA, 20 bp, synthetic construct
  misc_feature 1..20: note = chemically synthesized
  source 1..20: mol_type = other DNA
aagaatgcctggaagagact

SEQ ID NO: 23417 - DNA, 20 bp, synthetic construct
  misc_feature 1..20: note = chemically synthesized
  source 1..20: mol_type = other DNA
ggaagagactcagccactca

SEQ ID NO: 23418 - DNA, 20 bp, synthetic construct
  misc_feature 1..20: note = chemically synthesized
  source 1..20: mol_type = other DNA
gaagagactcagccactcac

SEQ ID NO: 23419 - DNA, 20 bp, synthetic construct
  misc_feature 1..20: note = chemically synthesized
  source 1..20: mol_type = other DNA
actcacaggaaaacgtcctc

SEQ ID NO: 23420 - DNA, 20 bp, synthetic construct
  misc_feature 1..20: note = chemically synthesized
  source 1..20: mol_type = other DNA
cacaggaaaacgtcctccag

SEQ ID NO: 23421 - DNA, 20 bp, synthetic construct
  misc_feature 1..20: note = chemically synthesized
  source 1..20: mol_type = other DNA
ggaaaacgtcctccagaagc

SEQ ID NO: 23422 - DNA, 20 bp, synthetic construct
  misc_feature 1..20: note = chemically synthesized
  source 1..20: mol_type = other DNA
gaaaacgtcctccagaagcc

SEQ ID NO: 23423 - DNA, 20 bp, synthetic construct
  misc_feature 1..20: note = chemically synthesized
  source 1..20: mol_type = other DNA
aaaacgtcctccagaagcca

SEQ ID NO: 23424 - DNA, 20 bp, synthetic construct
  misc_feature 1..20: note = chemically synthesized
  source 1..20: mol_type = other DNA
cgtcctccagaagccaggga

SEQ ID NO: 23425 - DNA, 20 bp, synthetic construct
  misc_feature 1..20: note = chemically synthesized
  source 1..20: mol_type = other DNA
agaagccagggaaagctgct

SEQ ID NO: 23426 - DNA, 20 bp, synthetic construct
  misc_feature 1..20: note = chemically synthesized
  source 1..20: mol_type = other DNA
agggaaagctgctgagacaa

SEQ ID NO: 23427 - DNA, 20 bp, synthetic construct
  misc_feature 1..20: note = chemically synthesized
  source 1..20: mol_type = other DNA
ctgctgagacaaaagacaaa

SEQ ID NO: 23428 - DNA, 20 bp, synthetic construct
  misc_feature 1..20: note = chemically synthesized
  source 1..20: mol_type = other DNA
gacaaaagacaaacagtttg

SEQ ID NO: 23429 - DNA, 20 bp, synthetic construct
  misc_feature 1..20: note = chemically synthesized
  source 1..20: mol_type = other DNA
aacagtttgaagaatatgtc

SEQ ID NO: 23430 - DNA, 20 bp, synthetic construct
  misc_feature 1..20: note = chemically synthesized
  source 1..20: mol_type = other DNA
aagaatatgtccagaacttc

SEQ ID NO: 23431 - DNA, 20 bp, synthetic construct
  misc_feature 1..20: note = chemically synthesized
  source 1..20: mol_type = other DNA
tgtccagaacttcaagccac

SEQ ID NO: 23432 - DNA, 20 bp, synthetic construct
  misc_feature 1..20: note = chemically synthesized
  source 1..20: mol_type = other DNA
ccagaacttcaagccacaag

SEQ ID NO: 23433 - DNA, 20 bp, synthetic construct
  misc_feature 1..20: note = chemically synthesized
  source 1..20: mol_type = other DNA
gaacttcaagccacaagaag

SEQ ID NO: 23434 - DNA, 20 bp, synthetic construct
  misc_feature 1..20: note = chemically synthesized
  source 1..20: mol_type = other DNA
acttcaagccacaagaagca

SEQ ID NO: 23435 - DNA, 20 bp, synthetic construct
  misc_feature 1..20: note = chemically synthesized
  source 1..20: mol_type = other DNA
cttcaagccacaagaagcag

SEQ ID NO: 23436 - DNA, 20 bp, synthetic construct
  misc_feature 1..20: note = chemically synthesized
  source 1..20: mol_type = other DNA
ttcaagccacaagaagcaga

SEQ ID NO: 23437 - DNA, 20 bp, synthetic construct
  misc_feature 1..20: note = chemically synthesized
  source 1..20: mol_type = other DNA
ccacaagaagcagagggtac

SEQ ID NO: 23438 - DNA, 20 bp, synthetic construct
  misc_feature 1..20: note = chemically synthesized
  source 1..20: mol_type = other DNA
aagcagagggtaccagacct

SEQ ID NO: 23439 - DNA, 20 bp, synthetic construct
  misc_feature 1..20: note = chemically synthesized
  source 1..20: mol_type = other DNA
gcagagggtaccagacctga

SEQ ID NO: 23440 - DNA, 20 bp, synthetic construct
  misc_feature 1..20: note = chemically synthesized
  source 1..20: mol_type = other DNA
accagacctgagagaactct

SEQ ID NO: 23441 - DNA, 20 bp, synthetic construct
  misc_feature 1..20: note = chemically synthesized
  source 1..20: mol_type = other DNA
ccagacctgagagaactctg

SEQ ID NO: 23442 - DNA, 20 bp, synthetic construct
  misc_feature 1..20: note = chemically synthesized
  source 1..20: mol_type = other DNA
gagagaactctgaggatgtt

SEQ ID NO: 23443 - DNA, 20 bp, synthetic construct
  misc_feature 1..20: note = chemically synthesized
  source 1..20: mol_type = other DNA
agaactctgaggatgtttag

SEQ ID NO: 23444 - DNA, 20 bp, synthetic construct
  misc_feature 1..20: note = chemically synthesized
  source 1..20: mol_type = other DNA
aggatgtttagaagcaatca

SEQ ID NO: 23445 - DNA, 20 bp, synthetic construct
  misc_feature 1..20: note = chemically synthesized
  source 1..20: mol_type = other DNA
ggatgtttagaagcaatcaa

SEQ ID NO: 23446 - DNA, 20 bp, synthetic construct
  misc_feature 1..20: note = chemically synthesized
  source 1..20: mol_type = other DNA
agaagcaatcaaaggcattc

SEQ ID NO: 23447 - DNA, 20 bp, synthetic construct
  misc_feature 1..20: note = chemically synthesized
  source 1..20: mol_type = other DNA
aagcaatcaaaggcattcaa

SEQ ID NO: 23448 - DNA, 20 bp, synthetic construct
  misc_feature 1..20: note = chemically synthesized
  source 1..20: mol_type = other DNA
gcattcaagagaccttgacg

SEQ ID NO: 23449 - DNA, 20 bp, synthetic construct
  misc_feature 1..20: note = chemically synthesized
  source 1..20: mol_type = other DNA
caagagaccttgacgaagct

SEQ ID NO: 23450 - DNA, 20 bp, synthetic construct
  misc_feature 1..20: note = chemically synthesized
  source 1..20: mol_type = other DNA
cgaagctgagtcactgtgtg

SEQ ID NO: 23451 - DNA, 20 bp, synthetic construct
  misc_feature 1..20: note = chemically synthesized
  source 1..20: mol_type = other DNA
actgtgtgaagtctgtgcgc

SEQ ID NO: 23452 - DNA, 20 bp, synthetic construct
  misc_feature 1..20: note = chemically synthesized
  source 1..20: mol_type = other DNA
gtgaagtctgtgcgctggat

SEQ ID NO: 23453 - DNA, 20 bp, synthetic construct
  misc_feature 1..20: note = chemically synthesized
  source 1..20: mol_type = other DNA
gtctgtgcgctggattggtc

SEQ ID NO: 23454 - DNA, 20 bp, synthetic construct
  misc_feature 1..20: note = chemically synthesized
  source 1..20: mol_type = other DNA
tctgtgcgctggattggtct

SEQ ID NO: 23455 - DNA, 20 bp, synthetic construct
  misc_feature 1..20: note = chemically synthesized
  source 1..20: mol_type = other DNA
gtgcgctggattggtctggg

SEQ ID NO: 23456 - DNA, 20 bp, synthetic construct
  misc_feature 1..20: note = chemically synthesized
  source 1..20: mol_type = other DNA
tgcgctggattggtctgggc

SEQ ID NO: 23457 - DNA, 20 bp, synthetic construct
  misc_feature 1..20: note = chemically synthesized
  source 1..20: mol_type = other DNA
gctggattggtctgggcagg

SEQ ID NO: 23458 - DNA, 20 bp, synthetic construct
  misc_feature 1..20: note = chemically synthesized
  source 1..20: mol_type = other DNA
ctggattggtctgggcagga

SEQ ID NO: 23459 - DNA, 20 bp, synthetic construct
  misc_feature 1..20: note = chemically synthesized
  source 1..20: mol_type = other DNA
tgggcaggaaggtgtgaaaa

SEQ ID NO: 23460 - DNA, 20 bp, synthetic construct
  misc_feature 1..20: note = chemically synthesized
  source 1..20: mol_type = other DNA
caggaaggtgtgaaaatggt

SEQ ID NO: 23461 - DNA, 20 bp, synthetic construct
  misc_feature 1..20: note = chemically synthesized
  source 1..20: mol_type = other DNA
aaggtgtgaaaatggttggt

SEQ ID NO: 23462 - DNA, 20 bp, synthetic construct
  misc_feature 1..20: note = chemically synthesized
  source 1..20: mol_type = other DNA
tgtgaaaatggttggtgaga

SEQ ID NO: 23463 - DNA, 20 bp, synthetic construct
  misc_feature 1..20: note = chemically synthesized
  source 1..20: mol_type = other DNA
gtgaaaatggttggtgagaa

SEQ ID NO: 23464 - DNA, 20 bp, synthetic construct
  misc_feature 1..20: note = chemically synthesized
  source 1..20: mol_type = other DNA
gtgagaaaggtgatgtgctc

SEQ ID NO: 23465 - DNA, 20 bp, synthetic construct
  misc_feature 1..20: note = chemically synthesized
  source 1..20: mol_type = other DNA
tgagaaaggtgatgtgctct

SEQ ID NO: 23466 - DNA, 20 bp, synthetic construct
  misc_feature 1..20: note = chemically synthesized
  source 1..20: mol_type = other DNA
agaaaggtgatgtgctctgg

SEQ ID NO: 23467 - DNA, 20 bp, synthetic construct
  misc_feature 1..20: note = chemically synthesized
  source 1..20: mol_type = other DNA
gaaaggtgatgtgctctggg

SEQ ID NO: 23468 - DNA, 20 bp, synthetic construct
  misc_feature 1..20: note = chemically synthesized
  source 1..20: mol_type = other DNA
ggatatccacaaaaaactca

SEQ ID NO: 23469 - DNA, 20 bp, synthetic construct
  misc_feature 1..20: note = chemically synthesized
  source 1..20: mol_type = other DNA
ggatgcatccttgctaacac

SEQ ID NO: 23470 - DNA, 20 bp, synthetic construct
  misc_feature 1..20: note = chemically synthesized
  source 1..20: mol_type = other DNA
gctaacactggaaaactacc

SEQ ID NO: 23471 - DNA, 20 bp, synthetic construct
  misc_feature 1..20: note = chemically synthesized
  source 1..20: mol_type = other DNA
tggaccaatttcctgacttg

SEQ ID NO: 23472 - DNA, 20 bp, synthetic construct
  misc_feature 1..20: note = chemically synthesized
  source 1..20: mol_type = other DNA
acttgaagaatcacatcacc

SEQ ID NO: 23473 - DNA, 20 bp, synthetic construct
  misc_feature 1..20: note = chemically synthesized
  source 1..20: mol_type = other DNA
aagaatcacatcaccaagtg

SEQ ID NO: 23474 - DNA, 20 bp, synthetic construct
  misc_feature 1..20: note = chemically synthesized
  source 1..20: mol_type = other DNA
aatcacatcaccaagtgcag

SEQ ID NO: 23475 - DNA, 20 bp, synthetic construct
  misc_feature 1..20: note = chemically synthesized
  source 1..20: mol_type = other DNA
atcacatcaccaagtgcagc

SEQ ID NO: 23476 - DNA, 20 bp, synthetic construct
  misc_feature 1..20: note = chemically synthesized
  source 1..20: mol_type = other DNA
acatcaccaagtgcagcagg

SEQ ID NO: 23477 - DNA, 20 bp, synthetic construct
  misc_feature 1..20: note = chemically synthesized
  source 1..20: mol_type = other DNA
caagtgcagcaggaagctta

SEQ ID NO: 23478 - DNA, 20 bp, synthetic construct
  misc_feature 1..20: note = chemically synthesized
  source 1..20: mol_type = other DNA
aggaagcttacggactatga

SEQ ID NO: 23479 - DNA, 20 bp, synthetic construct
  misc_feature 1..20: note = chemically synthesized
  source 1..20: mol_type = other DNA
cagtgcctgcccacctccat

SEQ ID NO: 23480 - DNA, 20 bp, synthetic construct
  misc_feature 1..20: note = chemically synthesized
  source 1..20: mol_type = other DNA
agtgcctgcccacctccatc

SEQ ID NO: 23481 - DNA, 20 bp, synthetic construct
  misc_feature 1..20: note = chemically synthesized
  source 1..20: mol_type = other DNA
cccacctccatcgggctcaa

SEQ ID NO: 23482 - DNA, 20 bp, synthetic construct
  misc_feature 1..20: note = chemically synthesized
  source 1..20: mol_type = other DNA
cacctccatcgggctcaaca

SEQ ID NO: 23483 - DNA, 20 bp, synthetic construct
  misc_feature 1..20: note = chemically synthesized
  source 1..20: mol_type = other DNA
catcgggctcaacagagctt

SEQ ID NO: 23484 - DNA, 20 bp, synthetic construct
  misc_feature 1..20: note = chemically synthesized
  source 1..20: mol_type = other DNA
atcgggctcaacagagcttc

SEQ ID NO: 23485 - DNA, 20 bp, synthetic construct
  misc_feature 1..20: note = chemically synthesized
  source 1..20: mol_type = other DNA
cgggctcaacagagcttcag

SEQ ID NO: 23486 - DNA, 20 bp, synthetic construct
  misc_feature 1..20: note = chemically synthesized
  source 1..20: mol_type = other DNA
gggctcaacagagcttcagg

SEQ ID NO: 23487 - DNA, 20 bp, synthetic construct
  misc_feature 1..20: note = chemically synthesized
  source 1..20: mol_type = other DNA
ctcaacagagcttcaggagg

SEQ ID NO: 23488 - DNA, 20 bp, synthetic construct
  misc_feature 1..20: note = chemically synthesized
  source 1..20: mol_type = other DNA
tcaacagagcttcaggagga

SEQ ID NO: 23489 - DNA, 20 bp, synthetic construct
  misc_feature 1..20: note = chemically synthesized
  source 1..20: mol_type = other DNA
cagagcttcaggaggaagga

SEQ ID NO: 23490 - DNA, 20 bp, synthetic construct
  misc_feature 1..20: note = chemically synthesized
  source 1..20: mol_type = other DNA
agagcttcaggaggaaggat

SEQ ID NO: 23491 - DNA, 20 bp, synthetic construct
  misc_feature 1..20: note = chemically synthesized
  source 1..20: mol_type = other DNA
agcttcaggaggaaggatag

SEQ ID NO: 23492 - DNA, 20 bp, synthetic construct
  misc_feature 1..20: note = chemically synthesized
  source 1..20: mol_type = other DNA
aaggataggagcctctgtct

SEQ ID NO: 23493 - DNA, 20 bp, synthetic construct
  misc_feature 1..20: note = chemically synthesized
  source 1..20: mol_type = other DNA
aggataggagcctctgtcta

SEQ ID NO: 23494 - DNA, 20 bp, synthetic construct
  misc_feature 1..20: note = chemically synthesized
  source 1..20: mol_type = other DNA
ataggagcctctgtctaagg

SEQ ID NO: 23495 - DNA, 20 bp, synthetic construct
  misc_feature 1..20: note = chemically synthesized
  source 1..20: mol_type = other DNA
ggagcctctgtctaaggcag

SEQ ID NO: 23496 - DNA, 20 bp, synthetic construct
  misc_feature 1..20: note = chemically synthesized
  source 1..20: mol_type = other DNA
gcctctgtctaaggcagaag

SEQ ID NO: 23497 - DNA, 20 bp, synthetic construct
  misc_feature 1..20: note = chemically synthesized
  source 1..20: mol_type = other DNA
ctaaggcagaagtagaattt

SEQ ID NO: 23498 - DNA, 20 bp, synthetic construct
  misc_feature 1..20: note = chemically synthesized
  source 1..20: mol_type = other DNA
ggcagaagtagaatttcaga

SEQ ID NO: 23499 - DNA, 20 bp, synthetic construct
  misc_feature 1..20: note = chemically synthesized
  source 1..20: mol_type = other DNA
aagtagaatttcagaaagca

SEQ ID NO: 23500 - DNA, 20 bp, synthetic construct
  misc_feature 1..20: note = chemically synthesized
  source 1..20: mol_type = other DNA
gtagaatttcagaaagcata

SEQ ID NO: 23501 - DNA, 20 bp, synthetic construct
  misc_feature 1..20: note = chemically synthesized
  source 1..20: mol_type = other DNA
aatttcagaaagcatagaga

SEQ ID NO: 23502 - DNA, 20 bp, synthetic construct
  misc_feature 1..20: note = chemically synthesized
  source 1..20: mol_type = other DNA
gaaagcatagagaaagtttg

SEQ ID NO: 23503 - DNA, 20 bp, synthetic construct
  misc_feature 1..20: note = chemically synthesized
  source 1..20: mol_type = other DNA
aagcatagagaaagtttgaa

SEQ ID NO: 23504 - DNA, 20 bp, synthetic construct
  misc_feature 1..20: note = chemically synthesized
  source 1..20: mol_type = other DNA
agaaagtttgaagagtttaa

SEQ ID NO: 23505 - DNA, 20 bp, synthetic construct
  misc_feature 1..20: note = chemically synthesized
  source 1..20: mol_type = other DNA
agagtttaatggtgacttac

SEQ ID NO: 23506 - DNA, 20 bp, synthetic construct
  misc_feature 1..20: note = chemically synthesized
  source 1..20: mol_type = other DNA
ttaatggtgacttacaagaa

SEQ ID NO: 23507 - DNA, 20 bp, synthetic construct
  misc_feature 1..20: note = chemically synthesized
  source 1..20: mol_type = other DNA
aagaaaagttaccattatta

SEQ ID NO: 23508 - DNA, 20 bp, synthetic construct
  misc_feature 1..20: note = chemically synthesized
  source 1..20: mol_type = other DNA
aagttaccattattatagtc

SEQ ID NO: 23509 - DNA, 20 bp, synthetic construct
  misc_feature 1..20: note = chemically synthesized
  source 1..20: mol_type = other DNA
ttattatagtcaagacgaat

SEQ ID NO: 23510 - DNA, 20 bp, synthetic construct
  misc_feature 1..20: note = chemically synthesized
  source 1..20: mol_type = other DNA
aatactttcaaaaacatctc

SEQ ID NO: 23511 - DNA, 20 bp, synthetic construct
  misc_feature 1..20: note = chemically synthesized
  source 1..20: mol_type = other DNA
caaaaacatctccagccttg

SEQ ID NO: 23512 - DNA, 20 bp, synthetic construct
  misc_feature 1..20: note = chemically synthesized
  source 1..20: mol_type = other DNA
acatctccagccttgaagct

SEQ ID NO: 23513 - DNA, 20 bp, synthetic construct
  misc_feature 1..20: note = chemically synthesized
  source 1..20: mol_type = other DNA
gccttgaagctaagtttcat

SEQ ID NO: 23514 - DNA, 20 bp, synthetic construct
  misc_feature 1..20: note = chemically synthesized
  source 1..20: mol_type = other DNA
ccttgaagctaagtttcata

SEQ ID NO: 23515 - DNA, 20 bp, synthetic construct
  misc_feature 1..20: note = chemically synthesized
  source 1..20: mol_type = other DNA
taagtttcataaggaaactg

SEQ ID NO: 23516 - DNA, 20 bp, synthetic construct
  misc_feature 1..20: note = chemically synthesized
  source 1..20: mol_type = other DNA
ataaggaaactgtggtgctt

SEQ ID NO: 23517 - DNA, 20 bp, synthetic construct
  misc_feature 1..20: note = chemically synthesized
  source 1..20: mol_type = other DNA
ctgtggtgctttggtacaaa

SEQ ID NO: 23518 - DNA, 20 bp, synthetic construct
  misc_feature 1..20: note = chemically synthesized
  source 1..20: mol_type = other DNA
gctttggtacaaacagtatg

SEQ ID NO: 23519 - DNA, 20 bp, synthetic construct
  misc_feature 1..20: note = chemically synthesized
  source 1..20: mol_type = other DNA
gtatgaagtgatgatgaaac

SEQ ID NO: 23520 - DNA, 20 bp, synthetic construct
  misc_feature 1..20: note = chemically synthesized
  source 1..20: mol_type = other DNA
tatgaagtgatgatgaaact

SEQ ID NO: 23521 - DNA, 20 bp, synthetic construct
  misc_feature 1..20: note = chemically synthesized
  source 1..20: mol_type = other DNA
tgatgatgaaactgggtgac

SEQ ID NO: 23522 - DNA, 20 bp, synthetic construct
  misc_feature 1..20: note = chemically synthesized
  source 1..20: mol_type = other DNA
tgggtgaccagtatgctgac

SEQ ID NO: 23523 - DNA, 20 bp, synthetic construct
  misc_feature 1..20: note = chemically synthesized
  source 1..20: mol_type = other DNA
gggtgaccagtatgctgaca

SEQ ID NO: 23524 - DNA, 20 bp, synthetic construct
  misc_feature 1..20: note = chemically synthesized
  source 1..20: mol_type = other DNA
gacaaggccttcaacattca

SEQ ID NO: 23525 - DNA, 20 bp, synthetic construct
  misc_feature 1..20: note = chemically synthesized
  source 1..20: mol_type = other DNA
caaggccttcaacattcaaa

SEQ ID NO: 23526 - DNA, 20 bp, synthetic construct
  misc_feature 1..20: note = chemically synthesized
  source 1..20: mol_type = other DNA
aagagcaacacccactgatt

SEQ ID NO: 23527 - DNA, 20 bp, synthetic construct
  misc_feature 1..20: note = chemically synthesized
  source 1..20: mol_type = other DNA
agagcaacacccactgattt

SEQ ID NO: 23528 - DNA, 20 bp, synthetic construct
  misc_feature 1..20: note = chemically synthesized
  source 1..20: mol_type = other DNA
tgggtcctctccacattgca

SEQ ID NO: 23529 - DNA, 20 bp, synthetic construct
  misc_feature 1..20: note = chemically synthesized
  source 1..20: mol_type = other DNA
acattgcaaagatgtcctca

SEQ ID NO: 23530 - DNA, 20 bp, synthetic construct
  misc_feature 1..20: note = chemically synthesized
  source 1..20: mol_type = other DNA
gcaaagatgtcctcatggcc

SEQ ID NO: 23531 - DNA, 20 bp, synthetic construct
  misc_feature 1..20: note = chemically synthesized
  source 1..20: mol_type = other DNA
caaagatgtcctcatggcct

SEQ ID NO: 23532 - DNA, 20 bp, synthetic construct
  misc_feature 1..20: note = chemically synthesized
  source 1..20: mol_type = other DNA
aaagatgtcctcatggccta

SEQ ID NO: 23533 - DNA, 20 bp, synthetic construct
  misc_feature 1..20: note = chemically synthesized
  source 1..20: mol_type = other DNA
agatgtcctcatggcctagg

SEQ ID NO: 23534 - DNA, 20 bp, synthetic construct
  misc_feature 1..20: note = chemically synthesized
  source 1..20: mol_type = other DNA
agggagctttcattccaccc

SEQ ID NO: 23535 - DNA, 20 bp, synthetic construct
  misc_feature 1..20: note = chemically synthesized
  source 1..20: mol_type = other DNA
ttccaccccagcccaacaac

SEQ ID NO: 23536 - DNA, 20 bp, synthetic construct
  misc_feature 1..20: note = chemically synthesized
  source 1..20: mol_type = other DNA
cccagcccaacaactagttc

SEQ ID NO: 23537 - DNA, 20 bp, synthetic construct
  misc_feature 1..20: note = chemically synthesized
  source 1..20: mol_type = other DNA
aactagttcaagtgaaacac

SEQ ID NO: 23538 - DNA, 20 bp, synthetic construct
  misc_feature 1..20: note = chemically synthesized
  source 1..20: mol_type = other DNA
agcacctgcttctcctatgc

SEQ ID NO: 23539 - DNA, 20 bp, synthetic construct
  misc_feature 1..20: note = chemically synthesized
  source 1..20: mol_type = other DNA
ctcctatgccagcatgacct

SEQ ID NO: 23540 - DNA, 20 bp, synthetic construct
  misc_feature 1..20: note = chemically synthesized
  source 1..20: mol_type = other DNA
catgacctgagtcactcttg

SEQ ID NO: 23541 - DNA, 20 bp, synthetic construct
  misc_feature 1..20: note = chemically synthesized
  source 1..20: mol_type = other DNA
tgcagtcctgtatctgtcta

SEQ ID NO: 23542 - DNA, 20 bp, synthetic construct
  misc_feature 1..20: note = chemically synthesized
  source 1..20: mol_type = other DNA
ctgtctaaagtcacttgaca

SEQ ID NO: 23543 - DNA, 20 bp, synthetic construct
  misc_feature 1..20: note = chemically synthesized
  source 1..20: mol_type = other DNA
tgtctaaagtcacttgacaa

SEQ ID NO: 23544 - DNA, 20 bp, synthetic construct
  misc_feature 1..20: note = chemically synthesized
  source 1..20: mol_type = other DNA
gtcacttgacaaaggaactg

SEQ ID NO: 23545 - DNA, 20 bp, synthetic construct
  misc_feature 1..20: note = chemically synthesized
  source 1..20: mol_type = other DNA
acttgacaaaggaactgcag

SEQ ID NO: 23546 - DNA, 20 bp, synthetic construct
  misc_feature 1..20: note = chemically synthesized
  source 1..20: mol_type = other DNA
cttgacaaaggaactgcagc

SEQ ID NO: 23547 - DNA, 20 bp, synthetic construct
  misc_feature 1..20: note = chemically synthesized
  source 1..20: mol_type = other DNA
caggaaaaatatcatcttca

SEQ ID NO: 23548 - DNA, 20 bp, synthetic construct
  misc_feature 1..20: note = chemically synthesized
  source 1..20: mol_type = other DNA
catcttcacagactgtccta

SEQ ID NO: 23549 - DNA, 20 bp, synthetic construct
  misc_feature 1..20: note = chemically synthesized
  source 1..20: mol_type = other DNA
ttcacagactgtcctaaagt

SEQ ID NO: 23550 - DNA, 20 bp, synthetic construct
  misc_feature 1..20: note = chemically synthesized
  source 1..20: mol_type = other DNA
cagactgtcctaaagtaaga

SEQ ID NO: 23551 - DNA, 20 bp, synthetic construct
  misc_feature 1..20: note = chemically synthesized
  source 1..20: mol_type = other DNA
agactgtcctaaagtaagat

SEQ ID NO: 23552 - DNA, 20 bp, synthetic construct
  misc_feature 1..20: note = chemically synthesized
  source 1..20: mol_type = other DNA
tatccacaaatcatctgtaa

SEQ ID NO: 23553 - DNA, 20 bp, synthetic construct
  misc_feature 1..20: note = chemically synthesized
  source 1..20: mol_type = other DNA
atctgtaaaagttatgtttt

SEQ ID NO: 23554 - DNA, 20 bp, synthetic construct
  misc_feature 1..20: note = chemically synthesized
  source 1..20: mol_type = other DNA
tgtaaaagttatgttttcag

SEQ ID NO: 23555 - DNA, 20 bp, synthetic construct
  misc_feature 1..20: note = chemically synthesized
  source 1..20: mol_type = other DNA
gtgtcatttcaaataaacct

SEQ ID NO: 23556 - DNA, 20 bp, synthetic construct
  misc_feature 1..20: note = chemically synthesized
  source 1..20: mol_type = other DNA
tgtcatttcaaataaacctt

SEQ ID NO: 23557 - DNA, 20 bp, synthetic construct
  misc_feature 1..20: note = chemically synthesized
  source 1..20: mol_type = other DNA
taaaaattaaaaaaaaaaaa

SEQ ID NO: 23558 - DNA, 20 bp, synthetic construct
  misc_feature 1..20: note = chemically synthesized
  source 1..20: mol_type = other DNA
aaaattaaaaaaaaaaaaaa

SEQ ID NO: 23559 - DNA, 20 bp, synthetic construct
  misc_feature 1..20: note = chemically synthesized
  source 1..20: mol_type = other DNA
attaaaaaaaaaaaaaagag

SEQ ID NO: 23560 - DNA, 20 bp, synthetic construct
  misc_feature 1..20: note = chemically synthesized
  source 1..20: mol_type = other DNA
ttaaaaaaaaaaaaaagagt

SEQ ID NO: 23561 - DNA, 20 bp, synthetic construct
  misc_feature 1..20: note = chemically synthesized
  source 1..20: mol_type = other DNA
taaaaaaaaaaaaaagagta

SEQ ID NO: 23562 - DNA, 20 bp, synthetic construct
  misc_feature 1..20: note = chemically synthesized
  source 1..20: mol_type = other DNA
aaaaaaaaaagagtagggtc

SEQ ID NO: 23563 - DNA, 20 bp, synthetic construct
  misc_feature 1..20: note = chemically synthesized
  source 1..20: mol_type = other DNA
aaaaaaaaagagtagggtca

SEQ ID NO: 23564 - DNA, 20 bp, synthetic construct
  misc_feature 1..20: note = chemically synthesized
  source 1..20: mol_type = other DNA
aaaaaaaagagtagggtcaa

SEQ ID NO: 23565 - DNA, 20 bp, synthetic construct
  misc_feature 1..20: note = chemically synthesized
  source 1..20: mol_type = other DNA
aaaaaaagagtagggtcaag

SEQ ID NO: 23566 - DNA, 20 bp, synthetic construct
  misc_feature 1..20: note = chemically synthesized
  source 1..20: mol_type = other DNA
aagagtagggtcaaggggta

SEQ ID NO: 23567 - DNA, 20 bp, synthetic construct
  misc_feature 1..20: note = chemically synthesized
  source 1..20: mol_type = other DNA
agagtagggtcaaggggtat

SEQ ID NO: 23568 - DNA, 20 bp, synthetic construct
  misc_feature 1..20: note = chemically synthesized
  source 1..20: mol_type = other DNA
gagtagggtcaaggggtata

SEQ ID NO: 23569 - DNA, 20 bp, synthetic construct
  misc_feature 1..20: note = chemically synthesized
  source 1..20: mol_type = other DNA
tagggtcaaggggtataggg

SEQ ID NO: 23570 - DNA, 20 bp, synthetic construct
  misc_feature 1..20: note = chemically synthesized
  source 1..20: mol_type = other DNA
agggtagcaaaattttctta

SEQ ID NO: 23571 - DNA, 20 bp, synthetic construct
  misc_feature 1..20: note = chemically synthesized
  source 1..20: mol_type = other DNA
gggtagcaaaattttcttaa

SEQ ID NO: 23572 - DNA, 20 bp, synthetic construct
  misc_feature 1..20: note = chemically synthesized
  source 1..20: mol_type = other DNA
atgccctgctctgattcctg

SEQ ID NO: 23573 - DNA, 20 bp, synthetic construct
  misc_feature 1..20: note = chemically synthesized
  source 1..20: mol_type = other DNA
ctctgattcctgtagtgaca

SEQ ID NO: 23574 - DNA, 20 bp, synthetic construct
  misc_feature 1..20: note = chemically synthesized
  source 1..20: mol_type = other DNA
tctgattcctgtagtgacat

SEQ ID NO: 23575 - DNA, 20 bp, synthetic construct
  misc_feature 1..20: note = chemically synthesized
  source 1..20: mol_type = other DNA
gtgacataggcgtcaatata

SEQ ID NO: 23576 - DNA, 20 bp, synthetic construct
  misc_feature 1..20: note = chemically synthesized
  source 1..20: mol_type = other DNA
ataggcgtcaatatacagac

SEQ ID NO: 23577 - DNA, 20 bp, synthetic construct
  misc_feature 1..20: note = chemically synthesized
  source 1..20: mol_type = other DNA
taggcgtcaatatacagaca

SEQ ID NO: 23578 - DNA, 20 bp, synthetic construct
  misc_feature 1..20: note = chemically synthesized
  source 1..20: mol_type = other DNA
tcaatatacagacaaggtcc

SEQ ID NO: 23579 - DNA, 20 bp, synthetic construct
  misc_feature 1..20: note = chemically synthesized
  source 1..20: mol_type = other DNA
atatacagacaaggtcctgg

SEQ ID NO: 23580 - DNA, 20 bp, synthetic construct
  misc_feature 1..20: note = chemically synthesized
  source 1..20: mol_type = other DNA
ttcttttaaaaatctgctgc

SEQ ID NO: 23581 - DNA, 20 bp, synthetic construct
  misc_feature 1..20: note = chemically synthesized
  source 1..20: mol_type = other DNA
ttaaaaatctgctgcaagct

SEQ ID NO: 23582 - DNA, 20 bp, synthetic construct
  misc_feature 1..20: note = chemically synthesized
  source 1..20: mol_type = other DNA
taaaaatctgctgcaagctg

SEQ ID NO: 23583 - DNA, 20 bp, synthetic construct
  misc_feature 1..20: note = chemically synthesized
  source 1..20: mol_type = other DNA
aaaaatctgctgcaagctga

SEQ ID NO: 23584 - DNA, 20 bp, synthetic construct
  misc_feature 1..20: note = chemically synthesized
  source 1..20: mol_type = other DNA
ctgcaagctgagggtcctgt

SEQ ID NO: 23585 - DNA, 20 bp, synthetic construct
  misc_feature 1..20: note = chemically synthesized
  source 1..20: mol_type = other DNA
caagctgagggtcctgttag

SEQ ID NO: 23586 - DNA, 20 bp, synthetic construct
  misc_feature 1..20: note = chemically synthesized
  source 1..20: mol_type = other DNA
aagctgagggtcctgttaga

SEQ ID NO: 23587 - DNA, 20 bp, synthetic construct
  misc_feature 1..20: note = chemically synthesized
  source 1..20: mol_type = other DNA
ttagaaggaaaactaacaaa

SEQ ID NO: 23588 - DNA, 20 bp, synthetic construct
  misc_feature 1..20: note = chemically synthesized
  source 1..20: mol_type = other DNA
aaggaaaactaacaaacaga

SEQ ID NO: 23589 - DNA, 20 bp, synthetic construct
  misc_feature 1..20: note = chemically synthesized
  source 1..20: mol_type = other DNA
aggaaaactaacaaacagaa

SEQ ID NO: 23590 - DNA, 20 bp, synthetic construct
  misc_feature 1..20: note = chemically synthesized
  source 1..20: mol_type = other DNA
tctgtacgtcaccatcatca

SEQ ID NO: 23591 - DNA, 20 bp, synthetic construct
  misc_feature 1..20: note = chemically synthesized
  source 1..20: mol_type = other DNA
gtcaccatcatcaaagacca

SEQ ID NO: 23592 - DNA, 20 bp, synthetic construct
  misc_feature 1..20: note = chemically synthesized
  source 1..20: mol_type = other DNA
tcaccatcatcaaagaccaa

SEQ ID NO: 23593 - DNA, 20 bp, synthetic construct
  misc_feature 1..20: note = chemically synthesized
  source 1..20: mol_type = other DNA
ccatcatcaaagaccaaagg

SEQ ID NO: 23594 - DNA, 20 bp, synthetic construct
  misc_feature 1..20: note = chemically synthesized
  source 1..20: mol_type = other DNA
caaaggtagataaaaccaca

SEQ ID NO: 23595 - DNA, 20 bp, synthetic construct
  misc_feature 1..20: note = chemically synthesized
  source 1..20: mol_type = other DNA
ggtagataaaaccacaaaga

SEQ ID NO: 23596 - DNA, 20 bp, synthetic construct
  misc_feature 1..20: note = chemically synthesized
  source 1..20: mol_type = other DNA
gtagataaaaccacaaagat

SEQ ID NO: 23597 - DNA, 20 bp, synthetic construct
  misc_feature 1..20: note = chemically synthesized
  source 1..20: mol_type = other DNA
tagataaaaccacaaagatg

SEQ ID NO: 23598 - DNA, 20 bp, synthetic construct
  misc_feature 1..20: note = chemically synthesized
  source 1..20: mol_type = other DNA
accacaaagatggggaaaaa

SEQ ID NO: 23599 - DNA, 20 bp, synthetic construct
  misc_feature 1..20: note = chemically synthesized
  source 1..20: mol_type = other DNA
cacaaagatggggaaaaaca

SEQ ID NO: 23600 - DNA, 20 bp, synthetic construct
  misc_feature 1..20: note = chemically synthesized
  source 1..20: mol_type = other DNA
aaagatggggaaaaacagag

SEQ ID NO: 23601 - DNA, 20 bp, synthetic construct
  misc_feature 1..20: note = chemically synthesized
  source 1..20: mol_type = other DNA
gaaaaacagagcagaaaaac

SEQ ID NO: 23602 - DNA, 20 bp, synthetic construct
  misc_feature 1..20: note = chemically synthesized
  source 1..20: mol_type = other DNA
aaactggaaactctaaaaat

SEQ ID NO: 23603 - DNA, 20 bp, synthetic construct
  misc_feature 1..20: note = chemically synthesized
  source 1..20: mol_type = other DNA
actggaaactctaaaaatca

SEQ ID NO: 23604 - DNA, 20 bp, synthetic construct
  misc_feature 1..20: note = chemically synthesized
  source 1..20: mol_type = other DNA
agagtgcctctcctcctcca

SEQ ID NO: 23605 - DNA, 20 bp, synthetic construct
  misc_feature 1..20: note = chemically synthesized
  source 1..20: mol_type = other DNA
gagtgcctctcctcctccaa

SEQ ID NO: 23606 - DNA, 20 bp, synthetic construct
  misc_feature 1..20: note = chemically synthesized
  source 1..20: mol_type = other DNA
tctcctcctccaaaggaatg

SEQ ID NO: 23607 - DNA, 20 bp, synthetic construct
  misc_feature 1..20: note = chemically synthesized
  source 1..20: mol_type = other DNA
aaaggaatgcagctcctcac

SEQ ID NO: 23608 - DNA, 20 bp, synthetic construct
  misc_feature 1..20: note = chemically synthesized
  source 1..20: mol_type = other DNA
atgcagctcctcaccagcaa

SEQ ID NO: 23609 - DNA, 20 bp, synthetic construct
  misc_feature 1..20: note = chemically synthesized
  source 1..20: mol_type = other DNA
tcctcaccagcaacggtaca

SEQ ID NO: 23610 - DNA, 20 bp, synthetic construct
  misc_feature 1..20: note = chemically synthesized
  source 1..20: mol_type = other DNA
caccagcaacggtacaaagc

SEQ ID NO: 23611 - DNA, 20 bp, synthetic construct
  misc_feature 1..20: note = chemically synthesized
  source 1..20: mol_type = other DNA
agcaacggtacaaagctgga

SEQ ID NO: 23612 - DNA, 20 bp, synthetic construct
  misc_feature 1..20: note = chemically synthesized
  source 1..20: mol_type = other DNA
caacggtacaaagctggaca

SEQ ID NO: 23613 - DNA, 20 bp, synthetic construct
  misc_feature 1..20: note = chemically synthesized
  source 1..20: mol_type = other DNA
ggacagagaatgactttgac

SEQ ID NO: 23614 - DNA, 20 bp, synthetic construct
  misc_feature 1..20: note = chemically synthesized
  source 1..20: mol_type = other DNA
gagaatgactttgacaagtt

SEQ ID NO: 23615 - DNA, 20 bp, synthetic construct
  misc_feature 1..20: note = chemically synthesized
  source 1..20: mol_type = other DNA
gaatgactttgacaagttga

SEQ ID NO: 23616 - DNA, 20 bp, synthetic construct
  misc_feature 1..20: note = chemically synthesized
  source 1..20: mol_type = other DNA
tgactttgacaagttgagag

SEQ ID NO: 23617 - DNA, 20 bp, synthetic construct
  misc_feature 1..20: note = chemically synthesized
  source 1..20: mol_type = other DNA
ctttgacaagttgagagaag

SEQ ID NO: 23618 - DNA, 20 bp, synthetic construct
  misc_feature 1..20: note = chemically synthesized
  source 1..20: mol_type = other DNA
tttgacaagttgagagaaga

SEQ ID NO: 23619 - DNA, 20 bp, synthetic construct
  misc_feature 1..20: note = chemically synthesized
  source 1..20: mol_type = other DNA
aagttgagagaagaaggctt

SEQ ID NO: 23620 - DNA, 20 bp, synthetic construct
  misc_feature 1..20: note = chemically synthesized
  source 1..20: mol_type = other DNA
tcagacgatcaaactactcc

SEQ ID NO: 23621 - DNA, 20 bp, synthetic construct
  misc_feature 1..20: note = chemically synthesized
  source 1..20: mol_type = other DNA
gatcaaactactccgagcta

SEQ ID NO: 23622 - DNA, 20 bp, synthetic construct
  misc_feature 1..20: note = chemically synthesized
  source 1..20: mol_type = other DNA
atcaaactactccgagctaa

SEQ ID NO: 23623 - DNA, 20 bp, synthetic construct
  misc_feature 1..20: note = chemically synthesized
  source 1..20: mol_type = other DNA
caaactactccgagctaaag

SEQ ID NO: 23624 - DNA, 20 bp, synthetic construct
  misc_feature 1..20: note = chemically synthesized
  source 1..20: mol_type = other DNA
aaactactccgagctaaagg

SEQ ID NO: 23625 - DNA, 20 bp, synthetic construct
  misc_feature 1..20: note = chemically synthesized
  source 1..20: mol_type = other DNA
ctactccgagctaaaggagg

SEQ ID NO: 23626 - DNA, 20 bp, synthetic construct
  misc_feature 1..20: note = chemically synthesized
  source 1..20: mol_type = other DNA
aaggaggaagctcgaaccca

SEQ ID NO: 23627 - DNA, 20 bp, synthetic construct
  misc_feature 1..20: note = chemically synthesized
  source 1..20: mol_type = other DNA
agctcgaacccatggcaaaa

SEQ ID NO: 23628 - DNA, 20 bp, synthetic construct
  misc_feature 1..20: note = chemically synthesized
  source 1..20: mol_type = other DNA
taaaaaccttgaaaataaat

SEQ ID NO: 23629 - DNA, 20 bp, synthetic construct
  misc_feature 1..20: note = chemically synthesized
  source 1..20: mol_type = other DNA
ttgaaaataaattagactaa

SEQ ID NO: 23630 - DNA, 20 bp, synthetic construct
  misc_feature 1..20: note = chemically synthesized
  source 1..20: mol_type = other DNA
aaattagactaatggctaac

SEQ ID NO: 23631 - DNA, 20 bp, synthetic construct
  misc_feature 1..20: note = chemically synthesized
  source 1..20: mol_type = other DNA
gctaactagaataaccaata

SEQ ID NO: 23632 - DNA, 20 bp, synthetic construct
  misc_feature 1..20: note = chemically synthesized
  source 1..20: mol_type = other DNA
taactagaataaccaataca

SEQ ID NO: 23633 - DNA, 20 bp, synthetic construct
  misc_feature 1..20: note = chemically synthesized
  source 1..20: mol_type = other DNA
ctagaataaccaatacagag

SEQ ID NO: 23634 - DNA, 20 bp, synthetic construct
  misc_feature 1..20: note = chemically synthesized
  source 1..20: mol_type = other DNA
ccaatacagagaagtcctta

SEQ ID NO: 23635 - DNA, 20 bp, synthetic construct
  misc_feature 1..20: note = chemically synthesized
  source 1..20: mol_type = other DNA
caatacagagaagtccttaa

SEQ ID NO: 23636 - DNA, 20 bp, synthetic construct
  misc_feature 1..20: note = chemically synthesized
  source 1..20: mol_type = other DNA
gaagtccttaaaggacctga

SEQ ID NO: 23637 - DNA, 20 bp, synthetic construct
  misc_feature 1..20: note = chemically synthesized
  source 1..20: mol_type = other DNA
agtccttaaaggacctgatg

SEQ ID NO: 23638 - DNA, 20 bp, synthetic construct
  misc_feature 1..20: note = chemically synthesized
  source 1..20: mol_type = other DNA
acctgatggagctgaaaacc

SEQ ID NO: 23639 - DNA, 20 bp, synthetic construct
  misc_feature 1..20: note = chemically synthesized
  source 1..20: mol_type = other DNA
cctgatggagctgaaaacca

SEQ ID NO: 23640 - DNA, 20 bp, synthetic construct
  misc_feature 1..20: note = chemically synthesized
  source 1..20: mol_type = other DNA
ggagctgaaaaccaaggcat

SEQ ID NO: 23641 - DNA, 20 bp, synthetic construct
  misc_feature 1..20: note = chemically synthesized
  source 1..20: mol_type = other DNA
gaactacatgatgaatgcac

SEQ ID NO: 23642 - DNA, 20 bp, synthetic construct
  misc_feature 1..20: note = chemically synthesized
  source 1..20: mol_type = other DNA
catgatgaatgcacaagact

SEQ ID NO: 23643 - DNA, 20 bp, synthetic construct
  misc_feature 1..20: note = chemically synthesized
  source 1..20: mol_type = other DNA
gatgaatgcacaagactcag

SEQ ID NO: 23644 - DNA, 20 bp, synthetic construct
  misc_feature 1..20: note = chemically synthesized
  source 1..20: mol_type = other DNA
cagtagctgattcgatcaac

SEQ ID NO: 23645 - DNA, 20 bp, synthetic construct
  misc_feature 1..20: note = chemically synthesized
  source 1..20: mol_type = other DNA
tagctgattcgatcaactgg

SEQ ID NO: 23646 - DNA, 20 bp, synthetic construct
  misc_feature 1..20: note = chemically synthesized
  source 1..20: mol_type = other DNA
tgattcgatcaactggaaga

SEQ ID NO: 23647 - DNA, 20 bp, synthetic construct
  misc_feature 1..20: note = chemically synthesized
  source 1..20: mol_type = other DNA
gattcgatcaactggaagaa

SEQ ID NO: 23648 - DNA, 20 bp, synthetic construct
  misc_feature 1..20: note = chemically synthesized
  source 1..20: mol_type = other DNA
attcgatcaactggaagaaa

SEQ ID NO: 23649 - DNA, 20 bp, synthetic construct
  misc_feature 1..20: note = chemically synthesized
  source 1..20: mol_type = other DNA
tcaactggaagaaagggtat

SEQ ID NO: 23650 - DNA, 20 bp, synthetic construct
  misc_feature 1..20: note = chemically synthesized
  source 1..20: mol_type = other DNA
ggaagaaagggtatcagtga

SEQ ID NO: 23651 - DNA, 20 bp, synthetic construct
  misc_feature 1..20: note = chemically synthesized
  source 1..20: mol_type = other DNA
agaaagggtatcagtgatgg

SEQ ID NO: 23652 - DNA, 20 bp, synthetic construct
  misc_feature 1..20: note = chemically synthesized
  source 1..20: mol_type = other DNA
aagatcaaatgaatgaaatg

SEQ ID NO: 23653 - DNA, 20 bp, synthetic construct
  misc_feature 1..20: note = chemically synthesized
  source 1..20: mol_type = other DNA
tcaaatgaatgaaatgaagc

SEQ ID NO: 23654 - DNA, 20 bp, synthetic construct
  misc_feature 1..20: note = chemically synthesized
  source 1..20: mol_type = other DNA
aatgaatgaaatgaagcaag

SEQ ID NO: 23655 - DNA, 20 bp, synthetic construct
  misc_feature 1..20: note = chemically synthesized
  source 1..20: mol_type = other DNA
tgaatgaaatgaagcaagaa

SEQ ID NO: 23656 - DNA, 20 bp, synthetic construct
  misc_feature 1..20: note = chemically synthesized
  source 1..20: mol_type = other DNA
atgaaatgaagcaagaagag

SEQ ID NO: 23657 - DNA, 20 bp, synthetic construct
  misc_feature 1..20: note = chemically synthesized
  source 1..20: mol_type = other DNA
atgaagcaagaagagaagtt

SEQ ID NO: 23658 - DNA, 20 bp, synthetic construct
  misc_feature 1..20: note = chemically synthesized
  source 1..20: mol_type = other DNA
gaagcaagaagagaagttta

SEQ ID NO: 23659 - DNA, 20 bp, synthetic construct
  misc_feature 1..20: note = chemically synthesized
  source 1..20: mol_type = other DNA
gaagagaagtttagagaaaa

SEQ ID NO: 23660 - DNA, 20 bp, synthetic construct
  misc_feature 1..20: note = chemically synthesized
  source 1..20: mol_type = other DNA
tttagagaaaaaagaataaa

SEQ ID NO: 23661 - DNA, 20 bp, synthetic construct
  misc_feature 1..20: note = chemically synthesized
  source 1..20: mol_type = other DNA
agaataaaaagaaatgaaca

SEQ ID NO: 23662 - DNA, 20 bp, synthetic construct
  misc_feature 1..20: note = chemically synthesized
  source 1..20: mol_type = other DNA
aagaaatgaacaaagcctcc

SEQ ID NO: 23663 - DNA, 20 bp, synthetic construct
  misc_feature 1..20: note = chemically synthesized
  source 1..20: mol_type = other DNA
aacaaagcctccaagaaata

SEQ ID NO: 23664 - DNA, 20 bp, synthetic construct
  misc_feature 1..20: note = chemically synthesized
  source 1..20: mol_type = other DNA
acaaagcctccaagaaatat

SEQ ID NO: 23665 - DNA, 20 bp, synthetic construct
  misc_feature 1..20: note = chemically synthesized
  source 1..20: mol_type = other DNA
gaaatatgggactatgtgaa

SEQ ID NO: 23666 - DNA, 20 bp, synthetic construct
  misc_feature 1..20: note = chemically synthesized
  source 1..20: mol_type = other DNA
agaccaaatctatatctgat

SEQ ID NO: 23667 - DNA, 20 bp, synthetic construct
  misc_feature 1..20: note = chemically synthesized
  source 1..20: mol_type = other DNA
tatctgattggtgtacctga

SEQ ID NO: 23668 - DNA, 20 bp, synthetic construct
  misc_feature 1..20: note = chemically synthesized
  source 1..20: mol_type = other DNA
attggtgtacctgaaagtga

SEQ ID NO: 23669 - DNA, 20 bp, synthetic construct
  misc_feature 1..20: note = chemically synthesized
  source 1..20: mol_type = other DNA
ttggtgtacctgaaagtgac

SEQ ID NO: 23670 - DNA, 20 bp, synthetic construct
  misc_feature 1..20: note = chemically synthesized
  source 1..20: mol_type = other DNA
gtgtacctgaaagtgacggg

SEQ ID NO: 23671 - DNA, 20 bp, synthetic construct
  misc_feature 1..20: note = chemically synthesized
  source 1..20: mol_type = other DNA
cctgaaagtgacgggcagaa

SEQ ID NO: 23672 - DNA, 20 bp, synthetic construct
  misc_feature 1..20: note = chemically synthesized
  source 1..20: mol_type = other DNA
gtgacgggcagaatggaacc

SEQ ID NO: 23673 - DNA, 20 bp, synthetic construct
  misc_feature 1..20: note = chemically synthesized
  source 1..20: mol_type = other DNA
cgggcagaatggaaccaagt

SEQ ID NO: 23674 - DNA, 20 bp, synthetic construct
  misc_feature 1..20: note = chemically synthesized
  source 1..20: mol_type = other DNA
ccaagttggaaaacactctg

SEQ ID NO: 23675 - DNA, 20 bp, synthetic construct
  misc_feature 1..20: note = chemically synthesized
  source 1..20: mol_type = other DNA
caagttggaaaacactctgc

SEQ ID NO: 23676 - DNA, 20 bp, synthetic construct
  misc_feature 1..20: note = chemically synthesized
  source 1..20: mol_type = other DNA
acactctgcaggatattatc

SEQ ID NO: 23677 - DNA, 20 bp, synthetic construct
  misc_feature 1..20: note = chemically synthesized
  source 1..20: mol_type = other DNA
cactctgcaggatattatcc

SEQ ID NO: 23678 - DNA, 20 bp, synthetic construct
  misc_feature 1..20: note = chemically synthesized
  source 1..20: mol_type = other DNA
ctctgcaggatattatccag

SEQ ID NO: 23679 - DNA, 20 bp, synthetic construct
  misc_feature 1..20: note = chemically synthesized
  source 1..20: mol_type = other DNA
ccaggagaacttccccaatc

SEQ ID NO: 23680 - DNA, 20 bp, synthetic construct
  misc_feature 1..20: note = chemically synthesized
  source 1..20: mol_type = other DNA
gagaacttccccaatctagc

SEQ ID NO: 23681 - DNA, 20 bp, synthetic construct
  misc_feature 1..20: note = chemically synthesized
  source 1..20: mol_type = other DNA
agaacttccccaatctagca

SEQ ID NO: 23682 - DNA, 20 bp, synthetic construct
  misc_feature 1..20: note = chemically synthesized
  source 1..20: mol_type = other DNA
acttccccaatctagcaagg

SEQ ID NO: 23683 - DNA, 20 bp, synthetic construct
  misc_feature 1..20: note = chemically synthesized
  source 1..20: mol_type = other DNA
cttccccaatctagcaaggc

SEQ ID NO: 23684 - DNA, 20 bp, synthetic construct
  misc_feature 1..20: note = chemically synthesized
  source 1..20: mol_type = other DNA
ggcaggtcaacattcaaatt

SEQ ID NO: 23685 - DNA, 20 bp, synthetic construct
  misc_feature 1..20: note = chemically synthesized
  source 1..20: mol_type = other DNA
gcaggtcaacattcaaattc

SEQ ID NO: 23686 - DNA, 20 bp, synthetic construct
  misc_feature 1..20: note = chemically synthesized
  source 1..20: mol_type = other DNA
acattcaaattcaggaaata

SEQ ID NO: 23687 - DNA, 20 bp, synthetic construct
  misc_feature 1..20: note = chemically synthesized
  source 1..20: mol_type = other DNA
attcaaattcaggaaataca

SEQ ID NO: 23688 - DNA, 20 bp, synthetic construct
  misc_feature 1..20: note = chemically synthesized
  source 1..20: mol_type = other DNA
gaaatacagagaacgccaca

SEQ ID NO: 23689 - DNA, 20 bp, synthetic construct
  misc_feature 1..20: note = chemically synthesized
  source 1..20: mol_type = other DNA
acgccacaaagatactcctt

SEQ ID NO: 23690 - DNA, 20 bp, synthetic construct
  misc_feature 1..20: note = chemically synthesized
  source 1..20: mol_type = other DNA
ccacaaagatactccttgag

SEQ ID NO: 23691 - DNA, 20 bp, synthetic construct
  misc_feature 1..20: note = chemically synthesized
  source 1..20: mol_type = other DNA
acaaagatactccttgagaa

SEQ ID NO: 23692 - DNA, 20 bp, synthetic construct
  misc_feature 1..20: note = chemically synthesized
  source 1..20: mol_type = other DNA
tccttgagaagagcaactac

SEQ ID NO: 23693 - DNA, 20 bp, synthetic construct
  misc_feature 1..20: note = chemically synthesized
  source 1..20: mol_type = other DNA
ccttgagaagagcaactaca

SEQ ID NO: 23694 - DNA, 20 bp, synthetic construct
  misc_feature 1..20: note = chemically synthesized
  source 1..20: mol_type = other DNA
actacaaggcacataattgt

SEQ ID NO: 23695 - DNA, 20 bp, synthetic construct
  misc_feature 1..20: note = chemically synthesized
  source 1..20: mol_type = other DNA
cataattgtcagattcacca

SEQ ID NO: 23696 - DNA, 20 bp, synthetic construct
  misc_feature 1..20: note = chemically synthesized
  source 1..20: mol_type = other DNA
gattcaccaaagttgaaatg

SEQ ID NO: 23697 - DNA, 20 bp, synthetic construct
  misc_feature 1..20: note = chemically synthesized
  source 1..20: mol_type = other DNA
attcaccaaagttgaaatga

SEQ ID NO: 23698 - DNA, 20 bp, synthetic construct
  misc_feature 1..20: note = chemically synthesized
  source 1..20: mol_type = other DNA
ttcaccaaagttgaaatgaa

SEQ ID NO: 23699 - DNA, 20 bp, synthetic construct
  misc_feature 1..20: note = chemically synthesized
  source 1..20: mol_type = other DNA
gaaatgaagggaaaaatgtt

SEQ ID NO: 23700 - DNA, 20 bp, synthetic construct
  misc_feature 1..20: note = chemically synthesized
  source 1..20: mol_type = other DNA
aaatgaagggaaaaatgtta

SEQ ID NO: 23701 - DNA, 20 bp, synthetic construct
  misc_feature 1..20: note = chemically synthesized
  source 1..20: mol_type = other DNA
aatgaagggaaaaatgttaa

SEQ ID NO: 23702 - DNA, 20 bp, synthetic construct
  misc_feature 1..20: note = chemically synthesized
  source 1..20: mol_type = other DNA
gaagggaaaaatgttaaggg

SEQ ID NO: 23703 - DNA, 20 bp, synthetic construct
  misc_feature 1..20: note = chemically synthesized
  source 1..20: mol_type = other DNA
ggaaaaatgttaagggtagc

SEQ ID NO: 23704 - DNA, 20 bp, synthetic construct
  misc_feature 1..20: note = chemically synthesized
  source 1..20: mol_type = other DNA
aaaaatgttaagggtagcca

SEQ ID NO: 23705 - DNA, 20 bp, synthetic construct
  misc_feature 1..20: note = chemically synthesized
  source 1..20: mol_type = other DNA
aaatgttaagggtagccaga

SEQ ID NO: 23706 - DNA, 20 bp, synthetic construct
  misc_feature 1..20: note = chemically synthesized
  source 1..20: mol_type = other DNA
gttaagggtagccagagaga

SEQ ID NO: 23707 - DNA, 20 bp, synthetic construct
  misc_feature 1..20: note = chemically synthesized
  source 1..20: mol_type = other DNA
ttaagggtagccagagagaa

SEQ ID NO: 23708 - DNA, 20 bp, synthetic construct
  misc_feature 1..20: note = chemically synthesized
  source 1..20: mol_type = other DNA
gggtagccagagagaaaggt

SEQ ID NO: 23709 - DNA, 20 bp, synthetic construct
  misc_feature 1..20: note = chemically synthesized
  source 1..20: mol_type = other DNA
ggtagccagagagaaaggtc

SEQ ID NO: 23710 - DNA, 20 bp, synthetic construct
  misc_feature 1..20: note = chemically synthesized
  source 1..20: mol_type = other DNA
gaaaggtcgggttacccaca

SEQ ID NO: 23711 - DNA, 20 bp, synthetic construct
  misc_feature 1..20: note = chemically synthesized
  source 1..20: mol_type = other DNA
aaaggtcgggttacccacaa

SEQ ID NO: 23712 - DNA, 20 bp, synthetic construct
  misc_feature 1..20: note = chemically synthesized
  source 1..20: mol_type = other DNA
aaggtcgggttacccacaaa

SEQ ID NO: 23713 - DNA, 20 bp, synthetic construct
  misc_feature 1..20: note = chemically synthesized
  source 1..20: mol_type = other DNA
gtcgggttacccacaaaggg

SEQ ID NO: 23714 - DNA, 20 bp, synthetic construct
  misc_feature 1..20: note = chemically synthesized
  source 1..20: mol_type = other DNA
acccacaaagggaagcccat

SEQ ID NO: 23715 - DNA, 20 bp, synthetic construct
  misc_feature 1..20: note = chemically synthesized
  source 1..20: mol_type = other DNA
agggaagcccatcagaataa

SEQ ID NO: 23716 - DNA, 20 bp, synthetic construct
  misc_feature 1..20: note = chemically synthesized
  source 1..20: mol_type = other DNA
gaagcccatcagaataacag

SEQ ID NO: 23717 - DNA, 20 bp, synthetic construct
  misc_feature 1..20: note = chemically synthesized
  source 1..20: mol_type = other DNA
cagaataacagcagatctct

SEQ ID NO: 23718 - DNA, 20 bp, synthetic construct
  misc_feature 1..20: note = chemically synthesized
  source 1..20: mol_type = other DNA
aataacagcagatctctcag

SEQ ID NO: 23719 - DNA, 20 bp, synthetic construct
  misc_feature 1..20: note = chemically synthesized
  source 1..20: mol_type = other DNA
tctctcagcagaaactctac

SEQ ID NO: 23720 - DNA, 20 bp, synthetic construct
  misc_feature 1..20: note = chemically synthesized
  source 1..20: mol_type = other DNA
tcagcagaaactctacaagc

SEQ ID NO: 23721 - DNA, 20 bp, synthetic construct
  misc_feature 1..20: note = chemically synthesized
  source 1..20: mol_type = other DNA
gcagaaactctacaagccag

SEQ ID NO: 23722 - DNA, 20 bp, synthetic construct
  misc_feature 1..20: note = chemically synthesized
  source 1..20: mol_type = other DNA
agaaactctacaagccagaa

SEQ ID NO: 23723 - DNA, 20 bp, synthetic construct
  misc_feature 1..20: note = chemically synthesized
  source 1..20: mol_type = other DNA
aaactctacaagccagaaga

SEQ ID NO: 23724 - DNA, 20 bp, synthetic construct
  misc_feature 1..20: note = chemically synthesized
  source 1..20: mol_type = other DNA
ctctacaagccagaagagag

SEQ ID NO: 23725 - DNA, 20 bp, synthetic construct
  misc_feature 1..20: note = chemically synthesized
  source 1..20: mol_type = other DNA
tctacaagccagaagagagt

SEQ ID NO: 23726 - DNA, 20 bp, synthetic construct
  misc_feature 1..20: note = chemically synthesized
  source 1..20: mol_type = other DNA
ctacaagccagaagagagtg

SEQ ID NO: 23727 - DNA, 20 bp, synthetic construct
  misc_feature 1..20: note = chemically synthesized
  source 1..20: mol_type = other DNA
tacaagccagaagagagtgg

SEQ ID NO: 23728 - DNA, 20 bp, synthetic construct
  misc_feature 1..20: note = chemically synthesized
  source 1..20: mol_type = other DNA
gccaatattcaacatcctta

SEQ ID NO: 23729 - DNA, 20 bp, synthetic construct
  misc_feature 1..20: note = chemically synthesized
  source 1..20: mol_type = other DNA
ccaatattcaacatccttaa

SEQ ID NO: 23730 - DNA, 20 bp, synthetic construct
  misc_feature 1..20: note = chemically synthesized
  source 1..20: mol_type = other DNA
tattcaacatccttaaagga

SEQ ID NO: 23731 - DNA, 20 bp, synthetic construct
  misc_feature 1..20: note = chemically synthesized
  source 1..20: mol_type = other DNA
aaaggaaagaattttcaaca

SEQ ID NO: 23732 - DNA, 20 bp, synthetic construct
  misc_feature 1..20: note = chemically synthesized
  source 1..20: mol_type = other DNA
tcaacacagaatttcatatc

SEQ ID NO: 23733 - DNA, 20 bp, synthetic construct
  misc_feature 1..20: note = chemically synthesized
  source 1..20: mol_type = other DNA
atttcatatccagccaaact

SEQ ID NO: 23734 - DNA, 20 bp, synthetic construct
  misc_feature 1..20: note = chemically synthesized
  source 1..20: mol_type = other DNA
ccagccaaactaagcttcat

SEQ ID NO: 23735 - DNA, 20 bp, synthetic construct
  misc_feature 1..20: note = chemically synthesized
  source 1..20: mol_type = other DNA
caaactaagcttcataagtg

SEQ ID NO: 23736 - DNA, 20 bp, synthetic construct
  misc_feature 1..20: note = chemically synthesized
  source 1..20: mol_type = other DNA
aaactaagcttcataagtga

SEQ ID NO: 23737 - DNA, 20 bp, synthetic construct
  misc_feature 1..20: note = chemically synthesized
  source 1..20: mol_type = other DNA
actaagcttcataagtgaag

SEQ ID NO: 23738 - DNA, 20 bp, synthetic construct
  misc_feature 1..20: note = chemically synthesized
  source 1..20: mol_type = other DNA
aggagaaataaaatacttta

SEQ ID NO: 23739 - DNA, 20 bp, synthetic construct
  misc_feature 1..20: note = chemically synthesized
  source 1..20: mol_type = other DNA
aaataaaatactttacagac

SEQ ID NO: 23740 - DNA, 20 bp, synthetic construct
  misc_feature 1..20: note = chemically synthesized
  source 1..20: mol_type = other DNA
tttacagacaagcaaatgct

SEQ ID NO: 23741 - DNA, 20 bp, synthetic construct
  misc_feature 1..20: note = chemically synthesized
  source 1..20: mol_type = other DNA
tacagacaagcaaatgctga

SEQ ID NO: 23742 - DNA, 20 bp, synthetic construct
  misc_feature 1..20: note = chemically synthesized
  source 1..20: mol_type = other DNA
ctgagagattttgtcatcac

SEQ ID NO: 23743 - DNA, 20 bp, synthetic construct
  misc_feature 1..20: note = chemically synthesized
  source 1..20: mol_type = other DNA
tgagagattttgtcatcacc

SEQ ID NO: 23744 - DNA, 20 bp, synthetic construct
  misc_feature 1..20: note = chemically synthesized
  source 1..20: mol_type = other DNA
catcaccaggcctgacctaa

SEQ ID NO: 23745 - DNA, 20 bp, synthetic construct
  misc_feature 1..20: note = chemically synthesized
  source 1..20: mol_type = other DNA
tcaccaggcctgacctaaaa

SEQ ID NO: 23746 - DNA, 20 bp, synthetic construct
  misc_feature 1..20: note = chemically synthesized
  source 1..20: mol_type = other DNA
ctgacctaaaagagctcctg

SEQ ID NO: 23747 - DNA, 20 bp, synthetic construct
  misc_feature 1..20: note = chemically synthesized
  source 1..20: mol_type = other DNA
tgacctaaaagagctcctga

SEQ ID NO: 23748 - DNA, 20 bp, synthetic construct
  misc_feature 1..20: note = chemically synthesized
  source 1..20: mol_type = other DNA
cctaaaagagctcctgaagg

SEQ ID NO: 23749 - DNA, 20 bp, synthetic construct
  misc_feature 1..20: note = chemically synthesized
  source 1..20: mol_type = other DNA
cctgaaggaagcactaaata

SEQ ID NO: 23750 - DNA, 20 bp, synthetic construct
  misc_feature 1..20: note = chemically synthesized
  source 1..20: mol_type = other DNA
aaggaagcactaaatatgga

SEQ ID NO: 23751 - DNA, 20 bp, synthetic construct
  misc_feature 1..20: note = chemically synthesized
  source 1..20: mol_type = other DNA
aggaagcactaaatatggaa

SEQ ID NO: 23752 - DNA, 20 bp, synthetic construct
  misc_feature 1..20: note = chemically synthesized
  source 1..20: mol_type = other DNA
taaatatggaaaggcacaac

SEQ ID NO: 23753 - DNA, 20 bp, synthetic construct
  misc_feature 1..20: note = chemically synthesized
  source 1..20: mol_type = other DNA
tggaaaggcacaaccggtac

SEQ ID NO: 23754 - DNA, 20 bp, synthetic construct
  misc_feature 1..20: note = chemically synthesized
  source 1..20: mol_type = other DNA
caaaaacatgccaaattgta

SEQ ID NO: 23755 - DNA, 20 bp, synthetic construct
  misc_feature 1..20: note = chemically synthesized
  source 1..20: mol_type = other DNA
gccaaattgtaaagaccatt

SEQ ID NO: 23756 - DNA, 20 bp, synthetic construct
  misc_feature 1..20: note = chemically synthesized
  source 1..20: mol_type = other DNA
ccaaattgtaaagaccattg

SEQ ID NO: 23757 - DNA, 20 bp, synthetic construct
  misc_feature 1..20: note = chemically synthesized
  source 1..20: mol_type = other DNA
attgtaaagaccattgaggc

SEQ ID NO: 23758 - DNA, 20 bp, synthetic construct
  misc_feature 1..20: note = chemically synthesized
  source 1..20: mol_type = other DNA
ttgtaaagaccattgaggct

SEQ ID NO: 23759 - DNA, 20 bp, synthetic construct
  misc_feature 1..20: note = chemically synthesized
  source 1..20: mol_type = other DNA
taaagaccattgaggctagg

SEQ ID NO: 23760 - DNA, 20 bp, synthetic construct
  misc_feature 1..20: note = chemically synthesized
  source 1..20: mol_type = other DNA
aagaaactgcatcaactaat

SEQ ID NO: 23761 - DNA, 20 bp, synthetic construct
  misc_feature 1..20: note = chemically synthesized
  source 1..20: mol_type = other DNA
caactaatgagcaaaataac

SEQ ID NO: 23762 - DNA, 20 bp, synthetic construct
  misc_feature 1..20: note = chemically synthesized
  source 1..20: mol_type = other DNA
accagctaacatcataatga

SEQ ID NO: 23763 - DNA, 20 bp, synthetic construct
  misc_feature 1..20: note = chemically synthesized
  source 1..20: mol_type = other DNA
ccagctaacatcataatgac

SEQ ID NO: 23764 - DNA, 20 bp, synthetic construct
  misc_feature 1..20: note = chemically synthesized
  source 1..20: mol_type = other DNA
aatattaaccttaatgtaaa

SEQ ID NO: 23765 - DNA, 20 bp, synthetic construct
  misc_feature 1..20: note = chemically synthesized
  source 1..20: mol_type = other DNA
atattaaccttaatgtaaat

SEQ ID NO: 23766 - DNA, 20 bp, synthetic construct
  misc_feature 1..20: note = chemically synthesized
  source 1..20: mol_type = other DNA
tgtaaatgggctaaatgctc

SEQ ID NO: 23767 - DNA, 20 bp, synthetic construct
  misc_feature 1..20: note = chemically synthesized
  source 1..20: mol_type = other DNA
gggctaaatgctccagtaaa

SEQ ID NO: 23768 - DNA, 20 bp, synthetic construct
  misc_feature 1..20: note = chemically synthesized
  source 1..20: mol_type = other DNA
aatgctccagtaaaaagaca

SEQ ID NO: 23769 - DNA, 20 bp, synthetic construct
  misc_feature 1..20: note = chemically synthesized
  source 1..20: mol_type = other DNA
ctccagtaaaaagacacaga

SEQ ID NO: 23770 - DNA, 20 bp, synthetic construct
  misc_feature 1..20: note = chemically synthesized
  source 1..20: mol_type = other DNA
tccagtaaaaagacacagac

SEQ ID NO: 23771 - DNA, 20 bp, synthetic construct
  misc_feature 1..20: note = chemically synthesized
  source 1..20: mol_type = other DNA
aaagacacagacgggcaaat

SEQ ID NO: 23772 - DNA, 20 bp, synthetic construct
  misc_feature 1..20: note = chemically synthesized
  source 1..20: mol_type = other DNA
acagacgggcaaattagata

SEQ ID NO: 23773 - DNA, 20 bp, synthetic construct
  misc_feature 1..20: note = chemically synthesized
  source 1..20: mol_type = other DNA
agacgggcaaattagataaa

SEQ ID NO: 23774 - DNA, 20 bp, synthetic construct
  misc_feature 1..20: note = chemically synthesized
  source 1..20: mol_type = other DNA
ggcaaattagataaagagtc

SEQ ID NO: 23775 - DNA, 20 bp, synthetic construct
  misc_feature 1..20: note = chemically synthesized
  source 1..20: mol_type = other DNA
gataaagagtcaagacccat

SEQ ID NO: 23776 - DNA, 20 bp, synthetic construct
  misc_feature 1..20: note = chemically synthesized
  source 1..20: mol_type = other DNA
acccatcagtgtgctgtatt

SEQ ID NO: 23777 - DNA, 20 bp, synthetic construct
  misc_feature 1..20: note = chemically synthesized
  source 1..20: mol_type = other DNA
cccatcagtgtgctgtattc

SEQ ID NO: 23778 - DNA, 20 bp, synthetic construct
  misc_feature 1..20: note = chemically synthesized
  source 1..20: mol_type = other DNA
ctcatgtgcacacacacaca

SEQ ID NO: 23779 - DNA, 20 bp, synthetic construct
  misc_feature 1..20: note = chemically synthesized
  source 1..20: mol_type = other DNA
tcatgtgcacacacacacat

SEQ ID NO: 23780 - DNA, 20 bp, synthetic construct
  misc_feature 1..20: note = chemically synthesized
  source 1..20: mol_type = other DNA
acacacataggctcaaaata

SEQ ID NO: 23781 - DNA, 20 bp, synthetic construct
  misc_feature 1..20: note = chemically synthesized
  source 1..20: mol_type = other DNA
cacacataggctcaaaataa

SEQ ID NO: 23782 - DNA, 20 bp, synthetic construct
  misc_feature 1..20: note = chemically synthesized
  source 1..20: mol_type = other DNA
acacataggctcaaaataaa

SEQ ID NO: 23783 - DNA, 20 bp, synthetic construct
  misc_feature 1..20: note = chemically synthesized
  source 1..20: mol_type = other DNA
ataggctcaaaataaaggga

SEQ ID NO: 23784 - DNA, 20 bp, synthetic construct
  misc_feature 1..20: note = chemically synthesized
  source 1..20: mol_type = other DNA
aggctcaaaataaagggatg

SEQ ID NO: 23785 - DNA, 20 bp, synthetic construct
  misc_feature 1..20: note = chemically synthesized
  source 1..20: mol_type = other DNA
ggctcaaaataaagggatgg

SEQ ID NO: 23786 - DNA, 20 bp, synthetic construct
  misc_feature 1..20: note = chemically synthesized
  source 1..20: mol_type = other DNA
tcaaaataaagggatggagg

SEQ ID NO: 23787 - DNA, 20 bp, synthetic construct
  misc_feature 1..20: note = chemically synthesized
  source 1..20: mol_type = other DNA
gggatggaggaagatctacc

SEQ ID NO: 23788 - DNA, 20 bp, synthetic construct
  misc_feature 1..20: note = chemically synthesized
  source 1..20: mol_type = other DNA
aggaagatctaccaagaaaa

SEQ ID NO: 23789 - DNA, 20 bp, synthetic construct
  misc_feature 1..20: note = chemically synthesized
  source 1..20: mol_type = other DNA
aagaaaatggaaaacaaaaa

SEQ ID NO: 23790 - DNA, 20 bp, synthetic construct
  misc_feature 1..20: note = chemically synthesized
  source 1..20: mol_type = other DNA
agaaaatggaaaacaaaaaa

SEQ ID NO: 23791 - DNA, 20 bp, synthetic construct
  misc_feature 1..20: note = chemically synthesized
  source 1..20: mol_type = other DNA
aaatggaaaacaaaaaaagg

SEQ ID NO: 23792 - DNA, 20 bp, synthetic construct
  misc_feature 1..20: note = chemically synthesized
  source 1..20: mol_type = other DNA
aatggaaaacaaaaaaaggc

SEQ ID NO: 23793 - DNA, 20 bp, synthetic construct
  misc_feature 1..20: note = chemically synthesized
  source 1..20: mol_type = other DNA
atggaaaacaaaaaaaggca

SEQ ID NO: 23794 - DNA, 20 bp, synthetic construct
  misc_feature 1..20: note = chemically synthesized
  source 1..20: mol_type = other DNA
tggaaaacaaaaaaaggcag

SEQ ID NO: 23795 - DNA, 20 bp, synthetic construct
  misc_feature 1..20: note = chemically synthesized
  source 1..20: mol_type = other DNA
aatcctcatctctgataaaa

SEQ ID NO: 23796 - DNA, 20 bp, synthetic construct
  misc_feature 1..20: note = chemically synthesized
  source 1..20: mol_type = other DNA
atcctcatctctgataaaac

SEQ ID NO: 23797 - DNA, 20 bp, synthetic construct
  misc_feature 1..20: note = chemically synthesized
  source 1..20: mol_type = other DNA
aaacaggctttaaaccaaca

SEQ ID NO: 23798 - DNA, 20 bp, synthetic construct
  misc_feature 1..20: note = chemically synthesized
  source 1..20: mol_type = other DNA
tttaaaccaacaaagatcaa

SEQ ID NO: 23799 - DNA, 20 bp, synthetic construct
  misc_feature 1..20: note = chemically synthesized
  source 1..20: mol_type = other DNA
taaaccaacaaagatcaaaa

SEQ ID NO: 23800 - DNA, 20 bp, synthetic construct
  misc_feature 1..20: note = chemically synthesized
  source 1..20: mol_type = other DNA
aacaaagatcaaaagagaca

SEQ ID NO: 23801 - DNA, 20 bp, synthetic construct
  misc_feature 1..20: note = chemically synthesized
  source 1..20: mol_type = other DNA
aaagatcaaaagagacaaag

SEQ ID NO: 23802 - DNA, 20 bp, synthetic construct
  misc_feature 1..20: note = chemically synthesized
  source 1..20: mol_type = other DNA
aagatcaaaagagacaaaga

SEQ ID NO: 23803 - DNA, 20 bp, synthetic construct
  misc_feature 1..20: note = chemically synthesized
  source 1..20: mol_type = other DNA
caaagaaggccattacataa

SEQ ID NO: 23804 - DNA, 20 bp, synthetic construct
  misc_feature 1..20: note = chemically synthesized
  source 1..20: mol_type = other DNA
aaggccattacataatggta

SEQ ID NO: 23805 - DNA, 20 bp, synthetic construct
  misc_feature 1..20: note = chemically synthesized
  source 1..20: mol_type = other DNA
aggccattacataatggtaa

SEQ ID NO: 23806 - DNA, 20 bp, synthetic construct
  misc_feature 1..20: note = chemically synthesized
  source 1..20: mol_type = other DNA
ggccattacataatggtaaa

SEQ ID NO: 23807 - DNA, 20 bp, synthetic construct
  misc_feature 1..20: note = chemically synthesized
  source 1..20: mol_type = other DNA
ggtaaagggatcaattcaac

SEQ ID NO: 23808 - DNA, 20 bp, synthetic construct
  misc_feature 1..20: note = chemically synthesized
  source 1..20: mol_type = other DNA
aaagggatcaattcaacaag

SEQ ID NO: 23809 - DNA, 20 bp, synthetic construct
  misc_feature 1..20: note = chemically synthesized
  source 1..20: mol_type = other DNA
agggatcaattcaacaagaa

SEQ ID NO: 23810 - DNA, 20 bp, synthetic construct
  misc_feature 1..20: note = chemically synthesized
  source 1..20: mol_type = other DNA
aaacatatatgcacccaata

SEQ ID NO: 23811 - DNA, 20 bp, synthetic construct
  misc_feature 1..20: note = chemically synthesized
  source 1..20: mol_type = other DNA
aacatatatgcacccaatac

SEQ ID NO: 23812 - DNA, 20 bp, synthetic construct
  misc_feature 1..20: note = chemically synthesized
  source 1..20: mol_type = other DNA
gcacccaatacaggaacacc

SEQ ID NO: 23813 - DNA, 20 bp, synthetic construct
  misc_feature 1..20: note = chemically synthesized
  source 1..20: mol_type = other DNA
cacccaatacaggaacaccc

SEQ ID NO: 23814 - DNA, 20 bp, synthetic construct
  misc_feature 1..20: note = chemically synthesized
  source 1..20: mol_type = other DNA
caggaacacccaggttcata

SEQ ID NO: 23815 - DNA, 20 bp, synthetic construct
  misc_feature 1..20: note = chemically synthesized
  source 1..20: mol_type = other DNA
aacacccaggttcataaagc

SEQ ID NO: 23816 - DNA, 20 bp, synthetic construct
  misc_feature 1..20: note = chemically synthesized
  source 1..20: mol_type = other DNA
aggttcataaagcaagtcct

SEQ ID NO: 23817 - DNA, 20 bp, synthetic construct
  misc_feature 1..20: note = chemically synthesized
  source 1..20: mol_type = other DNA
gttcataaagcaagtcctta

SEQ ID NO: 23818 - DNA, 20 bp, synthetic construct
  misc_feature 1..20: note = chemically synthesized
  source 1..20: mol_type = other DNA
caagtccttagagacctaca

SEQ ID NO: 23819 - DNA, 20 bp, synthetic construct
  misc_feature 1..20: note = chemically synthesized
  source 1..20: mol_type = other DNA
agtccttagagacctacaaa

SEQ ID NO: 23820 - DNA, 20 bp, synthetic construct
  misc_feature 1..20: note = chemically synthesized
  source 1..20: mol_type = other DNA
tagagacctacaaagagact

SEQ ID NO: 23821 - DNA, 20 bp, synthetic construct
  misc_feature 1..20: note = chemically synthesized
  source 1..20: mol_type = other DNA
agactctcacacaataacaa

SEQ ID NO: 23822 - DNA, 20 bp, synthetic construct
  misc_feature 1..20: note = chemically synthesized
  source 1..20: mol_type = other DNA
gactctcacacaataacaat

SEQ ID NO: 23823 - DNA, 20 bp, synthetic construct
  misc_feature 1..20: note = chemically synthesized
  source 1..20: mol_type = other DNA
ctctcacacaataacaatgg

SEQ ID NO: 23824 - DNA, 20 bp, synthetic construct
  misc_feature 1..20: note = chemically synthesized
  source 1..20: mol_type = other DNA
taacaccccactgtcaacat

SEQ ID NO: 23825 - DNA, 20 bp, synthetic construct
  misc_feature 1..20: note = chemically synthesized
  source 1..20: mol_type = other DNA
accccactgtcaacattaga

SEQ ID NO: 23826 - DNA, 20 bp, synthetic construct
  misc_feature 1..20: note = chemically synthesized
  source 1..20: mol_type = other DNA
aacattagacagatcaacat

SEQ ID NO: 23827 - DNA, 20 bp, synthetic construct
  misc_feature 1..20: note = chemically synthesized
  source 1..20: mol_type = other DNA
ttagacagatcaacattaga

SEQ ID NO: 23828 - DNA, 20 bp, synthetic construct
  misc_feature 1..20: note = chemically synthesized
  source 1..20: mol_type = other DNA
tcaacattagacagatcaac

SEQ ID NO: 23829 - DNA, 20 bp, synthetic construct
  misc_feature 1..20: note = chemically synthesized
  source 1..20: mol_type = other DNA
cattagacagatcaacgaga

SEQ ID NO: 23830 - DNA, 20 bp, synthetic construct
  misc_feature 1..20: note = chemically synthesized
  source 1..20: mol_type = other DNA
agacagatcaacgagacaga

SEQ ID NO: 23831 - DNA, 20 bp, synthetic construct
  misc_feature 1..20: note = chemically synthesized
  source 1..20: mol_type = other DNA
caacgagacagaaagttaac

SEQ ID NO: 23832 - DNA, 20 bp, synthetic construct
  misc_feature 1..20: note = chemically synthesized
  source 1..20: mol_type = other DNA
aacgagacagaaagttaaca

SEQ ID NO: 23833 - DNA, 20 bp, synthetic construct
  misc_feature 1..20: note = chemically synthesized
  source 1..20: mol_type = other DNA
agaaagttaacaaggatatc

SEQ ID NO: 23834 - DNA, 20 bp, synthetic construct
  misc_feature 1..20: note = chemically synthesized
  source 1..20: mol_type = other DNA
gaaagttaacaaggatatcc

SEQ ID NO: 23835 - DNA, 20 bp, synthetic construct
  misc_feature 1..20: note = chemically synthesized
  source 1..20: mol_type = other DNA
ggatatccaggaattgaact

SEQ ID NO: 23836 - DNA, 20 bp, synthetic construct
  misc_feature 1..20: note = chemically synthesized
  source 1..20: mol_type = other DNA
attgaactcagctctgcacc

SEQ ID NO: 23837 - DNA, 20 bp, synthetic construct
  misc_feature 1..20: note = chemically synthesized
  source 1..20: mol_type = other DNA
gaactcagctctgcaccaag

SEQ ID NO: 23838 - DNA, 20 bp, synthetic construct
  misc_feature 1..20: note = chemically synthesized
  source 1..20: mol_type = other DNA
tctgcaccaagcggacctaa

SEQ ID NO: 23839 - DNA, 20 bp, synthetic construct
  misc_feature 1..20: note = chemically synthesized
  source 1..20: mol_type = other DNA
gcggacctaatagacatcta

SEQ ID NO: 23840 - DNA, 20 bp, synthetic construct
  misc_feature 1..20: note = chemically synthesized
  source 1..20: mol_type = other DNA
aactctccaccccaaatcaa

SEQ ID NO: 23841 - DNA, 20 bp, synthetic construct
  misc_feature 1..20: note = chemically synthesized
  source 1..20: mol_type = other DNA
aacagaatatacattctttt

SEQ ID NO: 23842 - DNA, 20 bp, synthetic construct
  misc_feature 1..20: note = chemically synthesized
  source 1..20: mol_type = other DNA
ctattccaaaattgaccaca

SEQ ID NO: 23843 - DNA, 20 bp, synthetic construct
  misc_feature 1..20: note = chemically synthesized
  source 1..20: mol_type = other DNA
tccaaaattgaccacatagt

SEQ ID NO: 23844 - DNA, 20 bp, synthetic construct
  misc_feature 1..20: note = chemically synthesized
  source 1..20: mol_type = other DNA
aaaattgaccacatagttgg

SEQ ID NO: 23845 - DNA, 20 bp, synthetic construct
  misc_feature 1..20: note = chemically synthesized
  source 1..20: mol_type = other DNA
tgaccacatagttggaagta

SEQ ID NO: 23846 - DNA, 20 bp, synthetic construct
  misc_feature 1..20: note = chemically synthesized
  source 1..20: mol_type = other DNA
gttggaagtaaagcactcct

SEQ ID NO: 23847 - DNA, 20 bp, synthetic construct
  misc_feature 1..20: note = chemically synthesized
  source 1..20: mol_type = other DNA
gcactcctcagcaaatgtaa

SEQ ID NO: 23848 - DNA, 20 bp, synthetic construct
  misc_feature 1..20: note = chemically synthesized
  source 1..20: mol_type = other DNA
cctcagcaaatgtaaaagaa

SEQ ID NO: 23849 - DNA, 20 bp, synthetic construct
  misc_feature 1..20: note = chemically synthesized
  source 1..20: mol_type = other DNA
aattataacaaactgtctct

SEQ ID NO: 23850 - DNA, 20 bp, synthetic construct
  misc_feature 1..20: note = chemically synthesized
  source 1..20: mol_type = other DNA
acaaactgtctctcagacca

SEQ ID NO: 23851 - DNA, 20 bp, synthetic construct
  misc_feature 1..20: note = chemically synthesized
  source 1..20: mol_type = other DNA
agaccacagtgcaatcaaac

SEQ ID NO: 23852 - DNA, 20 bp, synthetic construct
  misc_feature 1..20: note = chemically synthesized
  source 1..20: mol_type = other DNA
agtgcaatcaaactagaact

SEQ ID NO: 23853 - DNA, 20 bp, synthetic construct
  misc_feature 1..20: note = chemically synthesized
  source 1..20: mol_type = other DNA
gtgcaatcaaactagaactc

SEQ ID NO: 23854 - DNA, 20 bp, synthetic construct
  misc_feature 1..20: note = chemically synthesized
  source 1..20: mol_type = other DNA
tcaaactagaactcaggatt

SEQ ID NO: 23855 - DNA, 20 bp, synthetic construct
  misc_feature 1..20: note = chemically synthesized
  source 1..20: mol_type = other DNA
ctcaaaaccgctcaactaca

SEQ ID NO: 23856 - DNA, 20 bp, synthetic construct
  misc_feature 1..20: note = chemically synthesized
  source 1..20: mol_type = other DNA
aattgctcctgaatgactac

SEQ ID NO: 23857 - DNA, 20 bp, synthetic construct
  misc_feature 1..20: note = chemically synthesized
  source 1..20: mol_type = other DNA
attgctcctgaatgactact

SEQ ID NO: 23858 - DNA, 20 bp, synthetic construct
  misc_feature 1..20: note = chemically synthesized
  source 1..20: mol_type = other DNA
actgggttcataacaaaatg

SEQ ID NO: 23859 - DNA, 20 bp, synthetic construct
  misc_feature 1..20: note = chemically synthesized
  source 1..20: mol_type = other DNA
ctgggttcataacaaaatga

SEQ ID NO: 23860 - DNA, 20 bp, synthetic construct
  misc_feature 1..20: note = chemically synthesized
  source 1..20: mol_type = other DNA
ggttcataacaaaatgaagg

SEQ ID NO: 23861 - DNA, 20 bp, synthetic construct
  misc_feature 1..20: note = chemically synthesized
  source 1..20: mol_type = other DNA
gcagaaataaaaatgttctt

SEQ ID NO: 23862 - DNA, 20 bp, synthetic construct
  misc_feature 1..20: note = chemically synthesized
  source 1..20: mol_type = other DNA
aaaaatgttctttggaacca

SEQ ID NO: 23863 - DNA, 20 bp, synthetic construct
  misc_feature 1..20: note = chemically synthesized
  source 1..20: mol_type = other DNA
aaatgttctttggaaccaaa

SEQ ID NO: 23864 - DNA, 20 bp, synthetic construct
  misc_feature 1..20: note = chemically synthesized
  source 1..20: mol_type = other DNA
ctttggaaccaaagagaaca

SEQ ID NO: 23865 - DNA, 20 bp, synthetic construct
  misc_feature 1..20: note = chemically synthesized
  source 1..20: mol_type = other DNA
agaacaaagacacaacatac

SEQ ID NO: 23866 - DNA, 20 bp, synthetic construct
  misc_feature 1..20: note = chemically synthesized
  source 1..20: mol_type = other DNA
acacaacataccagaatctc

SEQ ID NO: 23867 - DNA, 20 bp, synthetic construct
  misc_feature 1..20: note = chemically synthesized
  source 1..20: mol_type = other DNA
cacaacataccagaatctct

SEQ ID NO: 23868 - DNA, 20 bp, synthetic construct
  misc_feature 1..20: note = chemically synthesized
  source 1..20: mol_type = other DNA
gaatctctgggacacattca

SEQ ID NO: 23869 - DNA, 20 bp, synthetic construct
  misc_feature 1..20: note = chemically synthesized
  source 1..20: mol_type = other DNA
tctctgggacacattcaaag

SEQ ID NO: 23870 - DNA, 20 bp, synthetic construct
  misc_feature 1..20: note = chemically synthesized
  source 1..20: mol_type = other DNA
gacacattcaaagcagtgtg

SEQ ID NO: 23871 - DNA, 20 bp, synthetic construct
  misc_feature 1..20: note = chemically synthesized
  source 1..20: mol_type = other DNA
cacattcaaagcagtgtgta

SEQ ID NO: 23872 - DNA, 20 bp, synthetic construct
  misc_feature 1..20: note = chemically synthesized
  source 1..20: mol_type = other DNA
acattcaaagcagtgtgtag

SEQ ID NO: 23873 - DNA, 20 bp, synthetic construct
  misc_feature 1..20: note = chemically synthesized
  source 1..20: mol_type = other DNA
cattcaaagcagtgtgtaga

SEQ ID NO: 23874 - DNA, 20 bp, synthetic construct
  misc_feature 1..20: note = chemically synthesized
  source 1..20: mol_type = other DNA
agtgtgtagagggaaattta

SEQ ID NO: 23875 - DNA, 20 bp, synthetic construct
  misc_feature 1..20: note = chemically synthesized
  source 1..20: mol_type = other DNA
aatttatagcactaaacgcc

SEQ ID NO: 23876 - DNA, 20 bp, synthetic construct
  misc_feature 1..20: note = chemically synthesized
  source 1..20: mol_type = other DNA
ttatagcactaaacgcccag

SEQ ID NO: 23877 - DNA, 20 bp, synthetic construct
  misc_feature 1..20: note = chemically synthesized
  source 1..20: mol_type = other DNA
atagcactaaacgcccagaa

SEQ ID NO: 23878 - DNA, 20 bp, synthetic construct
  misc_feature 1..20: note = chemically synthesized
  source 1..20: mol_type = other DNA
cactaaacgcccagaagaga

SEQ ID NO: 23879 - DNA, 20 bp, synthetic construct
  misc_feature 1..20: note = chemically synthesized
  source 1..20: mol_type = other DNA
taaacgcccagaagagaaag

SEQ ID NO: 23880 - DNA, 20 bp, synthetic construct
  misc_feature 1..20: note = chemically synthesized
  source 1..20: mol_type = other DNA
aaacgcccagaagagaaagc

SEQ ID NO: 23881 - DNA, 20 bp, synthetic construct
  misc_feature 1..20: note = chemically synthesized
  source 1..20: mol_type = other DNA
gcccagaagagaaagcagga

SEQ ID NO: 23882 - DNA, 20 bp, synthetic construct
  misc_feature 1..20: note = chemically synthesized
  source 1..20: mol_type = other DNA
caccctaacatcacaattaa

SEQ ID NO: 23883 - DNA, 20 bp, synthetic construct
  misc_feature 1..20: note = chemically synthesized
  source 1..20: mol_type = other DNA
aacatcacaattaaaagaac

SEQ ID NO: 23884 - DNA, 20 bp, synthetic construct
  misc_feature 1..20: note = chemically synthesized
  source 1..20: mol_type = other DNA
catcacaattaaaagaacta

SEQ ID NO: 23885 - DNA, 20 bp, synthetic construct
  misc_feature 1..20: note = chemically synthesized
  source 1..20: mol_type = other DNA
cacaattaaaagaactagag

SEQ ID NO: 23886 - DNA, 20 bp, synthetic construct
  misc_feature 1..20: note = chemically synthesized
  source 1..20: mol_type = other DNA
attaaaagaactagagaagc

SEQ ID NO: 23887 - DNA, 20 bp, synthetic construct
  misc_feature 1..20: note = chemically synthesized
  source 1..20: mol_type = other DNA
taaaagaactagagaagcaa

SEQ ID NO: 23888 - DNA, 20 bp, synthetic construct
  misc_feature 1..20: note = chemically synthesized
  source 1..20: mol_type = other DNA
gagcaaacacattcaaatgc

SEQ ID NO: 23889 - DNA, 20 bp, synthetic construct
  misc_feature 1..20: note = chemically synthesized
  source 1..20: mol_type = other DNA
caaacacattcaaatgctag

SEQ ID NO: 23890 - DNA, 20 bp, synthetic construct
  misc_feature 1..20: note = chemically synthesized
  source 1..20: mol_type = other DNA
acacattcaaatgctagcag

SEQ ID NO: 23891 - DNA, 20 bp, synthetic construct
  misc_feature 1..20: note = chemically synthesized
  source 1..20: mol_type = other DNA
cacattcaaatgctagcaga

SEQ ID NO: 23892 - DNA, 20 bp, synthetic construct
  misc_feature 1..20: note = chemically synthesized
  source 1..20: mol_type = other DNA
ttcaaatgctagcagaaggc

SEQ ID NO: 23893 - DNA, 20 bp, synthetic construct
  misc_feature 1..20: note = chemically synthesized
  source 1..20: mol_type = other DNA
aggcaagaaataactaaaat

SEQ ID NO: 23894 - DNA, 20 bp, synthetic construct
  misc_feature 1..20: note = chemically synthesized
  source 1..20: mol_type = other DNA
gcaagaaataactaaaatca

SEQ ID NO: 23895 - DNA, 20 bp, synthetic construct
  misc_feature 1..20: note = chemically synthesized
  source 1..20: mol_type = other DNA
agaaataactaaaatcagag

SEQ ID NO: 23896 - DNA, 20 bp, synthetic construct
  misc_feature 1..20: note = chemically synthesized
  source 1..20: mol_type = other DNA
ctaaaatcagagcagaactg

SEQ ID NO: 23897 - DNA, 20 bp, synthetic construct
  misc_feature 1..20: note = chemically synthesized
  source 1..20: mol_type = other DNA
taaaatcagagcagaactga

SEQ ID NO: 23898 - DNA, 20 bp, synthetic construct
  misc_feature 1..20: note = chemically synthesized
  source 1..20: mol_type = other DNA
cagagcagaactgaaggaaa

SEQ ID NO: 23899 - DNA, 20 bp, synthetic construct
  misc_feature 1..20: note = chemically synthesized
  source 1..20: mol_type = other DNA
gagcagaactgaaggaaata

SEQ ID NO: 23900 - DNA, 20 bp, synthetic construct
  misc_feature 1..20: note = chemically synthesized
  source 1..20: mol_type = other DNA
cttcaaaaaatcaatgaatc

SEQ ID NO: 23901 - DNA, 20 bp, synthetic construct
  misc_feature 1..20: note = chemically synthesized
  source 1..20: mol_type = other DNA
caaaaaatcaatgaatccag

SEQ ID NO: 23902 - DNA, 20 bp, synthetic construct
  misc_feature 1..20: note = chemically synthesized
  source 1..20: mol_type = other DNA
aaatcaatgaatccagaagc

SEQ ID NO: 23903 - DNA, 20 bp, synthetic construct
  misc_feature 1..20: note = chemically synthesized
  source 1..20: mol_type = other DNA
ccagaagctggtttttcaaa

SEQ ID NO: 23904 - DNA, 20 bp, synthetic construct
  misc_feature 1..20: note = chemically synthesized
  source 1..20: mol_type = other DNA
aaaaagatcaacaaaattga

SEQ ID NO: 23905 - DNA, 20 bp, synthetic construct
  misc_feature 1..20: note = chemically synthesized
  source 1..20: mol_type = other DNA
caacaaaattgatagactgc

SEQ ID NO: 23906 - DNA, 20 bp, synthetic construct
  misc_feature 1..20: note = chemically synthesized
  source 1..20: mol_type = other DNA
aaaattgatagactgctagc

SEQ ID NO: 23907 - DNA, 20 bp, synthetic construct
  misc_feature 1..20: note = chemically synthesized
  source 1..20: mol_type = other DNA
gactgctagcaagactaata

SEQ ID NO: 23908 - DNA, 20 bp, synthetic construct
  misc_feature 1..20: note = chemically synthesized
  source 1..20: mol_type = other DNA
tgctagcaagactaataaag

SEQ ID NO: 23909 - DNA, 20 bp, synthetic construct
  misc_feature 1..20: note = chemically synthesized
  source 1..20: mol_type = other DNA
gcaagactaataaagaagaa

SEQ ID NO: 23910 - DNA, 20 bp, synthetic construct
  misc_feature 1..20: note = chemically synthesized
  source 1..20: mol_type = other DNA
aagactaataaagaagaaaa

SEQ ID NO: 23911 - DNA, 20 bp, synthetic construct
  misc_feature 1..20: note = chemically synthesized
  source 1..20: mol_type = other DNA
gactaataaagaagaaaaga

SEQ ID NO: 23912 - DNA, 20 bp, synthetic construct
  misc_feature 1..20: note = chemically synthesized
  source 1..20: mol_type = other DNA
taataaagaagaaaagagag

SEQ ID NO: 23913 - DNA, 20 bp, synthetic construct
  misc_feature 1..20: note = chemically synthesized
  source 1..20: mol_type = other DNA
gaaaagagagaagaatcaaa

SEQ ID NO: 23914 - DNA, 20 bp, synthetic construct
  misc_feature 1..20: note = chemically synthesized
  source 1..20: mol_type = other DNA
agatgcaataaaaaatgata

SEQ ID NO: 23915 - DNA, 20 bp, synthetic construct
  misc_feature 1..20: note = chemically synthesized
  source 1..20: mol_type = other DNA
gatgcaataaaaaatgataa

SEQ ID NO: 23916 - DNA, 20 bp, synthetic construct
  misc_feature 1..20: note = chemically synthesized
  source 1..20: mol_type = other DNA
atgcaataaaaaatgataaa

SEQ ID NO: 23917 - DNA, 20 bp, synthetic construct
  misc_feature 1..20: note = chemically synthesized
  source 1..20: mol_type = other DNA
gtatatcaccaccgatccca

SEQ ID NO: 23918 - DNA, 20 bp, synthetic construct
  misc_feature 1..20: note = chemically synthesized
  source 1..20: mol_type = other DNA
acagaaatacaaaccaccat

SEQ ID NO: 23919 - DNA, 20 bp, synthetic construct
  misc_feature 1..20: note = chemically synthesized
  source 1..20: mol_type = other DNA
agaaatacaaaccaccatca

SEQ ID NO: 23920 - DNA, 20 bp, synthetic construct
  misc_feature 1..20: note = chemically synthesized
  source 1..20: mol_type = other DNA
acacctctacacaaataaac

SEQ ID NO: 23921 - DNA, 20 bp, synthetic construct
  misc_feature 1..20: note = chemically synthesized
  source 1..20: mol_type = other DNA
cacaaataaactagaaaatc

SEQ ID NO: 23922 - DNA, 20 bp, synthetic construct
  misc_feature 1..20: note = chemically synthesized
  source 1..20: mol_type = other DNA
aaataaactagaaaatctag

SEQ ID NO: 23923 - DNA, 20 bp, synthetic construct
  misc_feature 1..20: note = chemically synthesized
  source 1..20: mol_type = other DNA
actagaaaatctagaagaaa

SEQ ID NO: 23924 - DNA, 20 bp, synthetic construct
  misc_feature 1..20: note = chemically synthesized
  source 1..20: mol_type = other DNA
cttgacacatacaccctccc

SEQ ID NO: 23925 - DNA, 20 bp, synthetic construct
  misc_feature 1..20: note = chemically synthesized
  source 1..20: mol_type = other DNA
acaccctcccaagactaaac

SEQ ID NO: 23926 - DNA, 20 bp, synthetic construct
  misc_feature 1..20: note = chemically synthesized
  source 1..20: mol_type = other DNA
caccctcccaagactaaacc

SEQ ID NO: 23927 - DNA, 20 bp, synthetic construct
  misc_feature 1..20: note = chemically synthesized
  source 1..20: mol_type = other DNA
cctcccaagactaaaccagg

SEQ ID NO: 23928 - DNA, 20 bp, synthetic construct
  misc_feature 1..20: note = chemically synthesized
  source 1..20: mol_type = other DNA
cccaagactaaaccaggaag

SEQ ID NO: 23929 - DNA, 20 bp, synthetic construct
  misc_feature 1..20: note = chemically synthesized
  source 1..20: mol_type = other DNA
gaagaagttgaatctctgaa

SEQ ID NO: 23930 - DNA, 20 bp, synthetic construct
  misc_feature 1..20: note = chemically synthesized
  source 1..20: mol_type = other DNA
atctctgaatagaccaataa

SEQ ID NO: 23931 - DNA, 20 bp, synthetic construct
  misc_feature 1..20: note = chemically synthesized
  source 1..20: mol_type = other DNA
tctctgaatagaccaataac

SEQ ID NO: 23932 - DNA, 20 bp, synthetic construct
  misc_feature 1..20: note = chemically synthesized
  source 1..20: mol_type = other DNA
caataacaggatctgaaatt

SEQ ID NO: 23933 - DNA, 20 bp, synthetic construct
  misc_feature 1..20: note = chemically synthesized
  source 1..20: mol_type = other DNA
aataacaggatctgaaattg

SEQ ID NO: 23934 - DNA, 20 bp, synthetic construct
  misc_feature 1..20: note = chemically synthesized
  source 1..20: mol_type = other DNA
gaaattgaggcaataattaa

SEQ ID NO: 23935 - DNA, 20 bp, synthetic construct
  misc_feature 1..20: note = chemically synthesized
  source 1..20: mol_type = other DNA
aatagcttaccaaccaaaaa

SEQ ID NO: 23936 - DNA, 20 bp, synthetic construct
  misc_feature 1..20: note = chemically synthesized
  source 1..20: mol_type = other DNA
cttaccaaccaaaaacagtc

SEQ ID NO: 23937 - DNA, 20 bp, synthetic construct
  misc_feature 1..20: note = chemically synthesized
  source 1..20: mol_type = other DNA
ttaccaaccaaaaacagtcc

SEQ ID NO: 23938 - DNA, 20 bp, synthetic construct
  misc_feature 1..20: note = chemically synthesized
  source 1..20: mol_type = other DNA
aaccaaaaacagtccaggac

SEQ ID NO: 23939 - DNA, 20 bp, synthetic construct
  misc_feature 1..20: note = chemically synthesized
  source 1..20: mol_type = other DNA
aaaaacagtccaggaccaga

SEQ ID NO: 23940 - DNA, 20 bp, synthetic construct
  misc_feature 1..20: note = chemically synthesized
  source 1..20: mol_type = other DNA
aaacagtccaggaccagatg

SEQ ID NO: 23941 - DNA, 20 bp, synthetic construct
  misc_feature 1..20: note = chemically synthesized
  source 1..20: mol_type = other DNA
tccaggaccagatggagtca

SEQ ID NO: 23942 - DNA, 20 bp, synthetic construct
  misc_feature 1..20: note = chemically synthesized
  source 1..20: mol_type = other DNA
gagtcacagccaaattctac

SEQ ID NO: 23943 - DNA, 20 bp, synthetic construct
  misc_feature 1..20: note = chemically synthesized
  source 1..20: mol_type = other DNA
gtcacagccaaattctacca

SEQ ID NO: 23944 - DNA, 20 bp, synthetic construct
  misc_feature 1..20: note = chemically synthesized
  source 1..20: mol_type = other DNA
tcacagccaaattctaccag

SEQ ID NO: 23945 - DNA, 20 bp, synthetic construct
  misc_feature 1..20: note = chemically synthesized
  source 1..20: mol_type = other DNA
ccaaattctaccagaggtac

SEQ ID NO: 23946 - DNA, 20 bp, synthetic construct
  misc_feature 1..20: note = chemically synthesized
  source 1..20: mol_type = other DNA
caaattctaccagaggtaca

SEQ ID NO: 23947 - DNA, 20 bp, synthetic construct
  misc_feature 1..20: note = chemically synthesized
  source 1..20: mol_type = other DNA
aattctaccagaggtacaag

SEQ ID NO: 23948 - DNA, 20 bp, synthetic construct
  misc_feature 1..20: note = chemically synthesized
  source 1..20: mol_type = other DNA
attctaccagaggtacaagg

SEQ ID NO: 23949 - DNA, 20 bp, synthetic construct
  misc_feature 1..20: note = chemically synthesized
  source 1..20: mol_type = other DNA
tctaccagaggtacaaggag

SEQ ID NO: 23950 - DNA, 20 bp, synthetic construct
  misc_feature 1..20: note = chemically synthesized
  source 1..20: mol_type = other DNA
ccagaggtacaaggaggagc

SEQ ID NO: 23951 - DNA, 20 bp, synthetic construct
  misc_feature 1..20: note = chemically synthesized
  source 1..20: mol_type = other DNA
tctgaaactattcgaatcaa

SEQ ID NO: 23952 - DNA, 20 bp, synthetic construct
  misc_feature 1..20: note = chemically synthesized
  source 1..20: mol_type = other DNA
actattcgaatcaatagtaa

SEQ ID NO: 23953 - DNA, 20 bp, synthetic construct
  misc_feature 1..20: note = chemically synthesized
  source 1..20: mol_type = other DNA
tattcgaatcaatagtaaaa

SEQ ID NO: 23954 - DNA, 20 bp, synthetic construct
  misc_feature 1..20: note = chemically synthesized
  source 1..20: mol_type = other DNA
attcgaatcaatagtaaaag

SEQ ID NO: 23955 - DNA, 20 bp, synthetic construct
  misc_feature 1..20: note = chemically synthesized
  source 1..20: mol_type = other DNA
ttcgaatcaatagtaaaaga

SEQ ID NO: 23956 - DNA, 20 bp, synthetic construct
  misc_feature 1..20: note = chemically synthesized
  source 1..20: mol_type = other DNA
tcctccctaactcattttat

SEQ ID NO: 23957 - DNA, 20 bp, synthetic construct
  misc_feature 1..20: note = chemically synthesized
  source 1..20: mol_type = other DNA
cctccctaactcattttatg

SEQ ID NO: 23958 - DNA, 20 bp, synthetic construct
  misc_feature 1..20: note = chemically synthesized
  source 1..20: mol_type = other DNA
cctaactcattttatgaggc

SEQ ID NO: 23959 - DNA, 20 bp, synthetic construct
  misc_feature 1..20: note = chemically synthesized
  source 1..20: mol_type = other DNA
ccagcatcatcctgatacca

SEQ ID NO: 23960 - DNA, 20 bp, synthetic construct
  misc_feature 1..20: note = chemically synthesized
  source 1..20: mol_type = other DNA
catcatcctgataccaaagc

SEQ ID NO: 23961 - DNA, 20 bp, synthetic construct
  misc_feature 1..20: note = chemically synthesized
  source 1..20: mol_type = other DNA
atcatcctgataccaaagcc

SEQ ID NO: 23962 - DNA, 20 bp, synthetic construct
  misc_feature 1..20: note = chemically synthesized
  source 1..20: mol_type = other DNA
atcctgataccaaagccggg

SEQ ID NO: 23963 - DNA, 20 bp, synthetic construct
  misc_feature 1..20: note = chemically synthesized
  source 1..20: mol_type = other DNA
cctgataccaaagccgggca

SEQ ID NO: 23964 - DNA, 20 bp, synthetic construct
  misc_feature 1..20: note = chemically synthesized
  source 1..20: mol_type = other DNA
gggcagagacacaacaaaaa

SEQ ID NO: 23965 - DNA, 20 bp, synthetic construct
  misc_feature 1..20: note = chemically synthesized
  source 1..20: mol_type = other DNA
gcagagacacaacaaaaaaa

SEQ ID NO: 23966 - DNA, 20 bp, synthetic construct
  misc_feature 1..20: note = chemically synthesized
  source 1..20: mol_type = other DNA
acaacaaaaaaagagaattt

SEQ ID NO: 23967 - DNA, 20 bp, synthetic construct
  misc_feature 1..20: note = chemically synthesized
  source 1..20: mol_type = other DNA
ttttagaccaatatccctga

SEQ ID NO: 23968 - DNA, 20 bp, synthetic construct
  misc_feature 1..20: note = chemically synthesized
  source 1..20: mol_type = other DNA
aaaaaacctcaataaaatac

SEQ ID NO: 23969 - DNA, 20 bp, synthetic construct
  misc_feature 1..20: note = chemically synthesized
  source 1..20: mol_type = other DNA
acctcaataaaatactggca

SEQ ID NO: 23970 - DNA, 20 bp, synthetic construct
  misc_feature 1..20: note = chemically synthesized
  source 1..20: mol_type = other DNA
aaatactggcaaagcaaatc

SEQ ID NO: 23971 - DNA, 20 bp, synthetic construct
  misc_feature 1..20: note = chemically synthesized
  source 1..20: mol_type = other DNA
tactggcaaagcaaatccag

SEQ ID NO: 23972 - DNA, 20 bp, synthetic construct
  misc_feature 1..20: note = chemically synthesized
  source 1..20: mol_type = other DNA
aaatccagcagcacatccaa

SEQ ID NO: 23973 - DNA, 20 bp, synthetic construct
  misc_feature 1..20: note = chemically synthesized
  source 1..20: mol_type = other DNA
aaagcttatccaccatgatc

SEQ ID NO: 23974 - DNA, 20 bp, synthetic construct
  misc_feature 1..20: note = chemically synthesized
  source 1..20: mol_type = other DNA
gcttatccaccatgatcaag

SEQ ID NO: 23975 - DNA, 20 bp, synthetic construct
  misc_feature 1..20: note = chemically synthesized
  source 1..20: mol_type = other DNA
cttatccaccatgatcaagt

SEQ ID NO: 23976 - DNA, 20 bp, synthetic construct
  misc_feature 1..20: note = chemically synthesized
  source 1..20: mol_type = other DNA
gatcaagtgggcttcatccc

SEQ ID NO: 23977 - DNA, 20 bp, synthetic construct
  misc_feature 1..20: note = chemically synthesized
  source 1..20: mol_type = other DNA
atcaagtgggcttcatccct

SEQ ID NO: 23978 - DNA, 20 bp, synthetic construct
  misc_feature 1..20: note = chemically synthesized
  source 1..20: mol_type = other DNA
gggcttcatccctgggatgc

SEQ ID NO: 23979 - DNA, 20 bp, synthetic construct
  misc_feature 1..20: note = chemically synthesized
  source 1..20: mol_type = other DNA
ggcttcatccctgggatgca

SEQ ID NO: 23980 - DNA, 20 bp, synthetic construct
  misc_feature 1..20: note = chemically synthesized
  source 1..20: mol_type = other DNA
tcatccctgggatgcaaggc

SEQ ID NO: 23981 - DNA, 20 bp, synthetic construct
  misc_feature 1..20: note = chemically synthesized
  source 1..20: mol_type = other DNA
gcaaatcaataaatgtaatc

SEQ ID NO: 23982 - DNA, 20 bp, synthetic construct
  misc_feature 1..20: note = chemically synthesized
  source 1..20: mol_type = other DNA
aatgtaatccagcatataaa

SEQ ID NO: 23983 - DNA, 20 bp, synthetic construct
  misc_feature 1..20: note = chemically synthesized
  source 1..20: mol_type = other DNA
ccagcatataaacagaacca

SEQ ID NO: 23984 - DNA, 20 bp, synthetic construct
  misc_feature 1..20: note = chemically synthesized
  source 1..20: mol_type = other DNA
aaaccacatgattatctcaa

SEQ ID NO: 23985 - DNA, 20 bp, synthetic construct
  misc_feature 1..20: note = chemically synthesized
  source 1..20: mol_type = other DNA
catgattatctcaatagatg

SEQ ID NO: 23986 - DNA, 20 bp, synthetic construct
  misc_feature 1..20: note = chemically synthesized
  source 1..20: mol_type = other DNA
ttatctcaatagatgcagaa

SEQ ID NO: 23987 - DNA, 20 bp, synthetic construct
  misc_feature 1..20: note = chemically synthesized
  source 1..20: mol_type = other DNA
tatctcaatagatgcagaaa

SEQ ID NO: 23988 - DNA, 20 bp, synthetic construct
  misc_feature 1..20: note = chemically synthesized
  source 1..20: mol_type = other DNA
gctaaaaactctcaataaat

SEQ ID NO: 23989 - DNA, 20 bp, synthetic construct
  misc_feature 1..20: note = chemically synthesized
  source 1..20: mol_type = other DNA
ctaaaaactctcaataaatt

SEQ ID NO: 23990 - DNA, 20 bp, synthetic construct
  misc_feature 1..20: note = chemically synthesized
  source 1..20: mol_type = other DNA
ctcaataaattaggtattga

SEQ ID NO: 23991 - DNA, 20 bp, synthetic construct
  misc_feature 1..20: note = chemically synthesized
  source 1..20: mol_type = other DNA
tcaataaattaggtattgat

SEQ ID NO: 23992 - DNA, 20 bp, synthetic construct
  misc_feature 1..20: note = chemically synthesized
  source 1..20: mol_type = other DNA
gggacgtatctcaaaataat

SEQ ID NO: 23993 - DNA, 20 bp, synthetic construct
  misc_feature 1..20: note = chemically synthesized
  source 1..20: mol_type = other DNA
gacgtatctcaaaataataa

SEQ ID NO: 23994 - DNA, 20 bp, synthetic construct
  misc_feature 1..20: note = chemically synthesized
  source 1..20: mol_type = other DNA
agccatctatgacaaaccca

SEQ ID NO: 23995 - DNA, 20 bp, synthetic construct
  misc_feature 1..20: note = chemically synthesized
  source 1..20: mol_type = other DNA
acagccaatatcatactgaa

SEQ ID NO: 23996 - DNA, 20 bp, synthetic construct
  misc_feature 1..20: note = chemically synthesized
  source 1..20: mol_type = other DNA
catactgaatggacaaaaac

SEQ ID NO: 23997 - DNA, 20 bp, synthetic construct
  misc_feature 1..20: note = chemically synthesized
  source 1..20: mol_type = other DNA
actgaatggacaaaaactgg

SEQ ID NO: 23998 - DNA, 20 bp, synthetic construct
  misc_feature 1..20: note = chemically synthesized
  source 1..20: mol_type = other DNA
gaagcattccctttgaaaac

SEQ ID NO: 23999 - DNA, 20 bp, synthetic construct
  misc_feature 1..20: note = chemically synthesized
  source 1..20: mol_type = other DNA
ttccctttgaaaactggcac

SEQ ID NO: 24000 - DNA, 20 bp, synthetic construct
  misc_feature 1..20: note = chemically synthesized
  source 1..20: mol_type = other DNA
ctttgaaaactggcacaaga

SEQ ID NO: 24001 - DNA, 20 bp, synthetic construct
  misc_feature 1..20: note = chemically synthesized
  source 1..20: mol_type = other DNA
tttgaaaactggcacaagac

SEQ ID NO: 24002 - DNA, 20 bp, synthetic construct
  misc_feature 1..20: note = chemically synthesized
  source 1..20: mol_type = other DNA
ttgaaaactggcacaagaca

SEQ ID NO: 24003 - DNA, 20 bp, synthetic construct
  misc_feature 1..20: note = chemically synthesized
  source 1..20: mol_type = other DNA
ctcactactcctattcaaca

SEQ ID NO: 24004 - DNA, 20 bp, synthetic construct
  misc_feature 1..20: note = chemically synthesized
  source 1..20: mol_type = other DNA
actcctattcaacatagtgt

SEQ ID NO: 24005 - DNA, 20 bp, synthetic construct
  misc_feature 1..20: note = chemically synthesized
  source 1..20: mol_type = other DNA
caacatagtgttggaatttc

SEQ ID NO: 24006 - DNA, 20 bp, synthetic construct
  misc_feature 1..20: note = chemically synthesized
  source 1..20: mol_type = other DNA
atagtgttggaatttctggc

SEQ ID NO: 24007 - DNA, 20 bp, synthetic construct
  misc_feature 1..20: note = chemically synthesized
  source 1..20: mol_type = other DNA
tagtgttggaatttctggcc

SEQ ID NO: 24008 - DNA, 20 bp, synthetic construct
  misc_feature 1..20: note = chemically synthesized
  source 1..20: mol_type = other DNA
agtgttggaatttctggcca

SEQ ID NO: 24009 - DNA, 20 bp, synthetic construct
  misc_feature 1..20: note = chemically synthesized
  source 1..20: mol_type = other DNA
gaatttctggccagggcaat

SEQ ID NO: 24010 - DNA, 20 bp, synthetic construct
  misc_feature 1..20: note = chemically synthesized
  source 1..20: mol_type = other DNA
aatttctggccagggcaatt

SEQ ID NO: 24011 - DNA, 20 bp, synthetic construct
  misc_feature 1..20: note = chemically synthesized
  source 1..20: mol_type = other DNA
ttctggccagggcaattagg

SEQ ID NO: 24012 - DNA, 20 bp, synthetic construct
  misc_feature 1..20: note = chemically synthesized
  source 1..20: mol_type = other DNA
tctggccagggcaattaggc

SEQ ID NO: 24013 - DNA, 20 bp, synthetic construct
  misc_feature 1..20: note = chemically synthesized
  source 1..20: mol_type = other DNA
tggccagggcaattaggcag

SEQ ID NO: 24014 - DNA, 20 bp, synthetic construct
  misc_feature 1..20: note = chemically synthesized
  source 1..20: mol_type = other DNA
ccagggcaattaggcaggag

SEQ ID NO: 24015 - DNA, 20 bp, synthetic construct
  misc_feature 1..20: note = chemically synthesized
  source 1..20: mol_type = other DNA
cagggcaattaggcaggaga

SEQ ID NO: 24016 - DNA, 20 bp, synthetic construct
  misc_feature 1..20: note = chemically synthesized
  source 1..20: mol_type = other DNA
ttaggcaggagaaggaaaaa

SEQ ID NO: 24017 - DNA, 20 bp, synthetic construct
  misc_feature 1..20: note = chemically synthesized
  source 1..20: mol_type = other DNA
taggcaggagaaggaaaaaa

SEQ ID NO: 24018 - DNA, 20 bp, synthetic construct
  misc_feature 1..20: note = chemically synthesized
  source 1..20: mol_type = other DNA
aggaaaaaaaggtattcaat

SEQ ID NO: 24019 - DNA, 20 bp, synthetic construct
  misc_feature 1..20: note = chemically synthesized
  source 1..20: mol_type = other DNA
ggaaaaaaaggtattcaatt

SEQ ID NO: 24020 - DNA, 20 bp, synthetic construct
  misc_feature 1..20: note = chemically synthesized
  source 1..20: mol_type = other DNA
aaaaggtattcaattaggaa

SEQ ID NO: 24021 - DNA, 20 bp, synthetic construct
  misc_feature 1..20: note = chemically synthesized
  source 1..20: mol_type = other DNA
aaggtattcaattaggaaaa

SEQ ID NO: 24022 - DNA, 20 bp, synthetic construct
  misc_feature 1..20: note = chemically synthesized
  source 1..20: mol_type = other DNA
aggtattcaattaggaaaag

SEQ ID NO: 24023 - DNA, 20 bp, synthetic construct
  misc_feature 1..20: note = chemically synthesized
  source 1..20: mol_type = other DNA
tattcaattaggaaaagagg

SEQ ID NO: 24024 - DNA, 20 bp, synthetic construct
  misc_feature 1..20: note = chemically synthesized
  source 1..20: mol_type = other DNA
agtcaaattgtccctgtttg

SEQ ID NO: 24025 - DNA, 20 bp, synthetic construct
  misc_feature 1..20: note = chemically synthesized
  source 1..20: mol_type = other DNA
agatgacacgattgtatatc

SEQ ID NO: 24026 - DNA, 20 bp, synthetic construct
  misc_feature 1..20: note = chemically synthesized
  source 1..20: mol_type = other DNA
tctagaaaaccccactgtct

SEQ ID NO: 24027 - DNA, 20 bp, synthetic construct
  misc_feature 1..20: note = chemically synthesized
  source 1..20: mol_type = other DNA
ccaaaatgtccttaaactga

SEQ ID NO: 24028 - DNA, 20 bp, synthetic construct
  misc_feature 1..20: note = chemically synthesized
  source 1..20: mol_type = other DNA
caaaatgtccttaaactgat

SEQ ID NO: 24029 - DNA, 20 bp, synthetic construct
  misc_feature 1..20: note = chemically synthesized
  source 1..20: mol_type = other DNA
cttaaactgataggcaactt

SEQ ID NO: 24030 - DNA, 20 bp, synthetic construct
  misc_feature 1..20: note = chemically synthesized
  source 1..20: mol_type = other DNA
actgataggcaacttcagca

SEQ ID NO: 24031 - DNA, 20 bp, synthetic construct
  misc_feature 1..20: note = chemically synthesized
  source 1..20: mol_type = other DNA
aggcaacttcagcaaagtct

SEQ ID NO: 24032 - DNA, 20 bp, synthetic construct
  misc_feature 1..20: note = chemically synthesized
  source 1..20: mol_type = other DNA
ggcaacttcagcaaagtctc

SEQ ID NO: 24033 - DNA, 20 bp, synthetic construct
  misc_feature 1..20: note = chemically synthesized
  source 1..20: mol_type = other DNA
aatcaatgtgcaaaaatcac

SEQ ID NO: 24034 - DNA, 20 bp, synthetic construct
  misc_feature 1..20: note = chemically synthesized
  source 1..20: mol_type = other DNA
gcattcttatacaccaataa

SEQ ID NO: 24035 - DNA, 20 bp, synthetic construct
  misc_feature 1..20: note = chemically synthesized
  source 1..20: mol_type = other DNA
atacaccaataacagacaaa

SEQ ID NO: 24036 - DNA, 20 bp, synthetic construct
  misc_feature 1..20: note = chemically synthesized
  source 1..20: mol_type = other DNA
acaccaataacagacaaaca

SEQ ID NO: 24037 - DNA, 20 bp, synthetic construct
  misc_feature 1..20: note = chemically synthesized
  source 1..20: mol_type = other DNA
accaataacagacaaacaga

SEQ ID NO: 24038 - DNA, 20 bp, synthetic construct
  misc_feature 1..20: note = chemically synthesized
  source 1..20: mol_type = other DNA
caaacagagagccaaatcat

SEQ ID NO: 24039 - DNA, 20 bp, synthetic construct
  misc_feature 1..20: note = chemically synthesized
  source 1..20: mol_type = other DNA
aaacagagagccaaatcatg

SEQ ID NO: 24040 - DNA, 20 bp, synthetic construct
  misc_feature 1..20: note = chemically synthesized
  source 1..20: mol_type = other DNA
aacagagagccaaatcatga

SEQ ID NO: 24041 - DNA, 20 bp, synthetic construct
  misc_feature 1..20: note = chemically synthesized
  source 1..20: mol_type = other DNA
tcccattcacaattgcttca

SEQ ID NO: 24042 - DNA, 20 bp, synthetic construct
  misc_feature 1..20: note = chemically synthesized
  source 1..20: mol_type = other DNA
ccattcacaattgcttcaaa

SEQ ID NO: 24043 - DNA, 20 bp, synthetic construct
  misc_feature 1..20: note = chemically synthesized
  source 1..20: mol_type = other DNA
ttcaaagagaataaaatacc

SEQ ID NO: 24044 - DNA, 20 bp, synthetic construct
  misc_feature 1..20: note = chemically synthesized
  source 1..20: mol_type = other DNA
tcaaagagaataaaatacct

SEQ ID NO: 24045 - DNA, 20 bp, synthetic construct
  misc_feature 1..20: note = chemically synthesized
  source 1..20: mol_type = other DNA
tacctaggaatccaacttac

SEQ ID NO: 24046 - DNA, 20 bp, synthetic construct
  misc_feature 1..20: note = chemically synthesized
  source 1..20: mol_type = other DNA
cctaggaatccaacttacaa

SEQ ID NO: 24047 - DNA, 20 bp, synthetic construct
  misc_feature 1..20: note = chemically synthesized
  source 1..20: mol_type = other DNA
taggaatccaacttacaaga

SEQ ID NO: 24048 - DNA, 20 bp, synthetic construct
  misc_feature 1..20: note = chemically synthesized
  source 1..20: mol_type = other DNA
aggaatccaacttacaagag

SEQ ID NO: 24049 - DNA, 20 bp, synthetic construct
  misc_feature 1..20: note = chemically synthesized
  source 1..20: mol_type = other DNA
tccaacttacaagagaggtg

SEQ ID NO: 24050 - DNA, 20 bp, synthetic construct
  misc_feature 1..20: note = chemically synthesized
  source 1..20: mol_type = other DNA
ccaacttacaagagaggtga

SEQ ID NO: 24051 - DNA, 20 bp, synthetic construct
  misc_feature 1..20: note = chemically synthesized
  source 1..20: mol_type = other DNA
gagaggtgaaggacctcttc

SEQ ID NO: 24052 - DNA, 20 bp, synthetic construct
  misc_feature 1..20: note = chemically synthesized
  source 1..20: mol_type = other DNA
agaggtgaaggacctcttca

SEQ ID NO: 24053 - DNA, 20 bp, synthetic construct
  misc_feature 1..20: note = chemically synthesized
  source 1..20: mol_type = other DNA
aggtgaaggacctcttcaag

SEQ ID NO: 24054 - DNA, 20 bp, synthetic construct
  misc_feature 1..20: note = chemically synthesized
  source 1..20: mol_type = other DNA
accactgctgaatgaaataa

SEQ ID NO: 24055 - DNA, 20 bp, synthetic construct
  misc_feature 1..20: note = chemically synthesized
  source 1..20: mol_type = other DNA
actgctgaatgaaataaaag

SEQ ID NO: 24056 - DNA, 20 bp, synthetic construct
  misc_feature 1..20: note = chemically synthesized
  source 1..20: mol_type = other DNA
taaaagaagatacaaacaaa

SEQ ID NO: 24057 - DNA, 20 bp, synthetic construct
  misc_feature 1..20: note = chemically synthesized
  source 1..20: mol_type = other DNA
aagaagatacaaacaaatgg

SEQ ID NO: 24058 - DNA, 20 bp, synthetic construct
  misc_feature 1..20: note = chemically synthesized
  source 1..20: mol_type = other DNA
ggaagaacattccatgctca

SEQ ID NO: 24059 - DNA, 20 bp, synthetic construct
  misc_feature 1..20: note = chemically synthesized
  source 1..20: mol_type = other DNA
gaagaacattccatgctcat

SEQ ID NO: 24060 - DNA, 20 bp, synthetic construct
  misc_feature 1..20: note = chemically synthesized
  source 1..20: mol_type = other DNA
gaacattccatgctcatggg

SEQ ID NO: 24061 - DNA, 20 bp, synthetic construct
  misc_feature 1..20: note = chemically synthesized
  source 1..20: mol_type = other DNA
aacattccatgctcatgggt

SEQ ID NO: 24062 - DNA, 20 bp, synthetic construct
  misc_feature 1..20: note = chemically synthesized
  source 1..20: mol_type = other DNA
attccatgctcatgggtagg

SEQ ID NO: 24063 - DNA, 20 bp, synthetic construct
  misc_feature 1..20: note = chemically synthesized
  source 1..20: mol_type = other DNA
aagaatcaatatcatgaaaa

SEQ ID NO: 24064 - DNA, 20 bp, synthetic construct
  misc_feature 1..20: note = chemically synthesized
  source 1..20: mol_type = other DNA
atatcatgaaaatggccata

SEQ ID NO: 24065 - DNA, 20 bp, synthetic construct
  misc_feature 1..20: note = chemically synthesized
  source 1..20: mol_type = other DNA
tgaaaatggccatacagccc

SEQ ID NO: 24066 - DNA, 20 bp, synthetic construct
  misc_feature 1..20: note = chemically synthesized
  source 1..20: mol_type = other DNA
gaaaatggccatacagccca

SEQ ID NO: 24067 - DNA, 20 bp, synthetic construct
  misc_feature 1..20: note = chemically synthesized
  source 1..20: mol_type = other DNA
atacagcccaaggtaattta

SEQ ID NO: 24068 - DNA, 20 bp, synthetic construct
  misc_feature 1..20: note = chemically synthesized
  source 1..20: mol_type = other DNA
gattcaatgccatccccatc

SEQ ID NO: 24069 - DNA, 20 bp, synthetic construct
  misc_feature 1..20: note = chemically synthesized
  source 1..20: mol_type = other DNA
gctaccaatgactttcttca

SEQ ID NO: 24070 - DNA, 20 bp, synthetic construct
  misc_feature 1..20: note = chemically synthesized
  source 1..20: mol_type = other DNA
aatgactttcttcacagaat

SEQ ID NO: 24071 - DNA, 20 bp, synthetic construct
  misc_feature 1..20: note = chemically synthesized
  source 1..20: mol_type = other DNA
aattggaaaaaactacttta

SEQ ID NO: 24072 - DNA, 20 bp, synthetic construct
  misc_feature 1..20: note = chemically synthesized
  source 1..20: mol_type = other DNA
aaactactttaaagttcata

SEQ ID NO: 24073 - DNA, 20 bp, synthetic construct
  misc_feature 1..20: note = chemically synthesized
  source 1..20: mol_type = other DNA
aagttcatatggaaccaaaa

SEQ ID NO: 24074 - DNA, 20 bp, synthetic construct
  misc_feature 1..20: note = chemically synthesized
  source 1..20: mol_type = other DNA
gttcatatggaaccaaaaaa

SEQ ID NO: 24075 - DNA, 20 bp, synthetic construct
  misc_feature 1..20: note = chemically synthesized
  source 1..20: mol_type = other DNA
cacattgacatgccaatcct

SEQ ID NO: 24076 - DNA, 20 bp, synthetic construct
  misc_feature 1..20: note = chemically synthesized
  source 1..20: mol_type = other DNA
acatgccaatcctaagccaa

SEQ ID NO: 24077 - DNA, 20 bp, synthetic construct
  misc_feature 1..20: note = chemically synthesized
  source 1..20: mol_type = other DNA
aatcctaagccaaaagaaca

SEQ ID NO: 24078 - DNA, 20 bp, synthetic construct
  misc_feature 1..20: note = chemically synthesized
  source 1..20: mol_type = other DNA
ctaagccaaaagaacaaagc

SEQ ID NO: 24079 - DNA, 20 bp, synthetic construct
  misc_feature 1..20: note = chemically synthesized
  source 1..20: mol_type = other DNA
aagccaaaagaacaaagctg

SEQ ID NO: 24080 - DNA, 20 bp, synthetic construct
  misc_feature 1..20: note = chemically synthesized
  source 1..20: mol_type = other DNA
agccaaaagaacaaagctgg

SEQ ID NO: 24081 - DNA, 20 bp, synthetic construct
  misc_feature 1..20: note = chemically synthesized
  source 1..20: mol_type = other DNA
ctgacttcaaactatactac

SEQ ID NO: 24082 - DNA, 20 bp, synthetic construct
  misc_feature 1..20: note = chemically synthesized
  source 1..20: mol_type = other DNA
tgacttcaaactatactaca

SEQ ID NO: 24083 - DNA, 20 bp, synthetic construct
  misc_feature 1..20: note = chemically synthesized
  source 1..20: mol_type = other DNA
caaactatactacaaggcta

SEQ ID NO: 24084 - DNA, 20 bp, synthetic construct
  misc_feature 1..20: note = chemically synthesized
  source 1..20: mol_type = other DNA
caaggctacagtaaccaaaa

SEQ ID NO: 24085 - DNA, 20 bp, synthetic construct
  misc_feature 1..20: note = chemically synthesized
  source 1..20: mol_type = other DNA
ctacagtaaccaaaacagca

SEQ ID NO: 24086 - DNA, 20 bp, synthetic construct
  misc_feature 1..20: note = chemically synthesized
  source 1..20: mol_type = other DNA
taaccaaaacagcatggtac

SEQ ID NO: 24087 - DNA, 20 bp, synthetic construct
  misc_feature 1..20: note = chemically synthesized
  source 1..20: mol_type = other DNA
gcatggtactggtaccaaaa

SEQ ID NO: 24088 - DNA, 20 bp, synthetic construct
  misc_feature 1..20: note = chemically synthesized
  source 1..20: mol_type = other DNA
atggtactggtaccaaaaca

SEQ ID NO: 24089 - DNA, 20 bp, synthetic construct
  misc_feature 1..20: note = chemically synthesized
  source 1..20: mol_type = other DNA
ctggtaccaaaacagagata

SEQ ID NO: 24090 - DNA, 20 bp, synthetic construct
  misc_feature 1..20: note = chemically synthesized
  source 1..20: mol_type = other DNA
aaaacagagatatagaccaa

SEQ ID NO: 24091 - DNA, 20 bp, synthetic construct
  misc_feature 1..20: note = chemically synthesized
  source 1..20: mol_type = other DNA
agagatatagaccaatggaa

SEQ ID NO: 24092 - DNA, 20 bp, synthetic construct
  misc_feature 1..20: note = chemically synthesized
  source 1..20: mol_type = other DNA
tatagaccaatggaacagaa

SEQ ID NO: 24093 - DNA, 20 bp, synthetic construct
  misc_feature 1..20: note = chemically synthesized
  source 1..20: mol_type = other DNA
tagaccaatggaacagaaca

SEQ ID NO: 24094 - DNA, 20 bp, synthetic construct
  misc_feature 1..20: note = chemically synthesized
  source 1..20: mol_type = other DNA
agaccaatggaacagaacag

SEQ ID NO: 24095 - DNA, 20 bp, synthetic construct
  misc_feature 1..20: note = chemically synthesized
  source 1..20: mol_type = other DNA
atggaacagaacagaggcct

SEQ ID NO: 24096 - DNA, 20 bp, synthetic construct
  misc_feature 1..20: note = chemically synthesized
  source 1..20: mol_type = other DNA
aacctgacaaaaaaaacaaa

SEQ ID NO: 24097 - DNA, 20 bp, synthetic construct
  misc_feature 1..20: note = chemically synthesized
  source 1..20: mol_type = other DNA
acctgacaaaaaaaacaaat

SEQ ID NO: 24098 - DNA, 20 bp, synthetic construct
  misc_feature 1..20: note = chemically synthesized
  source 1..20: mol_type = other DNA
cctgacaaaaaaaacaaatg

SEQ ID NO: 24099 - DNA, 20 bp, synthetic construct
  misc_feature 1..20: note = chemically synthesized
  source 1..20: mol_type = other DNA
acaaaaaaaacaaatgggga

SEQ ID NO: 24100 - DNA, 20 bp, synthetic construct
  misc_feature 1..20: note = chemically synthesized
  source 1..20: mol_type = other DNA
caaaaaaaacaaatggggaa

SEQ ID NO: 24101 - DNA, 20 bp, synthetic construct
  misc_feature 1..20: note = chemically synthesized
  source 1..20: mol_type = other DNA
aggattccctatttaataaa

SEQ ID NO: 24102 - DNA, 20 bp, synthetic construct
  misc_feature 1..20: note = chemically synthesized
  source 1..20: mol_type = other DNA
ccctatttaataaatggtgc

SEQ ID NO: 24103 - DNA, 20 bp, synthetic construct
  misc_feature 1..20: note = chemically synthesized
  source 1..20: mol_type = other DNA
cctatttaataaatggtgct

SEQ ID NO: 24104 - DNA, 20 bp, synthetic construct
  misc_feature 1..20: note = chemically synthesized
  source 1..20: mol_type = other DNA
ataaatggtgctgggaaaac

SEQ ID NO: 24105 - DNA, 20 bp, synthetic construct
  misc_feature 1..20: note = chemically synthesized
  source 1..20: mol_type = other DNA
gaaaactggctaaccatacg

SEQ ID NO: 24106 - DNA, 20 bp, synthetic construct
  misc_feature 1..20: note = chemically synthesized
  source 1..20: mol_type = other DNA
actggctaaccatacgcaga

SEQ ID NO: 24107 - DNA, 20 bp, synthetic construct
  misc_feature 1..20: note = chemically synthesized
  source 1..20: mol_type = other DNA
catacgcagaaagctgaaac

SEQ ID NO: 24108 - DNA, 20 bp, synthetic construct
  misc_feature 1..20: note = chemically synthesized
  source 1..20: mol_type = other DNA
ccttatacaaaaattaattc

SEQ ID NO: 24109 - DNA, 20 bp, synthetic construct
  misc_feature 1..20: note = chemically synthesized
  source 1..20: mol_type = other DNA
atacaaaaattaattcaaga

SEQ ID NO: 24110 - DNA, 20 bp, synthetic construct
  misc_feature 1..20: note = chemically synthesized
  source 1..20: mol_type = other DNA
aattaattcaagatggatta

SEQ ID NO: 24111 - DNA, 20 bp, synthetic construct
  misc_feature 1..20: note = chemically synthesized
  source 1..20: mol_type = other DNA
tggattacagacttaaatgt

SEQ ID NO: 24112 - DNA, 20 bp, synthetic construct
  misc_feature 1..20: note = chemically synthesized
  source 1..20: mol_type = other DNA
actgaaaaccataaaaactc

SEQ ID NO: 24113 - DNA, 20 bp, synthetic construct
  misc_feature 1..20: note = chemically synthesized
  source 1..20: mol_type = other DNA
gaaaaccataaaaactctgg

SEQ ID NO: 24114 - DNA, 20 bp, synthetic construct
  misc_feature 1..20: note = chemically synthesized
  source 1..20: mol_type = other DNA
aaaaactctggaagaaaacc

SEQ ID NO: 24115 - DNA, 20 bp, synthetic construct
  misc_feature 1..20: note = chemically synthesized
  source 1..20: mol_type = other DNA
aaaactctggaagaaaacct

SEQ ID NO: 24116 - DNA, 20 bp, synthetic construct
  misc_feature 1..20: note = chemically synthesized
  source 1..20: mol_type = other DNA
aaaacctaggcaataccatt

SEQ ID NO: 24117 - DNA, 20 bp, synthetic construct
  misc_feature 1..20: note = chemically synthesized
  source 1..20: mol_type = other DNA
aaacctaggcaataccattc

SEQ ID NO: 24118 - DNA, 20 bp, synthetic construct
  misc_feature 1..20: note = chemically synthesized
  source 1..20: mol_type = other DNA
aggcaataccattcaggaca

SEQ ID NO: 24119 - DNA, 20 bp, synthetic construct
  misc_feature 1..20: note = chemically synthesized
  source 1..20: mol_type = other DNA
ggcaataccattcaggacat

SEQ ID NO: 24120 - DNA, 20 bp, synthetic construct
  misc_feature 1..20: note = chemically synthesized
  source 1..20: mol_type = other DNA
taccattcaggacataggca

SEQ ID NO: 24121 - DNA, 20 bp, synthetic construct
  misc_feature 1..20: note = chemically synthesized
  source 1..20: mol_type = other DNA
accattcaggacataggcat

SEQ ID NO: 24122 - DNA, 20 bp, synthetic construct
  misc_feature 1..20: note = chemically synthesized
  source 1..20: mol_type = other DNA
ttcaggacataggcatgggc

SEQ ID NO: 24123 - DNA, 20 bp, synthetic construct
  misc_feature 1..20: note = chemically synthesized
  source 1..20: mol_type = other DNA
tcaggacataggcatgggca

SEQ ID NO: 24124 - DNA, 20 bp, synthetic construct
  misc_feature 1..20: note = chemically synthesized
  source 1..20: mol_type = other DNA
cttcatgtctaaaacaccaa

SEQ ID NO: 24125 - DNA, 20 bp, synthetic construct
  misc_feature 1..20: note = chemically synthesized
  source 1..20: mol_type = other DNA
gtctaaaacaccaaaagcaa

SEQ ID NO: 24126 - DNA, 20 bp, synthetic construct
  misc_feature 1..20: note = chemically synthesized
  source 1..20: mol_type = other DNA
accaaaagcaatggcaacaa

SEQ ID NO: 24127 - DNA, 20 bp, synthetic construct
  misc_feature 1..20: note = chemically synthesized
  source 1..20: mol_type = other DNA
aatggcaacaaaagccaaaa

SEQ ID NO: 24128 - DNA, 20 bp, synthetic construct
  misc_feature 1..20: note = chemically synthesized
  source 1..20: mol_type = other DNA
caaaagccaaaatggacaaa

SEQ ID NO: 24129 - DNA, 20 bp, synthetic construct
  misc_feature 1..20: note = chemically synthesized
  source 1..20: mol_type = other DNA
aaaagccaaaatggacaaat

SEQ ID NO: 24130 - DNA, 20 bp, synthetic construct
  misc_feature 1..20: note = chemically synthesized
  source 1..20: mol_type = other DNA
aatgggatctaattaaacta

SEQ ID NO: 24131 - DNA, 20 bp, synthetic construct
  misc_feature 1..20: note = chemically synthesized
  source 1..20: mol_type = other DNA
tgggatctaattaaactaaa

SEQ ID NO: 24132 - DNA, 20 bp, synthetic construct
  misc_feature 1..20: note = chemically synthesized
  source 1..20: mol_type = other DNA
taaactaaagagcttctgca

SEQ ID NO: 24133 - DNA, 20 bp, synthetic construct
  misc_feature 1..20: note = chemically synthesized
  source 1..20: mol_type = other DNA
aaagagcttctgcacagcaa

SEQ ID NO: 24134 - DNA, 20 bp, synthetic construct
  misc_feature 1..20: note = chemically synthesized
  source 1..20: mol_type = other DNA
acagcaaaagaaactaccat

SEQ ID NO: 24135 - DNA, 20 bp, synthetic construct
  misc_feature 1..20: note = chemically synthesized
  source 1..20: mol_type = other DNA
agcaaaagaaactaccatca

SEQ ID NO: 24136 - DNA, 20 bp, synthetic construct
  misc_feature 1..20: note = chemically synthesized
  source 1..20: mol_type = other DNA
gaaactaccatcagagtgaa

SEQ ID NO: 24137 - DNA, 20 bp, synthetic construct
  misc_feature 1..20: note = chemically synthesized
  source 1..20: mol_type = other DNA
aaactaccatcagagtgaac

SEQ ID NO: 24138 - DNA, 20 bp, synthetic construct
  misc_feature 1..20: note = chemically synthesized
  source 1..20: mol_type = other DNA
cagagtgaacaggcaacata

SEQ ID NO: 24139 - DNA, 20 bp, synthetic construct
  misc_feature 1..20: note = chemically synthesized
  source 1..20: mol_type = other DNA
tgaacaggcaacatacagaa

SEQ ID NO: 24140 - DNA, 20 bp, synthetic construct
  misc_feature 1..20: note = chemically synthesized
  source 1..20: mol_type = other DNA
gaacaggcaacatacagaat

SEQ ID NO: 24141 - DNA, 20 bp, synthetic construct
  misc_feature 1..20: note = chemically synthesized
  source 1..20: mol_type = other DNA
acaggcaacatacagaatgg

SEQ ID NO: 24142 - DNA, 20 bp, synthetic construct
  misc_feature 1..20: note = chemically synthesized
  source 1..20: mol_type = other DNA
tgcaatctactcatccgaca

SEQ ID NO: 24143 - DNA, 20 bp, synthetic construct
  misc_feature 1..20: note = chemically synthesized
  source 1..20: mol_type = other DNA
gcaatctactcatccgacaa

SEQ ID NO: 24144 - DNA, 20 bp, synthetic construct
  misc_feature 1..20: note = chemically synthesized
  source 1..20: mol_type = other DNA
caatctactcatccgacaaa

SEQ ID NO: 24145 - DNA, 20 bp, synthetic construct
  misc_feature 1..20: note = chemically synthesized
  source 1..20: mol_type = other DNA
tccgacaaagggctaatatc

SEQ ID NO: 24146 - DNA, 20 bp, synthetic construct
  misc_feature 1..20: note = chemically synthesized
  source 1..20: mol_type = other DNA
atgaactcaaacaaatttac

SEQ ID NO: 24147 - DNA, 20 bp, synthetic construct
  misc_feature 1..20: note = chemically synthesized
  source 1..20: mol_type = other DNA
aaaaaaacaaccccatcaaa

SEQ ID NO: 24148 - DNA, 20 bp, synthetic construct
  misc_feature 1..20: note = chemically synthesized
  source 1..20: mol_type = other DNA
aaaacaaccccatcaaaaag

SEQ ID NO: 24149 - DNA, 20 bp, synthetic construct
  misc_feature 1..20: note = chemically synthesized
  source 1..20: mol_type = other DNA
aaacaaccccatcaaaaagt

SEQ ID NO: 24150 - DNA, 20 bp, synthetic construct
  misc_feature 1..20: note = chemically synthesized
  source 1..20: mol_type = other DNA
accccatcaaaaagtgggca

SEQ ID NO: 24151 - DNA, 20 bp, synthetic construct
  misc_feature 1..20: note = chemically synthesized
  source 1..20: mol_type = other DNA
ccccatcaaaaagtgggcaa

SEQ ID NO: 24152 - DNA, 20 bp, synthetic construct
  misc_feature 1..20: note = chemically synthesized
  source 1..20: mol_type = other DNA
aagtgggcaaaggatatgaa

SEQ ID NO: 24153 - DNA, 20 bp, synthetic construct
  misc_feature 1..20: note = chemically synthesized
  source 1..20: mol_type = other DNA
tatgaacagacacttctcaa

SEQ ID NO: 24154 - DNA, 20 bp, synthetic construct
  misc_feature 1..20: note = chemically synthesized
  source 1..20: mol_type = other DNA
gaacagacacttctcaaaag

SEQ ID NO: 24155 - DNA, 20 bp, synthetic construct
  misc_feature 1..20: note = chemically synthesized
  source 1..20: mol_type = other DNA
ctcaaaagaagacatttatg

SEQ ID NO: 24156 - DNA, 20 bp, synthetic construct
  misc_feature 1..20: note = chemically synthesized
  source 1..20: mol_type = other DNA
gaagacatttatgcagtcaa

SEQ ID NO: 24157 - DNA, 20 bp, synthetic construct
  misc_feature 1..20: note = chemically synthesized
  source 1..20: mol_type = other DNA
gaaaaaatgctcatcatcac

SEQ ID NO: 24158 - DNA, 20 bp, synthetic construct
  misc_feature 1..20: note = chemically synthesized
  source 1..20: mol_type = other DNA
tgctcatcatcactggccat

SEQ ID NO: 24159 - DNA, 20 bp, synthetic construct
  misc_feature 1..20: note = chemically synthesized
  source 1..20: mol_type = other DNA
ctcatcatcactggccatca

SEQ ID NO: 24160 - DNA, 20 bp, synthetic construct
  misc_feature 1..20: note = chemically synthesized
  source 1..20: mol_type = other DNA
agaaatacaaatcaaaacca

SEQ ID NO: 24161 - DNA, 20 bp, synthetic construct
  misc_feature 1..20: note = chemically synthesized
  source 1..20: mol_type = other DNA
atacaaatcaaaaccacagt

SEQ ID NO: 24162 - DNA, 20 bp, synthetic construct
  misc_feature 1..20: note = chemically synthesized
  source 1..20: mol_type = other DNA
agtgagataccatctcacac

SEQ ID NO: 24163 - DNA, 20 bp, synthetic construct
  misc_feature 1..20: note = chemically synthesized
  source 1..20: mol_type = other DNA
agataccatctcacaccagt

SEQ ID NO: 24164 - DNA, 20 bp, synthetic construct
  misc_feature 1..20: note = chemically synthesized
  source 1..20: mol_type = other DNA
ccatctcacaccagttagaa

SEQ ID NO: 24165 - DNA, 20 bp, synthetic construct
  misc_feature 1..20: note = chemically synthesized
  source 1..20: mol_type = other DNA
ttagaatggcgatcattaaa

SEQ ID NO: 24166 - DNA, 20 bp, synthetic construct
  misc_feature 1..20: note = chemically synthesized
  source 1..20: mol_type = other DNA
aatggcgatcattaaaaagt

SEQ ID NO: 24167 - DNA, 20 bp, synthetic construct
  misc_feature 1..20: note = chemically synthesized
  source 1..20: mol_type = other DNA
atggcgatcattaaaaagtc

SEQ ID NO: 24168 - DNA, 20 bp, synthetic construct
  misc_feature 1..20: note = chemically synthesized
  source 1..20: mol_type = other DNA
attaaaaagtcaggaaacaa

SEQ ID NO: 24169 - DNA, 20 bp, synthetic construct
  misc_feature 1..20: note = chemically synthesized
  source 1..20: mol_type = other DNA
ttaaaaagtcaggaaacaac

SEQ ID NO: 24170 - DNA, 20 bp, synthetic construct
  misc_feature 1..20: note = chemically synthesized
  source 1..20: mol_type = other DNA
agtcaggaaacaacaggtgc

SEQ ID NO: 24171 - DNA, 20 bp, synthetic construct
  misc_feature 1..20: note = chemically synthesized
  source 1..20: mol_type = other DNA
tcaggaaacaacaggtgctg

SEQ ID NO: 24172 - DNA, 20 bp, synthetic construct
  misc_feature 1..20: note = chemically synthesized
  source 1..20: mol_type = other DNA
aggaaacaacaggtgctgga

SEQ ID NO: 24173 - DNA, 20 bp, synthetic construct
  misc_feature 1..20: note = chemically synthesized
  source 1..20: mol_type = other DNA
ggaaacaacaggtgctggag

SEQ ID NO: 24174 - DNA, 20 bp, synthetic construct
  misc_feature 1..20: note = chemically synthesized
  source 1..20: mol_type = other DNA
caggtgctggagaggatgtg

SEQ ID NO: 24175 - DNA, 20 bp, synthetic construct
  misc_feature 1..20: note = chemically synthesized
  source 1..20: mol_type = other DNA
gtgctggagaggatgtgaag

SEQ ID NO: 24176 - DNA, 20 bp, synthetic construct
  misc_feature 1..20: note = chemically synthesized
  source 1..20: mol_type = other DNA
ctggagaggatgtgaagaag

SEQ ID NO: 24177 - DNA, 20 bp, synthetic construct
  misc_feature 1..20: note = chemically synthesized
  source 1..20: mol_type = other DNA
tggagaggatgtgaagaagt

SEQ ID NO: 24178 - DNA, 20 bp, synthetic construct
  misc_feature 1..20: note = chemically synthesized
  source 1..20: mol_type = other DNA
taggaacacttttacactgt

SEQ ID NO: 24179 - DNA, 20 bp, synthetic construct
  misc_feature 1..20: note = chemically synthesized
  source 1..20: mol_type = other DNA
aacacttttacactgttggt

SEQ ID NO: 24180 - DNA, 20 bp, synthetic construct
  misc_feature 1..20: note = chemically synthesized
  source 1..20: mol_type = other DNA
ctgttggtgagactgtaaac

SEQ ID NO: 24181 - DNA, 20 bp, synthetic construct
  misc_feature 1..20: note = chemically synthesized
  source 1..20: mol_type = other DNA
gtaaactagttcaaccattg

SEQ ID NO: 24182 - DNA, 20 bp, synthetic construct
  misc_feature 1..20: note = chemically synthesized
  source 1..20: mol_type = other DNA
aactagttcaaccattgtgg

SEQ ID NO: 24183 - DNA, 20 bp, synthetic construct
  misc_feature 1..20: note = chemically synthesized
  source 1..20: mol_type = other DNA
agttcaaccattgtggaagt

SEQ ID NO: 24184 - DNA, 20 bp, synthetic construct
  misc_feature 1..20: note = chemically synthesized
  source 1..20: mol_type = other DNA
aaccattgtggaagtcagtg

SEQ ID NO: 24185 - DNA, 20 bp, synthetic construct
  misc_feature 1..20: note = chemically synthesized
  source 1..20: mol_type = other DNA
aagtcagtgtggcgattcct

SEQ ID NO: 24186 - DNA, 20 bp, synthetic construct
  misc_feature 1..20: note = chemically synthesized
  source 1..20: mol_type = other DNA
agtcagtgtggcgattcctc

SEQ ID NO: 24187 - DNA, 20 bp, synthetic construct
  misc_feature 1..20: note = chemically synthesized
  source 1..20: mol_type = other DNA
gtcagtgtggcgattcctca

SEQ ID NO: 24188 - DNA, 20 bp, synthetic construct
  misc_feature 1..20: note = chemically synthesized
  source 1..20: mol_type = other DNA
gtggcgattcctcagggatc

SEQ ID NO: 24189 - DNA, 20 bp, synthetic construct
  misc_feature 1..20: note = chemically synthesized
  source 1..20: mol_type = other DNA
attcctcagggatctagaac

SEQ ID NO: 24190 - DNA, 20 bp, synthetic construct
  misc_feature 1..20: note = chemically synthesized
  source 1..20: mol_type = other DNA
actagaaataccatttgacc

SEQ ID NO: 24191 - DNA, 20 bp, synthetic construct
  misc_feature 1..20: note = chemically synthesized
  source 1..20: mol_type = other DNA
tgacccagccatcccattac

SEQ ID NO: 24192 - DNA, 20 bp, synthetic construct
  misc_feature 1..20: note = chemically synthesized
  source 1..20: mol_type = other DNA
gacccagccatcccattact

SEQ ID NO: 24193 - DNA, 20 bp, synthetic construct
  misc_feature 1..20: note = chemically synthesized
  source 1..20: mol_type = other DNA
cattactgggtacatactca

SEQ ID NO: 24194 - DNA, 20 bp, synthetic construct
  misc_feature 1..20: note = chemically synthesized
  source 1..20: mol_type = other DNA
attactgggtacatactcaa

SEQ ID NO: 24195 - DNA, 20 bp, synthetic construct
  misc_feature 1..20: note = chemically synthesized
  source 1..20: mol_type = other DNA
ttataaatcatgctgctata

SEQ ID NO: 24196 - DNA, 20 bp, synthetic construct
  misc_feature 1..20: note = chemically synthesized
  source 1..20: mol_type = other DNA
atgcacatgtatgtttattg

SEQ ID NO: 24197 - DNA, 20 bp, synthetic construct
  misc_feature 1..20: note = chemically synthesized
  source 1..20: mol_type = other DNA
tattgtggcactattcacaa

SEQ ID NO: 24198 - DNA, 20 bp, synthetic construct
  misc_feature 1..20: note = chemically synthesized
  source 1..20: mol_type = other DNA
tggcactattcacaatagca

SEQ ID NO: 24199 - DNA, 20 bp, synthetic construct
  misc_feature 1..20: note = chemically synthesized
  source 1..20: mol_type = other DNA
tattcacaatagcaaagact

SEQ ID NO: 24200 - DNA, 20 bp, synthetic construct
  misc_feature 1..20: note = chemically synthesized
  source 1..20: mol_type = other DNA
acccaaatgtccaacaatga

SEQ ID NO: 24201 - DNA, 20 bp, synthetic construct
  misc_feature 1..20: note = chemically synthesized
  source 1..20: mol_type = other DNA
aatgtccaacaatgatagac

SEQ ID NO: 24202 - DNA, 20 bp, synthetic construct
  misc_feature 1..20: note = chemically synthesized
  source 1..20: mol_type = other DNA
caacaatgatagactggatt

SEQ ID NO: 24203 - DNA, 20 bp, synthetic construct
  misc_feature 1..20: note = chemically synthesized
  source 1..20: mol_type = other DNA
tagactggattaagaaaacg

SEQ ID NO: 24204 - DNA, 20 bp, synthetic construct
  misc_feature 1..20: note = chemically synthesized
  source 1..20: mol_type = other DNA
aacgtggcacatatacacca

SEQ ID NO: 24205 - DNA, 20 bp, synthetic construct
  misc_feature 1..20: note = chemically synthesized
  source 1..20: mol_type = other DNA
atacaccatggaatactatg

SEQ ID NO: 24206 - DNA, 20 bp, synthetic construct
  misc_feature 1..20: note = chemically synthesized
  source 1..20: mol_type = other DNA
ctatgcagccataaaaaatg

SEQ ID NO: 24207 - DNA, 20 bp, synthetic construct
  misc_feature 1..20: note = chemically synthesized
  source 1..20: mol_type = other DNA
atgcagccataaaaaatgaa

SEQ ID NO: 24208 - DNA, 20 bp, synthetic construct
  misc_feature 1..20: note = chemically synthesized
  source 1..20: mol_type = other DNA
tgaagagttcatgtcctttg

SEQ ID NO: 24209 - DNA, 20 bp, synthetic construct
  misc_feature 1..20: note = chemically synthesized
  source 1..20: mol_type = other DNA
gaagagttcatgtcctttgt

SEQ ID NO: 24210 - DNA, 20 bp, synthetic construct
  misc_feature 1..20: note = chemically synthesized
  source 1..20: mol_type = other DNA
aagagttcatgtcctttgta

SEQ ID NO: 24211 - DNA, 20 bp, synthetic construct
  misc_feature 1..20: note = chemically synthesized
  source 1..20: mol_type = other DNA
tcatgtcctttgtagggaca

SEQ ID NO: 24212 - DNA, 20 bp, synthetic construct
  misc_feature 1..20: note = chemically synthesized
  source 1..20: mol_type = other DNA
cctttgtagggacatggatg

SEQ ID NO: 24213 - DNA, 20 bp, synthetic construct
  misc_feature 1..20: note = chemically synthesized
  source 1..20: mol_type = other DNA
tgtagggacatggatgaagc

SEQ ID NO: 24214 - DNA, 20 bp, synthetic construct
  misc_feature 1..20: note = chemically synthesized
  source 1..20: mol_type = other DNA
aagctggaaaccatcattct

SEQ ID NO: 24215 - DNA, 20 bp, synthetic construct
  misc_feature 1..20: note = chemically synthesized
  source 1..20: mol_type = other DNA
cattctcagcaaactatcgc

SEQ ID NO: 24216 - DNA, 20 bp, synthetic construct
  misc_feature 1..20: note = chemically synthesized
  source 1..20: mol_type = other DNA
attctcagcaaactatcgca

SEQ ID NO: 24217 - DNA, 20 bp, synthetic construct
  misc_feature 1..20: note = chemically synthesized
  source 1..20: mol_type = other DNA
acactgcatgttctcactca

SEQ ID NO: 24218 - DNA, 20 bp, synthetic construct
  misc_feature 1..20: note = chemically synthesized
  source 1..20: mol_type = other DNA
cactgcatgttctcactcat

SEQ ID NO: 24219 - DNA, 20 bp, synthetic construct
  misc_feature 1..20: note = chemically synthesized
  source 1..20: mol_type = other DNA
tgcatgttctcactcatagg

SEQ ID NO: 24220 - DNA, 20 bp, synthetic construct
  misc_feature 1..20: note = chemically synthesized
  source 1..20: mol_type = other DNA
gcatgttctcactcataggt

SEQ ID NO: 24221 - DNA, 20 bp, synthetic construct
  misc_feature 1..20: note = chemically synthesized
  source 1..20: mol_type = other DNA
ataggtgggaattgaacaat

SEQ ID NO: 24222 - DNA, 20 bp, synthetic construct
  misc_feature 1..20: note = chemically synthesized
  source 1..20: mol_type = other DNA
aattgaacaatgagaacaca

SEQ ID NO: 24223 - DNA, 20 bp, synthetic construct
  misc_feature 1..20: note = chemically synthesized
  source 1..20: mol_type = other DNA
acaatgagaacacatggaca

SEQ ID NO: 24224 - DNA, 20 bp, synthetic construct
  misc_feature 1..20: note = chemically synthesized
  source 1..20: mol_type = other DNA
caatgagaacacatggacac

SEQ ID NO: 24225 - DNA, 20 bp, synthetic construct
  misc_feature 1..20: note = chemically synthesized
  source 1..20: mol_type = other DNA
tgagaacacatggacacagg

SEQ ID NO: 24226 - DNA, 20 bp, synthetic construct
  misc_feature 1..20: note = chemically synthesized
  source 1..20: mol_type = other DNA
gagaacacatggacacagga

SEQ ID NO: 24227 - DNA, 20 bp, synthetic construct
  misc_feature 1..20: note = chemically synthesized
  source 1..20: mol_type = other DNA
agaacacatggacacaggaa

SEQ ID NO: 24228 - DNA, 20 bp, synthetic construct
  misc_feature 1..20: note = chemically synthesized
  source 1..20: mol_type = other DNA
gaacacatggacacaggaag

SEQ ID NO: 24229 - DNA, 20 bp, synthetic construct
  misc_feature 1..20: note = chemically synthesized
  source 1..20: mol_type = other DNA
ggaaggggaacatcacacac

SEQ ID NO: 24230 - DNA, 20 bp, synthetic construct
  misc_feature 1..20: note = chemically synthesized
  source 1..20: mol_type = other DNA
gaaggggaacatcacacacc

SEQ ID NO: 24231 - DNA, 20 bp, synthetic construct
  misc_feature 1..20: note = chemically synthesized
  source 1..20: mol_type = other DNA
aaggggaacatcacacacca

SEQ ID NO: 24232 - DNA, 20 bp, synthetic construct
  misc_feature 1..20: note = chemically synthesized
  source 1..20: mol_type = other DNA
acatcacacaccagggcctg

SEQ ID NO: 24233 - DNA, 20 bp, synthetic construct
  misc_feature 1..20: note = chemically synthesized
  source 1..20: mol_type = other DNA
tcacacaccagggcctgcag

SEQ ID NO: 24234 - DNA, 20 bp, synthetic construct
  misc_feature 1..20: note = chemically synthesized
  source 1..20: mol_type = other DNA
cacacaccagggcctgcagt

SEQ ID NO: 24235 - DNA, 20 bp, synthetic construct
  misc_feature 1..20: note = chemically synthesized
  source 1..20: mol_type = other DNA
acacaccagggcctgcagtg

SEQ ID NO: 24236 - DNA, 20 bp, synthetic construct
  misc_feature 1..20: note = chemically synthesized
  source 1..20: mol_type = other DNA
caccagggcctgcagtgggg

SEQ ID NO: 24237 - DNA, 20 bp, synthetic construct
  misc_feature 1..20: note = chemically synthesized
  source 1..20: mol_type = other DNA
accagggcctgcagtggggt

SEQ ID NO: 24238 - DNA, 20 bp, synthetic construct
  misc_feature 1..20: note = chemically synthesized
  source 1..20: mol_type = other DNA
ccagggcctgcagtggggtg

SEQ ID NO: 24239 - DNA, 20 bp, synthetic construct
  misc_feature 1..20: note = chemically synthesized
  source 1..20: mol_type = other DNA
cagggcctgcagtggggtgg

SEQ ID NO: 24240 - DNA, 20 bp, synthetic construct
  misc_feature 1..20: note = chemically synthesized
  source 1..20: mol_type = other DNA
gcctgcagtggggtgggggt

SEQ ID NO: 24241 - DNA, 20 bp, synthetic construct
  misc_feature 1..20: note = chemically synthesized
  source 1..20: mol_type = other DNA
cctgcagtggggtgggggtc

SEQ ID NO: 24242 - DNA, 20 bp, synthetic construct
  misc_feature 1..20: note = chemically synthesized
  source 1..20: mol_type = other DNA
ctgcagtggggtgggggtcg

SEQ ID NO: 24243 - DNA, 20 bp, synthetic construct
  misc_feature 1..20: note = chemically synthesized
  source 1..20: mol_type = other DNA
tgcagtggggtgggggtcgg

SEQ ID NO: 24244 - DNA, 20 bp, synthetic construct
  misc_feature 1..20: note = chemically synthesized
  source 1..20: mol_type = other DNA
gcagtggggtgggggtcggg

SEQ ID NO: 24245 - DNA, 20 bp, synthetic construct
  misc_feature 1..20: note = chemically synthesized
  source 1..20: mol_type = other DNA
agtggggtgggggtcggggg

SEQ ID NO: 24246 - DNA, 20 bp, synthetic construct
  misc_feature 1..20: note = chemically synthesized
  source 1..20: mol_type = other DNA
gtggggtgggggtcgggggg

SEQ ID NO: 24247 - DNA, 20 bp, synthetic construct
  misc_feature 1..20: note = chemically synthesized
  source 1..20: mol_type = other DNA
tggggtgggggtcgggggga

SEQ ID NO: 24248 - DNA, 20 bp, synthetic construct
  misc_feature 1..20: note = chemically synthesized
  source 1..20: mol_type = other DNA
gtgggggtcggggggaggga

SEQ ID NO: 24249 - DNA, 20 bp, synthetic construct
  misc_feature 1..20: note = chemically synthesized
  source 1..20: mol_type = other DNA
gtcggggggagggatagcat

SEQ ID NO: 24250 - DNA, 20 bp, synthetic construct
  misc_feature 1..20: note = chemically synthesized
  source 1..20: mol_type = other DNA
tcggggggagggatagcatt

SEQ ID NO: 24251 - DNA, 20 bp, synthetic construct
  misc_feature 1..20: note = chemically synthesized
  source 1..20: mol_type = other DNA
ggggggagggatagcattag

SEQ ID NO: 24252 - DNA, 20 bp, synthetic construct
  misc_feature 1..20: note = chemically synthesized
  source 1..20: mol_type = other DNA
taggagatatacctaatgct

SEQ ID NO: 24253 - DNA, 20 bp, synthetic construct
  misc_feature 1..20: note = chemically synthesized
  source 1..20: mol_type = other DNA
tatacctaatgctaagtgac

SEQ ID NO: 24254 - DNA, 20 bp, synthetic construct
  misc_feature 1..20: note = chemically synthesized
  source 1..20: mol_type = other DNA
aatgctaagtgacgagttaa

SEQ ID NO: 24255 - DNA, 20 bp, synthetic construct
  misc_feature 1..20: note = chemically synthesized
  source 1..20: mol_type = other DNA
atgctaagtgacgagttaat

SEQ ID NO: 24256 - DNA, 20 bp, synthetic construct
  misc_feature 1..20: note = chemically synthesized
  source 1..20: mol_type = other DNA
aagtgacgagttaatgggtg

SEQ ID NO: 24257 - DNA, 20 bp, synthetic construct
  misc_feature 1..20: note = chemically synthesized
  source 1..20: mol_type = other DNA
atgggtgcagcacaccaaca

SEQ ID NO: 24258 - DNA, 20 bp, synthetic construct
  misc_feature 1..20: note = chemically synthesized
  source 1..20: mol_type = other DNA
caaatgtaccctaaaactta

SEQ ID NO: 24259 - DNA, 20 bp, synthetic construct
  misc_feature 1..20: note = chemically synthesized
  source 1..20: mol_type = other DNA
aacttaaagtataataataa

SEQ ID NO: 24260 - DNA, 20 bp, synthetic construct
  misc_feature 1..20: note = chemically synthesized
  source 1..20: mol_type = other DNA
taaagtataataataaaaga

SEQ ID NO: 24261 - DNA, 20 bp, synthetic construct
  misc_feature 1..20: note = chemically synthesized
  source 1..20: mol_type = other DNA
gtataataataaaagaaaga

SEQ ID NO: 24262 - DNA, 20 bp, synthetic construct
  misc_feature 1..20: note = chemically synthesized
  source 1..20: mol_type = other DNA
aataataaaagaaagaaaga

SEQ ID NO: 24263 - DNA, 20 bp, synthetic construct
  misc_feature 1..20: note = chemically synthesized
  source 1..20: mol_type = other DNA
agaaagaaatctgctgcaaa

SEQ ID NO: 24264 - DNA, 20 bp, synthetic construct
  misc_feature 1..20: note = chemically synthesized
  source 1..20: mol_type = other DNA
gaaagaaatctgctgcaaaa

SEQ ID NO: 24265 - DNA, 20 bp, synthetic construct
  misc_feature 1..20: note = chemically synthesized
  source 1..20: mol_type = other DNA
cttaaaataaatcttatttc

SEQ ID NO: 24266 - DNA, 20 bp, synthetic construct
  misc_feature 1..20: note = chemically synthesized
  source 1..20: mol_type = other DNA
taaaataaatcttatttctg

SEQ ID NO: 24267 - DNA, 20 bp, synthetic construct
  misc_feature 1..20: note = chemically synthesized
  source 1..20: mol_type = other DNA
aaatcttatttctggagatg

SEQ ID NO: 24268 - DNA, 20 bp, synthetic construct
  misc_feature 1..20: note = chemically synthesized
  source 1..20: mol_type = other DNA
atgtggctaattccctaacc

SEQ ID NO: 24269 - DNA, 20 bp, synthetic construct
  misc_feature 1..20: note = chemically synthesized
  source 1..20: mol_type = other DNA
ctaattccctaacctagatg

SEQ ID NO: 24270 - DNA, 20 bp, synthetic construct
  misc_feature 1..20: note = chemically synthesized
  source 1..20: mol_type = other DNA
taattccctaacctagatgc

SEQ ID NO: 24271 - DNA, 20 bp, synthetic construct
  misc_feature 1..20: note = chemically synthesized
  source 1..20: mol_type = other DNA
ttccctaacctagatgcagg

SEQ ID NO: 24272 - DNA, 20 bp, synthetic construct
  misc_feature 1..20: note = chemically synthesized
  source 1..20: mol_type = other DNA
ctagatgcaggaagaaacct

SEQ ID NO: 24273 - DNA, 20 bp, synthetic construct
  misc_feature 1..20: note = chemically synthesized
  source 1..20: mol_type = other DNA
ccttagcgactcctgttcca

SEQ ID NO: 24274 - DNA, 20 bp, synthetic construct
  misc_feature 1..20: note = chemically synthesized
  source 1..20: mol_type = other DNA
ttccaaagttctaaatccct

SEQ ID NO: 24275 - DNA, 20 bp, synthetic construct
  misc_feature 1..20: note = chemically synthesized
  source 1..20: mol_type = other DNA
tccaaagttctaaatccctc

SEQ ID NO: 24276 - DNA, 20 bp, synthetic construct
  misc_feature 1..20: note = chemically synthesized
  source 1..20: mol_type = other DNA
aagttctaaatccctcaggc

SEQ ID NO: 24277 - DNA, 20 bp, synthetic construct
  misc_feature 1..20: note = chemically synthesized
  source 1..20: mol_type = other DNA
agttctaaatccctcaggct

SEQ ID NO: 24278 - DNA, 20 bp, synthetic construct
  misc_feature 1..20: note = chemically synthesized
  source 1..20: mol_type = other DNA
ttctaaatccctcaggctgg

SEQ ID NO: 24279 - DNA, 20 bp, synthetic construct
  misc_feature 1..20: note = chemically synthesized
  source 1..20: mol_type = other DNA
tccctcaggctgggagaata

SEQ ID NO: 24280 - DNA, 20 bp, synthetic construct
  misc_feature 1..20: note = chemically synthesized
  source 1..20: mol_type = other DNA
ctcaggctgggagaataaag

SEQ ID NO: 24281 - DNA, 20 bp, synthetic construct
  misc_feature 1..20: note = chemically synthesized
  source 1..20: mol_type = other DNA
tcaggctgggagaataaaga

SEQ ID NO: 24282 - DNA, 20 bp, synthetic construct
  misc_feature 1..20: note = chemically synthesized
  source 1..20: mol_type = other DNA
aggctgggagaataaagaag

SEQ ID NO: 24283 - DNA, 20 bp, synthetic construct
  misc_feature 1..20: note = chemically synthesized
  source 1..20: mol_type = other DNA
ggctgggagaataaagaagg

SEQ ID NO: 24284 - DNA, 20 bp, synthetic construct
  misc_feature 1..20: note = chemically synthesized
  source 1..20: mol_type = other DNA
gctgggagaataaagaagga

SEQ ID NO: 24285 - DNA, 20 bp, synthetic construct
  misc_feature 1..20: note = chemically synthesized
  source 1..20: mol_type = other DNA
tgggagaataaagaaggagg

SEQ ID NO: 24286 - DNA, 20 bp, synthetic construct
  misc_feature 1..20: note = chemically synthesized
  source 1..20: mol_type = other DNA
gggagaataaagaaggaggg

SEQ ID NO: 24287 - DNA, 20 bp, synthetic construct
  misc_feature 1..20: note = chemically synthesized
  source 1..20: mol_type = other DNA
gagaataaagaaggagggag

SEQ ID NO: 24288 - DNA, 20 bp, synthetic construct
  misc_feature 1..20: note = chemically synthesized
  source 1..20: mol_type = other DNA
gaataaagaaggagggagga

SEQ ID NO: 24289 - DNA, 20 bp, synthetic construct
  misc_feature 1..20: note = chemically synthesized
  source 1..20: mol_type = other DNA
ataaagaaggagggaggaga

SEQ ID NO: 24290 - DNA, 20 bp, synthetic construct
  misc_feature 1..20: note = chemically synthesized
  source 1..20: mol_type = other DNA
taaagaaggagggaggagag

SEQ ID NO: 24291 - DNA, 20 bp, synthetic construct
  misc_feature 1..20: note = chemically synthesized
  source 1..20: mol_type = other DNA
aagaaggagggaggagagag

SEQ ID NO: 24292 - DNA, 20 bp, synthetic construct
  misc_feature 1..20: note = chemically synthesized
  source 1..20: mol_type = other DNA
aaggagggaggagagaggag

SEQ ID NO: 24293 - DNA, 20 bp, synthetic construct
  misc_feature 1..20: note = chemically synthesized
  source 1..20: mol_type = other DNA
aggagggaggagagaggagt

SEQ ID NO: 24294 - DNA, 20 bp, synthetic construct
  misc_feature 1..20: note = chemically synthesized
  source 1..20: mol_type = other DNA
gaggagagaggagtgggccg

SEQ ID NO: 24295 - DNA, 20 bp, synthetic construct
  misc_feature 1..20: note = chemically synthesized
  source 1..20: mol_type = other DNA
aggagagaggagtgggccgt

SEQ ID NO: 24296 - DNA, 20 bp, synthetic construct
  misc_feature 1..20: note = chemically synthesized
  source 1..20: mol_type = other DNA
ggagagaggagtgggccgta

SEQ ID NO: 24297 - DNA, 20 bp, synthetic construct
  misc_feature 1..20: note = chemically synthesized
  source 1..20: mol_type = other DNA
agagaggagtgggccgtagg

SEQ ID NO: 24298 - DNA, 20 bp, synthetic construct
  misc_feature 1..20: note = chemically synthesized
  source 1..20: mol_type = other DNA
gagaggagtgggccgtaggg

SEQ ID NO: 24299 - DNA, 20 bp, synthetic construct
  misc_feature 1..20: note = chemically synthesized
  source 1..20: mol_type = other DNA
gaggagtgggccgtagggag

SEQ ID NO: 24300 - DNA, 20 bp, synthetic construct
  misc_feature 1..20: note = chemically synthesized
  source 1..20: mol_type = other DNA
tctgaaactaattttctttg

SEQ ID NO: 24301 - DNA, 20 bp, synthetic construct
  misc_feature 1..20: note = chemically synthesized
  source 1..20: mol_type = other DNA
aactaattttctttgcagct

SEQ ID NO: 24302 - DNA, 20 bp, synthetic construct
  misc_feature 1..20: note = chemically synthesized
  source 1..20: mol_type = other DNA
ttctttgcagcttggcttct

SEQ ID NO: 24303 - DNA, 20 bp, synthetic construct
  misc_feature 1..20: note = chemically synthesized
  source 1..20: mol_type = other DNA
tgcagcttggcttctgagta

SEQ ID NO: 24304 - DNA, 20 bp, synthetic construct
  misc_feature 1..20: note = chemically synthesized
  source 1..20: mol_type = other DNA
gcttctgagtatagtctaaa

SEQ ID NO: 24305 - DNA, 20 bp, synthetic construct
  misc_feature 1..20: note = chemically synthesized
  source 1..20: mol_type = other DNA
ctgagtatagtctaaaaagt

SEQ ID NO: 24306 - DNA, 20 bp, synthetic construct
  misc_feature 1..20: note = chemically synthesized
  source 1..20: mol_type = other DNA
atagtctaaaaagttggtgt

SEQ ID NO: 24307 - DNA, 20 bp, synthetic construct
  misc_feature 1..20: note = chemically synthesized
  source 1..20: mol_type = other DNA
gttggatccaatatcttgac

SEQ ID NO: 24308 - DNA, 20 bp, synthetic construct
  misc_feature 1..20: note = chemically synthesized
  source 1..20: mol_type = other DNA
ttggatccaatatcttgacc

SEQ ID NO: 24309 - DNA, 20 bp, synthetic construct
  misc_feature 1..20: note = chemically synthesized
  source 1..20: mol_type = other DNA
tccaatatcttgaccaggct

SEQ ID NO: 24310 - DNA, 20 bp, synthetic construct
  misc_feature 1..20: note = chemically synthesized
  source 1..20: mol_type = other DNA
ccaatatcttgaccaggctt

SEQ ID NO: 24311 - DNA, 20 bp, synthetic construct
  misc_feature 1..20: note = chemically synthesized
  source 1..20: mol_type = other DNA
caatatcttgaccaggctta

SEQ ID NO: 24312 - DNA, 20 bp, synthetic construct
  misc_feature 1..20: note = chemically synthesized
  source 1..20: mol_type = other DNA
aatatcttgaccaggcttag

SEQ ID NO: 24313 - DNA, 20 bp, synthetic construct
  misc_feature 1..20: note = chemically synthesized
  source 1..20: mol_type = other DNA
tgaccaggcttaggggttca

SEQ ID NO: 24314 - DNA, 20 bp, synthetic construct
  misc_feature 1..20: note = chemically synthesized
  source 1..20: mol_type = other DNA
ggggttcatagtcacatctg

SEQ ID NO: 24315 - DNA, 20 bp, synthetic construct
  misc_feature 1..20: note = chemically synthesized
  source 1..20: mol_type = other DNA
acatctgtggcaacaatgaa

SEQ ID NO: 24316 - DNA, 20 bp, synthetic construct
  misc_feature 1..20: note = chemically synthesized
  source 1..20: mol_type = other DNA
acaatgaacagacttatgaa

SEQ ID NO: 24317 - DNA, 20 bp, synthetic construct
  misc_feature 1..20: note = chemically synthesized
  source 1..20: mol_type = other DNA
caatgaacagacttatgaac

SEQ ID NO: 24318 - DNA, 20 bp, synthetic construct
  misc_feature 1..20: note = chemically synthesized
  source 1..20: mol_type = other DNA
gaacagacttatgaacaggt

SEQ ID NO: 24319 - DNA, 20 bp, synthetic construct
  misc_feature 1..20: note = chemically synthesized
  source 1..20: mol_type = other DNA
gacttatgaacaggtcggta

SEQ ID NO: 24320 - DNA, 20 bp, synthetic construct
  misc_feature 1..20: note = chemically synthesized
  source 1..20: mol_type = other DNA
aacaggtcggtaaagaactc

SEQ ID NO: 24321 - DNA, 20 bp, synthetic construct
  misc_feature 1..20: note = chemically synthesized
  source 1..20: mol_type = other DNA
taaagaactccagtgtgtct

SEQ ID NO: 24322 - DNA, 20 bp, synthetic construct
  misc_feature 1..20: note = chemically synthesized
  source 1..20: mol_type = other DNA
aactccagtgtgtcttggcc

SEQ ID NO: 24323 - DNA, 20 bp, synthetic construct
  misc_feature 1..20: note = chemically synthesized
  source 1..20: mol_type = other DNA
ctccagtgtgtcttggccta

SEQ ID NO: 24324 - DNA, 20 bp, synthetic construct
  misc_feature 1..20: note = chemically synthesized
  source 1..20: mol_type = other DNA
tccagtgtgtcttggcctag

SEQ ID NO: 24325 - DNA, 20 bp, synthetic construct
  misc_feature 1..20: note = chemically synthesized
  source 1..20: mol_type = other DNA
cttggcctagaggctccgca

SEQ ID NO: 24326 - DNA, 20 bp, synthetic construct
  misc_feature 1..20: note = chemically synthesized
  source 1..20: mol_type = other DNA
ttggcctagaggctccgcat

SEQ ID NO: 24327 - DNA, 20 bp, synthetic construct
  misc_feature 1..20: note = chemically synthesized
  source 1..20: mol_type = other DNA
tagaggctccgcataggaat

SEQ ID NO: 24328 - DNA, 20 bp, synthetic construct
  misc_feature 1..20: note = chemically synthesized
  source 1..20: mol_type = other DNA
aggctccgcataggaatgag

SEQ ID NO: 24329 - DNA, 20 bp, synthetic construct
  misc_feature 1..20: note = chemically synthesized
  source 1..20: mol_type = other DNA
ctccgcataggaatgagcag

SEQ ID NO: 24330 - DNA, 20 bp, synthetic construct
  misc_feature 1..20: note = chemically synthesized
  source 1..20: mol_type = other DNA
gcataggaatgagcagtaga

SEQ ID NO: 24331 - DNA, 20 bp, synthetic construct
  misc_feature 1..20: note = chemically synthesized
  source 1..20: mol_type = other DNA
aggaatgagcagtagacggt

SEQ ID NO: 24332 - DNA, 20 bp, synthetic construct
  misc_feature 1..20: note = chemically synthesized
  source 1..20: mol_type = other DNA
gcagtagacggttggcttat

SEQ ID NO: 24333 - DNA, 20 bp, synthetic construct
  misc_feature 1..20: note = chemically synthesized
  source 1..20: mol_type = other DNA
agtagacggttggcttatca

SEQ ID NO: 24334 - DNA, 20 bp, synthetic construct
  misc_feature 1..20: note = chemically synthesized
  source 1..20: mol_type = other DNA
ggttggcttatcagagattg

SEQ ID NO: 24335 - DNA, 20 bp, synthetic construct
  misc_feature 1..20: note = chemically synthesized
  source 1..20: mol_type = other DNA
ttggcttatcagagattgca

SEQ ID NO: 24336 - DNA, 20 bp, synthetic construct
  misc_feature 1..20: note = chemically synthesized
  source 1..20: mol_type = other DNA
ggcttatcagagattgcaga

SEQ ID NO: 24337 - DNA, 20 bp, synthetic construct
  misc_feature 1..20: note = chemically synthesized
  source 1..20: mol_type = other DNA
gcttatcagagattgcagag

SEQ ID NO: 24338 - DNA, 20 bp, synthetic construct
  misc_feature 1..20: note = chemically synthesized
  source 1..20: mol_type = other DNA
cttatcagagattgcagaga

SEQ ID NO: 24339 - DNA, 20 bp, synthetic construct
  misc_feature 1..20: note = chemically synthesized
  source 1..20: mol_type = other DNA
agattgcagagagggaaatg

SEQ ID NO: 24340 - DNA, 20 bp, synthetic construct
  misc_feature 1..20: note = chemically synthesized
  source 1..20: mol_type = other DNA
agggaaatgcagtaatgtat

SEQ ID NO: 24341 - DNA, 20 bp, synthetic construct
  misc_feature 1..20: note = chemically synthesized
  source 1..20: mol_type = other DNA
aatgcagtaatgtatcagtc

SEQ ID NO: 24342 - DNA, 20 bp, synthetic construct
  misc_feature 1..20: note = chemically synthesized
  source 1..20: mol_type = other DNA
atgtatcagtcaagatgtga

SEQ ID NO: 24343 - DNA, 20 bp, synthetic construct
  misc_feature 1..20: note = chemically synthesized
  source 1..20: mol_type = other DNA
tgtatcagtcaagatgtgat

SEQ ID NO: 24344 - DNA, 20 bp, synthetic construct
  misc_feature 1..20: note = chemically synthesized
  source 1..20: mol_type = other DNA
gtatcagtcaagatgtgatg

SEQ ID NO: 24345 - DNA, 20 bp, synthetic construct
  misc_feature 1..20: note = chemically synthesized
  source 1..20: mol_type = other DNA
gtcaagatgtgatggggtat

SEQ ID NO: 24346 - DNA, 20 bp, synthetic construct
  misc_feature 1..20: note = chemically synthesized
  source 1..20: mol_type = other DNA
tataagaatctatcatccca

SEQ ID NO: 24347 - DNA, 20 bp, synthetic construct
  misc_feature 1..20: note = chemically synthesized
  source 1..20: mol_type = other DNA
caaagactccctaaaatctt

SEQ ID NO: 24348 - DNA, 20 bp, synthetic construct
  misc_feature 1..20: note = chemically synthesized
  source 1..20: mol_type = other DNA
tccctaaaatctttagaact

SEQ ID NO: 24349 - DNA, 20 bp, synthetic construct
  misc_feature 1..20: note = chemically synthesized
  source 1..20: mol_type = other DNA
taatctcttttgcaaattcc

SEQ ID NO: 24350 - DNA, 20 bp, synthetic construct
  misc_feature 1..20: note = chemically synthesized
  source 1..20: mol_type = other DNA
tctcttttgcaaattcctag

SEQ ID NO: 24351 - DNA, 20 bp, synthetic construct
  misc_feature 1..20: note = chemically synthesized
  source 1..20: mol_type = other DNA
tcttttgcaaattcctagaa

SEQ ID NO: 24352 - DNA, 20 bp, synthetic construct
  misc_feature 1..20: note = chemically synthesized
  source 1..20: mol_type = other DNA
cttttgcaaattcctagaag

SEQ ID NO: 24353 - DNA, 20 bp, synthetic construct
  misc_feature 1..20: note = chemically synthesized
  source 1..20: mol_type = other DNA
ttttgcaaattcctagaaga

SEQ ID NO: 24354 - DNA, 20 bp, synthetic construct
  misc_feature 1..20: note = chemically synthesized
  source 1..20: mol_type = other DNA
tcctagaagagggaaaatcc

SEQ ID NO: 24355 - DNA, 20 bp, synthetic construct
  misc_feature 1..20: note = chemically synthesized
  source 1..20: mol_type = other DNA
agatctcctttttcattccc

SEQ ID NO: 24356 - DNA, 20 bp, synthetic construct
  misc_feature 1..20: note = chemically synthesized
  source 1..20: mol_type = other DNA
tctcctttttcattccctag

SEQ ID NO: 24357 - DNA, 20 bp, synthetic construct
  misc_feature 1..20: note = chemically synthesized
  source 1..20: mol_type = other DNA
tcctttttcattccctagca

SEQ ID NO: 24358 - DNA, 20 bp, synthetic construct
  misc_feature 1..20: note = chemically synthesized
  source 1..20: mol_type = other DNA
cattccctagcagagtgatc

SEQ ID NO: 24359 - DNA, 20 bp, synthetic construct
  misc_feature 1..20: note = chemically synthesized
  source 1..20: mol_type = other DNA
ccctagcagagtgatctagt

SEQ ID NO: 24360 - DNA, 20 bp, synthetic construct
  misc_feature 1..20: note = chemically synthesized
  source 1..20: mol_type = other DNA
cctagcagagtgatctagtt

SEQ ID NO: 24361 - DNA, 20 bp, synthetic construct
  misc_feature 1..20: note = chemically synthesized
  source 1..20: mol_type = other DNA
gatctagttaggaaaaaatc

SEQ ID NO: 24362 - DNA, 20 bp, synthetic construct
  misc_feature 1..20: note = chemically synthesized
  source 1..20: mol_type = other DNA
aaaatcaagttgaaaatcca

SEQ ID NO: 24363 - DNA, 20 bp, synthetic construct
  misc_feature 1..20: note = chemically synthesized
  source 1..20: mol_type = other DNA
aaatcaagttgaaaatccac

SEQ ID NO: 24364 - DNA, 20 bp, synthetic construct
  misc_feature 1..20: note = chemically synthesized
  source 1..20: mol_type = other DNA
gttgaaaatccacgggaata

SEQ ID NO: 24365 - DNA, 20 bp, synthetic construct
  misc_feature 1..20: note = chemically synthesized
  source 1..20: mol_type = other DNA
ggaatacagaatgatatctc

SEQ ID NO: 24366 - DNA, 20 bp, synthetic construct
  misc_feature 1..20: note = chemically synthesized
  source 1..20: mol_type = other DNA
acagaatgatatctctggtg

SEQ ID NO: 24367 - DNA, 20 bp, synthetic construct
  misc_feature 1..20: note = chemically synthesized
  source 1..20: mol_type = other DNA
tgatatctctggtgtagttc

SEQ ID NO: 24368 - DNA, 20 bp, synthetic construct
  misc_feature 1..20: note = chemically synthesized
  source 1..20: mol_type = other DNA
tctggtgtagttccagactc

SEQ ID NO: 24369 - DNA, 20 bp, synthetic construct
  misc_feature 1..20: note = chemically synthesized
  source 1..20: mol_type = other DNA
tgtagttccagactctggtt

SEQ ID NO: 24370 - DNA, 20 bp, synthetic construct
  misc_feature 1..20: note = chemically synthesized
  source 1..20: mol_type = other DNA
atttcctttgttgctctctt

SEQ ID NO: 24371 - DNA, 20 bp, synthetic construct
  misc_feature 1..20: note = chemically synthesized
  source 1..20: mol_type = other DNA
tttcctttgttgctctcttc

SEQ ID NO: 24372 - DNA, 20 bp, synthetic construct
  misc_feature 1..20: note = chemically synthesized
  source 1..20: mol_type = other DNA
tctcttcgggctgcataaac

SEQ ID NO: 24373 - DNA, 20 bp, synthetic construct
  misc_feature 1..20: note = chemically synthesized
  source 1..20: mol_type = other DNA
ttgcctctatgtgttctacc

SEQ ID NO: 24374 - DNA, 20 bp, synthetic construct
  misc_feature 1..20: note = chemically synthesized
  source 1..20: mol_type = other DNA
ccaagtacttactcccaaaa

SEQ ID NO: 24375 - DNA, 20 bp, synthetic construct
  misc_feature 1..20: note = chemically synthesized
  source 1..20: mol_type = other DNA
acttactcccaaaaaagatg

SEQ ID NO: 24376 - DNA, 20 bp, synthetic construct
  misc_feature 1..20: note = chemically synthesized
  source 1..20: mol_type = other DNA
actcccaaaaaagatgaagt

SEQ ID NO: 24377 - DNA, 20 bp, synthetic construct
  misc_feature 1..20: note = chemically synthesized
  source 1..20: mol_type = other DNA
tcccaaaaaagatgaagtta

SEQ ID NO: 24378 - DNA, 20 bp, synthetic construct
  misc_feature 1..20: note = chemically synthesized
  source 1..20: mol_type = other DNA
aaaaaagatgaagttagagt

SEQ ID NO: 24379 - DNA, 20 bp, synthetic construct
  misc_feature 1..20: note = chemically synthesized
  source 1..20: mol_type = other DNA
aaaaagatgaagttagagtg

SEQ ID NO: 24380 - DNA, 20 bp, synthetic construct
  misc_feature 1..20: note = chemically synthesized
  source 1..20: mol_type = other DNA
agatgaagttagagtgagga

SEQ ID NO: 24381 - DNA, 20 bp, synthetic construct
  misc_feature 1..20: note = chemically synthesized
  source 1..20: mol_type = other DNA
gatgaagttagagtgaggat

SEQ ID NO: 24382 - DNA, 20 bp, synthetic construct
  misc_feature 1..20: note = chemically synthesized
  source 1..20: mol_type = other DNA
atgaagttagagtgaggata

SEQ ID NO: 24383 - DNA, 20 bp, synthetic construct
  misc_feature 1..20: note = chemically synthesized
  source 1..20: mol_type = other DNA
tgaagttagagtgaggatag

SEQ ID NO: 24384 - DNA, 20 bp, synthetic construct
  misc_feature 1..20: note = chemically synthesized
  source 1..20: mol_type = other DNA
ataggggacactgtaatgac

SEQ ID NO: 24385 - DNA, 20 bp, synthetic construct
  misc_feature 1..20: note = chemically synthesized
  source 1..20: mol_type = other DNA
taggggacactgtaatgaca

SEQ ID NO: 24386 - DNA, 20 bp, synthetic construct
  misc_feature 1..20: note = chemically synthesized
  source 1..20: mol_type = other DNA
aggggacactgtaatgacaa

SEQ ID NO: 24387 - DNA, 20 bp, synthetic construct
  misc_feature 1..20: note = chemically synthesized
  source 1..20: mol_type = other DNA
acactgtaatgacaagggta

SEQ ID NO: 24388 - DNA, 20 bp, synthetic construct
  misc_feature 1..20: note = chemically synthesized
  source 1..20: mol_type = other DNA
atgacaagggtatagactaa

SEQ ID NO: 24389 - DNA, 20 bp, synthetic construct
  misc_feature 1..20: note = chemically synthesized
  source 1..20: mol_type = other DNA
caagggtatagactaacaga

SEQ ID NO: 24390 - DNA, 20 bp, synthetic construct
  misc_feature 1..20: note = chemically synthesized
  source 1..20: mol_type = other DNA
agaaagaaaaacttaccaaa

SEQ ID NO: 24391 - DNA, 20 bp, synthetic construct
  misc_feature 1..20: note = chemically synthesized
  source 1..20: mol_type = other DNA
gaaaaacttaccaaatagat

SEQ ID NO: 24392 - DNA, 20 bp, synthetic construct
  misc_feature 1..20: note = chemically synthesized
  source 1..20: mol_type = other DNA
cttaccaaatagattagtgt

SEQ ID NO: 24393 - DNA, 20 bp, synthetic construct
  misc_feature 1..20: note = chemically synthesized
  source 1..20: mol_type = other DNA
aaatagattagtgtcagatt

SEQ ID NO: 24394 - DNA, 20 bp, synthetic construct
  misc_feature 1..20: note = chemically synthesized
  source 1..20: mol_type = other DNA
gattagtgtcagattgagta

SEQ ID NO: 24395 - DNA, 20 bp, synthetic construct
  misc_feature 1..20: note = chemically synthesized
  source 1..20: mol_type = other DNA
agtaaagcaaactttgacat

SEQ ID NO: 24396 - DNA, 20 bp, synthetic construct
  misc_feature 1..20: note = chemically synthesized
  source 1..20: mol_type = other DNA
gtaaagcaaactttgacatg

SEQ ID NO: 24397 - DNA, 20 bp, synthetic construct
  misc_feature 1..20: note = chemically synthesized
  source 1..20: mol_type = other DNA
tttaaattgctgcatattcc

SEQ ID NO: 24398 - DNA, 20 bp, synthetic construct
  misc_feature 1..20: note = chemically synthesized
  source 1..20: mol_type = other DNA
tgctgcatattcccagaaat

SEQ ID NO: 24399 - DNA, 20 bp, synthetic construct
  misc_feature 1..20: note = chemically synthesized
  source 1..20: mol_type = other DNA
catattcccagaaatgagcc

SEQ ID NO: 24400 - DNA, 20 bp, synthetic construct
  misc_feature 1..20: note = chemically synthesized
  source 1..20: mol_type = other DNA
gaaatgagcctagtatccat

SEQ ID NO: 24401 - DNA, 20 bp, synthetic construct
  misc_feature 1..20: note = chemically synthesized
  source 1..20: mol_type = other DNA
atgcaaatccttataaacca

SEQ ID NO: 24402 - DNA, 20 bp, synthetic construct
  misc_feature 1..20: note = chemically synthesized
  source 1..20: mol_type = other DNA
aaatccttataaaccaaagt

SEQ ID NO: 24403 - DNA, 20 bp, synthetic construct
  misc_feature 1..20: note = chemically synthesized
  source 1..20: mol_type = other DNA
atccttataaaccaaagtca

SEQ ID NO: 24404 - DNA, 20 bp, synthetic construct
  misc_feature 1..20: note = chemically synthesized
  source 1..20: mol_type = other DNA
ccttataaaccaaagtcaga

SEQ ID NO: 24405 - DNA, 20 bp, synthetic construct
  misc_feature 1..20: note = chemically synthesized
  source 1..20: mol_type = other DNA
ttataaaccaaagtcagaga

SEQ ID NO: 24406 - DNA, 20 bp, synthetic construct
  misc_feature 1..20: note = chemically synthesized
  source 1..20: mol_type = other DNA
caaagtcagagagagcttgt

SEQ ID NO: 24407 - DNA, 20 bp, synthetic construct
  misc_feature 1..20: note = chemically synthesized
  source 1..20: mol_type = other DNA
ggttcacttcattccatgct

SEQ ID NO: 24408 - DNA, 20 bp, synthetic construct
  misc_feature 1..20: note = chemically synthesized
  source 1..20: mol_type = other DNA
ttcattccatgctgagctat

SEQ ID NO: 24409 - DNA, 20 bp, synthetic construct
  misc_feature 1..20: note = chemically synthesized
  source 1..20: mol_type = other DNA
atgctgagctatcagcactg

SEQ ID NO: 24410 - DNA, 20 bp, synthetic construct
  misc_feature 1..20: note = chemically synthesized
  source 1..20: mol_type = other DNA
tatcagcactgcagattttg

SEQ ID NO: 24411 - DNA, 20 bp, synthetic construct
  misc_feature 1..20: note = chemically synthesized
  source 1..20: mol_type = other DNA
ttgaagatctcaaccacacc

SEQ ID NO: 24412 - DNA, 20 bp, synthetic construct
  misc_feature 1..20: note = chemically synthesized
  source 1..20: mol_type = other DNA
agatctcaaccacacccaga

SEQ ID NO: 24413 - DNA, 20 bp, synthetic construct
  misc_feature 1..20: note = chemically synthesized
  source 1..20: mol_type = other DNA
atctcaaccacacccagata

SEQ ID NO: 24414 - DNA, 20 bp, synthetic construct
  misc_feature 1..20: note = chemically synthesized
  source 1..20: mol_type = other DNA
ctcaaccacacccagataga

SEQ ID NO: 24415 - DNA, 20 bp, synthetic construct
  misc_feature 1..20: note = chemically synthesized
  source 1..20: mol_type = other DNA
cacacccagatagagagtga

SEQ ID NO: 24416 - DNA, 20 bp, synthetic construct
  misc_feature 1..20: note = chemically synthesized
  source 1..20: mol_type = other DNA
acccagatagagagtgatag

SEQ ID NO: 24417 - DNA, 20 bp, synthetic construct
  misc_feature 1..20: note = chemically synthesized
  source 1..20: mol_type = other DNA
agtggatcccgtgtttctgt

SEQ ID NO: 24418 - DNA, 20 bp, synthetic construct
  misc_feature 1..20: note = chemically synthesized
  source 1..20: mol_type = other DNA
gtggatcccgtgtttctgtc

SEQ ID NO: 24419 - DNA, 20 bp, synthetic construct
  misc_feature 1..20: note = chemically synthesized
  source 1..20: mol_type = other DNA
tggatcccgtgtttctgtcg

SEQ ID NO: 24420 - DNA, 20 bp, synthetic construct
  misc_feature 1..20: note = chemically synthesized
  source 1..20: mol_type = other DNA
ggatcccgtgtttctgtcgg

SEQ ID NO: 24421 - DNA, 20 bp, synthetic construct
  misc_feature 1..20: note = chemically synthesized
  source 1..20: mol_type = other DNA
cccgtgtttctgtcggggga

SEQ ID NO: 24422 - DNA, 20 bp, synthetic construct
  misc_feature 1..20: note = chemically synthesized
  source 1..20: mol_type = other DNA
ccgtgtttctgtcgggggat

SEQ ID NO: 24423 - DNA, 20 bp, synthetic construct
  misc_feature 1..20: note = chemically synthesized
  source 1..20: mol_type = other DNA
gtgtttctgtcgggggatgg

SEQ ID NO: 24424 - DNA, 20 bp, synthetic construct
  misc_feature 1..20: note = chemically synthesized
  source 1..20: mol_type = other DNA
tttctgtcgggggatgggag

SEQ ID NO: 24425 - DNA, 20 bp, synthetic construct
  misc_feature 1..20: note = chemically synthesized
  source 1..20: mol_type = other DNA
gtcgggggatgggagtagat

SEQ ID NO: 24426 - DNA, 20 bp, synthetic construct
  misc_feature 1..20: note = chemically synthesized
  source 1..20: mol_type = other DNA
tcgggggatgggagtagata

SEQ ID NO: 24427 - DNA, 20 bp, synthetic construct
  misc_feature 1..20: note = chemically synthesized
  source 1..20: mol_type = other DNA
ggatgggagtagataaggaa

SEQ ID NO: 24428 - DNA, 20 bp, synthetic construct
  misc_feature 1..20: note = chemically synthesized
  source 1..20: mol_type = other DNA
aaagtgtttactatttttac

SEQ ID NO: 24429 - DNA, 20 bp, synthetic construct
  misc_feature 1..20: note = chemically synthesized
  source 1..20: mol_type = other DNA
gtgtttactatttttaccag

SEQ ID NO: 24430 - DNA, 20 bp, synthetic construct
  misc_feature 1..20: note = chemically synthesized
  source 1..20: mol_type = other DNA
tgtttactatttttaccagc

SEQ ID NO: 24431 - DNA, 20 bp, synthetic construct
  misc_feature 1..20: note = chemically synthesized
  source 1..20: mol_type = other DNA
gtttactatttttaccagca

SEQ ID NO: 24432 - DNA, 20 bp, synthetic construct
  misc_feature 1..20: note = chemically synthesized
  source 1..20: mol_type = other DNA
tttactatttttaccagcag

SEQ ID NO: 24433 - DNA, 20 bp, synthetic construct
  misc_feature 1..20: note = chemically synthesized
  source 1..20: mol_type = other DNA
taccagcaggggaaactacc

SEQ ID NO: 24434 - DNA, 20 bp, synthetic construct
  misc_feature 1..20: note = chemically synthesized
  source 1..20: mol_type = other DNA
ggaaactacccagatgaaaa

SEQ ID NO: 24435 - DNA, 20 bp, synthetic construct
  misc_feature 1..20: note = chemically synthesized
  source 1..20: mol_type = other DNA
tacccagatgaaaatggtgc

SEQ ID NO: 24436 - DNA, 20 bp, synthetic construct
  misc_feature 1..20: note = chemically synthesized
  source 1..20: mol_type = other DNA
gaaaatggtgctggatgctt

SEQ ID NO: 24437 - DNA, 20 bp, synthetic construct
  misc_feature 1..20: note = chemically synthesized
  source 1..20: mol_type = other DNA
aaaatggtgctggatgcttt

SEQ ID NO: 24438 - DNA, 20 bp, synthetic construct
  misc_feature 1..20: note = chemically synthesized
  source 1..20: mol_type = other DNA
tgctggatgctttgggcaaa

SEQ ID NO: 24439 - DNA, 20 bp, synthetic construct
  misc_feature 1..20: note = chemically synthesized
  source 1..20: mol_type = other DNA
gctttgggcaaaaagccatt

SEQ ID NO: 24440 - DNA, 20 bp, synthetic construct
  misc_feature 1..20: note = chemically synthesized
  source 1..20: mol_type = other DNA
tttgggcaaaaagccattca

SEQ ID NO: 24441 - DNA, 20 bp, synthetic construct
  misc_feature 1..20: note = chemically synthesized
  source 1..20: mol_type = other DNA
cagagccataatcaactacg

SEQ ID NO: 24442 - DNA, 20 bp, synthetic construct
  misc_feature 1..20: note = chemically synthesized
  source 1..20: mol_type = other DNA
gccataatcaactacgaaga

SEQ ID NO: 24443 - DNA, 20 bp, synthetic construct
  misc_feature 1..20: note = chemically synthesized
  source 1..20: mol_type = other DNA
taatcaactacgaagatggt

SEQ ID NO: 24444 - DNA, 20 bp, synthetic construct
  misc_feature 1..20: note = chemically synthesized
  source 1..20: mol_type = other DNA
aatcaactacgaagatggtc

SEQ ID NO: 24445 - DNA, 20 bp, synthetic construct
  misc_feature 1..20: note = chemically synthesized
  source 1..20: mol_type = other DNA
tacgaagatggtcaggaatt

SEQ ID NO: 24446 - DNA, 20 bp, synthetic construct
  misc_feature 1..20: note = chemically synthesized
  source 1..20: mol_type = other DNA
tcaggaatttagtgtatttg

SEQ ID NO: 24447 - DNA, 20 bp, synthetic construct
  misc_feature 1..20: note = chemically synthesized
  source 1..20: mol_type = other DNA
aatttagtgtatttgtagat

SEQ ID NO: 24448 - DNA, 20 bp, synthetic construct
  misc_feature 1..20: note = chemically synthesized
  source 1..20: mol_type = other DNA
gtatttgtagatcagatgat

SEQ ID NO: 24449 - DNA, 20 bp, synthetic construct
  misc_feature 1..20: note = chemically synthesized
  source 1..20: mol_type = other DNA
tagatcagatgatcagtcta

SEQ ID NO: 24450 - DNA, 20 bp, synthetic construct
  misc_feature 1..20: note = chemically synthesized
  source 1..20: mol_type = other DNA
agatgatcagtctatggctt

SEQ ID NO: 24451 - DNA, 20 bp, synthetic construct
  misc_feature 1..20: note = chemically synthesized
  source 1..20: mol_type = other DNA
ctttggaaaattgtgaacat

SEQ ID NO: 24452 - DNA, 20 bp, synthetic construct
  misc_feature 1..20: note = chemically synthesized
  source 1..20: mol_type = other DNA
aattgtgaacattagttgtt

SEQ ID NO: 24453 - DNA, 20 bp, synthetic construct
  misc_feature 1..20: note = chemically synthesized
  source 1..20: mol_type = other DNA
tagttgttgagccttataat

SEQ ID NO: 24454 - DNA, 20 bp, synthetic construct
  misc_feature 1..20: note = chemically synthesized
  source 1..20: mol_type = other DNA
tgagaatgtgatgattaaat

SEQ ID NO: 24455 - DNA, 20 bp, synthetic construct
  misc_feature 1..20: note = chemically synthesized
  source 1..20: mol_type = other DNA
gagaatgtgatgattaaatc

SEQ ID NO: 24456 - DNA, 20 bp, synthetic construct
  misc_feature 1..20: note = chemically synthesized
  source 1..20: mol_type = other DNA
gatgattaaatcaggtctac

SEQ ID NO: 24457 - DNA, 20 bp, synthetic construct
  misc_feature 1..20: note = chemically synthesized
  source 1..20: mol_type = other DNA
gtctactggatactatgaat

SEQ ID NO: 24458 - DNA, 20 bp, synthetic construct
  misc_feature 1..20: note = chemically synthesized
  source 1..20: mol_type = other DNA
ctggatactatgaatcagaa

SEQ ID NO: 24459 - DNA, 20 bp, synthetic construct
  misc_feature 1..20: note = chemically synthesized
  source 1..20: mol_type = other DNA
atcagaatagataacattgt

SEQ ID NO: 24460 - DNA, 20 bp, synthetic construct
  misc_feature 1..20: note = chemically synthesized
  source 1..20: mol_type = other DNA
cattgttagatataattacc

SEQ ID NO: 24461 - DNA, 20 bp, synthetic construct
  misc_feature 1..20: note = chemically synthesized
  source 1..20: mol_type = other DNA
gttagatataattacctagt

SEQ ID NO: 24462 - DNA, 20 bp, synthetic construct
  misc_feature 1..20: note = chemically synthesized
  source 1..20: mol_type = other DNA
tagatataattacctagtca

SEQ ID NO: 24463 - DNA, 20 bp, synthetic construct
  misc_feature 1..20: note = chemically synthesized
  source 1..20: mol_type = other DNA
gatataattacctagtcaga

SEQ ID NO: 24464 - DNA, 20 bp, synthetic construct
  misc_feature 1..20: note = chemically synthesized
  source 1..20: mol_type = other DNA
ataattacctagtcagagag

SEQ ID NO: 24465 - DNA, 20 bp, synthetic construct
  misc_feature 1..20: note = chemically synthesized
  source 1..20: mol_type = other DNA
aattacctagtcagagagca

SEQ ID NO: 24466 - DNA, 20 bp, synthetic construct
  misc_feature 1..20: note = chemically synthesized
  source 1..20: mol_type = other DNA
ctagtcagagagcagagatg

SEQ ID NO: 24467 - DNA, 20 bp, synthetic construct
  misc_feature 1..20: note = chemically synthesized
  source 1..20: mol_type = other DNA
tcagagagcagagatgaagt

SEQ ID NO: 24468 - DNA, 20 bp, synthetic construct
  misc_feature 1..20: note = chemically synthesized
  source 1..20: mol_type = other DNA
cagagagcagagatgaagtc

SEQ ID NO: 24469 - DNA, 20 bp, synthetic construct
  misc_feature 1..20: note = chemically synthesized
  source 1..20: mol_type = other DNA
gagcagagatgaagtcagga

SEQ ID NO: 24470 - DNA, 20 bp, synthetic construct
  misc_feature 1..20: note = chemically synthesized
  source 1..20: mol_type = other DNA
agatgaagtcaggaaagcaa

SEQ ID NO: 24471 - DNA, 20 bp, synthetic construct
  misc_feature 1..20: note = chemically synthesized
  source 1..20: mol_type = other DNA
aagtcaggaaagcaaaagat

SEQ ID NO: 24472 - DNA, 20 bp, synthetic construct
  misc_feature 1..20: note = chemically synthesized
  source 1..20: mol_type = other DNA
aagcaaaagataagaaataa

SEQ ID NO: 24473 - DNA, 20 bp, synthetic construct
  misc_feature 1..20: note = chemically synthesized
  source 1..20: mol_type = other DNA
caaaagataagaaataacag

SEQ ID NO: 24474 - DNA, 20 bp, synthetic construct
  misc_feature 1..20: note = chemically synthesized
  source 1..20: mol_type = other DNA
aagaaataacagaagtcttc

SEQ ID NO: 24475 - DNA, 20 bp, synthetic construct
  misc_feature 1..20: note = chemically synthesized
  source 1..20: mol_type = other DNA
aaataacagaagtcttctgg

SEQ ID NO: 24476 - DNA, 20 bp, synthetic construct
  misc_feature 1..20: note = chemically synthesized
  source 1..20: mol_type = other DNA
taacagaagtcttctggtgg

SEQ ID NO: 24477 - DNA, 20 bp, synthetic construct
  misc_feature 1..20: note = chemically synthesized
  source 1..20: mol_type = other DNA
acagaagtcttctggtggca

SEQ ID NO: 24478 - DNA, 20 bp, synthetic construct
  misc_feature 1..20: note = chemically synthesized
  source 1..20: mol_type = other DNA
gaagtcttctggtggcagag

SEQ ID NO: 24479 - DNA, 20 bp, synthetic construct
  misc_feature 1..20: note = chemically synthesized
  source 1..20: mol_type = other DNA
gtcttctggtggcagagtgg

SEQ ID NO: 24480 - DNA, 20 bp, synthetic construct
  misc_feature 1..20: note = chemically synthesized
  source 1..20: mol_type = other DNA
ctggtggcagagtggtggct

SEQ ID NO: 24481 - DNA, 20 bp, synthetic construct
  misc_feature 1..20: note = chemically synthesized
  source 1..20: mol_type = other DNA
agagtggtggcttagcctgc

SEQ ID NO: 24482 - DNA, 20 bp, synthetic construct
  misc_feature 1..20: note = chemically synthesized
  source 1..20: mol_type = other DNA
gagtggtggcttagcctgct

SEQ ID NO: 24483 - DNA, 20 bp, synthetic construct
  misc_feature 1..20: note = chemically synthesized
  source 1..20: mol_type = other DNA
agtggtggcttagcctgctg

SEQ ID NO: 24484 - DNA, 20 bp, synthetic construct
  misc_feature 1..20: note = chemically synthesized
  source 1..20: mol_type = other DNA
cttagcctgctggggcaaaa

SEQ ID NO: 24485 - DNA, 20 bp, synthetic construct
  misc_feature 1..20: note = chemically synthesized
  source 1..20: mol_type = other DNA
tagcctgctggggcaaaatg

SEQ ID NO: 24486 - DNA, 20 bp, synthetic construct
  misc_feature 1..20: note = chemically synthesized
  source 1..20: mol_type = other DNA
gctggggcaaaatggagctc

SEQ ID NO: 24487 - DNA, 20 bp, synthetic construct
  misc_feature 1..20: note = chemically synthesized
  source 1..20: mol_type = other DNA
ctggggcaaaatggagctca

SEQ ID NO: 24488 - DNA, 20 bp, synthetic construct
  misc_feature 1..20: note = chemically synthesized
  source 1..20: mol_type = other DNA
aaaatggagctcaaggccat

SEQ ID NO: 24489 - DNA, 20 bp, synthetic construct
  misc_feature 1..20: note = chemically synthesized
  source 1..20: mol_type = other DNA
atggagctcaaggccatgag

SEQ ID NO: 24490 - DNA, 20 bp, synthetic construct
  misc_feature 1..20: note = chemically synthesized
  source 1..20: mol_type = other DNA
aaggccatgagcagatacaa

SEQ ID NO: 24491 - DNA, 20 bp, synthetic construct
  misc_feature 1..20: note = chemically synthesized
  source 1..20: mol_type = other DNA
catgagcagatacaacagcc

SEQ ID NO: 24492 - DNA, 20 bp, synthetic construct
  misc_feature 1..20: note = chemically synthesized
  source 1..20: mol_type = other DNA
atacaacagcccggtcaacc

SEQ ID NO: 24493 - DNA, 20 bp, synthetic construct
  misc_feature 1..20: note = chemically synthesized
  source 1..20: mol_type = other DNA
tgtcttcccccatctgattg

SEQ ID NO: 24494 - DNA, 20 bp, synthetic construct
  misc_feature 1..20: note = chemically synthesized
  source 1..20: mol_type = other DNA
tcttcccccatctgattgta

SEQ ID NO: 24495 - DNA, 20 bp, synthetic construct
  misc_feature 1..20: note = chemically synthesized
  source 1..20: mol_type = other DNA
ccatctgattgtagagcttt

SEQ ID NO: 24496 - DNA, 20 bp, synthetic construct
  misc_feature 1..20: note = chemically synthesized
  source 1..20: mol_type = other DNA
tcgacatgttcttcaccacc

SEQ ID NO: 24497 - DNA, 20 bp, synthetic construct
  misc_feature 1..20: note = chemically synthesized
  source 1..20: mol_type = other DNA
ccacctggttctttgtttac

SEQ ID NO: 24498 - DNA, 20 bp, synthetic construct
  misc_feature 1..20: note = chemically synthesized
  source 1..20: mol_type = other DNA
cacctggttctttgtttacg

SEQ ID NO: 24499 - DNA, 20 bp, synthetic construct
  misc_feature 1..20: note = chemically synthesized
  source 1..20: mol_type = other DNA
tttacgaggtcacctctacc

SEQ ID NO: 24500 - DNA, 20 bp, synthetic construct
  misc_feature 1..20: note = chemically synthesized
  source 1..20: mol_type = other DNA
gtacacttgtgatatctata

SEQ ID NO: 24501 - DNA, 20 bp, synthetic construct
  misc_feature 1..20: note = chemically synthesized
  source 1..20: mol_type = other DNA
acacttgtgatatctataaa

SEQ ID NO: 24502 - DNA, 20 bp, synthetic construct
  misc_feature 1..20: note = chemically synthesized
  source 1..20: mol_type = other DNA
atctataaagagtatctcct

SEQ ID NO: 24503 - DNA, 20 bp, synthetic construct
  misc_feature 1..20: note = chemically synthesized
  source 1..20: mol_type = other DNA
tataaagagtatctccttgg

SEQ ID NO: 24504 - DNA, 20 bp, synthetic construct
  misc_feature 1..20: note = chemically synthesized
  source 1..20: mol_type = other DNA
cttggtggcctcactcttca

SEQ ID NO: 24505 - DNA, 20 bp, synthetic construct
  misc_feature 1..20: note = chemically synthesized
  source 1..20: mol_type = other DNA
ttggtggcctcactcttcat

SEQ ID NO: 24506 - DNA, 20 bp, synthetic construct
  misc_feature 1..20: note = chemically synthesized
  source 1..20: mol_type = other DNA
ctcactcttcatgggctttg

SEQ ID NO: 24507 - DNA, 20 bp, synthetic construct
  misc_feature 1..20: note = chemically synthesized
  source 1..20: mol_type = other DNA
aagtcctcttcctgatgctc

SEQ ID NO: 24508 - DNA, 20 bp, synthetic construct
  misc_feature 1..20: note = chemically synthesized
  source 1..20: mol_type = other DNA
agtcctcttcctgatgctct

SEQ ID NO: 24509 - DNA, 20 bp, synthetic construct
  misc_feature 1..20: note = chemically synthesized
  source 1..20: mol_type = other DNA
ctcttcctgatgctctgggt

SEQ ID NO: 24510 - DNA, 20 bp, synthetic construct
  misc_feature 1..20: note = chemically synthesized
  source 1..20: mol_type = other DNA
ctgggttggcatctacatgt

SEQ ID NO: 24511 - DNA, 20 bp, synthetic construct
  misc_feature 1..20: note = chemically synthesized
  source 1..20: mol_type = other DNA
gcatctacatgtgagtgccc

SEQ ID NO: 24512 - DNA, 20 bp, synthetic construct
  misc_feature 1..20: note = chemically synthesized
  source 1..20: mol_type = other DNA
atctacatgtgagtgcccaa

SEQ ID NO: 24513 - DNA, 20 bp, synthetic construct
  misc_feature 1..20: note = chemically synthesized
  source 1..20: mol_type = other DNA
gagtgcccaagagtaacaac

SEQ ID NO: 24514 - DNA, 20 bp, synthetic construct
  misc_feature 1..20: note = chemically synthesized
  source 1..20: mol_type = other DNA
agtgcccaagagtaacaacc

SEQ ID NO: 24515 - DNA, 20 bp, synthetic construct
  misc_feature 1..20: note = chemically synthesized
  source 1..20: mol_type = other DNA
gcccaagagtaacaaccagg

SEQ ID NO: 24516 - DNA, 20 bp, synthetic construct
  misc_feature 1..20: note = chemically synthesized
  source 1..20: mol_type = other DNA
aatccctgcttttgtaaatt

SEQ ID NO: 24517 - DNA, 20 bp, synthetic construct
  misc_feature 1..20: note = chemically synthesized
  source 1..20: mol_type = other DNA
ttaagttttctttctattgc

SEQ ID NO: 24518 - DNA, 20 bp, synthetic construct
  misc_feature 1..20: note = chemically synthesized
  source 1..20: mol_type = other DNA
agttttctttctattgctgg

SEQ ID NO: 24519 - DNA, 20 bp, synthetic construct
  misc_feature 1..20: note = chemically synthesized
  source 1..20: mol_type = other DNA
cctgttgcttataataaatg

SEQ ID NO: 24520 - DNA, 20 bp, synthetic construct
  misc_feature 1..20: note = chemically synthesized
  source 1..20: mol_type = other DNA
ttataataaatgcagatgta

SEQ ID NO: 24521 - DNA, 20 bp, synthetic construct
  misc_feature 1..20: note = chemically synthesized
  source 1..20: mol_type = other DNA
gtatggcattaaaaaaaaaa

SEQ ID NO: 24522 - DNA, 20 bp, synthetic construct
  misc_feature 1..20: note = chemically synthesized
  source 1..20: mol_type = other DNA
taaaaaaaaaaaagaaataa

SEQ ID NO: 24523 - DNA, 20 bp, synthetic construct
  misc_feature 1..20: note = chemically synthesized
  source 1..20: mol_type = other DNA
aaaaaaaaaagaaataatag

SEQ ID NO: 24524 - DNA, 20 bp, synthetic construct
  misc_feature 1..20: note = chemically synthesized
  source 1..20: mol_type = other DNA
aaaaaagaaataatagaagt

SEQ ID NO: 24525 - DNA, 20 bp, synthetic construct
  misc_feature 1..20: note = chemically synthesized
  source 1..20: mol_type = other DNA
aaaaagaaataatagaagtt

SEQ ID NO: 24526 - DNA, 20 bp, synthetic construct
  misc_feature 1..20: note = chemically synthesized
  source 1..20: mol_type = other DNA
aagaaataatagaagttagg

SEQ ID NO: 24527 - DNA, 20 bp, synthetic construct
  misc_feature 1..20: note = chemically synthesized
  source 1..20: mol_type = other DNA
agaaataatagaagttaggc

SEQ ID NO: 24528 - DNA, 20 bp, synthetic construct
  misc_feature 1..20: note = chemically synthesized
  source 1..20: mol_type = other DNA
gaaataatagaagttaggca

SEQ ID NO: 24529 - DNA, 20 bp, synthetic construct
  misc_feature 1..20: note = chemically synthesized
  source 1..20: mol_type = other DNA
aatagaagttaggcagggat

SEQ ID NO: 24530 - DNA, 20 bp, synthetic construct
  misc_feature 1..20: note = chemically synthesized
  source 1..20: mol_type = other DNA
atagaagttaggcagggatt

SEQ ID NO: 24531 - DNA, 20 bp, synthetic construct
  misc_feature 1..20: note = chemically synthesized
  source 1..20: mol_type = other DNA
tagaagttaggcagggattg

SEQ ID NO: 24532 - DNA, 20 bp, synthetic construct
  misc_feature 1..20: note = chemically synthesized
  source 1..20: mol_type = other DNA
taggcagggattggggcatg

SEQ ID NO: 24533 - DNA, 20 bp, synthetic construct
  misc_feature 1..20: note = chemically synthesized
  source 1..20: mol_type = other DNA
aggcagggattggggcatga

SEQ ID NO: 24534 - DNA, 20 bp, synthetic construct
  misc_feature 1..20: note = chemically synthesized
  source 1..20: mol_type = other DNA
ggggcatgaaggttgaaaac

SEQ ID NO: 24535 - DNA, 20 bp, synthetic construct
  misc_feature 1..20: note = chemically synthesized
  source 1..20: mol_type = other DNA
gggcatgaaggttgaaaaca

SEQ ID NO: 24536 - DNA, 20 bp, synthetic construct
  misc_feature 1..20: note = chemically synthesized
  source 1..20: mol_type = other DNA
tgaaggttgaaaacaaggaa

SEQ ID NO: 24537 - DNA, 20 bp, synthetic construct
  misc_feature 1..20: note = chemically synthesized
  source 1..20: mol_type = other DNA
gaaggttgaaaacaaggaaa

SEQ ID NO: 24538 - DNA, 20 bp, synthetic construct
  misc_feature 1..20: note = chemically synthesized
  source 1..20: mol_type = other DNA
aggttgaaaacaaggaaaag

SEQ ID NO: 24539 - DNA, 20 bp, synthetic construct
  misc_feature 1..20: note = chemically synthesized
  source 1..20: mol_type = other DNA
aaaacaaggaaaaggagccc

SEQ ID NO: 24540 - DNA, 20 bp, synthetic construct
  misc_feature 1..20: note = chemically synthesized
  source 1..20: mol_type = other DNA
aaacaaggaaaaggagccca

SEQ ID NO: 24541 - DNA, 20 bp, synthetic construct
  misc_feature 1..20: note = chemically synthesized
  source 1..20: mol_type = other DNA
aaaggagcccaaggaaatgc

SEQ ID NO: 24542 - DNA, 20 bp, synthetic construct
  misc_feature 1..20: note = chemically synthesized
  source 1..20: mol_type = other DNA
caagtgttgtaaaatgtgct

SEQ ID NO: 24543 - DNA, 20 bp, synthetic construct
  misc_feature 1..20: note = chemically synthesized
  source 1..20: mol_type = other DNA
gtgttgtaaaatgtgctaag

SEQ ID NO: 24544 - DNA, 20 bp, synthetic construct
  misc_feature 1..20: note = chemically synthesized
  source 1..20: mol_type = other DNA
aatgtgctaagtagatgtct

SEQ ID NO: 24545 - DNA, 20 bp, synthetic construct
  misc_feature 1..20: note = chemically synthesized
  source 1..20: mol_type = other DNA
gtgctaagtagatgtctgag

SEQ ID NO: 24546 - DNA, 20 bp, synthetic construct
  misc_feature 1..20: note = chemically synthesized
  source 1..20: mol_type = other DNA
tctgagtggcattcctccat

SEQ ID NO: 24547 - DNA, 20 bp, synthetic construct
  misc_feature 1..20: note = chemically synthesized
  source 1..20: mol_type = other DNA
tgagtggcattcctccatga

SEQ ID NO: 24548 - DNA, 20 bp, synthetic construct
  misc_feature 1..20: note = chemically synthesized
  source 1..20: mol_type = other DNA
tggcattcctccatgagaga

SEQ ID NO: 24549 - DNA, 20 bp, synthetic construct
  misc_feature 1..20: note = chemically synthesized
  source 1..20: mol_type = other DNA
tcctccatgagagaaagctt

SEQ ID NO: 24550 - DNA, 20 bp, synthetic construct
  misc_feature 1..20: note = chemically synthesized
  source 1..20: mol_type = other DNA
cctccatgagagaaagctta

SEQ ID NO: 24551 - DNA, 20 bp, synthetic construct
  misc_feature 1..20: note = chemically synthesized
  source 1..20: mol_type = other DNA
ctccatgagagaaagcttaa

SEQ ID NO: 24552 - DNA, 20 bp, synthetic construct
  misc_feature 1..20: note = chemically synthesized
  source 1..20: mol_type = other DNA
catgagagaaagcttaaggg

SEQ ID NO: 24553 - DNA, 20 bp, synthetic construct
  misc_feature 1..20: note = chemically synthesized
  source 1..20: mol_type = other DNA
agagaaagcttaagggaaga

SEQ ID NO: 24554 - DNA, 20 bp, synthetic construct
  misc_feature 1..20: note = chemically synthesized
  source 1..20: mol_type = other DNA
agaaagcttaagggaagaaa

SEQ ID NO: 24555 - DNA, 20 bp, synthetic construct
  misc_feature 1..20: note = chemically synthesized
  source 1..20: mol_type = other DNA
taagggaagaaagagaccct

SEQ ID NO: 24556 - DNA, 20 bp, synthetic construct
  misc_feature 1..20: note = chemically synthesized
  source 1..20: mol_type = other DNA
ctgagtgtcttcaaaactca

SEQ ID NO: 24557 - DNA, 20 bp, synthetic construct
  misc_feature 1..20: note = chemically synthesized
  source 1..20: mol_type = other DNA
aaaactcaaagttttacgaa

SEQ ID NO: 24558 - DNA, 20 bp, synthetic construct
  misc_feature 1..20: note = chemically synthesized
  source 1..20: mol_type = other DNA
agttttacgaacagaatgat

SEQ ID NO: 24559 - DNA, 20 bp, synthetic construct
  misc_feature 1..20: note = chemically synthesized
  source 1..20: mol_type = other DNA
tacgaacagaatgattagtc

SEQ ID NO: 24560 - DNA, 20 bp, synthetic construct
  misc_feature 1..20: note = chemically synthesized
  source 1..20: mol_type = other DNA
cgaacagaatgattagtctg

SEQ ID NO: 24561 - DNA, 20 bp, synthetic construct
  misc_feature 1..20: note = chemically synthesized
  source 1..20: mol_type = other DNA
gaaatcatttttcatcaata

SEQ ID NO: 24562 - DNA, 20 bp, synthetic construct
  misc_feature 1..20: note = chemically synthesized
  source 1..20: mol_type = other DNA
aaatcatttttcatcaatac

SEQ ID NO: 24563 - DNA, 20 bp, synthetic construct
  misc_feature 1..20: note = chemically synthesized
  source 1..20: mol_type = other DNA
tttcatcaatacaggatctc

SEQ ID NO: 24564 - DNA, 20 bp, synthetic construct
  misc_feature 1..20: note = chemically synthesized
  source 1..20: mol_type = other DNA
acacacacacacacacacac

SEQ ID NO: 24565 - DNA, 20 bp, synthetic construct
  misc_feature 1..20: note = chemically synthesized
  source 1..20: mol_type = other DNA
acacacacacacacaccggt

SEQ ID NO: 24566 - DNA, 20 bp, synthetic construct
  misc_feature 1..20: note = chemically synthesized
  source 1..20: mol_type = other DNA
cacacacacacaccggtgag

SEQ ID NO: 24567 - DNA, 20 bp, synthetic construct
  misc_feature 1..20: note = chemically synthesized
  source 1..20: mol_type = other DNA
cacacacaccggtgagtgga

SEQ ID NO: 24568 - DNA, 20 bp, synthetic construct
  misc_feature 1..20: note = chemically synthesized
  source 1..20: mol_type = other DNA
gtggacagacatcgtttttc

SEQ ID NO: 24569 - DNA, 20 bp, synthetic construct
  misc_feature 1..20: note = chemically synthesized
  source 1..20: mol_type = other DNA
tcgtttttcaagtcatgatg

SEQ ID NO: 24570 - DNA, 20 bp, synthetic construct
  misc_feature 1..20: note = chemically synthesized
  source 1..20: mol_type = other DNA
tttttcaagtcatgatgcag

SEQ ID NO: 24571 - DNA, 20 bp, synthetic construct
  misc_feature 1..20: note = chemically synthesized
  source 1..20: mol_type = other DNA
aagtcatgatgcagcagtat

SEQ ID NO: 24572 - DNA, 20 bp, synthetic construct
  misc_feature 1..20: note = chemically synthesized
  source 1..20: mol_type = other DNA
atgcagcagtattggaatta

SEQ ID NO: 24573 - DNA, 20 bp, synthetic construct
  misc_feature 1..20: note = chemically synthesized
  source 1..20: mol_type = other DNA
attggaattacagttttttt

SEQ ID NO: 24574 - DNA, 20 bp, synthetic construct
  misc_feature 1..20: note = chemically synthesized
  source 1..20: mol_type = other DNA
tttttgtttttttttacttc

SEQ ID NO: 24575 - DNA, 20 bp, synthetic construct
  misc_feature 1..20: note = chemically synthesized
  source 1..20: mol_type = other DNA
tttttttttacttcaagcta

SEQ ID NO: 24576 - DNA, 20 bp, synthetic construct
  misc_feature 1..20: note = chemically synthesized
  source 1..20: mol_type = other DNA
ttacttcaagctatggtgtt

SEQ ID NO: 24577 - DNA, 20 bp, synthetic construct
  misc_feature 1..20: note = chemically synthesized
  source 1..20: mol_type = other DNA
caccaattaattgttccttt

SEQ ID NO: 24578 - DNA, 20 bp, synthetic construct
  misc_feature 1..20: note = chemically synthesized
  source 1..20: mol_type = other DNA
acactctctctctcacacaa

SEQ ID NO: 24579 - DNA, 20 bp, synthetic construct
  misc_feature 1..20: note = chemically synthesized
  source 1..20: mol_type = other DNA
aaacacacatcaccaccact

SEQ ID NO: 24580 - DNA, 20 bp, synthetic construct
  misc_feature 1..20: note = chemically synthesized
  source 1..20: mol_type = other DNA
tcaccaccactcagctccat

SEQ ID NO: 24581 - DNA, 20 bp, synthetic construct
  misc_feature 1..20: note = chemically synthesized
  source 1..20: mol_type = other DNA
caccaccactcagctccatg

SEQ ID NO: 24582 - DNA, 20 bp, synthetic construct
  misc_feature 1..20: note = chemically synthesized
  source 1..20: mol_type = other DNA
ctcactacttttattaaacc

SEQ ID NO: 24583 - DNA, 20 bp, synthetic construct
  misc_feature 1..20: note = chemically synthesized
  source 1..20: mol_type = other DNA
tacttttattaaaccaagca

SEQ ID NO: 24584 - DNA, 20 bp, synthetic construct
  misc_feature 1..20: note = chemically synthesized
  source 1..20: mol_type = other DNA
ttaaaccaagcacagatacc

SEQ ID NO: 24585 - DNA, 20 bp, synthetic construct
  misc_feature 1..20: note = chemically synthesized
  source 1..20: mol_type = other DNA
agcacagataccaagttttt

SEQ ID NO: 24586 - DNA, 20 bp, synthetic construct
  misc_feature 1..20: note = chemically synthesized
  source 1..20: mol_type = other DNA
caagtttttgagtgtgaatg

SEQ ID NO: 24587 - DNA, 20 bp, synthetic construct
  misc_feature 1..20: note = chemically synthesized
  source 1..20: mol_type = other DNA
tttttgagtgtgaatgcaga

SEQ ID NO: 24588 - DNA, 20 bp, synthetic construct
  misc_feature 1..20: note = chemically synthesized
  source 1..20: mol_type = other DNA
ttgagtgtgaatgcagaaag

SEQ ID NO: 24589 - DNA, 20 bp, synthetic construct
  misc_feature 1..20: note = chemically synthesized
  source 1..20: mol_type = other DNA
atgcagaaagaagatatatt

SEQ ID NO: 24590 - DNA, 20 bp, synthetic construct
  misc_feature 1..20: note = chemically synthesized
  source 1..20: mol_type = other DNA
tgcagaaagaagatatattg

SEQ ID NO: 24591 - DNA, 20 bp, synthetic construct
  misc_feature 1..20: note = chemically synthesized
  source 1..20: mol_type = other DNA
agaaagaagatatattgagg

SEQ ID NO: 24592 - DNA, 20 bp, synthetic construct
  misc_feature 1..20: note = chemically synthesized
  source 1..20: mol_type = other DNA
attgaggtagatttttctca

SEQ ID NO: 24593 - DNA, 20 bp, synthetic construct
  misc_feature 1..20: note = chemically synthesized
  source 1..20: mol_type = other DNA
tttttctcatagatactact

SEQ ID NO: 24594 - DNA, 20 bp, synthetic construct
  misc_feature 1..20: note = chemically synthesized
  source 1..20: mol_type = other DNA
actactaagattatattgtc

SEQ ID NO: 24595 - DNA, 20 bp, synthetic construct
  misc_feature 1..20: note = chemically synthesized
  source 1..20: mol_type = other DNA
gtctggaatcttatgtgaca

SEQ ID NO: 24596 - DNA, 20 bp, synthetic construct
  misc_feature 1..20: note = chemically synthesized
  source 1..20: mol_type = other DNA
aatcttatgtgacacagaaa

SEQ ID NO: 24597 - DNA, 20 bp, synthetic construct
  misc_feature 1..20: note = chemically synthesized
  source 1..20: mol_type = other DNA
aaaagaacaactctgccatt

SEQ ID NO: 24598 - DNA, 20 bp, synthetic construct
  misc_feature 1..20: note = chemically synthesized
  source 1..20: mol_type = other DNA
tttggccatttgcttgtgtt

SEQ ID NO: 24599 - DNA, 20 bp, synthetic construct
  misc_feature 1..20: note = chemically synthesized
  source 1..20: mol_type = other DNA
tgcttgtgtttggacttgtg

SEQ ID NO: 24600 - DNA, 20 bp, synthetic construct
  misc_feature 1..20: note = chemically synthesized
  source 1..20: mol_type = other DNA
gcttgtgtttggacttgtga

SEQ ID NO: 24601 - DNA, 20 bp, synthetic construct
  misc_feature 1..20: note = chemically synthesized
  source 1..20: mol_type = other DNA
tctttccatcattctgttat

SEQ ID NO: 24602 - DNA, 20 bp, synthetic construct
  misc_feature 1..20: note = chemically synthesized
  source 1..20: mol_type = other DNA
tccatcattctgttattgga

SEQ ID NO: 24603 - DNA, 20 bp, synthetic construct
  misc_feature 1..20: note = chemically synthesized
  source 1..20: mol_type = other DNA
atcattctgttattggaaag

SEQ ID NO: 24604 - DNA, 20 bp, synthetic construct
  misc_feature 1..20: note = chemically synthesized
  source 1..20: mol_type = other DNA
tcattctgttattggaaagc

SEQ ID NO: 24605 - DNA, 20 bp, synthetic construct
  misc_feature 1..20: note = chemically synthesized
  source 1..20: mol_type = other DNA
tctgttattggaaagcggga

SEQ ID NO: 24606 - DNA, 20 bp, synthetic construct
  misc_feature 1..20: note = chemically synthesized
  source 1..20: mol_type = other DNA
gttattggaaagcgggaaag

SEQ ID NO: 24607 - DNA, 20 bp, synthetic construct
  misc_feature 1..20: note = chemically synthesized
  source 1..20: mol_type = other DNA
cgggaaagtagcattttcat

SEQ ID NO: 24608 - DNA, 20 bp, synthetic construct
  misc_feature 1..20: note = chemically synthesized
  source 1..20: mol_type = other DNA
gggaaagtagcattttcatg

SEQ ID NO: 24609 - DNA, 20 bp, synthetic construct
  misc_feature 1..20: note = chemically synthesized
  source 1..20: mol_type = other DNA
atgaggattctattaaaaac

SEQ ID NO: 24610 - DNA, 20 bp, synthetic construct
  misc_feature 1..20: note = chemically synthesized
  source 1..20: mol_type = other DNA
tgaggattctattaaaaact

SEQ ID NO: 24611 - DNA, 20 bp, synthetic construct
  misc_feature 1..20: note = chemically synthesized
  source 1..20: mol_type = other DNA
gaggattctattaaaaacta

SEQ ID NO: 24612 - DNA, 20 bp, synthetic construct
  misc_feature 1..20: note = chemically synthesized
  source 1..20: mol_type = other DNA
gggaccatatgcaatacatc

SEQ ID NO: 24613 - DNA, 20 bp, synthetic construct
  misc_feature 1..20: note = chemically synthesized
  source 1..20: mol_type = other DNA
caatacatccagactatatt

SEQ ID NO: 24614 - DNA, 20 bp, synthetic construct
  misc_feature 1..20: note = chemically synthesized
  source 1..20: mol_type = other DNA
agactatatttagtgtacaa

SEQ ID NO: 24615 - DNA, 20 bp, synthetic construct
  misc_feature 1..20: note = chemically synthesized
  source 1..20: mol_type = other DNA
tatatttagtgtacaataga

SEQ ID NO: 24616 - DNA, 20 bp, synthetic construct
  misc_feature 1..20: note = chemically synthesized
  source 1..20: mol_type = other DNA
acaatagaaagcaattacca

SEQ ID NO: 24617 - DNA, 20 bp, synthetic construct
  misc_feature 1..20: note = chemically synthesized
  source 1..20: mol_type = other DNA
accatagcaattatgttccc

SEQ ID NO: 24618 - DNA, 20 bp, synthetic construct
  misc_feature 1..20: note = chemically synthesized
  source 1..20: mol_type = other DNA
tcttctctctttgcaaaccc

SEQ ID NO: 24619 - DNA, 20 bp, synthetic construct
  misc_feature 1..20: note = chemically synthesized
  source 1..20: mol_type = other DNA
tgcaaaccccagcccccact

SEQ ID NO: 24620 - DNA, 20 bp, synthetic construct
  misc_feature 1..20: note = chemically synthesized
  source 1..20: mol_type = other DNA
agcccccactcagcatgaca

SEQ ID NO: 24621 - DNA, 20 bp, synthetic construct
  misc_feature 1..20: note = chemically synthesized
  source 1..20: mol_type = other DNA
ccccactcagcatgacatgg

SEQ ID NO: 24622 - DNA, 20 bp, synthetic construct
  misc_feature 1..20: note = chemically synthesized
  source 1..20: mol_type = other DNA
cccactcagcatgacatggc

SEQ ID NO: 24623 - DNA, 20 bp, synthetic construct
  misc_feature 1..20: note = chemically synthesized
  source 1..20: mol_type = other DNA
tgacatggcaggtataaaaa

SEQ ID NO: 24624 - DNA, 20 bp, synthetic construct
  misc_feature 1..20: note = chemically synthesized
  source 1..20: mol_type = other DNA
gacatggcaggtataaaaat

SEQ ID NO: 24625 - DNA, 20 bp, synthetic construct
  misc_feature 1..20: note = chemically synthesized
  source 1..20: mol_type = other DNA
aggtataaaaataggcaact

SEQ ID NO: 24626 - DNA, 20 bp, synthetic construct
  misc_feature 1..20: note = chemically synthesized
  source 1..20: mol_type = other DNA
aactcagacccatttctgta

SEQ ID NO: 24627 - DNA, 20 bp, synthetic construct
  misc_feature 1..20: note = chemically synthesized
  source 1..20: mol_type = other DNA
actcagacccatttctgtaa

SEQ ID NO: 24628 - DNA, 20 bp, synthetic construct
  misc_feature 1..20: note = chemically synthesized
  source 1..20: mol_type = other DNA
tcagacccatttctgtaaag

SEQ ID NO: 24629 - DNA, 20 bp, synthetic construct
  misc_feature 1..20: note = chemically synthesized
  source 1..20: mol_type = other DNA
cagacccatttctgtaaagg

SEQ ID NO: 24630 - DNA, 20 bp, synthetic construct
  misc_feature 1..20: note = chemically synthesized
  source 1..20: mol_type = other DNA
gacccatttctgtaaaggag

SEQ ID NO: 24631 - DNA, 20 bp, synthetic construct
  misc_feature 1..20: note = chemically synthesized
  source 1..20: mol_type = other DNA
ccatttctgtaaaggaggag

SEQ ID NO: 24632 - DNA, 20 bp, synthetic construct
  misc_feature 1..20: note = chemically synthesized
  source 1..20: mol_type = other DNA
aaaggaggagaagcttgtgt

SEQ ID NO: 24633 - DNA, 20 bp, synthetic construct
  misc_feature 1..20: note = chemically synthesized
  source 1..20: mol_type = other DNA
aaggaggagaagcttgtgtt

SEQ ID NO: 24634 - DNA, 20 bp, synthetic construct
  misc_feature 1..20: note = chemically synthesized
  source 1..20: mol_type = other DNA
ggagaagcttgtgttaggaa

SEQ ID NO: 24635 - DNA, 20 bp, synthetic construct
  misc_feature 1..20: note = chemically synthesized
  source 1..20: mol_type = other DNA
gaagcttgtgttaggaatgg

SEQ ID NO: 24636 - DNA, 20 bp, synthetic construct
  misc_feature 1..20: note = chemically synthesized
  source 1..20: mol_type = other DNA
gttaggaatggaagaatgcc

SEQ ID NO: 24637 - DNA, 20 bp, synthetic construct
  misc_feature 1..20: note = chemically synthesized
  source 1..20: mol_type = other DNA
ttaggaatggaagaatgcct

SEQ ID NO: 24638 - DNA, 20 bp, synthetic construct
  misc_feature 1..20: note = chemically synthesized
  source 1..20: mol_type = other DNA
gaatggaagaatgcctgggc

SEQ ID NO: 24639 - DNA, 20 bp, synthetic construct
  misc_feature 1..20: note = chemically synthesized
  source 1..20: mol_type = other DNA
atggaagaatgcctgggctg

SEQ ID NO: 24640 - DNA, 20 bp, synthetic construct
  misc_feature 1..20: note = chemically synthesized
  source 1..20: mol_type = other DNA
agaatgcctgggctggagaa

SEQ ID NO: 24641 - DNA, 20 bp, synthetic construct
  misc_feature 1..20: note = chemically synthesized
  source 1..20: mol_type = other DNA
gaatgcctgggctggagaac

SEQ ID NO: 24642 - DNA, 20 bp, synthetic construct
  misc_feature 1..20: note = chemically synthesized
  source 1..20: mol_type = other DNA
aatgcctgggctggagaaca

SEQ ID NO: 24643 - DNA, 20 bp, synthetic construct
  misc_feature 1..20: note = chemically synthesized
  source 1..20: mol_type = other DNA
tggagaacagggcttcacaa

SEQ ID NO: 24644 - DNA, 20 bp, synthetic construct
  misc_feature 1..20: note = chemically synthesized
  source 1..20: mol_type = other DNA
aacagggcttcacaacagtg

SEQ ID NO: 24645 - DNA, 20 bp, synthetic construct
  misc_feature 1..20: note = chemically synthesized
  source 1..20: mol_type = other DNA
gcttcacaacagtgtagtga

SEQ ID NO: 24646 - DNA, 20 bp, synthetic construct
  misc_feature 1..20: note = chemically synthesized
  source 1..20: mol_type = other DNA
cacccacatattatgtgatg

SEQ ID NO: 24647 - DNA, 20 bp, synthetic construct
  misc_feature 1..20: note = chemically synthesized
  source 1..20: mol_type = other DNA
attatgtgatgtggacctct

SEQ ID NO: 24648 - DNA, 20 bp, synthetic construct
  misc_feature 1..20: note = chemically synthesized
  source 1..20: mol_type = other DNA
tgtgatgtggacctctgagc

SEQ ID NO: 24649 - DNA, 20 bp, synthetic construct
  misc_feature 1..20: note = chemically synthesized
  source 1..20: mol_type = other DNA
gtgatgtggacctctgagcc

SEQ ID NO: 24650 - DNA, 20 bp, synthetic construct
  misc_feature 1..20: note = chemically synthesized
  source 1..20: mol_type = other DNA
aggtactatctcattctcca

SEQ ID NO: 24651 - DNA, 20 bp, synthetic construct
  misc_feature 1..20: note = chemically synthesized
  source 1..20: mol_type = other DNA
tcattctccatggttgcaat

SEQ ID NO: 24652 - DNA, 20 bp, synthetic construct
  misc_feature 1..20: note = chemically synthesized
  source 1..20: mol_type = other DNA
cattctccatggttgcaata

SEQ ID NO: 24653 - DNA, 20 bp, synthetic construct
  misc_feature 1..20: note = chemically synthesized
  source 1..20: mol_type = other DNA
ggttgcaataaggtcgatta

SEQ ID NO: 24654 - DNA, 20 bp, synthetic construct
  misc_feature 1..20: note = chemically synthesized
  source 1..20: mol_type = other DNA
ggtcgattatagattcaata

SEQ ID NO: 24655 - DNA, 20 bp, synthetic construct
  misc_feature 1..20: note = chemically synthesized
  source 1..20: mol_type = other DNA
gtcgattatagattcaataa

SEQ ID NO: 24656 - DNA, 20 bp, synthetic construct
  misc_feature 1..20: note = chemically synthesized
  source 1..20: mol_type = other DNA
gattatagattcaataaagg

SEQ ID NO: 24657 - DNA, 20 bp, synthetic construct
  misc_feature 1..20: note = chemically synthesized
  source 1..20: mol_type = other DNA
ttatagattcaataaaggaa

SEQ ID NO: 24658 - DNA, 20 bp, synthetic construct
  misc_feature 1..20: note = chemically synthesized
  source 1..20: mol_type = other DNA
tatagattcaataaaggaag

SEQ ID NO: 24659 - DNA, 20 bp, synthetic construct
  misc_feature 1..20: note = chemically synthesized
  source 1..20: mol_type = other DNA
gaagaggtatctcaacacta

SEQ ID NO: 24660 - DNA, 20 bp, synthetic construct
  misc_feature 1..20: note = chemically synthesized
  source 1..20: mol_type = other DNA
aggtatctcaacactaaaga

SEQ ID NO: 24661 - DNA, 20 bp, synthetic construct
  misc_feature 1..20: note = chemically synthesized
  source 1..20: mol_type = other DNA
gtatctcaacactaaagaaa

SEQ ID NO: 24662 - DNA, 20 bp, synthetic construct
  misc_feature 1..20: note = chemically synthesized
  source 1..20: mol_type = other DNA
taaagaaagagtaaaatttt

SEQ ID NO: 24663 - DNA, 20 bp, synthetic construct
  misc_feature 1..20: note = chemically synthesized
  source 1..20: mol_type = other DNA
aaagaaagagtaaaattttc

SEQ ID NO: 24664 - DNA, 20 bp, synthetic construct
  misc_feature 1..20: note = chemically synthesized
  source 1..20: mol_type = other DNA
aagaaagagtaaaattttca

SEQ ID NO: 24665 - DNA, 20 bp, synthetic construct
  misc_feature 1..20: note = chemically synthesized
  source 1..20: mol_type = other DNA
taaaattttcagggttcaac

SEQ ID NO: 24666 - DNA, 20 bp, synthetic construct
  misc_feature 1..20: note = chemically synthesized
  source 1..20: mol_type = other DNA
ggttcaacaagcgaccacct

SEQ ID NO: 24667 - DNA, 20 bp, synthetic construct
  misc_feature 1..20: note = chemically synthesized
  source 1..20: mol_type = other DNA
gttcaacaagcgaccaccta

SEQ ID NO: 24668 - DNA, 20 bp, synthetic construct
  misc_feature 1..20: note = chemically synthesized
  source 1..20: mol_type = other DNA
ttcaacaagcgaccacctaa

SEQ ID NO: 24669 - DNA, 20 bp, synthetic construct
  misc_feature 1..20: note = chemically synthesized
  source 1..20: mol_type = other DNA
cctaaattttgacaaacttt

SEQ ID NO: 24670 - DNA, 20 bp, synthetic construct
  misc_feature 1..20: note = chemically synthesized
  source 1..20: mol_type = other DNA
tgacaaactttaagttcaaa

SEQ ID NO: 24671 - DNA, 20 bp, synthetic construct
  misc_feature 1..20: note = chemically synthesized
  source 1..20: mol_type = other DNA
ttaagttcaaaaagctcatc

SEQ ID NO: 24672 - DNA, 20 bp, synthetic construct
  misc_feature 1..20: note = chemically synthesized
  source 1..20: mol_type = other DNA
aagctcatctagctatgaca

SEQ ID NO: 24673 - DNA, 20 bp, synthetic construct
  misc_feature 1..20: note = chemically synthesized
  source 1..20: mol_type = other DNA
agctatgacaaagtttgaca

SEQ ID NO: 24674 - DNA, 20 bp, synthetic construct
  misc_feature 1..20: note = chemically synthesized
  source 1..20: mol_type = other DNA
atgacaaagtttgacatagt

SEQ ID NO: 24675 - DNA, 20 bp, synthetic construct
  misc_feature 1..20: note = chemically synthesized
  source 1..20: mol_type = other DNA
aaagtttgacatagttagat

SEQ ID NO: 24676 - DNA, 20 bp, synthetic construct
  misc_feature 1..20: note = chemically synthesized
  source 1..20: mol_type = other DNA
tcttgacttcacaaaaccat

SEQ ID NO: 24677 - DNA, 20 bp, synthetic construct
  misc_feature 1..20: note = chemically synthesized
  source 1..20: mol_type = other DNA
ttcacaaaaccattggaatt

SEQ ID NO: 24678 - DNA, 20 bp, synthetic construct
  misc_feature 1..20: note = chemically synthesized
  source 1..20: mol_type = other DNA
tcacaaaaccattggaattt

SEQ ID NO: 24679 - DNA, 20 bp, synthetic construct
  misc_feature 1..20: note = chemically synthesized
  source 1..20: mol_type = other DNA
cacaaaaccattggaatttg

SEQ ID NO: 24680 - DNA, 20 bp, synthetic construct
  misc_feature 1..20: note = chemically synthesized
  source 1..20: mol_type = other DNA
cattggaatttggggtgata

SEQ ID NO: 24681 - DNA, 20 bp, synthetic construct
  misc_feature 1..20: note = chemically synthesized
  source 1..20: mol_type = other DNA
ttggaatttggggtgatatg

SEQ ID NO: 24682 - DNA, 20 bp, synthetic construct
  misc_feature 1..20: note = chemically synthesized
  source 1..20: mol_type = other DNA
tggaatttggggtgatatgg

SEQ ID NO: 24683 - DNA, 20 bp, synthetic construct
  misc_feature 1..20: note = chemically synthesized
  source 1..20: mol_type = other DNA
atttggggtgatatggaggc

SEQ ID NO: 24684 - DNA, 20 bp, synthetic construct
  misc_feature 1..20: note = chemically synthesized
  source 1..20: mol_type = other DNA
atatggaggcaagccaaatg

SEQ ID NO: 24685 - DNA, 20 bp, synthetic construct
  misc_feature 1..20: note = chemically synthesized
  source 1..20: mol_type = other DNA
aggcaagccaaatgcagaaa

SEQ ID NO: 24686 - DNA, 20 bp, synthetic construct
  misc_feature 1..20: note = chemically synthesized
  source 1..20: mol_type = other DNA
ggcaagccaaatgcagaaac

SEQ ID NO: 24687 - DNA, 20 bp, synthetic construct
  misc_feature 1..20: note = chemically synthesized
  source 1..20: mol_type = other DNA
caagccaaatgcagaaacag

SEQ ID NO: 24688 - DNA, 20 bp, synthetic construct
  misc_feature 1..20: note = chemically synthesized
  source 1..20: mol_type = other DNA
aagccaaatgcagaaacagg

SEQ ID NO: 24689 - DNA, 20 bp, synthetic construct
  misc_feature 1..20: note = chemically synthesized
  source 1..20: mol_type = other DNA
aatgcagaaacaggaggtca

SEQ ID NO: 24690 - DNA, 20 bp, synthetic construct
  misc_feature 1..20: note = chemically synthesized
  source 1..20: mol_type = other DNA
cagaaacaggaggtcatggt

SEQ ID NO: 24691 - DNA, 20 bp, synthetic construct
  misc_feature 1..20: note = chemically synthesized
  source 1..20: mol_type = other DNA
agaaacaggaggtcatggta

SEQ ID NO: 24692 - DNA, 20 bp, synthetic construct
  misc_feature 1..20: note = chemically synthesized
  source 1..20: mol_type = other DNA
gtcatggtaaggctatgatg

SEQ ID NO: 24693 - DNA, 20 bp, synthetic construct
  misc_feature 1..20: note = chemically synthesized
  source 1..20: mol_type = other DNA
ggtaaggctatgatgcagtt

SEQ ID NO: 24694 - DNA, 20 bp, synthetic construct
  misc_feature 1..20: note = chemically synthesized
  source 1..20: mol_type = other DNA
gtaaggctatgatgcagttt

SEQ ID NO: 24695 - DNA, 20 bp, synthetic construct
  misc_feature 1..20: note = chemically synthesized
  source 1..20: mol_type = other DNA
aaggctatgatgcagtttag

SEQ ID NO: 24696 - DNA, 20 bp, synthetic construct
  misc_feature 1..20: note = chemically synthesized
  source 1..20: mol_type = other DNA
gtgatgtgtcatttctgtga

SEQ ID NO: 24697 - DNA, 20 bp, synthetic construct
  misc_feature 1..20: note = chemically synthesized
  source 1..20: mol_type = other DNA
tgatgtgtcatttctgtgac

SEQ ID NO: 24698 - DNA, 20 bp, synthetic construct
  misc_feature 1..20: note = chemically synthesized
  source 1..20: mol_type = other DNA
tcatttctgtgacaggatat

SEQ ID NO: 24699 - DNA, 20 bp, synthetic construct
  misc_feature 1..20: note = chemically synthesized
  source 1..20: mol_type = other DNA
atttctgtgacaggatatga

SEQ ID NO: 24700 - DNA, 20 bp, synthetic construct
  misc_feature 1..20: note = chemically synthesized
  source 1..20: mol_type = other DNA
gagctgcacatctttctgtt

SEQ ID NO: 24701 - DNA, 20 bp, synthetic construct
  misc_feature 1..20: note = chemically synthesized
  source 1..20: mol_type = other DNA
gccatatttgtaattctcaa

SEQ ID NO: 24702 - DNA, 20 bp, synthetic construct
  misc_feature 1..20: note = chemically synthesized
  source 1..20: mol_type = other DNA
tatttgtaattctcaatggt

SEQ ID NO: 24703 - DNA, 20 bp, synthetic construct
  misc_feature 1..20: note = chemically synthesized
  source 1..20: mol_type = other DNA
tcaatggtcagtctccttgc

SEQ ID NO: 24704 - DNA, 20 bp, synthetic construct
  misc_feature 1..20: note = chemically synthesized
  source 1..20: mol_type = other DNA
ctataaattcaactacatgc

SEQ ID NO: 24705 - DNA, 20 bp, synthetic construct
  misc_feature 1..20: note = chemically synthesized
  source 1..20: mol_type = other DNA
ttcaactacatgccagcttt

SEQ ID NO: 24706 - DNA, 20 bp, synthetic construct
  misc_feature 1..20: note = chemically synthesized
  source 1..20: mol_type = other DNA
ctacatgccagctttaagca

SEQ ID NO: 24707 - DNA, 20 bp, synthetic construct
  misc_feature 1..20: note = chemically synthesized
  source 1..20: mol_type = other DNA
gctttaagcacagtgctttg

SEQ ID NO: 24708 - DNA, 20 bp, synthetic construct
  misc_feature 1..20: note = chemically synthesized
  source 1..20: mol_type = other DNA
tttaagcacagtgctttgaa

SEQ ID NO: 24709 - DNA, 20 bp, synthetic construct
  misc_feature 1..20: note = chemically synthesized
  source 1..20: mol_type = other DNA
taagcacagtgctttgaaga

SEQ ID NO: 24710 - DNA, 20 bp, synthetic construct
  misc_feature 1..20: note = chemically synthesized
  source 1..20: mol_type = other DNA
gcacagtgctttgaagagag

SEQ ID NO: 24711 - DNA, 20 bp, synthetic construct
  misc_feature 1..20: note = chemically synthesized
  source 1..20: mol_type = other DNA
cacagtgctttgaagagagt

SEQ ID NO: 24712 - DNA, 20 bp, synthetic construct
  misc_feature 1..20: note = chemically synthesized
  source 1..20: mol_type = other DNA
cagtgctttgaagagagtag

SEQ ID NO: 24713 - DNA, 20 bp, synthetic construct
  misc_feature 1..20: note = chemically synthesized
  source 1..20: mol_type = other DNA
attaaatgaaaaaataaact

SEQ ID NO: 24714 - DNA, 20 bp, synthetic construct
  misc_feature 1..20: note = chemically synthesized
  source 1..20: mol_type = other DNA
tgaaaaaataaactaagcgt

SEQ ID NO: 24715 - DNA, 20 bp, synthetic construct
  misc_feature 1..20: note = chemically synthesized
  source 1..20: mol_type = other DNA
aaaaaataaactaagcgtga

SEQ ID NO: 24716 - DNA, 20 bp, synthetic construct
  misc_feature 1..20: note = chemically synthesized
  source 1..20: mol_type = other DNA
aaaaataaactaagcgtgag

SEQ ID NO: 24717 - DNA, 20 bp, synthetic construct
  misc_feature 1..20: note = chemically synthesized
  source 1..20: mol_type = other DNA
tctctgattttgtgcactct

SEQ ID NO: 24718 - DNA, 20 bp, synthetic construct
  misc_feature 1..20: note = chemically synthesized
  source 1..20: mol_type = other DNA
ctctgattttgtgcactcta

SEQ ID NO: 24719 - DNA, 20 bp, synthetic construct
  misc_feature 1..20: note = chemically synthesized
  source 1..20: mol_type = other DNA
tgattttgtgcactctaagg

SEQ ID NO: 24720 - DNA, 20 bp, synthetic construct
  misc_feature 1..20: note = chemically synthesized
  source 1..20: mol_type = other DNA
gcactctaaggcagccctct

SEQ ID NO: 24721 - DNA, 20 bp, synthetic construct
  misc_feature 1..20: note = chemically synthesized
  source 1..20: mol_type = other DNA
ctctaagctgtttgcccatc

SEQ ID NO: 24722 - DNA, 20 bp, synthetic construct
  misc_feature 1..20: note = chemically synthesized
  source 1..20: mol_type = other DNA
tttgcccatccagcatatga

SEQ ID NO: 24723 - DNA, 20 bp, synthetic construct
  misc_feature 1..20: note = chemically synthesized
  source 1..20: mol_type = other DNA
gcccatccagcatatgacag

SEQ ID NO: 24724 - DNA, 20 bp, synthetic construct
  misc_feature 1..20: note = chemically synthesized
  source 1..20: mol_type = other DNA
atatgacagaagactcttca

SEQ ID NO: 24725 - DNA, 20 bp, synthetic construct
  misc_feature 1..20: note = chemically synthesized
  source 1..20: mol_type = other DNA
ctcttcaaagtgaatgatca

SEQ ID NO: 24726 - DNA, 20 bp, synthetic construct
  misc_feature 1..20: note = chemically synthesized
  source 1..20: mol_type = other DNA
tgatcaaagtcccttgttta

SEQ ID NO: 24727 - DNA, 20 bp, synthetic construct
  misc_feature 1..20: note = chemically synthesized
  source 1..20: mol_type = other DNA
gatcaaagtcccttgtttac

SEQ ID NO: 24728 - DNA, 20 bp, synthetic construct
  misc_feature 1..20: note = chemically synthesized
  source 1..20: mol_type = other DNA
atcaaagtcccttgtttaca

SEQ ID NO: 24729 - DNA, 20 bp, synthetic construct
  misc_feature 1..20: note = chemically synthesized
  source 1..20: mol_type = other DNA
cccccaccctcttccttcct

SEQ ID NO: 24730 - DNA, 20 bp, synthetic construct
  misc_feature 1..20: note = chemically synthesized
  source 1..20: mol_type = other DNA
tccttcctgagcatgtgttc

SEQ ID NO: 24731 - DNA, 20 bp, synthetic construct
  misc_feature 1..20: note = chemically synthesized
  source 1..20: mol_type = other DNA
catgtgttctggatatgctg

SEQ ID NO: 24732 - DNA, 20 bp, synthetic construct
  misc_feature 1..20: note = chemically synthesized
  source 1..20: mol_type = other DNA
atatgctgaagccaacctca

SEQ ID NO: 24733 - DNA, 20 bp, synthetic construct
  misc_feature 1..20: note = chemically synthesized
  source 1..20: mol_type = other DNA
tatgctgaagccaacctcac

SEQ ID NO: 24734 - DNA, 20 bp, synthetic construct
  misc_feature 1..20: note = chemically synthesized
  source 1..20: mol_type = other DNA
aggactttgttacctttcct

SEQ ID NO: 24735 - DNA, 20 bp, synthetic construct
  misc_feature 1..20: note = chemically synthesized
  source 1..20: mol_type = other DNA
tacctttcctaagtttctat

SEQ ID NO: 24736 - DNA, 20 bp, synthetic construct
  misc_feature 1..20: note = chemically synthesized
  source 1..20: mol_type = other DNA
tggtgaatttccatttaata

SEQ ID NO: 24737 - DNA, 20 bp, synthetic construct
  misc_feature 1..20: note = chemically synthesized
  source 1..20: mol_type = other DNA
atagttttattaaatgattt

SEQ ID NO: 24738 - DNA, 20 bp, synthetic construct
  misc_feature 1..20: note = chemically synthesized
  source 1..20: mol_type = other DNA
taaataatttttaatcattg

SEQ ID NO: 24739 - DNA, 20 bp, synthetic construct
  misc_feature 1..20: note = chemically synthesized
  source 1..20: mol_type = other DNA
tttaatcattgtagcttcta

SEQ ID NO: 24740 - DNA, 20 bp, synthetic construct
  misc_feature 1..20: note = chemically synthesized
  source 1..20: mol_type = other DNA
aatcattgtagcttctatgg

SEQ ID NO: 24741 - DNA, 20 bp, synthetic construct
  misc_feature 1..20: note = chemically synthesized
  source 1..20: mol_type = other DNA
agcttctatggtggatacac

SEQ ID NO: 24742 - DNA, 20 bp, synthetic construct
  misc_feature 1..20: note = chemically synthesized
  source 1..20: mol_type = other DNA
gcttctatggtggatacaca

SEQ ID NO: 24743 - DNA, 20 bp, synthetic construct
  misc_feature 1..20: note = chemically synthesized
  source 1..20: mol_type = other DNA
ttctatggtggatacacaag

SEQ ID NO: 24744 - DNA, 20 bp, synthetic construct
  misc_feature 1..20: note = chemically synthesized
  source 1..20: mol_type = other DNA
tatggtggatacacaaggag

SEQ ID NO: 24745 - DNA, 20 bp, synthetic construct
  misc_feature 1..20: note = chemically synthesized
  source 1..20: mol_type = other DNA
ggtggatacacaaggagaag

SEQ ID NO: 24746 - DNA, 20 bp, synthetic construct
  misc_feature 1..20: note = chemically synthesized
  source 1..20: mol_type = other DNA
tggatacacaaggagaagca

SEQ ID NO: 24747 - DNA, 20 bp, synthetic construct
  misc_feature 1..20: note = chemically synthesized
  source 1..20: mol_type = other DNA
gatacacaaggagaagcaga

SEQ ID NO: 24748 - DNA, 20 bp, synthetic construct
  misc_feature 1..20: note = chemically synthesized
  source 1..20: mol_type = other DNA
tacacaaggagaagcagaga

SEQ ID NO: 24749 - DNA, 20 bp, synthetic construct
  misc_feature 1..20: note = chemically synthesized
  source 1..20: mol_type = other DNA
cacaaggagaagcagagaga

SEQ ID NO: 24750 - DNA, 20 bp, synthetic construct
  misc_feature 1..20: note = chemically synthesized
  source 1..20: mol_type = other DNA
acaaggagaagcagagagag

SEQ ID NO: 24751 - DNA, 20 bp, synthetic construct
  misc_feature 1..20: note = chemically synthesized
  source 1..20: mol_type = other DNA
caaggagaagcagagagaga

SEQ ID NO: 24752 - DNA, 20 bp, synthetic construct
  misc_feature 1..20: note = chemically synthesized
  source 1..20: mol_type = other DNA
gagagagagggaaaaaaatg

SEQ ID NO: 24753 - DNA, 20 bp, synthetic construct
  misc_feature 1..20: note = chemically synthesized
  source 1..20: mol_type = other DNA
gagggaaaaaaatgaagtaa

SEQ ID NO: 24754 - DNA, 20 bp, synthetic construct
  misc_feature 1..20: note = chemically synthesized
  source 1..20: mol_type = other DNA
ggaaaaaaatgaagtaacag

SEQ ID NO: 24755 - DNA, 20 bp, synthetic construct
  misc_feature 1..20: note = chemically synthesized
  source 1..20: mol_type = other DNA
gaaaaaaatgaagtaacaga

SEQ ID NO: 24756 - DNA, 20 bp, synthetic construct
  misc_feature 1..20: note = chemically synthesized
  source 1..20: mol_type = other DNA
atgaagtaacagaaggctac

SEQ ID NO: 24757 - DNA, 20 bp, synthetic construct
  misc_feature 1..20: note = chemically synthesized
  source 1..20: mol_type = other DNA
tgaagtaacagaaggctaca

SEQ ID NO: 24758 - DNA, 20 bp, synthetic construct
  misc_feature 1..20: note = chemically synthesized
  source 1..20: mol_type = other DNA
gaagtaacagaaggctacaa

SEQ ID NO: 24759 - DNA, 20 bp, synthetic construct
  misc_feature 1..20: note = chemically synthesized
  source 1..20: mol_type = other DNA
aagtaacagaaggctacaag

SEQ ID NO: 24760 - DNA, 20 bp, synthetic construct
  misc_feature 1..20: note = chemically synthesized
  source 1..20: mol_type = other DNA
aggctacaaggggatttctc

SEQ ID NO: 24761 - DNA, 20 bp, synthetic construct
  misc_feature 1..20: note = chemically synthesized
  source 1..20: mol_type = other DNA
tcttcttgtcattcttgtca

SEQ ID NO: 24762 - DNA, 20 bp, synthetic construct
  misc_feature 1..20: note = chemically synthesized
  source 1..20: mol_type = other DNA
cttgtcacagcaatgaatct

SEQ ID NO: 24763 - DNA, 20 bp, synthetic construct
  misc_feature 1..20: note = chemically synthesized
  source 1..20: mol_type = other DNA
ttgtcacagcaatgaatctt

SEQ ID NO: 24764 - DNA, 20 bp, synthetic construct
  misc_feature 1..20: note = chemically synthesized
  source 1..20: mol_type = other DNA
gcaatgaatcttgggcaaat

SEQ ID NO: 24765 - DNA, 20 bp, synthetic construct
  misc_feature 1..20: note = chemically synthesized
  source 1..20: mol_type = other DNA
caatgaatcttgggcaaata

SEQ ID NO: 24766 - DNA, 20 bp, synthetic construct
  misc_feature 1..20: note = chemically synthesized
  source 1..20: mol_type = other DNA
aatgaatcttgggcaaataa

SEQ ID NO: 24767 - DNA, 20 bp, synthetic construct
  misc_feature 1..20: note = chemically synthesized
  source 1..20: mol_type = other DNA
cttgtaataaccttgaattc

SEQ ID NO: 24768 - DNA, 20 bp, synthetic construct
  misc_feature 1..20: note = chemically synthesized
  source 1..20: mol_type = other DNA
gtaataaccttgaattcaag

SEQ ID NO: 24769 - DNA, 20 bp, synthetic construct
  misc_feature 1..20: note = chemically synthesized
  source 1..20: mol_type = other DNA
ataaccttgaattcaagtgg

SEQ ID NO: 24770 - DNA, 20 bp, synthetic construct
  misc_feature 1..20: note = chemically synthesized
  source 1..20: mol_type = other DNA
aataacttttcttctttgtc

SEQ ID NO: 24771 - DNA, 20 bp, synthetic construct
  misc_feature 1..20: note = chemically synthesized
  source 1..20: mol_type = other DNA
acttttcttctttgtctggt

SEQ ID NO: 24772 - DNA, 20 bp, synthetic construct
  misc_feature 1..20: note = chemically synthesized
  source 1..20: mol_type = other DNA
tctttgtctggtgagttctg

SEQ ID NO: 24773 - DNA, 20 bp, synthetic construct
  misc_feature 1..20: note = chemically synthesized
  source 1..20: mol_type = other DNA
tggtgagttctgtagacatt

SEQ ID NO: 24774 - DNA, 20 bp, synthetic construct
  misc_feature 1..20: note = chemically synthesized
  source 1..20: mol_type = other DNA
gtgagttctgtagacattta

SEQ ID NO: 24775 - DNA, 20 bp, synthetic construct
  misc_feature 1..20: note = chemically synthesized
  source 1..20: mol_type = other DNA
ttctgtagacatttagagtg

SEQ ID NO: 24776 - DNA, 20 bp, synthetic construct
  misc_feature 1..20: note = chemically synthesized
  source 1..20: mol_type = other DNA
tctgtagacatttagagtgt

SEQ ID NO: 24777 - DNA, 20 bp, synthetic construct
  misc_feature 1..20: note = chemically synthesized
  source 1..20: mol_type = other DNA
ctgtagacatttagagtgta

SEQ ID NO: 24778 - DNA, 20 bp, synthetic construct
  misc_feature 1..20: note = chemically synthesized
  source 1..20: mol_type = other DNA
agacatttagagtgtagggc

SEQ ID NO: 24779 - DNA, 20 bp, synthetic construct
  misc_feature 1..20: note = chemically synthesized
  source 1..20: mol_type = other DNA
ctggcaactgtgtttaaaat

SEQ ID NO: 24780 - DNA, 20 bp, synthetic construct
  misc_feature 1..20: note = chemically synthesized
  source 1..20: mol_type = other DNA
aaataagttgtctattatat

SEQ ID NO: 24781 - DNA, 20 bp, synthetic construct
  misc_feature 1..20: note = chemically synthesized
  source 1..20: mol_type = other DNA
aataagttgtctattatatc

SEQ ID NO: 24782 - DNA, 20 bp, synthetic construct
  misc_feature 1..20: note = chemically synthesized
  source 1..20: mol_type = other DNA
tctattatatcaggactcca

SEQ ID NO: 24783 - DNA, 20 bp, synthetic construct
  misc_feature 1..20: note = chemically synthesized
  source 1..20: mol_type = other DNA
caggactccatggaaacatc

SEQ ID NO: 24784 - DNA, 20 bp, synthetic construct
  misc_feature 1..20: note = chemically synthesized
  source 1..20: mol_type = other DNA
catggaaacatctagtgaac

SEQ ID NO: 24785 - DNA, 20 bp, synthetic construct
  misc_feature 1..20: note = chemically synthesized
  source 1..20: mol_type = other DNA
ggaaacatctagtgaaccag

SEQ ID NO: 24786 - DNA, 20 bp, synthetic construct
  misc_feature 1..20: note = chemically synthesized
  source 1..20: mol_type = other DNA
gaaacatctagtgaaccaga

SEQ ID NO: 24787 - DNA, 20 bp, synthetic construct
  misc_feature 1..20: note = chemically synthesized
  source 1..20: mol_type = other DNA
aaacatctagtgaaccagaa

SEQ ID NO: 24788 - DNA, 20 bp, synthetic construct
  misc_feature 1..20: note = chemically synthesized
  source 1..20: mol_type = other DNA
atctagtgaaccagaagggc

SEQ ID NO: 24789 - DNA, 20 bp, synthetic construct
  misc_feature 1..20: note = chemically synthesized
  source 1..20: mol_type = other DNA
tagtgaaccagaagggctgg

SEQ ID NO: 24790 - DNA, 20 bp, synthetic construct
  misc_feature 1..20: note = chemically synthesized
  source 1..20: mol_type = other DNA
gaaccagaagggctggtggt

SEQ ID NO: 24791 - DNA, 20 bp, synthetic construct
  misc_feature 1..20: note = chemically synthesized
  source 1..20: mol_type = other DNA
agaagggctggtggtgagaa

SEQ ID NO: 24792 - DNA, 20 bp, synthetic construct
  misc_feature 1..20: note = chemically synthesized
  source 1..20: mol_type = other DNA
ggtggtgagaacagtgttat

SEQ ID NO: 24793 - DNA, 20 bp, synthetic construct
  misc_feature 1..20: note = chemically synthesized
  source 1..20: mol_type = other DNA
cagtgttattagaataccac

SEQ ID NO: 24794 - DNA, 20 bp, synthetic construct
  misc_feature 1..20: note = chemically synthesized
  source 1..20: mol_type = other DNA
agaataccactggtgtttgc

SEQ ID NO: 24795 - DNA, 20 bp, synthetic construct
  misc_feature 1..20: note = chemically synthesized
  source 1..20: mol_type = other DNA
ccactggtgtttgccagctg

SEQ ID NO: 24796 - DNA, 20 bp, synthetic construct
  misc_feature 1..20: note = chemically synthesized
  source 1..20: mol_type = other DNA
tttgccagctgtggaaaaca

SEQ ID NO: 24797 - DNA, 20 bp, synthetic construct
  misc_feature 1..20: note = chemically synthesized
  source 1..20: mol_type = other DNA
ttgccagctgtggaaaacat

SEQ ID NO: 24798 - DNA, 20 bp, synthetic construct
  misc_feature 1..20: note = chemically synthesized
  source 1..20: mol_type = other DNA
agctgtggaaaacatgggta

SEQ ID NO: 24799 - DNA, 20 bp, synthetic construct
  misc_feature 1..20: note = chemically synthesized
  source 1..20: mol_type = other DNA
ctgtggaaaacatgggtata

SEQ ID NO: 24800 - DNA, 20 bp, synthetic construct
  misc_feature 1..20: note = chemically synthesized
  source 1..20: mol_type = other DNA
tagagcatacactgatgcca

SEQ ID NO: 24801 - DNA, 20 bp, synthetic construct
  misc_feature 1..20: note = chemically synthesized
  source 1..20: mol_type = other DNA
agagcatacactgatgccaa

SEQ ID NO: 24802 - DNA, 20 bp, synthetic construct
  misc_feature 1..20: note = chemically synthesized
  source 1..20: mol_type = other DNA
gccaaaggcaaaccaatgca

SEQ ID NO: 24803 - DNA, 20 bp, synthetic construct
  misc_feature 1..20: note = chemically synthesized
  source 1..20: mol_type = other DNA
aaggcaaaccaatgcatggc

SEQ ID NO: 24804 - DNA, 20 bp, synthetic construct
  misc_feature 1..20: note = chemically synthesized
  source 1..20: mol_type = other DNA
aaccaatgcatggctggtcc

SEQ ID NO: 24805 - DNA, 20 bp, synthetic construct
  misc_feature 1..20: note = chemically synthesized
  source 1..20: mol_type = other DNA
atgcatggctggtcccggca

SEQ ID NO: 24806 - DNA, 20 bp, synthetic construct
  misc_feature 1..20: note = chemically synthesized
  source 1..20: mol_type = other DNA
gctggtcccggcatggcaac

SEQ ID NO: 24807 - DNA, 20 bp, synthetic construct
  misc_feature 1..20: note = chemically synthesized
  source 1..20: mol_type = other DNA
tggcaacaagtaaccaaata

SEQ ID NO: 24808 - DNA, 20 bp, synthetic construct
  misc_feature 1..20: note = chemically synthesized
  source 1..20: mol_type = other DNA
ggcaacaagtaaccaaatat

SEQ ID NO: 24809 - DNA, 20 bp, synthetic construct
  misc_feature 1..20: note = chemically synthesized
  source 1..20: mol_type = other DNA
caagtaaccaaatatgggat

SEQ ID NO: 24810 - DNA, 20 bp, synthetic construct
  misc_feature 1..20: note = chemically synthesized
  source 1..20: mol_type = other DNA
agtaaccaaatatgggatga

SEQ ID NO: 24811 - DNA, 20 bp, synthetic construct
  misc_feature 1..20: note = chemically synthesized
  source 1..20: mol_type = other DNA
ccaaatatgggatgagagac

SEQ ID NO: 24812 - DNA, 20 bp, synthetic construct
  misc_feature 1..20: note = chemically synthesized
  source 1..20: mol_type = other DNA
atgggatgagagacaagatc

SEQ ID NO: 24813 - DNA, 20 bp, synthetic construct
  misc_feature 1..20: note = chemically synthesized
  source 1..20: mol_type = other DNA
agacaagatcaagcatactg

SEQ ID NO: 24814 - DNA, 20 bp, synthetic construct
  misc_feature 1..20: note = chemically synthesized
  source 1..20: mol_type = other DNA
gcatactgtagaaatcgctg

SEQ ID NO: 24815 - DNA, 20 bp, synthetic construct
  misc_feature 1..20: note = chemically synthesized
  source 1..20: mol_type = other DNA
atactgtagaaatcgctgtg

SEQ ID NO: 24816 - DNA, 20 bp, synthetic construct
  misc_feature 1..20: note = chemically synthesized
  source 1..20: mol_type = other DNA
actgtagaaatcgctgtgga

SEQ ID NO: 24817 - DNA, 20 bp, synthetic construct
  misc_feature 1..20: note = chemically synthesized
  source 1..20: mol_type = other DNA
tcgctgtggagagatgcatt

SEQ ID NO: 24818 - DNA, 20 bp, synthetic construct
  misc_feature 1..20: note = chemically synthesized
  source 1..20: mol_type = other DNA
gagagatgcatttagatgaa

SEQ ID NO: 24819 - DNA, 20 bp, synthetic construct
  misc_feature 1..20: note = chemically synthesized
  source 1..20: mol_type = other DNA
agagatgcatttagatgaaa

SEQ ID NO: 24820 - DNA, 20 bp, synthetic construct
  misc_feature 1..20: note = chemically synthesized
  source 1..20: mol_type = other DNA
atgaaaaggtaacccaattc

SEQ ID NO: 24821 - DNA, 20 bp, synthetic construct
  misc_feature 1..20: note = chemically synthesized
  source 1..20: mol_type = other DNA
gtaacccaattctggtctgc

SEQ ID NO: 24822 - DNA, 20 bp, synthetic construct
  misc_feature 1..20: note = chemically synthesized
  source 1..20: mol_type = other DNA
cccaattctggtctgccagt

SEQ ID NO: 24823 - DNA, 20 bp, synthetic construct
  misc_feature 1..20: note = chemically synthesized
  source 1..20: mol_type = other DNA
accattttcctgtctatgca

SEQ ID NO: 24824 - DNA, 20 bp, synthetic construct
  misc_feature 1..20: note = chemically synthesized
  source 1..20: mol_type = other DNA
ccattttcctgtctatgcac

SEQ ID NO: 24825 - DNA, 20 bp, synthetic construct
  misc_feature 1..20: note = chemically synthesized
  source 1..20: mol_type = other DNA
tttcctgtctatgcacagga

SEQ ID NO: 24826 - DNA, 20 bp, synthetic construct
  misc_feature 1..20: note = chemically synthesized
  source 1..20: mol_type = other DNA
ttcctgtctatgcacaggat

SEQ ID NO: 24827 - DNA, 20 bp, synthetic construct
  misc_feature 1..20: note = chemically synthesized
  source 1..20: mol_type = other DNA
tctatgcacaggataggata

SEQ ID NO: 24828 - DNA, 20 bp, synthetic construct
  misc_feature 1..20: note = chemically synthesized
  source 1..20: mol_type = other DNA
gatatggctgtactacctcg

SEQ ID NO: 24829 - DNA, 20 bp, synthetic construct
  misc_feature 1..20: note = chemically synthesized
  source 1..20: mol_type = other DNA
tacctcgaagttttttcaca

SEQ ID NO: 24830 - DNA, 20 bp, synthetic construct
  misc_feature 1..20: note = chemically synthesized
  source 1..20: mol_type = other DNA
tgatacacaaaaacattatc

SEQ ID NO: 24831 - DNA, 20 bp, synthetic construct
  misc_feature 1..20: note = chemically synthesized
  source 1..20: mol_type = other DNA
tatcgagatgcacatgacat

SEQ ID NO: 24832 - DNA, 20 bp, synthetic construct
  misc_feature 1..20: note = chemically synthesized
  source 1..20: mol_type = other DNA
atgacatcggtttgccatga

SEQ ID NO: 24833 - DNA, 20 bp, synthetic construct
  misc_feature 1..20: note = chemically synthesized
  source 1..20: mol_type = other DNA
tgacatcggtttgccatgac

SEQ ID NO: 24834 - DNA, 20 bp, synthetic construct
  misc_feature 1..20: note = chemically synthesized
  source 1..20: mol_type = other DNA
gacatcggtttgccatgaca

SEQ ID NO: 24835 - DNA, 20 bp, synthetic construct
  misc_feature 1..20: note = chemically synthesized
  source 1..20: mol_type = other DNA
gtttgccatgacagggctct

SEQ ID NO: 24836 - DNA, 20 bp, synthetic construct
  misc_feature 1..20: note = chemically synthesized
  source 1..20: mol_type = other DNA
aacacacctccaaatgtgtt

SEQ ID NO: 24837 - DNA, 20 bp, synthetic construct
  misc_feature 1..20: note = chemically synthesized
  source 1..20: mol_type = other DNA
acacacctccaaatgtgttg

SEQ ID NO: 24838 - DNA, 20 bp, synthetic construct
  misc_feature 1..20: note = chemically synthesized
  source 1..20: mol_type = other DNA
aaatgtgttgaggccctaat

SEQ ID NO: 24839 - DNA, 20 bp, synthetic construct
  misc_feature 1..20: note = chemically synthesized
  source 1..20: mol_type = other DNA
tcctgtaattatttaaaaaa

SEQ ID NO: 24840 - DNA, 20 bp, synthetic construct
  misc_feature 1..20: note = chemically synthesized
  source 1..20: mol_type = other DNA
attatttaaaaaatagatat

SEQ ID NO: 24841 - DNA, 20 bp, synthetic construct
  misc_feature 1..20: note = chemically synthesized
  source 1..20: mol_type = other DNA
aaaaatagatataagctttt

SEQ ID NO: 24842 - DNA, 20 bp, synthetic construct
  misc_feature 1..20: note = chemically synthesized
  source 1..20: mol_type = other DNA
aaaatagatataagcttttg

SEQ ID NO: 24843 - DNA, 20 bp, synthetic construct
  misc_feature 1..20: note = chemically synthesized
  source 1..20: mol_type = other DNA
aaatagatataagcttttga

SEQ ID NO: 24844 - DNA, 20 bp, synthetic construct
  misc_feature 1..20: note = chemically synthesized
  source 1..20: mol_type = other DNA
tagatataagcttttgaggg

SEQ ID NO: 24845 - DNA, 20 bp, synthetic construct
  misc_feature 1..20: note = chemically synthesized
  source 1..20: mol_type = other DNA
tgagggcagatattataatc

SEQ ID NO: 24846 - DNA, 20 bp, synthetic construct
  misc_feature 1..20: note = chemically synthesized
  source 1..20: mol_type = other DNA
gagggcagatattataatcc

SEQ ID NO: 24847 - DNA, 20 bp, synthetic construct
  misc_feature 1..20: note = chemically synthesized
  source 1..20: mol_type = other DNA
cctccattacccacattgtc

SEQ ID NO: 24848 - DNA, 20 bp, synthetic construct
  misc_feature 1..20: note = chemically synthesized
  source 1..20: mol_type = other DNA
ccacattgtctagcacatta

SEQ ID NO: 24849 - DNA, 20 bp, synthetic construct
  misc_feature 1..20: note = chemically synthesized
  source 1..20: mol_type = other DNA
tctagcacattatagatgct

SEQ ID NO: 24850 - DNA, 20 bp, synthetic construct
  misc_feature 1..20: note = chemically synthesized
  source 1..20: mol_type = other DNA
tatagatgcttagtatgtgc

SEQ ID NO: 24851 - DNA, 20 bp, synthetic construct
  misc_feature 1..20: note = chemically synthesized
  source 1..20: mol_type = other DNA
agtatgtgctggcttgatga

SEQ ID NO: 24852 - DNA, 20 bp, synthetic construct
  misc_feature 1..20: note = chemically synthesized
  source 1..20: mol_type = other DNA
gtatgtgctggcttgatgac

SEQ ID NO: 24853 - DNA, 20 bp, synthetic construct
  misc_feature 1..20: note = chemically synthesized
  source 1..20: mol_type = other DNA
gctggcttgatgacaggatg

SEQ ID NO: 24854 - DNA, 20 bp, synthetic construct
  misc_feature 1..20: note = chemically synthesized
  source 1..20: mol_type = other DNA
ttgatgacaggatgaagttt

SEQ ID NO: 24855 - DNA, 20 bp, synthetic construct
  misc_feature 1..20: note = chemically synthesized
  source 1..20: mol_type = other DNA
tttaagttgctaaccattct

SEQ ID NO: 24856 - DNA, 20 bp, synthetic construct
  misc_feature 1..20: note = chemically synthesized
  source 1..20: mol_type = other DNA
taagttgctaaccattctta

SEQ ID NO: 24857 - DNA, 20 bp, synthetic construct
  misc_feature 1..20: note = chemically synthesized
  source 1..20: mol_type = other DNA
aagttgctaaccattcttag

SEQ ID NO: 24858 - DNA, 20 bp, synthetic construct
  misc_feature 1..20: note = chemically synthesized
  source 1..20: mol_type = other DNA
gaggaactctgcttacctct

SEQ ID NO: 24859 - DNA, 20 bp, synthetic construct
  misc_feature 1..20: note = chemically synthesized
  source 1..20: mol_type = other DNA
aggaactctgcttacctctt

SEQ ID NO: 24860 - DNA, 20 bp, synthetic construct
  misc_feature 1..20: note = chemically synthesized
  source 1..20: mol_type = other DNA
tgcttacctcttgggttctg

SEQ ID NO: 24861 - DNA, 20 bp, synthetic construct
  misc_feature 1..20: note = chemically synthesized
  source 1..20: mol_type = other DNA
gcttacctcttgggttctga

SEQ ID NO: 24862 - DNA, 20 bp, synthetic construct
  misc_feature 1..20: note = chemically synthesized
  source 1..20: mol_type = other DNA
cttacctcttgggttctgaa

SEQ ID NO: 24863 - DNA, 20 bp, synthetic construct
  misc_feature 1..20: note = chemically synthesized
  source 1..20: mol_type = other DNA
ttctgaagggtctgactgac

SEQ ID NO: 24864 - DNA, 20 bp, synthetic construct
  misc_feature 1..20: note = chemically synthesized
  source 1..20: mol_type = other DNA
ctgaagggtctgactgacca

SEQ ID NO: 24865 - DNA, 20 bp, synthetic construct
  misc_feature 1..20: note = chemically synthesized
  source 1..20: mol_type = other DNA
gaagggtctgactgaccaga

SEQ ID NO: 24866 - DNA, 20 bp, synthetic construct
  misc_feature 1..20: note = chemically synthesized
  source 1..20: mol_type = other DNA
aagggtctgactgaccagag

SEQ ID NO: 24867 - DNA, 20 bp, synthetic construct
  misc_feature 1..20: note = chemically synthesized
  source 1..20: mol_type = other DNA
tgactgaccagagaggcatg

SEQ ID NO: 24868 - DNA, 20 bp, synthetic construct
  misc_feature 1..20: note = chemically synthesized
  source 1..20: mol_type = other DNA
gactgaccagagaggcatga

SEQ ID NO: 24869 - DNA, 20 bp, synthetic construct
  misc_feature 1..20: note = chemically synthesized
  source 1..20: mol_type = other DNA
actgaccagagaggcatgaa

SEQ ID NO: 24870 - DNA, 20 bp, synthetic construct
  misc_feature 1..20: note = chemically synthesized
  source 1..20: mol_type = other DNA
ctgaccagagaggcatgaag

SEQ ID NO: 24871 - DNA, 20 bp, synthetic construct
  misc_feature 1..20: note = chemically synthesized
  source 1..20: mol_type = other DNA
tgaccagagaggcatgaagg

SEQ ID NO: 24872 - DNA, 20 bp, synthetic construct
  misc_feature 1..20: note = chemically synthesized
  source 1..20: mol_type = other DNA
ccagagaggcatgaaggggg

SEQ ID NO: 24873 - DNA, 20 bp, synthetic construct
  misc_feature 1..20: note = chemically synthesized
  source 1..20: mol_type = other DNA
cagagaggcatgaagggggc

SEQ ID NO: 24874 - DNA, 20 bp, synthetic construct
  misc_feature 1..20: note = chemically synthesized
  source 1..20: mol_type = other DNA
aggcatgaagggggcaggct

SEQ ID NO: 24875 - DNA, 20 bp, synthetic construct
  misc_feature 1..20: note = chemically synthesized
  source 1..20: mol_type = other DNA
ggcaggctcagcatgatcac

SEQ ID NO: 24876 - DNA, 20 bp, synthetic construct
  misc_feature 1..20: note = chemically synthesized
  source 1..20: mol_type = other DNA
tcagcatgatcaccagcact

SEQ ID NO: 24877 - DNA, 20 bp, synthetic construct
  misc_feature 1..20: note = chemically synthesized
  source 1..20: mol_type = other DNA
actgagaaccacacaaactg

SEQ ID NO: 24878 - DNA, 20 bp, synthetic construct
  misc_feature 1..20: note = chemically synthesized
  source 1..20: mol_type = other DNA
cacacaaactgaagaactgc

SEQ ID NO: 24879 - DNA, 20 bp, synthetic construct
  misc_feature 1..20: note = chemically synthesized
  source 1..20: mol_type = other DNA
acacaaactgaagaactgct

SEQ ID NO: 24880 - DNA, 20 bp, synthetic construct
  misc_feature 1..20: note = chemically synthesized
  source 1..20: mol_type = other DNA
actgaagaactgctaggtgc

SEQ ID NO: 24881 - DNA, 20 bp, synthetic construct
  misc_feature 1..20: note = chemically synthesized
  source 1..20: mol_type = other DNA
aagaactgctaggtgctggc

SEQ ID NO: 24882 - DNA, 20 bp, synthetic construct
  misc_feature 1..20: note = chemically synthesized
  source 1..20: mol_type = other DNA
aactgctaggtgctggctag

SEQ ID NO: 24883 - DNA, 20 bp, synthetic construct
  misc_feature 1..20: note = chemically synthesized
  source 1..20: mol_type = other DNA
actgctaggtgctggctagt

SEQ ID NO: 24884 - DNA, 20 bp, synthetic construct
  misc_feature 1..20: note = chemically synthesized
  source 1..20: mol_type = other DNA
tgctaggtgctggctagtgg

SEQ ID NO: 24885 - DNA, 20 bp, synthetic construct
  misc_feature 1..20: note = chemically synthesized
  source 1..20: mol_type = other DNA
tgctggctagtgggagactt

SEQ ID NO: 24886 - DNA, 20 bp, synthetic construct
  misc_feature 1..20: note = chemically synthesized
  source 1..20: mol_type = other DNA
aagaccaaccaaccacccta

SEQ ID NO: 24887 - DNA, 20 bp, synthetic construct
  misc_feature 1..20: note = chemically synthesized
  source 1..20: mol_type = other DNA
gaccaaccaaccaccctatg

SEQ ID NO: 24888 - DNA, 20 bp, synthetic construct
  misc_feature 1..20: note = chemically synthesized
  source 1..20: mol_type = other DNA
caaccaaccaccctatggag

SEQ ID NO: 24889 - DNA, 20 bp, synthetic construct
  misc_feature 1..20: note = chemically synthesized
  source 1..20: mol_type = other DNA
caaccaccctatggagcagc

SEQ ID NO: 24890 - DNA, 20 bp, synthetic construct
  misc_feature 1..20: note = chemically synthesized
  source 1..20: mol_type = other DNA
aaccaccctatggagcagcc

SEQ ID NO: 24891 - DNA, 20 bp, synthetic construct
  misc_feature 1..20: note = chemically synthesized
  source 1..20: mol_type = other DNA
ctatggagcagccaggtaat

SEQ ID NO: 24892 - DNA, 20 bp, synthetic construct
  misc_feature 1..20: note = chemically synthesized
  source 1..20: mol_type = other DNA
agccaggtaatcagcatgtt

SEQ ID NO: 24893 - DNA, 20 bp, synthetic construct
  misc_feature 1..20: note = chemically synthesized
  source 1..20: mol_type = other DNA
gccaggtaatcagcatgttt

SEQ ID NO: 24894 - DNA, 20 bp, synthetic construct
  misc_feature 1..20: note = chemically synthesized
  source 1..20: mol_type = other DNA
ccaggtaatcagcatgtttg

SEQ ID NO: 24895 - DNA, 20 bp, synthetic construct
  misc_feature 1..20: note = chemically synthesized
  source 1..20: mol_type = other DNA
caggtaatcagcatgtttgg

SEQ ID NO: 24896 - DNA, 20 bp, synthetic construct
  misc_feature 1..20: note = chemically synthesized
  source 1..20: mol_type = other DNA
gcatgtttgggggctgttaa

SEQ ID NO: 24897 - DNA, 20 bp, synthetic construct
  misc_feature 1..20: note = chemically synthesized
  source 1..20: mol_type = other DNA
tgtttgggggctgttaatgg

SEQ ID NO: 24898 - DNA, 20 bp, synthetic construct
  misc_feature 1..20: note = chemically synthesized
  source 1..20: mol_type = other DNA
tttgggggctgttaatggaa

SEQ ID NO: 24899 - DNA, 20 bp, synthetic construct
  misc_feature 1..20: note = chemically synthesized
  source 1..20: mol_type = other DNA
ctgttaatggaagagttgct

SEQ ID NO: 24900 - DNA, 20 bp, synthetic construct
  misc_feature 1..20: note = chemically synthesized
  source 1..20: mol_type = other DNA
tgttaatggaagagttgctg

SEQ ID NO: 24901 - DNA, 20 bp, synthetic construct
  misc_feature 1..20: note = chemically synthesized
  source 1..20: mol_type = other DNA
gttaatggaagagttgctga

SEQ ID NO: 24902 - DNA, 20 bp, synthetic construct
  misc_feature 1..20: note = chemically synthesized
  source 1..20: mol_type = other DNA
ttaatggaagagttgctgag

SEQ ID NO: 24903 - DNA, 20 bp, synthetic construct
  misc_feature 1..20: note = chemically synthesized
  source 1..20: mol_type = other DNA
gaggggtatgcttacttgtc

SEQ ID NO: 24904 - DNA, 20 bp, synthetic construct
  misc_feature 1..20: note = chemically synthesized
  source 1..20: mol_type = other DNA
ttgtccagttgtgtgtgact

SEQ ID NO: 24905 - DNA, 20 bp, synthetic construct
  misc_feature 1..20: note = chemically synthesized
  source 1..20: mol_type = other DNA
gtccagttgtgtgtgactta

SEQ ID NO: 24906 - DNA, 20 bp, synthetic construct
  misc_feature 1..20: note = chemically synthesized
  source 1..20: mol_type = other DNA
tccagttgtgtgtgacttag

SEQ ID NO: 24907 - DNA, 20 bp, synthetic construct
  misc_feature 1..20: note = chemically synthesized
  source 1..20: mol_type = other DNA
gtgtgacttagaggtgaacc

SEQ ID NO: 24908 - DNA, 20 bp, synthetic construct
  misc_feature 1..20: note = chemically synthesized
  source 1..20: mol_type = other DNA
tgacttagaggtgaacccag

SEQ ID NO: 24909 - DNA, 20 bp, synthetic construct
  misc_feature 1..20: note = chemically synthesized
  source 1..20: mol_type = other DNA
gacttagaggtgaacccagt

SEQ ID NO: 24910 - DNA, 20 bp, synthetic construct
  misc_feature 1..20: note = chemically synthesized
  source 1..20: mol_type = other DNA
gtgaacccagtgggcaaaat

SEQ ID NO: 24911 - DNA, 20 bp, synthetic construct
  misc_feature 1..20: note = chemically synthesized
  source 1..20: mol_type = other DNA
ccagtgggcaaaataagaaa

SEQ ID NO: 24912 - DNA, 20 bp, synthetic construct
  misc_feature 1..20: note = chemically synthesized
  source 1..20: mol_type = other DNA
aaaataagaaacagtatgtg

SEQ ID NO: 24913 - DNA, 20 bp, synthetic construct
  misc_feature 1..20: note = chemically synthesized
  source 1..20: mol_type = other DNA
aataagaaacagtatgtgaa

SEQ ID NO: 24914 - DNA, 20 bp, synthetic construct
  misc_feature 1..20: note = chemically synthesized
  source 1..20: mol_type = other DNA
ataagaaacagtatgtgaag

SEQ ID NO: 24915 - DNA, 20 bp, synthetic construct
  misc_feature 1..20: note = chemically synthesized
  source 1..20: mol_type = other DNA
gaaacagtatgtgaagagga

SEQ ID NO: 24916 - DNA, 20 bp, synthetic construct
  misc_feature 1..20: note = chemically synthesized
  source 1..20: mol_type = other DNA
aacagtatgtgaagaggata

SEQ ID NO: 24917 - DNA, 20 bp, synthetic construct
  misc_feature 1..20: note = chemically synthesized
  source 1..20: mol_type = other DNA
gtatgtgaagaggatagagc

SEQ ID NO: 24918 - DNA, 20 bp, synthetic construct
  misc_feature 1..20: note = chemically synthesized
  source 1..20: mol_type = other DNA
aagaggatagagcaagcctt

SEQ ID NO: 24919 - DNA, 20 bp, synthetic construct
  misc_feature 1..20: note = chemically synthesized
  source 1..20: mol_type = other DNA
aggatagagcaagccttaag

SEQ ID NO: 24920 - DNA, 20 bp, synthetic construct
  misc_feature 1..20: note = chemically synthesized
  source 1..20: mol_type = other DNA
ggatagagcaagccttaagt

SEQ ID NO: 24921 - DNA, 20 bp, synthetic construct
  misc_feature 1..20: note = chemically synthesized
  source 1..20: mol_type = other DNA
tagagcaagccttaagtagg

SEQ ID NO: 24922 - DNA, 20 bp, synthetic construct
  misc_feature 1..20: note = chemically synthesized
  source 1..20: mol_type = other DNA
caagccttaagtaggaagtt

SEQ ID NO: 24923 - DNA, 20 bp, synthetic construct
  misc_feature 1..20: note = chemically synthesized
  source 1..20: mol_type = other DNA
aagccttaagtaggaagtta

SEQ ID NO: 24924 - DNA, 20 bp, synthetic construct
  misc_feature 1..20: note = chemically synthesized
  source 1..20: mol_type = other DNA
ttaagtaggaagttaaggat

SEQ ID NO: 24925 - DNA, 20 bp, synthetic construct
  misc_feature 1..20: note = chemically synthesized
  source 1..20: mol_type = other DNA
taagtaggaagttaaggatg

SEQ ID NO: 24926 - DNA, 20 bp, synthetic construct
  misc_feature 1..20: note = chemically synthesized
  source 1..20: mol_type = other DNA
aagtaggaagttaaggatga

SEQ ID NO: 24927 - DNA, 20 bp, synthetic construct
  misc_feature 1..20: note = chemically synthesized
  source 1..20: mol_type = other DNA
gaagttaaggatgagggaaa

SEQ ID NO: 24928 - DNA, 20 bp, synthetic construct
  misc_feature 1..20: note = chemically synthesized
  source 1..20: mol_type = other DNA
aagttaaggatgagggaaac

SEQ ID NO: 24929 - DNA, 20 bp, synthetic construct
  misc_feature 1..20: note = chemically synthesized
  source 1..20: mol_type = other DNA
ttaaggatgagggaaacagg

SEQ ID NO: 24930 - DNA, 20 bp, synthetic construct
  misc_feature 1..20: note = chemically synthesized
  source 1..20: mol_type = other DNA
taaggatgagggaaacagga

SEQ ID NO: 24931 - DNA, 20 bp, synthetic construct
  misc_feature 1..20: note = chemically synthesized
  source 1..20: mol_type = other DNA
agggaaacaggaaggaaaat

SEQ ID NO: 24932 - DNA, 20 bp, synthetic construct
  misc_feature 1..20: note = chemically synthesized
  source 1..20: mol_type = other DNA
gaaacaggaaggaaaatcag

SEQ ID NO: 24933 - DNA, 20 bp, synthetic construct
  misc_feature 1..20: note = chemically synthesized
  source 1..20: mol_type = other DNA
aaacaggaaggaaaatcagt

SEQ ID NO: 24934 - DNA, 20 bp, synthetic construct
  misc_feature 1..20: note = chemically synthesized
  source 1..20: mol_type = other DNA
aggaaggaaaatcagtagga

SEQ ID NO: 24935 - DNA, 20 bp, synthetic construct
  misc_feature 1..20: note = chemically synthesized
  source 1..20: mol_type = other DNA
ggaaaatcagtaggaaagta

SEQ ID NO: 24936 - DNA, 20 bp, synthetic construct
  misc_feature 1..20: note = chemically synthesized
  source 1..20: mol_type = other DNA
aaatcagtaggaaagtatag

SEQ ID NO: 24937 - DNA, 20 bp, synthetic construct
  misc_feature 1..20: note = chemically synthesized
  source 1..20: mol_type = other DNA
gtaggaaagtatagaagaca

SEQ ID NO: 24938 - DNA, 20 bp, synthetic construct
  misc_feature 1..20: note = chemically synthesized
  source 1..20: mol_type = other DNA
taggaaagtatagaagacaa

SEQ ID NO: 24939 - DNA, 20 bp, synthetic construct
  misc_feature 1..20: note = chemically synthesized
  source 1..20: mol_type = other DNA
ggaaagtatagaagacaaag

SEQ ID NO: 24940 - DNA, 20 bp, synthetic construct
  misc_feature 1..20: note = chemically synthesized
  source 1..20: mol_type = other DNA
agtatagaagacaaaggaga

SEQ ID NO: 24941 - DNA, 20 bp, synthetic construct
  misc_feature 1..20: note = chemically synthesized
  source 1..20: mol_type = other DNA
gtatagaagacaaaggagaa

SEQ ID NO: 24942 - DNA, 20 bp, synthetic construct
  misc_feature 1..20: note = chemically synthesized
  source 1..20: mol_type = other DNA
tatagaagacaaaggagaaa

SEQ ID NO: 24943 - DNA, 20 bp, synthetic construct
  misc_feature 1..20: note = chemically synthesized
  source 1..20: mol_type = other DNA
gaagacaaaggagaaagggc

SEQ ID NO: 24944 - DNA, 20 bp, synthetic construct
  misc_feature 1..20: note = chemically synthesized
  source 1..20: mol_type = other DNA
agacaaaggagaaagggcca

SEQ ID NO: 24945 - DNA, 20 bp, synthetic construct
  misc_feature 1..20: note = chemically synthesized
  source 1..20: mol_type = other DNA
aggagaaagggccagagaaa

SEQ ID NO: 24946 - DNA, 20 bp, synthetic construct
  misc_feature 1..20: note = chemically synthesized
  source 1..20: mol_type = other DNA
agaaagggccagagaaacag

SEQ ID NO: 24947 - DNA, 20 bp, synthetic construct
  misc_feature 1..20: note = chemically synthesized
  source 1..20: mol_type = other DNA
gaaagggccagagaaacaga

SEQ ID NO: 24948 - DNA, 20 bp, synthetic construct
  misc_feature 1..20: note = chemically synthesized
  source 1..20: mol_type = other DNA
agggccagagaaacagaagg

SEQ ID NO: 24949 - DNA, 20 bp, synthetic construct
  misc_feature 1..20: note = chemically synthesized
  source 1..20: mol_type = other DNA
aacagaaggaagaatctgaa

SEQ ID NO: 24950 - DNA, 20 bp, synthetic construct
  misc_feature 1..20: note = chemically synthesized
  source 1..20: mol_type = other DNA
acagaaggaagaatctgaaa

SEQ ID NO: 24951 - DNA, 20 bp, synthetic construct
  misc_feature 1..20: note = chemically synthesized
  source 1..20: mol_type = other DNA
agaaggaagaatctgaaaag

SEQ ID NO: 24952 - DNA, 20 bp, synthetic construct
  misc_feature 1..20: note = chemically synthesized
  source 1..20: mol_type = other DNA
aagaatctgaaaaggagctc

SEQ ID NO: 24953 - DNA, 20 bp, synthetic construct
  misc_feature 1..20: note = chemically synthesized
  source 1..20: mol_type = other DNA
agaatctgaaaaggagctca

SEQ ID NO: 24954 - DNA, 20 bp, synthetic construct
  misc_feature 1..20: note = chemically synthesized
  source 1..20: mol_type = other DNA
gaatctgaaaaggagctcaa

SEQ ID NO: 24955 - DNA, 20 bp, synthetic construct
  misc_feature 1..20: note = chemically synthesized
  source 1..20: mol_type = other DNA
tctgaaaaggagctcaaggg

SEQ ID NO: 24956 - DNA, 20 bp, synthetic construct
  misc_feature 1..20: note = chemically synthesized
  source 1..20: mol_type = other DNA
ctgaaaaggagctcaaggga

SEQ ID NO: 24957 - DNA, 20 bp, synthetic construct
  misc_feature 1..20: note = chemically synthesized
  source 1..20: mol_type = other DNA
ctcaagggaaggttcctctg

SEQ ID NO: 24958 - DNA, 20 bp, synthetic construct
  misc_feature 1..20: note = chemically synthesized
  source 1..20: mol_type = other DNA
tcaagggaaggttcctctgt

SEQ ID NO: 24959 - DNA, 20 bp, synthetic construct
  misc_feature 1..20: note = chemically synthesized
  source 1..20: mol_type = other DNA
agggaaggttcctctgtggg

SEQ ID NO: 24960 - DNA, 20 bp, synthetic construct
  misc_feature 1..20: note = chemically synthesized
  source 1..20: mol_type = other DNA
cctctgtgggtagcctgtta

SEQ ID NO: 24961 - DNA, 20 bp, synthetic construct
  misc_feature 1..20: note = chemically synthesized
  source 1..20: mol_type = other DNA
gtgggtagcctgttaaagaa

SEQ ID NO: 24962 - DNA, 20 bp, synthetic construct
  misc_feature 1..20: note = chemically synthesized
  source 1..20: mol_type = other DNA
tgggtagcctgttaaagaaa

SEQ ID NO: 24963 - DNA, 20 bp, synthetic construct
  misc_feature 1..20: note = chemically synthesized
  source 1..20: mol_type = other DNA
ttaaagaaaaggctacatta

SEQ ID NO: 24964 - DNA, 20 bp, synthetic construct
  misc_feature 1..20: note = chemically synthesized
  source 1..20: mol_type = other DNA
cagactcatgcctgtaatcc

SEQ ID NO: 24965 - DNA, 20 bp, synthetic construct
  misc_feature 1..20: note = chemically synthesized
  source 1..20: mol_type = other DNA
tgcctgtaatcccagcactt

SEQ ID NO: 24966 - DNA, 20 bp, synthetic construct
  misc_feature 1..20: note = chemically synthesized
  source 1..20: mol_type = other DNA
gcctgtaatcccagcacttt

SEQ ID NO: 24967 - DNA, 20 bp, synthetic construct
  misc_feature 1..20: note = chemically synthesized
  source 1..20: mol_type = other DNA
tgtaatcccagcactttggg

SEQ ID NO: 24968 - DNA, 20 bp, synthetic construct
  misc_feature 1..20: note = chemically synthesized
  source 1..20: mol_type = other DNA
tcccagcactttgggtggct

SEQ ID NO: 24969 - DNA, 20 bp, synthetic construct
  misc_feature 1..20: note = chemically synthesized
  source 1..20: mol_type = other DNA
cccagcactttgggtggctg

SEQ ID NO: 24970 - DNA, 20 bp, synthetic construct
  misc_feature 1..20: note = chemically synthesized
  source 1..20: mol_type = other DNA
agcactttgggtggctgagg

SEQ ID NO: 24971 - DNA, 20 bp, synthetic construct
  misc_feature 1..20: note = chemically synthesized
  source 1..20: mol_type = other DNA
gcactttgggtggctgaggc

SEQ ID NO: 24972 - DNA, 20 bp, synthetic construct
  misc_feature 1..20: note = chemically synthesized
  source 1..20: mol_type = other DNA
actttgggtggctgaggcag

SEQ ID NO: 24973 - DNA, 20 bp, synthetic construct
  misc_feature 1..20: note = chemically synthesized
  source 1..20: mol_type = other DNA
ctttgggtggctgaggcagg

SEQ ID NO: 24974 - DNA, 20 bp, synthetic construct
  misc_feature 1..20: note = chemically synthesized
  source 1..20: mol_type = other DNA
ctgaggcaggaggatcacct

SEQ ID NO: 24975 - DNA, 20 bp, synthetic construct
  misc_feature 1..20: note = chemically synthesized
  source 1..20: mol_type = other DNA
tgaggcaggaggatcacctg

SEQ ID NO: 24976 - DNA, 20 bp, synthetic construct
  misc_feature 1..20: note = chemically synthesized
  source 1..20: mol_type = other DNA
gaggcaggaggatcacctga

SEQ ID NO: 24977 - DNA, 20 bp, synthetic construct
  misc_feature 1..20: note = chemically synthesized
  source 1..20: mol_type = other DNA
caggaggatcacctgagggc

SEQ ID NO: 24978 - DNA, 20 bp, synthetic construct
  misc_feature 1..20: note = chemically synthesized
  source 1..20: mol_type = other DNA
ggaggatcacctgagggcaa

SEQ ID NO: 24979 - DNA, 20 bp, synthetic construct
  misc_feature 1..20: note = chemically synthesized
  source 1..20: mol_type = other DNA
tcacctgagggcaagagttc

SEQ ID NO: 24980 - DNA, 20 bp, synthetic construct
  misc_feature 1..20: note = chemically synthesized
  source 1..20: mol_type = other DNA
tgagggcaagagttcgagac

SEQ ID NO: 24981 - DNA, 20 bp, synthetic construct
  misc_feature 1..20: note = chemically synthesized
  source 1..20: mol_type = other DNA
cgagaccagcctgaccaaca

SEQ ID NO: 24982 - DNA, 20 bp, synthetic construct
  misc_feature 1..20: note = chemically synthesized
  source 1..20: mol_type = other DNA
taataaaaatacaaaaaaat

SEQ ID NO: 24983 - DNA, 20 bp, synthetic construct
  misc_feature 1..20: note = chemically synthesized
  source 1..20: mol_type = other DNA
taaaaatacaaaaaaattag

SEQ ID NO: 24984 - DNA, 20 bp, synthetic construct
  misc_feature 1..20: note = chemically synthesized
  source 1..20: mol_type = other DNA
aaaaatacaaaaaaattagc

SEQ ID NO: 24985 - DNA, 20 bp, synthetic construct
  misc_feature 1..20: note = chemically synthesized
  source 1..20: mol_type = other DNA
aaaatacaaaaaaattagca

SEQ ID NO: 24986 - DNA, 20 bp, synthetic construct
  misc_feature 1..20: note = chemically synthesized
  source 1..20: mol_type = other DNA
acaaaaaaattagcagggcc

SEQ ID NO: 24987 - DNA, 20 bp, synthetic construct
  misc_feature 1..20: note = chemically synthesized
  source 1..20: mol_type = other DNA
aaaaaattagcagggcctgg

SEQ ID NO: 24988 - DNA, 20 bp, synthetic construct
  misc_feature 1..20: note = chemically synthesized
  source 1..20: mol_type = other DNA
aaattagcagggcctggtgg

SEQ ID NO: 24989 - DNA, 20 bp, synthetic construct
  misc_feature 1..20: note = chemically synthesized
  source 1..20: mol_type = other DNA
gtggcagatgcctgtaattg

SEQ ID NO: 24990 - DNA, 20 bp, synthetic construct
  misc_feature 1..20: note = chemically synthesized
  source 1..20: mol_type = other DNA
tgcctgtaattgcagctaca

SEQ ID NO: 24991 - DNA, 20 bp, synthetic construct
  misc_feature 1..20: note = chemically synthesized
  source 1..20: mol_type = other DNA
gcctgtaattgcagctacac

SEQ ID NO: 24992 - DNA, 20 bp, synthetic construct
  misc_feature 1..20: note = chemically synthesized
  source 1..20: mol_type = other DNA
ctgtaattgcagctacacag

SEQ ID NO: 24993 - DNA, 20 bp, synthetic construct
  misc_feature 1..20: note = chemically synthesized
  source 1..20: mol_type = other DNA
tgtaattgcagctacacagg

SEQ ID NO: 24994 - DNA, 20 bp, synthetic construct
  misc_feature 1..20: note = chemically synthesized
  source 1..20: mol_type = other DNA
ttgcagctacacaggaggct

SEQ ID NO: 24995 - DNA, 20 bp, synthetic construct
  misc_feature 1..20: note = chemically synthesized
  source 1..20: mol_type = other DNA
tgcagctacacaggaggctg

SEQ ID NO: 24996 - DNA, 20 bp, synthetic construct
  misc_feature 1..20: note = chemically synthesized
  source 1..20: mol_type = other DNA
agctacacaggaggctgagg

SEQ ID NO: 24997 - DNA, 20 bp, synthetic construct
  misc_feature 1..20: note = chemically synthesized
  source 1..20: mol_type = other DNA
gctacacaggaggctgaggt

SEQ ID NO: 24998 - DNA, 20 bp, synthetic construct
  misc_feature 1..20: note = chemically synthesized
  source 1..20: mol_type = other DNA
tacacaggaggctgaggtag

SEQ ID NO: 24999 - DNA, 20 bp, synthetic construct
  misc_feature 1..20: note = chemically synthesized
  source 1..20: mol_type = other DNA
gtaggagaatcgcttgaacc

SEQ ID NO: 25000 - DNA, 20 bp, synthetic construct
  misc_feature 1..20: note = chemically synthesized
  source 1..20: mol_type = other DNA
taggagaatcgcttgaacct

SEQ ID NO: 25001 - DNA, 20 bp, synthetic construct
  misc_feature 1..20: note = chemically synthesized
  source 1..20: mol_type = other DNA
ggagaatcgcttgaacctgg

SEQ ID NO: 25002 - DNA, 20 bp, synthetic construct
  misc_feature 1..20: note = chemically synthesized
  source 1..20: mol_type = other DNA
gagaatcgcttgaacctggg

SEQ ID NO: 25003 - DNA, 20 bp, synthetic construct
  misc_feature 1..20: note = chemically synthesized
  source 1..20: mol_type = other DNA
aatcgcttgaacctgggagg

SEQ ID NO: 25004 - DNA, 20 bp, synthetic construct
  misc_feature 1..20: note = chemically synthesized
  source 1..20: mol_type = other DNA
tcgcttgaacctgggaggcg

SEQ ID NO: 25005 - DNA, 20 bp, synthetic construct
  misc_feature 1..20: note = chemically synthesized
  source 1..20: mol_type = other DNA
cgcttgaacctgggaggcgg

SEQ ID NO: 25006 - DNA, 20 bp, synthetic construct
  misc_feature 1..20: note = chemically synthesized
  source 1..20: mol_type = other DNA
aacctgggaggcggaggttg

SEQ ID NO: 25007 - DNA, 20 bp, synthetic construct
  misc_feature 1..20: note = chemically synthesized
  source 1..20: mol_type = other DNA
tgggaggcggaggttgcagt

SEQ ID NO: 25008 - DNA, 20 bp, synthetic construct
  misc_feature 1..20: note = chemically synthesized
  source 1..20: mol_type = other DNA
ggcggaggttgcagtgagcc

SEQ ID NO: 25009 - DNA, 20 bp, synthetic construct
  misc_feature 1..20: note = chemically synthesized
  source 1..20: mol_type = other DNA
gagatcgcgccattgcactc

SEQ ID NO: 25010 - DNA, 20 bp, synthetic construct
  misc_feature 1..20: note = chemically synthesized
  source 1..20: mol_type = other DNA
atcgcgccattgcactccag

SEQ ID NO: 25011 - DNA, 20 bp, synthetic construct
  misc_feature 1..20: note = chemically synthesized
  source 1..20: mol_type = other DNA
gccattgcactccagcagcc

SEQ ID NO: 25012 - DNA, 20 bp, synthetic construct
  misc_feature 1..20: note = chemically synthesized
  source 1..20: mol_type = other DNA
attgcactccagcagcctgg

SEQ ID NO: 25013 - DNA, 20 bp, synthetic construct
  misc_feature 1..20: note = chemically synthesized
  source 1..20: mol_type = other DNA
ttgcactccagcagcctgga

SEQ ID NO: 25014 - DNA, 20 bp, synthetic construct
  misc_feature 1..20: note = chemically synthesized
  source 1..20: mol_type = other DNA
tccagcagcctggaaggcaa

SEQ ID NO: 25015 - DNA, 20 bp, synthetic construct
  misc_feature 1..20: note = chemically synthesized
  source 1..20: mol_type = other DNA
gcagcctggaaggcaaaagc

SEQ ID NO: 25016 - DNA, 20 bp, synthetic construct
  misc_feature 1..20: note = chemically synthesized
  source 1..20: mol_type = other DNA
ctggaaggcaaaagcaagat

SEQ ID NO: 25017 - DNA, 20 bp, synthetic construct
  misc_feature 1..20: note = chemically synthesized
  source 1..20: mol_type = other DNA
aaggcaaaagcaagatgaga

SEQ ID NO: 25018 - DNA, 20 bp, synthetic construct
  misc_feature 1..20: note = chemically synthesized
  source 1..20: mol_type = other DNA
aaagcaagatgagaaagaaa

SEQ ID NO: 25019 - DNA, 20 bp, synthetic construct
  misc_feature 1..20: note = chemically synthesized
  source 1..20: mol_type = other DNA
agcaagatgagaaagaaata

SEQ ID NO: 25020 - DNA, 20 bp, synthetic construct
  misc_feature 1..20: note = chemically synthesized
  source 1..20: mol_type = other DNA
agatgagaaagaaatagaga

SEQ ID NO: 25021 - DNA, 20 bp, synthetic construct
  misc_feature 1..20: note = chemically synthesized
  source 1..20: mol_type = other DNA
atgagaaagaaatagagaaa

SEQ ID NO: 25022 - DNA, 20 bp, synthetic construct
  misc_feature 1..20: note = chemically synthesized
  source 1..20: mol_type = other DNA
gagaaagaaatagagaaaga

SEQ ID NO: 25023 - DNA, 20 bp, synthetic construct
  misc_feature 1..20: note = chemically synthesized
  source 1..20: mol_type = other DNA
gaaagaaatagagaaagaga

SEQ ID NO: 25024 - DNA, 20 bp, synthetic construct
  misc_feature 1..20: note = chemically synthesized
  source 1..20: mol_type = other DNA
aagaaatagagaaagagaga

SEQ ID NO: 25025 - DNA, 20 bp, synthetic construct
  misc_feature 1..20: note = chemically synthesized
  source 1..20: mol_type = other DNA
agaaatagagaaagagagag

SEQ ID NO: 25026 - DNA, 20 bp, synthetic construct
  misc_feature 1..20: note = chemically synthesized
  source 1..20: mol_type = other DNA
aatagagaaagagagagagg

SEQ ID NO: 25027 - DNA, 20 bp, synthetic construct
  misc_feature 1..20: note = chemically synthesized
  source 1..20: mol_type = other DNA
atagagaaagagagagaggt

SEQ ID NO: 25028 - DNA, 20 bp, synthetic construct
  misc_feature 1..20: note = chemically synthesized
  source 1..20: mol_type = other DNA
tagagaaagagagagaggta

SEQ ID NO: 25029 - DNA, 20 bp, synthetic construct
  misc_feature 1..20: note = chemically synthesized
  source 1..20: mol_type = other DNA
gagaaagagagagaggtagg

SEQ ID NO: 25030 - DNA, 20 bp, synthetic construct
  misc_feature 1..20: note = chemically synthesized
  source 1..20: mol_type = other DNA
agaaagagagagaggtaggg

SEQ ID NO: 25031 - DNA, 20 bp, synthetic construct
  misc_feature 1..20: note = chemically synthesized
  source 1..20: mol_type = other DNA
gaaagagagagaggtaggga

SEQ ID NO: 25032 - DNA, 20 bp, synthetic construct
  misc_feature 1..20: note = chemically synthesized
  source 1..20: mol_type = other DNA
aagagagagaggtagggagg

SEQ ID NO: 25033 - DNA, 20 bp, synthetic construct
  misc_feature 1..20: note = chemically synthesized
  source 1..20: mol_type = other DNA
agagagagaggtagggaggg

SEQ ID NO: 25034 - DNA, 20 bp, synthetic construct
  misc_feature 1..20: note = chemically synthesized
  source 1..20: mol_type = other DNA
gagagaggtagggagggagg

SEQ ID NO: 25035 - DNA, 20 bp, synthetic construct
  misc_feature 1..20: note = chemically synthesized
  source 1..20: mol_type = other DNA
agagaggtagggagggagga

SEQ ID NO: 25036 - DNA, 20 bp, synthetic construct
  misc_feature 1..20: note = chemically synthesized
  source 1..20: mol_type = other DNA
gaggtagggagggaggaagg

SEQ ID NO: 25037 - DNA, 20 bp, synthetic construct
  misc_feature 1..20: note = chemically synthesized
  source 1..20: mol_type = other DNA
aggtagggagggaggaagga

SEQ ID NO: 25038 - DNA, 20 bp, synthetic construct
  misc_feature 1..20: note = chemically synthesized
  source 1..20: mol_type = other DNA
ggtagggagggaggaaggaa

SEQ ID NO: 25039 - DNA, 20 bp, synthetic construct
  misc_feature 1..20: note = chemically synthesized
  source 1..20: mol_type = other DNA
agggagggaggaaggaaggg

SEQ ID NO: 25040 - DNA, 20 bp, synthetic construct
  misc_feature 1..20: note = chemically synthesized
  source 1..20: mol_type = other DNA
gggagggaggaaggaaggga

SEQ ID NO: 25041 - DNA, 20 bp, synthetic construct
  misc_feature 1..20: note = chemically synthesized
  source 1..20: mol_type = other DNA
gggaggaaggaagggaagga

SEQ ID NO: 25042 - DNA, 20 bp, synthetic construct
  misc_feature 1..20: note = chemically synthesized
  source 1..20: mol_type = other DNA
ggaggaaggaagggaaggaa

SEQ ID NO: 25043 - DNA, 20 bp, synthetic construct
  misc_feature 1..20: note = chemically synthesized
  source 1..20: mol_type = other DNA
ggaaggaagggaaggaaagg

SEQ ID NO: 25044 - DNA, 20 bp, synthetic construct
  misc_feature 1..20: note = chemically synthesized
  source 1..20: mol_type = other DNA
gaaggaagggaaggaaagga

SEQ ID NO: 25045 - DNA, 20 bp, synthetic construct
  misc_feature 1..20: note = chemically synthesized
  source 1..20: mol_type = other DNA
ggaagggaaggaaaggaagg

SEQ ID NO: 25046 - DNA, 20 bp, synthetic construct
  misc_feature 1..20: note = chemically synthesized
  source 1..20: mol_type = other DNA
aagggaaggaaaggaaggaa

SEQ ID NO: 25047 - DNA, 20 bp, synthetic construct
  misc_feature 1..20: note = chemically synthesized
  source 1..20: mol_type = other DNA
ggaaggaaaggaaggaagag

SEQ ID NO: 25048 - DNA, 20 bp, synthetic construct
  misc_feature 1..20: note = chemically synthesized
  source 1..20: mol_type = other DNA
aggaaaggaaggaagagaag

SEQ ID NO: 25049 - DNA, 20 bp, synthetic construct
  misc_feature 1..20: note = chemically synthesized
  source 1..20: mol_type = other DNA
aaaggaaggaagagaagaag

SEQ ID NO: 25050 - DNA, 20 bp, synthetic construct
  misc_feature 1..20: note = chemically synthesized
  source 1..20: mol_type = other DNA
ggaaggaagagaagaagaag

SEQ ID NO: 25051 - DNA, 20 bp, synthetic construct
  misc_feature 1..20: note = chemically synthesized
  source 1..20: mol_type = other DNA
aggaagagaagaagaagaag

SEQ ID NO: 25052 - DNA, 20 bp, synthetic construct
  misc_feature 1..20: note = chemically synthesized
  source 1..20: mol_type = other DNA
ggaagagaagaagaagaaga

SEQ ID NO: 25053 - DNA, 20 bp, synthetic construct
  misc_feature 1..20: note = chemically synthesized
  source 1..20: mol_type = other DNA
aagagaagaagaagaagaag

SEQ ID NO: 25054 - DNA, 20 bp, synthetic construct
  misc_feature 1..20: note = chemically synthesized
  source 1..20: mol_type = other DNA
agaagaagaagaagaaggag

SEQ ID NO: 25055 - DNA, 20 bp, synthetic construct
  misc_feature 1..20: note = chemically synthesized
  source 1..20: mol_type = other DNA
gaagaagaagaagaaggaga

SEQ ID NO: 25056 - DNA, 20 bp, synthetic construct
  misc_feature 1..20: note = chemically synthesized
  source 1..20: mol_type = other DNA
agaagaagaagaaggagaag

SEQ ID NO: 25057 - DNA, 20 bp, synthetic construct
  misc_feature 1..20: note = chemically synthesized
  source 1..20: mol_type = other DNA
agaagaagaaggagaaggag

SEQ ID NO: 25058 - DNA, 20 bp, synthetic construct
  misc_feature 1..20: note = chemically synthesized
  source 1..20: mol_type = other DNA
agaaggagaaggagaagaaa

SEQ ID NO: 25059 - DNA, 20 bp, synthetic construct
  misc_feature 1..20: note = chemically synthesized
  source 1..20: mol_type = other DNA
aggagaaggagaagaaaaag

SEQ ID NO: 25060 - DNA, 20 bp, synthetic construct
  misc_feature 1..20: note = chemically synthesized
  source 1..20: mol_type = other DNA
gagaaggagaagaaaaagta

SEQ ID NO: 25061 - DNA, 20 bp, synthetic construct
  misc_feature 1..20: note = chemically synthesized
  source 1..20: mol_type = other DNA
agaaggagaagaaaaagtag

SEQ ID NO: 25062 - DNA, 20 bp, synthetic construct
  misc_feature 1..20: note = chemically synthesized
  source 1..20: mol_type = other DNA
aaggagaagaaaaagtagag

SEQ ID NO: 25063 - DNA, 20 bp, synthetic construct
  misc_feature 1..20: note = chemically synthesized
  source 1..20: mol_type = other DNA
aggagaagaaaaagtagagg

SEQ ID NO: 25064 - DNA, 20 bp, synthetic construct
  misc_feature 1..20: note = chemically synthesized
  source 1..20: mol_type = other DNA
gagaagaaaaagtagaggag

SEQ ID NO: 25065 - DNA, 20 bp, synthetic construct
  misc_feature 1..20: note = chemically synthesized
  source 1..20: mol_type = other DNA
agaagaaaaagtagaggagg

SEQ ID NO: 25066 - DNA, 20 bp, synthetic construct
  misc_feature 1..20: note = chemically synthesized
  source 1..20: mol_type = other DNA
gaaaaagtagaggaggagga

SEQ ID NO: 25067 - DNA, 20 bp, synthetic construct
  misc_feature 1..20: note = chemically synthesized
  source 1..20: mol_type = other DNA
aaaaagtagaggaggaggaa

SEQ ID NO: 25068 - DNA, 20 bp, synthetic construct
  misc_feature 1..20: note = chemically synthesized
  source 1..20: mol_type = other DNA
agtagaggaggaggaaagga

SEQ ID NO: 25069 - DNA, 20 bp, synthetic construct
  misc_feature 1..20: note = chemically synthesized
  source 1..20: mol_type = other DNA
gtagaggaggaggaaaggaa

SEQ ID NO: 25070 - DNA, 20 bp, synthetic construct
  misc_feature 1..20: note = chemically synthesized
  source 1..20: mol_type = other DNA
aggaggaggaaaggaaagga

SEQ ID NO: 25071 - DNA, 20 bp, synthetic construct
  misc_feature 1..20: note = chemically synthesized
  source 1..20: mol_type = other DNA
aggaggaaaggaaaggaaag

SEQ ID NO: 25072 - DNA, 20 bp, synthetic construct
  misc_feature 1..20: note = chemically synthesized
  source 1..20: mol_type = other DNA
ggaggaaaggaaaggaaaga

SEQ ID NO: 25073 - DNA, 20 bp, synthetic construct
  misc_feature 1..20: note = chemically synthesized
  source 1..20: mol_type = other DNA
ggaaaggaaaggaaagaagg

SEQ ID NO: 25074 - DNA, 20 bp, synthetic construct
  misc_feature 1..20: note = chemically synthesized
  source 1..20: mol_type = other DNA
gaaaggaaaggaaagaagga

SEQ ID NO: 25075 - DNA, 20 bp, synthetic construct
  misc_feature 1..20: note = chemically synthesized
  source 1..20: mol_type = other DNA
aggaaaggaaagaaggaagg

SEQ ID NO: 25076 - DNA, 20 bp, synthetic construct
  misc_feature 1..20: note = chemically synthesized
  source 1..20: mol_type = other DNA
ggaaaggaaagaaggaagga

SEQ ID NO: 25077 - DNA, 20 bp, synthetic construct
  misc_feature 1..20: note = chemically synthesized
  source 1..20: mol_type = other DNA
aaagaaggaaggaaggaaat

SEQ ID NO: 25078 - DNA, 20 bp, synthetic construct
  misc_feature 1..20: note = chemically synthesized
  source 1..20: mol_type = other DNA
aagaaggaaggaaggaaatc

SEQ ID NO: 25079 - DNA, 20 bp, synthetic construct
  misc_feature 1..20: note = chemically synthesized
  source 1..20: mol_type = other DNA
agaaggaaggaaggaaatca

SEQ ID NO: 25080 - DNA, 20 bp, synthetic construct
  misc_feature 1..20: note = chemically synthesized
  source 1..20: mol_type = other DNA
ggaaatcagggtattcactt

SEQ ID NO: 25081 - DNA, 20 bp, synthetic construct
  misc_feature 1..20: note = chemically synthesized
  source 1..20: mol_type = other DNA
gggtattcacttgagattca

SEQ ID NO: 25082 - DNA, 20 bp, synthetic construct
  misc_feature 1..20: note = chemically synthesized
  source 1..20: mol_type = other DNA
cacttgagattcaaagtctt

SEQ ID NO: 25083 - DNA, 20 bp, synthetic construct
  misc_feature 1..20: note = chemically synthesized
  source 1..20: mol_type = other DNA
ttagaataaaaattaaaatt

SEQ ID NO: 25084 - DNA, 20 bp, synthetic construct
  misc_feature 1..20: note = chemically synthesized
  source 1..20: mol_type = other DNA
tagaataaaaattaaaattt

SEQ ID NO: 25085 - DNA, 20 bp, synthetic construct
  misc_feature 1..20: note = chemically synthesized
  source 1..20: mol_type = other DNA
aaattaaaatttgggaaaat

SEQ ID NO: 25086 - DNA, 20 bp, synthetic construct
  misc_feature 1..20: note = chemically synthesized
  source 1..20: mol_type = other DNA
tgatgactaattccaatccc

SEQ ID NO: 25087 - DNA, 20 bp, synthetic construct
  misc_feature 1..20: note = chemically synthesized
  source 1..20: mol_type = other DNA
actaattccaatcccaagca

SEQ ID NO: 25088 - DNA, 20 bp, synthetic construct
  misc_feature 1..20: note = chemically synthesized
  source 1..20: mol_type = other DNA
ctaattccaatcccaagcac

SEQ ID NO: 25089 - DNA, 20 bp, synthetic construct
  misc_feature 1..20: note = chemically synthesized
  source 1..20: mol_type = other DNA
gcacgggtctctgtgcaatg

SEQ ID NO: 25090 - DNA, 20 bp, synthetic construct
  misc_feature 1..20: note = chemically synthesized
  source 1..20: mol_type = other DNA
cacgggtctctgtgcaatgc

SEQ ID NO: 25091 - DNA, 20 bp, synthetic construct
  misc_feature 1..20: note = chemically synthesized
  source 1..20: mol_type = other DNA
gtctctgtgcaatgcaggac

SEQ ID NO: 25092 - DNA, 20 bp, synthetic construct
  misc_feature 1..20: note = chemically synthesized
  source 1..20: mol_type = other DNA
tctctgtgcaatgcaggact

SEQ ID NO: 25093 - DNA, 20 bp, synthetic construct
  misc_feature 1..20: note = chemically synthesized
  source 1..20: mol_type = other DNA
ctgtgcaatgcaggactggg

SEQ ID NO: 25094 - DNA, 20 bp, synthetic construct
  misc_feature 1..20: note = chemically synthesized
  source 1..20: mol_type = other DNA
tgtgcaatgcaggactggga

SEQ ID NO: 25095 - DNA, 20 bp, synthetic construct
  misc_feature 1..20: note = chemically synthesized
  source 1..20: mol_type = other DNA
aatgcaggactgggaaggtt

SEQ ID NO: 25096 - DNA, 20 bp, synthetic construct
  misc_feature 1..20: note = chemically synthesized
  source 1..20: mol_type = other DNA
atgcaggactgggaaggttt

SEQ ID NO: 25097 - DNA, 20 bp, synthetic construct
  misc_feature 1..20: note = chemically synthesized
  source 1..20: mol_type = other DNA
caggactgggaaggtttagg

SEQ ID NO: 25098 - DNA, 20 bp, synthetic construct
  misc_feature 1..20: note = chemically synthesized
  source 1..20: mol_type = other DNA
aggactgggaaggtttaggc

SEQ ID NO: 25099 - DNA, 20 bp, synthetic construct
  misc_feature 1..20: note = chemically synthesized
  source 1..20: mol_type = other DNA
ggactgggaaggtttaggca

SEQ ID NO: 25100 - DNA, 20 bp, synthetic construct
  misc_feature 1..20: note = chemically synthesized
  source 1..20: mol_type = other DNA
gactgggaaggtttaggcag

SEQ ID NO: 25101 - DNA, 20 bp, synthetic construct
  misc_feature 1..20: note = chemically synthesized
  source 1..20: mol_type = other DNA
aggggtgctatctgattcat

SEQ ID NO: 25102 - DNA, 20 bp, synthetic construct
  misc_feature 1..20: note = chemically synthesized
  source 1..20: mol_type = other DNA
ctatctgattcatgagacaa

SEQ ID NO: 25103 - DNA, 20 bp, synthetic construct
  misc_feature 1..20: note = chemically synthesized
  source 1..20: mol_type = other DNA
tatctgattcatgagacaac

SEQ ID NO: 25104 - DNA, 20 bp, synthetic construct
  misc_feature 1..20: note = chemically synthesized
  source 1..20: mol_type = other DNA
ttcatgagacaacaggcaca

SEQ ID NO: 25105 - DNA, 20 bp, synthetic construct
  misc_feature 1..20: note = chemically synthesized
  source 1..20: mol_type = other DNA
agacaacaggcacaaagttt

SEQ ID NO: 25106 - DNA, 20 bp, synthetic construct
  misc_feature 1..20: note = chemically synthesized
  source 1..20: mol_type = other DNA
acaaagttttagtccctgcc

SEQ ID NO: 25107 - DNA, 20 bp, synthetic construct
  misc_feature 1..20: note = chemically synthesized
  source 1..20: mol_type = other DNA
ttttagtccctgcctggact

SEQ ID NO: 25108 - DNA, 20 bp, synthetic construct
  misc_feature 1..20: note = chemically synthesized
  source 1..20: mol_type = other DNA
tggacttggtgtcatctctt

SEQ ID NO: 25109 - DNA, 20 bp, synthetic construct
  misc_feature 1..20: note = chemically synthesized
  source 1..20: mol_type = other DNA
tctcttgagcacatgcctaa

SEQ ID NO: 25110 - DNA, 20 bp, synthetic construct
  misc_feature 1..20: note = chemically synthesized
  source 1..20: mol_type = other DNA
ctcctaacattcccctccca

SEQ ID NO: 25111 - DNA, 20 bp, synthetic construct
  misc_feature 1..20: note = chemically synthesized
  source 1..20: mol_type = other DNA
aatgcttccacctcccgctg

SEQ ID NO: 25112 - DNA, 20 bp, synthetic construct
  misc_feature 1..20: note = chemically synthesized
  source 1..20: mol_type = other DNA
tcccgctgcagtccatgaac

SEQ ID NO: 25113 - DNA, 20 bp, synthetic construct
  misc_feature 1..20: note = chemically synthesized
  source 1..20: mol_type = other DNA
cccgctgcagtccatgaacc

SEQ ID NO: 25114 - DNA, 20 bp, synthetic construct
  misc_feature 1..20: note = chemically synthesized
  source 1..20: mol_type = other DNA
tgaaccaggataaaattctc

SEQ ID NO: 25115 - DNA, 20 bp, synthetic construct
  misc_feature 1..20: note = chemically synthesized
  source 1..20: mol_type = other DNA
accaggataaaattctctag

SEQ ID NO: 25116 - DNA, 20 bp, synthetic construct
  misc_feature 1..20: note = chemically synthesized
  source 1..20: mol_type = other DNA
aggataaaattctctagcag

SEQ ID NO: 25117 - DNA, 20 bp, synthetic construct
  misc_feature 1..20: note = chemically synthesized
  source 1..20: mol_type = other DNA
gataaaattctctagcagca

SEQ ID NO: 25118 - DNA, 20 bp, synthetic construct
  misc_feature 1..20: note = chemically synthesized
  source 1..20: mol_type = other DNA
ttctctagcagcagagacca

SEQ ID NO: 25119 - DNA, 20 bp, synthetic construct
  misc_feature 1..20: note = chemically synthesized
  source 1..20: mol_type = other DNA
gagaccaaagacattctctc

SEQ ID NO: 25120 - DNA, 20 bp, synthetic construct
  misc_feature 1..20: note = chemically synthesized
  source 1..20: mol_type = other DNA
aaagacattctctcaagtct

SEQ ID NO: 25121 - DNA, 20 bp, synthetic construct
  misc_feature 1..20: note = chemically synthesized
  source 1..20: mol_type = other DNA
aagacattctctcaagtctc

SEQ ID NO: 25122 - DNA, 20 bp, synthetic construct
  misc_feature 1..20: note = chemically synthesized
  source 1..20: mol_type = other DNA
tctctcaagtctcaggaatg

SEQ ID NO: 25123 - DNA, 20 bp, synthetic construct
  misc_feature 1..20: note = chemically synthesized
  source 1..20: mol_type = other DNA
gtctcaggaatgtggttctg

SEQ ID NO: 25124 - DNA, 20 bp, synthetic construct
  misc_feature 1..20: note = chemically synthesized
  source 1..20: mol_type = other DNA
tctcaggaatgtggttctga

SEQ ID NO: 25125 - DNA, 20 bp, synthetic construct
  misc_feature 1..20: note = chemically synthesized
  source 1..20: mol_type = other DNA
caggaatgtggttctgaagg

SEQ ID NO: 25126 - DNA, 20 bp, synthetic construct
  misc_feature 1..20: note = chemically synthesized
  source 1..20: mol_type = other DNA
ggaatgtggttctgaaggaa

SEQ ID NO: 25127 - DNA, 20 bp, synthetic construct
  misc_feature 1..20: note = chemically synthesized
  source 1..20: mol_type = other DNA
atgtggttctgaaggaagag

SEQ ID NO: 25128 - DNA, 20 bp, synthetic construct
  misc_feature 1..20: note = chemically synthesized
  source 1..20: mol_type = other DNA
catacacatgccaccttgca

SEQ ID NO: 25129 - DNA, 20 bp, synthetic construct
  misc_feature 1..20: note = chemically synthesized
  source 1..20: mol_type = other DNA
tgccaccttgcaaagccact

SEQ ID NO: 25130 - DNA, 20 bp, synthetic construct
  misc_feature 1..20: note = chemically synthesized
  source 1..20: mol_type = other DNA
tgcaaagccacttagtgaca

SEQ ID NO: 25131 - DNA, 20 bp, synthetic construct
  misc_feature 1..20: note = chemically synthesized
  source 1..20: mol_type = other DNA
caaagccacttagtgacaca

SEQ ID NO: 25132 - DNA, 20 bp, synthetic construct
  misc_feature 1..20: note = chemically synthesized
  source 1..20: mol_type = other DNA
cacttagtgacacagagttt

SEQ ID NO: 25133 - DNA, 20 bp, synthetic construct
  misc_feature 1..20: note = chemically synthesized
  source 1..20: mol_type = other DNA
ttagttatttcattgtgaac

SEQ ID NO: 25134 - DNA, 20 bp, synthetic construct
  misc_feature 1..20: note = chemically synthesized
  source 1..20: mol_type = other DNA
ctggaataaaatcattttga

SEQ ID NO: 25135 - DNA, 20 bp, synthetic construct
  misc_feature 1..20: note = chemically synthesized
  source 1..20: mol_type = other DNA
tggaataaaatcattttgaa

SEQ ID NO: 25136 - DNA, 20 bp, synthetic construct
  misc_feature 1..20: note = chemically synthesized
  source 1..20: mol_type = other DNA
gaataaaatcattttgaaag

SEQ ID NO: 25137 - DNA, 20 bp, synthetic construct
  misc_feature 1..20: note = chemically synthesized
  source 1..20: mol_type = other DNA
attttgaaaggagatttttg

SEQ ID NO: 25138 - DNA, 20 bp, synthetic construct
  misc_feature 1..20: note = chemically synthesized
  source 1..20: mol_type = other DNA
aaggagatttttgaagttaa

SEQ ID NO: 25139 - DNA, 20 bp, synthetic construct
  misc_feature 1..20: note = chemically synthesized
  source 1..20: mol_type = other DNA
tttgaagttaaaagcattgc

SEQ ID NO: 25140 - DNA, 20 bp, synthetic construct
  misc_feature 1..20: note = chemically synthesized
  source 1..20: mol_type = other DNA
aagttaaaagcattgccaga

SEQ ID NO: 25141 - DNA, 20 bp, synthetic construct
  misc_feature 1..20: note = chemically synthesized
  source 1..20: mol_type = other DNA
agttaaaagcattgccagaa

SEQ ID NO: 25142 - DNA, 20 bp, synthetic construct
  misc_feature 1..20: note = chemically synthesized
  source 1..20: mol_type = other DNA
ttaaaagcattgccagaaag

SEQ ID NO: 25143 - DNA, 20 bp, synthetic construct
  misc_feature 1..20: note = chemically synthesized
  source 1..20: mol_type = other DNA
gccagaaaggagtcacaatc

SEQ ID NO: 25144 - DNA, 20 bp, synthetic construct
  misc_feature 1..20: note = chemically synthesized
  source 1..20: mol_type = other DNA
ggagtcacaatccagaccct

SEQ ID NO: 25145 - DNA, 20 bp, synthetic construct
  misc_feature 1..20: note = chemically synthesized
  source 1..20: mol_type = other DNA
agtcacaatccagaccctaa

SEQ ID NO: 25146 - DNA, 20 bp, synthetic construct
  misc_feature 1..20: note = chemically synthesized
  source 1..20: mol_type = other DNA
tcacaatccagaccctaaga

SEQ ID NO: 25147 - DNA, 20 bp, synthetic construct
  misc_feature 1..20: note = chemically synthesized
  source 1..20: mol_type = other DNA
cacaatccagaccctaagag

SEQ ID NO: 25148 - DNA, 20 bp, synthetic construct
  misc_feature 1..20: note = chemically synthesized
  source 1..20: mol_type = other DNA
acaatccagaccctaagaga

SEQ ID NO: 25149 - DNA, 20 bp, synthetic construct
  misc_feature 1..20: note = chemically synthesized
  source 1..20: mol_type = other DNA
agaccctaagagagggttct

SEQ ID NO: 25150 - DNA, 20 bp, synthetic construct
  misc_feature 1..20: note = chemically synthesized
  source 1..20: mol_type = other DNA
ggttcttggatttcgtgccc

SEQ ID NO: 25151 - DNA, 20 bp, synthetic construct
  misc_feature 1..20: note = chemically synthesized
  source 1..20: mol_type = other DNA
cttggatttcgtgcccaaga

SEQ ID NO: 25152 - DNA, 20 bp, synthetic construct
  misc_feature 1..20: note = chemically synthesized
  source 1..20: mol_type = other DNA
ttcgtgcccaagaaagaatt

SEQ ID NO: 25153 - DNA, 20 bp, synthetic construct
  misc_feature 1..20: note = chemically synthesized
  source 1..20: mol_type = other DNA
tcgtgcccaagaaagaattt

SEQ ID NO: 25154 - DNA, 20 bp, synthetic construct
  misc_feature 1..20: note = chemically synthesized
  source 1..20: mol_type = other DNA
cgtgcccaagaaagaatttg

SEQ ID NO: 25155 - DNA, 20 bp, synthetic construct
  misc_feature 1..20: note = chemically synthesized
  source 1..20: mol_type = other DNA
gaatttggggcaaatccata

SEQ ID NO: 25156 - DNA, 20 bp, synthetic construct
  misc_feature 1..20: note = chemically synthesized
  source 1..20: mol_type = other DNA
tggggcaaatccatacagaa

SEQ ID NO: 25157 - DNA, 20 bp, synthetic construct
  misc_feature 1..20: note = chemically synthesized
  source 1..20: mol_type = other DNA
aaatccatacagaaaagtga

SEQ ID NO: 25158 - DNA, 20 bp, synthetic construct
  misc_feature 1..20: note = chemically synthesized
  source 1..20: mol_type = other DNA
ccatacagaaaagtgaaagc

SEQ ID NO: 25159 - DNA, 20 bp, synthetic construct
  misc_feature 1..20: note = chemically synthesized
  source 1..20: mol_type = other DNA
aaagtgaaagcaagttaatt

SEQ ID NO: 25160 - DNA, 20 bp, synthetic construct
  misc_feature 1..20: note = chemically synthesized
  source 1..20: mol_type = other DNA
tgaaagcaagttaattaaga

SEQ ID NO: 25161 - DNA, 20 bp, synthetic construct
  misc_feature 1..20: note = chemically synthesized
  source 1..20: mol_type = other DNA
gcaagttaattaagaaagta

SEQ ID NO: 25162 - DNA, 20 bp, synthetic construct
  misc_feature 1..20: note = chemically synthesized
  source 1..20: mol_type = other DNA
caagttaattaagaaagtaa

SEQ ID NO: 25163 - DNA, 20 bp, synthetic construct
  misc_feature 1..20: note = chemically synthesized
  source 1..20: mol_type = other DNA
agttaattaagaaagtaaag

SEQ ID NO: 25164 - DNA, 20 bp, synthetic construct
  misc_feature 1..20: note = chemically synthesized
  source 1..20: mol_type = other DNA
aaagtaaaggagtaaaataa

SEQ ID NO: 25165 - DNA, 20 bp, synthetic construct
  misc_feature 1..20: note = chemically synthesized
  source 1..20: mol_type = other DNA
gtaaaataatggctacccta

SEQ ID NO: 25166 - DNA, 20 bp, synthetic construct
  misc_feature 1..20: note = chemically synthesized
  source 1..20: mol_type = other DNA
taaaataatggctaccctat

SEQ ID NO: 25167 - DNA, 20 bp, synthetic construct
  misc_feature 1..20: note = chemically synthesized
  source 1..20: mol_type = other DNA
aataatggctaccctatagg

SEQ ID NO: 25168 - DNA, 20 bp, synthetic construct
  misc_feature 1..20: note = chemically synthesized
  source 1..20: mol_type = other DNA
tggctaccctataggcagaa

SEQ ID NO: 25169 - DNA, 20 bp, synthetic construct
  misc_feature 1..20: note = chemically synthesized
  source 1..20: mol_type = other DNA
cctataggcagaacagtcct

SEQ ID NO: 25170 - DNA, 20 bp, synthetic construct
  misc_feature 1..20: note = chemically synthesized
  source 1..20: mol_type = other DNA
ctataggcagaacagtcctg

SEQ ID NO: 25171 - DNA, 20 bp, synthetic construct
  misc_feature 1..20: note = chemically synthesized
  source 1..20: mol_type = other DNA
agaacagtcctgaggactgc

SEQ ID NO: 25172 - DNA, 20 bp, synthetic construct
  misc_feature 1..20: note = chemically synthesized
  source 1..20: mol_type = other DNA
ctgctggttgcccattttta

SEQ ID NO: 25173 - DNA, 20 bp, synthetic construct
  misc_feature 1..20: note = chemically synthesized
  source 1..20: mol_type = other DNA
ttattgatgatatgctaaac

SEQ ID NO: 25174 - DNA, 20 bp, synthetic construct
  misc_feature 1..20: note = chemically synthesized
  source 1..20: mol_type = other DNA
tattgatgatatgctaaaca

SEQ ID NO: 25175 - DNA, 20 bp, synthetic construct
  misc_feature 1..20: note = chemically synthesized
  source 1..20: mol_type = other DNA
attgatgatatgctaaacaa

SEQ ID NO: 25176 - DNA, 20 bp, synthetic construct
  misc_feature 1..20: note = chemically synthesized
  source 1..20: mol_type = other DNA
ttgatgatatgctaaacaag

SEQ ID NO: 25177 - DNA, 20 bp, synthetic construct
  misc_feature 1..20: note = chemically synthesized
  source 1..20: mol_type = other DNA
atgatatgctaaacaagggg

SEQ ID NO: 25178 - DNA, 20 bp, synthetic construct
  misc_feature 1..20: note = chemically synthesized
  source 1..20: mol_type = other DNA
ttattcatgcctcccctttt

SEQ ID NO: 25179 - DNA, 20 bp, synthetic construct
  misc_feature 1..20: note = chemically synthesized
  source 1..20: mol_type = other DNA
cctccccttttcagaccgct

SEQ ID NO: 25180 - DNA, 20 bp, synthetic construct
  misc_feature 1..20: note = chemically synthesized
  source 1..20: mol_type = other DNA
gtaacttcctgatgttgcca

SEQ ID NO: 25181 - DNA, 20 bp, synthetic construct
  misc_feature 1..20: note = chemically synthesized
  source 1..20: mol_type = other DNA
gttgccatggcatttctaaa

SEQ ID NO: 25182 - DNA, 20 bp, synthetic construct
  misc_feature 1..20: note = chemically synthesized
  source 1..20: mol_type = other DNA
atggcatttctaaacagtca

SEQ ID NO: 25183 - DNA, 20 bp, synthetic construct
  misc_feature 1..20: note = chemically synthesized
  source 1..20: mol_type = other DNA
tttctaaacagtcatagtgc

SEQ ID NO: 25184 - DNA, 20 bp, synthetic construct
  misc_feature 1..20: note = chemically synthesized
  source 1..20: mol_type = other DNA
ctaaacagtcatagtgctgg

SEQ ID NO: 25185 - DNA, 20 bp, synthetic construct
  misc_feature 1..20: note = chemically synthesized
  source 1..20: mol_type = other DNA
taaacagtcatagtgctggt

SEQ ID NO: 25186 - DNA, 20 bp, synthetic construct
  misc_feature 1..20: note = chemically synthesized
  source 1..20: mol_type = other DNA
aacagtcatagtgctggtgg

SEQ ID NO: 25187 - DNA, 20 bp, synthetic construct
  misc_feature 1..20: note = chemically synthesized
  source 1..20: mol_type = other DNA
cagtcatagtgctggtggga

SEQ ID NO: 25188 - DNA, 20 bp, synthetic construct
  misc_feature 1..20: note = chemically synthesized
  source 1..20: mol_type = other DNA
tcatagtgctggtgggagag

SEQ ID NO: 25189 - DNA, 20 bp, synthetic construct
  misc_feature 1..20: note = chemically synthesized
  source 1..20: mol_type = other DNA
tagtgctggtgggagagtag

SEQ ID NO: 25190 - DNA, 20 bp, synthetic construct
  misc_feature 1..20: note = chemically synthesized
  source 1..20: mol_type = other DNA
gctggtgggagagtagcagt

SEQ ID NO: 25191 - DNA, 20 bp, synthetic construct
  misc_feature 1..20: note = chemically synthesized
  source 1..20: mol_type = other DNA
ctggtgggagagtagcagtg

SEQ ID NO: 25192 - DNA, 20 bp, synthetic construct
  misc_feature 1..20: note = chemically synthesized
  source 1..20: mol_type = other DNA
agagtagcagtgaggactac

SEQ ID NO: 25193 - DNA, 20 bp, synthetic construct
  misc_feature 1..20: note = chemically synthesized
  source 1..20: mol_type = other DNA
agtagcagtgaggactacca

SEQ ID NO: 25194 - DNA, 20 bp, synthetic construct
  misc_feature 1..20: note = chemically synthesized
  source 1..20: mol_type = other DNA
gtagcagtgaggactaccag

SEQ ID NO: 25195 - DNA, 20 bp, synthetic construct
  misc_feature 1..20: note = chemically synthesized
  source 1..20: mol_type = other DNA
ggtcactctcatcacaatct

SEQ ID NO: 25196 - DNA, 20 bp, synthetic construct
  misc_feature 1..20: note = chemically synthesized
  source 1..20: mol_type = other DNA
ctctcatcacaatcttggtt

SEQ ID NO: 25197 - DNA, 20 bp, synthetic construct
  misc_feature 1..20: note = chemically synthesized
  source 1..20: mol_type = other DNA
tcatcacaatcttggtttgg

SEQ ID NO: 25198 - DNA, 20 bp, synthetic construct
  misc_feature 1..20: note = chemically synthesized
  source 1..20: mol_type = other DNA
catcacaatcttggtttggt

SEQ ID NO: 25199 - DNA, 20 bp, synthetic construct
  misc_feature 1..20: note = chemically synthesized
  source 1..20: mol_type = other DNA
aatcttggtttggtgggttt

SEQ ID NO: 25200 - DNA, 20 bp, synthetic construct
  misc_feature 1..20: note = chemically synthesized
  source 1..20: mol_type = other DNA
ttggtttggtgggtttcagc

SEQ ID NO: 25201 - DNA, 20 bp, synthetic construct
  misc_feature 1..20: note = chemically synthesized
  source 1..20: mol_type = other DNA
tttactgcaaactgtttttt

SEQ ID NO: 25202 - DNA, 20 bp, synthetic construct
  misc_feature 1..20: note = chemically synthesized
  source 1..20: mol_type = other DNA
ctgcaaactgttttttcagc

SEQ ID NO: 25203 - DNA, 20 bp, synthetic construct
  misc_feature 1..20: note = chemically synthesized
  source 1..20: mol_type = other DNA
tgcaaactgttttttcagca

SEQ ID NO: 25204 - DNA, 20 bp, synthetic construct
  misc_feature 1..20: note = chemically synthesized
  source 1..20: mol_type = other DNA
tcttatctcatcctgtgact

SEQ ID NO: 25205 - DNA, 20 bp, synthetic construct
  misc_feature 1..20: note = chemically synthesized
  source 1..20: mol_type = other DNA
actgagaatgcctaactttc

SEQ ID NO: 25206 - DNA, 20 bp, synthetic construct
  misc_feature 1..20: note = chemically synthesized
  source 1..20: mol_type = other DNA
ctgagaatgcctaactttct

SEQ ID NO: 25207 - DNA, 20 bp, synthetic construct
  misc_feature 1..20: note = chemically synthesized
  source 1..20: mol_type = other DNA
tgcctaactttctgggaata

SEQ ID NO: 25208 - DNA, 20 bp, synthetic construct
  misc_feature 1..20: note = chemically synthesized
  source 1..20: mol_type = other DNA
aactttctgggaatacagcc

SEQ ID NO: 25209 - DNA, 20 bp, synthetic construct
  misc_feature 1..20: note = chemically synthesized
  source 1..20: mol_type = other DNA
tttctgggaatacagcccag

SEQ ID NO: 25210 - DNA, 20 bp, synthetic construct
  misc_feature 1..20: note = chemically synthesized
  source 1..20: mol_type = other DNA
ttctgggaatacagcccagt

SEQ ID NO: 25211 - DNA, 20 bp, synthetic construct
  misc_feature 1..20: note = chemically synthesized
  source 1..20: mol_type = other DNA
gaatacagcccagtaggtct

SEQ ID NO: 25212 - DNA, 20 bp, synthetic construct
  misc_feature 1..20: note = chemically synthesized
  source 1..20: mol_type = other DNA
ggtctcagccttattgtacc

SEQ ID NO: 25213 - DNA, 20 bp, synthetic construct
  misc_feature 1..20: note = chemically synthesized
  source 1..20: mol_type = other DNA
attgtacccagctcctattt

SEQ ID NO: 25214 - DNA, 20 bp, synthetic construct
  misc_feature 1..20: note = chemically synthesized
  source 1..20: mol_type = other DNA
tacccagctcctatttaaga

SEQ ID NO: 25215 - DNA, 20 bp, synthetic construct
  misc_feature 1..20: note = chemically synthesized
  source 1..20: mol_type = other DNA
cccagctcctatttaagatg

SEQ ID NO: 25216 - DNA, 20 bp, synthetic construct
  misc_feature 1..20: note = chemically synthesized
  source 1..20: mol_type = other DNA
tatttaagatggagttgctc

SEQ ID NO: 25217 - DNA, 20 bp, synthetic construct
  misc_feature 1..20: note = chemically synthesized
  source 1..20: mol_type = other DNA
ggttcaaatgcctctgacaa

SEQ ID NO: 25218 - DNA, 20 bp, synthetic construct
  misc_feature 1..20: note = chemically synthesized
  source 1..20: mol_type = other DNA
gttcaaatgcctctgacaaa

SEQ ID NO: 25219 - DNA, 20 bp, synthetic construct
  misc_feature 1..20: note = chemically synthesized
  source 1..20: mol_type = other DNA
aggaacaaaaatgttgtttc

SEQ ID NO: 25220 - DNA, 20 bp, synthetic construct
  misc_feature 1..20: note = chemically synthesized
  source 1..20: mol_type = other DNA
aaatgttgtttctggtatgc

SEQ ID NO: 25221 - DNA, 20 bp, synthetic construct
  misc_feature 1..20: note = chemically synthesized
  source 1..20: mol_type = other DNA
gtttctggtatgctagcacc

SEQ ID NO: 25222 - DNA, 20 bp, synthetic construct
  misc_feature 1..20: note = chemically synthesized
  source 1..20: mol_type = other DNA
tggtatgctagcacccagaa

SEQ ID NO: 25223 - DNA, 20 bp, synthetic construct
  misc_feature 1..20: note = chemically synthesized
  source 1..20: mol_type = other DNA
gtatgctagcacccagaata

SEQ ID NO: 25224 - DNA, 20 bp, synthetic construct
  misc_feature 1..20: note = chemically synthesized
  source 1..20: mol_type = other DNA
tatgctagcacccagaatag

SEQ ID NO: 25225 - DNA, 20 bp, synthetic construct
  misc_feature 1..20: note = chemically synthesized
  source 1..20: mol_type = other DNA
ctcatgcttaaatcttgacc

SEQ ID NO: 25226 - DNA, 20 bp, synthetic construct
  misc_feature 1..20: note = chemically synthesized
  source 1..20: mol_type = other DNA
tcatgcttaaatcttgacca

SEQ ID NO: 25227 - DNA, 20 bp, synthetic construct
  misc_feature 1..20: note = chemically synthesized
  source 1..20: mol_type = other DNA
tgcattttcctatccttact

SEQ ID NO: 25228 - DNA, 20 bp, synthetic construct
  misc_feature 1..20: note = chemically synthesized
  source 1..20: mol_type = other DNA
attttcctatccttactcag

SEQ ID NO: 25229 - DNA, 20 bp, synthetic construct
  misc_feature 1..20: note = chemically synthesized
  source 1..20: mol_type = other DNA
atccttactcagcagtttgt

SEQ ID NO: 25230 - DNA, 20 bp, synthetic construct
  misc_feature 1..20: note = chemically synthesized
  source 1..20: mol_type = other DNA
tccttactcagcagtttgtg

SEQ ID NO: 25231 - DNA, 20 bp, synthetic construct
  misc_feature 1..20: note = chemically synthesized
  source 1..20: mol_type = other DNA
ctcagcagtttgtgaggaat

SEQ ID NO: 25232 - DNA, 20 bp, synthetic construct
  misc_feature 1..20: note = chemically synthesized
  source 1..20: mol_type = other DNA
gaggaatcagacattcttca

SEQ ID NO: 25233 - DNA, 20 bp, synthetic construct
  misc_feature 1..20: note = chemically synthesized
  source 1..20: mol_type = other DNA
cttcaaagtttcacttctac

SEQ ID NO: 25234 - DNA, 20 bp, synthetic construct
  misc_feature 1..20: note = chemically synthesized
  source 1..20: mol_type = other DNA
tcaaagtttcacttctacca

SEQ ID NO: 25235 - DNA, 20 bp, synthetic construct
  misc_feature 1..20: note = chemically synthesized
  source 1..20: mol_type = other DNA
aagtttcacttctaccagag

SEQ ID NO: 25236 - DNA, 20 bp, synthetic construct
  misc_feature 1..20: note = chemically synthesized
  source 1..20: mol_type = other DNA
gtttcacttctaccagagta

SEQ ID NO: 25237 - DNA, 20 bp, synthetic construct
  misc_feature 1..20: note = chemically synthesized
  source 1..20: mol_type = other DNA
ttacaccccacaactaaccc

SEQ ID NO: 25238 - DNA, 20 bp, synthetic construct
  misc_feature 1..20: note = chemically synthesized
  source 1..20: mol_type = other DNA
caactaacccaagcttcact

SEQ ID NO: 25239 - DNA, 20 bp, synthetic construct
  misc_feature 1..20: note = chemically synthesized
  source 1..20: mol_type = other DNA
cacttggttctttgctccta

SEQ ID NO: 25240 - DNA, 20 bp, synthetic construct
  misc_feature 1..20: note = chemically synthesized
  source 1..20: mol_type = other DNA
cttggttctttgctcctatg

SEQ ID NO: 25241 - DNA, 20 bp, synthetic construct
  misc_feature 1..20: note = chemically synthesized
  source 1..20: mol_type = other DNA
tctttgctcctatggagacc

SEQ ID NO: 25242 - DNA, 20 bp, synthetic construct
  misc_feature 1..20: note = chemically synthesized
  source 1..20: mol_type = other DNA
ctttgctcctatggagaccc

SEQ ID NO: 25243 - DNA, 20 bp, synthetic construct
  misc_feature 1..20: note = chemically synthesized
  source 1..20: mol_type = other DNA
tatggagacccaggctcact

SEQ ID NO: 25244 - DNA, 20 bp, synthetic construct
  misc_feature 1..20: note = chemically synthesized
  source 1..20: mol_type = other DNA
ttgttttttcctctgccatt

SEQ ID NO: 25245 - DNA, 20 bp, synthetic construct
  misc_feature 1..20: note = chemically synthesized
  source 1..20: mol_type = other DNA
ccaataacttaactatgaac

SEQ ID NO: 25246 - DNA, 20 bp, synthetic construct
  misc_feature 1..20: note = chemically synthesized
  source 1..20: mol_type = other DNA
ccagcatgaaaaatcctgtt

SEQ ID NO: 25247 - DNA, 20 bp, synthetic construct
  misc_feature 1..20: note = chemically synthesized
  source 1..20: mol_type = other DNA
aaatcctgttaagtgttctg

SEQ ID NO: 25248 - DNA, 20 bp, synthetic construct
  misc_feature 1..20: note = chemically synthesized
  source 1..20: mol_type = other DNA
aatcctgttaagtgttctgt

SEQ ID NO: 25249 - DNA, 20 bp, synthetic construct
  misc_feature 1..20: note = chemically synthesized
  source 1..20: mol_type = other DNA
ttgtttcatgcttcttcata

SEQ ID NO: 25250 - DNA, 20 bp, synthetic construct
  misc_feature 1..20: note = chemically synthesized
  source 1..20: mol_type = other DNA
cttcttcatacagtcttatg

SEQ ID NO: 25251 - DNA, 20 bp, synthetic construct
  misc_feature 1..20: note = chemically synthesized
  source 1..20: mol_type = other DNA
cttcatacagtcttatgcag

SEQ ID NO: 25252 - DNA, 20 bp, synthetic construct
  misc_feature 1..20: note = chemically synthesized
  source 1..20: mol_type = other DNA
acagtcttatgcagtagttt

SEQ ID NO: 25253 - DNA, 20 bp, synthetic construct
  misc_feature 1..20: note = chemically synthesized
  source 1..20: mol_type = other DNA
cagtcttatgcagtagtttt

SEQ ID NO: 25254 - DNA, 20 bp, synthetic construct
  misc_feature 1..20: note = chemically synthesized
  source 1..20: mol_type = other DNA
cagtagttttgggaattaaa

SEQ ID NO: 25255 - DNA, 20 bp, synthetic construct
  misc_feature 1..20: note = chemically synthesized
  source 1..20: mol_type = other DNA
gttttgggaattaaacagtt

SEQ ID NO: 25256 - DNA, 20 bp, synthetic construct
  misc_feature 1..20: note = chemically synthesized
  source 1..20: mol_type = other DNA
caatcccaccttccacttat

SEQ ID NO: 25257 - DNA, 20 bp, synthetic construct
  misc_feature 1..20: note = chemically synthesized
  source 1..20: mol_type = other DNA
cttattggctgcgtacccta

SEQ ID NO: 25258 - DNA, 20 bp, synthetic construct
  misc_feature 1..20: note = chemically synthesized
  source 1..20: mol_type = other DNA
tggctgcgtaccctatagca

SEQ ID NO: 25259 - DNA, 20 bp, synthetic construct
  misc_feature 1..20: note = chemically synthesized
  source 1..20: mol_type = other DNA
caatttatctttctgtgttt

SEQ ID NO: 25260 - DNA, 20 bp, synthetic construct
  misc_feature 1..20: note = chemically synthesized
  source 1..20: mol_type = other DNA
gttttggtccactcatcttt

SEQ ID NO: 25261 - DNA, 20 bp, synthetic construct
  misc_feature 1..20: note = chemically synthesized
  source 1..20: mol_type = other DNA
ttggtccactcatctttaag

SEQ ID NO: 25262 - DNA, 20 bp, synthetic construct
  misc_feature 1..20: note = chemically synthesized
  source 1..20: mol_type = other DNA
tggtccactcatctttaagt

SEQ ID NO: 25263 - DNA, 20 bp, synthetic construct
  misc_feature 1..20: note = chemically synthesized
  source 1..20: mol_type = other DNA
ggtccactcatctttaagtg

SEQ ID NO: 25264 - DNA, 20 bp, synthetic construct
  misc_feature 1..20: note = chemically synthesized
  source 1..20: mol_type = other DNA
tctttaagtggggataccaa

SEQ ID NO: 25265 - DNA, 20 bp, synthetic construct
  misc_feature 1..20: note = chemically synthesized
  source 1..20: mol_type = other DNA
ggataccaatagtacccaca

SEQ ID NO: 25266 - DNA, 20 bp, synthetic construct
  misc_feature 1..20: note = chemically synthesized
  source 1..20: mol_type = other DNA
aatatgtctaacgtgttcaa

SEQ ID NO: 25267 - DNA, 20 bp, synthetic construct
  misc_feature 1..20: note = chemically synthesized
  source 1..20: mol_type = other DNA
ctaacgtgttcaatagtgcc

SEQ ID NO: 25268 - DNA, 20 bp, synthetic construct
  misc_feature 1..20: note = chemically synthesized
  source 1..20: mol_type = other DNA
aatagtgcctggtccattgt

SEQ ID NO: 25269 - DNA, 20 bp, synthetic construct
  misc_feature 1..20: note = chemically synthesized
  source 1..20: mol_type = other DNA
ctggtccattgtaagtatta

SEQ ID NO: 25270 - DNA, 20 bp, synthetic construct
  misc_feature 1..20: note = chemically synthesized
  source 1..20: mol_type = other DNA
attgaaaattttgtgaaaat

SEQ ID NO: 25271 - DNA, 20 bp, synthetic construct
  misc_feature 1..20: note = chemically synthesized
  source 1..20: mol_type = other DNA
aaatgagacaatttgacctt

SEQ ID NO: 25272 - DNA, 20 bp, synthetic construct
  misc_feature 1..20: note = chemically synthesized
  source 1..20: mol_type = other DNA
aatgagacaatttgaccttt

SEQ ID NO: 25273 - DNA, 20 bp, synthetic construct
  misc_feature 1..20: note = chemically synthesized
  source 1..20: mol_type = other DNA
gacaatttgacctttgggct

SEQ ID NO: 25274 - DNA, 20 bp, synthetic construct
  misc_feature 1..20: note = chemically synthesized
  source 1..20: mol_type = other DNA
aatttgacctttgggctgag

SEQ ID NO: 25275 - DNA, 20 bp, synthetic construct
  misc_feature 1..20: note = chemically synthesized
  source 1..20: mol_type = other DNA
ggctgagaagatactctgtc

SEQ ID NO: 25276 - DNA, 20 bp, synthetic construct
  misc_feature 1..20: note = chemically synthesized
  source 1..20: mol_type = other DNA
tactctgtctagctctgaca

SEQ ID NO: 25277 - DNA, 20 bp, synthetic construct
  misc_feature 1..20: note = chemically synthesized
  source 1..20: mol_type = other DNA
agaaaataaaaacctttaaa

SEQ ID NO: 25278 - DNA, 20 bp, synthetic construct
  misc_feature 1..20: note = chemically synthesized
  source 1..20: mol_type = other DNA
tctcacaatcgtaatacttg

SEQ ID NO: 25279 - DNA, 20 bp, synthetic construct
  misc_feature 1..20: note = chemically synthesized
  source 1..20: mol_type = other DNA
cgtaatacttgaagttacac

SEQ ID NO: 25280 - DNA, 20 bp, synthetic construct
  misc_feature 1..20: note = chemically synthesized
  source 1..20: mol_type = other DNA
acacaagatattctaacata

SEQ ID NO: 25281 - DNA, 20 bp, synthetic construct
  misc_feature 1..20: note = chemically synthesized
  source 1..20: mol_type = other DNA
tattctcacatgcatcctgt

SEQ ID NO: 25282 - DNA, 20 bp, synthetic construct
  misc_feature 1..20: note = chemically synthesized
  source 1..20: mol_type = other DNA
ctcacatgcatcctgtgaga

SEQ ID NO: 25283 - DNA, 20 bp, synthetic construct
  misc_feature 1..20: note = chemically synthesized
  source 1..20: mol_type = other DNA
acatgcatcctgtgagaaag

SEQ ID NO: 25284 - DNA, 20 bp, synthetic construct
  misc_feature 1..20: note = chemically synthesized
  source 1..20: mol_type = other DNA
atgcatcctgtgagaaagca

SEQ ID NO: 25285 - DNA, 20 bp, synthetic construct
  misc_feature 1..20: note = chemically synthesized
  source 1..20: mol_type = other DNA
tcctgtgagaaagcagagca

SEQ ID NO: 25286 - DNA, 20 bp, synthetic construct
  misc_feature 1..20: note = chemically synthesized
  source 1..20: mol_type = other DNA
tgtgagaaagcagagcatag

SEQ ID NO: 25287 - DNA, 20 bp, synthetic construct
  misc_feature 1..20: note = chemically synthesized
  source 1..20: mol_type = other DNA
tgagaaagcagagcatagta

SEQ ID NO: 25288 - DNA, 20 bp, synthetic construct
  misc_feature 1..20: note = chemically synthesized
  source 1..20: mol_type = other DNA
gagaaagcagagcatagtag

SEQ ID NO: 25289 - DNA, 20 bp, synthetic construct
  misc_feature 1..20: note = chemically synthesized
  source 1..20: mol_type = other DNA
gcagagcatagtagaggttt

SEQ ID NO: 25290 - DNA, 20 bp, synthetic construct
  misc_feature 1..20: note = chemically synthesized
  source 1..20: mol_type = other DNA
aggtttcagttttatctgtc

SEQ ID NO: 25291 - DNA, 20 bp, synthetic construct
  misc_feature 1..20: note = chemically synthesized
  source 1..20: mol_type = other DNA
gtttcagttttatctgtcaa

SEQ ID NO: 25292 - DNA, 20 bp, synthetic construct
  misc_feature 1..20: note = chemically synthesized
  source 1..20: mol_type = other DNA
atctgtcaagagcaaaattt

SEQ ID NO: 25293 - DNA, 20 bp, synthetic construct
  misc_feature 1..20: note = chemically synthesized
  source 1..20: mol_type = other DNA
tctgtcaagagcaaaatttg

SEQ ID NO: 25294 - DNA, 20 bp, synthetic construct
  misc_feature 1..20: note = chemically synthesized
  source 1..20: mol_type = other DNA
atttgaggtttctaaacatt

SEQ ID NO: 25295 - DNA, 20 bp, synthetic construct
  misc_feature 1..20: note = chemically synthesized
  source 1..20: mol_type = other DNA
aatattatgctttaaaactg

SEQ ID NO: 25296 - DNA, 20 bp, synthetic construct
  misc_feature 1..20: note = chemically synthesized
  source 1..20: mol_type = other DNA
atattatgctttaaaactga

SEQ ID NO: 25297 - DNA, 20 bp, synthetic construct
  misc_feature 1..20: note = chemically synthesized
  source 1..20: mol_type = other DNA
ttatgctttaaaactgaagg

SEQ ID NO: 25298 - DNA, 20 bp, synthetic construct
  misc_feature 1..20: note = chemically synthesized
  source 1..20: mol_type = other DNA
aactgaaggaagcaaaacct

SEQ ID NO: 25299 - DNA, 20 bp, synthetic construct
  misc_feature 1..20: note = chemically synthesized
  source 1..20: mol_type = other DNA
aaggaagcaaaacctcagca

SEQ ID NO: 25300 - DNA, 20 bp, synthetic construct
  misc_feature 1..20: note = chemically synthesized
  source 1..20: mol_type = other DNA
aggaagcaaaacctcagcat

SEQ ID NO: 25301 - DNA, 20 bp, synthetic construct
  misc_feature 1..20: note = chemically synthesized
  source 1..20: mol_type = other DNA
cctcagcataggccttctga

SEQ ID NO: 25302 - DNA, 20 bp, synthetic construct
  misc_feature 1..20: note = chemically synthesized
  source 1..20: mol_type = other DNA
ggccttctgaaagcttacga

SEQ ID NO: 25303 - DNA, 20 bp, synthetic construct
  misc_feature 1..20: note = chemically synthesized
  source 1..20: mol_type = other DNA
tggcttttctttttttcccc

SEQ ID NO: 25304 - DNA, 20 bp, synthetic construct
  misc_feature 1..20: note = chemically synthesized
  source 1..20: mol_type = other DNA
ggcttttctttttttccccc

SEQ ID NO: 25305 - DNA, 20 bp, synthetic construct
  misc_feature 1..20: note = chemically synthesized
  source 1..20: mol_type = other DNA
gcttttctttttttccccca

SEQ ID NO: 25306 - DNA, 20 bp, synthetic construct
  misc_feature 1..20: note = chemically synthesized
  source 1..20: mol_type = other DNA
tctttttttcccccagggca

SEQ ID NO: 25307 - DNA, 20 bp, synthetic construct
  misc_feature 1..20: note = chemically synthesized
  source 1..20: mol_type = other DNA
cccccagggcaaagtgttct

SEQ ID NO: 25308 - DNA, 20 bp, synthetic construct
  misc_feature 1..20: note = chemically synthesized
  source 1..20: mol_type = other DNA
ccccagggcaaagtgttctt

SEQ ID NO: 25309 - DNA, 20 bp, synthetic construct
  misc_feature 1..20: note = chemically synthesized
  source 1..20: mol_type = other DNA
ccagggcaaagtgttcttag

SEQ ID NO: 25310 - DNA, 20 bp, synthetic construct
  misc_feature 1..20: note = chemically synthesized
  source 1..20: mol_type = other DNA
ggcaaagtgttcttaggagc

SEQ ID NO: 25311 - DNA, 20 bp, synthetic construct
  misc_feature 1..20: note = chemically synthesized
  source 1..20: mol_type = other DNA
tgttcttaggagcaagatgt

SEQ ID NO: 25312 - DNA, 20 bp, synthetic construct
  misc_feature 1..20: note = chemically synthesized
  source 1..20: mol_type = other DNA
gaatttacaccattcttatg

SEQ ID NO: 25313 - DNA, 20 bp, synthetic construct
  misc_feature 1..20: note = chemically synthesized
  source 1..20: mol_type = other DNA
acaccattcttatgtggatt

SEQ ID NO: 25314 - DNA, 20 bp, synthetic construct
  misc_feature 1..20: note = chemically synthesized
  source 1..20: mol_type = other DNA
accattcttatgtggattaa

SEQ ID NO: 25315 - DNA, 20 bp, synthetic construct
  misc_feature 1..20: note = chemically synthesized
  source 1..20: mol_type = other DNA
cattcttatgtggattaaga

SEQ ID NO: 25316 - DNA, 20 bp, synthetic construct
  misc_feature 1..20: note = chemically synthesized
  source 1..20: mol_type = other DNA
attcttatgtggattaagag

SEQ ID NO: 25317 - DNA, 20 bp, synthetic construct
  misc_feature 1..20: note = chemically synthesized
  source 1..20: mol_type = other DNA
attaagagaggtttccttct

SEQ ID NO: 25318 - DNA, 20 bp, synthetic construct
  misc_feature 1..20: note = chemically synthesized
  source 1..20: mol_type = other DNA
ttaagagaggtttccttctg

SEQ ID NO: 25319 - DNA, 20 bp, synthetic construct
  misc_feature 1..20: note = chemically synthesized
  source 1..20: mol_type = other DNA
aggtttccttctgaggatgt

SEQ ID NO: 25320 - DNA, 20 bp, synthetic construct
  misc_feature 1..20: note = chemically synthesized
  source 1..20: mol_type = other DNA
tttccttctgaggatgttgg

SEQ ID NO: 25321 - DNA, 20 bp, synthetic construct
  misc_feature 1..20: note = chemically synthesized
  source 1..20: mol_type = other DNA
ggatgttggaagcctctgtt

SEQ ID NO: 25322 - DNA, 20 bp, synthetic construct
  misc_feature 1..20: note = chemically synthesized
  source 1..20: mol_type = other DNA
gatgttggaagcctctgttc

SEQ ID NO: 25323 - DNA, 20 bp, synthetic construct
  misc_feature 1..20: note = chemically synthesized
  source 1..20: mol_type = other DNA
gttcaggaactttttctttc

SEQ ID NO: 25324 - DNA, 20 bp, synthetic construct
  misc_feature 1..20: note = chemically synthesized
  source 1..20: mol_type = other DNA
ttctttccggatcatgctta

SEQ ID NO: 25325 - DNA, 20 bp, synthetic construct
  misc_feature 1..20: note = chemically synthesized
  source 1..20: mol_type = other DNA
ttacagatctgattacaccc

SEQ ID NO: 25326 - DNA, 20 bp, synthetic construct
  misc_feature 1..20: note = chemically synthesized
  source 1..20: mol_type = other DNA
cagatctgattacacccaag

SEQ ID NO: 25327 - DNA, 20 bp, synthetic construct
  misc_feature 1..20: note = chemically synthesized
  source 1..20: mol_type = other DNA
aagaagcctaaattgtgtgt

SEQ ID NO: 25328 - DNA, 20 bp, synthetic construct
  misc_feature 1..20: note = chemically synthesized
  source 1..20: mol_type = other DNA
taaattgtgtgtcagccaac

SEQ ID NO: 25329 - DNA, 20 bp, synthetic construct
  misc_feature 1..20: note = chemically synthesized
  source 1..20: mol_type = other DNA
gtgtgtcagccaactagatg

SEQ ID NO: 25330 - DNA, 20 bp, synthetic construct
  misc_feature 1..20: note = chemically synthesized
  source 1..20: mol_type = other DNA
tcagccaactagatgtggac

SEQ ID NO: 25331 - DNA, 20 bp, synthetic construct
  misc_feature 1..20: note = chemically synthesized
  source 1..20: mol_type = other DNA
ccaactagatgtggacaaga

SEQ ID NO: 25332 - DNA, 20 bp, synthetic construct
  misc_feature 1..20: note = chemically synthesized
  source 1..20: mol_type = other DNA
gatgtggacaagatagtttt

SEQ ID NO: 25333 - DNA, 20 bp, synthetic construct
  misc_feature 1..20: note = chemically synthesized
  source 1..20: mol_type = other DNA
gatagtttttagcctccttc

SEQ ID NO: 25334 - DNA, 20 bp, synthetic construct
  misc_feature 1..20: note = chemically synthesized
  source 1..20: mol_type = other DNA
atagtttttagcctccttct

SEQ ID NO: 25335 - DNA, 20 bp, synthetic construct
  misc_feature 1..20: note = chemically synthesized
  source 1..20: mol_type = other DNA
ttttagcctccttctgggac

SEQ ID NO: 25336 - DNA, 20 bp, synthetic construct
  misc_feature 1..20: note = chemically synthesized
  source 1..20: mol_type = other DNA
ggactagatattcattcacc

SEQ ID NO: 25337 - DNA, 20 bp, synthetic construct
  misc_feature 1..20: note = chemically synthesized
  source 1..20: mol_type = other DNA
agatattcattcaccaagat

SEQ ID NO: 25338 - DNA, 20 bp, synthetic construct
  misc_feature 1..20: note = chemically synthesized
  source 1..20: mol_type = other DNA
caccaagatgagtgcctttg

SEQ ID NO: 25339 - DNA, 20 bp, synthetic construct
  misc_feature 1..20: note = chemically synthesized
  source 1..20: mol_type = other DNA
caagatgagtgcctttgaag

SEQ ID NO: 25340 - DNA, 20 bp, synthetic construct
  misc_feature 1..20: note = chemically synthesized
  source 1..20: mol_type = other DNA
ctttgaagcagaatctgtga

SEQ ID NO: 25341 - DNA, 20 bp, synthetic construct
  misc_feature 1..20: note = chemically synthesized
  source 1..20: mol_type = other DNA
tttgaagcagaatctgtgat

SEQ ID NO: 25342 - DNA, 20 bp, synthetic construct
  misc_feature 1..20: note = chemically synthesized
  source 1..20: mol_type = other DNA
ttgaagcagaatctgtgata

SEQ ID NO: 25343 - DNA, 20 bp, synthetic construct
  misc_feature 1..20: note = chemically synthesized
  source 1..20: mol_type = other DNA
aagcagaatctgtgataggg

SEQ ID NO: 25344 - DNA, 20 bp, synthetic construct
  misc_feature 1..20: note = chemically synthesized
  source 1..20: mol_type = other DNA
agaatctgtgatagggtggt

SEQ ID NO: 25345 - DNA, 20 bp, synthetic construct
  misc_feature 1..20: note = chemically synthesized
  source 1..20: mol_type = other DNA
gaatctgtgatagggtggtt

SEQ ID NO: 25346 - DNA, 20 bp, synthetic construct
  misc_feature 1..20: note = chemically synthesized
  source 1..20: mol_type = other DNA
gatagggtggttgggccacc

SEQ ID NO: 25347 - DNA, 20 bp, synthetic construct
  misc_feature 1..20: note = chemically synthesized
  source 1..20: mol_type = other DNA
tagggtggttgggccaccta

SEQ ID NO: 25348 - DNA, 20 bp, synthetic construct
  misc_feature 1..20: note = chemically synthesized
  source 1..20: mol_type = other DNA
ttgggccacctagagacata

SEQ ID NO: 25349 - DNA, 20 bp, synthetic construct
  misc_feature 1..20: note = chemically synthesized
  source 1..20: mol_type = other DNA
tagagacatatggccatgac

SEQ ID NO: 25350 - DNA, 20 bp, synthetic construct
  misc_feature 1..20: note = chemically synthesized
  source 1..20: mol_type = other DNA
tatggccatgactagaatct

SEQ ID NO: 25351 - DNA, 20 bp, synthetic construct
  misc_feature 1..20: note = chemically synthesized
  source 1..20: mol_type = other DNA
atggccatgactagaatcta

SEQ ID NO: 25352 - DNA, 20 bp, synthetic construct
  misc_feature 1..20: note = chemically synthesized
  source 1..20: mol_type = other DNA
ccatgactagaatctaaggt

SEQ ID NO: 25353 - DNA, 20 bp, synthetic construct
  misc_feature 1..20: note = chemically synthesized
  source 1..20: mol_type = other DNA
agaatctaaggttagacata

SEQ ID NO: 25354 - DNA, 20 bp, synthetic construct
  misc_feature 1..20: note = chemically synthesized
  source 1..20: mol_type = other DNA
tctaaggttagacatacaga

SEQ ID NO: 25355 - DNA, 20 bp, synthetic construct
  misc_feature 1..20: note = chemically synthesized
  source 1..20: mol_type = other DNA
ctaaggttagacatacagaa

SEQ ID NO: 25356 - DNA, 20 bp, synthetic construct
  misc_feature 1..20: note = chemically synthesized
  source 1..20: mol_type = other DNA
ttagacatacagaaaggatg

SEQ ID NO: 25357 - DNA, 20 bp, synthetic construct
  misc_feature 1..20: note = chemically synthesized
  source 1..20: mol_type = other DNA
aaggatgaagtctttaaaaa

SEQ ID NO: 25358 - DNA, 20 bp, synthetic construct
  misc_feature 1..20: note = chemically synthesized
  source 1..20: mol_type = other DNA
aggatgaagtctttaaaaat

SEQ ID NO: 25359 - DNA, 20 bp, synthetic construct
  misc_feature 1..20: note = chemically synthesized
  source 1..20: mol_type = other DNA
tccattcacacatataacct

SEQ ID NO: 25360 - DNA, 20 bp, synthetic construct
  misc_feature 1..20: note = chemically synthesized
  source 1..20: mol_type = other DNA
ctgagtccctactgattttc

SEQ ID NO: 25361 - DNA, 20 bp, synthetic construct
  misc_feature 1..20: note = chemically synthesized
  source 1..20: mol_type = other DNA
tttctagtactgtactgaat

SEQ ID NO: 25362 - DNA, 20 bp, synthetic construct
  misc_feature 1..20: note = chemically synthesized
  source 1..20: mol_type = other DNA
ttctagtactgtactgaatg

SEQ ID NO: 25363 - DNA, 20 bp, synthetic construct
  misc_feature 1..20: note = chemically synthesized
  source 1..20: mol_type = other DNA
actgaatgaggccaacatga

SEQ ID NO: 25364 - DNA, 20 bp, synthetic construct
  misc_feature 1..20: note = chemically synthesized
  source 1..20: mol_type = other DNA
gaatgaggccaacatgatag

SEQ ID NO: 25365 - DNA, 20 bp, synthetic construct
  misc_feature 1..20: note = chemically synthesized
  source 1..20: mol_type = other DNA
tgaggccaacatgatagaag

SEQ ID NO: 25366 - DNA, 20 bp, synthetic construct
  misc_feature 1..20: note = chemically synthesized
  source 1..20: mol_type = other DNA
gatatgtatgcccatgtgtg

SEQ ID NO: 25367 - DNA, 20 bp, synthetic construct
  misc_feature 1..20: note = chemically synthesized
  source 1..20: mol_type = other DNA
atatgtatgcccatgtgtgt

SEQ ID NO: 25368 - DNA, 20 bp, synthetic construct
  misc_feature 1..20: note = chemically synthesized
  source 1..20: mol_type = other DNA
tatgtatgcccatgtgtgtg

SEQ ID NO: 25369 - DNA, 20 bp, synthetic construct
  misc_feature 1..20: note = chemically synthesized
  source 1..20: mol_type = other DNA
gtatgcccatgtgtgtgggg

SEQ ID NO: 25370 - DNA, 20 bp, synthetic construct
  misc_feature 1..20: note = chemically synthesized
  source 1..20: mol_type = other DNA
tgcccatgtgtgtggggtag

SEQ ID NO: 25371 - DNA, 20 bp, synthetic construct
  misc_feature 1..20: note = chemically synthesized
  source 1..20: mol_type = other DNA
tgtgtggggtagtagaaaca

SEQ ID NO: 25372 - DNA, 20 bp, synthetic construct
  misc_feature 1..20: note = chemically synthesized
  source 1..20: mol_type = other DNA
gggtagtagaaacaaagtca

SEQ ID NO: 25373 - DNA, 20 bp, synthetic construct
  misc_feature 1..20: note = chemically synthesized
  source 1..20: mol_type = other DNA
ggcttaacaaatattaatta

SEQ ID NO: 25374 - DNA, 20 bp, synthetic construct
  misc_feature 1..20: note = chemically synthesized
  source 1..20: mol_type = other DNA
ttaattaaagttattattac

SEQ ID NO: 25375 - DNA, 20 bp, synthetic construct
  misc_feature 1..20: note = chemically synthesized
  source 1..20: mol_type = other DNA
ttaaagttattattactagt

SEQ ID NO: 25376 - DNA, 20 bp, synthetic construct
  misc_feature 1..20: note = chemically synthesized
  source 1..20: mol_type = other DNA
aagttattattactagttag

SEQ ID NO: 25377 - DNA, 20 bp, synthetic construct
  misc_feature 1..20: note = chemically synthesized
  source 1..20: mol_type = other DNA
tactattaacaataatattt

SEQ ID NO: 25378 - DNA, 20 bp, synthetic construct
  misc_feature 1..20: note = chemically synthesized
  source 1..20: mol_type = other DNA
tattaacaataatattttag

SEQ ID NO: 25379 - DNA, 20 bp, synthetic construct
  misc_feature 1..20: note = chemically synthesized
  source 1..20: mol_type = other DNA
tttgcaaaatataacacttt

SEQ ID NO: 25380 - DNA, 20 bp, synthetic construct
  misc_feature 1..20: note = chemically synthesized
  source 1..20: mol_type = other DNA
ttgcaaaatataacactttt

SEQ ID NO: 25381 - DNA, 20 bp, synthetic construct
  misc_feature 1..20: note = chemically synthesized
  source 1..20: mol_type = other DNA
gcaaaatataacacttttag

SEQ ID NO: 25382 - DNA, 20 bp, synthetic construct
  misc_feature 1..20: note = chemically synthesized
  source 1..20: mol_type = other DNA
gaattacatctattatacct

SEQ ID NO: 25383 - DNA, 20 bp, synthetic construct
  misc_feature 1..20: note = chemically synthesized
  source 1..20: mol_type = other DNA
ctcagtaaaactctatgaaa

SEQ ID NO: 25384 - DNA, 20 bp, synthetic construct
  misc_feature 1..20: note = chemically synthesized
  source 1..20: mol_type = other DNA
gactttttatatattttttc

SEQ ID NO: 25385 - DNA, 20 bp, synthetic construct
  misc_feature 1..20: note = chemically synthesized
  source 1..20: mol_type = other DNA
aaaataaaatctgataattt

SEQ ID NO: 25386 - DNA, 20 bp, synthetic construct
  misc_feature 1..20: note = chemically synthesized
  source 1..20: mol_type = other DNA
ataatttgagacatttaaaa

SEQ ID NO: 25387 - DNA, 20 bp, synthetic construct
  misc_feature 1..20: note = chemically synthesized
  source 1..20: mol_type = other DNA
catttaaaaaagtatacaac

SEQ ID NO: 25388 - DNA, 20 bp, synthetic construct
  misc_feature 1..20: note = chemically synthesized
  source 1..20: mol_type = other DNA
taaaaaagtatacaactagt

SEQ ID NO: 25389 - DNA, 20 bp, synthetic construct
  misc_feature 1..20: note = chemically synthesized
  source 1..20: mol_type = other DNA
aaaagtatacaactagtaag

SEQ ID NO: 25390 - DNA, 20 bp, synthetic construct
  misc_feature 1..20: note = chemically synthesized
  source 1..20: mol_type = other DNA
ctccatgtatattaaatata

SEQ ID NO: 25391 - DNA, 20 bp, synthetic construct
  misc_feature 1..20: note = chemically synthesized
  source 1..20: mol_type = other DNA
tgtatattaaatataaagta

SEQ ID NO: 25392 - DNA, 20 bp, synthetic construct
  misc_feature 1..20: note = chemically synthesized
  source 1..20: mol_type = other DNA
ccttacctttctatcctccc

SEQ ID NO: 25393 - DNA, 20 bp, synthetic construct
  misc_feature 1..20: note = chemically synthesized
  source 1..20: mol_type = other DNA
ttacctttctatcctccctg

SEQ ID NO: 25394 - DNA, 20 bp, synthetic construct
  misc_feature 1..20: note = chemically synthesized
  source 1..20: mol_type = other DNA
tatgaacatactcaaataaa

SEQ ID NO: 25395 - DNA, 20 bp, synthetic construct
  misc_feature 1..20: note = chemically synthesized
  source 1..20: mol_type = other DNA
actcaaataaatagtcctat

SEQ ID NO: 25396 - DNA, 20 bp, synthetic construct
  misc_feature 1..20: note = chemically synthesized
  source 1..20: mol_type = other DNA
aaataaatagtcctattggc

SEQ ID NO: 25397 - DNA, 20 bp, synthetic construct
  misc_feature 1..20: note = chemically synthesized
  source 1..20: mol_type = other DNA
taaatagtcctattggctgg

SEQ ID NO: 25398 - DNA, 20 bp, synthetic construct
  misc_feature 1..20: note = chemically synthesized
  source 1..20: mol_type = other DNA
tagtcctattggctggtagc

SEQ ID NO: 25399 - DNA, 20 bp, synthetic construct
  misc_feature 1..20: note = chemically synthesized
  source 1..20: mol_type = other DNA
agtcctattggctggtagca

SEQ ID NO: 25400 - DNA, 20 bp, synthetic construct
  misc_feature 1..20: note = chemically synthesized
  source 1..20: mol_type = other DNA
gtcctattggctggtagcaa

SEQ ID NO: 25401 - DNA, 20 bp, synthetic construct
  misc_feature 1..20: note = chemically synthesized
  source 1..20: mol_type = other DNA
ctggtagcaagggctatgtg

SEQ ID NO: 25402 - DNA, 20 bp, synthetic construct
  misc_feature 1..20: note = chemically synthesized
  source 1..20: mol_type = other DNA
ccatgatgccacactaaaat

SEQ ID NO: 25403 - DNA, 20 bp, synthetic construct
  misc_feature 1..20: note = chemically synthesized
  source 1..20: mol_type = other DNA
ttgtctgcatttttgtgtta

SEQ ID NO: 25404 - DNA, 20 bp, synthetic construct
  misc_feature 1..20: note = chemically synthesized
  source 1..20: mol_type = other DNA
tttttgtgttacagtgaatg

SEQ ID NO: 25405 - DNA, 20 bp, synthetic construct
  misc_feature 1..20: note = chemically synthesized
  source 1..20: mol_type = other DNA
tgtagactaaaatccaaaat

SEQ ID NO: 25406 - DNA, 20 bp, synthetic construct
  misc_feature 1..20: note = chemically synthesized
  source 1..20: mol_type = other DNA
taaaatccaaaataagtcaa

SEQ ID NO: 25407 - DNA, 20 bp, synthetic construct
  misc_feature 1..20: note = chemically synthesized
  source 1..20: mol_type = other DNA
aataagtcaacagttgttaa

SEQ ID NO: 25408 - DNA, 20 bp, synthetic construct
  misc_feature 1..20: note = chemically synthesized
  source 1..20: mol_type = other DNA
gttaaaagtgatgacctcat

SEQ ID NO: 25409 - DNA, 20 bp, synthetic construct
  misc_feature 1..20: note = chemically synthesized
  source 1..20: mol_type = other DNA
cattggttttgctatcaaca

SEQ ID NO: 25410 - DNA, 20 bp, synthetic construct
  misc_feature 1..20: note = chemically synthesized
  source 1..20: mol_type = other DNA
ggttttgctatcaacataga

SEQ ID NO: 25411 - DNA, 20 bp, synthetic construct
  misc_feature 1..20: note = chemically synthesized
  source 1..20: mol_type = other DNA
ttgctatcaacatagaaaga

SEQ ID NO: 25412 - DNA, 20 bp, synthetic construct
  misc_feature 1..20: note = chemically synthesized
  source 1..20: mol_type = other DNA
tgctatcaacatagaaagaa

SEQ ID NO: 25413 - DNA, 20 bp, synthetic construct
  misc_feature 1..20: note = chemically synthesized
  source 1..20: mol_type = other DNA
gctatcaacatagaaagaaa

SEQ ID NO: 25414 - DNA, 20 bp, synthetic construct
  misc_feature 1..20: note = chemically synthesized
  source 1..20: mol_type = other DNA
atcaacatagaaagaaaggg

SEQ ID NO: 25415 - DNA, 20 bp, synthetic construct
  misc_feature 1..20: note = chemically synthesized
  source 1..20: mol_type = other DNA
agaaagggaagacattttct

SEQ ID NO: 25416 - DNA, 20 bp, synthetic construct
  misc_feature 1..20: note = chemically synthesized
  source 1..20: mol_type = other DNA
gaaagggaagacattttctc

SEQ ID NO: 25417 - DNA, 20 bp, synthetic construct
  misc_feature 1..20: note = chemically synthesized
  source 1..20: mol_type = other DNA
ttttctcaggatttttactc

SEQ ID NO: 25418 - DNA, 20 bp, synthetic construct
  misc_feature 1..20: note = chemically synthesized
  source 1..20: mol_type = other DNA
tttctcaggatttttactca

SEQ ID NO: 25419 - DNA, 20 bp, synthetic construct
  misc_feature 1..20: note = chemically synthesized
  source 1..20: mol_type = other DNA
tcaggatttttactcaagga

SEQ ID NO: 25420 - DNA, 20 bp, synthetic construct
  misc_feature 1..20: note = chemically synthesized
  source 1..20: mol_type = other DNA
caggatttttactcaaggaa

SEQ ID NO: 25421 - DNA, 20 bp, synthetic construct
  misc_feature 1..20: note = chemically synthesized
  source 1..20: mol_type = other DNA
gatttttactcaaggaaagg

SEQ ID NO: 25422 - DNA, 20 bp, synthetic construct
  misc_feature 1..20: note = chemically synthesized
  source 1..20: mol_type = other DNA
ttttactcaaggaaaggcag

SEQ ID NO: 25423 - DNA, 20 bp, synthetic construct
  misc_feature 1..20: note = chemically synthesized
  source 1..20: mol_type = other DNA
tttactcaaggaaaggcagt

SEQ ID NO: 25424 - DNA, 20 bp, synthetic construct
  misc_feature 1..20: note = chemically synthesized
  source 1..20: mol_type = other DNA
ttactcaaggaaaggcagtg

SEQ ID NO: 25425 - DNA, 20 bp, synthetic construct
  misc_feature 1..20: note = chemically synthesized
  source 1..20: mol_type = other DNA
tcaaggaaaggcagtgggga

SEQ ID NO: 25426 - DNA, 20 bp, synthetic construct
  misc_feature 1..20: note = chemically synthesized
  source 1..20: mol_type = other DNA
aaggaaaggcagtggggaaa

SEQ ID NO: 25427 - DNA, 20 bp, synthetic construct
  misc_feature 1..20: note = chemically synthesized
  source 1..20: mol_type = other DNA
aggaaaggcagtggggaaag

SEQ ID NO: 25428 - DNA, 20 bp, synthetic construct
  misc_feature 1..20: note = chemically synthesized
  source 1..20: mol_type = other DNA
ggcagtggggaaagaggctt

SEQ ID NO: 25429 - DNA, 20 bp, synthetic construct
  misc_feature 1..20: note = chemically synthesized
  source 1..20: mol_type = other DNA
ctgtgtcaatctgtatcaac

SEQ ID NO: 25430 - DNA, 20 bp, synthetic construct
  misc_feature 1..20: note = chemically synthesized
  source 1..20: mol_type = other DNA
tcttcaaacctccctctgca

SEQ ID NO: 25431 - DNA, 20 bp, synthetic construct
  misc_feature 1..20: note = chemically synthesized
  source 1..20: mol_type = other DNA
aacctccctctgcatggccc

SEQ ID NO: 25432 - DNA, 20 bp, synthetic construct
  misc_feature 1..20: note = chemically synthesized
  source 1..20: mol_type = other DNA
acctccctctgcatggcccc

SEQ ID NO: 25433 - DNA, 20 bp, synthetic construct
  misc_feature 1..20: note = chemically synthesized
  source 1..20: mol_type = other DNA
ctccctctgcatggccccag

SEQ ID NO: 25434 - DNA, 20 bp, synthetic construct
  misc_feature 1..20: note = chemically synthesized
  source 1..20: mol_type = other DNA
ccctctgcatggccccagga

SEQ ID NO: 25435 - DNA, 20 bp, synthetic construct
  misc_feature 1..20: note = chemically synthesized
  source 1..20: mol_type = other DNA
ctgcatggccccaggagagt

SEQ ID NO: 25436 - DNA, 20 bp, synthetic construct
  misc_feature 1..20: note = chemically synthesized
  source 1..20: mol_type = other DNA
aaacctctcctgccatctta

SEQ ID NO: 25437 - DNA, 20 bp, synthetic construct
  misc_feature 1..20: note = chemically synthesized
  source 1..20: mol_type = other DNA
ctgccatcttatggtttgta

SEQ ID NO: 25438 - DNA, 20 bp, synthetic construct
  misc_feature 1..20: note = chemically synthesized
  source 1..20: mol_type = other DNA
atggtttgtacagcatgtgc

SEQ ID NO: 25439 - DNA, 20 bp, synthetic construct
  misc_feature 1..20: note = chemically synthesized
  source 1..20: mol_type = other DNA
gcatgtgcaagctgcttcta

SEQ ID NO: 25440 - DNA, 20 bp, synthetic construct
  misc_feature 1..20: note = chemically synthesized
  source 1..20: mol_type = other DNA
tgcttctatagaaatgcata

SEQ ID NO: 25441 - DNA, 20 bp, synthetic construct
  misc_feature 1..20: note = chemically synthesized
  source 1..20: mol_type = other DNA
agaaatgcatatagaaaata

SEQ ID NO: 25442 - DNA, 20 bp, synthetic construct
  misc_feature 1..20: note = chemically synthesized
  source 1..20: mol_type = other DNA
gaaatgcatatagaaaatac

SEQ ID NO: 25443 - DNA, 20 bp, synthetic construct
  misc_feature 1..20: note = chemically synthesized
  source 1..20: mol_type = other DNA
aaatacaggtatataaatgc

SEQ ID NO: 25444 - DNA, 20 bp, synthetic construct
  misc_feature 1..20: note = chemically synthesized
  source 1..20: mol_type = other DNA
atacaggtatataaatgcta

SEQ ID NO: 25445 - DNA, 20 bp, synthetic construct
  misc_feature 1..20: note = chemically synthesized
  source 1..20: mol_type = other DNA
tacaggtatataaatgctag

SEQ ID NO: 25446 - DNA, 20 bp, synthetic construct
  misc_feature 1..20: note = chemically synthesized
  source 1..20: mol_type = other DNA
tataaatgctagaggctacc

SEQ ID NO: 25447 - DNA, 20 bp, synthetic construct
  misc_feature 1..20: note = chemically synthesized
  source 1..20: mol_type = other DNA
gtatttattattatcattaa

SEQ ID NO: 25448 - DNA, 20 bp, synthetic construct
  misc_feature 1..20: note = chemically synthesized
  source 1..20: mol_type = other DNA
attattatcattaacagtca

SEQ ID NO: 25449 - DNA, 20 bp, synthetic construct
  misc_feature 1..20: note = chemically synthesized
  source 1..20: mol_type = other DNA
ttaacagtcacagtctttta

SEQ ID NO: 25450 - DNA, 20 bp, synthetic construct
  misc_feature 1..20: note = chemically synthesized
  source 1..20: mol_type = other DNA
gtcttttatagtaaatccta

SEQ ID NO: 25451 - DNA, 20 bp, synthetic construct
  misc_feature 1..20: note = chemically synthesized
  source 1..20: mol_type = other DNA
tatagtaaatcctaaagttg

SEQ ID NO: 25452 - DNA, 20 bp, synthetic construct
  misc_feature 1..20: note = chemically synthesized
  source 1..20: mol_type = other DNA
atagtaaatcctaaagttga

SEQ ID NO: 25453 - DNA, 20 bp, synthetic construct
  misc_feature 1..20: note = chemically synthesized
  source 1..20: mol_type = other DNA
aatgctatgaaatattaaat

SEQ ID NO: 25454 - DNA, 20 bp, synthetic construct
  misc_feature 1..20: note = chemically synthesized
  source 1..20: mol_type = other DNA
aaatattaaataagtgacga

SEQ ID NO: 25455 - DNA, 20 bp, synthetic construct
  misc_feature 1..20: note = chemically synthesized
  source 1..20: mol_type = other DNA
tatcttttatgctgactgtc

SEQ ID NO: 25456 - DNA, 20 bp, synthetic construct
  misc_feature 1..20: note = chemically synthesized
  source 1..20: mol_type = other DNA
atcttttatgctgactgtcc

SEQ ID NO: 25457 - DNA, 20 bp, synthetic construct
  misc_feature 1..20: note = chemically synthesized
  source 1..20: mol_type = other DNA
ttatgctgactgtccaggat

SEQ ID NO: 25458 - DNA, 20 bp, synthetic construct
  misc_feature 1..20: note = chemically synthesized
  source 1..20: mol_type = other DNA
gtccaggattggaaatgcta

SEQ ID NO: 25459 - DNA, 20 bp, synthetic construct
  misc_feature 1..20: note = chemically synthesized
  source 1..20: mol_type = other DNA
ggattggaaatgctacagca

SEQ ID NO: 25460 - DNA, 20 bp, synthetic construct
  misc_feature 1..20: note = chemically synthesized
  source 1..20: mol_type = other DNA
tggaaatgctacagcaaagt

SEQ ID NO: 25461 - DNA, 20 bp, synthetic construct
  misc_feature 1..20: note = chemically synthesized
  source 1..20: mol_type = other DNA
aatgctacagcaaagtgaga

SEQ ID NO: 25462 - DNA, 20 bp, synthetic construct
  misc_feature 1..20: note = chemically synthesized
  source 1..20: mol_type = other DNA
atgctacagcaaagtgagat

SEQ ID NO: 25463 - DNA, 20 bp, synthetic construct
  misc_feature 1..20: note = chemically synthesized
  source 1..20: mol_type = other DNA
ttttatgtatatcatctgca

SEQ ID NO: 25464 - DNA, 20 bp, synthetic construct
  misc_feature 1..20: note = chemically synthesized
  source 1..20: mol_type = other DNA
ctgcaaagactaaactaaaa

SEQ ID NO: 25465 - DNA, 20 bp, synthetic construct
  misc_feature 1..20: note = chemically synthesized
  source 1..20: mol_type = other DNA
aaagactaaactaaaatagc

SEQ ID NO: 25466 - DNA, 20 bp, synthetic construct
  misc_feature 1..20: note = chemically synthesized
  source 1..20: mol_type = other DNA
aagactaaactaaaatagct

SEQ ID NO: 25467 - DNA, 20 bp, synthetic construct
  misc_feature 1..20: note = chemically synthesized
  source 1..20: mol_type = other DNA
aactaaaatagctgggttgt

SEQ ID NO: 25468 - DNA, 20 bp, synthetic construct
  misc_feature 1..20: note = chemically synthesized
  source 1..20: mol_type = other DNA
actaaaatagctgggttgtc

SEQ ID NO: 25469 - DNA, 20 bp, synthetic construct
  misc_feature 1..20: note = chemically synthesized
  source 1..20: mol_type = other DNA
aaatagctgggttgtcaggt

SEQ ID NO: 25470 - DNA, 20 bp, synthetic construct
  misc_feature 1..20: note = chemically synthesized
  source 1..20: mol_type = other DNA
atagctgggttgtcaggtca

SEQ ID NO: 25471 - DNA, 20 bp, synthetic construct
  misc_feature 1..20: note = chemically synthesized
  source 1..20: mol_type = other DNA
tgtcaggtcagagcaattta

SEQ ID NO: 25472 - DNA, 20 bp, synthetic construct
  misc_feature 1..20: note = chemically synthesized
  source 1..20: mol_type = other DNA
gtcaggtcagagcaatttac

SEQ ID NO: 25473 - DNA, 20 bp, synthetic construct
  misc_feature 1..20: note = chemically synthesized
  source 1..20: mol_type = other DNA
tcaggtcagagcaatttaca

SEQ ID NO: 25474 - DNA, 20 bp, synthetic construct
  misc_feature 1..20: note = chemically synthesized
  source 1..20: mol_type = other DNA
gaaaattaaattcaaatctt

SEQ ID NO: 25475 - DNA, 20 bp, synthetic construct
  misc_feature 1..20: note = chemically synthesized
  source 1..20: mol_type = other DNA
aaattaaattcaaatcttca

SEQ ID NO: 25476 - DNA, 20 bp, synthetic construct
  misc_feature 1..20: note = chemically synthesized
  source 1..20: mol_type = other DNA
aattaaattcaaatcttcag

SEQ ID NO: 25477 - DNA, 20 bp, synthetic construct
  misc_feature 1..20: note = chemically synthesized
  source 1..20: mol_type = other DNA
atcttcagaggatcatttgt

SEQ ID NO: 25478 - DNA, 20 bp, synthetic construct
  misc_feature 1..20: note = chemically synthesized
  source 1..20: mol_type = other DNA
ggtatgtctctgtccaattt

SEQ ID NO: 25479 - DNA, 20 bp, synthetic construct
  misc_feature 1..20: note = chemically synthesized
  source 1..20: mol_type = other DNA
gtatgtctctgtccaatttg

SEQ ID NO: 25480 - DNA, 20 bp, synthetic construct
  misc_feature 1..20: note = chemically synthesized
  source 1..20: mol_type = other DNA
tatgtctctgtccaatttga

SEQ ID NO: 25481 - DNA, 20 bp, synthetic construct
  misc_feature 1..20: note = chemically synthesized
  source 1..20: mol_type = other DNA
tgagggcaataatttaatgc

SEQ ID NO: 25482 - DNA, 20 bp, synthetic construct
  misc_feature 1..20: note = chemically synthesized
  source 1..20: mol_type = other DNA
tttctcactctttctgtgtt

SEQ ID NO: 25483 - DNA, 20 bp, synthetic construct
  misc_feature 1..20: note = chemically synthesized
  source 1..20: mol_type = other DNA
ctgtgtttagaaatgaataa

SEQ ID NO: 25484 - DNA, 20 bp, synthetic construct
  misc_feature 1..20: note = chemically synthesized
  source 1..20: mol_type = other DNA
actaaatacatttatttaac

SEQ ID NO: 25485 - DNA, 20 bp, synthetic construct
  misc_feature 1..20: note = chemically synthesized
  source 1..20: mol_type = other DNA
aaatacatttatttaacaag

SEQ ID NO: 25486 - DNA, 20 bp, synthetic construct
  misc_feature 1..20: note = chemically synthesized
  source 1..20: mol_type = other DNA
tttaacaagcggtcattgtt

SEQ ID NO: 25487 - DNA, 20 bp, synthetic construct
  misc_feature 1..20: note = chemically synthesized
  source 1..20: mol_type = other DNA
tagttgtttgtttatctaat

SEQ ID NO: 25488 - DNA, 20 bp, synthetic construct
  misc_feature 1..20: note = chemically synthesized
  source 1..20: mol_type = other DNA
gttgtttgtttatctaatga

SEQ ID NO: 25489 - DNA, 20 bp, synthetic construct
  misc_feature 1..20: note = chemically synthesized
  source 1..20: mol_type = other DNA
ttgtttgtttatctaatgag

SEQ ID NO: 25490 - DNA, 20 bp, synthetic construct
  misc_feature 1..20: note = chemically synthesized
  source 1..20: mol_type = other DNA
aatgagaggcttctctattt

SEQ ID NO: 25491 - DNA, 20 bp, synthetic construct
  misc_feature 1..20: note = chemically synthesized
  source 1..20: mol_type = other DNA
ttctctattttagcaactac

SEQ ID NO: 25492 - DNA, 20 bp, synthetic construct
  misc_feature 1..20: note = chemically synthesized
  source 1..20: mol_type = other DNA
tctctattttagcaactact

SEQ ID NO: 25493 - DNA, 20 bp, synthetic construct
  misc_feature 1..20: note = chemically synthesized
  source 1..20: mol_type = other DNA
tactgggtacaaaaatacat

SEQ ID NO: 25494 - DNA, 20 bp, synthetic construct
  misc_feature 1..20: note = chemically synthesized
  source 1..20: mol_type = other DNA
atatattctctgttcctatg

SEQ ID NO: 25495 - DNA, 20 bp, synthetic construct
  misc_feature 1..20: note = chemically synthesized
  source 1..20: mol_type = other DNA
ctatgaagcttgtattttaa

SEQ ID NO: 25496 - DNA, 20 bp, synthetic construct
  misc_feature 1..20: note = chemically synthesized
  source 1..20: mol_type = other DNA
gaagcttgtattttaacgga

SEQ ID NO: 25497 - DNA, 20 bp, synthetic construct
  misc_feature 1..20: note = chemically synthesized
  source 1..20: mol_type = other DNA
aagcttgtattttaacggaa

SEQ ID NO: 25498 - DNA, 20 bp, synthetic construct
  misc_feature 1..20: note = chemically synthesized
  source 1..20: mol_type = other DNA
acggaaaggaaataataaaa

SEQ ID NO: 25499 - DNA, 20 bp, synthetic construct
  misc_feature 1..20: note = chemically synthesized
  source 1..20: mol_type = other DNA
aaaataattacaacctcata

SEQ ID NO: 25500 - DNA, 20 bp, synthetic construct
  misc_feature 1..20: note = chemically synthesized
  source 1..20: mol_type = other DNA
acctcatatagctgctatga

SEQ ID NO: 25501 - DNA, 20 bp, synthetic construct
  misc_feature 1..20: note = chemically synthesized
  source 1..20: mol_type = other DNA
catatagctgctatgaaaga

SEQ ID NO: 25502 - DNA, 20 bp, synthetic construct
  misc_feature 1..20: note = chemically synthesized
  source 1..20: mol_type = other DNA
aaagaaaaaatttgatgcaa

SEQ ID NO: 25503 - DNA, 20 bp, synthetic construct
  misc_feature 1..20: note = chemically synthesized
  source 1..20: mol_type = other DNA
agaaaaaatttgatgcaata

SEQ ID NO: 25504 - DNA, 20 bp, synthetic construct
  misc_feature 1..20: note = chemically synthesized
  source 1..20: mol_type = other DNA
gagaataacaaaatttatgt

SEQ ID NO: 25505 - DNA, 20 bp, synthetic construct
  misc_feature 1..20: note = chemically synthesized
  source 1..20: mol_type = other DNA
ataacaaaatttatgtaagc

SEQ ID NO: 25506 - DNA, 20 bp, synthetic construct
  misc_feature 1..20: note = chemically synthesized
  source 1..20: mol_type = other DNA
gtaagctagtgtgacaaatg

SEQ ID NO: 25507 - DNA, 20 bp, synthetic construct
  misc_feature 1..20: note = chemically synthesized
  source 1..20: mol_type = other DNA
taagctagtgtgacaaatgc

SEQ ID NO: 25508 - DNA, 20 bp, synthetic construct
  misc_feature 1..20: note = chemically synthesized
  source 1..20: mol_type = other DNA
gtgtgacaaatgcgggttct

SEQ ID NO: 25509 - DNA, 20 bp, synthetic construct
  misc_feature 1..20: note = chemically synthesized
  source 1..20: mol_type = other DNA
gtgacaaatgcgggttctga

SEQ ID NO: 25510 - DNA, 20 bp, synthetic construct
  misc_feature 1..20: note = chemically synthesized
  source 1..20: mol_type = other DNA
tgacaaatgcgggttctgag

SEQ ID NO: 25511 - DNA, 20 bp, synthetic construct
  misc_feature 1..20: note = chemically synthesized
  source 1..20: mol_type = other DNA
acaaatgcgggttctgagag

SEQ ID NO: 25512 - DNA, 20 bp, synthetic construct
  misc_feature 1..20: note = chemically synthesized
  source 1..20: mol_type = other DNA
caaatgcgggttctgagagg

SEQ ID NO: 25513 - DNA, 20 bp, synthetic construct
  misc_feature 1..20: note = chemically synthesized
  source 1..20: mol_type = other DNA
tctgagaggaggtaatattt

SEQ ID NO: 25514 - DNA, 20 bp, synthetic construct
  misc_feature 1..20: note = chemically synthesized
  source 1..20: mol_type = other DNA
taatatttcagctgtgacct

SEQ ID NO: 25515 - DNA, 20 bp, synthetic construct
  misc_feature 1..20: note = chemically synthesized
  source 1..20: mol_type = other DNA
atatttcagctgtgacctga

SEQ ID NO: 25516 - DNA, 20 bp, synthetic construct
  misc_feature 1..20: note = chemically synthesized
  source 1..20: mol_type = other DNA
cagctgtgacctgagagttg

SEQ ID NO: 25517 - DNA, 20 bp, synthetic construct
  misc_feature 1..20: note = chemically synthesized
  source 1..20: mol_type = other DNA
gctgtgacctgagagttgta

SEQ ID NO: 25518 - DNA, 20 bp, synthetic construct
  misc_feature 1..20: note = chemically synthesized
  source 1..20: mol_type = other DNA
ctgtgacctgagagttgtag

SEQ ID NO: 25519 - DNA, 20 bp, synthetic construct
  misc_feature 1..20: note = chemically synthesized
  source 1..20: mol_type = other DNA
cctgagagttgtagaggcaa

SEQ ID NO: 25520 - DNA, 20 bp, synthetic construct
  misc_feature 1..20: note = chemically synthesized
  source 1..20: mol_type = other DNA
gagagttgtagaggcaaaag

SEQ ID NO: 25521 - DNA, 20 bp, synthetic construct
  misc_feature 1..20: note = chemically synthesized
  source 1..20: mol_type = other DNA
aggcaaaagaagtattgcca

SEQ ID NO: 25522 - DNA, 20 bp, synthetic construct
  misc_feature 1..20: note = chemically synthesized
  source 1..20: mol_type = other DNA
caaaagaagtattgccatag

SEQ ID NO: 25523 - DNA, 20 bp, synthetic construct
  misc_feature 1..20: note = chemically synthesized
  source 1..20: mol_type = other DNA
aagtattgccatagtggtat

SEQ ID NO: 25524 - DNA, 20 bp, synthetic construct
  misc_feature 1..20: note = chemically synthesized
  source 1..20: mol_type = other DNA
tgccatagtggtattggtcc

SEQ ID NO: 25525 - DNA, 20 bp, synthetic construct
  misc_feature 1..20: note = chemically synthesized
  source 1..20: mol_type = other DNA
ccatagtggtattggtcctg

SEQ ID NO: 25526 - DNA, 20 bp, synthetic construct
  misc_feature 1..20: note = chemically synthesized
  source 1..20: mol_type = other DNA
tggtattggtcctggagctc

SEQ ID NO: 25527 - DNA, 20 bp, synthetic construct
  misc_feature 1..20: note = chemically synthesized
  source 1..20: mol_type = other DNA
tcctggagctctggttcaat

SEQ ID NO: 25528 - DNA, 20 bp, synthetic construct
  misc_feature 1..20: note = chemically synthesized
  source 1..20: mol_type = other DNA
tggagctctggttcaatgag

SEQ ID NO: 25529 - DNA, 20 bp, synthetic construct
  misc_feature 1..20: note = chemically synthesized
  source 1..20: mol_type = other DNA
gctctggttcaatgagcaga

SEQ ID NO: 25530 - DNA, 20 bp, synthetic construct
  misc_feature 1..20: note = chemically synthesized
  source 1..20: mol_type = other DNA
ctggttcaatgagcagacag

SEQ ID NO: 25531 - DNA, 20 bp, synthetic construct
  misc_feature 1..20: note = chemically synthesized
  source 1..20: mol_type = other DNA
tggttcaatgagcagacaga

SEQ ID NO: 25532 - DNA, 20 bp, synthetic construct
  misc_feature 1..20: note = chemically synthesized
  source 1..20: mol_type = other DNA
ttcaatgagcagacagaagg

SEQ ID NO: 25533 - DNA, 20 bp, synthetic construct
  misc_feature 1..20: note = chemically synthesized
  source 1..20: mol_type = other DNA
caatgagcagacagaaggaa

SEQ ID NO: 25534 - DNA, 20 bp, synthetic construct
  misc_feature 1..20: note = chemically synthesized
  source 1..20: mol_type = other DNA
agaaccatatgatcatactt

SEQ ID NO: 25535 - DNA, 20 bp, synthetic construct
  misc_feature 1..20: note = chemically synthesized
  source 1..20: mol_type = other DNA
gaaccatatgatcatacttc

SEQ ID NO: 25536 - DNA, 20 bp, synthetic construct
  misc_feature 1..20: note = chemically synthesized
  source 1..20: mol_type = other DNA
tatgatcatacttcaggaaa

SEQ ID NO: 25537 - DNA, 20 bp, synthetic construct
  misc_feature 1..20: note = chemically synthesized
  source 1..20: mol_type = other DNA
gaaaaagacttacacatgat

SEQ ID NO: 25538 - DNA, 20 bp, synthetic construct
  misc_feature 1..20: note = chemically synthesized
  source 1..20: mol_type = other DNA
aaaaagacttacacatgatt

SEQ ID NO: 25539 - DNA, 20 bp, synthetic construct
  misc_feature 1..20: note = chemically synthesized
  source 1..20: mol_type = other DNA
aaaagacttacacatgattg

SEQ ID NO: 25540 - DNA, 20 bp, synthetic construct
  misc_feature 1..20: note = chemically synthesized
  source 1..20: mol_type = other DNA
cacatgattggggctaccca

SEQ ID NO: 25541 - DNA, 20 bp, synthetic construct
  misc_feature 1..20: note = chemically synthesized
  source 1..20: mol_type = other DNA
acatgattggggctacccaa

SEQ ID NO: 25542 - DNA, 20 bp, synthetic construct
  misc_feature 1..20: note = chemically synthesized
  source 1..20: mol_type = other DNA
catgattggggctacccaaa

SEQ ID NO: 25543 - DNA, 20 bp, synthetic construct
  misc_feature 1..20: note = chemically synthesized
  source 1..20: mol_type = other DNA
ttggggctacccaaagggac

SEQ ID NO: 25544 - DNA, 20 bp, synthetic construct
  misc_feature 1..20: note = chemically synthesized
  source 1..20: mol_type = other DNA
ccaaagggactggtttttcc

SEQ ID NO: 25545 - DNA, 20 bp, synthetic construct
  misc_feature 1..20: note = chemically synthesized
  source 1..20: mol_type = other DNA
aaagggactggtttttccaa

SEQ ID NO: 25546 - DNA, 20 bp, synthetic construct
  misc_feature 1..20: note = chemically synthesized
  source 1..20: mol_type = other DNA
gggactggtttttccaagag

SEQ ID NO: 25547 - DNA, 20 bp, synthetic construct
  misc_feature 1..20: note = chemically synthesized
  source 1..20: mol_type = other DNA
tttccaagagcagataattt

SEQ ID NO: 25548 - DNA, 20 bp, synthetic construct
  misc_feature 1..20: note = chemically synthesized
  source 1..20: mol_type = other DNA
gataatttgagtgataaaaa

SEQ ID NO: 25549 - DNA, 20 bp, synthetic construct
  misc_feature 1..20: note = chemically synthesized
  source 1..20: mol_type = other DNA
ttttgaacccttccttctgc

SEQ ID NO: 25550 - DNA, 20 bp, synthetic construct
  misc_feature 1..20: note = chemically synthesized
  source 1..20: mol_type = other DNA
acccttccttctgctagccc

SEQ ID NO: 25551 - DNA, 20 bp, synthetic construct
  misc_feature 1..20: note = chemically synthesized
  source 1..20: mol_type = other DNA
ccttctgctagccctagcta

SEQ ID NO: 25552 - DNA, 20 bp, synthetic construct
  misc_feature 1..20: note = chemically synthesized
  source 1..20: mol_type = other DNA
gccctagctatggaccacca

SEQ ID NO: 25553 - DNA, 20 bp, synthetic construct
  misc_feature 1..20: note = chemically synthesized
  source 1..20: mol_type = other DNA
atggaccaccatggatattg

SEQ ID NO: 25554 - DNA, 20 bp, synthetic construct
  misc_feature 1..20: note = chemically synthesized
  source 1..20: mol_type = other DNA
accaccatggatattgaagt

SEQ ID NO: 25555 - DNA, 20 bp, synthetic construct
  misc_feature 1..20: note = chemically synthesized
  source 1..20: mol_type = other DNA
ccaccatggatattgaagta

SEQ ID NO: 25556 - DNA, 20 bp, synthetic construct
  misc_feature 1..20: note = chemically synthesized
  source 1..20: mol_type = other DNA
caccatggatattgaagtaa

SEQ ID NO: 25557 - DNA, 20 bp, synthetic construct
  misc_feature 1..20: note = chemically synthesized
  source 1..20: mol_type = other DNA
ttgaagtaagggctttgttt

SEQ ID NO: 25558 - DNA, 20 bp, synthetic construct
  misc_feature 1..20: note = chemically synthesized
  source 1..20: mol_type = other DNA
aattactctccacacattct

SEQ ID NO: 25559 - DNA, 20 bp, synthetic construct
  misc_feature 1..20: note = chemically synthesized
  source 1..20: mol_type = other DNA
attactctccacacattctg

SEQ ID NO: 25560 - DNA, 20 bp, synthetic construct
  misc_feature 1..20: note = chemically synthesized
  source 1..20: mol_type = other DNA
cacacattctgaggatatac

SEQ ID NO: 25561 - DNA, 20 bp, synthetic construct
  misc_feature 1..20: note = chemically synthesized
  source 1..20: mol_type = other DNA
acacattctgaggatataca

SEQ ID NO: 25562 - DNA, 20 bp, synthetic construct
  misc_feature 1..20: note = chemically synthesized
  source 1..20: mol_type = other DNA
cacattctgaggatatacaa

SEQ ID NO: 25563 - DNA, 20 bp, synthetic construct
  misc_feature 1..20: note = chemically synthesized
  source 1..20: mol_type = other DNA
acaagggcactgaaatattc

SEQ ID NO: 25564 - DNA, 20 bp, synthetic construct
  misc_feature 1..20: note = chemically synthesized
  source 1..20: mol_type = other DNA
gggcactgaaatattctaga

SEQ ID NO: 25565 - DNA, 20 bp, synthetic construct
  misc_feature 1..20: note = chemically synthesized
  source 1..20: mol_type = other DNA
gaaatattctagaaagtcca

SEQ ID NO: 25566 - DNA, 20 bp, synthetic construct
  misc_feature 1..20: note = chemically synthesized
  source 1..20: mol_type = other DNA
cattctgatgtttatactct

SEQ ID NO: 25567 - DNA, 20 bp, synthetic construct
  misc_feature 1..20: note = chemically synthesized
  source 1..20: mol_type = other DNA
tgtttatactctaagccaca

SEQ ID NO: 25568 - DNA, 20 bp, synthetic construct
  misc_feature 1..20: note = chemically synthesized
  source 1..20: mol_type = other DNA
agccacacagcacctttccc

SEQ ID NO: 25569 - DNA, 20 bp, synthetic construct
  misc_feature 1..20: note = chemically synthesized
  source 1..20: mol_type = other DNA
acagcacctttccccggatc

SEQ ID NO: 25570 - DNA, 20 bp, synthetic construct
  misc_feature 1..20: note = chemically synthesized
  source 1..20: mol_type = other DNA
cagcacctttccccggatct

SEQ ID NO: 25571 - DNA, 20 bp, synthetic construct
  misc_feature 1..20: note = chemically synthesized
  source 1..20: mol_type = other DNA
agcacctttccccggatcta

SEQ ID NO: 25572 - DNA, 20 bp, synthetic construct
  misc_feature 1..20: note = chemically synthesized
  source 1..20: mol_type = other DNA
ggatctagggtctttcacat

SEQ ID NO: 25573 - DNA, 20 bp, synthetic construct
  misc_feature 1..20: note = chemically synthesized
  source 1..20: mol_type = other DNA
gatctagggtctttcacatt

SEQ ID NO: 25574 - DNA, 20 bp, synthetic construct
  misc_feature 1..20: note = chemically synthesized
  source 1..20: mol_type = other DNA
atttttttaaaactcaaaca

SEQ ID NO: 25575 - DNA, 20 bp, synthetic construct
  misc_feature 1..20: note = chemically synthesized
  source 1..20: mol_type = other DNA
tttttaaaactcaaacacag

SEQ ID NO: 25576 - DNA, 20 bp, synthetic construct
  misc_feature 1..20: note = chemically synthesized
  source 1..20: mol_type = other DNA
catataattctcattctctg

SEQ ID NO: 25577 - DNA, 20 bp, synthetic construct
  misc_feature 1..20: note = chemically synthesized
  source 1..20: mol_type = other DNA
tgtggctcataaacatttaa

SEQ ID NO: 25578 - DNA, 20 bp, synthetic construct
  misc_feature 1..20: note = chemically synthesized
  source 1..20: mol_type = other DNA
tggctcataaacatttaata

SEQ ID NO: 25579 - DNA, 20 bp, synthetic construct
  misc_feature 1..20: note = chemically synthesized
  source 1..20: mol_type = other DNA
tgatgaaactgtaaaaccct

SEQ ID NO: 25580 - DNA, 20 bp, synthetic construct
  misc_feature 1..20: note = chemically synthesized
  source 1..20: mol_type = other DNA
aactgtaaaaccctgagttg

SEQ ID NO: 25581 - DNA, 20 bp, synthetic construct
  misc_feature 1..20: note = chemically synthesized
  source 1..20: mol_type = other DNA
actgtaaaaccctgagttgt

SEQ ID NO: 25582 - DNA, 20 bp, synthetic construct
  misc_feature 1..20: note = chemically synthesized
  source 1..20: mol_type = other DNA
taaaaccctgagttgtaggc

SEQ ID NO: 25583 - DNA, 20 bp, synthetic construct
  misc_feature 1..20: note = chemically synthesized
  source 1..20: mol_type = other DNA
aaaccctgagttgtaggccg

SEQ ID NO: 25584 - DNA, 20 bp, synthetic construct
  misc_feature 1..20: note = chemically synthesized
  source 1..20: mol_type = other DNA
agatataaaatttcaacata

SEQ ID NO: 25585 - DNA, 20 bp, synthetic construct
  misc_feature 1..20: note = chemically synthesized
  source 1..20: mol_type = other DNA
taaagaatgaacaaaatgac

SEQ ID NO: 25586 - DNA, 20 bp, synthetic construct
  misc_feature 1..20: note = chemically synthesized
  source 1..20: mol_type = other DNA
aagaatgaacaaaatgacca

SEQ ID NO: 25587 - DNA, 20 bp, synthetic construct
  misc_feature 1..20: note = chemically synthesized
  source 1..20: mol_type = other DNA
agaatgaacaaaatgaccag

SEQ ID NO: 25588 - DNA, 20 bp, synthetic construct
  misc_feature 1..20: note = chemically synthesized
  source 1..20: mol_type = other DNA
atgaacaaaatgaccagagg

SEQ ID NO: 25589 - DNA, 20 bp, synthetic construct
  misc_feature 1..20: note = chemically synthesized
  source 1..20: mol_type = other DNA
gaacaaaatgaccagaggca

SEQ ID NO: 25590 - DNA, 20 bp, synthetic construct
  misc_feature 1..20: note = chemically synthesized
  source 1..20: mol_type = other DNA
aacaaaatgaccagaggcag

SEQ ID NO: 25591 - DNA, 20 bp, synthetic construct
  misc_feature 1..20: note = chemically synthesized
  source 1..20: mol_type = other DNA
accagaggcagaggtaccct

SEQ ID NO: 25592 - DNA, 20 bp, synthetic construct
  misc_feature 1..20: note = chemically synthesized
  source 1..20: mol_type = other DNA
cagaggcagaggtaccctga

SEQ ID NO: 25593 - DNA, 20 bp, synthetic construct
  misc_feature 1..20: note = chemically synthesized
  source 1..20: mol_type = other DNA
ggcagaggtaccctgagaga

SEQ ID NO: 25594 - DNA, 20 bp, synthetic construct
  misc_feature 1..20: note = chemically synthesized
  source 1..20: mol_type = other DNA
ggtaccctgagagacagtga

SEQ ID NO: 25595 - DNA, 20 bp, synthetic construct
  misc_feature 1..20: note = chemically synthesized
  source 1..20: mol_type = other DNA
gacagtgatagctgtatcta

SEQ ID NO: 25596 - DNA, 20 bp, synthetic construct
  misc_feature 1..20: note = chemically synthesized
  source 1..20: mol_type = other DNA
cagtgatagctgtatctaaa

SEQ ID NO: 25597 - DNA, 20 bp, synthetic construct
  misc_feature 1..20: note = chemically synthesized
  source 1..20: mol_type = other DNA
aagagtactgatattaaaaa

SEQ ID NO: 25598 - DNA, 20 bp, synthetic construct
  misc_feature 1..20: note = chemically synthesized
  source 1..20: mol_type = other DNA
gagtactgatattaaaaata

SEQ ID NO: 25599 - DNA, 20 bp, synthetic construct
  misc_feature 1..20: note = chemically synthesized
  source 1..20: mol_type = other DNA
catatatctcattatatcca

SEQ ID NO: 25600 - DNA, 20 bp, synthetic construct
  misc_feature 1..20: note = chemically synthesized
  source 1..20: mol_type = other DNA
atatatctcattatatccaa

SEQ ID NO: 25601 - DNA, 20 bp, synthetic construct
  misc_feature 1..20: note = chemically synthesized
  source 1..20: mol_type = other DNA
tatatctcattatatccaaa

SEQ ID NO: 25602 - DNA, 20 bp, synthetic construct
  misc_feature 1..20: note = chemically synthesized
  source 1..20: mol_type = other DNA
ttatatccaaagggttacat

SEQ ID NO: 25603 - DNA, 20 bp, synthetic construct
  misc_feature 1..20: note = chemically synthesized
  source 1..20: mol_type = other DNA
caaagggttacataagtttt

SEQ ID NO: 25604 - DNA, 20 bp, synthetic construct
  misc_feature 1..20: note = chemically synthesized
  source 1..20: mol_type = other DNA
aagggttacataagttttaa

SEQ ID NO: 25605 - DNA, 20 bp, synthetic construct
  misc_feature 1..20: note = chemically synthesized
  source 1..20: mol_type = other DNA
ggttacataagttttaagag

SEQ ID NO: 25606 - DNA, 20 bp, synthetic construct
  misc_feature 1..20: note = chemically synthesized
  source 1..20: mol_type = other DNA
ttaagagtggaaataacatg

SEQ ID NO: 25607 - DNA, 20 bp, synthetic construct
  misc_feature 1..20: note = chemically synthesized
  source 1..20: mol_type = other DNA
taagagtggaaataacatga

SEQ ID NO: 25608 - DNA, 20 bp, synthetic construct
  misc_feature 1..20: note = chemically synthesized
  source 1..20: mol_type = other DNA
catgaaggaccctaaacaat

SEQ ID NO: 25609 - DNA, 20 bp, synthetic construct
  misc_feature 1..20: note = chemically synthesized
  source 1..20: mol_type = other DNA
atgaaggaccctaaacaatt

SEQ ID NO: 25610 - DNA, 20 bp, synthetic construct
  misc_feature 1..20: note = chemically synthesized
  source 1..20: mol_type = other DNA
gaccctaaacaattaggaaa

SEQ ID NO: 25611 - DNA, 20 bp, synthetic construct
  misc_feature 1..20: note = chemically synthesized
  source 1..20: mol_type = other DNA
aacagaaatttgacttgctt

SEQ ID NO: 25612 - DNA, 20 bp, synthetic construct
  misc_feature 1..20: note = chemically synthesized
  source 1..20: mol_type = other DNA
atttgacttgcttcagataa

SEQ ID NO: 25613 - DNA, 20 bp, synthetic construct
  misc_feature 1..20: note = chemically synthesized
  source 1..20: mol_type = other DNA
taaaatattttatctgaaac

SEQ ID NO: 25614 - DNA, 20 bp, synthetic construct
  misc_feature 1..20: note = chemically synthesized
  source 1..20: mol_type = other DNA
atattttatctgaaacaagt

SEQ ID NO: 25615 - DNA, 20 bp, synthetic construct
  misc_feature 1..20: note = chemically synthesized
  source 1..20: mol_type = other DNA
gtaagcttgttcaaaaaata

SEQ ID NO: 25616 - DNA, 20 bp, synthetic construct
  misc_feature 1..20: note = chemically synthesized
  source 1..20: mol_type = other DNA
taagcttgttcaaaaaatat

SEQ ID NO: 25617 - DNA, 20 bp, synthetic construct
  misc_feature 1..20: note = chemically synthesized
  source 1..20: mol_type = other DNA
atataggatatatgtgtaca

SEQ ID NO: 25618 - DNA, 20 bp, synthetic construct
  misc_feature 1..20: note = chemically synthesized
  source 1..20: mol_type = other DNA
aggatatatgtgtacatagt

SEQ ID NO: 25619 - DNA, 20 bp, synthetic construct
  misc_feature 1..20: note = chemically synthesized
  source 1..20: mol_type = other DNA
gtgagatgattacttcaatc

SEQ ID NO: 25620 - DNA, 20 bp, synthetic construct
  misc_feature 1..20: note = chemically synthesized
  source 1..20: mol_type = other DNA
catcaatacaacaccttcca

SEQ ID NO: 25621 - DNA, 20 bp, synthetic construct
  misc_feature 1..20: note = chemically synthesized
  source 1..20: mol_type = other DNA
cttttgctttttctttgtgt

SEQ ID NO: 25622 - DNA, 20 bp, synthetic construct
  misc_feature 1..20: note = chemically synthesized
  source 1..20: mol_type = other DNA
ttttgctttttctttgtgta

SEQ ID NO: 25623 - DNA, 20 bp, synthetic construct
  misc_feature 1..20: note = chemically synthesized
  source 1..20: mol_type = other DNA
tttgctttttctttgtgtaa

SEQ ID NO: 25624 - DNA, 20 bp, synthetic construct
  misc_feature 1..20: note = chemically synthesized
  source 1..20: mol_type = other DNA
ctactgtcataacaaatgtt

SEQ ID NO: 25625 - DNA, 20 bp, synthetic construct
  misc_feature 1..20: note = chemically synthesized
  source 1..20: mol_type = other DNA
cataacaaatgtttagttta

SEQ ID NO: 25626 - DNA, 20 bp, synthetic construct
  misc_feature 1..20: note = chemically synthesized
  source 1..20: mol_type = other DNA
caaatgtttagtttacagta

SEQ ID NO: 25627 - DNA, 20 bp, synthetic construct
  misc_feature 1..20: note = chemically synthesized
  source 1..20: mol_type = other DNA
ttagtttacagtacagtatt

SEQ ID NO: 25628 - DNA, 20 bp, synthetic construct
  misc_feature 1..20: note = chemically synthesized
  source 1..20: mol_type = other DNA
taagtcttcatgccatacac

SEQ ID NO: 25629 - DNA, 20 bp, synthetic construct
  misc_feature 1..20: note = chemically synthesized
  source 1..20: mol_type = other DNA
ctaaacttatttatcctata

SEQ ID NO: 25630 - DNA, 20 bp, synthetic construct
  misc_feature 1..20: note = chemically synthesized
  source 1..20: mol_type = other DNA
tatttatcctatacagctgc

SEQ ID NO: 25631 - DNA, 20 bp, synthetic construct
  misc_feature 1..20: note = chemically synthesized
  source 1..20: mol_type = other DNA
tttgaccttatttttctttt

SEQ ID NO: 25632 - DNA, 20 bp, synthetic construct
  misc_feature 1..20: note = chemically synthesized
  source 1..20: mol_type = other DNA
tcttttgagattccacatat

SEQ ID NO: 25633 - DNA, 20 bp, synthetic construct
  misc_feature 1..20: note = chemically synthesized
  source 1..20: mol_type = other DNA
cctttatttgtttctgtgtc

SEQ ID NO: 25634 - DNA, 20 bp, synthetic construct
  misc_feature 1..20: note = chemically synthesized
  source 1..20: mol_type = other DNA
tgtgtctggtttatttcact

SEQ ID NO: 25635 - DNA, 20 bp, synthetic construct
  misc_feature 1..20: note = chemically synthesized
  source 1..20: mol_type = other DNA
tcacttagcaaaatgtactc

SEQ ID NO: 25636 - DNA, 20 bp, synthetic construct
  misc_feature 1..20: note = chemically synthesized
  source 1..20: mol_type = other DNA
cacttagcaaaatgtactct

SEQ ID NO: 25637 - DNA, 20 bp, synthetic construct
  misc_feature 1..20: note = chemically synthesized
  source 1..20: mol_type = other DNA
ttccccccatctcctttttt

SEQ ID NO: 25638 - DNA, 20 bp, synthetic construct
  misc_feature 1..20: note = chemically synthesized
  source 1..20: mol_type = other DNA
tccccccatctcctttttta

SEQ ID NO: 25639 - DNA, 20 bp, synthetic construct
  misc_feature 1..20: note = chemically synthesized
  source 1..20: mol_type = other DNA
atatatcacaatatcatata

SEQ ID NO: 25640 - DNA, 20 bp, synthetic construct
  misc_feature 1..20: note = chemically synthesized
  source 1..20: mol_type = other DNA
tttatctgttcatctatata

SEQ ID NO: 25641 - DNA, 20 bp, synthetic construct
  misc_feature 1..20: note = chemically synthesized
  source 1..20: mol_type = other DNA
atctatatatagataccact

SEQ ID NO: 25642 - DNA, 20 bp, synthetic construct
  misc_feature 1..20: note = chemically synthesized
  source 1..20: mol_type = other DNA
cttagattgtttccatgtct

SEQ ID NO: 25643 - DNA, 20 bp, synthetic construct
  misc_feature 1..20: note = chemically synthesized
  source 1..20: mol_type = other DNA
aataatgctgcaattaacat

SEQ ID NO: 25644 - DNA, 20 bp, synthetic construct
  misc_feature 1..20: note = chemically synthesized
  source 1..20: mol_type = other DNA
taatgctgcaattaacatga

SEQ ID NO: 25645 - DNA, 20 bp, synthetic construct
  misc_feature 1..20: note = chemically synthesized
  source 1..20: mol_type = other DNA
ctgcaattaacatgagagtg

SEQ ID NO: 25646 - DNA, 20 bp, synthetic construct
  misc_feature 1..20: note = chemically synthesized
  source 1..20: mol_type = other DNA
aattaacatgagagtgcaga

SEQ ID NO: 25647 - DNA, 20 bp, synthetic construct
  misc_feature 1..20: note = chemically synthesized
  source 1..20: mol_type = other DNA
catgagagtgcagatagctc

SEQ ID NO: 25648 - DNA, 20 bp, synthetic construct
  misc_feature 1..20: note = chemically synthesized
  source 1..20: mol_type = other DNA
gcagatagctctagaaaatg

SEQ ID NO: 25649 - DNA, 20 bp, synthetic construct
  misc_feature 1..20: note = chemically synthesized
  source 1..20: mol_type = other DNA
aatgcggattttatttattt

SEQ ID NO: 25650 - DNA, 20 bp, synthetic construct
  misc_feature 1..20: note = chemically synthesized
  source 1..20: mol_type = other DNA
atttattttggatacatata

SEQ ID NO: 25651 - DNA, 20 bp, synthetic construct
  misc_feature 1..20: note = chemically synthesized
  source 1..20: mol_type = other DNA
tattttggatacatatacag

SEQ ID NO: 25652 - DNA, 20 bp, synthetic construct
  misc_feature 1..20: note = chemically synthesized
  source 1..20: mol_type = other DNA
ttttggatacatatacagca

SEQ ID NO: 25653 - DNA, 20 bp, synthetic construct
  misc_feature 1..20: note = chemically synthesized
  source 1..20: mol_type = other DNA
tcatacaataactctatttt

SEQ ID NO: 25654 - DNA, 20 bp, synthetic construct
  misc_feature 1..20: note = chemically synthesized
  source 1..20: mol_type = other DNA
aactctatttttagttgttt

SEQ ID NO: 25655 - DNA, 20 bp, synthetic construct
  misc_feature 1..20: note = chemically synthesized
  source 1..20: mol_type = other DNA
cttccatacgttttctataa

SEQ ID NO: 25656 - DNA, 20 bp, synthetic construct
  misc_feature 1..20: note = chemically synthesized
  source 1..20: mol_type = other DNA
atgttaacttacattcccac

SEQ ID NO: 25657 - DNA, 20 bp, synthetic construct
  misc_feature 1..20: note = chemically synthesized
  source 1..20: mol_type = other DNA
cattcccaccagctatgcac

SEQ ID NO: 25658 - DNA, 20 bp, synthetic construct
  misc_feature 1..20: note = chemically synthesized
  source 1..20: mol_type = other DNA
ttcccaccagctatgcacaa

SEQ ID NO: 25659 - DNA, 20 bp, synthetic construct
  misc_feature 1..20: note = chemically synthesized
  source 1..20: mol_type = other DNA
caagagttctcctttctcca

SEQ ID NO: 25660 - DNA, 20 bp, synthetic construct
  misc_feature 1..20: note = chemically synthesized
  source 1..20: mol_type = other DNA
tctcttgtcttttttgataa

SEQ ID NO: 25661 - DNA, 20 bp, synthetic construct
  misc_feature 1..20: note = chemically synthesized
  source 1..20: mol_type = other DNA
tttgataatagccatctcaa

SEQ ID NO: 25662 - DNA, 20 bp, synthetic construct
  misc_feature 1..20: note = chemically synthesized
  source 1..20: mol_type = other DNA
ttgataatagccatctcaac

SEQ ID NO: 25663 - DNA, 20 bp, synthetic construct
  misc_feature 1..20: note = chemically synthesized
  source 1..20: mol_type = other DNA
atagccatctcaacaggtgt

SEQ ID NO: 25664 - DNA, 20 bp, synthetic construct
  misc_feature 1..20: note = chemically synthesized
  source 1..20: mol_type = other DNA
acaggtgtgagtgatacttg

SEQ ID NO: 25665 - DNA, 20 bp, synthetic construct
  misc_feature 1..20: note = chemically synthesized
  source 1..20: mol_type = other DNA
atttgcattttcctgatgat

SEQ ID NO: 25666 - DNA, 20 bp, synthetic construct
  misc_feature 1..20: note = chemically synthesized
  source 1..20: mol_type = other DNA
tttcctgatgattggtgatg

SEQ ID NO: 25667 - DNA, 20 bp, synthetic construct
  misc_feature 1..20: note = chemically synthesized
  source 1..20: mol_type = other DNA
gctgaccatttgcatgtctt

SEQ ID NO: 25668 - DNA, 20 bp, synthetic construct
  misc_feature 1..20: note = chemically synthesized
  source 1..20: mol_type = other DNA
tgaccatttgcatgtcttca

SEQ ID NO: 25669 - DNA, 20 bp, synthetic construct
  misc_feature 1..20: note = chemically synthesized
  source 1..20: mol_type = other DNA
tcttcagagaaatgtatatt

SEQ ID NO: 25670 - DNA, 20 bp, synthetic construct
  misc_feature 1..20: note = chemically synthesized
  source 1..20: mol_type = other DNA
atcctttgcccatttttact

SEQ ID NO: 25671 - DNA, 20 bp, synthetic construct
  misc_feature 1..20: note = chemically synthesized
  source 1..20: mol_type = other DNA
tcctttgcccatttttactt

SEQ ID NO: 25672 - DNA, 20 bp, synthetic construct
  misc_feature 1..20: note = chemically synthesized
  source 1..20: mol_type = other DNA
ctattatattttttcatatt

SEQ ID NO: 25673 - DNA, 20 bp, synthetic construct
  misc_feature 1..20: note = chemically synthesized
  source 1..20: mol_type = other DNA
tttttcatatttagttgatt

SEQ ID NO: 25674 - DNA, 20 bp, synthetic construct
  misc_feature 1..20: note = chemically synthesized
  source 1..20: mol_type = other DNA
attgagttccttatatattt

SEQ ID NO: 25675 - DNA, 20 bp, synthetic construct
  misc_feature 1..20: note = chemically synthesized
  source 1..20: mol_type = other DNA
ttgagttccttatatatttt

SEQ ID NO: 25676 - DNA, 20 bp, synthetic construct
  misc_feature 1..20: note = chemically synthesized
  source 1..20: mol_type = other DNA
tccttatatattttgggtat

SEQ ID NO: 25677 - DNA, 20 bp, synthetic construct
  misc_feature 1..20: note = chemically synthesized
  source 1..20: mol_type = other DNA
tttgggtattagacttgtat

SEQ ID NO: 25678 - DNA, 20 bp, synthetic construct
  misc_feature 1..20: note = chemically synthesized
  source 1..20: mol_type = other DNA
tgattgttttctttgctgtg

SEQ ID NO: 25679 - DNA, 20 bp, synthetic construct
  misc_feature 1..20: note = chemically synthesized
  source 1..20: mol_type = other DNA
tttgctgtgcagaaaatatt

SEQ ID NO: 25680 - DNA, 20 bp, synthetic construct
  misc_feature 1..20: note = chemically synthesized
  source 1..20: mol_type = other DNA
tatttttgcttttgttacct

SEQ ID NO: 25681 - DNA, 20 bp, synthetic construct
  misc_feature 1..20: note = chemically synthesized
  source 1..20: mol_type = other DNA
tgcttttgttacctgagctc

SEQ ID NO: 25682 - DNA, 20 bp, synthetic construct
  misc_feature 1..20: note = chemically synthesized
  source 1..20: mol_type = other DNA
ctgagctctggcacatttta

SEQ ID NO: 25683 - DNA, 20 bp, synthetic construct
  misc_feature 1..20: note = chemically synthesized
  source 1..20: mol_type = other DNA
tgaaaatttgtatgaaacca

SEQ ID NO: 25684 - DNA, 20 bp, synthetic construct
  misc_feature 1..20: note = chemically synthesized
  source 1..20: mol_type = other DNA
aaccacagaacacccccaaa

SEQ ID NO: 25685 - DNA, 20 bp, synthetic construct
  misc_feature 1..20: note = chemically synthesized
  source 1..20: mol_type = other DNA
caaatggccaaaacaatctt

SEQ ID NO: 25686 - DNA, 20 bp, synthetic construct
  misc_feature 1..20: note = chemically synthesized
  source 1..20: mol_type = other DNA
tggccaaaacaatcttgaga

SEQ ID NO: 25687 - DNA, 20 bp, synthetic construct
  misc_feature 1..20: note = chemically synthesized
  source 1..20: mol_type = other DNA
agaaagaaaaaccaacttga

SEQ ID NO: 25688 - DNA, 20 bp, synthetic construct
  misc_feature 1..20: note = chemically synthesized
  source 1..20: mol_type = other DNA
aagaaaaaccaacttgatgg

SEQ ID NO: 25689 - DNA, 20 bp, synthetic construct
  misc_feature 1..20: note = chemically synthesized
  source 1..20: mol_type = other DNA
tgatttcaaattatattaca

SEQ ID NO: 25690 - DNA, 20 bp, synthetic construct
  misc_feature 1..20: note = chemically synthesized
  source 1..20: mol_type = other DNA
caaattatattacaaagcta

SEQ ID NO: 25691 - DNA, 20 bp, synthetic construct
  misc_feature 1..20: note = chemically synthesized
  source 1..20: mol_type = other DNA
caaagctatagtaaccaaaa

SEQ ID NO: 25692 - DNA, 20 bp, synthetic construct
  misc_feature 1..20: note = chemically synthesized
  source 1..20: mol_type = other DNA
ctatagtaaccaaaaaagta

SEQ ID NO: 25693 - DNA, 20 bp, synthetic construct
  misc_feature 1..20: note = chemically synthesized
  source 1..20: mol_type = other DNA
gtatggtactatcacataaa

SEQ ID NO: 25694 - DNA, 20 bp, synthetic construct
  misc_feature 1..20: note = chemically synthesized
  source 1..20: mol_type = other DNA
ctatcacataaatagacaca

SEQ ID NO: 25695 - DNA, 20 bp, synthetic construct
  misc_feature 1..20: note = chemically synthesized
  source 1..20: mol_type = other DNA
gacacatagaccaaattgaa

SEQ ID NO: 25696 - DNA, 20 bp, synthetic construct
  misc_feature 1..20: note = chemically synthesized
  source 1..20: mol_type = other DNA
agaccaaattgaacagaata

SEQ ID NO: 25697 - DNA, 20 bp, synthetic construct
  misc_feature 1..20: note = chemically synthesized
  source 1..20: mol_type = other DNA
accaaattgaacagaataaa

SEQ ID NO: 25698 - DNA, 20 bp, synthetic construct
  misc_feature 1..20: note = chemically synthesized
  source 1..20: mol_type = other DNA
attgaacagaataaagagcc

SEQ ID NO: 25699 - DNA, 20 bp, synthetic construct
  misc_feature 1..20: note = chemically synthesized
  source 1..20: mol_type = other DNA
gaaataaatttacgtatata

SEQ ID NO: 25700 - DNA, 20 bp, synthetic construct
  misc_feature 1..20: note = chemically synthesized
  source 1..20: mol_type = other DNA
aaatttacgtatatacagtc

SEQ ID NO: 25701 - DNA, 20 bp, synthetic construct
  misc_feature 1..20: note = chemically synthesized
  source 1..20: mol_type = other DNA
acagtccagtaattctcaac

SEQ ID NO: 25702 - DNA, 20 bp, synthetic construct
  misc_feature 1..20: note = chemically synthesized
  source 1..20: mol_type = other DNA
cagtccagtaattctcaaca

SEQ ID NO: 25703 - DNA, 20 bp, synthetic construct
  misc_feature 1..20: note = chemically synthesized
  source 1..20: mol_type = other DNA
caacaaggccaccaacacaa

SEQ ID NO: 25704 - DNA, 20 bp, synthetic construct
  misc_feature 1..20: note = chemically synthesized
  source 1..20: mol_type = other DNA
aacaaggccaccaacacaat

SEQ ID NO: 25705 - DNA, 20 bp, synthetic construct
  misc_feature 1..20: note = chemically synthesized
  source 1..20: mol_type = other DNA
acaaggccaccaacacaata

SEQ ID NO: 25706 - DNA, 20 bp, synthetic construct
  misc_feature 1..20: note = chemically synthesized
  source 1..20: mol_type = other DNA
caaggccaccaacacaatag

SEQ ID NO: 25707 - DNA, 20 bp, synthetic construct
  misc_feature 1..20: note = chemically synthesized
  source 1..20: mol_type = other DNA
ggccaccaacacaatagggg

SEQ ID NO: 25708 - DNA, 20 bp, synthetic construct
  misc_feature 1..20: note = chemically synthesized
  source 1..20: mol_type = other DNA
gccaccaacacaatagggga

SEQ ID NO: 25709 - DNA, 20 bp, synthetic construct
  misc_feature 1..20: note = chemically synthesized
  source 1..20: mol_type = other DNA
ccaacacaataggggaagga

SEQ ID NO: 25710 - DNA, 20 bp, synthetic construct
  misc_feature 1..20: note = chemically synthesized
  source 1..20: mol_type = other DNA
aggatagtctcctcaacaaa

SEQ ID NO: 25711 - DNA, 20 bp, synthetic construct
  misc_feature 1..20: note = chemically synthesized
  source 1..20: mol_type = other DNA
gtctcctcaacaaatagtgt

SEQ ID NO: 25712 - DNA, 20 bp, synthetic construct
  misc_feature 1..20: note = chemically synthesized
  source 1..20: mol_type = other DNA
tctcctcaacaaatagtgtt

SEQ ID NO: 25713 - DNA, 20 bp, synthetic construct
  misc_feature 1..20: note = chemically synthesized
  source 1..20: mol_type = other DNA
acaaatagtgttgggaaaac

SEQ ID NO: 25714 - DNA, 20 bp, synthetic construct
  misc_feature 1..20: note = chemically synthesized
  source 1..20: mol_type = other DNA
aactggatatccaaatgcaa

SEQ ID NO: 25715 - DNA, 20 bp, synthetic construct
  misc_feature 1..20: note = chemically synthesized
  source 1..20: mol_type = other DNA
caaatgcaaaagaataaaat

SEQ ID NO: 25716 - DNA, 20 bp, synthetic construct
  misc_feature 1..20: note = chemically synthesized
  source 1..20: mol_type = other DNA
taaaattggacctttacctt

SEQ ID NO: 25717 - DNA, 20 bp, synthetic construct
  misc_feature 1..20: note = chemically synthesized
  source 1..20: mol_type = other DNA
ggacctttaccttaagccat

SEQ ID NO: 25718 - DNA, 20 bp, synthetic construct
  misc_feature 1..20: note = chemically synthesized
  source 1..20: mol_type = other DNA
agccataagtcaactcaaaa

SEQ ID NO: 25719 - DNA, 20 bp, synthetic construct
  misc_feature 1..20: note = chemically synthesized
  source 1..20: mol_type = other DNA
agtcaactcaaaatagatta

SEQ ID NO: 25720 - DNA, 20 bp, synthetic construct
  misc_feature 1..20: note = chemically synthesized
  source 1..20: mol_type = other DNA
tagattaaagacataaatgt

SEQ ID NO: 25721 - DNA, 20 bp, synthetic construct
  misc_feature 1..20: note = chemically synthesized
  source 1..20: mol_type = other DNA
acctgaaatcacaaaactcc

SEQ ID NO: 25722 - DNA, 20 bp, synthetic construct
  misc_feature 1..20: note = chemically synthesized
  source 1..20: mol_type = other DNA
tgaaatcacaaaactcctgg

SEQ ID NO: 25723 - DNA, 20 bp, synthetic construct
  misc_feature 1..20: note = chemically synthesized
  source 1..20: mol_type = other DNA
aactcctggaagaacatgta

SEQ ID NO: 25724 - DNA, 20 bp, synthetic construct
  misc_feature 1..20: note = chemically synthesized
  source 1..20: mol_type = other DNA
ctcctggaagaacatgtata

SEQ ID NO: 25725 - DNA, 20 bp, synthetic construct
  misc_feature 1..20: note = chemically synthesized
  source 1..20: mol_type = other DNA
tggaagaacatgtatagaga

SEQ ID NO: 25726 - DNA, 20 bp, synthetic construct
  misc_feature 1..20: note = chemically synthesized
  source 1..20: mol_type = other DNA
tagagatagctgcttgatat

SEQ ID NO: 25727 - DNA, 20 bp, synthetic construct
  misc_feature 1..20: note = chemically synthesized
  source 1..20: mol_type = other DNA
tagctgcttgatatcagtct

SEQ ID NO: 25728 - DNA, 20 bp, synthetic construct
  misc_feature 1..20: note = chemically synthesized
  source 1..20: mol_type = other DNA
tatcagtctcggcaattttt

SEQ ID NO: 25729 - DNA, 20 bp, synthetic construct
  misc_feature 1..20: note = chemically synthesized
  source 1..20: mol_type = other DNA
ttagatattgtcttgatttg

SEQ ID NO: 25730 - DNA, 20 bp, synthetic construct
  misc_feature 1..20: note = chemically synthesized
  source 1..20: mol_type = other DNA
gatttgaagaaaattttcac

SEQ ID NO: 25731 - DNA, 20 bp, synthetic construct
  misc_feature 1..20: note = chemically synthesized
  source 1..20: mol_type = other DNA
ttgaagaaaattttcactgg

SEQ ID NO: 25732 - DNA, 20 bp, synthetic construct
  misc_feature 1..20: note = chemically synthesized
  source 1..20: mol_type = other DNA
gattttttctttcacaaata

SEQ ID NO: 25733 - DNA, 20 bp, synthetic construct
  misc_feature 1..20: note = chemically synthesized
  source 1..20: mol_type = other DNA
ttctttcacaaataaagttc

SEQ ID NO: 25734 - DNA, 20 bp, synthetic construct
  misc_feature 1..20: note = chemically synthesized
  source 1..20: mol_type = other DNA
caaataaagttccagttttt

SEQ ID NO: 25735 - DNA, 20 bp, synthetic construct
  misc_feature 1..20: note = chemically synthesized
  source 1..20: mol_type = other DNA
aaagttccagtttttgagcc

SEQ ID NO: 25736 - DNA, 20 bp, synthetic construct
  misc_feature 1..20: note = chemically synthesized
  source 1..20: mol_type = other DNA
ttccagtttttgagccaaga

SEQ ID NO: 25737 - DNA, 20 bp, synthetic construct
  misc_feature 1..20: note = chemically synthesized
  source 1..20: mol_type = other DNA
tttgagccaagatggccaaa

SEQ ID NO: 25738 - DNA, 20 bp, synthetic construct
  misc_feature 1..20: note = chemically synthesized
  source 1..20: mol_type = other DNA
ttgagccaagatggccaaat

SEQ ID NO: 25739 - DNA, 20 bp, synthetic construct
  misc_feature 1..20: note = chemically synthesized
  source 1..20: mol_type = other DNA
ccaagatggccaaataggaa

SEQ ID NO: 25740 - DNA, 20 bp, synthetic construct
  misc_feature 1..20: note = chemically synthesized
  source 1..20: mol_type = other DNA
tggccaaataggaacagctc

SEQ ID NO: 25741 - DNA, 20 bp, synthetic construct
  misc_feature 1..20: note = chemically synthesized
  source 1..20: mol_type = other DNA
ataggaacagctctggtcta

SEQ ID NO: 25742 - DNA, 20 bp, synthetic construct
  misc_feature 1..20: note = chemically synthesized
  source 1..20: mol_type = other DNA
cagctctggtctacagctcc

SEQ ID NO: 25743 - DNA, 20 bp, synthetic construct
  misc_feature 1..20: note = chemically synthesized
  source 1..20: mol_type = other DNA
agctcccagcgtgaacaaca

SEQ ID NO: 25744 - DNA, 20 bp, synthetic construct
  misc_feature 1..20: note = chemically synthesized
  source 1..20: mol_type = other DNA
tcccagcgtgaacaacacag

SEQ ID NO: 25745 - DNA, 20 bp, synthetic construct
  misc_feature 1..20: note = chemically synthesized
  source 1..20: mol_type = other DNA
agcgtgaacaacacagaaga

SEQ ID NO: 25746 - DNA, 20 bp, synthetic construct
  misc_feature 1..20: note = chemically synthesized
  source 1..20: mol_type = other DNA
gcgtgaacaacacagaagac

SEQ ID NO: 25747 - DNA, 20 bp, synthetic construct
  misc_feature 1..20: note = chemically synthesized
  source 1..20: mol_type = other DNA
tgatttctgcatttccatct

SEQ ID NO: 25748 - DNA, 20 bp, synthetic construct
  misc_feature 1..20: note = chemically synthesized
  source 1..20: mol_type = other DNA
gatttctgcatttccatctg

SEQ ID NO: 25749 - DNA, 20 bp, synthetic construct
  misc_feature 1..20: note = chemically synthesized
  source 1..20: mol_type = other DNA
ctgcatttccatctgaggta

SEQ ID NO: 25750 - DNA, 20 bp, synthetic construct
  misc_feature 1..20: note = chemically synthesized
  source 1..20: mol_type = other DNA
tgcatttccatctgaggtat

SEQ ID NO: 25751 - DNA, 20 bp, synthetic construct
  misc_feature 1..20: note = chemically synthesized
  source 1..20: mol_type = other DNA
gcatttccatctgaggtatg

SEQ ID NO: 25752 - DNA, 20 bp, synthetic construct
  misc_feature 1..20: note = chemically synthesized
  source 1..20: mol_type = other DNA
aggtatggggttcatctcgc

SEQ ID NO: 25753 - DNA, 20 bp, synthetic construct
  misc_feature 1..20: note = chemically synthesized
  source 1..20: mol_type = other DNA
ggtatggggttcatctcgct

SEQ ID NO: 25754 - DNA, 20 bp, synthetic construct
  misc_feature 1..20: note = chemically synthesized
  source 1..20: mol_type = other DNA
gtatggggttcatctcgcta

SEQ ID NO: 25755 - DNA, 20 bp, synthetic construct
  misc_feature 1..20: note = chemically synthesized
  source 1..20: mol_type = other DNA
atggggttcatctcgctagg

SEQ ID NO: 25756 - DNA, 20 bp, synthetic construct
  misc_feature 1..20: note = chemically synthesized
  source 1..20: mol_type = other DNA
ttcatctcgctagggagtgc

SEQ ID NO: 25757 - DNA, 20 bp, synthetic construct
  misc_feature 1..20: note = chemically synthesized
  source 1..20: mol_type = other DNA
tctcgctagggagtgccaga

SEQ ID NO: 25758 - DNA, 20 bp, synthetic construct
  misc_feature 1..20: note = chemically synthesized
  source 1..20: mol_type = other DNA
cgctagggagtgccagacag

SEQ ID NO: 25759 - DNA, 20 bp, synthetic construct
  misc_feature 1..20: note = chemically synthesized
  source 1..20: mol_type = other DNA
gctagggagtgccagacagt

SEQ ID NO: 25760 - DNA, 20 bp, synthetic construct
  misc_feature 1..20: note = chemically synthesized
  source 1..20: mol_type = other DNA
ggagtgccagacagtgggca

SEQ ID NO: 25761 - DNA, 20 bp, synthetic construct
  misc_feature 1..20: note = chemically synthesized
  source 1..20: mol_type = other DNA
gagtgccagacagtgggcac

SEQ ID NO: 25762 - DNA, 20 bp, synthetic construct
  misc_feature 1..20: note = chemically synthesized
  source 1..20: mol_type = other DNA
gccagacagtgggcacaggt

SEQ ID NO: 25763 - DNA, 20 bp, synthetic construct
  misc_feature 1..20: note = chemically synthesized
  source 1..20: mol_type = other DNA
agacagtgggcacaggtcag

SEQ ID NO: 25764 - DNA, 20 bp, synthetic construct
  misc_feature 1..20: note = chemically synthesized
  source 1..20: mol_type = other DNA
gacagtgggcacaggtcagt

SEQ ID NO: 25765 - DNA, 20 bp, synthetic construct
  misc_feature 1..20: note = chemically synthesized
  source 1..20: mol_type = other DNA
tgggcacaggtcagtgggtg

SEQ ID NO: 25766 - DNA, 20 bp, synthetic construct
  misc_feature 1..20: note = chemically synthesized
  source 1..20: mol_type = other DNA
gggtgcagcacaccatgcac

SEQ ID NO: 25767 - DNA, 20 bp, synthetic construct
  misc_feature 1..20: note = chemically synthesized
  source 1..20: mol_type = other DNA
agcacaccatgcaccagccg

SEQ ID NO: 25768 - DNA, 20 bp, synthetic construct
  misc_feature 1..20: note = chemically synthesized
  source 1..20: mol_type = other DNA
acaccatgcaccagccgaag

SEQ ID NO: 25769 - DNA, 20 bp, synthetic construct
  misc_feature 1..20: note = chemically synthesized
  source 1..20: mol_type = other DNA
caccatgcaccagccgaagc

SEQ ID NO: 25770 - DNA, 20 bp, synthetic construct
  misc_feature 1..20: note = chemically synthesized
  source 1..20: mol_type = other DNA
accatgcaccagccgaagca

SEQ ID NO: 25771 - DNA, 20 bp, synthetic construct
  misc_feature 1..20: note = chemically synthesized
  source 1..20: mol_type = other DNA
tgcaccagccgaagcagggt

SEQ ID NO: 25772 - DNA, 20 bp, synthetic construct
  misc_feature 1..20: note = chemically synthesized
  source 1..20: mol_type = other DNA
gcaccagccgaagcagggtg

SEQ ID NO: 25773 - DNA, 20 bp, synthetic construct
  misc_feature 1..20: note = chemically synthesized
  source 1..20: mol_type = other DNA
gggtgaggcattgcctcact

SEQ ID NO: 25774 - DNA, 20 bp, synthetic construct
  misc_feature 1..20: note = chemically synthesized
  source 1..20: mol_type = other DNA
ggtgaggcattgcctcactt

SEQ ID NO: 25775 - DNA, 20 bp, synthetic construct
  misc_feature 1..20: note = chemically synthesized
  source 1..20: mol_type = other DNA
gaggcattgcctcacttggg

SEQ ID NO: 25776 - DNA, 20 bp, synthetic construct
  misc_feature 1..20: note = chemically synthesized
  source 1..20: mol_type = other DNA
ttgcctcacttgggaagcac

SEQ ID NO: 25777 - DNA, 20 bp, synthetic construct
  misc_feature 1..20: note = chemically synthesized
  source 1..20: mol_type = other DNA
tgcctcacttgggaagcaca

SEQ ID NO: 25778 - DNA, 20 bp, synthetic construct
  misc_feature 1..20: note = chemically synthesized
  source 1..20: mol_type = other DNA
gcctcacttgggaagcacaa

SEQ ID NO: 25779 - DNA, 20 bp, synthetic construct
  misc_feature 1..20: note = chemically synthesized
  source 1..20: mol_type = other DNA
cctcacttgggaagcacaag

SEQ ID NO: 25780 - DNA, 20 bp, synthetic construct
  misc_feature 1..20: note = chemically synthesized
  source 1..20: mol_type = other DNA
ttgggaagcacaaggggtca

SEQ ID NO: 25781 - DNA, 20 bp, synthetic construct
  misc_feature 1..20: note = chemically synthesized
  source 1..20: mol_type = other DNA
gggaagcacaaggggtcatg

SEQ ID NO: 25782 - DNA, 20 bp, synthetic construct
  misc_feature 1..20: note = chemically synthesized
  source 1..20: mol_type = other DNA
ggtcatggagttccctttcc

SEQ ID NO: 25783 - DNA, 20 bp, synthetic construct
  misc_feature 1..20: note = chemically synthesized
  source 1..20: mol_type = other DNA
tggagttccctttcctggtc

SEQ ID NO: 25784 - DNA, 20 bp, synthetic construct
  misc_feature 1..20: note = chemically synthesized
  source 1..20: mol_type = other DNA
ggagttccctttcctggtca

SEQ ID NO: 25785 - DNA, 20 bp, synthetic construct
  misc_feature 1..20: note = chemically synthesized
  source 1..20: mol_type = other DNA
ttccctttcctggtcaagga

SEQ ID NO: 25786 - DNA, 20 bp, synthetic construct
  misc_feature 1..20: note = chemically synthesized
  source 1..20: mol_type = other DNA
tccctttcctggtcaaggaa

SEQ ID NO: 25787 - DNA, 20 bp, synthetic construct
  misc_feature 1..20: note = chemically synthesized
  source 1..20: mol_type = other DNA
ccctttcctggtcaaggaaa

SEQ ID NO: 25788 - DNA, 20 bp, synthetic construct
  misc_feature 1..20: note = chemically synthesized
  source 1..20: mol_type = other DNA
cctttcctggtcaaggaaag

SEQ ID NO: 25789 - DNA, 20 bp, synthetic construct
  misc_feature 1..20: note = chemically synthesized
  source 1..20: mol_type = other DNA
tcaaggaaaggggtgacata

SEQ ID NO: 25790 - DNA, 20 bp, synthetic construct
  misc_feature 1..20: note = chemically synthesized
  source 1..20: mol_type = other DNA
aaggggtgacatacggcacc

SEQ ID NO: 25791 - DNA, 20 bp, synthetic construct
  misc_feature 1..20: note = chemically synthesized
  source 1..20: mol_type = other DNA
acatacggcacctggaaaat

SEQ ID NO: 25792 - DNA, 20 bp, synthetic construct
  misc_feature 1..20: note = chemically synthesized
  source 1..20: mol_type = other DNA
catacggcacctggaaaatt

SEQ ID NO: 25793 - DNA, 20 bp, synthetic construct
  misc_feature 1..20: note = chemically synthesized
  source 1..20: mol_type = other DNA
cgaatactgtgcttttctga

SEQ ID NO: 25794 - DNA, 20 bp, synthetic construct
  misc_feature 1..20: note = chemically synthesized
  source 1..20: mol_type = other DNA
gaatactgtgcttttctgac

SEQ ID NO: 25795 - DNA, 20 bp, synthetic construct
  misc_feature 1..20: note = chemically synthesized
  source 1..20: mol_type = other DNA
ctgtgcttttctgacaggct

SEQ ID NO: 25796 - DNA, 20 bp, synthetic construct
  misc_feature 1..20: note = chemically synthesized
  source 1..20: mol_type = other DNA
tgtgcttttctgacaggctt

SEQ ID NO: 25797 - DNA, 20 bp, synthetic construct
  misc_feature 1..20: note = chemically synthesized
  source 1..20: mol_type = other DNA
tttctgacaggcttaggaaa

SEQ ID NO: 25798 - DNA, 20 bp, synthetic construct
  misc_feature 1..20: note = chemically synthesized
  source 1..20: mol_type = other DNA
aggcttaggaaatggcgcac

SEQ ID NO: 25799 - DNA, 20 bp, synthetic construct
  misc_feature 1..20: note = chemically synthesized
  source 1..20: mol_type = other DNA
ggcttaggaaatggcgcacc

SEQ ID NO: 25800 - DNA, 20 bp, synthetic construct
  misc_feature 1..20: note = chemically synthesized
  source 1..20: mol_type = other DNA
cttaggaaatggcgcaccag

SEQ ID NO: 25801 - DNA, 20 bp, synthetic construct
  misc_feature 1..20: note = chemically synthesized
  source 1..20: mol_type = other DNA
aggagattatatcctgcaca

SEQ ID NO: 25802 - DNA, 20 bp, synthetic construct
  misc_feature 1..20: note = chemically synthesized
  source 1..20: mol_type = other DNA
tatatcctgcacatggctcc

SEQ ID NO: 25803 - DNA, 20 bp, synthetic construct
  misc_feature 1..20: note = chemically synthesized
  source 1..20: mol_type = other DNA
atatcctgcacatggctccg

SEQ ID NO: 25804 - DNA, 20 bp, synthetic construct
  misc_feature 1..20: note = chemically synthesized
  source 1..20: mol_type = other DNA
tatcctgcacatggctccga

SEQ ID NO: 25805 - DNA, 20 bp, synthetic construct
  misc_feature 1..20: note = chemically synthesized
  source 1..20: mol_type = other DNA
ctccgagggtcctacgccca

SEQ ID NO: 25806 - DNA, 20 bp, synthetic construct
  misc_feature 1..20: note = chemically synthesized
  source 1..20: mol_type = other DNA
ccgagggtcctacgcccacg

SEQ ID NO: 25807 - DNA, 20 bp, synthetic construct
  misc_feature 1..20: note = chemically synthesized
  source 1..20: mol_type = other DNA
cacggagtctccctgattgc

SEQ ID NO: 25808 - DNA, 20 bp, synthetic construct
  misc_feature 1..20: note = chemically synthesized
  source 1..20: mol_type = other DNA
agtctccctgattgctagca

SEQ ID NO: 25809 - DNA, 20 bp, synthetic construct
  misc_feature 1..20: note = chemically synthesized
  source 1..20: mol_type = other DNA
ctccctgattgctagcacag

SEQ ID NO: 25810 - DNA, 20 bp, synthetic construct
  misc_feature 1..20: note = chemically synthesized
  source 1..20: mol_type = other DNA
gattgctagcacagcagtct

SEQ ID NO: 25811 - DNA, 20 bp, synthetic construct
  misc_feature 1..20: note = chemically synthesized
  source 1..20: mol_type = other DNA
gcagtctgagatcaaactgc

SEQ ID NO: 25812 - DNA, 20 bp, synthetic construct
  misc_feature 1..20: note = chemically synthesized
  source 1..20: mol_type = other DNA
cagtctgagatcaaactgca

SEQ ID NO: 25813 - DNA, 20 bp, synthetic construct
  misc_feature 1..20: note = chemically synthesized
  source 1..20: mol_type = other DNA
tctgagatcaaactgcaagg

SEQ ID NO: 25814 - DNA, 20 bp, synthetic construct
  misc_feature 1..20: note = chemically synthesized
  source 1..20: mol_type = other DNA
gagatcaaactgcaaggtgg

SEQ ID NO: 25815 - DNA, 20 bp, synthetic construct
  misc_feature 1..20: note = chemically synthesized
  source 1..20: mol_type = other DNA
tcaaactgcaaggtggcagc

SEQ ID NO: 25816 - DNA, 20 bp, synthetic construct
  misc_feature 1..20: note = chemically synthesized
  source 1..20: mol_type = other DNA
caaactgcaaggtggcagcg

SEQ ID NO: 25817 - DNA, 20 bp, synthetic construct
  misc_feature 1..20: note = chemically synthesized
  source 1..20: mol_type = other DNA
ctgcaaggtggcagcgaggc

SEQ ID NO: 25818 - DNA, 20 bp, synthetic construct
  misc_feature 1..20: note = chemically synthesized
  source 1..20: mol_type = other DNA
tgcaaggtggcagcgaggct

SEQ ID NO: 25819 - DNA, 20 bp, synthetic construct
  misc_feature 1..20: note = chemically synthesized
  source 1..20: mol_type = other DNA
gcaaggtggcagcgaggctg

SEQ ID NO: 25820 - DNA, 20 bp, synthetic construct
  misc_feature 1..20: note = chemically synthesized
  source 1..20: mol_type = other DNA
caaggtggcagcgaggctgg

SEQ ID NO: 25821 - DNA, 20 bp, synthetic construct
  misc_feature 1..20: note = chemically synthesized
  source 1..20: mol_type = other DNA
aggtggcagcgaggctgggg

SEQ ID NO: 25822 - DNA, 20 bp, synthetic construct
  misc_feature 1..20: note = chemically synthesized
  source 1..20: mol_type = other DNA
ggtggcagcgaggctggggg

SEQ ID NO: 25823 - DNA, 20 bp, synthetic construct
  misc_feature 1..20: note = chemically synthesized
  source 1..20: mol_type = other DNA
gtggcagcgaggctggggga

SEQ ID NO: 25824 - DNA, 20 bp, synthetic construct
  misc_feature 1..20: note = chemically synthesized
  source 1..20: mol_type = other DNA
tggcagcgaggctgggggag

SEQ ID NO: 25825 - DNA, 20 bp, synthetic construct
  misc_feature 1..20: note = chemically synthesized
  source 1..20: mol_type = other DNA
cagcgaggctgggggagggg

SEQ ID NO: 25826 - DNA, 20 bp, synthetic construct
  misc_feature 1..20: note = chemically synthesized
  source 1..20: mol_type = other DNA
gaggggcagccgccattgcc

SEQ ID NO: 25827 - DNA, 20 bp, synthetic construct
  misc_feature 1..20: note = chemically synthesized
  source 1..20: mol_type = other DNA
aggggcagccgccattgccc

SEQ ID NO: 25828 - DNA, 20 bp, synthetic construct
  misc_feature 1..20: note = chemically synthesized
  source 1..20: mol_type = other DNA
cgccattgcccaggcttgct

SEQ ID NO: 25829 - DNA, 20 bp, synthetic construct
  misc_feature 1..20: note = chemically synthesized
  source 1..20: mol_type = other DNA
gccattgcccaggcttgctt

SEQ ID NO: 25830 - DNA, 20 bp, synthetic construct
  misc_feature 1..20: note = chemically synthesized
  source 1..20: mol_type = other DNA
caggcttgcttaggtaaaca

SEQ ID NO: 25831 - DNA, 20 bp, synthetic construct
  misc_feature 1..20: note = chemically synthesized
  source 1..20: mol_type = other DNA
gcttgcttaggtaaacaaag

SEQ ID NO: 25832 - DNA, 20 bp, synthetic construct
  misc_feature 1..20: note = chemically synthesized
  source 1..20: mol_type = other DNA
gcttaggtaaacaaagcagc

SEQ ID NO: 25833 - DNA, 20 bp, synthetic construct
  misc_feature 1..20: note = chemically synthesized
  source 1..20: mol_type = other DNA
cttaggtaaacaaagcagcc

SEQ ID NO: 25834 - DNA, 20 bp, synthetic construct
  misc_feature 1..20: note = chemically synthesized
  source 1..20: mol_type = other DNA
aggtaaacaaagcagccagg

SEQ ID NO: 25835 - DNA, 20 bp, synthetic construct
  misc_feature 1..20: note = chemically synthesized
  source 1..20: mol_type = other DNA
agcagccaggaagctcaaac

SEQ ID NO: 25836 - DNA, 20 bp, synthetic construct
  misc_feature 1..20: note = chemically synthesized
  source 1..20: mol_type = other DNA
gcagccaggaagctcaaact

SEQ ID NO: 25837 - DNA, 20 bp, synthetic construct
  misc_feature 1..20: note = chemically synthesized
  source 1..20: mol_type = other DNA
gccaggaagctcaaactggg

SEQ ID NO: 25838 - DNA, 20 bp, synthetic construct
  misc_feature 1..20: note = chemically synthesized
  source 1..20: mol_type = other DNA
aaactgggtggaccccacca

SEQ ID NO: 25839 - DNA, 20 bp, synthetic construct
  misc_feature 1..20: note = chemically synthesized
  source 1..20: mol_type = other DNA
ggtggaccccaccacagctc

SEQ ID NO: 25840 - DNA, 20 bp, synthetic construct
  misc_feature 1..20: note = chemically synthesized
  source 1..20: mol_type = other DNA
gtggaccccaccacagctca

SEQ ID NO: 25841 - DNA, 20 bp, synthetic construct
  misc_feature 1..20: note = chemically synthesized
  source 1..20: mol_type = other DNA
ggaccccaccacagctcaag

SEQ ID NO: 25842 - DNA, 20 bp, synthetic construct
  misc_feature 1..20: note = chemically synthesized
  source 1..20: mol_type = other DNA
gaccccaccacagctcaagg

SEQ ID NO: 25843 - DNA, 20 bp, synthetic construct
  misc_feature 1..20: note = chemically synthesized
  source 1..20: mol_type = other DNA
aggaggcctgcctgcctctg

SEQ ID NO: 25844 - DNA, 20 bp, synthetic construct
  misc_feature 1..20: note = chemically synthesized
  source 1..20: mol_type = other DNA
ggaggcctgcctgcctctgt

SEQ ID NO: 25845 - DNA, 20 bp, synthetic construct
  misc_feature 1..20: note = chemically synthesized
  source 1..20: mol_type = other DNA
gcctctgtaggctccacctt

SEQ ID NO: 25846 - DNA, 20 bp, synthetic construct
  misc_feature 1..20: note = chemically synthesized
  source 1..20: mol_type = other DNA
cctctgtaggctccaccttt

SEQ ID NO: 25847 - DNA, 20 bp, synthetic construct
  misc_feature 1..20: note = chemically synthesized
  source 1..20: mol_type = other DNA
ctctgtaggctccacctttg

SEQ ID NO: 25848 - DNA, 20 bp, synthetic construct
  misc_feature 1..20: note = chemically synthesized
  source 1..20: mol_type = other DNA
tctgtaggctccacctttgg

SEQ ID NO: 25849 - DNA, 20 bp, synthetic construct
  misc_feature 1..20: note = chemically synthesized
  source 1..20: mol_type = other DNA
gtaggctccacctttggggg

SEQ ID NO: 25850 - DNA, 20 bp, synthetic construct
  misc_feature 1..20: note = chemically synthesized
  source 1..20: mol_type = other DNA
taggctccacctttgggggc

SEQ ID NO: 25851 - DNA, 20 bp, synthetic construct
  misc_feature 1..20: note = chemically synthesized
  source 1..20: mol_type = other DNA
aggctccacctttgggggca

SEQ ID NO: 25852 - DNA, 20 bp, synthetic construct
  misc_feature 1..20: note = chemically synthesized
  source 1..20: mol_type = other DNA
ccacctttgggggcagggca

SEQ ID NO: 25853 - DNA, 20 bp, synthetic construct
  misc_feature 1..20: note = chemically synthesized
  source 1..20: mol_type = other DNA
gcagggcacagacaaacaaa

SEQ ID NO: 25854 - DNA, 20 bp, synthetic construct
  misc_feature 1..20: note = chemically synthesized
  source 1..20: mol_type = other DNA
ggcacagacaaacaaaaaga

SEQ ID NO: 25855 - DNA, 20 bp, synthetic construct
  misc_feature 1..20: note = chemically synthesized
  source 1..20: mol_type = other DNA
acagacaaacaaaaagacag

SEQ ID NO: 25856 - DNA, 20 bp, synthetic construct
  misc_feature 1..20: note = chemically synthesized
  source 1..20: mol_type = other DNA
aaagacagcagtaacctctg

SEQ ID NO: 25857 - DNA, 20 bp, synthetic construct
  misc_feature 1..20: note = chemically synthesized
  source 1..20: mol_type = other DNA
acttaaatgtccctgtctga

SEQ ID NO: 25858 - DNA, 20 bp, synthetic construct
  misc_feature 1..20: note = chemically synthesized
  source 1..20: mol_type = other DNA
tgtccctgtctgacagcttt

SEQ ID NO: 25859 - DNA, 20 bp, synthetic construct
  misc_feature 1..20: note = chemically synthesized
  source 1..20: mol_type = other DNA
gtccctgtctgacagctttg

SEQ ID NO: 25860 - DNA, 20 bp, synthetic construct
  misc_feature 1..20: note = chemically synthesized
  source 1..20: mol_type = other DNA
ccctgtctgacagctttgag

SEQ ID NO: 25861 - DNA, 20 bp, synthetic construct
  misc_feature 1..20: note = chemically synthesized
  source 1..20: mol_type = other DNA
ctgtctgacagctttgagga

SEQ ID NO: 25862 - DNA, 20 bp, synthetic construct
  misc_feature 1..20: note = chemically synthesized
  source 1..20: mol_type = other DNA
tctgacagctttgaggagag

SEQ ID NO: 25863 - DNA, 20 bp, synthetic construct
  misc_feature 1..20: note = chemically synthesized
  source 1..20: mol_type = other DNA
gacagctttgaggagagcag

SEQ ID NO: 25864 - DNA, 20 bp, synthetic construct
  misc_feature 1..20: note = chemically synthesized
  source 1..20: mol_type = other DNA
gaggagagcagtggttctcc

SEQ ID NO: 25865 - DNA, 20 bp, synthetic construct
  misc_feature 1..20: note = chemically synthesized
  source 1..20: mol_type = other DNA
gcagtggttctcccagcaca

SEQ ID NO: 25866 - DNA, 20 bp, synthetic construct
  misc_feature 1..20: note = chemically synthesized
  source 1..20: mol_type = other DNA
tggttctcccagcacacagc

SEQ ID NO: 25867 - DNA, 20 bp, synthetic construct
  misc_feature 1..20: note = chemically synthesized
  source 1..20: mol_type = other DNA
gttctcccagcacacagctg

SEQ ID NO: 25868 - DNA, 20 bp, synthetic construct
  misc_feature 1..20: note = chemically synthesized
  source 1..20: mol_type = other DNA
cagcacacagctggagatct

SEQ ID NO: 25869 - DNA, 20 bp, synthetic construct
  misc_feature 1..20: note = chemically synthesized
  source 1..20: mol_type = other DNA
cacagctggagatctgagaa

SEQ ID NO: 25870 - DNA, 20 bp, synthetic construct
  misc_feature 1..20: note = chemically synthesized
  source 1..20: mol_type = other DNA
acagctggagatctgagaac

SEQ ID NO: 25871 - DNA, 20 bp, synthetic construct
  misc_feature 1..20: note = chemically synthesized
  source 1..20: mol_type = other DNA
gctggagatctgagaacggg

SEQ ID NO: 25872 - DNA, 20 bp, synthetic construct
  misc_feature 1..20: note = chemically synthesized
  source 1..20: mol_type = other DNA
aacgggcagactgcctcctc

SEQ ID NO: 25873 - DNA, 20 bp, synthetic construct
  misc_feature 1..20: note = chemically synthesized
  source 1..20: mol_type = other DNA
gggcagactgcctcctcaag

SEQ ID NO: 25874 - DNA, 20 bp, synthetic construct
  misc_feature 1..20: note = chemically synthesized
  source 1..20: mol_type = other DNA
ggcagactgcctcctcaagt

SEQ ID NO: 25875 - DNA, 20 bp, synthetic construct
  misc_feature 1..20: note = chemically synthesized
  source 1..20: mol_type = other DNA
gtccctgacccctgaccccc

SEQ ID NO: 25876 - DNA, 20 bp, synthetic construct
  misc_feature 1..20: note = chemically synthesized
  source 1..20: mol_type = other DNA
cctgacccctgacccccgag

SEQ ID NO: 25877 - DNA, 20 bp, synthetic construct
  misc_feature 1..20: note = chemically synthesized
  source 1..20: mol_type = other DNA
tgacccccgagcagcctaac

SEQ ID NO: 25878 - DNA, 20 bp, synthetic construct
  misc_feature 1..20: note = chemically synthesized
  source 1..20: mol_type = other DNA
gacccccgagcagcctaact

SEQ ID NO: 25879 - DNA, 20 bp, synthetic construct
  misc_feature 1..20: note = chemically synthesized
  source 1..20: mol_type = other DNA
cccccgagcagcctaactgg

SEQ ID NO: 25880 - DNA, 20 bp, synthetic construct
  misc_feature 1..20: note = chemically synthesized
  source 1..20: mol_type = other DNA
ccccgagcagcctaactggg

SEQ ID NO: 25881 - DNA, 20 bp, synthetic construct
  misc_feature 1..20: note = chemically synthesized
  source 1..20: mol_type = other DNA
cctaactgggaggcaccccc

SEQ ID NO: 25882 - DNA, 20 bp, synthetic construct
  misc_feature 1..20: note = chemically synthesized
  source 1..20: mol_type = other DNA
actgggaggcacccccaagt

SEQ ID NO: 25883 - DNA, 20 bp, synthetic construct
  misc_feature 1..20: note = chemically synthesized
  source 1..20: mol_type = other DNA
ctgggaggcacccccaagta

SEQ ID NO: 25884 - DNA, 20 bp, synthetic construct
  misc_feature 1..20: note = chemically synthesized
  source 1..20: mol_type = other DNA
tgggaggcacccccaagtaa

SEQ ID NO: 25885 - DNA, 20 bp, synthetic construct
  misc_feature 1..20: note = chemically synthesized
  source 1..20: mol_type = other DNA
gaggcacccccaagtaaggg

SEQ ID NO: 25886 - DNA, 20 bp, synthetic construct
  misc_feature 1..20: note = chemically synthesized
  source 1..20: mol_type = other DNA
gggcagactgacacctcaca

SEQ ID NO: 25887 - DNA, 20 bp, synthetic construct
  misc_feature 1..20: note = chemically synthesized
  source 1..20: mol_type = other DNA
agactgacacctcacacggc

SEQ ID NO: 25888 - DNA, 20 bp, synthetic construct
  misc_feature 1..20: note = chemically synthesized
  source 1..20: mol_type = other DNA
gactgacacctcacacggcc

SEQ ID NO: 25889 - DNA, 20 bp, synthetic construct
  misc_feature 1..20: note = chemically synthesized
  source 1..20: mol_type = other DNA
acacggccaggtactcctct

SEQ ID NO: 25890 - DNA, 20 bp, synthetic construct
  misc_feature 1..20: note = chemically synthesized
  source 1..20: mol_type = other DNA
ctcctctgagacaaaacttc

SEQ ID NO: 25891 - DNA, 20 bp, synthetic construct
  misc_feature 1..20: note = chemically synthesized
  source 1..20: mol_type = other DNA
cctctgagacaaaacttcca

SEQ ID NO: 25892 - DNA, 20 bp, synthetic construct
  misc_feature 1..20: note = chemically synthesized
  source 1..20: mol_type = other DNA
ctctgagacaaaacttccag

SEQ ID NO: 25893 - DNA, 20 bp, synthetic construct
  misc_feature 1..20: note = chemically synthesized
  source 1..20: mol_type = other DNA
aaaacttccagaggaacgat

SEQ ID NO: 25894 - DNA, 20 bp, synthetic construct
  misc_feature 1..20: note = chemically synthesized
  source 1..20: mol_type = other DNA
cttccagaggaacgatcaga

SEQ ID NO: 25895 - DNA, 20 bp, synthetic construct
  misc_feature 1..20: note = chemically synthesized
  source 1..20: mol_type = other DNA
ccagaggaacgatcagacag

SEQ ID NO: 25896 - DNA, 20 bp, synthetic construct
  misc_feature 1..20: note = chemically synthesized
  source 1..20: mol_type = other DNA
cgatcagacagcagcattcg

SEQ ID NO: 25897 - DNA, 20 bp, synthetic construct
  misc_feature 1..20: note = chemically synthesized
  source 1..20: mol_type = other DNA
tcgcggatcacgaaaatctg

SEQ ID NO: 25898 - DNA, 20 bp, synthetic construct
  misc_feature 1..20: note = chemically synthesized
  source 1..20: mol_type = other DNA
cacgaaaatctgcggttctg

SEQ ID NO: 25899 - DNA, 20 bp, synthetic construct
  misc_feature 1..20: note = chemically synthesized
  source 1..20: mol_type = other DNA
cagacaccgctgctgatacc

SEQ ID NO: 25900 - DNA, 20 bp, synthetic construct
  misc_feature 1..20: note = chemically synthesized
  source 1..20: mol_type = other DNA
agacaccgctgctgataccc

SEQ ID NO: 25901 - DNA, 20 bp, synthetic construct
  misc_feature 1..20: note = chemically synthesized
  source 1..20: mol_type = other DNA
gctgctgatacccaggcaaa

SEQ ID NO: 25902 - DNA, 20 bp, synthetic construct
  misc_feature 1..20: note = chemically synthesized
  source 1..20: mol_type = other DNA
ctgctgatacccaggcaaac

SEQ ID NO: 25903 - DNA, 20 bp, synthetic construct
  misc_feature 1..20: note = chemically synthesized
  source 1..20: mol_type = other DNA
tgctgatacccaggcaaaca

SEQ ID NO: 25904 - DNA, 20 bp, synthetic construct
  misc_feature 1..20: note = chemically synthesized
  source 1..20: mol_type = other DNA
atacccaggcaaacagggtc

SEQ ID NO: 25905 - DNA, 20 bp, synthetic construct
  misc_feature 1..20: note = chemically synthesized
  source 1..20: mol_type = other DNA
acccaggcaaacagggtctg

SEQ ID NO: 25906 - DNA, 20 bp, synthetic construct
  misc_feature 1..20: note = chemically synthesized
  source 1..20: mol_type = other DNA
caggcaaacagggtctggag

SEQ ID NO: 25907 - DNA, 20 bp, synthetic construct
  misc_feature 1..20: note = chemically synthesized
  source 1..20: mol_type = other DNA
cagggtctggagtggacctc

SEQ ID NO: 25908 - DNA, 20 bp, synthetic construct
  misc_feature 1..20: note = chemically synthesized
  source 1..20: mol_type = other DNA
ggacctctagcaaactccaa

SEQ ID NO: 25909 - DNA, 20 bp, synthetic construct
  misc_feature 1..20: note = chemically synthesized
  source 1..20: mol_type = other DNA
agcaaactccaacagacctg

SEQ ID NO: 25910 - DNA, 20 bp, synthetic construct
  misc_feature 1..20: note = chemically synthesized
  source 1..20: mol_type = other DNA
actccaacagacctgcagct

SEQ ID NO: 25911 - DNA, 20 bp, synthetic construct
  misc_feature 1..20: note = chemically synthesized
  source 1..20: mol_type = other DNA
ctccaacagacctgcagctg

SEQ ID NO: 25912 - DNA, 20 bp, synthetic construct
  misc_feature 1..20: note = chemically synthesized
  source 1..20: mol_type = other DNA
tccaacagacctgcagctga

SEQ ID NO: 25913 - DNA, 20 bp, synthetic construct
  misc_feature 1..20: note = chemically synthesized
  source 1..20: mol_type = other DNA
cagctgagggtcctgtctgt

SEQ ID NO: 25914 - DNA, 20 bp, synthetic construct
  misc_feature 1..20: note = chemically synthesized
  source 1..20: mol_type = other DNA
ctgagggtcctgtctgttag

SEQ ID NO: 25915 - DNA, 20 bp, synthetic construct
  misc_feature 1..20: note = chemically synthesized
  source 1..20: mol_type = other DNA
tgagggtcctgtctgttaga

SEQ ID NO: 25916 - DNA, 20 bp, synthetic construct
  misc_feature 1..20: note = chemically synthesized
  source 1..20: mol_type = other DNA
ttagaaggaaaactaacaaa

SEQ ID NO: 25917 - DNA, 20 bp, synthetic construct
  misc_feature 1..20: note = chemically synthesized
  source 1..20: mol_type = other DNA
aaggaaaactaacaaacaga

SEQ ID NO: 25918 - DNA, 20 bp, synthetic construct
  misc_feature 1..20: note = chemically synthesized
  source 1..20: mol_type = other DNA
aggaaaactaacaaacagaa

SEQ ID NO: 25919 - DNA, 20 bp, synthetic construct
  misc_feature 1..20: note = chemically synthesized
  source 1..20: mol_type = other DNA
catccacaccaaaaacccat

SEQ ID NO: 25920 - DNA, 20 bp, synthetic construct
  misc_feature 1..20: note = chemically synthesized
  source 1..20: mol_type = other DNA
tcggtacatcactatcatca

SEQ ID NO: 25921 - DNA, 20 bp, synthetic construct
  misc_feature 1..20: note = chemically synthesized
  source 1..20: mol_type = other DNA
tcactatcatcaaagaccaa

SEQ ID NO: 25922 - DNA, 20 bp, synthetic construct
  misc_feature 1..20: note = chemically synthesized
  source 1..20: mol_type = other DNA
ctatcatcaaagaccaaaag

SEQ ID NO: 25923 - DNA, 20 bp, synthetic construct
  misc_feature 1..20: note = chemically synthesized
  source 1..20: mol_type = other DNA
caaaagtagatacaaccaca

SEQ ID NO: 25924 - DNA, 20 bp, synthetic construct
  misc_feature 1..20: note = chemically synthesized
  source 1..20: mol_type = other DNA
agtagatacaaccacaaagt

SEQ ID NO: 25925 - DNA, 20 bp, synthetic construct
  misc_feature 1..20: note = chemically synthesized
  source 1..20: mol_type = other DNA
gtagatacaaccacaaagtt

SEQ ID NO: 25926 - DNA, 20 bp, synthetic construct
  misc_feature 1..20: note = chemically synthesized
  source 1..20: mol_type = other DNA
tagatacaaccacaaagttg

SEQ ID NO: 25927 - DNA, 20 bp, synthetic construct
  misc_feature 1..20: note = chemically synthesized
  source 1..20: mol_type = other DNA
ccacaaagttggggaaaaaa

SEQ ID NO: 25928 - DNA, 20 bp, synthetic construct
  misc_feature 1..20: note = chemically synthesized
  source 1..20: mol_type = other DNA
acaaagttggggaaaaaaca

SEQ ID NO: 25929 - DNA, 20 bp, synthetic construct
  misc_feature 1..20: note = chemically synthesized
  source 1..20: mol_type = other DNA
aagttggggaaaaaacagag

SEQ ID NO: 25930 - DNA, 20 bp, synthetic construct
  misc_feature 1..20: note = chemically synthesized
  source 1..20: mol_type = other DNA
aaaaaacagagcagaaaaac

SEQ ID NO: 25931 - DNA, 20 bp, synthetic construct
  misc_feature 1..20: note = chemically synthesized
  source 1..20: mol_type = other DNA
gaaaaactggaaactctaaa

SEQ ID NO: 25932 - DNA, 20 bp, synthetic construct
  misc_feature 1..20: note = chemically synthesized
  source 1..20: mol_type = other DNA
aaactggaaactctaaaaag

SEQ ID NO: 25933 - DNA, 20 bp, synthetic construct
  misc_feature 1..20: note = chemically synthesized
  source 1..20: mol_type = other DNA
actggaaactctaaaaagca

SEQ ID NO: 25934 - DNA, 20 bp, synthetic construct
  misc_feature 1..20: note = chemically synthesized
  source 1..20: mol_type = other DNA
agagcacctttcctcctcca

SEQ ID NO: 25935 - DNA, 20 bp, synthetic construct
  misc_feature 1..20: note = chemically synthesized
  source 1..20: mol_type = other DNA
gagcacctttcctcctccaa

SEQ ID NO: 25936 - DNA, 20 bp, synthetic construct
  misc_feature 1..20: note = chemically synthesized
  source 1..20: mol_type = other DNA
acctttcctcctccaaagga

SEQ ID NO: 25937 - DNA, 20 bp, synthetic construct
  misc_feature 1..20: note = chemically synthesized
  source 1..20: mol_type = other DNA
tttcctcctccaaaggaaag

SEQ ID NO: 25938 - DNA, 20 bp, synthetic construct
  misc_feature 1..20: note = chemically synthesized
  source 1..20: mol_type = other DNA
aaaggaaagcagttcctcac

SEQ ID NO: 25939 - DNA, 20 bp, synthetic construct
  misc_feature 1..20: note = chemically synthesized
  source 1..20: mol_type = other DNA
aagcagttcctcaccagcaa

SEQ ID NO: 25940 - DNA, 20 bp, synthetic construct
  misc_feature 1..20: note = chemically synthesized
  source 1..20: mol_type = other DNA
tcctcaccagcaacggaaca

SEQ ID NO: 25941 - DNA, 20 bp, synthetic construct
  misc_feature 1..20: note = chemically synthesized
  source 1..20: mol_type = other DNA
caccagcaacggaacaaagc

SEQ ID NO: 25942 - DNA, 20 bp, synthetic construct
  misc_feature 1..20: note = chemically synthesized
  source 1..20: mol_type = other DNA
agcaacggaacaaagctgga

SEQ ID NO: 25943 - DNA, 20 bp, synthetic construct
  misc_feature 1..20: note = chemically synthesized
  source 1..20: mol_type = other DNA
caacggaacaaagctggatg

SEQ ID NO: 25944 - DNA, 20 bp, synthetic construct
  misc_feature 1..20: note = chemically synthesized
  source 1..20: mol_type = other DNA
ggatggagaatgactttgac

SEQ ID NO: 25945 - DNA, 20 bp, synthetic construct
  misc_feature 1..20: note = chemically synthesized
  source 1..20: mol_type = other DNA
gagaatgactttgacgagct

SEQ ID NO: 25946 - DNA, 20 bp, synthetic construct
  misc_feature 1..20: note = chemically synthesized
  source 1..20: mol_type = other DNA
gaatgactttgacgagctga

SEQ ID NO: 25947 - DNA, 20 bp, synthetic construct
  misc_feature 1..20: note = chemically synthesized
  source 1..20: mol_type = other DNA
tgactttgacgagctgagag

SEQ ID NO: 25948 - DNA, 20 bp, synthetic construct
  misc_feature 1..20: note = chemically synthesized
  source 1..20: mol_type = other DNA
ctttgacgagctgagagaag

SEQ ID NO: 25949 - DNA, 20 bp, synthetic construct
  misc_feature 1..20: note = chemically synthesized
  source 1..20: mol_type = other DNA
gagctgagagaagaagactt

SEQ ID NO: 25950 - DNA, 20 bp, synthetic construct
  misc_feature 1..20: note = chemically synthesized
  source 1..20: mol_type = other DNA
tcagacgatgaaactactcc

SEQ ID NO: 25951 - DNA, 20 bp, synthetic construct
  misc_feature 1..20: note = chemically synthesized
  source 1..20: mol_type = other DNA
gatgaaactactccgagcta

SEQ ID NO: 25952 - DNA, 20 bp, synthetic construct
  misc_feature 1..20: note = chemically synthesized
  source 1..20: mol_type = other DNA
atgaaactactccgagctac

SEQ ID NO: 25953 - DNA, 20 bp, synthetic construct
  misc_feature 1..20: note = chemically synthesized
  source 1..20: mol_type = other DNA
gaaactactccgagctacag

SEQ ID NO: 25954 - DNA, 20 bp, synthetic construct
  misc_feature 1..20: note = chemically synthesized
  source 1..20: mol_type = other DNA
aaactactccgagctacagg

SEQ ID NO: 25955 - DNA, 20 bp, synthetic construct
  misc_feature 1..20: note = chemically synthesized
  source 1..20: mol_type = other DNA
acaggaggaaattcaaacca

SEQ ID NO: 25956 - DNA, 20 bp, synthetic construct
  misc_feature 1..20: note = chemically synthesized
  source 1..20: mol_type = other DNA
caggaggaaattcaaaccaa

SEQ ID NO: 25957 - DNA, 20 bp, synthetic construct
  misc_feature 1..20: note = chemically synthesized
  source 1..20: mol_type = other DNA
ggaaattcaaaccaaaggca

SEQ ID NO: 25958 - DNA, 20 bp, synthetic construct
  misc_feature 1..20: note = chemically synthesized
  source 1..20: mol_type = other DNA
aattcaaaccaaaggcaaag

SEQ ID NO: 25959 - DNA, 20 bp, synthetic construct
  misc_feature 1..20: note = chemically synthesized
  source 1..20: mol_type = other DNA
aaaaactttgaaaaaaaatt

SEQ ID NO: 25960 - DNA, 20 bp, synthetic construct
  misc_feature 1..20: note = chemically synthesized
  source 1..20: mol_type = other DNA
aatttagatgaatgtataac

SEQ ID NO: 25961 - DNA, 20 bp, synthetic construct
  misc_feature 1..20: note = chemically synthesized
  source 1..20: mol_type = other DNA
tataactagaataaccaata

SEQ ID NO: 25962 - DNA, 20 bp, synthetic construct
  misc_feature 1..20: note = chemically synthesized
  source 1..20: mol_type = other DNA
taactagaataaccaataca

SEQ ID NO: 25963 - DNA, 20 bp, synthetic construct
  misc_feature 1..20: note = chemically synthesized
  source 1..20: mol_type = other DNA
ctagaataaccaatacagag

SEQ ID NO: 25964 - DNA, 20 bp, synthetic construct
  misc_feature 1..20: note = chemically synthesized
  source 1..20: mol_type = other DNA
ccaatacagagaagtgctta

SEQ ID NO: 25965 - DNA, 20 bp, synthetic construct
  misc_feature 1..20: note = chemically synthesized
  source 1..20: mol_type = other DNA
caatacagagaagtgcttaa

SEQ ID NO: 25966 - DNA, 20 bp, synthetic construct
  misc_feature 1..20: note = chemically synthesized
  source 1..20: mol_type = other DNA
atacagagaagtgcttaaag

SEQ ID NO: 25967 - DNA, 20 bp, synthetic construct
  misc_feature 1..20: note = chemically synthesized
  source 1..20: mol_type = other DNA
gaagtgcttaaaggagctga

SEQ ID NO: 25968 - DNA, 20 bp, synthetic construct
  misc_feature 1..20: note = chemically synthesized
  source 1..20: mol_type = other DNA
agtgcttaaaggagctgatg

SEQ ID NO: 25969 - DNA, 20 bp, synthetic construct
  misc_feature 1..20: note = chemically synthesized
  source 1..20: mol_type = other DNA
aaaggagctgatggagctga

SEQ ID NO: 25970 - DNA, 20 bp, synthetic construct
  misc_feature 1..20: note = chemically synthesized
  source 1..20: mol_type = other DNA
agctgatggagctgaaagcc

SEQ ID NO: 25971 - DNA, 20 bp, synthetic construct
  misc_feature 1..20: note = chemically synthesized
  source 1..20: mol_type = other DNA
gctgatggagctgaaagcca

SEQ ID NO: 25972 - DNA, 20 bp, synthetic construct
  misc_feature 1..20: note = chemically synthesized
  source 1..20: mol_type = other DNA
ggagctgaaagccaaggctc

SEQ ID NO: 25973 - DNA, 20 bp, synthetic construct
  misc_feature 1..20: note = chemically synthesized
  source 1..20: mol_type = other DNA
caaggctcgagaatgacgtg

SEQ ID NO: 25974 - DNA, 20 bp, synthetic construct
  misc_feature 1..20: note = chemically synthesized
  source 1..20: mol_type = other DNA
ctcgagaatgacgtgaagaa

SEQ ID NO: 25975 - DNA, 20 bp, synthetic construct
  misc_feature 1..20: note = chemically synthesized
  source 1..20: mol_type = other DNA
cgagaatgacgtgaagaatg

SEQ ID NO: 25976 - DNA, 20 bp, synthetic construct
  misc_feature 1..20: note = chemically synthesized
  source 1..20: mol_type = other DNA
gaatgacgtgaagaatggag

SEQ ID NO: 25977 - DNA, 20 bp, synthetic construct
  misc_feature 1..20: note = chemically synthesized
  source 1..20: mol_type = other DNA
cgtgaagaatggagaagcct

SEQ ID NO: 25978 - DNA, 20 bp, synthetic construct
  misc_feature 1..20: note = chemically synthesized
  source 1..20: mol_type = other DNA
gtgaagaatggagaagcctc

SEQ ID NO: 25979 - DNA, 20 bp, synthetic construct
  misc_feature 1..20: note = chemically synthesized
  source 1..20: mol_type = other DNA
gaagaatggagaagcctcag

SEQ ID NO: 25980 - DNA, 20 bp, synthetic construct
  misc_feature 1..20: note = chemically synthesized
  source 1..20: mol_type = other DNA
caggagctgatgcgatcaac

SEQ ID NO: 25981 - DNA, 20 bp, synthetic construct
  misc_feature 1..20: note = chemically synthesized
  source 1..20: mol_type = other DNA
gagctgatgcgatcaactgg

SEQ ID NO: 25982 - DNA, 20 bp, synthetic construct
  misc_feature 1..20: note = chemically synthesized
  source 1..20: mol_type = other DNA
tgatgcgatcaactggaaga

SEQ ID NO: 25983 - DNA, 20 bp, synthetic construct
  misc_feature 1..20: note = chemically synthesized
  source 1..20: mol_type = other DNA
gatgcgatcaactggaagaa

SEQ ID NO: 25984 - DNA, 20 bp, synthetic construct
  misc_feature 1..20: note = chemically synthesized
  source 1..20: mol_type = other DNA
atgcgatcaactggaagaaa

SEQ ID NO: 25985 - DNA, 20 bp, synthetic construct
  misc_feature 1..20: note = chemically synthesized
  source 1..20: mol_type = other DNA
tcaactggaagaaagggtat

SEQ ID NO: 25986 - DNA, 20 bp, synthetic construct
  misc_feature 1..20: note = chemically synthesized
  source 1..20: mol_type = other DNA
ggaagaaagggtatcagtga

SEQ ID NO: 25987 - DNA, 20 bp, synthetic construct
  misc_feature 1..20: note = chemically synthesized
  source 1..20: mol_type = other DNA
agaaagggtatcagtgatgg

SEQ ID NO: 25988 - DNA, 20 bp, synthetic construct
  misc_feature 1..20: note = chemically synthesized
  source 1..20: mol_type = other DNA
aagatgaaataaatgaaatg

SEQ ID NO: 25989 - DNA, 20 bp, synthetic construct
  misc_feature 1..20: note = chemically synthesized
  source 1..20: mol_type = other DNA
tgaaataaatgaaatgaagc

SEQ ID NO: 25990 - DNA, 20 bp, synthetic construct
  misc_feature 1..20: note = chemically synthesized
  source 1..20: mol_type = other DNA
aataaatgaaatgaagcgag

SEQ ID NO: 25991 - DNA, 20 bp, synthetic construct
  misc_feature 1..20: note = chemically synthesized
  source 1..20: mol_type = other DNA
ataaatgaaatgaagcgaga

SEQ ID NO: 25992 - DNA, 20 bp, synthetic construct
  misc_feature 1..20: note = chemically synthesized
  source 1..20: mol_type = other DNA
taaatgaaatgaagcgagaa

SEQ ID NO: 25993 - DNA, 20 bp, synthetic construct
  misc_feature 1..20: note = chemically synthesized
  source 1..20: mol_type = other DNA
atgaaatgaagcgagaaggg

SEQ ID NO: 25994 - DNA, 20 bp, synthetic construct
  misc_feature 1..20: note = chemically synthesized
  source 1..20: mol_type = other DNA
atgaagcgagaagggaagtt

SEQ ID NO: 25995 - DNA, 20 bp, synthetic construct
  misc_feature 1..20: note = chemically synthesized
  source 1..20: mol_type = other DNA
gaagcgagaagggaagttta

SEQ ID NO: 25996 - DNA, 20 bp, synthetic construct
  misc_feature 1..20: note = chemically synthesized
  source 1..20: mol_type = other DNA
gaagggaagtttagagaaaa

SEQ ID NO: 25997 - DNA, 20 bp, synthetic construct
  misc_feature 1..20: note = chemically synthesized
  source 1..20: mol_type = other DNA
tttagagaaaaaagaataaa

SEQ ID NO: 25998 - DNA, 20 bp, synthetic construct
  misc_feature 1..20: note = chemically synthesized
  source 1..20: mol_type = other DNA
agaataaaaagaaatgaaca

SEQ ID NO: 25999 - DNA, 20 bp, synthetic construct
  misc_feature 1..20: note = chemically synthesized
  source 1..20: mol_type = other DNA
aagaaatgaacaaagcctcc

SEQ ID NO: 26000 - DNA, 20 bp, synthetic construct
  misc_feature 1..20: note = chemically synthesized
  source 1..20: mol_type = other DNA
aacaaagcctccaagaaata

SEQ ID NO: 26001 - DNA, 20 bp, synthetic construct
  misc_feature 1..20: note = chemically synthesized
  source 1..20: mol_type = other DNA
acaaagcctccaagaaatat

SEQ ID NO: 26002 - DNA, 20 bp, synthetic construct
  misc_feature 1..20: note = chemically synthesized
  source 1..20: mol_type = other DNA
gaaatatgggactatgtgaa

SEQ ID NO: 26003 - DNA, 20 bp, synthetic construct
  misc_feature 1..20: note = chemically synthesized
  source 1..20: mol_type = other DNA
ctatgtgaaaagatcaaatc

SEQ ID NO: 26004 - DNA, 20 bp, synthetic construct
  misc_feature 1..20: note = chemically synthesized
  source 1..20: mol_type = other DNA
tatgtgaaaagatcaaatct

SEQ ID NO: 26005 - DNA, 20 bp, synthetic construct
  misc_feature 1..20: note = chemically synthesized
  source 1..20: mol_type = other DNA
agatcaaatctaggtctgat

SEQ ID NO: 26006 - DNA, 20 bp, synthetic construct
  misc_feature 1..20: note = chemically synthesized
  source 1..20: mol_type = other DNA
ggtctgattggtgtacctga

SEQ ID NO: 26007 - DNA, 20 bp, synthetic construct
  misc_feature 1..20: note = chemically synthesized
  source 1..20: mol_type = other DNA
attggtgtacctgaaagtga

SEQ ID NO: 26008 - DNA, 20 bp, synthetic construct
  misc_feature 1..20: note = chemically synthesized
  source 1..20: mol_type = other DNA
ttggtgtacctgaaagtgac

SEQ ID NO: 26009 - DNA, 20 bp, synthetic construct
  misc_feature 1..20: note = chemically synthesized
  source 1..20: mol_type = other DNA
tggtgtacctgaaagtgacg

SEQ ID NO: 26010 - DNA, 20 bp, synthetic construct
  misc_feature 1..20: note = chemically synthesized
  source 1..20: mol_type = other DNA
gtgtacctgaaagtgacggg

SEQ ID NO: 26011 - DNA, 20 bp, synthetic construct
  misc_feature 1..20: note = chemically synthesized
  source 1..20: mol_type = other DNA
gtgacggggagaatcgaacc

SEQ ID NO: 26012 - DNA, 20 bp, synthetic construct
  misc_feature 1..20: note = chemically synthesized
  source 1..20: mol_type = other DNA
cggggagaatcgaaccaagt

SEQ ID NO: 26013 - DNA, 20 bp, synthetic construct
  misc_feature 1..20: note = chemically synthesized
  source 1..20: mol_type = other DNA
ccaagttggaaaacactctg

SEQ ID NO: 26014 - DNA, 20 bp, synthetic construct
  misc_feature 1..20: note = chemically synthesized
  source 1..20: mol_type = other DNA
caagttggaaaacactctgc

SEQ ID NO: 26015 - DNA, 20 bp, synthetic construct
  misc_feature 1..20: note = chemically synthesized
  source 1..20: mol_type = other DNA
acactctgcaggatattatc

SEQ ID NO: 26016 - DNA, 20 bp, synthetic construct
  misc_feature 1..20: note = chemically synthesized
  source 1..20: mol_type = other DNA
cactctgcaggatattatcc

SEQ ID NO: 26017 - DNA, 20 bp, synthetic construct
  misc_feature 1..20: note = chemically synthesized
  source 1..20: mol_type = other DNA
ctctgcaggatattatccag

SEQ ID NO: 26018 - DNA, 20 bp, synthetic construct
  misc_feature 1..20: note = chemically synthesized
  source 1..20: mol_type = other DNA
ccaggagaacttccccaatc

SEQ ID NO: 26019 - DNA, 20 bp, synthetic construct
  misc_feature 1..20: note = chemically synthesized
  source 1..20: mol_type = other DNA
gagaacttccccaatctagc

SEQ ID NO: 26020 - DNA, 20 bp, synthetic construct
  misc_feature 1..20: note = chemically synthesized
  source 1..20: mol_type = other DNA
agaacttccccaatctagca

SEQ ID NO: 26021 - DNA, 20 bp, synthetic construct
  misc_feature 1..20: note = chemically synthesized
  source 1..20: mol_type = other DNA
acttccccaatctagcaagg

SEQ ID NO: 26022 - DNA, 20 bp, synthetic construct
  misc_feature 1..20: note = chemically synthesized
  source 1..20: mol_type = other DNA
cttccccaatctagcaaggc

SEQ ID NO: 26023 - DNA, 20 bp, synthetic construct
  misc_feature 1..20: note = chemically synthesized
  source 1..20: mol_type = other DNA
tagcaaggcaggccaacatt

SEQ ID NO: 26024 - DNA, 20 bp, synthetic construct
  misc_feature 1..20: note = chemically synthesized
  source 1..20: mol_type = other DNA
ggcaggccaacattcagatt

SEQ ID NO: 26025 - DNA, 20 bp, synthetic construct
  misc_feature 1..20: note = chemically synthesized
  source 1..20: mol_type = other DNA
gcaggccaacattcagattc

SEQ ID NO: 26026 - DNA, 20 bp, synthetic construct
  misc_feature 1..20: note = chemically synthesized
  source 1..20: mol_type = other DNA
acattcagattcaggaaata

SEQ ID NO: 26027 - DNA, 20 bp, synthetic construct
  misc_feature 1..20: note = chemically synthesized
  source 1..20: mol_type = other DNA
attcagattcaggaaataca

SEQ ID NO: 26028 - DNA, 20 bp, synthetic construct
  misc_feature 1..20: note = chemically synthesized
  source 1..20: mol_type = other DNA
acgccacaaacatactcctc

SEQ ID NO: 26029 - DNA, 20 bp, synthetic construct
  misc_feature 1..20: note = chemically synthesized
  source 1..20: mol_type = other DNA
ccacaaacatactcctcgag

SEQ ID NO: 26030 - DNA, 20 bp, synthetic construct
  misc_feature 1..20: note = chemically synthesized
  source 1..20: mol_type = other DNA
acaaacatactcctcgagaa

SEQ ID NO: 26031 - DNA, 20 bp, synthetic construct
  misc_feature 1..20: note = chemically synthesized
  source 1..20: mol_type = other DNA
tcctcgagaagagcaactcc

SEQ ID NO: 26032 - DNA, 20 bp, synthetic construct
  misc_feature 1..20: note = chemically synthesized
  source 1..20: mol_type = other DNA
actccaagacacataattgt

SEQ ID NO: 26033 - DNA, 20 bp, synthetic construct
  misc_feature 1..20: note = chemically synthesized
  source 1..20: mol_type = other DNA
cataattgtcagattcacca

SEQ ID NO: 26034 - DNA, 20 bp, synthetic construct
  misc_feature 1..20: note = chemically synthesized
  source 1..20: mol_type = other DNA
gattcaccaaagttgaaatg

SEQ ID NO: 26035 - DNA, 20 bp, synthetic construct
  misc_feature 1..20: note = chemically synthesized
  source 1..20: mol_type = other DNA
attcaccaaagttgaaatga

SEQ ID NO: 26036 - DNA, 20 bp, synthetic construct
  misc_feature 1..20: note = chemically synthesized
  source 1..20: mol_type = other DNA
gaaatgaaggaaaaaatgtt

SEQ ID NO: 26037 - DNA, 20 bp, synthetic construct
  misc_feature 1..20: note = chemically synthesized
  source 1..20: mol_type = other DNA
aaatgaaggaaaaaatgtta

SEQ ID NO: 26038 - DNA, 20 bp, synthetic construct
  misc_feature 1..20: note = chemically synthesized
  source 1..20: mol_type = other DNA
aatgaaggaaaaaatgttaa

SEQ ID NO: 26039 - DNA, 20 bp, synthetic construct
  misc_feature 1..20: note = chemically synthesized
  source 1..20: mol_type = other DNA
gaaggaaaaaatgttaaggg

SEQ ID NO: 26040 - DNA, 20 bp, synthetic construct
  misc_feature 1..20: note = chemically synthesized
  source 1..20: mol_type = other DNA
gaaaaaatgttaagggcagc

SEQ ID NO: 26041 - DNA, 20 bp, synthetic construct
  misc_feature 1..20: note = chemically synthesized
  source 1..20: mol_type = other DNA
aaaaatgttaagggcagcca

SEQ ID NO: 26042 - DNA, 20 bp, synthetic construct
  misc_feature 1..20: note = chemically synthesized
  source 1..20: mol_type = other DNA
aaatgttaagggcagccaga

SEQ ID NO: 26043 - DNA, 20 bp, synthetic construct
  misc_feature 1..20: note = chemically synthesized
  source 1..20: mol_type = other DNA
gttaagggcagccagagaga

SEQ ID NO: 26044 - DNA, 20 bp, synthetic construct
  misc_feature 1..20: note = chemically synthesized
  source 1..20: mol_type = other DNA
ttaagggcagccagagagaa

SEQ ID NO: 26045 - DNA, 20 bp, synthetic construct
  misc_feature 1..20: note = chemically synthesized
  source 1..20: mol_type = other DNA
gggcagccagagagaaaggt

SEQ ID NO: 26046 - DNA, 20 bp, synthetic construct
  misc_feature 1..20: note = chemically synthesized
  source 1..20: mol_type = other DNA
ggcagccagagagaaaggtc

SEQ ID NO: 26047 - DNA, 20 bp, synthetic construct
  misc_feature 1..20: note = chemically synthesized
  source 1..20: mol_type = other DNA
gaaaggtcgggttacccaca

SEQ ID NO: 26048 - DNA, 20 bp, synthetic construct
  misc_feature 1..20: note = chemically synthesized
  source 1..20: mol_type = other DNA
aaaggtcgggttacccacaa

SEQ ID NO: 26049 - DNA, 20 bp, synthetic construct
  misc_feature 1..20: note = chemically synthesized
  source 1..20: mol_type = other DNA
aaggtcgggttacccacaaa

SEQ ID NO: 26050 - DNA, 20 bp, synthetic construct
  misc_feature 1..20: note = chemically synthesized
  source 1..20: mol_type = other DNA
gtcgggttacccacaaaggg

SEQ ID NO: 26051 - DNA, 20 bp, synthetic construct
  misc_feature 1..20: note = chemically synthesized
  source 1..20: mol_type = other DNA
acccacaaagggaagcccat

SEQ ID NO: 26052 - DNA, 20 bp, synthetic construct
  misc_feature 1..20: note = chemically synthesized
  source 1..20: mol_type = other DNA
agggaagcccatcagactaa

SEQ ID NO: 26053 - DNA, 20 bp, synthetic construct
  misc_feature 1..20: note = chemically synthesized
  source 1..20: mol_type = other DNA
gaagcccatcagactaacag

SEQ ID NO: 26054 - DNA, 20 bp, synthetic construct
  misc_feature 1..20: note = chemically synthesized
  source 1..20: mol_type = other DNA
cagactaacagcagctctct

SEQ ID NO: 26055 - DNA, 20 bp, synthetic construct
  misc_feature 1..20: note = chemically synthesized
  source 1..20: mol_type = other DNA
actaacagcagctctcttgg

SEQ ID NO: 26056 - DNA, 20 bp, synthetic construct
  misc_feature 1..20: note = chemically synthesized
  source 1..20: mol_type = other DNA
tctcttggcagaaactctac

SEQ ID NO: 26057 - DNA, 20 bp, synthetic construct
  misc_feature 1..20: note = chemically synthesized
  source 1..20: mol_type = other DNA
ttggcagaaactctacaagc

SEQ ID NO: 26058 - DNA, 20 bp, synthetic construct
  misc_feature 1..20: note = chemically synthesized
  source 1..20: mol_type = other DNA
gcagaaactctacaagccag

SEQ ID NO: 26059 - DNA, 20 bp, synthetic construct
  misc_feature 1..20: note = chemically synthesized
  source 1..20: mol_type = other DNA
agaaactctacaagccagaa

SEQ ID NO: 26060 - DNA, 20 bp, synthetic construct
  misc_feature 1..20: note = chemically synthesized
  source 1..20: mol_type = other DNA
aaactctacaagccagaaga

SEQ ID NO: 26061 - DNA, 20 bp, synthetic construct
  misc_feature 1..20: note = chemically synthesized
  source 1..20: mol_type = other DNA
ctctacaagccagaagagag

SEQ ID NO: 26062 - DNA, 20 bp, synthetic construct
  misc_feature 1..20: note = chemically synthesized
  source 1..20: mol_type = other DNA
tctacaagccagaagagagt

SEQ ID NO: 26063 - DNA, 20 bp, synthetic construct
  misc_feature 1..20: note = chemically synthesized
  source 1..20: mol_type = other DNA
ctacaagccagaagagagtg

SEQ ID NO: 26064 - DNA, 20 bp, synthetic construct
  misc_feature 1..20: note = chemically synthesized
  source 1..20: mol_type = other DNA
tacaagccagaagagagtgg

SEQ ID NO: 26065 - DNA, 20 bp, synthetic construct
  misc_feature 1..20: note = chemically synthesized
  source 1..20: mol_type = other DNA
gccaatattcaacatcctta

SEQ ID NO: 26066 - DNA, 20 bp, synthetic construct
  misc_feature 1..20: note = chemically synthesized
  source 1..20: mol_type = other DNA
ccaatattcaacatccttaa

SEQ ID NO: 26067 - DNA, 20 bp, synthetic construct
  misc_feature 1..20: note = chemically synthesized
  source 1..20: mol_type = other DNA
tattcaacatccttaaagga

SEQ ID NO: 26068 - DNA, 20 bp, synthetic construct
  misc_feature 1..20: note = chemically synthesized
  source 1..20: mol_type = other DNA
aaaggaaagaattttcaaca

SEQ ID NO: 26069 - DNA, 20 bp, synthetic construct
  misc_feature 1..20: note = chemically synthesized
  source 1..20: mol_type = other DNA
tcaacacagaatttaatatc

SEQ ID NO: 26070 - DNA, 20 bp, synthetic construct
  misc_feature 1..20: note = chemically synthesized
  source 1..20: mol_type = other DNA
atttaatatccagccaaact

SEQ ID NO: 26071 - DNA, 20 bp, synthetic construct
  misc_feature 1..20: note = chemically synthesized
  source 1..20: mol_type = other DNA
ccagccaaactaagcttcat

SEQ ID NO: 26072 - DNA, 20 bp, synthetic construct
  misc_feature 1..20: note = chemically synthesized
  source 1..20: mol_type = other DNA
caaactaagcttcataagtg

SEQ ID NO: 26073 - DNA, 20 bp, synthetic construct
  misc_feature 1..20: note = chemically synthesized
  source 1..20: mol_type = other DNA
aaactaagcttcataagtga

SEQ ID NO: 26074 - DNA, 20 bp, synthetic construct
  misc_feature 1..20: note = chemically synthesized
  source 1..20: mol_type = other DNA
actaagcttcataagtgaag

SEQ ID NO: 26075 - DNA, 20 bp, synthetic construct
  misc_feature 1..20: note = chemically synthesized
  source 1..20: mol_type = other DNA
aggagaaataaaatacttta

SEQ ID NO: 26076 - DNA, 20 bp, synthetic construct
  misc_feature 1..20: note = chemically synthesized
  source 1..20: mol_type = other DNA
aaataaaatactttacagac

SEQ ID NO: 26077 - DNA, 20 bp, synthetic construct
  misc_feature 1..20: note = chemically synthesized
  source 1..20: mol_type = other DNA
tttacagacaagcaaatgct

SEQ ID NO: 26078 - DNA, 20 bp, synthetic construct
  misc_feature 1..20: note = chemically synthesized
  source 1..20: mol_type = other DNA
tacagacaagcaaatgctga

SEQ ID NO: 26079 - DNA, 20 bp, synthetic construct
  misc_feature 1..20: note = chemically synthesized
  source 1..20: mol_type = other DNA
ctgagagattttgtcatcac

SEQ ID NO: 26080 - DNA, 20 bp, synthetic construct
  misc_feature 1..20: note = chemically synthesized
  source 1..20: mol_type = other DNA
tgagagattttgtcatcacc

SEQ ID NO: 26081 - DNA, 20 bp, synthetic construct
  misc_feature 1..20: note = chemically synthesized
  source 1..20: mol_type = other DNA
catcaccaggcctgacctaa

SEQ ID NO: 26082 - DNA, 20 bp, synthetic construct
  misc_feature 1..20: note = chemically synthesized
  source 1..20: mol_type = other DNA
tcaccaggcctgacctaaaa

SEQ ID NO: 26083 - DNA, 20 bp, synthetic construct
  misc_feature 1..20: note = chemically synthesized
  source 1..20: mol_type = other DNA
ctgacctaaaagagctcctg

SEQ ID NO: 26084 - DNA, 20 bp, synthetic construct
  misc_feature 1..20: note = chemically synthesized
  source 1..20: mol_type = other DNA
tgacctaaaagagctcctga

SEQ ID NO: 26085 - DNA, 20 bp, synthetic construct
  misc_feature 1..20: note = chemically synthesized
  source 1..20: mol_type = other DNA
cctaaaagagctcctgaagg

SEQ ID NO: 26086 - DNA, 20 bp, synthetic construct
  misc_feature 1..20: note = chemically synthesized
  source 1..20: mol_type = other DNA
cctgaaggaagcactaaaca

SEQ ID NO: 26087 - DNA, 20 bp, synthetic construct
  misc_feature 1..20: note = chemically synthesized
  source 1..20: mol_type = other DNA
aaggaagcactaaacatgga

SEQ ID NO: 26088 - DNA, 20 bp, synthetic construct
  misc_feature 1..20: note = chemically synthesized
  source 1..20: mol_type = other DNA
aggaagcactaaacatggaa

SEQ ID NO: 26089 - DNA, 20 bp, synthetic construct
  misc_feature 1..20: note = chemically synthesized
  source 1..20: mol_type = other DNA
taaacatggaaaggcacaac

SEQ ID NO: 26090 - DNA, 20 bp, synthetic construct
  misc_feature 1..20: note = chemically synthesized
  source 1..20: mol_type = other DNA
tggaaaggcacaaccggtac

SEQ ID NO: 26091 - DNA, 20 bp, synthetic construct
  misc_feature 1..20: note = chemically synthesized
  source 1..20: mol_type = other DNA
ggtaccagccactgcaaaat

SEQ ID NO: 26092 - DNA, 20 bp, synthetic construct
  misc_feature 1..20: note = chemically synthesized
  source 1..20: mol_type = other DNA
gtaccagccactgcaaaatc

SEQ ID NO: 26093 - DNA, 20 bp, synthetic construct
  misc_feature 1..20: note = chemically synthesized
  source 1..20: mol_type = other DNA
caaaatcaggccaaaatgtg

SEQ ID NO: 26094 - DNA, 20 bp, synthetic construct
  misc_feature 1..20: note = chemically synthesized
  source 1..20: mol_type = other DNA
gccaaaatgtgaagaccatc

SEQ ID NO: 26095 - DNA, 20 bp, synthetic construct
  misc_feature 1..20: note = chemically synthesized
  source 1..20: mol_type = other DNA
aatgtgaagaccatcaagac

SEQ ID NO: 26096 - DNA, 20 bp, synthetic construct
  misc_feature 1..20: note = chemically synthesized
  source 1..20: mol_type = other DNA
atgtgaagaccatcaagact

SEQ ID NO: 26097 - DNA, 20 bp, synthetic construct
  misc_feature 1..20: note = chemically synthesized
  source 1..20: mol_type = other DNA
tgaagaccatcaagactagg

SEQ ID NO: 26098 - DNA, 20 bp, synthetic construct
  misc_feature 1..20: note = chemically synthesized
  source 1..20: mol_type = other DNA
aagaaactgcatcaactaac

SEQ ID NO: 26099 - DNA, 20 bp, synthetic construct
  misc_feature 1..20: note = chemically synthesized
  source 1..20: mol_type = other DNA
caactaacgagcaaaataac

SEQ ID NO: 26100 - DNA, 20 bp, synthetic construct
  misc_feature 1..20: note = chemically synthesized
  source 1..20: mol_type = other DNA
ataaccagctatcataatga

SEQ ID NO: 26101 - DNA, 20 bp, synthetic construct
  misc_feature 1..20: note = chemically synthesized
  source 1..20: mol_type = other DNA
taaccagctatcataatgac

SEQ ID NO: 26102 - DNA, 20 bp, synthetic construct
  misc_feature 1..20: note = chemically synthesized
  source 1..20: mol_type = other DNA
atattaactttaaatgtaaa

SEQ ID NO: 26103 - DNA, 20 bp, synthetic construct
  misc_feature 1..20: note = chemically synthesized
  source 1..20: mol_type = other DNA
actttaaatgtaaatggact

SEQ ID NO: 26104 - DNA, 20 bp, synthetic construct
  misc_feature 1..20: note = chemically synthesized
  source 1..20: mol_type = other DNA
ggactaagtgctccaattga

SEQ ID NO: 26105 - DNA, 20 bp, synthetic construct
  misc_feature 1..20: note = chemically synthesized
  source 1..20: mol_type = other DNA
agtgctccaattgaaagaca

SEQ ID NO: 26106 - DNA, 20 bp, synthetic construct
  misc_feature 1..20: note = chemically synthesized
  source 1..20: mol_type = other DNA
tccaattgaaagacacagac

SEQ ID NO: 26107 - DNA, 20 bp, synthetic construct
  misc_feature 1..20: note = chemically synthesized
  source 1..20: mol_type = other DNA
aaagacacagactggcaaat

SEQ ID NO: 26108 - DNA, 20 bp, synthetic construct
  misc_feature 1..20: note = chemically synthesized
  source 1..20: mol_type = other DNA
acagactggcaaattggata

SEQ ID NO: 26109 - DNA, 20 bp, synthetic construct
  misc_feature 1..20: note = chemically synthesized
  source 1..20: mol_type = other DNA
agactggcaaattggataaa

SEQ ID NO: 26110 - DNA, 20 bp, synthetic construct
  misc_feature 1..20: note = chemically synthesized
  source 1..20: mol_type = other DNA
aattggataaagagtgtatt

SEQ ID NO: 26111 - DNA, 20 bp, synthetic construct
  misc_feature 1..20: note = chemically synthesized
  source 1..20: mol_type = other DNA
attggataaagagtgtattc

SEQ ID NO: 26112 - DNA, 20 bp, synthetic construct
  misc_feature 1..20: note = chemically synthesized
  source 1..20: mol_type = other DNA
ctcatgtgcacacacacaca

SEQ ID NO: 26113 - DNA, 20 bp, synthetic construct
  misc_feature 1..20: note = chemically synthesized
  source 1..20: mol_type = other DNA
tcatgtgcacacacacacat

SEQ ID NO: 26114 - DNA, 20 bp, synthetic construct
  misc_feature 1..20: note = chemically synthesized
  source 1..20: mol_type = other DNA
cacacataggctcaaaataa

SEQ ID NO: 26115 - DNA, 20 bp, synthetic construct
  misc_feature 1..20: note = chemically synthesized
  source 1..20: mol_type = other DNA
acacataggctcaaaataaa

SEQ ID NO: 26116 - DNA, 20 bp, synthetic construct
  misc_feature 1..20: note = chemically synthesized
  source 1..20: mol_type = other DNA
ataggctcaaaataaaagga

SEQ ID NO: 26117 - DNA, 20 bp, synthetic construct
  misc_feature 1..20: note = chemically synthesized
  source 1..20: mol_type = other DNA
aggctcaaaataaaaggatg

SEQ ID NO: 26118 - DNA, 20 bp, synthetic construct
  misc_feature 1..20: note = chemically synthesized
  source 1..20: mol_type = other DNA
ggctcaaaataaaaggatgg

SEQ ID NO: 26119 - DNA, 20 bp, synthetic construct
  misc_feature 1..20: note = chemically synthesized
  source 1..20: mol_type = other DNA
tcaaaataaaaggatggagg

SEQ ID NO: 26120 - DNA, 20 bp, synthetic construct
  misc_feature 1..20: note = chemically synthesized
  source 1..20: mol_type = other DNA
aggatggaggaagatctacc

SEQ ID NO: 26121 - DNA, 20 bp, synthetic construct
  misc_feature 1..20: note = chemically synthesized
  source 1..20: mol_type = other DNA
aggaagatctaccaagcaaa

SEQ ID NO: 26122 - DNA, 20 bp, synthetic construct
  misc_feature 1..20: note = chemically synthesized
  source 1..20: mol_type = other DNA
aagcaaatggaaaacaaaaa

SEQ ID NO: 26123 - DNA, 20 bp, synthetic construct
  misc_feature 1..20: note = chemically synthesized
  source 1..20: mol_type = other DNA
agcaaatggaaaacaaaaaa

SEQ ID NO: 26124 - DNA, 20 bp, synthetic construct
  misc_feature 1..20: note = chemically synthesized
  source 1..20: mol_type = other DNA
aaatggaaaacaaaaaaagg

SEQ ID NO: 26125 - DNA, 20 bp, synthetic construct
  misc_feature 1..20: note = chemically synthesized
  source 1..20: mol_type = other DNA
aatggaaaacaaaaaaaggc

SEQ ID NO: 26126 - DNA, 20 bp, synthetic construct
  misc_feature 1..20: note = chemically synthesized
  source 1..20: mol_type = other DNA
atggaaaacaaaaaaaggca

SEQ ID NO: 26127 - DNA, 20 bp, synthetic construct
  misc_feature 1..20: note = chemically synthesized
  source 1..20: mol_type = other DNA
tggaaaacaaaaaaaggcag

SEQ ID NO: 26128 - DNA, 20 bp, synthetic construct
  misc_feature 1..20: note = chemically synthesized
  source 1..20: mol_type = other DNA
aaaggcaggggttgcaatcc

SEQ ID NO: 26129 - DNA, 20 bp, synthetic construct
  misc_feature 1..20: note = chemically synthesized
  source 1..20: mol_type = other DNA
aatcctagtctctgataaaa

SEQ ID NO: 26130 - DNA, 20 bp, synthetic construct
  misc_feature 1..20: note = chemically synthesized
  source 1..20: mol_type = other DNA
atcctagtctctgataaaac

SEQ ID NO: 26131 - DNA, 20 bp, synthetic construct
  misc_feature 1..20: note = chemically synthesized
  source 1..20: mol_type = other DNA
aaacaggctttaaaccaaca

SEQ ID NO: 26132 - DNA, 20 bp, synthetic construct
  misc_feature 1..20: note = chemically synthesized
  source 1..20: mol_type = other DNA
tttaaaccaacaaagatcaa

SEQ ID NO: 26133 - DNA, 20 bp, synthetic construct
  misc_feature 1..20: note = chemically synthesized
  source 1..20: mol_type = other DNA
taaaccaacaaagatcaaaa

SEQ ID NO: 26134 - DNA, 20 bp, synthetic construct
  misc_feature 1..20: note = chemically synthesized
  source 1..20: mol_type = other DNA
aacaaagatcaaaagagaca

SEQ ID NO: 26135 - DNA, 20 bp, synthetic construct
  misc_feature 1..20: note = chemically synthesized
  source 1..20: mol_type = other DNA
aaagatcaaaagagacaaag

SEQ ID NO: 26136 - DNA, 20 bp, synthetic construct
  misc_feature 1..20: note = chemically synthesized
  source 1..20: mol_type = other DNA
aagatcaaaagagacaaaga

SEQ ID NO: 26137 - DNA, 20 bp, synthetic construct
  misc_feature 1..20: note = chemically synthesized
  source 1..20: mol_type = other DNA
caaagaaggccattacataa

SEQ ID NO: 26138 - DNA, 20 bp, synthetic construct
  misc_feature 1..20: note = chemically synthesized
  source 1..20: mol_type = other DNA
aaggccattacataatggta

SEQ ID NO: 26139 - DNA, 20 bp, synthetic construct
  misc_feature 1..20: note = chemically synthesized
  source 1..20: mol_type = other DNA
aggccattacataatggtaa

SEQ ID NO: 26140 - DNA, 20 bp, synthetic construct
  misc_feature 1..20: note = chemically synthesized
  source 1..20: mol_type = other DNA
ggccattacataatggtaaa

SEQ ID NO: 26141 - DNA, 20 bp, synthetic construct
  misc_feature 1..20: note = chemically synthesized
  source 1..20: mol_type = other DNA
ggtaaagggatcaattcaac

SEQ ID NO: 26142 - DNA, 20 bp, synthetic construct
  misc_feature 1..20: note = chemically synthesized
  source 1..20: mol_type = other DNA
aaagggatcaattcaacaag

SEQ ID NO: 26143 - DNA, 20 bp, synthetic construct
  misc_feature 1..20: note = chemically synthesized
  source 1..20: mol_type = other DNA
agggatcaattcaacaagaa

SEQ ID NO: 26144 - DNA, 20 bp, synthetic construct
  misc_feature 1..20: note = chemically synthesized
  source 1..20: mol_type = other DNA
aaatatatatgcacccaata

SEQ ID NO: 26145 - DNA, 20 bp, synthetic construct
  misc_feature 1..20: note = chemically synthesized
  source 1..20: mol_type = other DNA
aatatatatgcacccaatac

SEQ ID NO: 26146 - DNA, 20 bp, synthetic construct
  misc_feature 1..20: note = chemically synthesized
  source 1..20: mol_type = other DNA
tatatatgcacccaatacag

SEQ ID NO: 26147 - DNA, 20 bp, synthetic construct
  misc_feature 1..20: note = chemically synthesized
  source 1..20: mol_type = other DNA
gcacccaatacaggagcacc

SEQ ID NO: 26148 - DNA, 20 bp, synthetic construct
  misc_feature 1..20: note = chemically synthesized
  source 1..20: mol_type = other DNA
caggagcacccagattcata

SEQ ID NO: 26149 - DNA, 20 bp, synthetic construct
  misc_feature 1..20: note = chemically synthesized
  source 1..20: mol_type = other DNA
agcacccagattcataaagc

SEQ ID NO: 26150 - DNA, 20 bp, synthetic construct
  misc_feature 1..20: note = chemically synthesized
  source 1..20: mol_type = other DNA
agattcataaagcaagtcct

SEQ ID NO: 26151 - DNA, 20 bp, synthetic construct
  misc_feature 1..20: note = chemically synthesized
  source 1..20: mol_type = other DNA
attcataaagcaagtcctta

SEQ ID NO: 26152 - DNA, 20 bp, synthetic construct
  misc_feature 1..20: note = chemically synthesized
  source 1..20: mol_type = other DNA
caagtccttagagacctaca

SEQ ID NO: 26153 - DNA, 20 bp, synthetic construct
  misc_feature 1..20: note = chemically synthesized
  source 1..20: mol_type = other DNA
agtccttagagacctacaaa

SEQ ID NO: 26154 - DNA, 20 bp, synthetic construct
  misc_feature 1..20: note = chemically synthesized
  source 1..20: mol_type = other DNA
tagagacctacaaagagact

SEQ ID NO: 26155 - DNA, 20 bp, synthetic construct
  misc_feature 1..20: note = chemically synthesized
  source 1..20: mol_type = other DNA
agactcccacactttaataa

SEQ ID NO: 26156 - DNA, 20 bp, synthetic construct
  misc_feature 1..20: note = chemically synthesized
  source 1..20: mol_type = other DNA
gactcccacactttaataat

SEQ ID NO: 26157 - DNA, 20 bp, synthetic construct
  misc_feature 1..20: note = chemically synthesized
  source 1..20: mol_type = other DNA
ctcccacactttaataatgg

SEQ ID NO: 26158 - DNA, 20 bp, synthetic construct
  misc_feature 1..20: note = chemically synthesized
  source 1..20: mol_type = other DNA
taataccccactgtcaacat

SEQ ID NO: 26159 - DNA, 20 bp, synthetic construct
  misc_feature 1..20: note = chemically synthesized
  source 1..20: mol_type = other DNA
accccactgtcaacattaga

SEQ ID NO: 26160 - DNA, 20 bp, synthetic construct
  misc_feature 1..20: note = chemically synthesized
  source 1..20: mol_type = other DNA
tcaacattagacagatcaac

SEQ ID NO: 26161 - DNA, 20 bp, synthetic construct
  misc_feature 1..20: note = chemically synthesized
  source 1..20: mol_type = other DNA
cattagacagatcaacgaga

SEQ ID NO: 26162 - DNA, 20 bp, synthetic construct
  misc_feature 1..20: note = chemically synthesized
  source 1..20: mol_type = other DNA
agacagatcaacgagacaga

SEQ ID NO: 26163 - DNA, 20 bp, synthetic construct
  misc_feature 1..20: note = chemically synthesized
  source 1..20: mol_type = other DNA
caacgagacagaaagttaac

SEQ ID NO: 26164 - DNA, 20 bp, synthetic construct
  misc_feature 1..20: note = chemically synthesized
  source 1..20: mol_type = other DNA
aacgagacagaaagttaaca

SEQ ID NO: 26165 - DNA, 20 bp, synthetic construct
  misc_feature 1..20: note = chemically synthesized
  source 1..20: mol_type = other DNA
agaaagttaacaaggatatc

SEQ ID NO: 26166 - DNA, 20 bp, synthetic construct
  misc_feature 1..20: note = chemically synthesized
  source 1..20: mol_type = other DNA
gaaagttaacaaggatatcc

SEQ ID NO: 26167 - DNA, 20 bp, synthetic construct
  misc_feature 1..20: note = chemically synthesized
  source 1..20: mol_type = other DNA
ggatatccaggaattgaaca

SEQ ID NO: 26168 - DNA, 20 bp, synthetic construct
  misc_feature 1..20: note = chemically synthesized
  source 1..20: mol_type = other DNA
attgaacacagctctgcacc

SEQ ID NO: 26169 - DNA, 20 bp, synthetic construct
  misc_feature 1..20: note = chemically synthesized
  source 1..20: mol_type = other DNA
gaacacagctctgcaccaag

SEQ ID NO: 26170 - DNA, 20 bp, synthetic construct
  misc_feature 1..20: note = chemically synthesized
  source 1..20: mol_type = other DNA
tctgcaccaagcagacctaa

SEQ ID NO: 26171 - DNA, 20 bp, synthetic construct
  misc_feature 1..20: note = chemically synthesized
  source 1..20: mol_type = other DNA
gcagacctaatagacatcta

SEQ ID NO: 26172 - DNA, 20 bp, synthetic construct
  misc_feature 1..20: note = chemically synthesized
  source 1..20: mol_type = other DNA
aactctccaccccaaatcaa

SEQ ID NO: 26173 - DNA, 20 bp, synthetic construct
  misc_feature 1..20: note = chemically synthesized
  source 1..20: mol_type = other DNA
acagaatatacatttttttt

SEQ ID NO: 26174 - DNA, 20 bp, synthetic construct
  misc_feature 1..20: note = chemically synthesized
  source 1..20: mol_type = other DNA
tccaaaattgaccacatact

SEQ ID NO: 26175 - DNA, 20 bp, synthetic construct
  misc_feature 1..20: note = chemically synthesized
  source 1..20: mol_type = other DNA
aaaattgaccacatacttgg

SEQ ID NO: 26176 - DNA, 20 bp, synthetic construct
  misc_feature 1..20: note = chemically synthesized
  source 1..20: mol_type = other DNA
tgaccacatacttggaagta

SEQ ID NO: 26177 - DNA, 20 bp, synthetic construct
  misc_feature 1..20: note = chemically synthesized
  source 1..20: mol_type = other DNA
cttggaagtaaagctctcct

SEQ ID NO: 26178 - DNA, 20 bp, synthetic construct
  misc_feature 1..20: note = chemically synthesized
  source 1..20: mol_type = other DNA
gctctcctcagcaaatataa

SEQ ID NO: 26179 - DNA, 20 bp, synthetic construct
  misc_feature 1..20: note = chemically synthesized
  source 1..20: mol_type = other DNA
cctcagcaaatataaaagaa

SEQ ID NO: 26180 - DNA, 20 bp, synthetic construct
  misc_feature 1..20: note = chemically synthesized
  source 1..20: mol_type = other DNA
aattataacaaactgtctct

SEQ ID NO: 26181 - DNA, 20 bp, synthetic construct
  misc_feature 1..20: note = chemically synthesized
  source 1..20: mol_type = other DNA
acaaactgtctctcagacca

SEQ ID NO: 26182 - DNA, 20 bp, synthetic construct
  misc_feature 1..20: note = chemically synthesized
  source 1..20: mol_type = other DNA
agaccacagtgcaatcaaac

SEQ ID NO: 26183 - DNA, 20 bp, synthetic construct
  misc_feature 1..20: note = chemically synthesized
  source 1..20: mol_type = other DNA
agtgcaatcaaactagaact

SEQ ID NO: 26184 - DNA, 20 bp, synthetic construct
  misc_feature 1..20: note = chemically synthesized
  source 1..20: mol_type = other DNA
gtgcaatcaaactagaactc

SEQ ID NO: 26185 - DNA, 20 bp, synthetic construct
  misc_feature 1..20: note = chemically synthesized
  source 1..20: mol_type = other DNA
tcaaactagaactcaggatt

SEQ ID NO: 26186 - DNA, 20 bp, synthetic construct
  misc_feature 1..20: note = chemically synthesized
  source 1..20: mol_type = other DNA
ctcaaaaccactcaactaca

SEQ ID NO: 26187 - DNA, 20 bp, synthetic construct
  misc_feature 1..20: note = chemically synthesized
  source 1..20: mol_type = other DNA
acctgctcctgaatgactac

SEQ ID NO: 26188 - DNA, 20 bp, synthetic construct
  misc_feature 1..20: note = chemically synthesized
  source 1..20: mol_type = other DNA
cctgctcctgaatgactact

SEQ ID NO: 26189 - DNA, 20 bp, synthetic construct
  misc_feature 1..20: note = chemically synthesized
  source 1..20: mol_type = other DNA
actgggtacataacgaaatg

SEQ ID NO: 26190 - DNA, 20 bp, synthetic construct
  misc_feature 1..20: note = chemically synthesized
  source 1..20: mol_type = other DNA
ctgggtacataacgaaatga

SEQ ID NO: 26191 - DNA, 20 bp, synthetic construct
  misc_feature 1..20: note = chemically synthesized
  source 1..20: mol_type = other DNA
ggtacataacgaaatgaagg

SEQ ID NO: 26192 - DNA, 20 bp, synthetic construct
  misc_feature 1..20: note = chemically synthesized
  source 1..20: mol_type = other DNA
acgaaatgaaggcagaaata

SEQ ID NO: 26193 - DNA, 20 bp, synthetic construct
  misc_feature 1..20: note = chemically synthesized
  source 1..20: mol_type = other DNA
agatgttctttgaaaccaat

SEQ ID NO: 26194 - DNA, 20 bp, synthetic construct
  misc_feature 1..20: note = chemically synthesized
  source 1..20: mol_type = other DNA
ctttgaaaccaatgagaaca

SEQ ID NO: 26195 - DNA, 20 bp, synthetic construct
  misc_feature 1..20: note = chemically synthesized
  source 1..20: mol_type = other DNA
agaacaaagacacaacatac

SEQ ID NO: 26196 - DNA, 20 bp, synthetic construct
  misc_feature 1..20: note = chemically synthesized
  source 1..20: mol_type = other DNA
acacaacataccagaatctc

SEQ ID NO: 26197 - DNA, 20 bp, synthetic construct
  misc_feature 1..20: note = chemically synthesized
  source 1..20: mol_type = other DNA
cacaacataccagaatctct

SEQ ID NO: 26198 - DNA, 20 bp, synthetic construct
  misc_feature 1..20: note = chemically synthesized
  source 1..20: mol_type = other DNA
tctctgggacacattcgaat

SEQ ID NO: 26199 - DNA, 20 bp, synthetic construct
  misc_feature 1..20: note = chemically synthesized
  source 1..20: mol_type = other DNA
gacacattcgaatcagtgtg

SEQ ID NO: 26200 - DNA, 20 bp, synthetic construct
  misc_feature 1..20: note = chemically synthesized
  source 1..20: mol_type = other DNA
acacattcgaatcagtgtgt

SEQ ID NO: 26201 - DNA, 20 bp, synthetic construct
  misc_feature 1..20: note = chemically synthesized
  source 1..20: mol_type = other DNA
cacattcgaatcagtgtgta

SEQ ID NO: 26202 - DNA, 20 bp, synthetic construct
  misc_feature 1..20: note = chemically synthesized
  source 1..20: mol_type = other DNA
acattcgaatcagtgtgtag

SEQ ID NO: 26203 - DNA, 20 bp, synthetic construct
  misc_feature 1..20: note = chemically synthesized
  source 1..20: mol_type = other DNA
cattcgaatcagtgtgtagg

SEQ ID NO: 26204 - DNA, 20 bp, synthetic construct
  misc_feature 1..20: note = chemically synthesized
  source 1..20: mol_type = other DNA
agtgtgtagggggaaattta

SEQ ID NO: 26205 - DNA, 20 bp, synthetic construct
  misc_feature 1..20: note = chemically synthesized
  source 1..20: mol_type = other DNA
ttatagcactaaacgcccac

SEQ ID NO: 26206 - DNA, 20 bp, synthetic construct
  misc_feature 1..20: note = chemically synthesized
  source 1..20: mol_type = other DNA
atagcactaaacgcccacaa

SEQ ID NO: 26207 - DNA, 20 bp, synthetic construct
  misc_feature 1..20: note = chemically synthesized
  source 1..20: mol_type = other DNA
cactaaacgcccacaagaga

SEQ ID NO: 26208 - DNA, 20 bp, synthetic construct
  misc_feature 1..20: note = chemically synthesized
  source 1..20: mol_type = other DNA
aaacgcccacaagagaaagc

SEQ ID NO: 26209 - DNA, 20 bp, synthetic construct
  misc_feature 1..20: note = chemically synthesized
  source 1..20: mol_type = other DNA
gcccacaagagaaagcaaga

SEQ ID NO: 26210 - DNA, 20 bp, synthetic construct
  misc_feature 1..20: note = chemically synthesized
  source 1..20: mol_type = other DNA
caccctaacatcacaattaa

SEQ ID NO: 26211 - DNA, 20 bp, synthetic construct
  misc_feature 1..20: note = chemically synthesized
  source 1..20: mol_type = other DNA
aacatcacaattaaaagaac

SEQ ID NO: 26212 - DNA, 20 bp, synthetic construct
  misc_feature 1..20: note = chemically synthesized
  source 1..20: mol_type = other DNA
cacaattaaaagaactagat

SEQ ID NO: 26213 - DNA, 20 bp, synthetic construct
  misc_feature 1..20: note = chemically synthesized
  source 1..20: mol_type = other DNA
attaaaagaactagataagc

SEQ ID NO: 26214 - DNA, 20 bp, synthetic construct
  misc_feature 1..20: note = chemically synthesized
  source 1..20: mol_type = other DNA
taaaagaactagataagcaa

SEQ ID NO: 26215 - DNA, 20 bp, synthetic construct
  misc_feature 1..20: note = chemically synthesized
  source 1..20: mol_type = other DNA
gcaagagcaaacacattcaa

SEQ ID NO: 26216 - DNA, 20 bp, synthetic construct
  misc_feature 1..20: note = chemically synthesized
  source 1..20: mol_type = other DNA
gagcaaacacattcaaaagc

SEQ ID NO: 26217 - DNA, 20 bp, synthetic construct
  misc_feature 1..20: note = chemically synthesized
  source 1..20: mol_type = other DNA
caaacacattcaaaagctag

SEQ ID NO: 26218 - DNA, 20 bp, synthetic construct
  misc_feature 1..20: note = chemically synthesized
  source 1..20: mol_type = other DNA
acacattcaaaagctagcag

SEQ ID NO: 26219 - DNA, 20 bp, synthetic construct
  misc_feature 1..20: note = chemically synthesized
  source 1..20: mol_type = other DNA
ttcaaaagctagcagaagtc

SEQ ID NO: 26220 - DNA, 20 bp, synthetic construct
  misc_feature 1..20: note = chemically synthesized
  source 1..20: mol_type = other DNA
agtcaagaaataactaaaat

SEQ ID NO: 26221 - DNA, 20 bp, synthetic construct
  misc_feature 1..20: note = chemically synthesized
  source 1..20: mol_type = other DNA
tcaagaaataactaaaatca

SEQ ID NO: 26222 - DNA, 20 bp, synthetic construct
  misc_feature 1..20: note = chemically synthesized
  source 1..20: mol_type = other DNA
agaaataactaaaatcagag

SEQ ID NO: 26223 - DNA, 20 bp, synthetic construct
  misc_feature 1..20: note = chemically synthesized
  source 1..20: mol_type = other DNA
ctaaaatcagagcagaactg

SEQ ID NO: 26224 - DNA, 20 bp, synthetic construct
  misc_feature 1..20: note = chemically synthesized
  source 1..20: mol_type = other DNA
taaaatcagagcagaactga

SEQ ID NO: 26225 - DNA, 20 bp, synthetic construct
  misc_feature 1..20: note = chemically synthesized
  source 1..20: mol_type = other DNA
cagagcagaactgaaggaaa

SEQ ID NO: 26226 - DNA, 20 bp, synthetic construct
  misc_feature 1..20: note = chemically synthesized
  source 1..20: mol_type = other DNA
gagcagaactgaaggaaaca

SEQ ID NO: 26227 - DNA, 20 bp, synthetic construct
  misc_feature 1..20: note = chemically synthesized
  source 1..20: mol_type = other DNA
cttcaaaaaattaatgaatc

SEQ ID NO: 26228 - DNA, 20 bp, synthetic construct
  misc_feature 1..20: note = chemically synthesized
  source 1..20: mol_type = other DNA
ttcaaaaaattaatgaatct

SEQ ID NO: 26229 - DNA, 20 bp, synthetic construct
  misc_feature 1..20: note = chemically synthesized
  source 1..20: mol_type = other DNA
caaaaaattaatgaatctgg

SEQ ID NO: 26230 - DNA, 20 bp, synthetic construct
  misc_feature 1..20: note = chemically synthesized
  source 1..20: mol_type = other DNA
aaattaatgaatctgggagc

SEQ ID NO: 26231 - DNA, 20 bp, synthetic construct
  misc_feature 1..20: note = chemically synthesized
  source 1..20: mol_type = other DNA
tctgggagctggttttttga

SEQ ID NO: 26232 - DNA, 20 bp, synthetic construct
  misc_feature 1..20: note = chemically synthesized
  source 1..20: mol_type = other DNA
ctgggagctggttttttgaa

SEQ ID NO: 26233 - DNA, 20 bp, synthetic construct
  misc_feature 1..20: note = chemically synthesized
  source 1..20: mol_type = other DNA
gaaaggatcaacaaaactga

SEQ ID NO: 26234 - DNA, 20 bp, synthetic construct
  misc_feature 1..20: note = chemically synthesized
  source 1..20: mol_type = other DNA
caacaaaactgatagaccgc

SEQ ID NO: 26235 - DNA, 20 bp, synthetic construct
  misc_feature 1..20: note = chemically synthesized
  source 1..20: mol_type = other DNA
aaaactgatagaccgctagc

SEQ ID NO: 26236 - DNA, 20 bp, synthetic construct
  misc_feature 1..20: note = chemically synthesized
  source 1..20: mol_type = other DNA
agaccgctagcaagactaat

SEQ ID NO: 26237 - DNA, 20 bp, synthetic construct
  misc_feature 1..20: note = chemically synthesized
  source 1..20: mol_type = other DNA
gctagcaagactaataagaa

SEQ ID NO: 26238 - DNA, 20 bp, synthetic construct
  misc_feature 1..20: note = chemically synthesized
  source 1..20: mol_type = other DNA
tagcaagactaataagaaaa

SEQ ID NO: 26239 - DNA, 20 bp, synthetic construct
  misc_feature 1..20: note = chemically synthesized
  source 1..20: mol_type = other DNA
gcaagactaataagaaaaga

SEQ ID NO: 26240 - DNA, 20 bp, synthetic construct
  misc_feature 1..20: note = chemically synthesized
  source 1..20: mol_type = other DNA
agactaataagaaaagagag

SEQ ID NO: 26241 - DNA, 20 bp, synthetic construct
  misc_feature 1..20: note = chemically synthesized
  source 1..20: mol_type = other DNA
gaaaagagagaagaatcaaa

SEQ ID NO: 26242 - DNA, 20 bp, synthetic construct
  misc_feature 1..20: note = chemically synthesized
  source 1..20: mol_type = other DNA
gacacaataaaaaaatgata

SEQ ID NO: 26243 - DNA, 20 bp, synthetic construct
  misc_feature 1..20: note = chemically synthesized
  source 1..20: mol_type = other DNA
acacaataaaaaaatgataa

SEQ ID NO: 26244 - DNA, 20 bp, synthetic construct
  misc_feature 1..20: note = chemically synthesized
  source 1..20: mol_type = other DNA
cacaataaaaaaatgataaa

SEQ ID NO: 26245 - DNA, 20 bp, synthetic construct
  misc_feature 1..20: note = chemically synthesized
  source 1..20: mol_type = other DNA
acaataaaaaaatgataaag

SEQ ID NO: 26246 - DNA, 20 bp, synthetic construct
  misc_feature 1..20: note = chemically synthesized
  source 1..20: mol_type = other DNA
ggatatcaccaccgatccca

SEQ ID NO: 26247 - DNA, 20 bp, synthetic construct
  misc_feature 1..20: note = chemically synthesized
  source 1..20: mol_type = other DNA
acagaaatacaaactgccat

SEQ ID NO: 26248 - DNA, 20 bp, synthetic construct
  misc_feature 1..20: note = chemically synthesized
  source 1..20: mol_type = other DNA
agaaatacaaactgccatca

SEQ ID NO: 26249 - DNA, 20 bp, synthetic construct
  misc_feature 1..20: note = chemically synthesized
  source 1..20: mol_type = other DNA
acacctctacgcaaataaac

SEQ ID NO: 26250 - DNA, 20 bp, synthetic construct
  misc_feature 1..20: note = chemically synthesized
  source 1..20: mol_type = other DNA
cgcaaataaactagaaaatc

SEQ ID NO: 26251 - DNA, 20 bp, synthetic construct
  misc_feature 1..20: note = chemically synthesized
  source 1..20: mol_type = other DNA
aaataaactagaaaatctag

SEQ ID NO: 26252 - DNA, 20 bp, synthetic construct
  misc_feature 1..20: note = chemically synthesized
  source 1..20: mol_type = other DNA
actagaaaatctagaagaaa

SEQ ID NO: 26253 - DNA, 20 bp, synthetic construct
  misc_feature 1..20: note = chemically synthesized
  source 1..20: mol_type = other DNA
agaagaaatggataaattcc

SEQ ID NO: 26254 - DNA, 20 bp, synthetic construct
  misc_feature 1..20: note = chemically synthesized
  source 1..20: mol_type = other DNA
ctggacacatacactatccc

SEQ ID NO: 26255 - DNA, 20 bp, synthetic construct
  misc_feature 1..20: note = chemically synthesized
  source 1..20: mol_type = other DNA
acactatcccaagactaaac

SEQ ID NO: 26256 - DNA, 20 bp, synthetic construct
  misc_feature 1..20: note = chemically synthesized
  source 1..20: mol_type = other DNA
cactatcccaagactaaacc

SEQ ID NO: 26257 - DNA, 20 bp, synthetic construct
  misc_feature 1..20: note = chemically synthesized
  source 1..20: mol_type = other DNA
tatcccaagactaaaccagg

SEQ ID NO: 26258 - DNA, 20 bp, synthetic construct
  misc_feature 1..20: note = chemically synthesized
  source 1..20: mol_type = other DNA
cccaagactaaaccaggaag

SEQ ID NO: 26259 - DNA, 20 bp, synthetic construct
  misc_feature 1..20: note = chemically synthesized
  source 1..20: mol_type = other DNA
gaagaagttgaatctctgaa

SEQ ID NO: 26260 - DNA, 20 bp, synthetic construct
  misc_feature 1..20: note = chemically synthesized
  source 1..20: mol_type = other DNA
atctctgaatagaccaataa

SEQ ID NO: 26261 - DNA, 20 bp, synthetic construct
  misc_feature 1..20: note = chemically synthesized
  source 1..20: mol_type = other DNA
tctctgaatagaccaataac

SEQ ID NO: 26262 - DNA, 20 bp, synthetic construct
  misc_feature 1..20: note = chemically synthesized
  source 1..20: mol_type = other DNA
aataacaggatctgaaattg

SEQ ID NO: 26263 - DNA, 20 bp, synthetic construct
  misc_feature 1..20: note = chemically synthesized
  source 1..20: mol_type = other DNA
gaaattgtggcaataatcaa

SEQ ID NO: 26264 - DNA, 20 bp, synthetic construct
  misc_feature 1..20: note = chemically synthesized
  source 1..20: mol_type = other DNA
tcaatagcttaccaaccaaa

SEQ ID NO: 26265 - DNA, 20 bp, synthetic construct
  misc_feature 1..20: note = chemically synthesized
  source 1..20: mol_type = other DNA
aatagcttaccaaccaaaaa

SEQ ID NO: 26266 - DNA, 20 bp, synthetic construct
  misc_feature 1..20: note = chemically synthesized
  source 1..20: mol_type = other DNA
cttaccaaccaaaaagagtc

SEQ ID NO: 26267 - DNA, 20 bp, synthetic construct
  misc_feature 1..20: note = chemically synthesized
  source 1..20: mol_type = other DNA
ttaccaaccaaaaagagtcc

SEQ ID NO: 26268 - DNA, 20 bp, synthetic construct
  misc_feature 1..20: note = chemically synthesized
  source 1..20: mol_type = other DNA
aaccaaaaagagtccaggac

SEQ ID NO: 26269 - DNA, 20 bp, synthetic construct
  misc_feature 1..20: note = chemically synthesized
  source 1..20: mol_type = other DNA
aaaaagagtccaggaccaga

SEQ ID NO: 26270 - DNA, 20 bp, synthetic construct
  misc_feature 1..20: note = chemically synthesized
  source 1..20: mol_type = other DNA
tccaggaccagatggattca

SEQ ID NO: 26271 - DNA, 20 bp, synthetic construct
  misc_feature 1..20: note = chemically synthesized
  source 1..20: mol_type = other DNA
gattcacagccaaattctaa

SEQ ID NO: 26272 - DNA, 20 bp, synthetic construct
  misc_feature 1..20: note = chemically synthesized
  source 1..20: mol_type = other DNA
ttcacagccaaattctaaca

SEQ ID NO: 26273 - DNA, 20 bp, synthetic construct
  misc_feature 1..20: note = chemically synthesized
  source 1..20: mol_type = other DNA
tcacagccaaattctaacag

SEQ ID NO: 26274 - DNA, 20 bp, synthetic construct
  misc_feature 1..20: note = chemically synthesized
  source 1..20: mol_type = other DNA
ccaaattctaacagaggtac

SEQ ID NO: 26275 - DNA, 20 bp, synthetic construct
  misc_feature 1..20: note = chemically synthesized
  source 1..20: mol_type = other DNA
caaattctaacagaggtaca

SEQ ID NO: 26276 - DNA, 20 bp, synthetic construct
  misc_feature 1..20: note = chemically synthesized
  source 1..20: mol_type = other DNA
aattctaacagaggtacaag

SEQ ID NO: 26277 - DNA, 20 bp, synthetic construct
  misc_feature 1..20: note = chemically synthesized
  source 1..20: mol_type = other DNA
attctaacagaggtacaagg

SEQ ID NO: 26278 - DNA, 20 bp, synthetic construct
  misc_feature 1..20: note = chemically synthesized
  source 1..20: mol_type = other DNA
acagaggtacaaggaggaat

SEQ ID NO: 26279 - DNA, 20 bp, synthetic construct
  misc_feature 1..20: note = chemically synthesized
  source 1..20: mol_type = other DNA
tctgaaactattccaatcaa

SEQ ID NO: 26280 - DNA, 20 bp, synthetic construct
  misc_feature 1..20: note = chemically synthesized
  source 1..20: mol_type = other DNA
actattccaatcaacagaaa

SEQ ID NO: 26281 - DNA, 20 bp, synthetic construct
  misc_feature 1..20: note = chemically synthesized
  source 1..20: mol_type = other DNA
attccaatcaacagaaaaag

SEQ ID NO: 26282 - DNA, 20 bp, synthetic construct
  misc_feature 1..20: note = chemically synthesized
  source 1..20: mol_type = other DNA
ttccaatcaacagaaaaaga

SEQ ID NO: 26283 - DNA, 20 bp, synthetic construct
  misc_feature 1..20: note = chemically synthesized
  source 1..20: mol_type = other DNA
tcctccctaactcattttat

SEQ ID NO: 26284 - DNA, 20 bp, synthetic construct
  misc_feature 1..20: note = chemically synthesized
  source 1..20: mol_type = other DNA
cctccctaactcattttatg

SEQ ID NO: 26285 - DNA, 20 bp, synthetic construct
  misc_feature 1..20: note = chemically synthesized
  source 1..20: mol_type = other DNA
cctaactcattttatgaggc

SEQ ID NO: 26286 - DNA, 20 bp, synthetic construct
  misc_feature 1..20: note = chemically synthesized
  source 1..20: mol_type = other DNA
ccagcatcatcctaatacca

SEQ ID NO: 26287 - DNA, 20 bp, synthetic construct
  misc_feature 1..20: note = chemically synthesized
  source 1..20: mol_type = other DNA
catcatcctaataccaaagc

SEQ ID NO: 26288 - DNA, 20 bp, synthetic construct
  misc_feature 1..20: note = chemically synthesized
  source 1..20: mol_type = other DNA
atcctaataccaaagccaga

SEQ ID NO: 26289 - DNA, 20 bp, synthetic construct
  misc_feature 1..20: note = chemically synthesized
  source 1..20: mol_type = other DNA
cctaataccaaagccagaaa

SEQ ID NO: 26290 - DNA, 20 bp, synthetic construct
  misc_feature 1..20: note = chemically synthesized
  source 1..20: mol_type = other DNA
agaaagagacacaaccaaaa

SEQ ID NO: 26291 - DNA, 20 bp, synthetic construct
  misc_feature 1..20: note = chemically synthesized
  source 1..20: mol_type = other DNA
aaagagacacaaccaaaaaa

SEQ ID NO: 26292 - DNA, 20 bp, synthetic construct
  misc_feature 1..20: note = chemically synthesized
  source 1..20: mol_type = other DNA
acaaccaaaaaagagaattt

SEQ ID NO: 26293 - DNA, 20 bp, synthetic construct
  misc_feature 1..20: note = chemically synthesized
  source 1..20: mol_type = other DNA
aaaaatcctcaataaaatac

SEQ ID NO: 26294 - DNA, 20 bp, synthetic construct
  misc_feature 1..20: note = chemically synthesized
  source 1..20: mol_type = other DNA
aaatactggcaaaccgaatc

SEQ ID NO: 26295 - DNA, 20 bp, synthetic construct
  misc_feature 1..20: note = chemically synthesized
  source 1..20: mol_type = other DNA
tactggcaaaccgaatccag

SEQ ID NO: 26296 - DNA, 20 bp, synthetic construct
  misc_feature 1..20: note = chemically synthesized
  source 1..20: mol_type = other DNA
gaatccagcagcacatcaaa

SEQ ID NO: 26297 - DNA, 20 bp, synthetic construct
  misc_feature 1..20: note = chemically synthesized
  source 1..20: mol_type = other DNA
aaagcttatccacgatgatc

SEQ ID NO: 26298 - DNA, 20 bp, synthetic construct
  misc_feature 1..20: note = chemically synthesized
  source 1..20: mol_type = other DNA
gcttatccacgatgatcaag

SEQ ID NO: 26299 - DNA, 20 bp, synthetic construct
  misc_feature 1..20: note = chemically synthesized
  source 1..20: mol_type = other DNA
gatcaagtggacttcatccc

SEQ ID NO: 26300 - DNA, 20 bp, synthetic construct
  misc_feature 1..20: note = chemically synthesized
  source 1..20: mol_type = other DNA
atcaagtggacttcatccct

SEQ ID NO: 26301 - DNA, 20 bp, synthetic construct
  misc_feature 1..20: note = chemically synthesized
  source 1..20: mol_type = other DNA
ggacttcatccctgggatgc

SEQ ID NO: 26302 - DNA, 20 bp, synthetic construct
  misc_feature 1..20: note = chemically synthesized
  source 1..20: mol_type = other DNA
gacttcatccctgggatgca

SEQ ID NO: 26303 - DNA, 20 bp, synthetic construct
  misc_feature 1..20: note = chemically synthesized
  source 1..20: mol_type = other DNA
tcatccctgggatgcaaggc

SEQ ID NO: 26304 - DNA, 20 bp, synthetic construct
  misc_feature 1..20: note = chemically synthesized
  source 1..20: mol_type = other DNA
gcaaatcaataaatgtaatc

SEQ ID NO: 26305 - DNA, 20 bp, synthetic construct
  misc_feature 1..20: note = chemically synthesized
  source 1..20: mol_type = other DNA
aatgtaatccagcatataaa

SEQ ID NO: 26306 - DNA, 20 bp, synthetic construct
  misc_feature 1..20: note = chemically synthesized
  source 1..20: mol_type = other DNA
ccagcatataaacagaacca

SEQ ID NO: 26307 - DNA, 20 bp, synthetic construct
  misc_feature 1..20: note = chemically synthesized
  source 1..20: mol_type = other DNA
aaaccacatgattatctcaa

SEQ ID NO: 26308 - DNA, 20 bp, synthetic construct
  misc_feature 1..20: note = chemically synthesized
  source 1..20: mol_type = other DNA
catgattatctcaatagatg

SEQ ID NO: 26309 - DNA, 20 bp, synthetic construct
  misc_feature 1..20: note = chemically synthesized
  source 1..20: mol_type = other DNA
ttatctcaatagatgcagaa

SEQ ID NO: 26310 - DNA, 20 bp, synthetic construct
  misc_feature 1..20: note = chemically synthesized
  source 1..20: mol_type = other DNA
tatctcaatagatgcagaaa

SEQ ID NO: 26311 - DNA, 20 bp, synthetic construct
  misc_feature 1..20: note = chemically synthesized
  source 1..20: mol_type = other DNA
gctaaaaactttcaataaat

SEQ ID NO: 26312 - DNA, 20 bp, synthetic construct
  misc_feature 1..20: note = chemically synthesized
  source 1..20: mol_type = other DNA
ctaaaaactttcaataaatt

SEQ ID NO: 26313 - DNA, 20 bp, synthetic construct
  misc_feature 1..20: note = chemically synthesized
  source 1..20: mol_type = other DNA
ttcaataaattaggtattga

SEQ ID NO: 26314 - DNA, 20 bp, synthetic construct
  misc_feature 1..20: note = chemically synthesized
  source 1..20: mol_type = other DNA
tcaataaattaggtattgat

SEQ ID NO: 26315 - DNA, 20 bp, synthetic construct
  misc_feature 1..20: note = chemically synthesized
  source 1..20: mol_type = other DNA
gggacatatctcaaaataat

SEQ ID NO: 26316 - DNA, 20 bp, synthetic construct
  misc_feature 1..20: note = chemically synthesized
  source 1..20: mol_type = other DNA
gacatatctcaaaataataa

SEQ ID NO: 26317 - DNA, 20 bp, synthetic construct
  misc_feature 1..20: note = chemically synthesized
  source 1..20: mol_type = other DNA
agctatctatgacaaaccca

SEQ ID NO: 26318 - DNA, 20 bp, synthetic construct
  misc_feature 1..20: note = chemically synthesized
  source 1..20: mol_type = other DNA
acagccaatatcatactgaa

SEQ ID NO: 26319 - DNA, 20 bp, synthetic construct
  misc_feature 1..20: note = chemically synthesized
  source 1..20: mol_type = other DNA
cagccaatatcatactgaat

SEQ ID NO: 26320 - DNA, 20 bp, synthetic construct
  misc_feature 1..20: note = chemically synthesized
  source 1..20: mol_type = other DNA
catactgaatgggcaaaaac

SEQ ID NO: 26321 - DNA, 20 bp, synthetic construct
  misc_feature 1..20: note = chemically synthesized
  source 1..20: mol_type = other DNA
actgaatgggcaaaaactgg

SEQ ID NO: 26322 - DNA, 20 bp, synthetic construct
  misc_feature 1..20: note = chemically synthesized
  source 1..20: mol_type = other DNA
gaagcattccctttgtaaac

SEQ ID NO: 26323 - DNA, 20 bp, synthetic construct
  misc_feature 1..20: note = chemically synthesized
  source 1..20: mol_type = other DNA
ttccctttgtaaactggcac

SEQ ID NO: 26324 - DNA, 20 bp, synthetic construct
  misc_feature 1..20: note = chemically synthesized
  source 1..20: mol_type = other DNA
ctttgtaaactggcacaaga

SEQ ID NO: 26325 - DNA, 20 bp, synthetic construct
  misc_feature 1..20: note = chemically synthesized
  source 1..20: mol_type = other DNA
tttgtaaactggcacaagac

SEQ ID NO: 26326 - DNA, 20 bp, synthetic construct
  misc_feature 1..20: note = chemically synthesized
  source 1..20: mol_type = other DNA
ttgtaaactggcacaagaca

SEQ ID NO: 26327 - DNA, 20 bp, synthetic construct
  misc_feature 1..20: note = chemically synthesized
  source 1..20: mol_type = other DNA
ctcactactcctattcaaca

SEQ ID NO: 26328 - DNA, 20 bp, synthetic construct
  misc_feature 1..20: note = chemically synthesized
  source 1..20: mol_type = other DNA
actcctattcaacatagtgt

SEQ ID NO: 26329 - DNA, 20 bp, synthetic construct
  misc_feature 1..20: note = chemically synthesized
  source 1..20: mol_type = other DNA
cctattcaacatagtgttgg

SEQ ID NO: 26330 - DNA, 20 bp, synthetic construct
  misc_feature 1..20: note = chemically synthesized
  source 1..20: mol_type = other DNA
caacatagtgttggaagttc

SEQ ID NO: 26331 - DNA, 20 bp, synthetic construct
  misc_feature 1..20: note = chemically synthesized
  source 1..20: mol_type = other DNA
atagtgttggaagttctggc

SEQ ID NO: 26332 - DNA, 20 bp, synthetic construct
  misc_feature 1..20: note = chemically synthesized
  source 1..20: mol_type = other DNA
tagtgttggaagttctggcc

SEQ ID NO: 26333 - DNA, 20 bp, synthetic construct
  misc_feature 1..20: note = chemically synthesized
  source 1..20: mol_type = other DNA
agtgttggaagttctggcca

SEQ ID NO: 26334 - DNA, 20 bp, synthetic construct
  misc_feature 1..20: note = chemically synthesized
  source 1..20: mol_type = other DNA
gaagttctggccagggcaat

SEQ ID NO: 26335 - DNA, 20 bp, synthetic construct
  misc_feature 1..20: note = chemically synthesized
  source 1..20: mol_type = other DNA
aagttctggccagggcaatt

SEQ ID NO: 26336 - DNA, 20 bp, synthetic construct
  misc_feature 1..20: note = chemically synthesized
  source 1..20: mol_type = other DNA
ttctggccagggcaattagg

SEQ ID NO: 26337 - DNA, 20 bp, synthetic construct
  misc_feature 1..20: note = chemically synthesized
  source 1..20: mol_type = other DNA
tggccagggcaattaggcag

SEQ ID NO: 26338 - DNA, 20 bp, synthetic construct
  misc_feature 1..20: note = chemically synthesized
  source 1..20: mol_type = other DNA
cagggcaattaggcagaaga

SEQ ID NO: 26339 - DNA, 20 bp, synthetic construct
  misc_feature 1..20: note = chemically synthesized
  source 1..20: mol_type = other DNA
agggcaattaggcagaagac

SEQ ID NO: 26340 - DNA, 20 bp, synthetic construct
  misc_feature 1..20: note = chemically synthesized
  source 1..20: mol_type = other DNA
ttaggcagaagacaggaaaa

SEQ ID NO: 26341 - DNA, 20 bp, synthetic construct
  misc_feature 1..20: note = chemically synthesized
  source 1..20: mol_type = other DNA
taggcagaagacaggaaaaa

SEQ ID NO: 26342 - DNA, 20 bp, synthetic construct
  misc_feature 1..20: note = chemically synthesized
  source 1..20: mol_type = other DNA
aggcagaagacaggaaaaaa

SEQ ID NO: 26343 - DNA, 20 bp, synthetic construct
  misc_feature 1..20: note = chemically synthesized
  source 1..20: mol_type = other DNA
ggaaaaaagggtattcaatt

SEQ ID NO: 26344 - DNA, 20 bp, synthetic construct
  misc_feature 1..20: note = chemically synthesized
  source 1..20: mol_type = other DNA
aaagggtattcaattaagaa

SEQ ID NO: 26345 - DNA, 20 bp, synthetic construct
  misc_feature 1..20: note = chemically synthesized
  source 1..20: mol_type = other DNA
agggtattcaattaagaaaa

SEQ ID NO: 26346 - DNA, 20 bp, synthetic construct
  misc_feature 1..20: note = chemically synthesized
  source 1..20: mol_type = other DNA
gggtattcaattaagaaaag

SEQ ID NO: 26347 - DNA, 20 bp, synthetic construct
  misc_feature 1..20: note = chemically synthesized
  source 1..20: mol_type = other DNA
tattcaattaagaaaagagg

SEQ ID NO: 26348 - DNA, 20 bp, synthetic construct
  misc_feature 1..20: note = chemically synthesized
  source 1..20: mol_type = other DNA
agtcaaattgtccctgtttg

SEQ ID NO: 26349 - DNA, 20 bp, synthetic construct
  misc_feature 1..20: note = chemically synthesized
  source 1..20: mol_type = other DNA
agacgacatgattgtatatc

SEQ ID NO: 26350 - DNA, 20 bp, synthetic construct
  misc_feature 1..20: note = chemically synthesized
  source 1..20: mol_type = other DNA
tctagaaaacccccttgtct

SEQ ID NO: 26351 - DNA, 20 bp, synthetic construct
  misc_feature 1..20: note = chemically synthesized
  source 1..20: mol_type = other DNA
tctcagcccaaaatctcctt

SEQ ID NO: 26352 - DNA, 20 bp, synthetic construct
  misc_feature 1..20: note = chemically synthesized
  source 1..20: mol_type = other DNA
caaaatctccttaagctgat

SEQ ID NO: 26353 - DNA, 20 bp, synthetic construct
  misc_feature 1..20: note = chemically synthesized
  source 1..20: mol_type = other DNA
cttaagctgataagcaactt

SEQ ID NO: 26354 - DNA, 20 bp, synthetic construct
  misc_feature 1..20: note = chemically synthesized
  source 1..20: mol_type = other DNA
gctgataagcaacttcagca

SEQ ID NO: 26355 - DNA, 20 bp, synthetic construct
  misc_feature 1..20: note = chemically synthesized
  source 1..20: mol_type = other DNA
aagcaacttcagcaaagcct

SEQ ID NO: 26356 - DNA, 20 bp, synthetic construct
  misc_feature 1..20: note = chemically synthesized
  source 1..20: mol_type = other DNA
agcaacttcagcaaagcctc

SEQ ID NO: 26357 - DNA, 20 bp, synthetic construct
  misc_feature 1..20: note = chemically synthesized
  source 1..20: mol_type = other DNA
aaccaatgtgcaaaaatcac

SEQ ID NO: 26358 - DNA, 20 bp, synthetic construct
  misc_feature 1..20: note = chemically synthesized
  source 1..20: mol_type = other DNA
gcattcttatacaccaataa

SEQ ID NO: 26359 - DNA, 20 bp, synthetic construct
  misc_feature 1..20: note = chemically synthesized
  source 1..20: mol_type = other DNA
atacaccaataacagacaaa

SEQ ID NO: 26360 - DNA, 20 bp, synthetic construct
  misc_feature 1..20: note = chemically synthesized
  source 1..20: mol_type = other DNA
acaccaataacagacaaaca

SEQ ID NO: 26361 - DNA, 20 bp, synthetic construct
  misc_feature 1..20: note = chemically synthesized
  source 1..20: mol_type = other DNA
accaataacagacaaacaga

SEQ ID NO: 26362 - DNA, 20 bp, synthetic construct
  misc_feature 1..20: note = chemically synthesized
  source 1..20: mol_type = other DNA
caaacagagagccaaatcat

SEQ ID NO: 26363 - DNA, 20 bp, synthetic construct
  misc_feature 1..20: note = chemically synthesized
  source 1..20: mol_type = other DNA
aaacagagagccaaatcatg

SEQ ID NO: 26364 - DNA, 20 bp, synthetic construct
  misc_feature 1..20: note = chemically synthesized
  source 1..20: mol_type = other DNA
aacagagagccaaatcatga

SEQ ID NO: 26365 - DNA, 20 bp, synthetic construct
  misc_feature 1..20: note = chemically synthesized
  source 1..20: mol_type = other DNA
tcccattcacaattgcttca

SEQ ID NO: 26366 - DNA, 20 bp, synthetic construct
  misc_feature 1..20: note = chemically synthesized
  source 1..20: mol_type = other DNA
ccattcacaattgcttcaaa

SEQ ID NO: 26367 - DNA, 20 bp, synthetic construct
  misc_feature 1..20: note = chemically synthesized
  source 1..20: mol_type = other DNA
ttcaaagagaataaaatacc

SEQ ID NO: 26368 - DNA, 20 bp, synthetic construct
  misc_feature 1..20: note = chemically synthesized
  source 1..20: mol_type = other DNA
tcaaagagaataaaatacct

SEQ ID NO: 26369 - DNA, 20 bp, synthetic construct
  misc_feature 1..20: note = chemically synthesized
  source 1..20: mol_type = other DNA
tacctaggaatccaacttac

SEQ ID NO: 26370 - DNA, 20 bp, synthetic construct
  misc_feature 1..20: note = chemically synthesized
  source 1..20: mol_type = other DNA
acctaggaatccaacttaca

SEQ ID NO: 26371 - DNA, 20 bp, synthetic construct
  misc_feature 1..20: note = chemically synthesized
  source 1..20: mol_type = other DNA
cctaggaatccaacttacaa

SEQ ID NO: 26372 - DNA, 20 bp, synthetic construct
  misc_feature 1..20: note = chemically synthesized
  source 1..20: mol_type = other DNA
tccaacttacaagggatgtg

SEQ ID NO: 26373 - DNA, 20 bp, synthetic construct
  misc_feature 1..20: note = chemically synthesized
  source 1..20: mol_type = other DNA
ccaacttacaagggatgtga

SEQ ID NO: 26374 - DNA, 20 bp, synthetic construct
  misc_feature 1..20: note = chemically synthesized
  source 1..20: mol_type = other DNA
gggatgtgaaggacctcttc

SEQ ID NO: 26375 - DNA, 20 bp, synthetic construct
  misc_feature 1..20: note = chemically synthesized
  source 1..20: mol_type = other DNA
ggatgtgaaggacctcttca

SEQ ID NO: 26376 - DNA, 20 bp, synthetic construct
  misc_feature 1..20: note = chemically synthesized
  source 1..20: mol_type = other DNA
atgtgaaggacctcttcaag

SEQ ID NO: 26377 - DNA, 20 bp, synthetic construct
  misc_feature 1..20: note = chemically synthesized
  source 1..20: mol_type = other DNA
accactgctcaatgaaataa

SEQ ID NO: 26378 - DNA, 20 bp, synthetic construct
  misc_feature 1..20: note = chemically synthesized
  source 1..20: mol_type = other DNA
actgctcaatgaaataaaag

SEQ ID NO: 26379 - DNA, 20 bp, synthetic construct
  misc_feature 1..20: note = chemically synthesized
  source 1..20: mol_type = other DNA
taaaagaagatacaaacaaa

SEQ ID NO: 26380 - DNA, 20 bp, synthetic construct
  misc_feature 1..20: note = chemically synthesized
  source 1..20: mol_type = other DNA
aagaagatacaaacaaatgg

SEQ ID NO: 26381 - DNA, 20 bp, synthetic construct
  misc_feature 1..20: note = chemically synthesized
  source 1..20: mol_type = other DNA
ggaagaacattccatgctta

SEQ ID NO: 26382 - DNA, 20 bp, synthetic construct
  misc_feature 1..20: note = chemically synthesized
  source 1..20: mol_type = other DNA
gaagaacattccatgcttat

SEQ ID NO: 26383 - DNA, 20 bp, synthetic construct
  misc_feature 1..20: note = chemically synthesized
  source 1..20: mol_type = other DNA
gaacattccatgcttatggg

SEQ ID NO: 26384 - DNA, 20 bp, synthetic construct
  misc_feature 1..20: note = chemically synthesized
  source 1..20: mol_type = other DNA
aacattccatgcttatgggt

SEQ ID NO: 26385 - DNA, 20 bp, synthetic construct
  misc_feature 1..20: note = chemically synthesized
  source 1..20: mol_type = other DNA
attccatgcttatgggtagg

SEQ ID NO: 26386 - DNA, 20 bp, synthetic construct
  misc_feature 1..20: note = chemically synthesized
  source 1..20: mol_type = other DNA
aagaatcaatatcatcaaaa

SEQ ID NO: 26387 - DNA, 20 bp, synthetic construct
  misc_feature 1..20: note = chemically synthesized
  source 1..20: mol_type = other DNA
tcaaaatggccataatgccc

SEQ ID NO: 26388 - DNA, 20 bp, synthetic construct
  misc_feature 1..20: note = chemically synthesized
  source 1..20: mol_type = other DNA
caaaatggccataatgccca

SEQ ID NO: 26389 - DNA, 20 bp, synthetic construct
  misc_feature 1..20: note = chemically synthesized
  source 1..20: mol_type = other DNA
ataatgcccaaggtaattta

SEQ ID NO: 26390 - DNA, 20 bp, synthetic construct
  misc_feature 1..20: note = chemically synthesized
  source 1..20: mol_type = other DNA
gattcaatgccatccccatc

SEQ ID NO: 26391 - DNA, 20 bp, synthetic construct
  misc_feature 1..20: note = chemically synthesized
  source 1..20: mol_type = other DNA
gctaccaatgattttcttca

SEQ ID NO: 26392 - DNA, 20 bp, synthetic construct
  misc_feature 1..20: note = chemically synthesized
  source 1..20: mol_type = other DNA
aatgattttcttcacagaat

SEQ ID NO: 26393 - DNA, 20 bp, synthetic construct
  misc_feature 1..20: note = chemically synthesized
  source 1..20: mol_type = other DNA
gaattggaaaaacgacttta

SEQ ID NO: 26394 - DNA, 20 bp, synthetic construct
  misc_feature 1..20: note = chemically synthesized
  source 1..20: mol_type = other DNA
aaacgactttaaagttcata

SEQ ID NO: 26395 - DNA, 20 bp, synthetic construct
  misc_feature 1..20: note = chemically synthesized
  source 1..20: mol_type = other DNA
aagttcatatggaaccaaaa

SEQ ID NO: 26396 - DNA, 20 bp, synthetic construct
  misc_feature 1..20: note = chemically synthesized
  source 1..20: mol_type = other DNA
gttcatatggaaccaaaaaa

SEQ ID NO: 26397 - DNA, 20 bp, synthetic construct
  misc_feature 1..20: note = chemically synthesized
  source 1..20: mol_type = other DNA
aaaaaagagcctgcattgcc

SEQ ID NO: 26398 - DNA, 20 bp, synthetic construct
  misc_feature 1..20: note = chemically synthesized
  source 1..20: mol_type = other DNA
tgcattgccaagtcaatcct

SEQ ID NO: 26399 - DNA, 20 bp, synthetic construct
  misc_feature 1..20: note = chemically synthesized
  source 1..20: mol_type = other DNA
ccaagtcaatcctaagccaa

SEQ ID NO: 26400 - DNA, 20 bp, synthetic construct
  misc_feature 1..20: note = chemically synthesized
  source 1..20: mol_type = other DNA
aatcctaagccaaaagaaca

SEQ ID NO: 26401 - DNA, 20 bp, synthetic construct
  misc_feature 1..20: note = chemically synthesized
  source 1..20: mol_type = other DNA
ctaagccaaaagaacaaagc

SEQ ID NO: 26402 - DNA, 20 bp, synthetic construct
  misc_feature 1..20: note = chemically synthesized
  source 1..20: mol_type = other DNA
aagccaaaagaacaaagctg

SEQ ID NO: 26403 - DNA, 20 bp, synthetic construct
  misc_feature 1..20: note = chemically synthesized
  source 1..20: mol_type = other DNA
agccaaaagaacaaagctgg

SEQ ID NO: 26404 - DNA, 20 bp, synthetic construct
  misc_feature 1..20: note = chemically synthesized
  source 1..20: mol_type = other DNA
aagaacaaagctggaggcat

SEQ ID NO: 26405 - DNA, 20 bp, synthetic construct
  misc_feature 1..20: note = chemically synthesized
  source 1..20: mol_type = other DNA
agaacaaagctggaggcatc

SEQ ID NO: 26406 - DNA, 20 bp, synthetic construct
  misc_feature 1..20: note = chemically synthesized
  source 1..20: mol_type = other DNA
ctcacttcaaactatactac

SEQ ID NO: 26407 - DNA, 20 bp, synthetic construct
  misc_feature 1..20: note = chemically synthesized
  source 1..20: mol_type = other DNA
tcacttcaaactatactaca

SEQ ID NO: 26408 - DNA, 20 bp, synthetic construct
  misc_feature 1..20: note = chemically synthesized
  source 1..20: mol_type = other DNA
caaactatactacaaggcta

SEQ ID NO: 26409 - DNA, 20 bp, synthetic construct
  misc_feature 1..20: note = chemically synthesized
  source 1..20: mol_type = other DNA
caaggctacagtaaccaaaa

SEQ ID NO: 26410 - DNA, 20 bp, synthetic construct
  misc_feature 1..20: note = chemically synthesized
  source 1..20: mol_type = other DNA
taaccaaaacagcatgttac

SEQ ID NO: 26411 - DNA, 20 bp, synthetic construct
  misc_feature 1..20: note = chemically synthesized
  source 1..20: mol_type = other DNA
atgttactggtaccaaaaca

SEQ ID NO: 26412 - DNA, 20 bp, synthetic construct
  misc_feature 1..20: note = chemically synthesized
  source 1..20: mol_type = other DNA
ctggtaccaaaacacagata

SEQ ID NO: 26413 - DNA, 20 bp, synthetic construct
  misc_feature 1..20: note = chemically synthesized
  source 1..20: mol_type = other DNA
aaaacacagatatagatcaa

SEQ ID NO: 26414 - DNA, 20 bp, synthetic construct
  misc_feature 1..20: note = chemically synthesized
  source 1..20: mol_type = other DNA
acagatatagatcaatggaa

SEQ ID NO: 26415 - DNA, 20 bp, synthetic construct
  misc_feature 1..20: note = chemically synthesized
  source 1..20: mol_type = other DNA
tatagatcaatggaacagaa

SEQ ID NO: 26416 - DNA, 20 bp, synthetic construct
  misc_feature 1..20: note = chemically synthesized
  source 1..20: mol_type = other DNA
tagatcaatggaacagaaca

SEQ ID NO: 26417 - DNA, 20 bp, synthetic construct
  misc_feature 1..20: note = chemically synthesized
  source 1..20: mol_type = other DNA
atggaacagaacagagccct

SEQ ID NO: 26418 - DNA, 20 bp, synthetic construct
  misc_feature 1..20: note = chemically synthesized
  source 1..20: mol_type = other DNA
atctgatctttgaaaaacct

SEQ ID NO: 26419 - DNA, 20 bp, synthetic construct
  misc_feature 1..20: note = chemically synthesized
  source 1..20: mol_type = other DNA
ttgaaaaacctgagaaaaac

SEQ ID NO: 26420 - DNA, 20 bp, synthetic construct
  misc_feature 1..20: note = chemically synthesized
  source 1..20: mol_type = other DNA
aacctgagaaaaacaagaaa

SEQ ID NO: 26421 - DNA, 20 bp, synthetic construct
  misc_feature 1..20: note = chemically synthesized
  source 1..20: mol_type = other DNA
acctgagaaaaacaagaaat

SEQ ID NO: 26422 - DNA, 20 bp, synthetic construct
  misc_feature 1..20: note = chemically synthesized
  source 1..20: mol_type = other DNA
cctgagaaaaacaagaaatg

SEQ ID NO: 26423 - DNA, 20 bp, synthetic construct
  misc_feature 1..20: note = chemically synthesized
  source 1..20: mol_type = other DNA
agaaaaacaagaaatgggga

SEQ ID NO: 26424 - DNA, 20 bp, synthetic construct
  misc_feature 1..20: note = chemically synthesized
  source 1..20: mol_type = other DNA
gaaaaacaagaaatggggaa

SEQ ID NO: 26425 - DNA, 20 bp, synthetic construct
  misc_feature 1..20: note = chemically synthesized
  source 1..20: mol_type = other DNA
aggattccctatttaataaa

SEQ ID NO: 26426 - DNA, 20 bp, synthetic construct
  misc_feature 1..20: note = chemically synthesized
  source 1..20: mol_type = other DNA
ccctatttaataaatggtgc

SEQ ID NO: 26427 - DNA, 20 bp, synthetic construct
  misc_feature 1..20: note = chemically synthesized
  source 1..20: mol_type = other DNA
cctatttaataaatggtgct

SEQ ID NO: 26428 - DNA, 20 bp, synthetic construct
  misc_feature 1..20: note = chemically synthesized
  source 1..20: mol_type = other DNA
tatttaataaatggtgctgg

SEQ ID NO: 26429 - DNA, 20 bp, synthetic construct
  misc_feature 1..20: note = chemically synthesized
  source 1..20: mol_type = other DNA
ataaatggtgctgggagaac

SEQ ID NO: 26430 - DNA, 20 bp, synthetic construct
  misc_feature 1..20: note = chemically synthesized
  source 1..20: mol_type = other DNA
atggtgctgggagaactggc

SEQ ID NO: 26431 - DNA, 20 bp, synthetic construct
  misc_feature 1..20: note = chemically synthesized
  source 1..20: mol_type = other DNA
gagaactggctagccatatg

SEQ ID NO: 26432 - DNA, 20 bp, synthetic construct
  misc_feature 1..20: note = chemically synthesized
  source 1..20: mol_type = other DNA
catatgtagaatgctgaaac

SEQ ID NO: 26433 - DNA, 20 bp, synthetic construct
  misc_feature 1..20: note = chemically synthesized
  source 1..20: mol_type = other DNA
ccttatacaaaaattaattc

SEQ ID NO: 26434 - DNA, 20 bp, synthetic construct
  misc_feature 1..20: note = chemically synthesized
  source 1..20: mol_type = other DNA
atacaaaaattaattcaaga

SEQ ID NO: 26435 - DNA, 20 bp, synthetic construct
  misc_feature 1..20: note = chemically synthesized
  source 1..20: mol_type = other DNA
aattaattcaagatggatta

SEQ ID NO: 26436 - DNA, 20 bp, synthetic construct
  misc_feature 1..20: note = chemically synthesized
  source 1..20: mol_type = other DNA
tggattaaagacttaaacat

SEQ ID NO: 26437 - DNA, 20 bp, synthetic construct
  misc_feature 1..20: note = chemically synthesized
  source 1..20: mol_type = other DNA
acctaaaaccataaaaaccc

SEQ ID NO: 26438 - DNA, 20 bp, synthetic construct
  misc_feature 1..20: note = chemically synthesized
  source 1..20: mol_type = other DNA
taaaaccataaaaaccctag

SEQ ID NO: 26439 - DNA, 20 bp, synthetic construct
  misc_feature 1..20: note = chemically synthesized
  source 1..20: mol_type = other DNA
aaaaaccctagaagaaaacg

SEQ ID NO: 26440 - DNA, 20 bp, synthetic construct
  misc_feature 1..20: note = chemically synthesized
  source 1..20: mol_type = other DNA
aaaaccctagaagaaaacgc

SEQ ID NO: 26441 - DNA, 20 bp, synthetic construct
  misc_feature 1..20: note = chemically synthesized
  source 1..20: mol_type = other DNA
aaaacgcaggcattaccatt

SEQ ID NO: 26442 - DNA, 20 bp, synthetic construct
  misc_feature 1..20: note = chemically synthesized
  source 1..20: mol_type = other DNA
aaacgcaggcattaccattc

SEQ ID NO: 26443 - DNA, 20 bp, synthetic construct
  misc_feature 1..20: note = chemically synthesized
  source 1..20: mol_type = other DNA
aggcattaccattcaggaca

SEQ ID NO: 26444 - DNA, 20 bp, synthetic construct
  misc_feature 1..20: note = chemically synthesized
  source 1..20: mol_type = other DNA
ggcattaccattcaggacat

SEQ ID NO: 26445 - DNA, 20 bp, synthetic construct
  misc_feature 1..20: note = chemically synthesized
  source 1..20: mol_type = other DNA
taccattcaggacataggca

SEQ ID NO: 26446 - DNA, 20 bp, synthetic construct
  misc_feature 1..20: note = chemically synthesized
  source 1..20: mol_type = other DNA
accattcaggacataggcat

SEQ ID NO: 26447 - DNA, 20 bp, synthetic construct
  misc_feature 1..20: note = chemically synthesized
  source 1..20: mol_type = other DNA
ttcaggacataggcatgggc

SEQ ID NO: 26448 - DNA, 20 bp, synthetic construct
  misc_feature 1..20: note = chemically synthesized
  source 1..20: mol_type = other DNA
tcaggacataggcatgggca

SEQ ID NO: 26449 - DNA, 20 bp, synthetic construct
  misc_feature 1..20: note = chemically synthesized
  source 1..20: mol_type = other DNA
cttcatgtctaaaacaccaa

SEQ ID NO: 26450 - DNA, 20 bp, synthetic construct
  misc_feature 1..20: note = chemically synthesized
  source 1..20: mol_type = other DNA
gtctaaaacaccaaaagcga

SEQ ID NO: 26451 - DNA, 20 bp, synthetic construct
  misc_feature 1..20: note = chemically synthesized
  source 1..20: mol_type = other DNA
accaaaagcgatggcaacaa

SEQ ID NO: 26452 - DNA, 20 bp, synthetic construct
  misc_feature 1..20: note = chemically synthesized
  source 1..20: mol_type = other DNA
caaaagccaaaattcactaa

SEQ ID NO: 26453 - DNA, 20 bp, synthetic construct
  misc_feature 1..20: note = chemically synthesized
  source 1..20: mol_type = other DNA
aaaagccaaaattcactaat

SEQ ID NO: 26454 - DNA, 20 bp, synthetic construct
  misc_feature 1..20: note = chemically synthesized
  source 1..20: mol_type = other DNA
aatgggatctaatgaaacta

SEQ ID NO: 26455 - DNA, 20 bp, synthetic construct
  misc_feature 1..20: note = chemically synthesized
  source 1..20: mol_type = other DNA
tgggatctaatgaaactaaa

SEQ ID NO: 26456 - DNA, 20 bp, synthetic construct
  misc_feature 1..20: note = chemically synthesized
  source 1..20: mol_type = other DNA
gaaactaaagagcttctgca

SEQ ID NO: 26457 - DNA, 20 bp, synthetic construct
  misc_feature 1..20: note = chemically synthesized
  source 1..20: mol_type = other DNA
aaagagcttctgcacagcta

SEQ ID NO: 26458 - DNA, 20 bp, synthetic construct
  misc_feature 1..20: note = chemically synthesized
  source 1..20: mol_type = other DNA
acagctaaagaaactaccat

SEQ ID NO: 26459 - DNA, 20 bp, synthetic construct
  misc_feature 1..20: note = chemically synthesized
  source 1..20: mol_type = other DNA
agctaaagaaactaccatca

SEQ ID NO: 26460 - DNA, 20 bp, synthetic construct
  misc_feature 1..20: note = chemically synthesized
  source 1..20: mol_type = other DNA
gaaactaccatcagagtgaa

SEQ ID NO: 26461 - DNA, 20 bp, synthetic construct
  misc_feature 1..20: note = chemically synthesized
  source 1..20: mol_type = other DNA
aaactaccatcagagtgaac

SEQ ID NO: 26462 - DNA, 20 bp, synthetic construct
  misc_feature 1..20: note = chemically synthesized
  source 1..20: mol_type = other DNA
tgaacaggcaacctacacaa

SEQ ID NO: 26463 - DNA, 20 bp, synthetic construct
  misc_feature 1..20: note = chemically synthesized
  source 1..20: mol_type = other DNA
gaacaggcaacctacacaat

SEQ ID NO: 26464 - DNA, 20 bp, synthetic construct
  misc_feature 1..20: note = chemically synthesized
  source 1..20: mol_type = other DNA
acaggcaacctacacaatgg

SEQ ID NO: 26465 - DNA, 20 bp, synthetic construct
  misc_feature 1..20: note = chemically synthesized
  source 1..20: mol_type = other DNA
cacaacctactcatctgaca

SEQ ID NO: 26466 - DNA, 20 bp, synthetic construct
  misc_feature 1..20: note = chemically synthesized
  source 1..20: mol_type = other DNA
acaacctactcatctgacaa

SEQ ID NO: 26467 - DNA, 20 bp, synthetic construct
  misc_feature 1..20: note = chemically synthesized
  source 1..20: mol_type = other DNA
caacctactcatctgacaaa

SEQ ID NO: 26468 - DNA, 20 bp, synthetic construct
  misc_feature 1..20: note = chemically synthesized
  source 1..20: mol_type = other DNA
tctgacaaagggctaatatc

SEQ ID NO: 26469 - DNA, 20 bp, synthetic construct
  misc_feature 1..20: note = chemically synthesized
  source 1..20: mol_type = other DNA
atgaactcaaacaaatttac

SEQ ID NO: 26470 - DNA, 20 bp, synthetic construct
  misc_feature 1..20: note = chemically synthesized
  source 1..20: mol_type = other DNA
atttacaagaaaaaaacaaa

SEQ ID NO: 26471 - DNA, 20 bp, synthetic construct
  misc_feature 1..20: note = chemically synthesized
  source 1..20: mol_type = other DNA
aaacaaacagccccatcaac

SEQ ID NO: 26472 - DNA, 20 bp, synthetic construct
  misc_feature 1..20: note = chemically synthesized
  source 1..20: mol_type = other DNA
caaacagccccatcaacaag

SEQ ID NO: 26473 - DNA, 20 bp, synthetic construct
  misc_feature 1..20: note = chemically synthesized
  source 1..20: mol_type = other DNA
aaacagccccatcaacaagt

SEQ ID NO: 26474 - DNA, 20 bp, synthetic construct
  misc_feature 1..20: note = chemically synthesized
  source 1..20: mol_type = other DNA
gccccatcaacaagtgggca

SEQ ID NO: 26475 - DNA, 20 bp, synthetic construct
  misc_feature 1..20: note = chemically synthesized
  source 1..20: mol_type = other DNA
ccccatcaacaagtgggcaa

SEQ ID NO: 26476 - DNA, 20 bp, synthetic construct
  misc_feature 1..20: note = chemically synthesized
  source 1..20: mol_type = other DNA
aagtgggcaaaggatatgaa

SEQ ID NO: 26477 - DNA, 20 bp, synthetic construct
  misc_feature 1..20: note = chemically synthesized
  source 1..20: mol_type = other DNA
tatgaacagacacttctcaa

SEQ ID NO: 26478 - DNA, 20 bp, synthetic construct
  misc_feature 1..20: note = chemically synthesized
  source 1..20: mol_type = other DNA
gaaaacatttatgcaaccaa

SEQ ID NO: 26479 - DNA, 20 bp, synthetic construct
  misc_feature 1..20: note = chemically synthesized
  source 1..20: mol_type = other DNA
gaaaaaatgctcatcatcac

SEQ ID NO: 26480 - DNA, 20 bp, synthetic construct
  misc_feature 1..20: note = chemically synthesized
  source 1..20: mol_type = other DNA
tgctcatcatcactggccat

SEQ ID NO: 26481 - DNA, 20 bp, synthetic construct
  misc_feature 1..20: note = chemically synthesized
  source 1..20: mol_type = other DNA
ctcatcatcactggccatca

SEQ ID NO: 26482 - DNA, 20 bp, synthetic construct
  misc_feature 1..20: note = chemically synthesized
  source 1..20: mol_type = other DNA
atgcaaatcaaaaccacaat

SEQ ID NO: 26483 - DNA, 20 bp, synthetic construct
  misc_feature 1..20: note = chemically synthesized
  source 1..20: mol_type = other DNA
aatgagataccatctcatac

SEQ ID NO: 26484 - DNA, 20 bp, synthetic construct
  misc_feature 1..20: note = chemically synthesized
  source 1..20: mol_type = other DNA
agataccatctcataccagt

SEQ ID NO: 26485 - DNA, 20 bp, synthetic construct
  misc_feature 1..20: note = chemically synthesized
  source 1..20: mol_type = other DNA
ccatctcataccagttagaa

SEQ ID NO: 26486 - DNA, 20 bp, synthetic construct
  misc_feature 1..20: note = chemically synthesized
  source 1..20: mol_type = other DNA
ttagaatggcaatcattaaa

SEQ ID NO: 26487 - DNA, 20 bp, synthetic construct
  misc_feature 1..20: note = chemically synthesized
  source 1..20: mol_type = other DNA
aatggcaatcattaaaaagt

SEQ ID NO: 26488 - DNA, 20 bp, synthetic construct
  misc_feature 1..20: note = chemically synthesized
  source 1..20: mol_type = other DNA
atggcaatcattaaaaagtc

SEQ ID NO: 26489 - DNA, 20 bp, synthetic construct
  misc_feature 1..20: note = chemically synthesized
  source 1..20: mol_type = other DNA
attaaaaagtcaggaaacaa

SEQ ID NO: 26490 - DNA, 20 bp, synthetic construct
  misc_feature 1..20: note = chemically synthesized
  source 1..20: mol_type = other DNA
ttaaaaagtcaggaaacaac

SEQ ID NO: 26491 - DNA, 20 bp, synthetic construct
  misc_feature 1..20: note = chemically synthesized
  source 1..20: mol_type = other DNA
agtcaggaaacaacaggtgc

SEQ ID NO: 26492 - DNA, 20 bp, synthetic construct
  misc_feature 1..20: note = chemically synthesized
  source 1..20: mol_type = other DNA
tcaggaaacaacaggtgctg

SEQ ID NO: 26493 - DNA, 20 bp, synthetic construct
  misc_feature 1..20: note = chemically synthesized
  source 1..20: mol_type = other DNA
aggaaacaacaggtgctgga

SEQ ID NO: 26494 - DNA, 20 bp, synthetic construct
  misc_feature 1..20: note = chemically synthesized
  source 1..20: mol_type = other DNA
ggaaacaacaggtgctggag

SEQ ID NO: 26495 - DNA, 20 bp, synthetic construct
  misc_feature 1..20: note = chemically synthesized
  source 1..20: mol_type = other DNA
aacaggtgctggagaggatg

SEQ ID NO: 26496 - DNA, 20 bp, synthetic construct
  misc_feature 1..20: note = chemically synthesized
  source 1..20: mol_type = other DNA
caggtgctggagaggatgtg

SEQ ID NO: 26497 - DNA, 20 bp, synthetic construct
  misc_feature 1..20: note = chemically synthesized
  source 1..20: mol_type = other DNA
ctggagaggatgtggagaaa

SEQ ID NO: 26498 - DNA, 20 bp, synthetic construct
  misc_feature 1..20: note = chemically synthesized
  source 1..20: mol_type = other DNA
tggagaggatgtggagaaat

SEQ ID NO: 26499 - DNA, 20 bp, synthetic construct
  misc_feature 1..20: note = chemically synthesized
  source 1..20: mol_type = other DNA
taggaacacttttacactct

SEQ ID NO: 26500 - DNA, 20 bp, synthetic construct
  misc_feature 1..20: note = chemically synthesized
  source 1..20: mol_type = other DNA
gaacacttttacactcttgg

SEQ ID NO: 26501 - DNA, 20 bp, synthetic construct
  misc_feature 1..20: note = chemically synthesized
  source 1..20: mol_type = other DNA
aacacttttacactcttggt

SEQ ID NO: 26502 - DNA, 20 bp, synthetic construct
  misc_feature 1..20: note = chemically synthesized
  source 1..20: mol_type = other DNA
ctcttggtgggactgtaaac

SEQ ID NO: 26503 - DNA, 20 bp, synthetic construct
  misc_feature 1..20: note = chemically synthesized
  source 1..20: mol_type = other DNA
gtaaactagttcaaccattg

SEQ ID NO: 26504 - DNA, 20 bp, synthetic construct
  misc_feature 1..20: note = chemically synthesized
  source 1..20: mol_type = other DNA
aactagttcaaccattgtgg

SEQ ID NO: 26505 - DNA, 20 bp, synthetic construct
  misc_feature 1..20: note = chemically synthesized
  source 1..20: mol_type = other DNA
agttcaaccattgtggaagt

SEQ ID NO: 26506 - DNA, 20 bp, synthetic construct
  misc_feature 1..20: note = chemically synthesized
  source 1..20: mol_type = other DNA
aaccattgtggaagtcagtg

SEQ ID NO: 26507 - DNA, 20 bp, synthetic construct
  misc_feature 1..20: note = chemically synthesized
  source 1..20: mol_type = other DNA
aagtcagtgtggcgattcct

SEQ ID NO: 26508 - DNA, 20 bp, synthetic construct
  misc_feature 1..20: note = chemically synthesized
  source 1..20: mol_type = other DNA
agtcagtgtggcgattcctc

SEQ ID NO: 26509 - DNA, 20 bp, synthetic construct
  misc_feature 1..20: note = chemically synthesized
  source 1..20: mol_type = other DNA
gtcagtgtggcgattcctca

SEQ ID NO: 26510 - DNA, 20 bp, synthetic construct
  misc_feature 1..20: note = chemically synthesized
  source 1..20: mol_type = other DNA
gtggcgattcctcagggatc

SEQ ID NO: 26511 - DNA, 20 bp, synthetic construct
  misc_feature 1..20: note = chemically synthesized
  source 1..20: mol_type = other DNA
attcctcagggatctagaac

SEQ ID NO: 26512 - DNA, 20 bp, synthetic construct
  misc_feature 1..20: note = chemically synthesized
  source 1..20: mol_type = other DNA
actagaaataccatttgacc

SEQ ID NO: 26513 - DNA, 20 bp, synthetic construct
  misc_feature 1..20: note = chemically synthesized
  source 1..20: mol_type = other DNA
tgacccagccatcccattac

SEQ ID NO: 26514 - DNA, 20 bp, synthetic construct
  misc_feature 1..20: note = chemically synthesized
  source 1..20: mol_type = other DNA
gacccagccatcccattact

SEQ ID NO: 26515 - DNA, 20 bp, synthetic construct
  misc_feature 1..20: note = chemically synthesized
  source 1..20: mol_type = other DNA
cattactgggtatataccca

SEQ ID NO: 26516 - DNA, 20 bp, synthetic construct
  misc_feature 1..20: note = chemically synthesized
  source 1..20: mol_type = other DNA
attactgggtatatacccaa

SEQ ID NO: 26517 - DNA, 20 bp, synthetic construct
  misc_feature 1..20: note = chemically synthesized
  source 1..20: mol_type = other DNA
atataaatcatgctgctata

SEQ ID NO: 26518 - DNA, 20 bp, synthetic construct
  misc_feature 1..20: note = chemically synthesized
  source 1..20: mol_type = other DNA
atgcacacgtatgtttattg

SEQ ID NO: 26519 - DNA, 20 bp, synthetic construct
  misc_feature 1..20: note = chemically synthesized
  source 1..20: mol_type = other DNA
tattgcggtactattcacaa

SEQ ID NO: 26520 - DNA, 20 bp, synthetic construct
  misc_feature 1..20: note = chemically synthesized
  source 1..20: mol_type = other DNA
cggtactattcacaatagca

SEQ ID NO: 26521 - DNA, 20 bp, synthetic construct
  misc_feature 1..20: note = chemically synthesized
  source 1..20: mol_type = other DNA
tattcacaatagcaaagact

SEQ ID NO: 26522 - DNA, 20 bp, synthetic construct
  misc_feature 1..20: note = chemically synthesized
  source 1..20: mol_type = other DNA
acccaaatgtccaacaatga

SEQ ID NO: 26523 - DNA, 20 bp, synthetic construct
  misc_feature 1..20: note = chemically synthesized
  source 1..20: mol_type = other DNA
aatgtccaacaatgatagac

SEQ ID NO: 26524 - DNA, 20 bp, synthetic construct
  misc_feature 1..20: note = chemically synthesized
  source 1..20: mol_type = other DNA
caacaatgatagactggatt

SEQ ID NO: 26525 - DNA, 20 bp, synthetic construct
  misc_feature 1..20: note = chemically synthesized
  source 1..20: mol_type = other DNA
tagactggattaagaaaatg

SEQ ID NO: 26526 - DNA, 20 bp, synthetic construct
  misc_feature 1..20: note = chemically synthesized
  source 1..20: mol_type = other DNA
aatgtggcacatatacacca

SEQ ID NO: 26527 - DNA, 20 bp, synthetic construct
  misc_feature 1..20: note = chemically synthesized
  source 1..20: mol_type = other DNA
atacaccatggaatactatg

SEQ ID NO: 26528 - DNA, 20 bp, synthetic construct
  misc_feature 1..20: note = chemically synthesized
  source 1..20: mol_type = other DNA
tatgcagccataaaaatgat

SEQ ID NO: 26529 - DNA, 20 bp, synthetic construct
  misc_feature 1..20: note = chemically synthesized
  source 1..20: mol_type = other DNA
tgatgagttcatgtcctttg

SEQ ID NO: 26530 - DNA, 20 bp, synthetic construct
  misc_feature 1..20: note = chemically synthesized
  source 1..20: mol_type = other DNA
gatgagttcatgtcctttgt

SEQ ID NO: 26531 - DNA, 20 bp, synthetic construct
  misc_feature 1..20: note = chemically synthesized
  source 1..20: mol_type = other DNA
atgagttcatgtcctttgta

SEQ ID NO: 26532 - DNA, 20 bp, synthetic construct
  misc_feature 1..20: note = chemically synthesized
  source 1..20: mol_type = other DNA
tcatgtcctttgtagggaca

SEQ ID NO: 26533 - DNA, 20 bp, synthetic construct
  misc_feature 1..20: note = chemically synthesized
  source 1..20: mol_type = other DNA
tgtagggacatggatgaaat

SEQ ID NO: 26534 - DNA, 20 bp, synthetic construct
  misc_feature 1..20: note = chemically synthesized
  source 1..20: mol_type = other DNA
aaattggaaatcatcattct

SEQ ID NO: 26535 - DNA, 20 bp, synthetic construct
  misc_feature 1..20: note = chemically synthesized
  source 1..20: mol_type = other DNA
cattctcagtaaactatcgc

SEQ ID NO: 26536 - DNA, 20 bp, synthetic construct
  misc_feature 1..20: note = chemically synthesized
  source 1..20: mol_type = other DNA
attctcagtaaactatcgca

SEQ ID NO: 26537 - DNA, 20 bp, synthetic construct
  misc_feature 1..20: note = chemically synthesized
  source 1..20: mol_type = other DNA
acaccacatattctcactca

SEQ ID NO: 26538 - DNA, 20 bp, synthetic construct
  misc_feature 1..20: note = chemically synthesized
  source 1..20: mol_type = other DNA
cacatattctcactcataga

SEQ ID NO: 26539 - DNA, 20 bp, synthetic construct
  misc_feature 1..20: note = chemically synthesized
  source 1..20: mol_type = other DNA
acatattctcactcatagat

SEQ ID NO: 26540 - DNA, 20 bp, synthetic construct
  misc_feature 1..20: note = chemically synthesized
  source 1..20: mol_type = other DNA
atagatgggaactgaacaat

SEQ ID NO: 26541 - DNA, 20 bp, synthetic construct
  misc_feature 1..20: note = chemically synthesized
  source 1..20: mol_type = other DNA
aactgaacaatgagaacaca

SEQ ID NO: 26542 - DNA, 20 bp, synthetic construct
  misc_feature 1..20: note = chemically synthesized
  source 1..20: mol_type = other DNA
acaatgagaacacatggaca

SEQ ID NO: 26543 - DNA, 20 bp, synthetic construct
  misc_feature 1..20: note = chemically synthesized
  source 1..20: mol_type = other DNA
caatgagaacacatggacac

SEQ ID NO: 26544 - DNA, 20 bp, synthetic construct
  misc_feature 1..20: note = chemically synthesized
  source 1..20: mol_type = other DNA
tgagaacacatggacacagg

SEQ ID NO: 26545 - DNA, 20 bp, synthetic construct
  misc_feature 1..20: note = chemically synthesized
  source 1..20: mol_type = other DNA
gagaacacatggacacagga

SEQ ID NO: 26546 - DNA, 20 bp, synthetic construct
  misc_feature 1..20: note = chemically synthesized
  source 1..20: mol_type = other DNA
agaacacatggacacaggaa

SEQ ID NO: 26547 - DNA, 20 bp, synthetic construct
  misc_feature 1..20: note = chemically synthesized
  source 1..20: mol_type = other DNA
gaacacatggacacaggaag

SEQ ID NO: 26548 - DNA, 20 bp, synthetic construct
  misc_feature 1..20: note = chemically synthesized
  source 1..20: mol_type = other DNA
ggaaggggaacatcacactc

SEQ ID NO: 26549 - DNA, 20 bp, synthetic construct
  misc_feature 1..20: note = chemically synthesized
  source 1..20: mol_type = other DNA
gaaggggaacatcacactct

SEQ ID NO: 26550 - DNA, 20 bp, synthetic construct
  misc_feature 1..20: note = chemically synthesized
  source 1..20: mol_type = other DNA
aaggggaacatcacactctg

SEQ ID NO: 26551 - DNA, 20 bp, synthetic construct
  misc_feature 1..20: note = chemically synthesized
  source 1..20: mol_type = other DNA
tcacactctggggactgttg

SEQ ID NO: 26552 - DNA, 20 bp, synthetic construct
  misc_feature 1..20: note = chemically synthesized
  source 1..20: mol_type = other DNA
cacactctggggactgttgt

SEQ ID NO: 26553 - DNA, 20 bp, synthetic construct
  misc_feature 1..20: note = chemically synthesized
  source 1..20: mol_type = other DNA
acactctggggactgttgtg

SEQ ID NO: 26554 - DNA, 20 bp, synthetic construct
  misc_feature 1..20: note = chemically synthesized
  source 1..20: mol_type = other DNA
ctctggggactgttgtgggg

SEQ ID NO: 26555 - DNA, 20 bp, synthetic construct
  misc_feature 1..20: note = chemically synthesized
  source 1..20: mol_type = other DNA
tctggggactgttgtggggt

SEQ ID NO: 26556 - DNA, 20 bp, synthetic construct
  misc_feature 1..20: note = chemically synthesized
  source 1..20: mol_type = other DNA
ctggggactgttgtggggtg

SEQ ID NO: 26557 - DNA, 20 bp, synthetic construct
  misc_feature 1..20: note = chemically synthesized
  source 1..20: mol_type = other DNA
tggggactgttgtggggtgg

SEQ ID NO: 26558 - DNA, 20 bp, synthetic construct
  misc_feature 1..20: note = chemically synthesized
  source 1..20: mol_type = other DNA
actgttgtggggtgggggtg

SEQ ID NO: 26559 - DNA, 20 bp, synthetic construct
  misc_feature 1..20: note = chemically synthesized
  source 1..20: mol_type = other DNA
ctgttgtggggtgggggtgc

SEQ ID NO: 26560 - DNA, 20 bp, synthetic construct
  misc_feature 1..20: note = chemically synthesized
  source 1..20: mol_type = other DNA
tgttgtggggtgggggtgca

SEQ ID NO: 26561 - DNA, 20 bp, synthetic construct
  misc_feature 1..20: note = chemically synthesized
  source 1..20: mol_type = other DNA
ttgtggggtgggggtgcagg

SEQ ID NO: 26562 - DNA, 20 bp, synthetic construct
  misc_feature 1..20: note = chemically synthesized
  source 1..20: mol_type = other DNA
tgtggggtgggggtgcaggg

SEQ ID NO: 26563 - DNA, 20 bp, synthetic construct
  misc_feature 1..20: note = chemically synthesized
  source 1..20: mol_type = other DNA
gtggggtgggggtgcaggga

SEQ ID NO: 26564 - DNA, 20 bp, synthetic construct
  misc_feature 1..20: note = chemically synthesized
  source 1..20: mol_type = other DNA
ggtgggggtgcagggaggga

SEQ ID NO: 26565 - DNA, 20 bp, synthetic construct
  misc_feature 1..20: note = chemically synthesized
  source 1..20: mol_type = other DNA
ggtgcagggagggatggcat

SEQ ID NO: 26566 - DNA, 20 bp, synthetic construct
  misc_feature 1..20: note = chemically synthesized
  source 1..20: mol_type = other DNA
gtgcagggagggatggcatt

SEQ ID NO: 26567 - DNA, 20 bp, synthetic construct
  misc_feature 1..20: note = chemically synthesized
  source 1..20: mol_type = other DNA
gcagggagggatggcattag

SEQ ID NO: 26568 - DNA, 20 bp, synthetic construct
  misc_feature 1..20: note = chemically synthesized
  source 1..20: mol_type = other DNA
tatacctaatgctaaattac

SEQ ID NO: 26569 - DNA, 20 bp, synthetic construct
  misc_feature 1..20: note = chemically synthesized
  source 1..20: mol_type = other DNA
aatgctaaattacgagttaa

SEQ ID NO: 26570 - DNA, 20 bp, synthetic construct
  misc_feature 1..20: note = chemically synthesized
  source 1..20: mol_type = other DNA
atgctaaattacgagttaat

SEQ ID NO: 26571 - DNA, 20 bp, synthetic construct
  misc_feature 1..20: note = chemically synthesized
  source 1..20: mol_type = other DNA
aaattacgagttaatgggtg

SEQ ID NO: 26572 - DNA, 20 bp, synthetic construct
  misc_feature 1..20: note = chemically synthesized
  source 1..20: mol_type = other DNA
atgggtgcagcacaccaaca

SEQ ID NO: 26573 - DNA, 20 bp, synthetic construct
  misc_feature 1..20: note = chemically synthesized
  source 1..20: mol_type = other DNA
tgtatacatatgtaactaac

SEQ ID NO: 26574 - DNA, 20 bp, synthetic construct
  misc_feature 1..20: note = chemically synthesized
  source 1..20: mol_type = other DNA
cacatgtaccctaaatctta

SEQ ID NO: 26575 - DNA, 20 bp, synthetic construct
  misc_feature 1..20: note = chemically synthesized
  source 1..20: mol_type = other DNA
aaataaaaaaataaaaaata

SEQ ID NO: 26576 - DNA, 20 bp, synthetic construct
  misc_feature 1..20: note = chemically synthesized
  source 1..20: mol_type = other DNA
aaaaataaaaaataaagttc

SEQ ID NO: 26577 - DNA, 20 bp, synthetic construct
  misc_feature 1..20: note = chemically synthesized
  source 1..20: mol_type = other DNA
aaagttccagtttatttttt

SEQ ID NO: 26578 - DNA, 20 bp, synthetic construct
  misc_feature 1..20: note = chemically synthesized
  source 1..20: mol_type = other DNA
aagttccagtttattttttc

SEQ ID NO: 26579 - DNA, 20 bp, synthetic construct
  misc_feature 1..20: note = chemically synthesized
  source 1..20: mol_type = other DNA
ctttttctatgtctgctttt

SEQ ID NO: 26580 - DNA, 20 bp, synthetic construct
  misc_feature 1..20: note = chemically synthesized
  source 1..20: mol_type = other DNA
tctatgtctgcttttaagat

SEQ ID NO: 26581 - DNA, 20 bp, synthetic construct
  misc_feature 1..20: note = chemically synthesized
  source 1..20: mol_type = other DNA
ttgttgtttatgccatttgt

SEQ ID NO: 26582 - DNA, 20 bp, synthetic construct
  misc_feature 1..20: note = chemically synthesized
  source 1..20: mol_type = other DNA
ccatttgtaagatatgcatt

SEQ ID NO: 26583 - DNA, 20 bp, synthetic construct
  misc_feature 1..20: note = chemically synthesized
  source 1..20: mol_type = other DNA
ttttttaattgacattgctc

SEQ ID NO: 26584 - DNA, 20 bp, synthetic construct
  misc_feature 1..20: note = chemically synthesized
  source 1..20: mol_type = other DNA
tttttaattgacattgctca

SEQ ID NO: 26585 - DNA, 20 bp, synthetic construct
  misc_feature 1..20: note = chemically synthesized
  source 1..20: mol_type = other DNA
taattgacattgctcaaggt

SEQ ID NO: 26586 - DNA, 20 bp, synthetic construct
  misc_feature 1..20: note = chemically synthesized
  source 1..20: mol_type = other DNA
acattgctcaaggttagcta

SEQ ID NO: 26587 - DNA, 20 bp, synthetic construct
  misc_feature 1..20: note = chemically synthesized
  source 1..20: mol_type = other DNA
tagctaaagatatgaattaa

SEQ ID NO: 26588 - DNA, 20 bp, synthetic construct
  misc_feature 1..20: note = chemically synthesized
  source 1..20: mol_type = other DNA
gaattaatagattttatgtc

SEQ ID NO: 26589 - DNA, 20 bp, synthetic construct
  misc_feature 1..20: note = chemically synthesized
  source 1..20: mol_type = other DNA
tgtccagatgttgaaacatt

SEQ ID NO: 26590 - DNA, 20 bp, synthetic construct
  misc_feature 1..20: note = chemically synthesized
  source 1..20: mol_type = other DNA
atccattttttgtttccttt

SEQ ID NO: 26591 - DNA, 20 bp, synthetic construct
  misc_feature 1..20: note = chemically synthesized
  source 1..20: mol_type = other DNA
tagaattctaatttcacata

SEQ ID NO: 26592 - DNA, 20 bp, synthetic construct
  misc_feature 1..20: note = chemically synthesized
  source 1..20: mol_type = other DNA
aattctaatttcacatatgg

SEQ ID NO: 26593 - DNA, 20 bp, synthetic construct
  misc_feature 1..20: note = chemically synthesized
  source 1..20: mol_type = other DNA
ctaatttcacatatggtgga

SEQ ID NO: 26594 - DNA, 20 bp, synthetic construct
  misc_feature 1..20: note = chemically synthesized
  source 1..20: mol_type = other DNA
acagcttgatactttcccat

SEQ ID NO: 26595 - DNA, 20 bp, synthetic construct
  misc_feature 1..20: note = chemically synthesized
  source 1..20: mol_type = other DNA
ttgatactttcccatgagtc

SEQ ID NO: 26596 - DNA, 20 bp, synthetic construct
  misc_feature 1..20: note = chemically synthesized
  source 1..20: mol_type = other DNA
ttcccatgagtctggctttc

SEQ ID NO: 26597 - DNA, 20 bp, synthetic construct
  misc_feature 1..20: note = chemically synthesized
  source 1..20: mol_type = other DNA
tcccatgagtctggctttct

SEQ ID NO: 26598 - DNA, 20 bp, synthetic construct
  misc_feature 1..20: note = chemically synthesized
  source 1..20: mol_type = other DNA
gctttctgggtttctctccc

SEQ ID NO: 26599 - DNA, 20 bp, synthetic construct
  misc_feature 1..20: note = chemically synthesized
  source 1..20: mol_type = other DNA
tgtctgctttctgccatgtt

SEQ ID NO: 26600 - DNA, 20 bp, synthetic construct
  misc_feature 1..20: note = chemically synthesized
  source 1..20: mol_type = other DNA
ctttctgccatgtttggaac

SEQ ID NO: 26601 - DNA, 20 bp, synthetic construct
  misc_feature 1..20: note = chemically synthesized
  source 1..20: mol_type = other DNA
gccatgtttggaaccagcat

SEQ ID NO: 26602 - DNA, 20 bp, synthetic construct
  misc_feature 1..20: note = chemically synthesized
  source 1..20: mol_type = other DNA
aaccagcatgagacctttat

SEQ ID NO: 26603 - DNA, 20 bp, synthetic construct
  misc_feature 1..20: note = chemically synthesized
  source 1..20: mol_type = other DNA
cagatgcaaccgcccgatct

SEQ ID NO: 26604 - DNA, 20 bp, synthetic construct
  misc_feature 1..20: note = chemically synthesized
  source 1..20: mol_type = other DNA
ccgcccgatcttggactttt

SEQ ID NO: 26605 - DNA, 20 bp, synthetic construct
  misc_feature 1..20: note = chemically synthesized
  source 1..20: mol_type = other DNA
atcttggacttttaagtcac

SEQ ID NO: 26606 - DNA, 20 bp, synthetic construct
  misc_feature 1..20: note = chemically synthesized
  source 1..20: mol_type = other DNA
aaactttaaaaaaaaaaaat

SEQ ID NO: 26607 - DNA, 20 bp, synthetic construct
  misc_feature 1..20: note = chemically synthesized
  source 1..20: mol_type = other DNA
aaaaaaaaaaataagctacc

SEQ ID NO: 26608 - DNA, 20 bp, synthetic construct
  misc_feature 1..20: note = chemically synthesized
  source 1..20: mol_type = other DNA
aaaaataagctacccagact

SEQ ID NO: 26609 - DNA, 20 bp, synthetic construct
  misc_feature 1..20: note = chemically synthesized
  source 1..20: mol_type = other DNA
aaaataagctacccagactc

SEQ ID NO: 26610 - DNA, 20 bp, synthetic construct
  misc_feature 1..20: note = chemically synthesized
  source 1..20: mol_type = other DNA
cagactcaggtactctgtta

SEQ ID NO: 26611 - DNA, 20 bp, synthetic construct
  misc_feature 1..20: note = chemically synthesized
  source 1..20: mol_type = other DNA
tgcaaaatacactaaaactt

SEQ ID NO: 26612 - DNA, 20 bp, synthetic construct
  misc_feature 1..20: note = chemically synthesized
  source 1..20: mol_type = other DNA
actaaaactttagcccaact

SEQ ID NO: 26613 - DNA, 20 bp, synthetic construct
  misc_feature 1..20: note = chemically synthesized
  source 1..20: mol_type = other DNA
taaaactttagcccaacttg

SEQ ID NO: 26614 - DNA, 20 bp, synthetic construct
  misc_feature 1..20: note = chemically synthesized
  source 1..20: mol_type = other DNA
aactttagcccaacttggag

SEQ ID NO: 26615 - DNA, 20 bp, synthetic construct
  misc_feature 1..20: note = chemically synthesized
  source 1..20: mol_type = other DNA
actttagcccaacttggagt

SEQ ID NO: 26616 - DNA, 20 bp, synthetic construct
  misc_feature 1..20: note = chemically synthesized
  source 1..20: mol_type = other DNA
ctttagcccaacttggagtg

SEQ ID NO: 26617 - DNA, 20 bp, synthetic construct
  misc_feature 1..20: note = chemically synthesized
  source 1..20: mol_type = other DNA
ttagcccaacttggagtggg

SEQ ID NO: 26618 - DNA, 20 bp, synthetic construct
  misc_feature 1..20: note = chemically synthesized
  source 1..20: mol_type = other DNA
gcccaacttggagtggggag

SEQ ID NO: 26619 - DNA, 20 bp, synthetic construct
  misc_feature 1..20: note = chemically synthesized
  source 1..20: mol_type = other DNA
ccaacttggagtggggagaa

SEQ ID NO: 26620 - DNA, 20 bp, synthetic construct
  misc_feature 1..20: note = chemically synthesized
  source 1..20: mol_type = other DNA
cttggagtggggagaagaga

SEQ ID NO: 26621 - DNA, 20 bp, synthetic construct
  misc_feature 1..20: note = chemically synthesized
  source 1..20: mol_type = other DNA
gagaagagatggtttcccaa

SEQ ID NO: 26622 - DNA, 20 bp, synthetic construct
  misc_feature 1..20: note = chemically synthesized
  source 1..20: mol_type = other DNA
agaagagatggtttcccaaa

SEQ ID NO: 26623 - DNA, 20 bp, synthetic construct
  misc_feature 1..20: note = chemically synthesized
  source 1..20: mol_type = other DNA
gaagagatggtttcccaaaa

SEQ ID NO: 26624 - DNA, 20 bp, synthetic construct
  misc_feature 1..20: note = chemically synthesized
  source 1..20: mol_type = other DNA
aagagatggtttcccaaaag

SEQ ID NO: 26625 - DNA, 20 bp, synthetic construct
  misc_feature 1..20: note = chemically synthesized
  source 1..20: mol_type = other DNA
ccaaaaggggtctctctgaa

SEQ ID NO: 26626 - DNA, 20 bp, synthetic construct
  misc_feature 1..20: note = chemically synthesized
  source 1..20: mol_type = other DNA
ttcacaatgaaaatgaaaat

SEQ ID NO: 26627 - DNA, 20 bp, synthetic construct
  misc_feature 1..20: note = chemically synthesized
  source 1..20: mol_type = other DNA
gttccctttcataatgactg

SEQ ID NO: 26628 - DNA, 20 bp, synthetic construct
  misc_feature 1..20: note = chemically synthesized
  source 1..20: mol_type = other DNA
tccctttcataatgactgaa

SEQ ID NO: 26629 - DNA, 20 bp, synthetic construct
  misc_feature 1..20: note = chemically synthesized
  source 1..20: mol_type = other DNA
cctttcataatgactgaaga

SEQ ID NO: 26630 - DNA, 20 bp, synthetic construct
  misc_feature 1..20: note = chemically synthesized
  source 1..20: mol_type = other DNA
ctttcataatgactgaagag

SEQ ID NO: 26631 - DNA, 20 bp, synthetic construct
  misc_feature 1..20: note = chemically synthesized
  source 1..20: mol_type = other DNA
tcataatgactgaagagagg

SEQ ID NO: 26632 - DNA, 20 bp, synthetic construct
  misc_feature 1..20: note = chemically synthesized
  source 1..20: mol_type = other DNA
cataatgactgaagagaggt

SEQ ID NO: 26633 - DNA, 20 bp, synthetic construct
  misc_feature 1..20: note = chemically synthesized
  source 1..20: mol_type = other DNA
agagaggtaggatgttacga

SEQ ID NO: 26634 - DNA, 20 bp, synthetic construct
  misc_feature 1..20: note = chemically synthesized
  source 1..20: mol_type = other DNA
gaggtaggatgttacgaaag

SEQ ID NO: 26635 - DNA, 20 bp, synthetic construct
  misc_feature 1..20: note = chemically synthesized
  source 1..20: mol_type = other DNA
aggtaggatgttacgaaaga

SEQ ID NO: 26636 - DNA, 20 bp, synthetic construct
  misc_feature 1..20: note = chemically synthesized
  source 1..20: mol_type = other DNA
acgaaagaaggcgtttctga

SEQ ID NO: 26637 - DNA, 20 bp, synthetic construct
  misc_feature 1..20: note = chemically synthesized
  source 1..20: mol_type = other DNA
gaaagaaggcgtttctgaaa

SEQ ID NO: 26638 - DNA, 20 bp, synthetic construct
  misc_feature 1..20: note = chemically synthesized
  source 1..20: mol_type = other DNA
cgtttctgaaagagttgctg

SEQ ID NO: 26639 - DNA, 20 bp, synthetic construct
  misc_feature 1..20: note = chemically synthesized
  source 1..20: mol_type = other DNA
gtttctgaaagagttgctgt

SEQ ID NO: 26640 - DNA, 20 bp, synthetic construct
  misc_feature 1..20: note = chemically synthesized
  source 1..20: mol_type = other DNA
tctgaaagagttgctgtggg

SEQ ID NO: 26641 - DNA, 20 bp, synthetic construct
  misc_feature 1..20: note = chemically synthesized
  source 1..20: mol_type = other DNA
agagttgctgtgggaagatg

SEQ ID NO: 26642 - DNA, 20 bp, synthetic construct
  misc_feature 1..20: note = chemically synthesized
  source 1..20: mol_type = other DNA
agttgctgtgggaagatgtg

SEQ ID NO: 26643 - DNA, 20 bp, synthetic construct
  misc_feature 1..20: note = chemically synthesized
  source 1..20: mol_type = other DNA
agacttctctgtaaaccttc

SEQ ID NO: 26644 - DNA, 20 bp, synthetic construct
  misc_feature 1..20: note = chemically synthesized
  source 1..20: mol_type = other DNA
ccagactctctgtgcacaca

SEQ ID NO: 26645 - DNA, 20 bp, synthetic construct
  misc_feature 1..20: note = chemically synthesized
  source 1..20: mol_type = other DNA
tctctgtgcacacacagatg

SEQ ID NO: 26646 - DNA, 20 bp, synthetic construct
  misc_feature 1..20: note = chemically synthesized
  source 1..20: mol_type = other DNA
ctctgtgcacacacagatgc

SEQ ID NO: 26647 - DNA, 20 bp, synthetic construct
  misc_feature 1..20: note = chemically synthesized
  source 1..20: mol_type = other DNA
cacacacagatgcaggtgtc

SEQ ID NO: 26648 - DNA, 20 bp, synthetic construct
  misc_feature 1..20: note = chemically synthesized
  source 1..20: mol_type = other DNA
acacacagatgcaggtgtcc

SEQ ID NO: 26649 - DNA, 20 bp, synthetic construct
  misc_feature 1..20: note = chemically synthesized
  source 1..20: mol_type = other DNA
cacacagatgcaggtgtcca

SEQ ID NO: 26650 - DNA, 20 bp, synthetic construct
  misc_feature 1..20: note = chemically synthesized
  source 1..20: mol_type = other DNA
cacagatgcaggtgtccagg

SEQ ID NO: 26651 - DNA, 20 bp, synthetic construct
  misc_feature 1..20: note = chemically synthesized
  source 1..20: mol_type = other DNA
acagatgcaggtgtccaggg

SEQ ID NO: 26652 - DNA, 20 bp, synthetic construct
  misc_feature 1..20: note = chemically synthesized
  source 1..20: mol_type = other DNA
gatgcaggtgtccagggagg

SEQ ID NO: 26653 - DNA, 20 bp, synthetic construct
  misc_feature 1..20: note = chemically synthesized
  source 1..20: mol_type = other DNA
atgcaggtgtccagggaggc

SEQ ID NO: 26654 - DNA, 20 bp, synthetic construct
  misc_feature 1..20: note = chemically synthesized
  source 1..20: mol_type = other DNA
tgcaggtgtccagggaggca

SEQ ID NO: 26655 - DNA, 20 bp, synthetic construct
  misc_feature 1..20: note = chemically synthesized
  source 1..20: mol_type = other DNA
gcaggtgtccagggaggcag

SEQ ID NO: 26656 - DNA, 20 bp, synthetic construct
  misc_feature 1..20: note = chemically synthesized
  source 1..20: mol_type = other DNA
caggtgtccagggaggcagg

SEQ ID NO: 26657 - DNA, 20 bp, synthetic construct
  misc_feature 1..20: note = chemically synthesized
  source 1..20: mol_type = other DNA
tgtccagggaggcaggggga

SEQ ID NO: 26658 - DNA, 20 bp, synthetic construct
  misc_feature 1..20: note = chemically synthesized
  source 1..20: mol_type = other DNA
attgcaacatgaaaatttct

SEQ ID NO: 26659 - DNA, 20 bp, synthetic construct
  misc_feature 1..20: note = chemically synthesized
  source 1..20: mol_type = other DNA
ttgcaacatgaaaatttctt

SEQ ID NO: 26660 - DNA, 20 bp, synthetic construct
  misc_feature 1..20: note = chemically synthesized
  source 1..20: mol_type = other DNA
tgcaacatgaaaatttctta

SEQ ID NO: 26661 - DNA, 20 bp, synthetic construct
  misc_feature 1..20: note = chemically synthesized
  source 1..20: mol_type = other DNA
gcaacatgaaaatttcttag

SEQ ID NO: 26662 - DNA, 20 bp, synthetic construct
  misc_feature 1..20: note = chemically synthesized
  source 1..20: mol_type = other DNA
tgaaaatttcttaggggctg

SEQ ID NO: 26663 - DNA, 20 bp, synthetic construct
  misc_feature 1..20: note = chemically synthesized
  source 1..20: mol_type = other DNA
atttcttaggggctgtggac

SEQ ID NO: 26664 - DNA, 20 bp, synthetic construct
  misc_feature 1..20: note = chemically synthesized
  source 1..20: mol_type = other DNA
ttaggggctgtggaccagtc

SEQ ID NO: 26665 - DNA, 20 bp, synthetic construct
  misc_feature 1..20: note = chemically synthesized
  source 1..20: mol_type = other DNA
ggggctgtggaccagtccag

SEQ ID NO: 26666 - DNA, 20 bp, synthetic construct
  misc_feature 1..20: note = chemically synthesized
  source 1..20: mol_type = other DNA
accagtccagaagacccttt

SEQ ID NO: 26667 - DNA, 20 bp, synthetic construct
  misc_feature 1..20: note = chemically synthesized
  source 1..20: mol_type = other DNA
tttggcaatcctaacttctg

SEQ ID NO: 26668 - DNA, 20 bp, synthetic construct
  misc_feature 1..20: note = chemically synthesized
  source 1..20: mol_type = other DNA
ttggcaatcctaacttctgt

SEQ ID NO: 26669 - DNA, 20 bp, synthetic construct
  misc_feature 1..20: note = chemically synthesized
  source 1..20: mol_type = other DNA
ctaacttctgtgggtctctc

SEQ ID NO: 26670 - DNA, 20 bp, synthetic construct
  misc_feature 1..20: note = chemically synthesized
  source 1..20: mol_type = other DNA
tgtgggtctctccagtctga

SEQ ID NO: 26671 - DNA, 20 bp, synthetic construct
  misc_feature 1..20: note = chemically synthesized
  source 1..20: mol_type = other DNA
atcgatctcacaccacaaaa

SEQ ID NO: 26672 - DNA, 20 bp, synthetic construct
  misc_feature 1..20: note = chemically synthesized
  source 1..20: mol_type = other DNA
cgatctcacaccacaaaatg

SEQ ID NO: 26673 - DNA, 20 bp, synthetic construct
  misc_feature 1..20: note = chemically synthesized
  source 1..20: mol_type = other DNA
accacaaaatggagttcttc

SEQ ID NO: 26674 - DNA, 20 bp, synthetic construct
  misc_feature 1..20: note = chemically synthesized
  source 1..20: mol_type = other DNA
ccacaaaatggagttcttct

SEQ ID NO: 26675 - DNA, 20 bp, synthetic construct
  misc_feature 1..20: note = chemically synthesized
  source 1..20: mol_type = other DNA
caaaatggagttcttctggg

SEQ ID NO: 26676 - DNA, 20 bp, synthetic construct
  misc_feature 1..20: note = chemically synthesized
  source 1..20: mol_type = other DNA
aaaatggagttcttctggga

SEQ ID NO: 26677 - DNA, 20 bp, synthetic construct
  misc_feature 1..20: note = chemically synthesized
  source 1..20: mol_type = other DNA
ctgggaaggacttgttctaa

SEQ ID NO: 26678 - DNA, 20 bp, synthetic construct
  misc_feature 1..20: note = chemically synthesized
  source 1..20: mol_type = other DNA
tgggaaggacttgttctaac

SEQ ID NO: 26679 - DNA, 20 bp, synthetic construct
  misc_feature 1..20: note = chemically synthesized
  source 1..20: mol_type = other DNA
ggacttgttctaacaggcct

SEQ ID NO: 26680 - DNA, 20 bp, synthetic construct
  misc_feature 1..20: note = chemically synthesized
  source 1..20: mol_type = other DNA
acttgttctaacaggcctga

SEQ ID NO: 26681 - DNA, 20 bp, synthetic construct
  misc_feature 1..20: note = chemically synthesized
  source 1..20: mol_type = other DNA
gttctaacaggcctgagagt

SEQ ID NO: 26682 - DNA, 20 bp, synthetic construct
  misc_feature 1..20: note = chemically synthesized
  source 1..20: mol_type = other DNA
ttctaacaggcctgagagtg

SEQ ID NO: 26683 - DNA, 20 bp, synthetic construct
  misc_feature 1..20: note = chemically synthesized
  source 1..20: mol_type = other DNA
ctgagagtgaggtgaccttg

SEQ ID NO: 26684 - DNA, 20 bp, synthetic construct
  misc_feature 1..20: note = chemically synthesized
  source 1..20: mol_type = other DNA
cttgtggccattttctgtga

SEQ ID NO: 26685 - DNA, 20 bp, synthetic construct
  misc_feature 1..20: note = chemically synthesized
  source 1..20: mol_type = other DNA
tgtggccattttctgtgaca

SEQ ID NO: 26686 - DNA, 20 bp, synthetic construct
  misc_feature 1..20: note = chemically synthesized
  source 1..20: mol_type = other DNA
ctgtgacagagacacctaaa

SEQ ID NO: 26687 - DNA, 20 bp, synthetic construct
  misc_feature 1..20: note = chemically synthesized
  source 1..20: mol_type = other DNA
gtgacagagacacctaaaaa

SEQ ID NO: 26688 - DNA, 20 bp, synthetic construct
  misc_feature 1..20: note = chemically synthesized
  source 1..20: mol_type = other DNA
acctaaaaagagtctgttgt

SEQ ID NO: 26689 - DNA, 20 bp, synthetic construct
  misc_feature 1..20: note = chemically synthesized
  source 1..20: mol_type = other DNA
aaaagagtctgttgtgagtc

SEQ ID NO: 26690 - DNA, 20 bp, synthetic construct
  misc_feature 1..20: note = chemically synthesized
  source 1..20: mol_type = other DNA
aagagtctgttgtgagtctg

SEQ ID NO: 26691 - DNA, 20 bp, synthetic construct
  misc_feature 1..20: note = chemically synthesized
  source 1..20: mol_type = other DNA
gttgtgagtctggagacatt

SEQ ID NO: 26692 - DNA, 20 bp, synthetic construct
  misc_feature 1..20: note = chemically synthesized
  source 1..20: mol_type = other DNA
ggagacattgagaaccctgt

SEQ ID NO: 26693 - DNA, 20 bp, synthetic construct
  misc_feature 1..20: note = chemically synthesized
  source 1..20: mol_type = other DNA
acattgagaaccctgtgagt

SEQ ID NO: 26694 - DNA, 20 bp, synthetic construct
  misc_feature 1..20: note = chemically synthesized
  source 1..20: mol_type = other DNA
cattgagaaccctgtgagta

SEQ ID NO: 26695 - DNA, 20 bp, synthetic construct
  misc_feature 1..20: note = chemically synthesized
  source 1..20: mol_type = other DNA
ctgtgagtaaggattttatt

SEQ ID NO: 26696 - DNA, 20 bp, synthetic construct
  misc_feature 1..20: note = chemically synthesized
  source 1..20: mol_type = other DNA
tgtgagtaaggattttattt

SEQ ID NO: 26697 - DNA, 20 bp, synthetic construct
  misc_feature 1..20: note = chemically synthesized
  source 1..20: mol_type = other DNA
attttatttaggtctgtttc

SEQ ID NO: 26698 - DNA, 20 bp, synthetic construct
  misc_feature 1..20: note = chemically synthesized
  source 1..20: mol_type = other DNA
tatttaggtctgtttctggt

SEQ ID NO: 26699 - DNA, 20 bp, synthetic construct
  misc_feature 1..20: note = chemically synthesized
  source 1..20: mol_type = other DNA
tttaggtctgtttctggtca

SEQ ID NO: 26700 - DNA, 20 bp, synthetic construct
  misc_feature 1..20: note = chemically synthesized
  source 1..20: mol_type = other DNA
aggtctgtttctggtcagag

SEQ ID NO: 26701 - DNA, 20 bp, synthetic construct
  misc_feature 1..20: note = chemically synthesized
  source 1..20: mol_type = other DNA
ggtctgtttctggtcagagt

SEQ ID NO: 26702 - DNA, 20 bp, synthetic construct
  misc_feature 1..20: note = chemically synthesized
  source 1..20: mol_type = other DNA
gtctgtttctggtcagagtg

SEQ ID NO: 26703 - DNA, 20 bp, synthetic construct
  misc_feature 1..20: note = chemically synthesized
  source 1..20: mol_type = other DNA
tctggtcagagtggggattt

SEQ ID NO: 26704 - DNA, 20 bp, synthetic construct
  misc_feature 1..20: note = chemically synthesized
  source 1..20: mol_type = other DNA
ctggtcagagtggggattta

SEQ ID NO: 26705 - DNA, 20 bp, synthetic construct
  misc_feature 1..20: note = chemically synthesized
  source 1..20: mol_type = other DNA
cagagtggggatttaaggct

SEQ ID NO: 26706 - DNA, 20 bp, synthetic construct
  misc_feature 1..20: note = chemically synthesized
  source 1..20: mol_type = other DNA
aaggcttggtcaatatgatt

SEQ ID NO: 26707 - DNA, 20 bp, synthetic construct
  misc_feature 1..20: note = chemically synthesized
  source 1..20: mol_type = other DNA
ggtcaatatgattaagacta

SEQ ID NO: 26708 - DNA, 20 bp, synthetic construct
  misc_feature 1..20: note = chemically synthesized
  source 1..20: mol_type = other DNA
gtcaatatgattaagactaa

SEQ ID NO: 26709 - DNA, 20 bp, synthetic construct
  misc_feature 1..20: note = chemically synthesized
  source 1..20: mol_type = other DNA
aagactaaaggccacacaca

SEQ ID NO: 26710 - DNA, 20 bp, synthetic construct
  misc_feature 1..20: note = chemically synthesized
  source 1..20: mol_type = other DNA
ccacacacatagatttgtgt

SEQ ID NO: 26711 - DNA, 20 bp, synthetic construct
  misc_feature 1..20: note = chemically synthesized
  source 1..20: mol_type = other DNA
ccatctgtaaaaatctgaaa

SEQ ID NO: 26712 - DNA, 20 bp, synthetic construct
  misc_feature 1..20: note = chemically synthesized
  source 1..20: mol_type = other DNA
tgtaaaaatctgaaaaagct

SEQ ID NO: 26713 - DNA, 20 bp, synthetic construct
  misc_feature 1..20: note = chemically synthesized
  source 1..20: mol_type = other DNA
ctatctctctccatcaattt

SEQ ID NO: 26714 - DNA, 20 bp, synthetic construct
  misc_feature 1..20: note = chemically synthesized
  source 1..20: mol_type = other DNA
tttagtttttatgtgtttgt

SEQ ID NO: 26715 - DNA, 20 bp, synthetic construct
  misc_feature 1..20: note = chemically synthesized
  source 1..20: mol_type = other DNA
ttttatgtgtttgtaagatg

SEQ ID NO: 26716 - DNA, 20 bp, synthetic construct
  misc_feature 1..20: note = chemically synthesized
  source 1..20: mol_type = other DNA
gatatgtctattttgtgcat

SEQ ID NO: 26717 - DNA, 20 bp, synthetic construct
  misc_feature 1..20: note = chemically synthesized
  source 1..20: mol_type = other DNA
tatgtctattttgtgcatga

SEQ ID NO: 26718 - DNA, 20 bp, synthetic construct
  misc_feature 1..20: note = chemically synthesized
  source 1..20: mol_type = other DNA
tgtctattttgtgcatgaga

SEQ ID NO: 26719 - DNA, 20 bp, synthetic construct
  misc_feature 1..20: note = chemically synthesized
  source 1..20: mol_type = other DNA
tctattttgtgcatgagaga

SEQ ID NO: 26720 - DNA, 20 bp, synthetic construct
  misc_feature 1..20: note = chemically synthesized
  source 1..20: mol_type = other DNA
ctattttgtgcatgagagag

SEQ ID NO: 26721 - DNA, 20 bp, synthetic construct
  misc_feature 1..20: note = chemically synthesized
  source 1..20: mol_type = other DNA
ttttgtgcatgagagagagg

SEQ ID NO: 26722 - DNA, 20 bp, synthetic construct
  misc_feature 1..20: note = chemically synthesized
  source 1..20: mol_type = other DNA
agagaggaagatcatcctca

SEQ ID NO: 26723 - DNA, 20 bp, synthetic construct
  misc_feature 1..20: note = chemically synthesized
  source 1..20: mol_type = other DNA
gagaggaagatcatcctcaa

SEQ ID NO: 26724 - DNA, 20 bp, synthetic construct
  misc_feature 1..20: note = chemically synthesized
  source 1..20: mol_type = other DNA
aggaagatcatcctcaaagg

SEQ ID NO: 26725 - DNA, 20 bp, synthetic construct
  misc_feature 1..20: note = chemically synthesized
  source 1..20: mol_type = other DNA
tcctcaaaggaagaatgaac

SEQ ID NO: 26726 - DNA, 20 bp, synthetic construct
  misc_feature 1..20: note = chemically synthesized
  source 1..20: mol_type = other DNA
caaaggaagaatgaactggt

SEQ ID NO: 26727 - DNA, 20 bp, synthetic construct
  misc_feature 1..20: note = chemically synthesized
  source 1..20: mol_type = other DNA
aggaagaatgaactggttgg

SEQ ID NO: 26728 - DNA, 20 bp, synthetic construct
  misc_feature 1..20: note = chemically synthesized
  source 1..20: mol_type = other DNA
atgaactggttggcagcttt

SEQ ID NO: 26729 - DNA, 20 bp, synthetic construct
  misc_feature 1..20: note = chemically synthesized
  source 1..20: mol_type = other DNA
gttggcagctttcagctgtg

SEQ ID NO: 26730 - DNA, 20 bp, synthetic construct
  misc_feature 1..20: note = chemically synthesized
  source 1..20: mol_type = other DNA
ggcagctttcagctgtgtag

SEQ ID NO: 26731 - DNA, 20 bp, synthetic construct
  misc_feature 1..20: note = chemically synthesized
  source 1..20: mol_type = other DNA
gcagctttcagctgtgtagt

SEQ ID NO: 26732 - DNA, 20 bp, synthetic construct
  misc_feature 1..20: note = chemically synthesized
  source 1..20: mol_type = other DNA
tcagctgtgtagtgggtatt

SEQ ID NO: 26733 - DNA, 20 bp, synthetic construct
  misc_feature 1..20: note = chemically synthesized
  source 1..20: mol_type = other DNA
cagctgtgtagtgggtattg

SEQ ID NO: 26734 - DNA, 20 bp, synthetic construct
  misc_feature 1..20: note = chemically synthesized
  source 1..20: mol_type = other DNA
tgtagtgggtattgaggaca

SEQ ID NO: 26735 - DNA, 20 bp, synthetic construct
  misc_feature 1..20: note = chemically synthesized
  source 1..20: mol_type = other DNA
gtagtgggtattgaggacac

SEQ ID NO: 26736 - DNA, 20 bp, synthetic construct
  misc_feature 1..20: note = chemically synthesized
  source 1..20: mol_type = other DNA
gtgggtattgaggacacggg

SEQ ID NO: 26737 - DNA, 20 bp, synthetic construct
  misc_feature 1..20: note = chemically synthesized
  source 1..20: mol_type = other DNA
tgggtattgaggacacggga

SEQ ID NO: 26738 - DNA, 20 bp, synthetic construct
  misc_feature 1..20: note = chemically synthesized
  source 1..20: mol_type = other DNA
gtattgaggacacgggaagg

SEQ ID NO: 26739 - DNA, 20 bp, synthetic construct
  misc_feature 1..20: note = chemically synthesized
  source 1..20: mol_type = other DNA
aggacacgggaaggtggtgc

SEQ ID NO: 26740 - DNA, 20 bp, synthetic construct
  misc_feature 1..20: note = chemically synthesized
  source 1..20: mol_type = other DNA
acacgggaaggtggtgctgg

SEQ ID NO: 26741 - DNA, 20 bp, synthetic construct
  misc_feature 1..20: note = chemically synthesized
  source 1..20: mol_type = other DNA
ggaaggtggtgctggaagaa

SEQ ID NO: 26742 - DNA, 20 bp, synthetic construct
  misc_feature 1..20: note = chemically synthesized
  source 1..20: mol_type = other DNA
agccacattttcttgtgccc

SEQ ID NO: 26743 - DNA, 20 bp, synthetic construct
  misc_feature 1..20: note = chemically synthesized
  source 1..20: mol_type = other DNA
gccacattttcttgtgccct

SEQ ID NO: 26744 - DNA, 20 bp, synthetic construct
  misc_feature 1..20: note = chemically synthesized
  source 1..20: mol_type = other DNA
ccacattttcttgtgccctg

SEQ ID NO: 26745 - DNA, 20 bp, synthetic construct
  misc_feature 1..20: note = chemically synthesized
  source 1..20: mol_type = other DNA
attttcttgtgccctgggga

SEQ ID NO: 26746 - DNA, 20 bp, synthetic construct
  misc_feature 1..20: note = chemically synthesized
  source 1..20: mol_type = other DNA
ttcttgtgccctggggatag

SEQ ID NO: 26747 - DNA, 20 bp, synthetic construct
  misc_feature 1..20: note = chemically synthesized
  source 1..20: mol_type = other DNA
tcttgtgccctggggatagt

SEQ ID NO: 26748 - DNA, 20 bp, synthetic construct
  misc_feature 1..20: note = chemically synthesized
  source 1..20: mol_type = other DNA
cttgtgccctggggatagta

SEQ ID NO: 26749 - DNA, 20 bp, synthetic construct
  misc_feature 1..20: note = chemically synthesized
  source 1..20: mol_type = other DNA
ccctggggatagtagggcct

SEQ ID NO: 26750 - DNA, 20 bp, synthetic construct
  misc_feature 1..20: note = chemically synthesized
  source 1..20: mol_type = other DNA
ggatagtagggccttggtgc

SEQ ID NO: 26751 - DNA, 20 bp, synthetic construct
  misc_feature 1..20: note = chemically synthesized
  source 1..20: mol_type = other DNA
agtagggccttggtgctggt

SEQ ID NO: 26752 - DNA, 20 bp, synthetic construct
  misc_feature 1..20: note = chemically synthesized
  source 1..20: mol_type = other DNA
cttggtgctggtcagaattt

SEQ ID NO: 26753 - DNA, 20 bp, synthetic construct
  misc_feature 1..20: note = chemically synthesized
  source 1..20: mol_type = other DNA
tcagaatttaagcctatcct

SEQ ID NO: 26754 - DNA, 20 bp, synthetic construct
  misc_feature 1..20: note = chemically synthesized
  source 1..20: mol_type = other DNA
cagaatttaagcctatcctt

SEQ ID NO: 26755 - DNA, 20 bp, synthetic construct
  misc_feature 1..20: note = chemically synthesized
  source 1..20: mol_type = other DNA
cttgggctgaatgctccccc

SEQ ID NO: 26756 - DNA, 20 bp, synthetic construct
  misc_feature 1..20: note = chemically synthesized
  source 1..20: mol_type = other DNA
gggctgaatgctccccctgg

SEQ ID NO: 26757 - DNA, 20 bp, synthetic construct
  misc_feature 1..20: note = chemically synthesized
  source 1..20: mol_type = other DNA
gctccccctggtggctacat

SEQ ID NO: 26758 - DNA, 20 bp, synthetic construct
  misc_feature 1..20: note = chemically synthesized
  source 1..20: mol_type = other DNA
gtggctacattggaaaacca

SEQ ID NO: 26759 - DNA, 20 bp, synthetic construct
  misc_feature 1..20: note = chemically synthesized
  source 1..20: mol_type = other DNA
ggaaaaccacagcatgtgta

SEQ ID NO: 26760 - DNA, 20 bp, synthetic construct
  misc_feature 1..20: note = chemically synthesized
  source 1..20: mol_type = other DNA
cacagcatgtgtacagacct

SEQ ID NO: 26761 - DNA, 20 bp, synthetic construct
  misc_feature 1..20: note = chemically synthesized
  source 1..20: mol_type = other DNA
acagcatgtgtacagacctt

SEQ ID NO: 26762 - DNA, 20 bp, synthetic construct
  misc_feature 1..20: note = chemically synthesized
  source 1..20: mol_type = other DNA
cagcatgtgtacagaccttg

SEQ ID NO: 26763 - DNA, 20 bp, synthetic construct
  misc_feature 1..20: note = chemically synthesized
  source 1..20: mol_type = other DNA
gtgtacagaccttggggatt

SEQ ID NO: 26764 - DNA, 20 bp, synthetic construct
  misc_feature 1..20: note = chemically synthesized
  source 1..20: mol_type = other DNA
ttggggattcagttctcctg

SEQ ID NO: 26765 - DNA, 20 bp, synthetic construct
  misc_feature 1..20: note = chemically synthesized
  source 1..20: mol_type = other DNA
tggggattcagttctcctga

SEQ ID NO: 26766 - DNA, 20 bp, synthetic construct
  misc_feature 1..20: note = chemically synthesized
  source 1..20: mol_type = other DNA
aaggaatctcctacttcacc

SEQ ID NO: 26767 - DNA, 20 bp, synthetic construct
  misc_feature 1..20: note = chemically synthesized
  source 1..20: mol_type = other DNA
atctcctacttcaccaagcc

SEQ ID NO: 26768 - DNA, 20 bp, synthetic construct
  misc_feature 1..20: note = chemically synthesized
  source 1..20: mol_type = other DNA
ctacttcaccaagcctggct

SEQ ID NO: 26769 - DNA, 20 bp, synthetic construct
  misc_feature 1..20: note = chemically synthesized
  source 1..20: mol_type = other DNA
cttcaccaagcctggctcag

SEQ ID NO: 26770 - DNA, 20 bp, synthetic construct
  misc_feature 1..20: note = chemically synthesized
  source 1..20: mol_type = other DNA
ttcaccaagcctggctcagt

SEQ ID NO: 26771 - DNA, 20 bp, synthetic construct
  misc_feature 1..20: note = chemically synthesized
  source 1..20: mol_type = other DNA
ccaagcctggctcagtgggc

SEQ ID NO: 26772 - DNA, 20 bp, synthetic construct
  misc_feature 1..20: note = chemically synthesized
  source 1..20: mol_type = other DNA
gcctggctcagtgggctggc

SEQ ID NO: 26773 - DNA, 20 bp, synthetic construct
  misc_feature 1..20: note = chemically synthesized
  source 1..20: mol_type = other DNA
cctggctcagtgggctggct

SEQ ID NO: 26774 - DNA, 20 bp, synthetic construct
  misc_feature 1..20: note = chemically synthesized
  source 1..20: mol_type = other DNA
ggctggctaggtatcaattc

SEQ ID NO: 26775 - DNA, 20 bp, synthetic construct
  misc_feature 1..20: note = chemically synthesized
  source 1..20: mol_type = other DNA
ggctaggtatcaattctgga

SEQ ID NO: 26776 - DNA, 20 bp, synthetic construct
  misc_feature 1..20: note = chemically synthesized
  source 1..20: mol_type = other DNA
ctaggtatcaattctggata

SEQ ID NO: 26777 - DNA, 20 bp, synthetic construct
  misc_feature 1..20: note = chemically synthesized
  source 1..20: mol_type = other DNA
taggtatcaattctggatag

SEQ ID NO: 26778 - DNA, 20 bp, synthetic construct
  misc_feature 1..20: note = chemically synthesized
  source 1..20: mol_type = other DNA
tccttaaataaaacttatac

SEQ ID NO: 26779 - DNA, 20 bp, synthetic construct
  misc_feature 1..20: note = chemically synthesized
  source 1..20: mol_type = other DNA
aacttatactggccccttga

SEQ ID NO: 26780 - DNA, 20 bp, synthetic construct
  misc_feature 1..20: note = chemically synthesized
  source 1..20: mol_type = other DNA
tatactggccccttgaaagc

SEQ ID NO: 26781 - DNA, 20 bp, synthetic construct
  misc_feature 1..20: note = chemically synthesized
  source 1..20: mol_type = other DNA
atactggccccttgaaagcc

SEQ ID NO: 26782 - DNA, 20 bp, synthetic construct
  misc_feature 1..20: note = chemically synthesized
  source 1..20: mol_type = other DNA
accatttgcacattaacaaa

SEQ ID NO: 26783 - DNA, 20 bp, synthetic construct
  misc_feature 1..20: note = chemically synthesized
  source 1..20: mol_type = other DNA
ccatttgcacattaacaaat

SEQ ID NO: 26784 - DNA, 20 bp, synthetic construct
  misc_feature 1..20: note = chemically synthesized
  source 1..20: mol_type = other DNA
aacaaataggtacactgtta

SEQ ID NO: 26785 - DNA, 20 bp, synthetic construct
  misc_feature 1..20: note = chemically synthesized
  source 1..20: mol_type = other DNA
acagtgacacttttcacttt

SEQ ID NO: 26786 - DNA, 20 bp, synthetic construct
  misc_feature 1..20: note = chemically synthesized
  source 1..20: mol_type = other DNA
acacttttcacttttagtaa

SEQ ID NO: 26787 - DNA, 20 bp, synthetic construct
  misc_feature 1..20: note = chemically synthesized
  source 1..20: mol_type = other DNA
ttcacttttagtaatggatt

SEQ ID NO: 26788 - DNA, 20 bp, synthetic construct
  misc_feature 1..20: note = chemically synthesized
  source 1..20: mol_type = other DNA
taatgaattctaatacctta

SEQ ID NO: 26789 - DNA, 20 bp, synthetic construct
  misc_feature 1..20: note = chemically synthesized
  source 1..20: mol_type = other DNA
aatgaattctaataccttaa

SEQ ID NO: 26790 - DNA, 20 bp, synthetic construct
  misc_feature 1..20: note = chemically synthesized
  source 1..20: mol_type = other DNA
attctaataccttaaaggtt

SEQ ID NO: 26791 - DNA, 20 bp, synthetic construct
  misc_feature 1..20: note = chemically synthesized
  source 1..20: mol_type = other DNA
ttctaataccttaaaggtta

SEQ ID NO: 26792 - DNA, 20 bp, synthetic construct
  misc_feature 1..20: note = chemically synthesized
  source 1..20: mol_type = other DNA
aatattcgcatgattaccca

SEQ ID NO: 26793 - DNA, 20 bp, synthetic construct
  misc_feature 1..20: note = chemically synthesized
  source 1..20: mol_type = other DNA
cgcatgattacccacagtga

SEQ ID NO: 26794 - DNA, 20 bp, synthetic construct
  misc_feature 1..20: note = chemically synthesized
  source 1..20: mol_type = other DNA
catgattacccacagtgata

SEQ ID NO: 26795 - DNA, 20 bp, synthetic construct
  misc_feature 1..20: note = chemically synthesized
  source 1..20: mol_type = other DNA
attacccacagtgatagaga

SEQ ID NO: 26796 - DNA, 20 bp, synthetic construct
  misc_feature 1..20: note = chemically synthesized
  source 1..20: mol_type = other DNA
ttacccacagtgatagagat

SEQ ID NO: 26797 - DNA, 20 bp, synthetic construct
  misc_feature 1..20: note = chemically synthesized
  source 1..20: mol_type = other DNA
acagtgatagagataggtcc

SEQ ID NO: 26798 - DNA, 20 bp, synthetic construct
  misc_feature 1..20: note = chemically synthesized
  source 1..20: mol_type = other DNA
cagtgatagagataggtccg

SEQ ID NO: 26799 - DNA, 20 bp, synthetic construct
  misc_feature 1..20: note = chemically synthesized
  source 1..20: mol_type = other DNA
tgtccccatcatcctcctct

SEQ ID NO: 26800 - DNA, 20 bp, synthetic construct
  misc_feature 1..20: note = chemically synthesized
  source 1..20: mol_type = other DNA
atcatcctcctcttggcctc

SEQ ID NO: 26801 - DNA, 20 bp, synthetic construct
  misc_feature 1..20: note = chemically synthesized
  source 1..20: mol_type = other DNA
tcatcctcctcttggcctcc

SEQ ID NO: 26802 - DNA, 20 bp, synthetic construct
  misc_feature 1..20: note = chemically synthesized
  source 1..20: mol_type = other DNA
tcctcttggcctccaggctt

SEQ ID NO: 26803 - DNA, 20 bp, synthetic construct
  misc_feature 1..20: note = chemically synthesized
  source 1..20: mol_type = other DNA
agaaactacctctgccttcc

SEQ ID NO: 26804 - DNA, 20 bp, synthetic construct
  misc_feature 1..20: note = chemically synthesized
  source 1..20: mol_type = other DNA
ctacctctgccttcctagcc

SEQ ID NO: 26805 - DNA, 20 bp, synthetic construct
  misc_feature 1..20: note = chemically synthesized
  source 1..20: mol_type = other DNA
tacctctgccttcctagcct

SEQ ID NO: 26806 - DNA, 20 bp, synthetic construct
  misc_feature 1..20: note = chemically synthesized
  source 1..20: mol_type = other DNA
tctgccttcctagcctgggc

SEQ ID NO: 26807 - DNA, 20 bp, synthetic construct
  misc_feature 1..20: note = chemically synthesized
  source 1..20: mol_type = other DNA
ctgggctagtgaccctattt

SEQ ID NO: 26808 - DNA, 20 bp, synthetic construct
  misc_feature 1..20: note = chemically synthesized
  source 1..20: mol_type = other DNA
ctaacatctttactcaatgt

SEQ ID NO: 26809 - DNA, 20 bp, synthetic construct
  misc_feature 1..20: note = chemically synthesized
  source 1..20: mol_type = other DNA
tactcaatgtgagcttcata

SEQ ID NO: 26810 - DNA, 20 bp, synthetic construct
  misc_feature 1..20: note = chemically synthesized
  source 1..20: mol_type = other DNA
actcaatgtgagcttcataa

SEQ ID NO: 26811 - DNA, 20 bp, synthetic construct
  misc_feature 1..20: note = chemically synthesized
  source 1..20: mol_type = other DNA
aatgtgagcttcataaaggc

SEQ ID NO: 26812 - DNA, 20 bp, synthetic construct
  misc_feature 1..20: note = chemically synthesized
  source 1..20: mol_type = other DNA
atgttaatctgtctatcttc

SEQ ID NO: 26813 - DNA, 20 bp, synthetic construct
  misc_feature 1..20: note = chemically synthesized
  source 1..20: mol_type = other DNA
tctatcttcaagttcttgat

SEQ ID NO: 26814 - DNA, 20 bp, synthetic construct
  misc_feature 1..20: note = chemically synthesized
  source 1..20: mol_type = other DNA
tatcttcaagttcttgatca

SEQ ID NO: 26815 - DNA, 20 bp, synthetic construct
  misc_feature 1..20: note = chemically synthesized
  source 1..20: mol_type = other DNA
ttcttgatcagagtttctca

SEQ ID NO: 26816 - DNA, 20 bp, synthetic construct
  misc_feature 1..20: note = chemically synthesized
  source 1..20: mol_type = other DNA
tcttgatcagagtttctcac

SEQ ID NO: 26817 - DNA, 20 bp, synthetic construct
  misc_feature 1..20: note = chemically synthesized
  source 1..20: mol_type = other DNA
gcacgtcaatgaaaattgat

SEQ ID NO: 26818 - DNA, 20 bp, synthetic construct
  misc_feature 1..20: note = chemically synthesized
  source 1..20: mol_type = other DNA
gagaatgtttaatgtaattt

SEQ ID NO: 26819 - DNA, 20 bp, synthetic construct
  misc_feature 1..20: note = chemically synthesized
  source 1..20: mol_type = other DNA
gtaatttcagtcacacttca

SEQ ID NO: 26820 - DNA, 20 bp, synthetic construct
  misc_feature 1..20: note = chemically synthesized
  source 1..20: mol_type = other DNA
aatttcagtcacacttcaaa

SEQ ID NO: 26821 - DNA, 20 bp, synthetic construct
  misc_feature 1..20: note = chemically synthesized
  source 1..20: mol_type = other DNA
atttcagtcacacttcaaag

SEQ ID NO: 26822 - DNA, 20 bp, synthetic construct
  misc_feature 1..20: note = chemically synthesized
  source 1..20: mol_type = other DNA
gatatgataaaacaaatcta

SEQ ID NO: 26823 - DNA, 20 bp, synthetic construct
  misc_feature 1..20: note = chemically synthesized
  source 1..20: mol_type = other DNA
atatgataaaacaaatctaa

SEQ ID NO: 26824 - DNA, 20 bp, synthetic construct
  misc_feature 1..20: note = chemically synthesized
  source 1..20: mol_type = other DNA
aaacaaatctaaaggtcatt

SEQ ID NO: 26825 - DNA, 20 bp, synthetic construct
  misc_feature 1..20: note = chemically synthesized
  source 1..20: mol_type = other DNA
acaaatctaaaggtcattta

SEQ ID NO: 26826 - DNA, 20 bp, synthetic construct
  misc_feature 1..20: note = chemically synthesized
  source 1..20: mol_type = other DNA
aaaggtcatttagagcaata

SEQ ID NO: 26827 - DNA, 20 bp, synthetic construct
  misc_feature 1..20: note = chemically synthesized
  source 1..20: mol_type = other DNA
aataaagaatcaaaaatgct

SEQ ID NO: 26828 - DNA, 20 bp, synthetic construct
  misc_feature 1..20: note = chemically synthesized
  source 1..20: mol_type = other DNA
aaatgctgagttctttcatt

SEQ ID NO: 26829 - DNA, 20 bp, synthetic construct
  misc_feature 1..20: note = chemically synthesized
  source 1..20: mol_type = other DNA
tttcaaataaatctattgct

SEQ ID NO: 26830 - DNA, 20 bp, synthetic construct
  misc_feature 1..20: note = chemically synthesized
  source 1..20: mol_type = other DNA
taaatctattgcttggaaac

SEQ ID NO: 26831 - DNA, 20 bp, synthetic construct
  misc_feature 1..20: note = chemically synthesized
  source 1..20: mol_type = other DNA
ggtccttcaattatataatt

SEQ ID NO: 26832 - DNA, 20 bp, synthetic construct
  misc_feature 1..20: note = chemically synthesized
  source 1..20: mol_type = other DNA
tccttcaattatataattca

SEQ ID NO: 26833 - DNA, 20 bp, synthetic construct
  misc_feature 1..20: note = chemically synthesized
  source 1..20: mol_type = other DNA
aattatataattcagagaaa

SEQ ID NO: 26834 - DNA, 20 bp, synthetic construct
  misc_feature 1..20: note = chemically synthesized
  source 1..20: mol_type = other DNA
attcagagaaatagaatata

SEQ ID NO: 26835 - DNA, 20 bp, synthetic construct
  misc_feature 1..20: note = chemically synthesized
  source 1..20: mol_type = other DNA
tagaatataaagctattata

SEQ ID NO: 26836 - DNA, 20 bp, synthetic construct
  misc_feature 1..20: note = chemically synthesized
  source 1..20: mol_type = other DNA
taaagctattatacagatgt

SEQ ID NO: 26837 - DNA, 20 bp, synthetic construct
  misc_feature 1..20: note = chemically synthesized
  source 1..20: mol_type = other DNA
atacagatgttagtttaaaa

SEQ ID NO: 26838 - DNA, 20 bp, synthetic construct
  misc_feature 1..20: note = chemically synthesized
  source 1..20: mol_type = other DNA
agatgttagtttaaaaaagt

SEQ ID NO: 26839 - DNA, 20 bp, synthetic construct
  misc_feature 1..20: note = chemically synthesized
  source 1..20: mol_type = other DNA
ttaaaaaagtaagcaaatat

SEQ ID NO: 26840 - DNA, 20 bp, synthetic construct
  misc_feature 1..20: note = chemically synthesized
  source 1..20: mol_type = other DNA
aaaaaagtaagcaaatatta

SEQ ID NO: 26841 - DNA, 20 bp, synthetic construct
  misc_feature 1..20: note = chemically synthesized
  source 1..20: mol_type = other DNA
aaatattagagatctctaaa

SEQ ID NO: 26842 - DNA, 20 bp, synthetic construct
  misc_feature 1..20: note = chemically synthesized
  source 1..20: mol_type = other DNA
tattagagatctctaaatgg

SEQ ID NO: 26843 - DNA, 20 bp, synthetic construct
  misc_feature 1..20: note = chemically synthesized
  source 1..20: mol_type = other DNA
attagagatctctaaatggt

SEQ ID NO: 26844 - DNA, 20 bp, synthetic construct
  misc_feature 1..20: note = chemically synthesized
  source 1..20: mol_type = other DNA
atggtaggttatccactaaa

SEQ ID NO: 26845 - DNA, 20 bp, synthetic construct
  misc_feature 1..20: note = chemically synthesized
  source 1..20: mol_type = other DNA
gtattgtttatctacgtaaa

SEQ ID NO: 26846 - DNA, 20 bp, synthetic construct
  misc_feature 1..20: note = chemically synthesized
  source 1..20: mol_type = other DNA
gtcaattacatatctgcatc

SEQ ID NO: 26847 - DNA, 20 bp, synthetic construct
  misc_feature 1..20: note = chemically synthesized
  source 1..20: mol_type = other DNA
accaaaataacatctgtttc

SEQ ID NO: 26848 - DNA, 20 bp, synthetic construct
  misc_feature 1..20: note = chemically synthesized
  source 1..20: mol_type = other DNA
aataacatctgtttccagtg

SEQ ID NO: 26849 - DNA, 20 bp, synthetic construct
  misc_feature 1..20: note = chemically synthesized
  source 1..20: mol_type = other DNA
atattgttaacaatgtactc

SEQ ID NO: 26850 - DNA, 20 bp, synthetic construct
  misc_feature 1..20: note = chemically synthesized
  source 1..20: mol_type = other DNA
acatgtcatataaactcatt

SEQ ID NO: 26851 - DNA, 20 bp, synthetic construct
  misc_feature 1..20: note = chemically synthesized
  source 1..20: mol_type = other DNA
catgtcatataaactcattc

SEQ ID NO: 26852 - DNA, 20 bp, synthetic construct
  misc_feature 1..20: note = chemically synthesized
  source 1..20: mol_type = other DNA
atgtcatataaactcattca

SEQ ID NO: 26853 - DNA, 20 bp, synthetic construct
  misc_feature 1..20: note = chemically synthesized
  source 1..20: mol_type = other DNA
tacctctactgttttattcc

SEQ ID NO: 26854 - DNA, 20 bp, synthetic construct
  misc_feature 1..20: note = chemically synthesized
  source 1..20: mol_type = other DNA
acctctactgttttattcca

SEQ ID NO: 26855 - DNA, 20 bp, synthetic construct
  misc_feature 1..20: note = chemically synthesized
  source 1..20: mol_type = other DNA
taaatgttatatttgatcac

SEQ ID NO: 26856 - DNA, 20 bp, synthetic construct
  misc_feature 1..20: note = chemically synthesized
  source 1..20: mol_type = other DNA
ttgatcaccggaaaatctta

SEQ ID NO: 26857 - DNA, 20 bp, synthetic construct
  misc_feature 1..20: note = chemically synthesized
  source 1..20: mol_type = other DNA
cttacactacccctcctttt

SEQ ID NO: 26858 - DNA, 20 bp, synthetic construct
  misc_feature 1..20: note = chemically synthesized
  source 1..20: mol_type = other DNA
tttggaaatacctttctata

SEQ ID NO: 26859 - DNA, 20 bp, synthetic construct
  misc_feature 1..20: note = chemically synthesized
  source 1..20: mol_type = other DNA
tttctataaagccctatctg

SEQ ID NO: 26860 - DNA, 20 bp, synthetic construct
  misc_feature 1..20: note = chemically synthesized
  source 1..20: mol_type = other DNA
atctgtggttgattcttaat

SEQ ID NO: 26861 - DNA, 20 bp, synthetic construct
  misc_feature 1..20: note = chemically synthesized
  source 1..20: mol_type = other DNA
tgattcttaattagtcttca

SEQ ID NO: 26862 - DNA, 20 bp, synthetic construct
  misc_feature 1..20: note = chemically synthesized
  source 1..20: mol_type = other DNA
cttaattagtcttcatagct

SEQ ID NO: 26863 - DNA, 20 bp, synthetic construct
  misc_feature 1..20: note = chemically synthesized
  source 1..20: mol_type = other DNA
ttaattagtcttcatagctc

SEQ ID NO: 26864 - DNA, 20 bp, synthetic construct
  misc_feature 1..20: note = chemically synthesized
  source 1..20: mol_type = other DNA
ttagtcttcatagctcaggt

SEQ ID NO: 26865 - DNA, 20 bp, synthetic construct
  misc_feature 1..20: note = chemically synthesized
  source 1..20: mol_type = other DNA
tagtcttcatagctcaggtt

SEQ ID NO: 26866 - DNA, 20 bp, synthetic construct
  misc_feature 1..20: note = chemically synthesized
  source 1..20: mol_type = other DNA
agtcttcatagctcaggttg

SEQ ID NO: 26867 - DNA, 20 bp, synthetic construct
  misc_feature 1..20: note = chemically synthesized
  source 1..20: mol_type = other DNA
gctcaggttggggccttccc

SEQ ID NO: 26868 - DNA, 20 bp, synthetic construct
  misc_feature 1..20: note = chemically synthesized
  source 1..20: mol_type = other DNA
ccttccctggccctcacctg

SEQ ID NO: 26869 - DNA, 20 bp, synthetic construct
  misc_feature 1..20: note = chemically synthesized
  source 1..20: mol_type = other DNA
cttccctggccctcacctgt

SEQ ID NO: 26870 - DNA, 20 bp, synthetic construct
  misc_feature 1..20: note = chemically synthesized
  source 1..20: mol_type = other DNA
cctggccctcacctgtgggc

SEQ ID NO: 26871 - DNA, 20 bp, synthetic construct
  misc_feature 1..20: note = chemically synthesized
  source 1..20: mol_type = other DNA
ctggccctcacctgtgggcc

SEQ ID NO: 26872 - DNA, 20 bp, synthetic construct
  misc_feature 1..20: note = chemically synthesized
  source 1..20: mol_type = other DNA
tccatctcttacattgcgct

SEQ ID NO: 26873 - DNA, 20 bp, synthetic construct
  misc_feature 1..20: note = chemically synthesized
  source 1..20: mol_type = other DNA
tctcttacattgcgctaaga

SEQ ID NO: 26874 - DNA, 20 bp, synthetic construct
  misc_feature 1..20: note = chemically synthesized
  source 1..20: mol_type = other DNA
ttttcctatcttatgtgtga

SEQ ID NO: 26875 - DNA, 20 bp, synthetic construct
  misc_feature 1..20: note = chemically synthesized
  source 1..20: mol_type = other DNA
tgatagatgcccctgaataa

SEQ ID NO: 26876 - DNA, 20 bp, synthetic construct
  misc_feature 1..20: note = chemically synthesized
  source 1..20: mol_type = other DNA
atagcaatatttgctgttgc

SEQ ID NO: 26877 - DNA, 20 bp, synthetic construct
  misc_feature 1..20: note = chemically synthesized
  source 1..20: mol_type = other DNA
tttgctgttgctggtaataa

SEQ ID NO: 26878 - DNA, 20 bp, synthetic construct
  misc_feature 1..20: note = chemically synthesized
  source 1..20: mol_type = other DNA
gctgttgctggtaataatag

SEQ ID NO: 26879 - DNA, 20 bp, synthetic construct
  misc_feature 1..20: note = chemically synthesized
  source 1..20: mol_type = other DNA
tgttgctgttatactgtcct

SEQ ID NO: 26880 - DNA, 20 bp, synthetic construct
  misc_feature 1..20: note = chemically synthesized
  source 1..20: mol_type = other DNA
gctgttatactgtccttggc

SEQ ID NO: 26881 - DNA, 20 bp, synthetic construct
  misc_feature 1..20: note = chemically synthesized
  source 1..20: mol_type = other DNA
ctgttatactgtccttggct

SEQ ID NO: 26882 - DNA, 20 bp, synthetic construct
  misc_feature 1..20: note = chemically synthesized
  source 1..20: mol_type = other DNA
actgtccttggctaggatcc

SEQ ID NO: 26883 - DNA, 20 bp, synthetic construct
  misc_feature 1..20: note = chemically synthesized
  source 1..20: mol_type = other DNA
tggctaggatcccagtgaaa

SEQ ID NO: 26884 - DNA, 20 bp, synthetic construct
  misc_feature 1..20: note = chemically synthesized
  source 1..20: mol_type = other DNA
ggctaggatcccagtgaaat

SEQ ID NO: 26885 - DNA, 20 bp, synthetic construct
  misc_feature 1..20: note = chemically synthesized
  source 1..20: mol_type = other DNA
aatcatgttcttaataaatg

SEQ ID NO: 26886 - DNA, 20 bp, synthetic construct
  misc_feature 1..20: note = chemically synthesized
  source 1..20: mol_type = other DNA
atcatgttcttaataaatgc

SEQ ID NO: 26887 - DNA, 20 bp, synthetic construct
  misc_feature 1..20: note = chemically synthesized
  source 1..20: mol_type = other DNA
aggattttctgaaatttttc

SEQ ID NO: 26888 - DNA, 20 bp, synthetic construct
  misc_feature 1..20: note = chemically synthesized
  source 1..20: mol_type = other DNA
attttctgaaatttttctgg

SEQ ID NO: 26889 - DNA, 20 bp, synthetic construct
  misc_feature 1..20: note = chemically synthesized
  source 1..20: mol_type = other DNA
ttctgaaatttttctggtag

SEQ ID NO: 26890 - DNA, 20 bp, synthetic construct
  misc_feature 1..20: note = chemically synthesized
  source 1..20: mol_type = other DNA
gtagtggtgccctctcctac

SEQ ID NO: 26891 - DNA, 20 bp, synthetic construct
  misc_feature 1..20: note = chemically synthesized
  source 1..20: mol_type = other DNA
ctctcctacaagcctaaatg

SEQ ID NO: 26892 - DNA, 20 bp, synthetic construct
  misc_feature 1..20: note = chemically synthesized
  source 1..20: mol_type = other DNA
caagcctaaatgaagatgct

SEQ ID NO: 26893 - DNA, 20 bp, synthetic construct
  misc_feature 1..20: note = chemically synthesized
  source 1..20: mol_type = other DNA
agctccttcctattgtaccg

SEQ ID NO: 26894 - DNA, 20 bp, synthetic construct
  misc_feature 1..20: note = chemically synthesized
  source 1..20: mol_type = other DNA
ccttcctattgtaccgaagc

SEQ ID NO: 26895 - DNA, 20 bp, synthetic construct
  misc_feature 1..20: note = chemically synthesized
  source 1..20: mol_type = other DNA
cctcataactacaatttaat

SEQ ID NO: 26896 - DNA, 20 bp, synthetic construct
  misc_feature 1..20: note = chemically synthesized
  source 1..20: mol_type = other DNA
accctgactctcctacactc

SEQ ID NO: 26897 - DNA, 20 bp, synthetic construct
  misc_feature 1..20: note = chemically synthesized
  source 1..20: mol_type = other DNA
tacactctggccctaacaac

SEQ ID NO: 26898 - DNA, 20 bp, synthetic construct
  misc_feature 1..20: note = chemically synthesized
  source 1..20: mol_type = other DNA
ctaacaaccagttacttacc

SEQ ID NO: 26899 - DNA, 20 bp, synthetic construct
  misc_feature 1..20: note = chemically synthesized
  source 1..20: mol_type = other DNA
accagttacttacccggtgt

SEQ ID NO: 26900 - DNA, 20 bp, synthetic construct
  misc_feature 1..20: note = chemically synthesized
  source 1..20: mol_type = other DNA
ccagttacttacccggtgta

SEQ ID NO: 26901 - DNA, 20 bp, synthetic construct
  misc_feature 1..20: note = chemically synthesized
  source 1..20: mol_type = other DNA
gttacttacccggtgtaagg

SEQ ID NO: 26902 - DNA, 20 bp, synthetic construct
  misc_feature 1..20: note = chemically synthesized
  source 1..20: mol_type = other DNA
aaggtggtgccacttctgtc

SEQ ID NO: 26903 - DNA, 20 bp, synthetic construct
  misc_feature 1..20: note = chemically synthesized
  source 1..20: mol_type = other DNA
aggtggtgccacttctgtct

SEQ ID NO: 26904 - DNA, 20 bp, synthetic construct
  misc_feature 1..20: note = chemically synthesized
  source 1..20: mol_type = other DNA
gtgccacttctgtctgggtg

SEQ ID NO: 26905 - DNA, 20 bp, synthetic construct
  misc_feature 1..20: note = chemically synthesized
  source 1..20: mol_type = other DNA
tgggtgtggtctgatcacaa

SEQ ID NO: 26906 - DNA, 20 bp, synthetic construct
  misc_feature 1..20: note = chemically synthesized
  source 1..20: mol_type = other DNA
atggcatgtcataaacttca

SEQ ID NO: 26907 - DNA, 20 bp, synthetic construct
  misc_feature 1..20: note = chemically synthesized
  source 1..20: mol_type = other DNA
tggcatgtcataaacttcat

SEQ ID NO: 26908 - DNA, 20 bp, synthetic construct
  misc_feature 1..20: note = chemically synthesized
  source 1..20: mol_type = other DNA
aacttcatgggtctctgtcc

SEQ ID NO: 26909 - DNA, 20 bp, synthetic construct
  misc_feature 1..20: note = chemically synthesized
  source 1..20: mol_type = other DNA
atgggtctctgtcctggttt

SEQ ID NO: 26910 - DNA, 20 bp, synthetic construct
  misc_feature 1..20: note = chemically synthesized
  source 1..20: mol_type = other DNA
tagatctgtatgccccgttt

SEQ ID NO: 26911 - DNA, 20 bp, synthetic construct
  misc_feature 1..20: note = chemically synthesized
  source 1..20: mol_type = other DNA
gatctgtatgccccgttttg

SEQ ID NO: 26912 - DNA, 20 bp, synthetic construct
  misc_feature 1..20: note = chemically synthesized
  source 1..20: mol_type = other DNA
aatcaaccatgccctattta

SEQ ID NO: 26913 - DNA, 20 bp, synthetic construct
  misc_feature 1..20: note = chemically synthesized
  source 1..20: mol_type = other DNA
atcaaccatgccctatttaa

SEQ ID NO: 26914 - DNA, 20 bp, synthetic construct
  misc_feature 1..20: note = chemically synthesized
  source 1..20: mol_type = other DNA
tgtaataccttgcttcatgc

SEQ ID NO: 26915 - DNA, 20 bp, synthetic construct
  misc_feature 1..20: note = chemically synthesized
  source 1..20: mol_type = other DNA
cttgcttcatgccagtctcc

SEQ ID NO: 26916 - DNA, 20 bp, synthetic construct
  misc_feature 1..20: note = chemically synthesized
  source 1..20: mol_type = other DNA
tgcttcatgccagtctccaa

SEQ ID NO: 26917 - DNA, 20 bp, synthetic construct
  misc_feature 1..20: note = chemically synthesized
  source 1..20: mol_type = other DNA
caagagtgtgtgtgtgtttg

SEQ ID NO: 26918 - DNA, 20 bp, synthetic construct
  misc_feature 1..20: note = chemically synthesized
  source 1..20: mol_type = other DNA
gagtgtgtgtgtgtttgtgg

SEQ ID NO: 26919 - DNA, 20 bp, synthetic construct
  misc_feature 1..20: note = chemically synthesized
  source 1..20: mol_type = other DNA
gtgtgtgtgtgtttgtggtg

SEQ ID NO: 26920 - DNA, 20 bp, synthetic construct
  misc_feature 1..20: note = chemically synthesized
  source 1..20: mol_type = other DNA
gtgtgtgtgtttgtggtgga

SEQ ID NO: 26921 - DNA, 20 bp, synthetic construct
  misc_feature 1..20: note = chemically synthesized
  source 1..20: mol_type = other DNA
tgtgtgtgtttgtggtggag

SEQ ID NO: 26922 - DNA, 20 bp, synthetic construct
  misc_feature 1..20: note = chemically synthesized
  source 1..20: mol_type = other DNA
gtggtggagaggttgtgtgt

SEQ ID NO: 26923 - DNA, 20 bp, synthetic construct
  misc_feature 1..20: note = chemically synthesized
  source 1..20: mol_type = other DNA
aggttgtgtgtgagttttga

SEQ ID NO: 26924 - DNA, 20 bp, synthetic construct
  misc_feature 1..20: note = chemically synthesized
  source 1..20: mol_type = other DNA
gtgtgtgagttttgaaagaa

SEQ ID NO: 26925 - DNA, 20 bp, synthetic construct
  misc_feature 1..20: note = chemically synthesized
  source 1..20: mol_type = other DNA
gtgtgagttttgaaagaaaa

SEQ ID NO: 26926 - DNA, 20 bp, synthetic construct
  misc_feature 1..20: note = chemically synthesized
  source 1..20: mol_type = other DNA
atgacctgatcacattaact

SEQ ID NO: 26927 - DNA, 20 bp, synthetic construct
  misc_feature 1..20: note = chemically synthesized
  source 1..20: mol_type = other DNA
tgacctgatcacattaactc

SEQ ID NO: 26928 - DNA, 20 bp, synthetic construct
  misc_feature 1..20: note = chemically synthesized
  source 1..20: mol_type = other DNA
tcacattaactcaggttctg

SEQ ID NO: 26929 - DNA, 20 bp, synthetic construct
  misc_feature 1..20: note = chemically synthesized
  source 1..20: mol_type = other DNA
ttaactcaggttctgtagca

SEQ ID NO: 26930 - DNA, 20 bp, synthetic construct
  misc_feature 1..20: note = chemically synthesized
  source 1..20: mol_type = other DNA
tcaggttctgtagcatagtc

SEQ ID NO: 26931 - DNA, 20 bp, synthetic construct
  misc_feature 1..20: note = chemically synthesized
  source 1..20: mol_type = other DNA
caggttctgtagcatagtct

SEQ ID NO: 26932 - DNA, 20 bp, synthetic construct
  misc_feature 1..20: note = chemically synthesized
  source 1..20: mol_type = other DNA
aggttctgtagcatagtctg

SEQ ID NO: 26933 - DNA, 20 bp, synthetic construct
  misc_feature 1..20: note = chemically synthesized
  source 1..20: mol_type = other DNA
ttctgtagcatagtctgggg

SEQ ID NO: 26934 - DNA, 20 bp, synthetic construct
  misc_feature 1..20: note = chemically synthesized
  source 1..20: mol_type = other DNA
tgtagcatagtctggggaag

SEQ ID NO: 26935 - DNA, 20 bp, synthetic construct
  misc_feature 1..20: note = chemically synthesized
  source 1..20: mol_type = other DNA
atagtctggggaagaagtac

SEQ ID NO: 26936 - DNA, 20 bp, synthetic construct
  misc_feature 1..20: note = chemically synthesized
  source 1..20: mol_type = other DNA
tttttttttctaaatgttga

SEQ ID NO: 26937 - DNA, 20 bp, synthetic construct
  misc_feature 1..20: note = chemically synthesized
  source 1..20: mol_type = other DNA
atgttgatggcatttgctac

SEQ ID NO: 26938 - DNA, 20 bp, synthetic construct
  misc_feature 1..20: note = chemically synthesized
  source 1..20: mol_type = other DNA
gatggcatttgctaccagaa

SEQ ID NO: 26939 - DNA, 20 bp, synthetic construct
  misc_feature 1..20: note = chemically synthesized
  source 1..20: mol_type = other DNA
ggcatttgctaccagaaaag

SEQ ID NO: 26940 - DNA, 20 bp, synthetic construct
  misc_feature 1..20: note = chemically synthesized
  source 1..20: mol_type = other DNA
gcatttgctaccagaaaaga

SEQ ID NO: 26941 - DNA, 20 bp, synthetic construct
  misc_feature 1..20: note = chemically synthesized
  source 1..20: mol_type = other DNA
ctaccagaaaagaaggaaaa

SEQ ID NO: 26942 - DNA, 20 bp, synthetic construct
  misc_feature 1..20: note = chemically synthesized
  source 1..20: mol_type = other DNA
agaaggaaaaaagttttgta

SEQ ID NO: 26943 - DNA, 20 bp, synthetic construct
  misc_feature 1..20: note = chemically synthesized
  source 1..20: mol_type = other DNA
gaaggaaaaaagttttgtaa

SEQ ID NO: 26944 - DNA, 20 bp, synthetic construct
  misc_feature 1..20: note = chemically synthesized
  source 1..20: mol_type = other DNA
tttgtaaaggctacttgttg

SEQ ID NO: 26945 - DNA, 20 bp, synthetic construct
  misc_feature 1..20: note = chemically synthesized
  source 1..20: mol_type = other DNA
ttgtaaaggctacttgttgt

SEQ ID NO: 26946 - DNA, 20 bp, synthetic construct
  misc_feature 1..20: note = chemically synthesized
  source 1..20: mol_type = other DNA
tgtaaaggctacttgttgta

SEQ ID NO: 26947 - DNA, 20 bp, synthetic construct
  misc_feature 1..20: note = chemically synthesized
  source 1..20: mol_type = other DNA
acttgttgtagggctcattg

SEQ ID NO: 26948 - DNA, 20 bp, synthetic construct
  misc_feature 1..20: note = chemically synthesized
  source 1..20: mol_type = other DNA
cttgttgtagggctcattga

SEQ ID NO: 26949 - DNA, 20 bp, synthetic construct
  misc_feature 1..20: note = chemically synthesized
  source 1..20: mol_type = other DNA
ttgtagggctcattgaagga

SEQ ID NO: 26950 - DNA, 20 bp, synthetic construct
  misc_feature 1..20: note = chemically synthesized
  source 1..20: mol_type = other DNA
gggctcattgaaggaaagtc

SEQ ID NO: 26951 - DNA, 20 bp, synthetic construct
  misc_feature 1..20: note = chemically synthesized
  source 1..20: mol_type = other DNA
aggaaagtccagtgcattca

SEQ ID NO: 26952 - DNA, 20 bp, synthetic construct
  misc_feature 1..20: note = chemically synthesized
  source 1..20: mol_type = other DNA
gtccagtgcattcaaagatg

SEQ ID NO: 26953 - DNA, 20 bp, synthetic construct
  misc_feature 1..20: note = chemically synthesized
  source 1..20: mol_type = other DNA
cagtgcattcaaagatgaag

SEQ ID NO: 26954 - DNA, 20 bp, synthetic construct
  misc_feature 1..20: note = chemically synthesized
  source 1..20: mol_type = other DNA
gtgcattcaaagatgaagta

SEQ ID NO: 26955 - DNA, 20 bp, synthetic construct
  misc_feature 1..20: note = chemically synthesized
  source 1..20: mol_type = other DNA
gcattcaaagatgaagtaga

SEQ ID NO: 26956 - DNA, 20 bp, synthetic construct
  misc_feature 1..20: note = chemically synthesized
  source 1..20: mol_type = other DNA
aaagatgaagtagagagctt

SEQ ID NO: 26957 - DNA, 20 bp, synthetic construct
  misc_feature 1..20: note = chemically synthesized
  source 1..20: mol_type = other DNA
aagatgaagtagagagcttt

SEQ ID NO: 26958 - DNA, 20 bp, synthetic construct
  misc_feature 1..20: note = chemically synthesized
  source 1..20: mol_type = other DNA
tgaagtagagagctttggga

SEQ ID NO: 26959 - DNA, 20 bp, synthetic construct
  misc_feature 1..20: note = chemically synthesized
  source 1..20: mol_type = other DNA
agagagctttgggaaagcct

SEQ ID NO: 26960 - DNA, 20 bp, synthetic construct
  misc_feature 1..20: note = chemically synthesized
  source 1..20: mol_type = other DNA
gaaagcctgagacactgacc

SEQ ID NO: 26961 - DNA, 20 bp, synthetic construct
  misc_feature 1..20: note = chemically synthesized
  source 1..20: mol_type = other DNA
cactgacctggacatttgtt

SEQ ID NO: 26962 - DNA, 20 bp, synthetic construct
  misc_feature 1..20: note = chemically synthesized
  source 1..20: mol_type = other DNA
actgacctggacatttgttt

SEQ ID NO: 26963 - DNA, 20 bp, synthetic construct
  misc_feature 1..20: note = chemically synthesized
  source 1..20: mol_type = other DNA
ctgacctggacatttgtttg

SEQ ID NO: 26964 - DNA, 20 bp, synthetic construct
  misc_feature 1..20: note = chemically synthesized
  source 1..20: mol_type = other DNA
acctggacatttgtttgggg

SEQ ID NO: 26965 - DNA, 20 bp, synthetic construct
  misc_feature 1..20: note = chemically synthesized
  source 1..20: mol_type = other DNA
cctggacatttgtttggggt

SEQ ID NO: 26966 - DNA, 20 bp, synthetic construct
  misc_feature 1..20: note = chemically synthesized
  source 1..20: mol_type = other DNA
tggggtaggattgaatatgc

SEQ ID NO: 26967 - DNA, 20 bp, synthetic construct
  misc_feature 1..20: note = chemically synthesized
  source 1..20: mol_type = other DNA
gaatatgcaagattgacttc

SEQ ID NO: 26968 - DNA, 20 bp, synthetic construct
  misc_feature 1..20: note = chemically synthesized
  source 1..20: mol_type = other DNA
aatatgcaagattgacttct

SEQ ID NO: 26969 - DNA, 20 bp, synthetic construct
  misc_feature 1..20: note = chemically synthesized
  source 1..20: mol_type = other DNA
aagattgacttctaggtcca

SEQ ID NO: 26970 - DNA, 20 bp, synthetic construct
  misc_feature 1..20: note = chemically synthesized
  source 1..20: mol_type = other DNA
gacttctaggtccaaagata

SEQ ID NO: 26971 - DNA, 20 bp, synthetic construct
  misc_feature 1..20: note = chemically synthesized
  source 1..20: mol_type = other DNA
cttctaggtccaaagatata

SEQ ID NO: 26972 - DNA, 20 bp, synthetic construct
  misc_feature 1..20: note = chemically synthesized
  source 1..20: mol_type = other DNA
ttctaggtccaaagatatag

SEQ ID NO: 26973 - DNA, 20 bp, synthetic construct
  misc_feature 1..20: note = chemically synthesized
  source 1..20: mol_type = other DNA
aggtccaaagatatagaggc

SEQ ID NO: 26974 - DNA, 20 bp, synthetic construct
  misc_feature 1..20: note = chemically synthesized
  source 1..20: mol_type = other DNA
tccaaagatatagaggctgg

SEQ ID NO: 26975 - DNA, 20 bp, synthetic construct
  misc_feature 1..20: note = chemically synthesized
  source 1..20: mol_type = other DNA
caaagatatagaggctggca

SEQ ID NO: 26976 - DNA, 20 bp, synthetic construct
  misc_feature 1..20: note = chemically synthesized
  source 1..20: mol_type = other DNA
gatatagaggctggcagaga

SEQ ID NO: 26977 - DNA, 20 bp, synthetic construct
  misc_feature 1..20: note = chemically synthesized
  source 1..20: mol_type = other DNA
tatagaggctggcagagatg

SEQ ID NO: 26978 - DNA, 20 bp, synthetic construct
  misc_feature 1..20: note = chemically synthesized
  source 1..20: mol_type = other DNA
atagaggctggcagagatgg

SEQ ID NO: 26979 - DNA, 20 bp, synthetic construct
  misc_feature 1..20: note = chemically synthesized
  source 1..20: mol_type = other DNA
tagaggctggcagagatgga

SEQ ID NO: 26980 - DNA, 20 bp, synthetic construct
  misc_feature 1..20: note = chemically synthesized
  source 1..20: mol_type = other DNA
gagggcaatttaattatctg

SEQ ID NO: 26981 - DNA, 20 bp, synthetic construct
  misc_feature 1..20: note = chemically synthesized
  source 1..20: mol_type = other DNA
atttaattatctgcagtaaa

SEQ ID NO: 26982 - DNA, 20 bp, synthetic construct
  misc_feature 1..20: note = chemically synthesized
  source 1..20: mol_type = other DNA
agtaaatggaaatataaaaa

SEQ ID NO: 26983 - DNA, 20 bp, synthetic construct
  misc_feature 1..20: note = chemically synthesized
  source 1..20: mol_type = other DNA
aatggaaatataaaaataga

SEQ ID NO: 26984 - DNA, 20 bp, synthetic construct
  misc_feature 1..20: note = chemically synthesized
  source 1..20: mol_type = other DNA
atggaaatataaaaatagac

SEQ ID NO: 26985 - DNA, 20 bp, synthetic construct
  misc_feature 1..20: note = chemically synthesized
  source 1..20: mol_type = other DNA
ataaaaatagacaggaaaat

SEQ ID NO: 26986 - DNA, 20 bp, synthetic construct
  misc_feature 1..20: note = chemically synthesized
  source 1..20: mol_type = other DNA
aatagacaggaaaatgagtg

SEQ ID NO: 26987 - DNA, 20 bp, synthetic construct
  misc_feature 1..20: note = chemically synthesized
  source 1..20: mol_type = other DNA
atagacaggaaaatgagtgc

SEQ ID NO: 26988 - DNA, 20 bp, synthetic construct
  misc_feature 1..20: note = chemically synthesized
  source 1..20: mol_type = other DNA
agacaggaaaatgagtgcag

SEQ ID NO: 26989 - DNA, 20 bp, synthetic construct
  misc_feature 1..20: note = chemically synthesized
  source 1..20: mol_type = other DNA
aggaaaatgagtgcaggagt

SEQ ID NO: 26990 - DNA, 20 bp, synthetic construct
  misc_feature 1..20: note = chemically synthesized
  source 1..20: mol_type = other DNA
gaaaatgagtgcaggagtga

SEQ ID NO: 26991 - DNA, 20 bp, synthetic construct
  misc_feature 1..20: note = chemically synthesized
  source 1..20: mol_type = other DNA
gcaggagtgagagaatcttg

SEQ ID NO: 26992 - DNA, 20 bp, synthetic construct
  misc_feature 1..20: note = chemically synthesized
  source 1..20: mol_type = other DNA
ggagtgagagaatcttgaag

SEQ ID NO: 26993 - DNA, 20 bp, synthetic construct
  misc_feature 1..20: note = chemically synthesized
  source 1..20: mol_type = other DNA
gtgagagaatcttgaagtag

SEQ ID NO: 26994 - DNA, 20 bp, synthetic construct
  misc_feature 1..20: note = chemically synthesized
  source 1..20: mol_type = other DNA
tcttgaagtagtggtgattg

SEQ ID NO: 26995 - DNA, 20 bp, synthetic construct
  misc_feature 1..20: note = chemically synthesized
  source 1..20: mol_type = other DNA
agtggtgattgtggtgcttc

SEQ ID NO: 26996 - DNA, 20 bp, synthetic construct
  misc_feature 1..20: note = chemically synthesized
  source 1..20: mol_type = other DNA
gtggtgattgtggtgcttca

SEQ ID NO: 26997 - DNA, 20 bp, synthetic construct
  misc_feature 1..20: note = chemically synthesized
  source 1..20: mol_type = other DNA
gtgattgtggtgcttcaagg

SEQ ID NO: 26998 - DNA, 20 bp, synthetic construct
  misc_feature 1..20: note = chemically synthesized
  source 1..20: mol_type = other DNA
aaggcagatgtgcaatttaa

SEQ ID NO: 26999 - DNA, 20 bp, synthetic construct
  misc_feature 1..20: note = chemically synthesized
  source 1..20: mol_type = other DNA
aagccactgtgaacatcaca

SEQ ID NO: 27000 - DNA, 20 bp, synthetic construct
  misc_feature 1..20: note = chemically synthesized
  source 1..20: mol_type = other DNA
tatactacatccgacctctc

SEQ ID NO: 27001 - DNA, 20 bp, synthetic construct
  misc_feature 1..20: note = chemically synthesized
  source 1..20: mol_type = other DNA
ccgacctctctggaaaacga

SEQ ID NO: 27002 - DNA, 20 bp, synthetic construct
  misc_feature 1..20: note = chemically synthesized
  source 1..20: mol_type = other DNA
cgacctctctggaaaacgac

SEQ ID NO: 27003 - DNA, 20 bp, synthetic construct
  misc_feature 1..20: note = chemically synthesized
  source 1..20: mol_type = other DNA
gaaaacgacgggtccattac

SEQ ID NO: 27004 - DNA, 20 bp, synthetic construct
  misc_feature 1..20: note = chemically synthesized
  source 1..20: mol_type = other DNA
aacgacgggtccattactag

SEQ ID NO: 27005 - DNA, 20 bp, synthetic construct
  misc_feature 1..20: note = chemically synthesized
  source 1..20: mol_type = other DNA
ggtccattactagtggataa

SEQ ID NO: 27006 - DNA, 20 bp, synthetic construct
  misc_feature 1..20: note = chemically synthesized
  source 1..20: mol_type = other DNA
ccattactagtggataacag

SEQ ID NO: 27007 - DNA, 20 bp, synthetic construct
  misc_feature 1..20: note = chemically synthesized
  source 1..20: mol_type = other DNA
tactagtggataacagaaga

SEQ ID NO: 27008 - DNA, 20 bp, synthetic construct
  misc_feature 1..20: note = chemically synthesized
  source 1..20: mol_type = other DNA
aagacagtaaataaaatgat

SEQ ID NO: 27009 - DNA, 20 bp, synthetic construct
  misc_feature 1..20: note = chemically synthesized
  source 1..20: mol_type = other DNA
tttatgaaattaaaaataaa

SEQ ID NO: 27010 - DNA, 20 bp, synthetic construct
  misc_feature 1..20: note = chemically synthesized
  source 1..20: mol_type = other DNA
gaaattaaaaataaacagat

SEQ ID NO: 27011 - DNA, 20 bp, synthetic construct
  misc_feature 1..20: note = chemically synthesized
  source 1..20: mol_type = other DNA
aaattaaaaataaacagata

SEQ ID NO: 27012 - DNA, 20 bp, synthetic construct
  misc_feature 1..20: note = chemically synthesized
  source 1..20: mol_type = other DNA
ttaaaaataaacagataagg

SEQ ID NO: 27013 - DNA, 20 bp, synthetic construct
  misc_feature 1..20: note = chemically synthesized
  source 1..20: mol_type = other DNA
aaaataaacagataaggcag

SEQ ID NO: 27014 - DNA, 20 bp, synthetic construct
  misc_feature 1..20: note = chemically synthesized
  source 1..20: mol_type = other DNA
aggcagtagtacttttgttg

SEQ ID NO: 27015 - DNA, 20 bp, synthetic construct
  misc_feature 1..20: note = chemically synthesized
  source 1..20: mol_type = other DNA
cagtagtacttttgttgcag

SEQ ID NO: 27016 - DNA, 20 bp, synthetic construct
  misc_feature 1..20: note = chemically synthesized
  source 1..20: mol_type = other DNA
tgttgcagcagatgtctgtg

SEQ ID NO: 27017 - DNA, 20 bp, synthetic construct
  misc_feature 1..20: note = chemically synthesized
  source 1..20: mol_type = other DNA
atgtctgtgtagccaaaacc

SEQ ID NO: 27018 - DNA, 20 bp, synthetic construct
  misc_feature 1..20: note = chemically synthesized
  source 1..20: mol_type = other DNA
tgtctgtgtagccaaaacct

SEQ ID NO: 27019 - DNA, 20 bp, synthetic construct
  misc_feature 1..20: note = chemically synthesized
  source 1..20: mol_type = other DNA
gtctgtgtagccaaaacctg

SEQ ID NO: 27020 - DNA, 20 bp, synthetic construct
  misc_feature 1..20: note = chemically synthesized
  source 1..20: mol_type = other DNA
cctggggactgaatgctaaa

SEQ ID NO: 27021 - DNA, 20 bp, synthetic construct
  misc_feature 1..20: note = chemically synthesized
  source 1..20: mol_type = other DNA
gggactgaatgctaaaaagt

SEQ ID NO: 27022 - DNA, 20 bp, synthetic construct
  misc_feature 1..20: note = chemically synthesized
  source 1..20: mol_type = other DNA
ggactgaatgctaaaaagtt

SEQ ID NO: 27023 - DNA, 20 bp, synthetic construct
  misc_feature 1..20: note = chemically synthesized
  source 1..20: mol_type = other DNA
gactgaatgctaaaaagtta

SEQ ID NO: 27024 - DNA, 20 bp, synthetic construct
  misc_feature 1..20: note = chemically synthesized
  source 1..20: mol_type = other DNA
gctaaaaagttagggctctt

SEQ ID NO: 27025 - DNA, 20 bp, synthetic construct
  misc_feature 1..20: note = chemically synthesized
  source 1..20: mol_type = other DNA
aagttagggctcttcagctt

SEQ ID NO: 27026 - DNA, 20 bp, synthetic construct
  misc_feature 1..20: note = chemically synthesized
  source 1..20: mol_type = other DNA
agttagggctcttcagcttc

SEQ ID NO: 27027 - DNA, 20 bp, synthetic construct
  misc_feature 1..20: note = chemically synthesized
  source 1..20: mol_type = other DNA
ttagggctcttcagcttcag

SEQ ID NO: 27028 - DNA, 20 bp, synthetic construct
  misc_feature 1..20: note = chemically synthesized
  source 1..20: mol_type = other DNA
ggctcttcagcttcaggaga

SEQ ID NO: 27029 - DNA, 20 bp, synthetic construct
  misc_feature 1..20: note = chemically synthesized
  source 1..20: mol_type = other DNA
gctcttcagcttcaggagac

SEQ ID NO: 27030 - DNA, 20 bp, synthetic construct
  misc_feature 1..20: note = chemically synthesized
  source 1..20: mol_type = other DNA
ctcttcagcttcaggagaca

SEQ ID NO: 27031 - DNA, 20 bp, synthetic construct
  misc_feature 1..20: note = chemically synthesized
  source 1..20: mol_type = other DNA
tcttcagcttcaggagacag

SEQ ID NO: 27032 - DNA, 20 bp, synthetic construct
  misc_feature 1..20: note = chemically synthesized
  source 1..20: mol_type = other DNA
tcagcttcaggagacagggg

SEQ ID NO: 27033 - DNA, 20 bp, synthetic construct
  misc_feature 1..20: note = chemically synthesized
  source 1..20: mol_type = other DNA
agcttcaggagacaggggtg

SEQ ID NO: 27034 - DNA, 20 bp, synthetic construct
  misc_feature 1..20: note = chemically synthesized
  source 1..20: mol_type = other DNA
aggagacaggggtggagata

SEQ ID NO: 27035 - DNA, 20 bp, synthetic construct
  misc_feature 1..20: note = chemically synthesized
  source 1..20: mol_type = other DNA
gacaggggtggagataaaga

SEQ ID NO: 27036 - DNA, 20 bp, synthetic construct
  misc_feature 1..20: note = chemically synthesized
  source 1..20: mol_type = other DNA
taaagaaagtttcctgccca

SEQ ID NO: 27037 - DNA, 20 bp, synthetic construct
  misc_feature 1..20: note = chemically synthesized
  source 1..20: mol_type = other DNA
aaagaaagtttcctgcccat

SEQ ID NO: 27038 - DNA, 20 bp, synthetic construct
  misc_feature 1..20: note = chemically synthesized
  source 1..20: mol_type = other DNA
tttcctgcccataggattcc

SEQ ID NO: 27039 - DNA, 20 bp, synthetic construct
  misc_feature 1..20: note = chemically synthesized
  source 1..20: mol_type = other DNA
gcccataggattcccagccc

SEQ ID NO: 27040 - DNA, 20 bp, synthetic construct
  misc_feature 1..20: note = chemically synthesized
  source 1..20: mol_type = other DNA
cccataggattcccagccct

SEQ ID NO: 27041 - DNA, 20 bp, synthetic construct
  misc_feature 1..20: note = chemically synthesized
  source 1..20: mol_type = other DNA
ccataggattcccagccctg

SEQ ID NO: 27042 - DNA, 20 bp, synthetic construct
  misc_feature 1..20: note = chemically synthesized
  source 1..20: mol_type = other DNA
gggaccctttgtttaccatt

SEQ ID NO: 27043 - DNA, 20 bp, synthetic construct
  misc_feature 1..20: note = chemically synthesized
  source 1..20: mol_type = other DNA
tgtttaccattaagttctcc

SEQ ID NO: 27044 - DNA, 20 bp, synthetic construct
  misc_feature 1..20: note = chemically synthesized
  source 1..20: mol_type = other DNA
taccattaagttctcccagc

SEQ ID NO: 27045 - DNA, 20 bp, synthetic construct
  misc_feature 1..20: note = chemically synthesized
  source 1..20: mol_type = other DNA
ccattaagttctcccagctg

SEQ ID NO: 27046 - DNA, 20 bp, synthetic construct
  misc_feature 1..20: note = chemically synthesized
  source 1..20: mol_type = other DNA
agttctcccagctggagcca

SEQ ID NO: 27047 - DNA, 20 bp, synthetic construct
  misc_feature 1..20: note = chemically synthesized
  source 1..20: mol_type = other DNA
ccagctggagccatggtctt

SEQ ID NO: 27048 - DNA, 20 bp, synthetic construct
  misc_feature 1..20: note = chemically synthesized
  source 1..20: mol_type = other DNA
cagctggagccatggtcttt

SEQ ID NO: 27049 - DNA, 20 bp, synthetic construct
  misc_feature 1..20: note = chemically synthesized
  source 1..20: mol_type = other DNA
gctggagccatggtctttag

SEQ ID NO: 27050 - DNA, 20 bp, synthetic construct
  misc_feature 1..20: note = chemically synthesized
  source 1..20: mol_type = other DNA
ctggagccatggtctttagg

SEQ ID NO: 27051 - DNA, 20 bp, synthetic construct
  misc_feature 1..20: note = chemically synthesized
  source 1..20: mol_type = other DNA
gaggataaatccttctgtga

SEQ ID NO: 27052 - DNA, 20 bp, synthetic construct
  misc_feature 1..20: note = chemically synthesized
  source 1..20: mol_type = other DNA
aaatccttctgtgacagcca

SEQ ID NO: 27053 - DNA, 20 bp, synthetic construct
  misc_feature 1..20: note = chemically synthesized
  source 1..20: mol_type = other DNA
agccacagccttgtgcctct

SEQ ID NO: 27054 - DNA, 20 bp, synthetic construct
  misc_feature 1..20: note = chemically synthesized
  source 1..20: mol_type = other DNA
tatactcttctttcttcctt

SEQ ID NO: 27055 - DNA, 20 bp, synthetic construct
  misc_feature 1..20: note = chemically synthesized
  source 1..20: mol_type = other DNA
ttcctttggaacctactcat

SEQ ID NO: 27056 - DNA, 20 bp, synthetic construct
  misc_feature 1..20: note = chemically synthesized
  source 1..20: mol_type = other DNA
acatttttgttattacctgc

SEQ ID NO: 27057 - DNA, 20 bp, synthetic construct
  misc_feature 1..20: note = chemically synthesized
  source 1..20: mol_type = other DNA
ttttgttattacctgctggt

SEQ ID NO: 27058 - DNA, 20 bp, synthetic construct
  misc_feature 1..20: note = chemically synthesized
  source 1..20: mol_type = other DNA
gtctcactactgtcttgtgc

SEQ ID NO: 27059 - DNA, 20 bp, synthetic construct
  misc_feature 1..20: note = chemically synthesized
  source 1..20: mol_type = other DNA
tctcactactgtcttgtgcc

SEQ ID NO: 27060 - DNA, 20 bp, synthetic construct
  misc_feature 1..20: note = chemically synthesized
  source 1..20: mol_type = other DNA
ctcactactgtcttgtgccg

SEQ ID NO: 27061 - DNA, 20 bp, synthetic construct
  misc_feature 1..20: note = chemically synthesized
  source 1..20: mol_type = other DNA
actgtcttgtgccggggttt

SEQ ID NO: 27062 - DNA, 20 bp, synthetic construct
  misc_feature 1..20: note = chemically synthesized
  source 1..20: mol_type = other DNA
ctgtcttgtgccggggtttc

SEQ ID NO: 27063 - DNA, 20 bp, synthetic construct
  misc_feature 1..20: note = chemically synthesized
  source 1..20: mol_type = other DNA
gtcttgtgccggggtttcag

SEQ ID NO: 27064 - DNA, 20 bp, synthetic construct
  misc_feature 1..20: note = chemically synthesized
  source 1..20: mol_type = other DNA
ttgtgccggggtttcaggag

SEQ ID NO: 27065 - DNA, 20 bp, synthetic construct
  misc_feature 1..20: note = chemically synthesized
  source 1..20: mol_type = other DNA
tgtgccggggtttcaggagt

SEQ ID NO: 27066 - DNA, 20 bp, synthetic construct
  misc_feature 1..20: note = chemically synthesized
  source 1..20: mol_type = other DNA
gggtttcaggagtgggtaat

SEQ ID NO: 27067 - DNA, 20 bp, synthetic construct
  misc_feature 1..20: note = chemically synthesized
  source 1..20: mol_type = other DNA
ggtttcaggagtgggtaatt

SEQ ID NO: 27068 - DNA, 20 bp, synthetic construct
  misc_feature 1..20: note = chemically synthesized
  source 1..20: mol_type = other DNA
gtttcaggagtgggtaatta

SEQ ID NO: 27069 - DNA, 20 bp, synthetic construct
  misc_feature 1..20: note = chemically synthesized
  source 1..20: mol_type = other DNA
tttcaggagtgggtaattag

SEQ ID NO: 27070 - DNA, 20 bp, synthetic construct
  misc_feature 1..20: note = chemically synthesized
  source 1..20: mol_type = other DNA
ttcaggagtgggtaattagg

SEQ ID NO: 27071 - DNA, 20 bp, synthetic construct
  misc_feature 1..20: note = chemically synthesized
  source 1..20: mol_type = other DNA
agtgggtaattagggggaca

SEQ ID NO: 27072 - DNA, 20 bp, synthetic construct
  misc_feature 1..20: note = chemically synthesized
  source 1..20: mol_type = other DNA
gtgggtaattagggggacat

SEQ ID NO: 27073 - DNA, 20 bp, synthetic construct
  misc_feature 1..20: note = chemically synthesized
  source 1..20: mol_type = other DNA
gggtaattagggggacatgg

SEQ ID NO: 27074 - DNA, 20 bp, synthetic construct
  misc_feature 1..20: note = chemically synthesized
  source 1..20: mol_type = other DNA
gtaattagggggacatggga

SEQ ID NO: 27075 - DNA, 20 bp, synthetic construct
  misc_feature 1..20: note = chemically synthesized
  source 1..20: mol_type = other DNA
aattagggggacatgggaga

SEQ ID NO: 27076 - DNA, 20 bp, synthetic construct
  misc_feature 1..20: note = chemically synthesized
  source 1..20: mol_type = other DNA
attagggggacatgggagag

SEQ ID NO: 27077 - DNA, 20 bp, synthetic construct
  misc_feature 1..20: note = chemically synthesized
  source 1..20: mol_type = other DNA
tagggggacatgggagagag

SEQ ID NO: 27078 - DNA, 20 bp, synthetic construct
  misc_feature 1..20: note = chemically synthesized
  source 1..20: mol_type = other DNA
agggggacatgggagagagg

SEQ ID NO: 27079 - DNA, 20 bp, synthetic construct
  misc_feature 1..20: note = chemically synthesized
  source 1..20: mol_type = other DNA
gggggacatgggagagagga

SEQ ID NO: 27080 - DNA, 20 bp, synthetic construct
  misc_feature 1..20: note = chemically synthesized
  source 1..20: mol_type = other DNA
gggacatgggagagaggagg

SEQ ID NO: 27081 - DNA, 20 bp, synthetic construct
  misc_feature 1..20: note = chemically synthesized
  source 1..20: mol_type = other DNA
ggagagaggagggagaaaat

SEQ ID NO: 27082 - DNA, 20 bp, synthetic construct
  misc_feature 1..20: note = chemically synthesized
  source 1..20: mol_type = other DNA
gagagaggagggagaaaatg

SEQ ID NO: 27083 - DNA, 20 bp, synthetic construct
  misc_feature 1..20: note = chemically synthesized
  source 1..20: mol_type = other DNA
agagaggagggagaaaatga

SEQ ID NO: 27084 - DNA, 20 bp, synthetic construct
  misc_feature 1..20: note = chemically synthesized
  source 1..20: mol_type = other DNA
agggagaaaatgagggaaaa

SEQ ID NO: 27085 - DNA, 20 bp, synthetic construct
  misc_feature 1..20: note = chemically synthesized
  source 1..20: mol_type = other DNA
gggagaaaatgagggaaaat

SEQ ID NO: 27086 - DNA, 20 bp, synthetic construct
  misc_feature 1..20: note = chemically synthesized
  source 1..20: mol_type = other DNA
tgagggaaaatgggaatgca

SEQ ID NO: 27087 - DNA, 20 bp, synthetic construct
  misc_feature 1..20: note = chemically synthesized
  source 1..20: mol_type = other DNA
gagggaaaatgggaatgcat

SEQ ID NO: 27088 - DNA, 20 bp, synthetic construct
  misc_feature 1..20: note = chemically synthesized
  source 1..20: mol_type = other DNA
ggaatgcataggtatcacaa

SEQ ID NO: 27089 - DNA, 20 bp, synthetic construct
  misc_feature 1..20: note = chemically synthesized
  source 1..20: mol_type = other DNA
atgcataggtatcacaaaag

SEQ ID NO: 27090 - DNA, 20 bp, synthetic construct
  misc_feature 1..20: note = chemically synthesized
  source 1..20: mol_type = other DNA
ataggtatcacaaaagcagt

SEQ ID NO: 27091 - DNA, 20 bp, synthetic construct
  misc_feature 1..20: note = chemically synthesized
  source 1..20: mol_type = other DNA
acaaaagcagtgagcccaaa

SEQ ID NO: 27092 - DNA, 20 bp, synthetic construct
  misc_feature 1..20: note = chemically synthesized
  source 1..20: mol_type = other DNA
gcagtgagcccaaaaagaca

SEQ ID NO: 27093 - DNA, 20 bp, synthetic construct
  misc_feature 1..20: note = chemically synthesized
  source 1..20: mol_type = other DNA
agcccaaaaagacatggtct

SEQ ID NO: 27094 - DNA, 20 bp, synthetic construct
  misc_feature 1..20: note = chemically synthesized
  source 1..20: mol_type = other DNA
acatggtctcagttacaatt

SEQ ID NO: 27095 - DNA, 20 bp, synthetic construct
  misc_feature 1..20: note = chemically synthesized
  source 1..20: mol_type = other DNA
catggtctcagttacaatta

SEQ ID NO: 27096 - DNA, 20 bp, synthetic construct
  misc_feature 1..20: note = chemically synthesized
  source 1..20: mol_type = other DNA
cccaaatgtttgaatgtcct

SEQ ID NO: 27097 - DNA, 20 bp, synthetic construct
  misc_feature 1..20: note = chemically synthesized
  source 1..20: mol_type = other DNA
tttgaatgtccttagccaaa

SEQ ID NO: 27098 - DNA, 20 bp, synthetic construct
  misc_feature 1..20: note = chemically synthesized
  source 1..20: mol_type = other DNA
ttccccacattccctgcact

SEQ ID NO: 27099 - DNA, 20 bp, synthetic construct
  misc_feature 1..20: note = chemically synthesized
  source 1..20: mol_type = other DNA
attccctgcactaagcctaa

SEQ ID NO: 27100 - DNA, 20 bp, synthetic construct
  misc_feature 1..20: note = chemically synthesized
  source 1..20: mol_type = other DNA
ttccctgcactaagcctaat

SEQ ID NO: 27101 - DNA, 20 bp, synthetic construct
  misc_feature 1..20: note = chemically synthesized
  source 1..20: mol_type = other DNA
gtttctttgtttgttgtttt

SEQ ID NO: 27102 - DNA, 20 bp, synthetic construct
  misc_feature 1..20: note = chemically synthesized
  source 1..20: mol_type = other DNA
tgtttgttgtttttagaaat

SEQ ID NO: 27103 - DNA, 20 bp, synthetic construct
  misc_feature 1..20: note = chemically synthesized
  source 1..20: mol_type = other DNA
gtttgttgtttttagaaatg

SEQ ID NO: 27104 - DNA, 20 bp, synthetic construct
  misc_feature 1..20: note = chemically synthesized
  source 1..20: mol_type = other DNA
ttgtttttagaaatgaggtc

SEQ ID NO: 27105 - DNA, 20 bp, synthetic construct
  misc_feature 1..20: note = chemically synthesized
  source 1..20: mol_type = other DNA
tgaggtctagctctgttacc

SEQ ID NO: 27106 - DNA, 20 bp, synthetic construct
  misc_feature 1..20: note = chemically synthesized
  source 1..20: mol_type = other DNA
gaggtctagctctgttaccc

SEQ ID NO: 27107 - DNA, 20 bp, synthetic construct
  misc_feature 1..20: note = chemically synthesized
  source 1..20: mol_type = other DNA
tagctctgttacccaggcta

SEQ ID NO: 27108 - DNA, 20 bp, synthetic construct
  misc_feature 1..20: note = chemically synthesized
  source 1..20: mol_type = other DNA
ctgttacccaggctacagtg

SEQ ID NO: 27109 - DNA, 20 bp, synthetic construct
  misc_feature 1..20: note = chemically synthesized
  source 1..20: mol_type = other DNA
ttacccaggctacagtgcag

SEQ ID NO: 27110 - DNA, 20 bp, synthetic construct
  misc_feature 1..20: note = chemically synthesized
  source 1..20: mol_type = other DNA
acagtgcagtggtgtaatca

SEQ ID NO: 27111 - DNA, 20 bp, synthetic construct
  misc_feature 1..20: note = chemically synthesized
  source 1..20: mol_type = other DNA
agctcactgtaaactcaaac

SEQ ID NO: 27112 - DNA, 20 bp, synthetic construct
  misc_feature 1..20: note = chemically synthesized
  source 1..20: mol_type = other DNA
tgtaaactcaaaccggattc

SEQ ID NO: 27113 - DNA, 20 bp, synthetic construct
  misc_feature 1..20: note = chemically synthesized
  source 1..20: mol_type = other DNA
tcctcccaccttattcttcc

SEQ ID NO: 27114 - DNA, 20 bp, synthetic construct
  misc_feature 1..20: note = chemically synthesized
  source 1..20: mol_type = other DNA
accttattcttccaagttgc

SEQ ID NO: 27115 - DNA, 20 bp, synthetic construct
  misc_feature 1..20: note = chemically synthesized
  source 1..20: mol_type = other DNA
ccttattcttccaagttgcc

SEQ ID NO: 27116 - DNA, 20 bp, synthetic construct
  misc_feature 1..20: note = chemically synthesized
  source 1..20: mol_type = other DNA
ttccaagttgccaggattat

SEQ ID NO: 27117 - DNA, 20 bp, synthetic construct
  misc_feature 1..20: note = chemically synthesized
  source 1..20: mol_type = other DNA
taagtgtgaaccaccatata

SEQ ID NO: 27118 - DNA, 20 bp, synthetic construct
  misc_feature 1..20: note = chemically synthesized
  source 1..20: mol_type = other DNA
gtgtgaaccaccatatacag

SEQ ID NO: 27119 - DNA, 20 bp, synthetic construct
  misc_feature 1..20: note = chemically synthesized
  source 1..20: mol_type = other DNA
aaccaccatatacagcagtc

SEQ ID NO: 27120 - DNA, 20 bp, synthetic construct
  misc_feature 1..20: note = chemically synthesized
  source 1..20: mol_type = other DNA
accaccatatacagcagtct

SEQ ID NO: 27121 - DNA, 20 bp, synthetic construct
  misc_feature 1..20: note = chemically synthesized
  source 1..20: mol_type = other DNA
atatacagcagtctgggcct

SEQ ID NO: 27122 - DNA, 20 bp, synthetic construct
  misc_feature 1..20: note = chemically synthesized
  source 1..20: mol_type = other DNA
tgggccttagatttttcact

SEQ ID NO: 27123 - DNA, 20 bp, synthetic construct
  misc_feature 1..20: note = chemically synthesized
  source 1..20: mol_type = other DNA
gatttttcacttggaaaatg

SEQ ID NO: 27124 - DNA, 20 bp, synthetic construct
  misc_feature 1..20: note = chemically synthesized
  source 1..20: mol_type = other DNA
tcacttggaaaatgaagtct

SEQ ID NO: 27125 - DNA, 20 bp, synthetic construct
  misc_feature 1..20: note = chemically synthesized
  source 1..20: mol_type = other DNA
gaaaatgaagtcttagaaac

SEQ ID NO: 27126 - DNA, 20 bp, synthetic construct
  misc_feature 1..20: note = chemically synthesized
  source 1..20: mol_type = other DNA
aaaatgaagtcttagaaacc

SEQ ID NO: 27127 - DNA, 20 bp, synthetic construct
  misc_feature 1..20: note = chemically synthesized
  source 1..20: mol_type = other DNA
aaatgaagtcttagaaacca

SEQ ID NO: 27128 - DNA, 20 bp, synthetic construct
  misc_feature 1..20: note = chemically synthesized
  source 1..20: mol_type = other DNA
cttagaaaccagggttctca

SEQ ID NO: 27129 - DNA, 20 bp, synthetic construct
  misc_feature 1..20: note = chemically synthesized
  source 1..20: mol_type = other DNA
agaatctcttctgatattct

SEQ ID NO: 27130 - DNA, 20 bp, synthetic construct
  misc_feature 1..20: note = chemically synthesized
  source 1..20: mol_type = other DNA
aatctcttctgatattctca

SEQ ID NO: 27131 - DNA, 20 bp, synthetic construct
  misc_feature 1..20: note = chemically synthesized
  source 1..20: mol_type = other DNA
atattctcagagtctatgca

SEQ ID NO: 27132 - DNA, 20 bp, synthetic construct
  misc_feature 1..20: note = chemically synthesized
  source 1..20: mol_type = other DNA
tcagagtctatgcacagaac

SEQ ID NO: 27133 - DNA, 20 bp, synthetic construct
  misc_feature 1..20: note = chemically synthesized
  source 1..20: mol_type = other DNA
agagtctatgcacagaacca

SEQ ID NO: 27134 - DNA, 20 bp, synthetic construct
  misc_feature 1..20: note = chemically synthesized
  source 1..20: mol_type = other DNA
tctatgcacagaaccagagc

SEQ ID NO: 27135 - DNA, 20 bp, synthetic construct
  misc_feature 1..20: note = chemically synthesized
  source 1..20: mol_type = other DNA
tatgcacagaaccagagcca

SEQ ID NO: 27136 - DNA, 20 bp, synthetic construct
  misc_feature 1..20: note = chemically synthesized
  source 1..20: mol_type = other DNA
cacagaaccagagccagaga

SEQ ID NO: 27137 - DNA, 20 bp, synthetic construct
  misc_feature 1..20: note = chemically synthesized
  source 1..20: mol_type = other DNA
aaccagagccagagaaagaa

SEQ ID NO: 27138 - DNA, 20 bp, synthetic construct
  misc_feature 1..20: note = chemically synthesized
  source 1..20: mol_type = other DNA
gccagagaaagaacagaaaa

SEQ ID NO: 27139 - DNA, 20 bp, synthetic construct
  misc_feature 1..20: note = chemically synthesized
  source 1..20: mol_type = other DNA
ccagagaaagaacagaaaac

SEQ ID NO: 27140 - DNA, 20 bp, synthetic construct
  misc_feature 1..20: note = chemically synthesized
  source 1..20: mol_type = other DNA
aaaacaggaccttctcttgc

SEQ ID NO: 27141 - DNA, 20 bp, synthetic construct
  misc_feature 1..20: note = chemically synthesized
  source 1..20: mol_type = other DNA
aggaccttctcttgctggaa

SEQ ID NO: 27142 - DNA, 20 bp, synthetic construct
  misc_feature 1..20: note = chemically synthesized
  source 1..20: mol_type = other DNA
gaccttctcttgctggaaaa

SEQ ID NO: 27143 - DNA, 20 bp, synthetic construct
  misc_feature 1..20: note = chemically synthesized
  source 1..20: mol_type = other DNA
accttctcttgctggaaaag

SEQ ID NO: 27144 - DNA, 20 bp, synthetic construct
  misc_feature 1..20: note = chemically synthesized
  source 1..20: mol_type = other DNA
tctcttgctggaaaagaggc

SEQ ID NO: 27145 - DNA, 20 bp, synthetic construct
  misc_feature 1..20: note = chemically synthesized
  source 1..20: mol_type = other DNA
aaaagaggcgagctcatctg

SEQ ID NO: 27146 - DNA, 20 bp, synthetic construct
  misc_feature 1..20: note = chemically synthesized
  source 1..20: mol_type = other DNA
gctcatctgcagtattctgt

SEQ ID NO: 27147 - DNA, 20 bp, synthetic construct
  misc_feature 1..20: note = chemically synthesized
  source 1..20: mol_type = other DNA
ctcatctgcagtattctgtt

SEQ ID NO: 27148 - DNA, 20 bp, synthetic construct
  misc_feature 1..20: note = chemically synthesized
  source 1..20: mol_type = other DNA
atctgcagtattctgttagg

SEQ ID NO: 27149 - DNA, 20 bp, synthetic construct
  misc_feature 1..20: note = chemically synthesized
  source 1..20: mol_type = other DNA
tctgcagtattctgttagga

SEQ ID NO: 27150 - DNA, 20 bp, synthetic construct
  misc_feature 1..20: note = chemically synthesized
  source 1..20: mol_type = other DNA
cagtattctgttaggaaggc

SEQ ID NO: 27151 - DNA, 20 bp, synthetic construct
  misc_feature 1..20: note = chemically synthesized
  source 1..20: mol_type = other DNA
agtattctgttaggaaggcc

SEQ ID NO: 27152 - DNA, 20 bp, synthetic construct
  misc_feature 1..20: note = chemically synthesized
  source 1..20: mol_type = other DNA
tattctgttaggaaggccag

SEQ ID NO: 27153 - DNA, 20 bp, synthetic construct
  misc_feature 1..20: note = chemically synthesized
  source 1..20: mol_type = other DNA
attctgttaggaaggccagg

SEQ ID NO: 27154 - DNA, 20 bp, synthetic construct
  misc_feature 1..20: note = chemically synthesized
  source 1..20: mol_type = other DNA
ctgttaggaaggccaggagg

SEQ ID NO: 27155 - DNA, 20 bp, synthetic construct
  misc_feature 1..20: note = chemically synthesized
  source 1..20: mol_type = other DNA
tgttaggaaggccaggaggc

SEQ ID NO: 27156 - DNA, 20 bp, synthetic construct
  misc_feature 1..20: note = chemically synthesized
  source 1..20: mol_type = other DNA
gttaggaaggccaggaggca

SEQ ID NO: 27157 - DNA, 20 bp, synthetic construct
  misc_feature 1..20: note = chemically synthesized
  source 1..20: mol_type = other DNA
ggctgcctcactcccctgat

SEQ ID NO: 27158 - DNA, 20 bp, synthetic construct
  misc_feature 1..20: note = chemically synthesized
  source 1..20: mol_type = other DNA
tcccctgatgagtgcctgca

SEQ ID NO: 27159 - DNA, 20 bp, synthetic construct
  misc_feature 1..20: note = chemically synthesized
  source 1..20: mol_type = other DNA
ctgatgagtgcctgcatggc

SEQ ID NO: 27160 - DNA, 20 bp, synthetic construct
  misc_feature 1..20: note = chemically synthesized
  source 1..20: mol_type = other DNA
tgatgagtgcctgcatggcc

SEQ ID NO: 27161 - DNA, 20 bp, synthetic construct
  misc_feature 1..20: note = chemically synthesized
  source 1..20: mol_type = other DNA
gagtgcctgcatggccaggc

SEQ ID NO: 27162 - DNA, 20 bp, synthetic construct
  misc_feature 1..20: note = chemically synthesized
  source 1..20: mol_type = other DNA
tggccaggccagcccctccc

SEQ ID NO: 27163 - DNA, 20 bp, synthetic construct
  misc_feature 1..20: note = chemically synthesized
  source 1..20: mol_type = other DNA
gcccctccctggatcatgtc

SEQ ID NO: 27164 - DNA, 20 bp, synthetic construct
  misc_feature 1..20: note = chemically synthesized
  source 1..20: mol_type = other DNA
cctccctggatcatgtctag

SEQ ID NO: 27165 - DNA, 20 bp, synthetic construct
  misc_feature 1..20: note = chemically synthesized
  source 1..20: mol_type = other DNA
cctggatcatgtctagaagt

SEQ ID NO: 27166 - DNA, 20 bp, synthetic construct
  misc_feature 1..20: note = chemically synthesized
  source 1..20: mol_type = other DNA
ctggatcatgtctagaagtc

SEQ ID NO: 27167 - DNA, 20 bp, synthetic construct
  misc_feature 1..20: note = chemically synthesized
  source 1..20: mol_type = other DNA
atcatgtctagaagtcagga

SEQ ID NO: 27168 - DNA, 20 bp, synthetic construct
  misc_feature 1..20: note = chemically synthesized
  source 1..20: mol_type = other DNA
atgtctagaagtcaggatgg

SEQ ID NO: 27169 - DNA, 20 bp, synthetic construct
  misc_feature 1..20: note = chemically synthesized
  source 1..20: mol_type = other DNA
tctagaagtcaggatggcag

SEQ ID NO: 27170 - DNA, 20 bp, synthetic construct
  misc_feature 1..20: note = chemically synthesized
  source 1..20: mol_type = other DNA
tcaggatggcagaagccctc

SEQ ID NO: 27171 - DNA, 20 bp, synthetic construct
  misc_feature 1..20: note = chemically synthesized
  source 1..20: mol_type = other DNA
tctctatactctttcctgcc

SEQ ID NO: 27172 - DNA, 20 bp, synthetic construct
  misc_feature 1..20: note = chemically synthesized
  source 1..20: mol_type = other DNA
ctctttcctgccgagccatc

SEQ ID NO: 27173 - DNA, 20 bp, synthetic construct
  misc_feature 1..20: note = chemically synthesized
  source 1..20: mol_type = other DNA
caccctctccttactctcat

SEQ ID NO: 27174 - DNA, 20 bp, synthetic construct
  misc_feature 1..20: note = chemically synthesized
  source 1..20: mol_type = other DNA
ccttactctcatcagaaaaa

SEQ ID NO: 27175 - DNA, 20 bp, synthetic construct
  misc_feature 1..20: note = chemically synthesized
  source 1..20: mol_type = other DNA
attaaatgcattttatatgc

SEQ ID NO: 27176 - DNA, 20 bp, synthetic construct
  misc_feature 1..20: note = chemically synthesized
  source 1..20: mol_type = other DNA
atgcattttatatgctggtc

SEQ ID NO: 27177 - DNA, 20 bp, synthetic construct
  misc_feature 1..20: note = chemically synthesized
  source 1..20: mol_type = other DNA
atatgctggtccagttaaca

SEQ ID NO: 27178 - DNA, 20 bp, synthetic construct
  misc_feature 1..20: note = chemically synthesized
  source 1..20: mol_type = other DNA
ctggtccagttaacatagaa

SEQ ID NO: 27179 - DNA, 20 bp, synthetic construct
  misc_feature 1..20: note = chemically synthesized
  source 1..20: mol_type = other DNA
acaacaccttgtaacttccc

SEQ ID NO: 27180 - DNA, 20 bp, synthetic construct
  misc_feature 1..20: note = chemically synthesized
  source 1..20: mol_type = other DNA
cttgtaacttccccagtatc

SEQ ID NO: 27181 - DNA, 20 bp, synthetic construct
  misc_feature 1..20: note = chemically synthesized
  source 1..20: mol_type = other DNA
ttgtaacttccccagtatcc

SEQ ID NO: 27182 - DNA, 20 bp, synthetic construct
  misc_feature 1..20: note = chemically synthesized
  source 1..20: mol_type = other DNA
cttccccagtatccaggata

SEQ ID NO: 27183 - DNA, 20 bp, synthetic construct
  misc_feature 1..20: note = chemically synthesized
  source 1..20: mol_type = other DNA
ctcctctatcctactaaaaa

SEQ ID NO: 27184 - DNA, 20 bp, synthetic construct
  misc_feature 1..20: note = chemically synthesized
  source 1..20: mol_type = other DNA
tcctctatcctactaaaaac

SEQ ID NO: 27185 - DNA, 20 bp, synthetic construct
  misc_feature 1..20: note = chemically synthesized
  source 1..20: mol_type = other DNA
actaaaaacaggcatgttta

SEQ ID NO: 27186 - DNA, 20 bp, synthetic construct
  misc_feature 1..20: note = chemically synthesized
  source 1..20: mol_type = other DNA
aaacaggcatgtttacagat

SEQ ID NO: 27187 - DNA, 20 bp, synthetic construct
  misc_feature 1..20: note = chemically synthesized
  source 1..20: mol_type = other DNA
acagatgagtttgaccactg

SEQ ID NO: 27188 - DNA, 20 bp, synthetic construct
  misc_feature 1..20: note = chemically synthesized
  source 1..20: mol_type = other DNA
accactgtggaaatgttctc

SEQ ID NO: 27189 - DNA, 20 bp, synthetic construct
  misc_feature 1..20: note = chemically synthesized
  source 1..20: mol_type = other DNA
ccactgtggaaatgttctct

SEQ ID NO: 27190 - DNA, 20 bp, synthetic construct
  misc_feature 1..20: note = chemically synthesized
  source 1..20: mol_type = other DNA
cactgtggaaatgttctcta

SEQ ID NO: 27191 - DNA, 20 bp, synthetic construct
  misc_feature 1..20: note = chemically synthesized
  source 1..20: mol_type = other DNA
actgtggaaatgttctctag

SEQ ID NO: 27192 - DNA, 20 bp, synthetic construct
  misc_feature 1..20: note = chemically synthesized
  source 1..20: mol_type = other DNA
gggttcaaaaatgaataatc

SEQ ID NO: 27193 - DNA, 20 bp, synthetic construct
  misc_feature 1..20: note = chemically synthesized
  source 1..20: mol_type = other DNA
aaaaatgaataatctggttc

SEQ ID NO: 27194 - DNA, 20 bp, synthetic construct
  misc_feature 1..20: note = chemically synthesized
  source 1..20: mol_type = other DNA
ctggttcaagtccttgtgtt

SEQ ID NO: 27195 - DNA, 20 bp, synthetic construct
  misc_feature 1..20: note = chemically synthesized
  source 1..20: mol_type = other DNA
tggttcaagtccttgtgttt

SEQ ID NO: 27196 - DNA, 20 bp, synthetic construct
  misc_feature 1..20: note = chemically synthesized
  source 1..20: mol_type = other DNA
caagtccttgtgtttaggtg

SEQ ID NO: 27197 - DNA, 20 bp, synthetic construct
  misc_feature 1..20: note = chemically synthesized
  source 1..20: mol_type = other DNA
ttgcatattctcctatttac

SEQ ID NO: 27198 - DNA, 20 bp, synthetic construct
  misc_feature 1..20: note = chemically synthesized
  source 1..20: mol_type = other DNA
attctcctatttacaagaaa

SEQ ID NO: 27199 - DNA, 20 bp, synthetic construct
  misc_feature 1..20: note = chemically synthesized
  source 1..20: mol_type = other DNA
aacagtatcctccaccaatg

SEQ ID NO: 27200 - DNA, 20 bp, synthetic construct
  misc_feature 1..20: note = chemically synthesized
  source 1..20: mol_type = other DNA
ctaatattaaattcaaacaa

SEQ ID NO: 27201 - DNA, 20 bp, synthetic construct
  misc_feature 1..20: note = chemically synthesized
  source 1..20: mol_type = other DNA
aattcaaacaaaagaatatt

SEQ ID NO: 27202 - DNA, 20 bp, synthetic construct
  misc_feature 1..20: note = chemically synthesized
  source 1..20: mol_type = other DNA
aacaaaagaatatttagaca

SEQ ID NO: 27203 - DNA, 20 bp, synthetic construct
  misc_feature 1..20: note = chemically synthesized
  source 1..20: mol_type = other DNA
acaaaagaatatttagacac

SEQ ID NO: 27204 - DNA, 20 bp, synthetic construct
  misc_feature 1..20: note = chemically synthesized
  source 1..20: mol_type = other DNA
aagaatatttagacacaggt

SEQ ID NO: 27205 - DNA, 20 bp, synthetic construct
  misc_feature 1..20: note = chemically synthesized
  source 1..20: mol_type = other DNA
agaatatttagacacaggtg

SEQ ID NO: 27206 - DNA, 20 bp, synthetic construct
  misc_feature 1..20: note = chemically synthesized
  source 1..20: mol_type = other DNA
atatttagacacaggtgagg

SEQ ID NO: 27207 - DNA, 20 bp, synthetic construct
  misc_feature 1..20: note = chemically synthesized
  source 1..20: mol_type = other DNA
atttagacacaggtgaggta

SEQ ID NO: 27208 - DNA, 20 bp, synthetic construct
  misc_feature 1..20: note = chemically synthesized
  source 1..20: mol_type = other DNA
ttagacacaggtgaggtaga

SEQ ID NO: 27209 - DNA, 20 bp, synthetic construct
  misc_feature 1..20: note = chemically synthesized
  source 1..20: mol_type = other DNA
gtatactgaaaatctctttt

SEQ ID NO: 27210 - DNA, 20 bp, synthetic construct
  misc_feature 1..20: note = chemically synthesized
  source 1..20: mol_type = other DNA
tatactgaaaatctcttttc

SEQ ID NO: 27211 - DNA, 20 bp, synthetic construct
  misc_feature 1..20: note = chemically synthesized
  source 1..20: mol_type = other DNA
ggaattttctcctgtgatct

SEQ ID NO: 27212 - DNA, 20 bp, synthetic construct
  misc_feature 1..20: note = chemically synthesized
  source 1..20: mol_type = other DNA
tattttaattatgttgtaat

SEQ ID NO: 27213 - DNA, 20 bp, synthetic construct
  misc_feature 1..20: note = chemically synthesized
  source 1..20: mol_type = other DNA
tagatgtaactgactgctct

SEQ ID NO: 27214 - DNA, 20 bp, synthetic construct
  misc_feature 1..20: note = chemically synthesized
  source 1..20: mol_type = other DNA
atgtaactgactgctctgag

SEQ ID NO: 27215 - DNA, 20 bp, synthetic construct
  misc_feature 1..20: note = chemically synthesized
  source 1..20: mol_type = other DNA
gagtggactcctccattgct

SEQ ID NO: 27216 - DNA, 20 bp, synthetic construct
  misc_feature 1..20: note = chemically synthesized
  source 1..20: mol_type = other DNA
tggactcctccattgcttag

SEQ ID NO: 27217 - DNA, 20 bp, synthetic construct
  misc_feature 1..20: note = chemically synthesized
  source 1..20: mol_type = other DNA
tgactgttgctctcctatca

SEQ ID NO: 27218 - DNA, 20 bp, synthetic construct
  misc_feature 1..20: note = chemically synthesized
  source 1..20: mol_type = other DNA
tggataattatctctcttgc

SEQ ID NO: 27219 - DNA, 20 bp, synthetic construct
  misc_feature 1..20: note = chemically synthesized
  source 1..20: mol_type = other DNA
ggataattatctctcttgct

SEQ ID NO: 27220 - DNA, 20 bp, synthetic construct
  misc_feature 1..20: note = chemically synthesized
  source 1..20: mol_type = other DNA
ataattatctctcttgctag

SEQ ID NO: 27221 - DNA, 20 bp, synthetic construct
  misc_feature 1..20: note = chemically synthesized
  source 1..20: mol_type = other DNA
ttgctaggagaaatccccta

SEQ ID NO: 27222 - DNA, 20 bp, synthetic construct
  misc_feature 1..20: note = chemically synthesized
  source 1..20: mol_type = other DNA
tcccctaaagctttcttccc

SEQ ID NO: 27223 - DNA, 20 bp, synthetic construct
  misc_feature 1..20: note = chemically synthesized
  source 1..20: mol_type = other DNA
ccctaaagctttcttcccaa

SEQ ID NO: 27224 - DNA, 20 bp, synthetic construct
  misc_feature 1..20: note = chemically synthesized
  source 1..20: mol_type = other DNA
cctaaagctttcttcccaag

SEQ ID NO: 27225 - DNA, 20 bp, synthetic construct
  misc_feature 1..20: note = chemically synthesized
  source 1..20: mol_type = other DNA
aaagctttcttcccaagagg

SEQ ID NO: 27226 - DNA, 20 bp, synthetic construct
  misc_feature 1..20: note = chemically synthesized
  source 1..20: mol_type = other DNA
caagaggaagtatactttcc

SEQ ID NO: 27227 - DNA, 20 bp, synthetic construct
  misc_feature 1..20: note = chemically synthesized
  source 1..20: mol_type = other DNA
agaggaagtatactttccaa

SEQ ID NO: 27228 - DNA, 20 bp, synthetic construct
  misc_feature 1..20: note = chemically synthesized
  source 1..20: mol_type = other DNA
ctttccaagagaaataatcc

SEQ ID NO: 27229 - DNA, 20 bp, synthetic construct
  misc_feature 1..20: note = chemically synthesized
  source 1..20: mol_type = other DNA
gccctgtcattgtctctgta

SEQ ID NO: 27230 - DNA, 20 bp, synthetic construct
  misc_feature 1..20: note = chemically synthesized
  source 1..20: mol_type = other DNA
tatagacatcttgtttctac

SEQ ID NO: 27231 - DNA, 20 bp, synthetic construct
  misc_feature 1..20: note = chemically synthesized
  source 1..20: mol_type = other DNA
ctgtccatctcatcactctg

SEQ ID NO: 27232 - DNA, 20 bp, synthetic construct
  misc_feature 1..20: note = chemically synthesized
  source 1..20: mol_type = other DNA
ccatctcatcactctgaagt

SEQ ID NO: 27233 - DNA, 20 bp, synthetic construct
  misc_feature 1..20: note = chemically synthesized
  source 1..20: mol_type = other DNA
cactctgaagttggtgaaca

SEQ ID NO: 27234 - DNA, 20 bp, synthetic construct
  misc_feature 1..20: note = chemically synthesized
  source 1..20: mol_type = other DNA
ctctgaagttggtgaacaca

SEQ ID NO: 27235 - DNA, 20 bp, synthetic construct
  misc_feature 1..20: note = chemically synthesized
  source 1..20: mol_type = other DNA
ggtgaacacagagctgacaa

SEQ ID NO: 27236 - DNA, 20 bp, synthetic construct
  misc_feature 1..20: note = chemically synthesized
  source 1..20: mol_type = other DNA
cagagctgacaacagaaccc

SEQ ID NO: 27237 - DNA, 20 bp, synthetic construct
  misc_feature 1..20: note = chemically synthesized
  source 1..20: mol_type = other DNA
agagctgacaacagaacccc

SEQ ID NO: 27238 - DNA, 20 bp, synthetic construct
  misc_feature 1..20: note = chemically synthesized
  source 1..20: mol_type = other DNA
acaacagaaccccaggcaca

SEQ ID NO: 27239 - DNA, 20 bp, synthetic construct
  misc_feature 1..20: note = chemically synthesized
  source 1..20: mol_type = other DNA
gaaccccaggcacaaagaat

SEQ ID NO: 27240 - DNA, 20 bp, synthetic construct
  misc_feature 1..20: note = chemically synthesized
  source 1..20: mol_type = other DNA
aaccccaggcacaaagaatc

SEQ ID NO: 27241 - DNA, 20 bp, synthetic construct
  misc_feature 1..20: note = chemically synthesized
  source 1..20: mol_type = other DNA
caggcacaaagaatcaggat

SEQ ID NO: 27242 - DNA, 20 bp, synthetic construct
  misc_feature 1..20: note = chemically synthesized
  source 1..20: mol_type = other DNA
ggcacaaagaatcaggataa

SEQ ID NO: 27243 - DNA, 20 bp, synthetic construct
  misc_feature 1..20: note = chemically synthesized
  source 1..20: mol_type = other DNA
gcacaaagaatcaggataag

SEQ ID NO: 27244 - DNA, 20 bp, synthetic construct
  misc_feature 1..20: note = chemically synthesized
  source 1..20: mol_type = other DNA
aaagaatcaggataagaggt

SEQ ID NO: 27245 - DNA, 20 bp, synthetic construct
  misc_feature 1..20: note = chemically synthesized
  source 1..20: mol_type = other DNA
actttatttattcacccatt

SEQ ID NO: 27246 - DNA, 20 bp, synthetic construct
  misc_feature 1..20: note = chemically synthesized
  source 1..20: mol_type = other DNA
catgcaaaaaaatatatata

SEQ ID NO: 27247 - DNA, 20 bp, synthetic construct
  misc_feature 1..20: note = chemically synthesized
  source 1..20: mol_type = other DNA
gcaaaaaaatatatatatag

SEQ ID NO: 27248 - DNA, 20 bp, synthetic construct
  misc_feature 1..20: note = chemically synthesized
  source 1..20: mol_type = other DNA
tagtggtacctaccacatct

SEQ ID NO: 27249 - DNA, 20 bp, synthetic construct
  misc_feature 1..20: note = chemically synthesized
  source 1..20: mol_type = other DNA
taccacatcttagacactgt

SEQ ID NO: 27250 - DNA, 20 bp, synthetic construct
  misc_feature 1..20: note = chemically synthesized
  source 1..20: mol_type = other DNA
accacatcttagacactgtc

SEQ ID NO: 27251 - DNA, 20 bp, synthetic construct
  misc_feature 1..20: note = chemically synthesized
  source 1..20: mol_type = other DNA
tcttagacactgtcaggctc

SEQ ID NO: 27252 - DNA, 20 bp, synthetic construct
  misc_feature 1..20: note = chemically synthesized
  source 1..20: mol_type = other DNA
cttagacactgtcaggctcc

SEQ ID NO: 27253 - DNA, 20 bp, synthetic construct
  misc_feature 1..20: note = chemically synthesized
  source 1..20: mol_type = other DNA
ttagacactgtcaggctcca

SEQ ID NO: 27254 - DNA, 20 bp, synthetic construct
  misc_feature 1..20: note = chemically synthesized
  source 1..20: mol_type = other DNA
tagacactgtcaggctccag

SEQ ID NO: 27255 - DNA, 20 bp, synthetic construct
  misc_feature 1..20: note = chemically synthesized
  source 1..20: mol_type = other DNA
tgtcaggctccaggggcctt

SEQ ID NO: 27256 - DNA, 20 bp, synthetic construct
  misc_feature 1..20: note = chemically synthesized
  source 1..20: mol_type = other DNA
tcaggctccaggggccttta

SEQ ID NO: 27257 - DNA, 20 bp, synthetic construct
  misc_feature 1..20: note = chemically synthesized
  source 1..20: mol_type = other DNA
caggggcctttagagaattc

SEQ ID NO: 27258 - DNA, 20 bp, synthetic construct
  misc_feature 1..20: note = chemically synthesized
  source 1..20: mol_type = other DNA
caacttaaaaaatgaattat

SEQ ID NO: 27259 - DNA, 20 bp, synthetic construct
  misc_feature 1..20: note = chemically synthesized
  source 1..20: mol_type = other DNA
aacttaaaaaatgaattatt

SEQ ID NO: 27260 - DNA, 20 bp, synthetic construct
  misc_feature 1..20: note = chemically synthesized
  source 1..20: mol_type = other DNA
taaaaaatgaattattaggt

SEQ ID NO: 27261 - DNA, 20 bp, synthetic construct
  misc_feature 1..20: note = chemically synthesized
  source 1..20: mol_type = other DNA
ttaggttggtgaaaaattaa

SEQ ID NO: 27262 - DNA, 20 bp, synthetic construct
  misc_feature 1..20: note = chemically synthesized
  source 1..20: mol_type = other DNA
ggttggtgaaaaattaatgg

SEQ ID NO: 27263 - DNA, 20 bp, synthetic construct
  misc_feature 1..20: note = chemically synthesized
  source 1..20: mol_type = other DNA
tgttctaaacatgtataata

SEQ ID NO: 27264 - DNA, 20 bp, synthetic construct
  misc_feature 1..20: note = chemically synthesized
  source 1..20: mol_type = other DNA
tataatatatatgttgtaca

SEQ ID NO: 27265 - DNA, 20 bp, synthetic construct
  misc_feature 1..20: note = chemically synthesized
  source 1..20: mol_type = other DNA
tgtttacatatataaatata

SEQ ID NO: 27266 - DNA, 20 bp, synthetic construct
  misc_feature 1..20: note = chemically synthesized
  source 1..20: mol_type = other DNA
ttatatataaaaaatctata

SEQ ID NO: 27267 - DNA, 20 bp, synthetic construct
  misc_feature 1..20: note = chemically synthesized
  source 1..20: mol_type = other DNA
aaaaatctataaagtatata

SEQ ID NO: 27268 - DNA, 20 bp, synthetic construct
  misc_feature 1..20: note = chemically synthesized
  source 1..20: mol_type = other DNA
actaaaatgtatattctata

SEQ ID NO: 27269 - DNA, 20 bp, synthetic construct
  misc_feature 1..20: note = chemically synthesized
  source 1..20: mol_type = other DNA
atattctataaagtatttat

SEQ ID NO: 27270 - DNA, 20 bp, synthetic construct
  misc_feature 1..20: note = chemically synthesized
  source 1..20: mol_type = other DNA
tatacatatgtgtacttata

SEQ ID NO: 27271 - DNA, 20 bp, synthetic construct
  misc_feature 1..20: note = chemically synthesized
  source 1..20: mol_type = other DNA
gtgtacttatatggatgtat

SEQ ID NO: 27272 - DNA, 20 bp, synthetic construct
  misc_feature 1..20: note = chemically synthesized
  source 1..20: mol_type = other DNA
tgttctatatatatatcaat

SEQ ID NO: 27273 - DNA, 20 bp, synthetic construct
  misc_feature 1..20: note = chemically synthesized
  source 1..20: mol_type = other DNA
tatataaatataaaaatata

SEQ ID NO: 27274 - DNA, 20 bp, synthetic construct
  misc_feature 1..20: note = chemically synthesized
  source 1..20: mol_type = other DNA
tgtgtgtatttacaccttaa

SEQ ID NO: 27275 - DNA, 20 bp, synthetic construct
  misc_feature 1..20: note = chemically synthesized
  source 1..20: mol_type = other DNA
tacaccttaatagtacatta

SEQ ID NO: 27276 - DNA, 20 bp, synthetic construct
  misc_feature 1..20: note = chemically synthesized
  source 1..20: mol_type = other DNA
acaccttaatagtacattac

SEQ ID NO: 27277 - DNA, 20 bp, synthetic construct
  misc_feature 1..20: note = chemically synthesized
  source 1..20: mol_type = other DNA
gtacattacaggtactacgt

SEQ ID NO: 27278 - DNA, 20 bp, synthetic construct
  misc_feature 1..20: note = chemically synthesized
  source 1..20: mol_type = other DNA
ttacaggtactacgtgagaa

SEQ ID NO: 27279 - DNA, 20 bp, synthetic construct
  misc_feature 1..20: note = chemically synthesized
  source 1..20: mol_type = other DNA
acaggtactacgtgagaaca

SEQ ID NO: 27280 - DNA, 20 bp, synthetic construct
  misc_feature 1..20: note = chemically synthesized
  source 1..20: mol_type = other DNA
gtactacgtgagaacagaga

SEQ ID NO: 27281 - DNA, 20 bp, synthetic construct
  misc_feature 1..20: note = chemically synthesized
  source 1..20: mol_type = other DNA
gaaagatgtacctaatgcta

SEQ ID NO: 27282 - DNA, 20 bp, synthetic construct
  misc_feature 1..20: note = chemically synthesized
  source 1..20: mol_type = other DNA
agatgtacctaatgctacag

SEQ ID NO: 27283 - DNA, 20 bp, synthetic construct
  misc_feature 1..20: note = chemically synthesized
  source 1..20: mol_type = other DNA
gatgtacctaatgctacaga

SEQ ID NO: 27284 - DNA, 20 bp, synthetic construct
  misc_feature 1..20: note = chemically synthesized
  source 1..20: mol_type = other DNA
gtacctaatgctacagaagg

SEQ ID NO: 27285 - DNA, 20 bp, synthetic construct
  misc_feature 1..20: note = chemically synthesized
  source 1..20: mol_type = other DNA
ctaatgctacagaaggaagt

SEQ ID NO: 27286 - DNA, 20 bp, synthetic construct
  misc_feature 1..20: note = chemically synthesized
  source 1..20: mol_type = other DNA
taatgctacagaaggaagtc

SEQ ID NO: 27287 - DNA, 20 bp, synthetic construct
  misc_feature 1..20: note = chemically synthesized
  source 1..20: mol_type = other DNA
atgctacagaaggaagtcag

SEQ ID NO: 27288 - DNA, 20 bp, synthetic construct
  misc_feature 1..20: note = chemically synthesized
  source 1..20: mol_type = other DNA
gctacagaaggaagtcagga

SEQ ID NO: 27289 - DNA, 20 bp, synthetic construct
  misc_feature 1..20: note = chemically synthesized
  source 1..20: mol_type = other DNA
ggaagtcaggagagatttga

SEQ ID NO: 27290 - DNA, 20 bp, synthetic construct
  misc_feature 1..20: note = chemically synthesized
  source 1..20: mol_type = other DNA
agtcaggagagatttgacag

SEQ ID NO: 27291 - DNA, 20 bp, synthetic construct
  misc_feature 1..20: note = chemically synthesized
  source 1..20: mol_type = other DNA
caggagagatttgacagaag

SEQ ID NO: 27292 - DNA, 20 bp, synthetic construct
  misc_feature 1..20: note = chemically synthesized
  source 1..20: mol_type = other DNA
gaagaagtgatatttgtact

SEQ ID NO: 27293 - DNA, 20 bp, synthetic construct
  misc_feature 1..20: note = chemically synthesized
  source 1..20: mol_type = other DNA
gatatttgtactaagtctta

SEQ ID NO: 27294 - DNA, 20 bp, synthetic construct
  misc_feature 1..20: note = chemically synthesized
  source 1..20: mol_type = other DNA
atatttgtactaagtcttaa

SEQ ID NO: 27295 - DNA, 20 bp, synthetic construct
  misc_feature 1..20: note = chemically synthesized
  source 1..20: mol_type = other DNA
ctaagtcttaaaggatccgc

SEQ ID NO: 27296 - DNA, 20 bp, synthetic construct
  misc_feature 1..20: note = chemically synthesized
  source 1..20: mol_type = other DNA
aaggatccgcaagtgtttac

SEQ ID NO: 27297 - DNA, 20 bp, synthetic construct
  misc_feature 1..20: note = chemically synthesized
  source 1..20: mol_type = other DNA
atccgcaagtgtttactggt

SEQ ID NO: 27298 - DNA, 20 bp, synthetic construct
  misc_feature 1..20: note = chemically synthesized
  source 1..20: mol_type = other DNA
gtgtttactggttggaaaaa

SEQ ID NO: 27299 - DNA, 20 bp, synthetic construct
  misc_feature 1..20: note = chemically synthesized
  source 1..20: mol_type = other DNA
tgtttactggttggaaaaac

SEQ ID NO: 27300 - DNA, 20 bp, synthetic construct
  misc_feature 1..20: note = chemically synthesized
  source 1..20: mol_type = other DNA
gtttactggttggaaaaaca

SEQ ID NO: 27301 - DNA, 20 bp, synthetic construct
  misc_feature 1..20: note = chemically synthesized
  source 1..20: mol_type = other DNA
tttactggttggaaaaacag

SEQ ID NO: 27302 - DNA, 20 bp, synthetic construct
  misc_feature 1..20: note = chemically synthesized
  source 1..20: mol_type = other DNA
actggttggaaaaacagggg

SEQ ID NO: 27303 - DNA, 20 bp, synthetic construct
  misc_feature 1..20: note = chemically synthesized
  source 1..20: mol_type = other DNA
aaacaggggtggtttttgcc

SEQ ID NO: 27304 - DNA, 20 bp, synthetic construct
  misc_feature 1..20: note = chemically synthesized
  source 1..20: mol_type = other DNA
aggggtggtttttgccaaga

SEQ ID NO: 27305 - DNA, 20 bp, synthetic construct
  misc_feature 1..20: note = chemically synthesized
  source 1..20: mol_type = other DNA
tgccaagaaagcaataaata

SEQ ID NO: 27306 - DNA, 20 bp, synthetic construct
  misc_feature 1..20: note = chemically synthesized
  source 1..20: mol_type = other DNA
caagaaagcaataaatatag

SEQ ID NO: 27307 - DNA, 20 bp, synthetic construct
  misc_feature 1..20: note = chemically synthesized
  source 1..20: mol_type = other DNA
aaatatagaagaataaaaac

SEQ ID NO: 27308 - DNA, 20 bp, synthetic construct
  misc_feature 1..20: note = chemically synthesized
  source 1..20: mol_type = other DNA
tagaagaataaaaacaagaa

SEQ ID NO: 27309 - DNA, 20 bp, synthetic construct
  misc_feature 1..20: note = chemically synthesized
  source 1..20: mol_type = other DNA
aaaaacaagaaaagtatgtg

SEQ ID NO: 27310 - DNA, 20 bp, synthetic construct
  misc_feature 1..20: note = chemically synthesized
  source 1..20: mol_type = other DNA
aaaacaagaaaagtatgtgt

SEQ ID NO: 27311 - DNA, 20 bp, synthetic construct
  misc_feature 1..20: note = chemically synthesized
  source 1..20: mol_type = other DNA
aaacaagaaaagtatgtgta

SEQ ID NO: 27312 - DNA, 20 bp, synthetic construct
  misc_feature 1..20: note = chemically synthesized
  source 1..20: mol_type = other DNA
aaagtatgtgtagggaattg

SEQ ID NO: 27313 - DNA, 20 bp, synthetic construct
  misc_feature 1..20: note = chemically synthesized
  source 1..20: mol_type = other DNA
aattgaagaaaaaaatgata

SEQ ID NO: 27314 - DNA, 20 bp, synthetic construct
  misc_feature 1..20: note = chemically synthesized
  source 1..20: mol_type = other DNA
attgaagaaaaaaatgatat

SEQ ID NO: 27315 - DNA, 20 bp, synthetic construct
  misc_feature 1..20: note = chemically synthesized
  source 1..20: mol_type = other DNA
aatgatatgggtgtgttgac

SEQ ID NO: 27316 - DNA, 20 bp, synthetic construct
  misc_feature 1..20: note = chemically synthesized
  source 1..20: mol_type = other DNA
atgatatgggtgtgttgact

SEQ ID NO: 27317 - DNA, 20 bp, synthetic construct
  misc_feature 1..20: note = chemically synthesized
  source 1..20: mol_type = other DNA
atgggtgtgttgactgggaa

SEQ ID NO: 27318 - DNA, 20 bp, synthetic construct
  misc_feature 1..20: note = chemically synthesized
  source 1..20: mol_type = other DNA
gtgtgttgactgggaaaaga

SEQ ID NO: 27319 - DNA, 20 bp, synthetic construct
  misc_feature 1..20: note = chemically synthesized
  source 1..20: mol_type = other DNA
tgtgttgactgggaaaagat

SEQ ID NO: 27320 - DNA, 20 bp, synthetic construct
  misc_feature 1..20: note = chemically synthesized
  source 1..20: mol_type = other DNA
tgactgggaaaagatgggtt

SEQ ID NO: 27321 - DNA, 20 bp, synthetic construct
  misc_feature 1..20: note = chemically synthesized
  source 1..20: mol_type = other DNA
tgggaaaagatgggtttgga

SEQ ID NO: 27322 - DNA, 20 bp, synthetic construct
  misc_feature 1..20: note = chemically synthesized
  source 1..20: mol_type = other DNA
gggaaaagatgggtttggaa

SEQ ID NO: 27323 - DNA, 20 bp, synthetic construct
  misc_feature 1..20: note = chemically synthesized
  source 1..20: mol_type = other DNA
gtttggaaaggtgccaaaac

SEQ ID NO: 27324 - DNA, 20 bp, synthetic construct
  misc_feature 1..20: note = chemically synthesized
  source 1..20: mol_type = other DNA
tggaaaggtgccaaaacaag

SEQ ID NO: 27325 - DNA, 20 bp, synthetic construct
  misc_feature 1..20: note = chemically synthesized
  source 1..20: mol_type = other DNA
ggaaaggtgccaaaacaaga

SEQ ID NO: 27326 - DNA, 20 bp, synthetic construct
  misc_feature 1..20: note = chemically synthesized
  source 1..20: mol_type = other DNA
ggtgccaaaacaagaaggac

SEQ ID NO: 27327 - DNA, 20 bp, synthetic construct
  misc_feature 1..20: note = chemically synthesized
  source 1..20: mol_type = other DNA
gtgccaaaacaagaaggacc

SEQ ID NO: 27328 - DNA, 20 bp, synthetic construct
  misc_feature 1..20: note = chemically synthesized
  source 1..20: mol_type = other DNA
aaacaagaaggaccgggcta

SEQ ID NO: 27329 - DNA, 20 bp, synthetic construct
  misc_feature 1..20: note = chemically synthesized
  source 1..20: mol_type = other DNA
aagaaggaccgggctaaaga

SEQ ID NO: 27330 - DNA, 20 bp, synthetic construct
  misc_feature 1..20: note = chemically synthesized
  source 1..20: mol_type = other DNA
ccgggctaaagatggtgtta

SEQ ID NO: 27331 - DNA, 20 bp, synthetic construct
  misc_feature 1..20: note = chemically synthesized
  source 1..20: mol_type = other DNA
cgggctaaagatggtgttac

SEQ ID NO: 27332 - DNA, 20 bp, synthetic construct
  misc_feature 1..20: note = chemically synthesized
  source 1..20: mol_type = other DNA
gggctaaagatggtgttaca

SEQ ID NO: 27333 - DNA, 20 bp, synthetic construct
  misc_feature 1..20: note = chemically synthesized
  source 1..20: mol_type = other DNA
gatggtgttacagggtgttt

SEQ ID NO: 27334 - DNA, 20 bp, synthetic construct
  misc_feature 1..20: note = chemically synthesized
  source 1..20: mol_type = other DNA
atggtgttacagggtgtttg

SEQ ID NO: 27335 - DNA, 20 bp, synthetic construct
  misc_feature 1..20: note = chemically synthesized
  source 1..20: mol_type = other DNA
tacagggtgtttgaggctac

SEQ ID NO: 27336 - DNA, 20 bp, synthetic construct
  misc_feature 1..20: note = chemically synthesized
  source 1..20: mol_type = other DNA
acagggtgtttgaggctacc

SEQ ID NO: 27337 - DNA, 20 bp, synthetic construct
  misc_feature 1..20: note = chemically synthesized
  source 1..20: mol_type = other DNA
cagggtgtttgaggctacca

SEQ ID NO: 27338 - DNA, 20 bp, synthetic construct
  misc_feature 1..20: note = chemically synthesized
  source 1..20: mol_type = other DNA
gaggctaccagggccatgca

SEQ ID NO: 27339 - DNA, 20 bp, synthetic construct
  misc_feature 1..20: note = chemically synthesized
  source 1..20: mol_type = other DNA
ggctaccagggccatgcata

SEQ ID NO: 27340 - DNA, 20 bp, synthetic construct
  misc_feature 1..20: note = chemically synthesized
  source 1..20: mol_type = other DNA
ctaccagggccatgcataga

SEQ ID NO: 27341 - DNA, 20 bp, synthetic construct
  misc_feature 1..20: note = chemically synthesized
  source 1..20: mol_type = other DNA
gggccatgcatagagagaca

SEQ ID NO: 27342 - DNA, 20 bp, synthetic construct
  misc_feature 1..20: note = chemically synthesized
  source 1..20: mol_type = other DNA
ggccatgcatagagagacaa

SEQ ID NO: 27343 - DNA, 20 bp, synthetic construct
  misc_feature 1..20: note = chemically synthesized
  source 1..20: mol_type = other DNA
tcctgattttcgctcactac

SEQ ID NO: 27344 - DNA, 20 bp, synthetic construct
  misc_feature 1..20: note = chemically synthesized
  source 1..20: mol_type = other DNA
cctgattttcgctcactacc

SEQ ID NO: 27345 - DNA, 20 bp, synthetic construct
  misc_feature 1..20: note = chemically synthesized
  source 1..20: mol_type = other DNA
tttcgctcactaccaggcct

SEQ ID NO: 27346 - DNA, 20 bp, synthetic construct
  misc_feature 1..20: note = chemically synthesized
  source 1..20: mol_type = other DNA
ttcgctcactaccaggcctt

SEQ ID NO: 27347 - DNA, 20 bp, synthetic construct
  misc_feature 1..20: note = chemically synthesized
  source 1..20: mol_type = other DNA
gatgattgtttacctttttg

SEQ ID NO: 27348 - DNA, 20 bp, synthetic construct
  misc_feature 1..20: note = chemically synthesized
  source 1..20: mol_type = other DNA
tttgtagttttctccttgtg

SEQ ID NO: 27349 - DNA, 20 bp, synthetic construct
  misc_feature 1..20: note = chemically synthesized
  source 1..20: mol_type = other DNA
gtagttttctccttgtgaag

SEQ ID NO: 27350 - DNA, 20 bp, synthetic construct
  misc_feature 1..20: note = chemically synthesized
  source 1..20: mol_type = other DNA
agtagtaataaaatgtttca

SEQ ID NO: 27351 - DNA, 20 bp, synthetic construct
  misc_feature 1..20: note = chemically synthesized
  source 1..20: mol_type = other DNA
gaaatattcatgattatgtc

SEQ ID NO: 27352 - DNA, 20 bp, synthetic construct
  misc_feature 1..20: note = chemically synthesized
  source 1..20: mol_type = other DNA
tgattatgtcaagcttttca

SEQ ID NO: 27353 - DNA, 20 bp, synthetic construct
  misc_feature 1..20: note = chemically synthesized
  source 1..20: mol_type = other DNA
cacagcatctaaatcatgta

SEQ ID NO: 27354 - DNA, 20 bp, synthetic construct
  misc_feature 1..20: note = chemically synthesized
  source 1..20: mol_type = other DNA
catgtatggcctcaataaat

SEQ ID NO: 27355 - DNA, 20 bp, synthetic construct
  misc_feature 1..20: note = chemically synthesized
  source 1..20: mol_type = other DNA
aataaattggactatcacca

SEQ ID NO: 27356 - DNA, 20 bp, synthetic construct
  misc_feature 1..20: note = chemically synthesized
  source 1..20: mol_type = other DNA
tatcaccacagatcttttac

SEQ ID NO: 27357 - DNA, 20 bp, synthetic construct
  misc_feature 1..20: note = chemically synthesized
  source 1..20: mol_type = other DNA
tttgaactttattctaatga

SEQ ID NO: 27358 - DNA, 20 bp, synthetic construct
  misc_feature 1..20: note = chemically synthesized
  source 1..20: mol_type = other DNA
ttgaactttattctaatgat

SEQ ID NO: 27359 - DNA, 20 bp, synthetic construct
  misc_feature 1..20: note = chemically synthesized
  source 1..20: mol_type = other DNA
gaactttattctaatgatag

SEQ ID NO: 27360 - DNA, 20 bp, synthetic construct
  misc_feature 1..20: note = chemically synthesized
  source 1..20: mol_type = other DNA
tctaatgataggagctactg

SEQ ID NO: 27361 - DNA, 20 bp, synthetic construct
  misc_feature 1..20: note = chemically synthesized
  source 1..20: mol_type = other DNA
agctactgaagtactgaaaa

SEQ ID NO: 27362 - DNA, 20 bp, synthetic construct
  misc_feature 1..20: note = chemically synthesized
  source 1..20: mol_type = other DNA
ctgaagtactgaaaacagtg

SEQ ID NO: 27363 - DNA, 20 bp, synthetic construct
  misc_feature 1..20: note = chemically synthesized
  source 1..20: mol_type = other DNA
gaaaacagtgcagtgattca

SEQ ID NO: 27364 - DNA, 20 bp, synthetic construct
  misc_feature 1..20: note = chemically synthesized
  source 1..20: mol_type = other DNA
aaacagtgcagtgattcata

SEQ ID NO: 27365 - DNA, 20 bp, synthetic construct
  misc_feature 1..20: note = chemically synthesized
  source 1..20: mol_type = other DNA
agtgcagtgattcatagagt

SEQ ID NO: 27366 - DNA, 20 bp, synthetic construct
  misc_feature 1..20: note = chemically synthesized
  source 1..20: mol_type = other DNA
tagtactttctgcataatct

SEQ ID NO: 27367 - DNA, 20 bp, synthetic construct
  misc_feature 1..20: note = chemically synthesized
  source 1..20: mol_type = other DNA
tactttctgcataatctcgg

SEQ ID NO: 27368 - DNA, 20 bp, synthetic construct
  misc_feature 1..20: note = chemically synthesized
  source 1..20: mol_type = other DNA
ctgcataatctcggtggctg

SEQ ID NO: 27369 - DNA, 20 bp, synthetic construct
  misc_feature 1..20: note = chemically synthesized
  source 1..20: mol_type = other DNA
cataatctcggtggctgcag

SEQ ID NO: 27370 - DNA, 20 bp, synthetic construct
  misc_feature 1..20: note = chemically synthesized
  source 1..20: mol_type = other DNA
taatctcggtggctgcagta

SEQ ID NO: 27371 - DNA, 20 bp, synthetic construct
  misc_feature 1..20: note = chemically synthesized
  source 1..20: mol_type = other DNA
aatctcggtggctgcagtag

SEQ ID NO: 27372 - DNA, 20 bp, synthetic construct
  misc_feature 1..20: note = chemically synthesized
  source 1..20: mol_type = other DNA
tcggtggctgcagtagagga

SEQ ID NO: 27373 - DNA, 20 bp, synthetic construct
  misc_feature 1..20: note = chemically synthesized
  source 1..20: mol_type = other DNA
gctgcagtagaggatggacc

SEQ ID NO: 27374 - DNA, 20 bp, synthetic construct
  misc_feature 1..20: note = chemically synthesized
  source 1..20: mol_type = other DNA
ctgcagtagaggatggacca

SEQ ID NO: 27375 - DNA, 20 bp, synthetic construct
  misc_feature 1..20: note = chemically synthesized
  source 1..20: mol_type = other DNA
tgcagtagaggatggaccaa

SEQ ID NO: 27376 - DNA, 20 bp, synthetic construct
  misc_feature 1..20: note = chemically synthesized
  source 1..20: mol_type = other DNA
agtagaggatggaccaaggg

SEQ ID NO: 27377 - DNA, 20 bp, synthetic construct
  misc_feature 1..20: note = chemically synthesized
  source 1..20: mol_type = other DNA
gtagaggatggaccaaggga

SEQ ID NO: 27378 - DNA, 20 bp, synthetic construct
  misc_feature 1..20: note = chemically synthesized
  source 1..20: mol_type = other DNA
agaggatggaccaagggaag

SEQ ID NO: 27379 - DNA, 20 bp, synthetic construct
  misc_feature 1..20: note = chemically synthesized
  source 1..20: mol_type = other DNA
gaggatggaccaagggaagg

SEQ ID NO: 27380 - DNA, 20 bp, synthetic construct
  misc_feature 1..20: note = chemically synthesized
  source 1..20: mol_type = other DNA
ggatggaccaagggaaggag

SEQ ID NO: 27381 - DNA, 20 bp, synthetic construct
  misc_feature 1..20: note = chemically synthesized
  source 1..20: mol_type = other DNA
gaccaagggaaggaggagcc

SEQ ID NO: 27382 - DNA, 20 bp, synthetic construct
  misc_feature 1..20: note = chemically synthesized
  source 1..20: mol_type = other DNA
tggctttgcatgttgaatga

SEQ ID NO: 27383 - DNA, 20 bp, synthetic construct
  misc_feature 1..20: note = chemically synthesized
  source 1..20: mol_type = other DNA
ggctttgcatgttgaatgac

SEQ ID NO: 27384 - DNA, 20 bp, synthetic construct
  misc_feature 1..20: note = chemically synthesized
  source 1..20: mol_type = other DNA
ttgcatgttgaatgacaggt

SEQ ID NO: 27385 - DNA, 20 bp, synthetic construct
  misc_feature 1..20: note = chemically synthesized
  source 1..20: mol_type = other DNA
tgcatgttgaatgacaggtc

SEQ ID NO: 27386 - DNA, 20 bp, synthetic construct
  misc_feature 1..20: note = chemically synthesized
  source 1..20: mol_type = other DNA
tgttgaatgacaggtcaggc

SEQ ID NO: 27387 - DNA, 20 bp, synthetic construct
  misc_feature 1..20: note = chemically synthesized
  source 1..20: mol_type = other DNA
tgaatgacaggtcaggcaag

SEQ ID NO: 27388 - DNA, 20 bp, synthetic construct
  misc_feature 1..20: note = chemically synthesized
  source 1..20: mol_type = other DNA
gaatgacaggtcaggcaagc

SEQ ID NO: 27389 - DNA, 20 bp, synthetic construct
  misc_feature 1..20: note = chemically synthesized
  source 1..20: mol_type = other DNA
acaggtcaggcaagcaggtg

SEQ ID NO: 27390 - DNA, 20 bp, synthetic construct
  misc_feature 1..20: note = chemically synthesized
  source 1..20: mol_type = other DNA
tcaggcaagcaggtgtggaa

SEQ ID NO: 27391 - DNA, 20 bp, synthetic construct
  misc_feature 1..20: note = chemically synthesized
  source 1..20: mol_type = other DNA
caagcaggtgtggaaaagct

SEQ ID NO: 27392 - DNA, 20 bp, synthetic construct
  misc_feature 1..20: note = chemically synthesized
  source 1..20: mol_type = other DNA
ggtgtggaaaagctaagaac

SEQ ID NO: 27393 - DNA, 20 bp, synthetic construct
  misc_feature 1..20: note = chemically synthesized
  source 1..20: mol_type = other DNA
gtgtggaaaagctaagaaca

SEQ ID NO: 27394 - DNA, 20 bp, synthetic construct
  misc_feature 1..20: note = chemically synthesized
  source 1..20: mol_type = other DNA
aaagctaagaacaaggacat

SEQ ID NO: 27395 - DNA, 20 bp, synthetic construct
  misc_feature 1..20: note = chemically synthesized
  source 1..20: mol_type = other DNA
aagaacaaggacattggcta

SEQ ID NO: 27396 - DNA, 20 bp, synthetic construct
  misc_feature 1..20: note = chemically synthesized
  source 1..20: mol_type = other DNA
gaacaaggacattggctaca

SEQ ID NO: 27397 - DNA, 20 bp, synthetic construct
  misc_feature 1..20: note = chemically synthesized
  source 1..20: mol_type = other DNA
ggacattggctacagagatg

SEQ ID NO: 27398 - DNA, 20 bp, synthetic construct
  misc_feature 1..20: note = chemically synthesized
  source 1..20: mol_type = other DNA
gctacagagatgaagatgaa

SEQ ID NO: 27399 - DNA, 20 bp, synthetic construct
  misc_feature 1..20: note = chemically synthesized
  source 1..20: mol_type = other DNA
agatgaagatgaatagatta

SEQ ID NO: 27400 - DNA, 20 bp, synthetic construct
  misc_feature 1..20: note = chemically synthesized
  source 1..20: mol_type = other DNA
gatgaagatgaatagattac

SEQ ID NO: 27401 - DNA, 20 bp, synthetic construct
  misc_feature 1..20: note = chemically synthesized
  source 1..20: mol_type = other DNA
atgaagatgaatagattaca

SEQ ID NO: 27402 - DNA, 20 bp, synthetic construct
  misc_feature 1..20: note = chemically synthesized
  source 1..20: mol_type = other DNA
agatgaatagattacaggga

SEQ ID NO: 27403 - DNA, 20 bp, synthetic construct
  misc_feature 1..20: note = chemically synthesized
  source 1..20: mol_type = other DNA
agattacagggatagattaa

SEQ ID NO: 27404 - DNA, 20 bp, synthetic construct
  misc_feature 1..20: note = chemically synthesized
  source 1..20: mol_type = other DNA
agggatagattaaaagaact

SEQ ID NO: 27405 - DNA, 20 bp, synthetic construct
  misc_feature 1..20: note = chemically synthesized
  source 1..20: mol_type = other DNA
aaaagaacttagttaaaaat

SEQ ID NO: 27406 - DNA, 20 bp, synthetic construct
  misc_feature 1..20: note = chemically synthesized
  source 1..20: mol_type = other DNA
acttagttaaaaattagata

SEQ ID NO: 27407 - DNA, 20 bp, synthetic construct
  misc_feature 1..20: note = chemically synthesized
  source 1..20: mol_type = other DNA
agttaaaaattagatacaga

SEQ ID NO: 27408 - DNA, 20 bp, synthetic construct
  misc_feature 1..20: note = chemically synthesized
  source 1..20: mol_type = other DNA
ttaaaaattagatacagaaa

SEQ ID NO: 27409 - DNA, 20 bp, synthetic construct
  misc_feature 1..20: note = chemically synthesized
  source 1..20: mol_type = other DNA
taaaaattagatacagaaag

SEQ ID NO: 27410 - DNA, 20 bp, synthetic construct
  misc_feature 1..20: note = chemically synthesized
  source 1..20: mol_type = other DNA
aaaaattagatacagaaaga

SEQ ID NO: 27411 - DNA, 20 bp, synthetic construct
  misc_feature 1..20: note = chemically synthesized
  source 1..20: mol_type = other DNA
aaattagatacagaaagagg

SEQ ID NO: 27412 - DNA, 20 bp, synthetic construct
  misc_feature 1..20: note = chemically synthesized
  source 1..20: mol_type = other DNA
attagatacagaaagaggga

SEQ ID NO: 27413 - DNA, 20 bp, synthetic construct
  misc_feature 1..20: note = chemically synthesized
  source 1..20: mol_type = other DNA
ttagatacagaaagagggag

SEQ ID NO: 27414 - DNA, 20 bp, synthetic construct
  misc_feature 1..20: note = chemically synthesized
  source 1..20: mol_type = other DNA
tagatacagaaagagggaga

SEQ ID NO: 27415 - DNA, 20 bp, synthetic construct
  misc_feature 1..20: note = chemically synthesized
  source 1..20: mol_type = other DNA
acagaaagagggagagggtt

SEQ ID NO: 27416 - DNA, 20 bp, synthetic construct
  misc_feature 1..20: note = chemically synthesized
  source 1..20: mol_type = other DNA
gaaagagggagagggttgag

SEQ ID NO: 27417 - DNA, 20 bp, synthetic construct
  misc_feature 1..20: note = chemically synthesized
  source 1..20: mol_type = other DNA
aagagggagagggttgagta

SEQ ID NO: 27418 - DNA, 20 bp, synthetic construct
  misc_feature 1..20: note = chemically synthesized
  source 1..20: mol_type = other DNA
gagagggttgagtagagcat

SEQ ID NO: 27419 - DNA, 20 bp, synthetic construct
  misc_feature 1..20: note = chemically synthesized
  source 1..20: mol_type = other DNA
ctcaaaaatgttgtcttgaa

SEQ ID NO: 27420 - DNA, 20 bp, synthetic construct
  misc_feature 1..20: note = chemically synthesized
  source 1..20: mol_type = other DNA
aaaaatgttgtcttgaatgg

SEQ ID NO: 27421 - DNA, 20 bp, synthetic construct
  misc_feature 1..20: note = chemically synthesized
  source 1..20: mol_type = other DNA
aaaatgttgtcttgaatggc

SEQ ID NO: 27422 - DNA, 20 bp, synthetic construct
  misc_feature 1..20: note = chemically synthesized
  source 1..20: mol_type = other DNA
ttgtcttgaatggcaggaaa

SEQ ID NO: 27423 - DNA, 20 bp, synthetic construct
  misc_feature 1..20: note = chemically synthesized
  source 1..20: mol_type = other DNA
tataaaaaatgcataaatat

SEQ ID NO: 27424 - DNA, 20 bp, synthetic construct
  misc_feature 1..20: note = chemically synthesized
  source 1..20: mol_type = other DNA
aaaaaatgcataaatatgag

SEQ ID NO: 27425 - DNA, 20 bp, synthetic construct
  misc_feature 1..20: note = chemically synthesized
  source 1..20: mol_type = other DNA
tgcataaatatgagaagaat

SEQ ID NO: 27426 - DNA, 20 bp, synthetic construct
  misc_feature 1..20: note = chemically synthesized
  source 1..20: mol_type = other DNA
gcataaatatgagaagaatc

SEQ ID NO: 27427 - DNA, 20 bp, synthetic construct
  misc_feature 1..20: note = chemically synthesized
  source 1..20: mol_type = other DNA
tgagaagaatcaggtgtgaa

SEQ ID NO: 27428 - DNA, 20 bp, synthetic construct
  misc_feature 1..20: note = chemically synthesized
  source 1..20: mol_type = other DNA
aagaatcaggtgtgaaaaga

SEQ ID NO: 27429 - DNA, 20 bp, synthetic construct
  misc_feature 1..20: note = chemically synthesized
  source 1..20: mol_type = other DNA
aggtgtgaaaagatggatgc

SEQ ID NO: 27430 - DNA, 20 bp, synthetic construct
  misc_feature 1..20: note = chemically synthesized
  source 1..20: mol_type = other DNA
ggtgtgaaaagatggatgct

SEQ ID NO: 27431 - DNA, 20 bp, synthetic construct
  misc_feature 1..20: note = chemically synthesized
  source 1..20: mol_type = other DNA
atggatgctgggctcaatat

SEQ ID NO: 27432 - DNA, 20 bp, synthetic construct
  misc_feature 1..20: note = chemically synthesized
  source 1..20: mol_type = other DNA
ggctcaatattagacgtgtt

SEQ ID NO: 27433 - DNA, 20 bp, synthetic construct
  misc_feature 1..20: note = chemically synthesized
  source 1..20: mol_type = other DNA
ttagacgtgttgagtttcat

SEQ ID NO: 27434 - DNA, 20 bp, synthetic construct
  misc_feature 1..20: note = chemically synthesized
  source 1..20: mol_type = other DNA
gagtttcatcagtatccttt

SEQ ID NO: 27435 - DNA, 20 bp, synthetic construct
  misc_feature 1..20: note = chemically synthesized
  source 1..20: mol_type = other DNA
agtatccttttggaaacacc

SEQ ID NO: 27436 - DNA, 20 bp, synthetic construct
  misc_feature 1..20: note = chemically synthesized
  source 1..20: mol_type = other DNA
tccttttggaaacacctagt

SEQ ID NO: 27437 - DNA, 20 bp, synthetic construct
  misc_feature 1..20: note = chemically synthesized
  source 1..20: mol_type = other DNA
ttttggaaacacctagtgag

SEQ ID NO: 27438 - DNA, 20 bp, synthetic construct
  misc_feature 1..20: note = chemically synthesized
  source 1..20: mol_type = other DNA
tttggaaacacctagtgaga

SEQ ID NO: 27439 - DNA, 20 bp, synthetic construct
  misc_feature 1..20: note = chemically synthesized
  source 1..20: mol_type = other DNA
ggaaacacctagtgagaagg

SEQ ID NO: 27440 - DNA, 20 bp, synthetic construct
  misc_feature 1..20: note = chemically synthesized
  source 1..20: mol_type = other DNA
ctagtgagaaggcagaaact

SEQ ID NO: 27441 - DNA, 20 bp, synthetic construct
  misc_feature 1..20: note = chemically synthesized
  source 1..20: mol_type = other DNA
tagtgagaaggcagaaactc

SEQ ID NO: 27442 - DNA, 20 bp, synthetic construct
  misc_feature 1..20: note = chemically synthesized
  source 1..20: mol_type = other DNA
aactcaggcctgatatgtaa

SEQ ID NO: 27443 - DNA, 20 bp, synthetic construct
  misc_feature 1..20: note = chemically synthesized
  source 1..20: mol_type = other DNA
ctcaggcctgatatgtaacg

SEQ ID NO: 27444 - DNA, 20 bp, synthetic construct
  misc_feature 1..20: note = chemically synthesized
  source 1..20: mol_type = other DNA
tgatatgtaacggagttatc

SEQ ID NO: 27445 - DNA, 20 bp, synthetic construct
  misc_feature 1..20: note = chemically synthesized
  source 1..20: mol_type = other DNA
tgtaacggagttatctggac

SEQ ID NO: 27446 - DNA, 20 bp, synthetic construct
  misc_feature 1..20: note = chemically synthesized
  source 1..20: mol_type = other DNA
taacggagttatctggacta

SEQ ID NO: 27447 - DNA, 20 bp, synthetic construct
  misc_feature 1..20: note = chemically synthesized
  source 1..20: mol_type = other DNA
tggactagagattaatgtct

SEQ ID NO: 27448 - DNA, 20 bp, synthetic construct
  misc_feature 1..20: note = chemically synthesized
  source 1..20: mol_type = other DNA
gactagagattaatgtctaa

SEQ ID NO: 27449 - DNA, 20 bp, synthetic construct
  misc_feature 1..20: note = chemically synthesized
  source 1..20: mol_type = other DNA
tctaagagccaccactgtat

SEQ ID NO: 27450 - DNA, 20 bp, synthetic construct
  misc_feature 1..20: note = chemically synthesized
  source 1..20: mol_type = other DNA
tgtataagtaataataataa

SEQ ID NO: 27451 - DNA, 20 bp, synthetic construct
  misc_feature 1..20: note = chemically synthesized
  source 1..20: mol_type = other DNA
taatagataatataatgaat

SEQ ID NO: 27452 - DNA, 20 bp, synthetic construct
  misc_feature 1..20: note = chemically synthesized
  source 1..20: mol_type = other DNA
tagataatataatgaatgag

SEQ ID NO: 27453 - DNA, 20 bp, synthetic construct
  misc_feature 1..20: note = chemically synthesized
  source 1..20: mol_type = other DNA
aatataatgaatgagaagtt

SEQ ID NO: 27454 - DNA, 20 bp, synthetic construct
  misc_feature 1..20: note = chemically synthesized
  source 1..20: mol_type = other DNA
atataatgaatgagaagtta

SEQ ID NO: 27455 - DNA, 20 bp, synthetic construct
  misc_feature 1..20: note = chemically synthesized
  source 1..20: mol_type = other DNA
aatgagaagttaaggtgttc

SEQ ID NO: 27456 - DNA, 20 bp, synthetic construct
  misc_feature 1..20: note = chemically synthesized
  source 1..20: mol_type = other DNA
atgagaagttaaggtgttca

SEQ ID NO: 27457 - DNA, 20 bp, synthetic construct
  misc_feature 1..20: note = chemically synthesized
  source 1..20: mol_type = other DNA
gaagttaaggtgttcaagga

SEQ ID NO: 27458 - DNA, 20 bp, synthetic construct
  misc_feature 1..20: note = chemically synthesized
  source 1..20: mol_type = other DNA
actgaataacataaatattt

SEQ ID NO: 27459 - DNA, 20 bp, synthetic construct
  misc_feature 1..20: note = chemically synthesized
  source 1..20: mol_type = other DNA
taacataaatatttgagcaa

SEQ ID NO: 27460 - DNA, 20 bp, synthetic construct
  misc_feature 1..20: note = chemically synthesized
  source 1..20: mol_type = other DNA
aatatttgagcaatggaaat

SEQ ID NO: 27461 - DNA, 20 bp, synthetic construct
  misc_feature 1..20: note = chemically synthesized
  source 1..20: mol_type = other DNA
tatttgagcaatggaaataa

SEQ ID NO: 27462 - DNA, 20 bp, synthetic construct
  misc_feature 1..20: note = chemically synthesized
  source 1..20: mol_type = other DNA
tttgagcaatggaaataaga

SEQ ID NO: 27463 - DNA, 20 bp, synthetic construct
  misc_feature 1..20: note = chemically synthesized
  source 1..20: mol_type = other DNA
aatggaaataagagagtgca

SEQ ID NO: 27464 - DNA, 20 bp, synthetic construct
  misc_feature 1..20: note = chemically synthesized
  source 1..20: mol_type = other DNA
ggaaataagagagtgcatag

SEQ ID NO: 27465 - DNA, 20 bp, synthetic construct
  misc_feature 1..20: note = chemically synthesized
  source 1..20: mol_type = other DNA
atagaagctatcacaaaaat

SEQ ID NO: 27466 - DNA, 20 bp, synthetic construct
  misc_feature 1..20: note = chemically synthesized
  source 1..20: mol_type = other DNA
gaagctatcacaaaaatcag

SEQ ID NO: 27467 - DNA, 20 bp, synthetic construct
  misc_feature 1..20: note = chemically synthesized
  source 1..20: mol_type = other DNA
agctatcacaaaaatcagaa

SEQ ID NO: 27468 - DNA, 20 bp, synthetic construct
  misc_feature 1..20: note = chemically synthesized
  source 1..20: mol_type = other DNA
cacaaaaatcagaagagaac

SEQ ID NO: 27469 - DNA, 20 bp, synthetic construct
  misc_feature 1..20: note = chemically synthesized
  source 1..20: mol_type = other DNA
aaaaatcagaagagaaccag

SEQ ID NO: 27470 - DNA, 20 bp, synthetic construct
  misc_feature 1..20: note = chemically synthesized
  source 1..20: mol_type = other DNA
agaagagaaccagcagatct

SEQ ID NO: 27471 - DNA, 20 bp, synthetic construct
  misc_feature 1..20: note = chemically synthesized
  source 1..20: mol_type = other DNA
aaccagcagatcttggcatt

SEQ ID NO: 27472 - DNA, 20 bp, synthetic construct
  misc_feature 1..20: note = chemically synthesized
  source 1..20: mol_type = other DNA
atcttggcattaagaatttc

SEQ ID NO: 27473 - DNA, 20 bp, synthetic construct
  misc_feature 1..20: note = chemically synthesized
  source 1..20: mol_type = other DNA
cttggcattaagaatttcta

SEQ ID NO: 27474 - DNA, 20 bp, synthetic construct
  misc_feature 1..20: note = chemically synthesized
  source 1..20: mol_type = other DNA
tggcattaagaatttctaga

SEQ ID NO: 27475 - DNA, 20 bp, synthetic construct
  misc_feature 1..20: note = chemically synthesized
  source 1..20: mol_type = other DNA
gcattaagaatttctagaga

SEQ ID NO: 27476 - DNA, 20 bp, synthetic construct
  misc_feature 1..20: note = chemically synthesized
  source 1..20: mol_type = other DNA
tttctagagagagctctaaa

SEQ ID NO: 27477 - DNA, 20 bp, synthetic construct
  misc_feature 1..20: note = chemically synthesized
  source 1..20: mol_type = other DNA
ttctagagagagctctaaaa

SEQ ID NO: 27478 - DNA, 20 bp, synthetic construct
  misc_feature 1..20: note = chemically synthesized
  source 1..20: mol_type = other DNA
tagagagagctctaaaaagg

SEQ ID NO: 27479 - DNA, 20 bp, synthetic construct
  misc_feature 1..20: note = chemically synthesized
  source 1..20: mol_type = other DNA
agagagagctctaaaaagga

SEQ ID NO: 27480 - DNA, 20 bp, synthetic construct
  misc_feature 1..20: note = chemically synthesized
  source 1..20: mol_type = other DNA
gagctctaaaaaggaaggca

SEQ ID NO: 27481 - DNA, 20 bp, synthetic construct
  misc_feature 1..20: note = chemically synthesized
  source 1..20: mol_type = other DNA
tctaaaaaggaaggcatggc

SEQ ID NO: 27482 - DNA, 20 bp, synthetic construct
  misc_feature 1..20: note = chemically synthesized
  source 1..20: mol_type = other DNA
taaaaaggaaggcatggcca

SEQ ID NO: 27483 - DNA, 20 bp, synthetic construct
  misc_feature 1..20: note = chemically synthesized
  source 1..20: mol_type = other DNA
ttgcacaaaaaaatcaataa

SEQ ID NO: 27484 - DNA, 20 bp, synthetic construct
  misc_feature 1..20: note = chemically synthesized
  source 1..20: mol_type = other DNA
cacaaaaaaatcaataaaag

SEQ ID NO: 27485 - DNA, 20 bp, synthetic construct
  misc_feature 1..20: note = chemically synthesized
  source 1..20: mol_type = other DNA
acaaaaaaatcaataaaagc

SEQ ID NO: 27486 - DNA, 20 bp, synthetic construct
  misc_feature 1..20: note = chemically synthesized
  source 1..20: mol_type = other DNA
caataaaagcaggtatgatt

SEQ ID NO: 27487 - DNA, 20 bp, synthetic construct
  misc_feature 1..20: note = chemically synthesized
  source 1..20: mol_type = other DNA
ttaagactctccattgcatt

SEQ ID NO: 27488 - DNA, 20 bp, synthetic construct
  misc_feature 1..20: note = chemically synthesized
  source 1..20: mol_type = other DNA
tctccattgcatttggcccc

SEQ ID NO: 27489 - DNA, 20 bp, synthetic construct
  misc_feature 1..20: note = chemically synthesized
  source 1..20: mol_type = other DNA
ccattgcatttggcccctag

SEQ ID NO: 27490 - DNA, 20 bp, synthetic construct
  misc_feature 1..20: note = chemically synthesized
  source 1..20: mol_type = other DNA
atttggcccctagaagtcac

SEQ ID NO: 27491 - DNA, 20 bp, synthetic construct
  misc_feature 1..20: note = chemically synthesized
  source 1..20: mol_type = other DNA
tagaagtcactggtgaattt

SEQ ID NO: 27492 - DNA, 20 bp, synthetic construct
  misc_feature 1..20: note = chemically synthesized
  source 1..20: mol_type = other DNA
agaagtcactggtgaattta

SEQ ID NO: 27493 - DNA, 20 bp, synthetic construct
  misc_feature 1..20: note = chemically synthesized
  source 1..20: mol_type = other DNA
aagtcactggtgaatttaag

SEQ ID NO: 27494 - DNA, 20 bp, synthetic construct
  misc_feature 1..20: note = chemically synthesized
  source 1..20: mol_type = other DNA
gaatttaaggagcattgctt

SEQ ID NO: 27495 - DNA, 20 bp, synthetic construct
  misc_feature 1..20: note = chemically synthesized
  source 1..20: mol_type = other DNA
taaggagcattgctttagct

SEQ ID NO: 27496 - DNA, 20 bp, synthetic construct
  misc_feature 1..20: note = chemically synthesized
  source 1..20: mol_type = other DNA
ggagcattgctttagctaag

SEQ ID NO: 27497 - DNA, 20 bp, synthetic construct
  misc_feature 1..20: note = chemically synthesized
  source 1..20: mol_type = other DNA
gagcattgctttagctaagt

SEQ ID NO: 27498 - DNA, 20 bp, synthetic construct
  misc_feature 1..20: note = chemically synthesized
  source 1..20: mol_type = other DNA
gggttttaaaaaaaacatta

SEQ ID NO: 27499 - DNA, 20 bp, synthetic construct
  misc_feature 1..20: note = chemically synthesized
  source 1..20: mol_type = other DNA
ggttttaaaaaaaacattat

SEQ ID NO: 27500 - DNA, 20 bp, synthetic construct
  misc_feature 1..20: note = chemically synthesized
  source 1..20: mol_type = other DNA
gttttaaaaaaaacattata

SEQ ID NO: 27501 - DNA, 20 bp, synthetic construct
  misc_feature 1..20: note = chemically synthesized
  source 1..20: mol_type = other DNA
ttaaaaaaaacattataggg

SEQ ID NO: 27502 - DNA, 20 bp, synthetic construct
  misc_feature 1..20: note = chemically synthesized
  source 1..20: mol_type = other DNA
aaaaaacattatagggtggt

SEQ ID NO: 27503 - DNA, 20 bp, synthetic construct
  misc_feature 1..20: note = chemically synthesized
  source 1..20: mol_type = other DNA
acattatagggtggttggtt

SEQ ID NO: 27504 - DNA, 20 bp, synthetic construct
  misc_feature 1..20: note = chemically synthesized
  source 1..20: mol_type = other DNA
ttatagggtggttggttgag

SEQ ID NO: 27505 - DNA, 20 bp, synthetic construct
  misc_feature 1..20: note = chemically synthesized
  source 1..20: mol_type = other DNA
ggttggttgagtagtaaact

SEQ ID NO: 27506 - DNA, 20 bp, synthetic construct
  misc_feature 1..20: note = chemically synthesized
  source 1..20: mol_type = other DNA
tggttgagtagtaaactgag

SEQ ID NO: 27507 - DNA, 20 bp, synthetic construct
  misc_feature 1..20: note = chemically synthesized
  source 1..20: mol_type = other DNA
gagtagtaaactgagaagta

SEQ ID NO: 27508 - DNA, 20 bp, synthetic construct
  misc_feature 1..20: note = chemically synthesized
  source 1..20: mol_type = other DNA
taaactgagaagtaaagaaa

SEQ ID NO: 27509 - DNA, 20 bp, synthetic construct
  misc_feature 1..20: note = chemically synthesized
  source 1..20: mol_type = other DNA
tgagaagtaaagaaatggaa

SEQ ID NO: 27510 - DNA, 20 bp, synthetic construct
  misc_feature 1..20: note = chemically synthesized
  source 1..20: mol_type = other DNA
agaaatggaaaagataaatg

SEQ ID NO: 27511 - DNA, 20 bp, synthetic construct
  misc_feature 1..20: note = chemically synthesized
  source 1..20: mol_type = other DNA
ctattttttaccccttgcca

SEQ ID NO: 27512 - DNA, 20 bp, synthetic construct
  misc_feature 1..20: note = chemically synthesized
  source 1..20: mol_type = other DNA
accccttgccaaagtgatgt

SEQ ID NO: 27513 - DNA, 20 bp, synthetic construct
  misc_feature 1..20: note = chemically synthesized
  source 1..20: mol_type = other DNA
atgtaagccttatatccatg

SEQ ID NO: 27514 - DNA, 20 bp, synthetic construct
  misc_feature 1..20: note = chemically synthesized
  source 1..20: mol_type = other DNA
gcacctctgctctcaactcg

SEQ ID NO: 27515 - DNA, 20 bp, synthetic construct
  misc_feature 1..20: note = chemically synthesized
  source 1..20: mol_type = other DNA
gctctcaactcgaagctcac

SEQ ID NO: 27516 - DNA, 20 bp, synthetic construct
  misc_feature 1..20: note = chemically synthesized
  source 1..20: mol_type = other DNA
cacaagtataataaaattca

SEQ ID NO: 27517 - DNA, 20 bp, synthetic construct
  misc_feature 1..20: note = chemically synthesized
  source 1..20: mol_type = other DNA
aagtataataaaattcaaag

SEQ ID NO: 27518 - DNA, 20 bp, synthetic construct
  misc_feature 1..20: note = chemically synthesized
  source 1..20: mol_type = other DNA
aagtagcttgcgtgacctgc

SEQ ID NO: 27519 - DNA, 20 bp, synthetic construct
  misc_feature 1..20: note = chemically synthesized
  source 1..20: mol_type = other DNA
ctgcaagatcatacatgacg

SEQ ID NO: 27520 - DNA, 20 bp, synthetic construct
  misc_feature 1..20: note = chemically synthesized
  source 1..20: mol_type = other DNA
atcatacatgacgtagcatt

SEQ ID NO: 27521 - DNA, 20 bp, synthetic construct
  misc_feature 1..20: note = chemically synthesized
  source 1..20: mol_type = other DNA
tagcatttagctgctacttc

SEQ ID NO: 27522 - DNA, 20 bp, synthetic construct
  misc_feature 1..20: note = chemically synthesized
  source 1..20: mol_type = other DNA
catttagctgctacttcaag

SEQ ID NO: 27523 - DNA, 20 bp, synthetic construct
  misc_feature 1..20: note = chemically synthesized
  source 1..20: mol_type = other DNA
ttcctccattgaatatacat

SEQ ID NO: 27524 - DNA, 20 bp, synthetic construct
  misc_feature 1..20: note = chemically synthesized
  source 1..20: mol_type = other DNA
ttttgtcttttaaacttgtc

SEQ ID NO: 27525 - DNA, 20 bp, synthetic construct
  misc_feature 1..20: note = chemically synthesized
  source 1..20: mol_type = other DNA
tgtcaagctgctctctgctt

SEQ ID NO: 27526 - DNA, 20 bp, synthetic construct
  misc_feature 1..20: note = chemically synthesized
  source 1..20: mol_type = other DNA
gtcaagctgctctctgcttc

SEQ ID NO: 27527 - DNA, 20 bp, synthetic construct
  misc_feature 1..20: note = chemically synthesized
  source 1..20: mol_type = other DNA
ttccttgaatgtttttccct

SEQ ID NO: 27528 - DNA, 20 bp, synthetic construct
  misc_feature 1..20: note = chemically synthesized
  source 1..20: mol_type = other DNA
ttgaatgtttttccctaaga

SEQ ID NO: 27529 - DNA, 20 bp, synthetic construct
  misc_feature 1..20: note = chemically synthesized
  source 1..20: mol_type = other DNA
cttctctaaaattacctact

SEQ ID NO: 27530 - DNA, 20 bp, synthetic construct
  misc_feature 1..20: note = chemically synthesized
  source 1..20: mol_type = other DNA
tctctaaaattacctactca

SEQ ID NO: 27531 - DNA, 20 bp, synthetic construct
  misc_feature 1..20: note = chemically synthesized
  source 1..20: mol_type = other DNA
tctaaaattacctactcaga

SEQ ID NO: 27532 - DNA, 20 bp, synthetic construct
  misc_feature 1..20: note = chemically synthesized
  source 1..20: mol_type = other DNA
ctaaaattacctactcagag

SEQ ID NO: 27533 - DNA, 20 bp, synthetic construct
  misc_feature 1..20: note = chemically synthesized
  source 1..20: mol_type = other DNA
cattacattaccttgcattg

SEQ ID NO: 27534 - DNA, 20 bp, synthetic construct
  misc_feature 1..20: note = chemically synthesized
  source 1..20: mol_type = other DNA
gtttctgttcattgtatttt

SEQ ID NO: 27535 - DNA, 20 bp, synthetic construct
  misc_feature 1..20: note = chemically synthesized
  source 1..20: mol_type = other DNA
ttcattgtattttcagtacc

SEQ ID NO: 27536 - DNA, 20 bp, synthetic construct
  misc_feature 1..20: note = chemically synthesized
  source 1..20: mol_type = other DNA
tcattgtattttcagtacct

SEQ ID NO: 27537 - DNA, 20 bp, synthetic construct
  misc_feature 1..20: note = chemically synthesized
  source 1..20: mol_type = other DNA
ttttcagtacctaggtgtaa

SEQ ID NO: 27538 - DNA, 20 bp, synthetic construct
  misc_feature 1..20: note = chemically synthesized
  source 1..20: mol_type = other DNA
cctaggtgtaaaagtaattg

SEQ ID NO: 27539 - DNA, 20 bp, synthetic construct
  misc_feature 1..20: note = chemically synthesized
  source 1..20: mol_type = other DNA
attgcagttcttgccattga

SEQ ID NO: 27540 - DNA, 20 bp, synthetic construct
  misc_feature 1..20: note = chemically synthesized
  source 1..20: mol_type = other DNA
gttcttgccattgaaagtaa

SEQ ID NO: 27541 - DNA, 20 bp, synthetic construct
  misc_feature 1..20: note = chemically synthesized
  source 1..20: mol_type = other DNA
ttacttttgcaccaacctaa

SEQ ID NO: 27542 - DNA, 20 bp, synthetic construct
  misc_feature 1..20: note = chemically synthesized
  source 1..20: mol_type = other DNA
attgaaataattattgaaat

SEQ ID NO: 27543 - DNA, 20 bp, synthetic construct
  misc_feature 1..20: note = chemically synthesized
  source 1..20: mol_type = other DNA
aattattgaaataagattaa

SEQ ID NO: 27544 - DNA, 20 bp, synthetic construct
  misc_feature 1..20: note = chemically synthesized
  source 1..20: mol_type = other DNA
atttattcaaataatattta

SEQ ID NO: 27545 - DNA, 20 bp, synthetic construct
  misc_feature 1..20: note = chemically synthesized
  source 1..20: mol_type = other DNA
tttattcaaataatatttaa

SEQ ID NO: 27546 - DNA, 20 bp, synthetic construct
  misc_feature 1..20: note = chemically synthesized
  source 1..20: mol_type = other DNA
tttaaaggattccaatgata

SEQ ID NO: 27547 - DNA, 20 bp, synthetic construct
  misc_feature 1..20: note = chemically synthesized
  source 1..20: mol_type = other DNA
aaaggattccaatgatatgg

SEQ ID NO: 27548 - DNA, 20 bp, synthetic construct
  misc_feature 1..20: note = chemically synthesized
  source 1..20: mol_type = other DNA
caatgatatggtggctaaaa

SEQ ID NO: 27549 - DNA, 20 bp, synthetic construct
  misc_feature 1..20: note = chemically synthesized
  source 1..20: mol_type = other DNA
tggctaaaaaagtcaatccc

SEQ ID NO: 27550 - DNA, 20 bp, synthetic construct
  misc_feature 1..20: note = chemically synthesized
  source 1..20: mol_type = other DNA
gctaaaaaagtcaatcccta

SEQ ID NO: 27551 - DNA, 20 bp, synthetic construct
  misc_feature 1..20: note = chemically synthesized
  source 1..20: mol_type = other DNA
agctaatattaaaattaaaa

SEQ ID NO: 27552 - DNA, 20 bp, synthetic construct
  misc_feature 1..20: note = chemically synthesized
  source 1..20: mol_type = other DNA
ctaatattaaaattaaaaaa

SEQ ID NO: 27553 - DNA, 20 bp, synthetic construct
  misc_feature 1..20: note = chemically synthesized
  source 1..20: mol_type = other DNA
tattaaaattaaaaaagaga

SEQ ID NO: 27554 - DNA, 20 bp, synthetic construct
  misc_feature 1..20: note = chemically synthesized
  source 1..20: mol_type = other DNA
aattaaaaaagagacagtca

SEQ ID NO: 27555 - DNA, 20 bp, synthetic construct
  misc_feature 1..20: note = chemically synthesized
  source 1..20: mol_type = other DNA
cagtcatggtttatgtccac

SEQ ID NO: 27556 - DNA, 20 bp, synthetic construct
  misc_feature 1..20: note = chemically synthesized
  source 1..20: mol_type = other DNA
agtcatggtttatgtccaca

SEQ ID NO: 27557 - DNA, 20 bp, synthetic construct
  misc_feature 1..20: note = chemically synthesized
  source 1..20: mol_type = other DNA
tccacaaggaattcacatta

SEQ ID NO: 27558 - DNA, 20 bp, synthetic construct
  misc_feature 1..20: note = chemically synthesized
  source 1..20: mol_type = other DNA
acaaggaattcacattatag

SEQ ID NO: 27559 - DNA, 20 bp, synthetic construct
  misc_feature 1..20: note = chemically synthesized
  source 1..20: mol_type = other DNA
ttcacattatagaagcaata

SEQ ID NO: 27560 - DNA, 20 bp, synthetic construct
  misc_feature 1..20: note = chemically synthesized
  source 1..20: mol_type = other DNA
tacagaaattgacaatgctg

SEQ ID NO: 27561 - DNA, 20 bp, synthetic construct
  misc_feature 1..20: note = chemically synthesized
  source 1..20: mol_type = other DNA
acagaaattgacaatgctgc

SEQ ID NO: 27562 - DNA, 20 bp, synthetic construct
  misc_feature 1..20: note = chemically synthesized
  source 1..20: mol_type = other DNA
cagaaattgacaatgctgca

SEQ ID NO: 27563 - DNA, 20 bp, synthetic construct
  misc_feature 1..20: note = chemically synthesized
  source 1..20: mol_type = other DNA
atgctgcagggaaaatatca

SEQ ID NO: 27564 - DNA, 20 bp, synthetic construct
  misc_feature 1..20: note = chemically synthesized
  source 1..20: mol_type = other DNA
agggaaaatatcatggtaat

SEQ ID NO: 27565 - DNA, 20 bp, synthetic construct
  misc_feature 1..20: note = chemically synthesized
  source 1..20: mol_type = other DNA
atatcatggtaattagtgca

SEQ ID NO: 27566 - DNA, 20 bp, synthetic construct
  misc_feature 1..20: note = chemically synthesized
  source 1..20: mol_type = other DNA
aattagtgcatagtgaacta

SEQ ID NO: 27567 - DNA, 20 bp, synthetic construct
  misc_feature 1..20: note = chemically synthesized
  source 1..20: mol_type = other DNA
attagtgcatagtgaactac

SEQ ID NO: 27568 - DNA, 20 bp, synthetic construct
  misc_feature 1..20: note = chemically synthesized
  source 1..20: mol_type = other DNA
tagtgaactacaggaacaca

SEQ ID NO: 27569 - DNA, 20 bp, synthetic construct
  misc_feature 1..20: note = chemically synthesized
  source 1..20: mol_type = other DNA
agtgaactacaggaacacat

SEQ ID NO: 27570 - DNA, 20 bp, synthetic construct
  misc_feature 1..20: note = chemically synthesized
  source 1..20: mol_type = other DNA
tgaactacaggaacacatag

SEQ ID NO: 27571 - DNA, 20 bp, synthetic construct
  misc_feature 1..20: note = chemically synthesized
  source 1..20: mol_type = other DNA
aactacaggaacacatagga

SEQ ID NO: 27572 - DNA, 20 bp, synthetic construct
  misc_feature 1..20: note = chemically synthesized
  source 1..20: mol_type = other DNA
actacaggaacacataggag

SEQ ID NO: 27573 - DNA, 20 bp, synthetic construct
  misc_feature 1..20: note = chemically synthesized
  source 1..20: mol_type = other DNA
ctacaggaacacataggaga

SEQ ID NO: 27574 - DNA, 20 bp, synthetic construct
  misc_feature 1..20: note = chemically synthesized
  source 1..20: mol_type = other DNA
gagggtattcaaactaaact

SEQ ID NO: 27575 - DNA, 20 bp, synthetic construct
  misc_feature 1..20: note = chemically synthesized
  source 1..20: mol_type = other DNA
agggtattcaaactaaactt

SEQ ID NO: 27576 - DNA, 20 bp, synthetic construct
  misc_feature 1..20: note = chemically synthesized
  source 1..20: mol_type = other DNA
gggtattcaaactaaacttg

SEQ ID NO: 27577 - DNA, 20 bp, synthetic construct
  misc_feature 1..20: note = chemically synthesized
  source 1..20: mol_type = other DNA
aaactaaacttggggaattt

SEQ ID NO: 27578 - DNA, 20 bp, synthetic construct
  misc_feature 1..20: note = chemically synthesized
  source 1..20: mol_type = other DNA
ctaaacttggggaatttaag

SEQ ID NO: 27579 - DNA, 20 bp, synthetic construct
  misc_feature 1..20: note = chemically synthesized
  source 1..20: mol_type = other DNA
taaacttggggaatttaaga

SEQ ID NO: 27580 - DNA, 20 bp, synthetic construct
  misc_feature 1..20: note = chemically synthesized
  source 1..20: mol_type = other DNA
gaatttaagaaggccttctg

SEQ ID NO: 27581 - DNA, 20 bp, synthetic construct
  misc_feature 1..20: note = chemically synthesized
  source 1..20: mol_type = other DNA
aatttaagaaggccttctga

SEQ ID NO: 27582 - DNA, 20 bp, synthetic construct
  misc_feature 1..20: note = chemically synthesized
  source 1..20: mol_type = other DNA
ttctgaaggacatcatatct

SEQ ID NO: 27583 - DNA, 20 bp, synthetic construct
  misc_feature 1..20: note = chemically synthesized
  source 1..20: mol_type = other DNA
aaggacatcatatctaagct

SEQ ID NO: 27584 - DNA, 20 bp, synthetic construct
  misc_feature 1..20: note = chemically synthesized
  source 1..20: mol_type = other DNA
aggacatcatatctaagcta

SEQ ID NO: 27585 - DNA, 20 bp, synthetic construct
  misc_feature 1..20: note = chemically synthesized
  source 1..20: mol_type = other DNA
acatcatatctaagctaagg

SEQ ID NO: 27586 - DNA, 20 bp, synthetic construct
  misc_feature 1..20: note = chemically synthesized
  source 1..20: mol_type = other DNA
catcatatctaagctaaggt

SEQ ID NO: 27587 - DNA, 20 bp, synthetic construct
  misc_feature 1..20: note = chemically synthesized
  source 1..20: mol_type = other DNA
taagctaaggtgggttatat

SEQ ID NO: 27588 - DNA, 20 bp, synthetic construct
  misc_feature 1..20: note = chemically synthesized
  source 1..20: mol_type = other DNA
gctaaggtgggttatattag

SEQ ID NO: 27589 - DNA, 20 bp, synthetic construct
  misc_feature 1..20: note = chemically synthesized
  source 1..20: mol_type = other DNA
aaggtgggttatattagtag

SEQ ID NO: 27590 - DNA, 20 bp, synthetic construct
  misc_feature 1..20: note = chemically synthesized
  source 1..20: mol_type = other DNA
ttatattagtagaagttaac

SEQ ID NO: 27591 - DNA, 20 bp, synthetic construct
  misc_feature 1..20: note = chemically synthesized
  source 1..20: mol_type = other DNA
tagtagaagttaactagaca

SEQ ID NO: 27592 - DNA, 20 bp, synthetic construct
  misc_feature 1..20: note = chemically synthesized
  source 1..20: mol_type = other DNA
aagttaactagacaaagatt

SEQ ID NO: 27593 - DNA, 20 bp, synthetic construct
  misc_feature 1..20: note = chemically synthesized
  source 1..20: mol_type = other DNA
agttaactagacaaagatta

SEQ ID NO: 27594 - DNA, 20 bp, synthetic construct
  misc_feature 1..20: note = chemically synthesized
  source 1..20: mol_type = other DNA
gttaactagacaaagattaa

SEQ ID NO: 27595 - DNA, 20 bp, synthetic construct
  misc_feature 1..20: note = chemically synthesized
  source 1..20: mol_type = other DNA
actagacaaagattaaggga

SEQ ID NO: 27596 - DNA, 20 bp, synthetic construct
  misc_feature 1..20: note = chemically synthesized
  source 1..20: mol_type = other DNA
agattaagggaaagctattt

SEQ ID NO: 27597 - DNA, 20 bp, synthetic construct
  misc_feature 1..20: note = chemically synthesized
  source 1..20: mol_type = other DNA
gattaagggaaagctatttc

SEQ ID NO: 27598 - DNA, 20 bp, synthetic construct
  misc_feature 1..20: note = chemically synthesized
  source 1..20: mol_type = other DNA
aggaaaaaatgtttttattc

SEQ ID NO: 27599 - DNA, 20 bp, synthetic construct
  misc_feature 1..20: note = chemically synthesized
  source 1..20: mol_type = other DNA
ggaaaaaatgtttttattcc

SEQ ID NO: 27600 - DNA, 20 bp, synthetic construct
  misc_feature 1..20: note = chemically synthesized
  source 1..20: mol_type = other DNA
aaaaatgtttttattccagg

SEQ ID NO: 27601 - DNA, 20 bp, synthetic construct
  misc_feature 1..20: note = chemically synthesized
  source 1..20: mol_type = other DNA
aaatacaaatgtttacctat

SEQ ID NO: 27602 - DNA, 20 bp, synthetic construct
  misc_feature 1..20: note = chemically synthesized
  source 1..20: mol_type = other DNA
acaaatgtttacctatgagc

SEQ ID NO: 27603 - DNA, 20 bp, synthetic construct
  misc_feature 1..20: note = chemically synthesized
  source 1..20: mol_type = other DNA
ttacctatgagcaagcatac

SEQ ID NO: 27604 - DNA, 20 bp, synthetic construct
  misc_feature 1..20: note = chemically synthesized
  source 1..20: mol_type = other DNA
agcaagcatactagataaac

SEQ ID NO: 27605 - DNA, 20 bp, synthetic construct
  misc_feature 1..20: note = chemically synthesized
  source 1..20: mol_type = other DNA
aagcatactagataaactgg

SEQ ID NO: 27606 - DNA, 20 bp, synthetic construct
  misc_feature 1..20: note = chemically synthesized
  source 1..20: mol_type = other DNA
gataaactggaagaattgtt

SEQ ID NO: 27607 - DNA, 20 bp, synthetic construct
  misc_feature 1..20: note = chemically synthesized
  source 1..20: mol_type = other DNA
tcattaacaccgtgaatata

SEQ ID NO: 27608 - DNA, 20 bp, synthetic construct
  misc_feature 1..20: note = chemically synthesized
  source 1..20: mol_type = other DNA
attaacaccgtgaatataca

SEQ ID NO: 27609 - DNA, 20 bp, synthetic construct
  misc_feature 1..20: note = chemically synthesized
  source 1..20: mol_type = other DNA
ttaacaccgtgaatatacag

SEQ ID NO: 27610 - DNA, 20 bp, synthetic construct
  misc_feature 1..20: note = chemically synthesized
  source 1..20: mol_type = other DNA
cgtgaatatacagaggaaat

SEQ ID NO: 27611 - DNA, 20 bp, synthetic construct
  misc_feature 1..20: note = chemically synthesized
  source 1..20: mol_type = other DNA
gtgaatatacagaggaaatt

SEQ ID NO: 27612 - DNA, 20 bp, synthetic construct
  misc_feature 1..20: note = chemically synthesized
  source 1..20: mol_type = other DNA
atatacagaggaaattagga

SEQ ID NO: 27613 - DNA, 20 bp, synthetic construct
  misc_feature 1..20: note = chemically synthesized
  source 1..20: mol_type = other DNA
cagaggaaattaggatagat

SEQ ID NO: 27614 - DNA, 20 bp, synthetic construct
  misc_feature 1..20: note = chemically synthesized
  source 1..20: mol_type = other DNA
aattaggatagataagaaaa

SEQ ID NO: 27615 - DNA, 20 bp, synthetic construct
  misc_feature 1..20: note = chemically synthesized
  source 1..20: mol_type = other DNA
attaggatagataagaaaat

SEQ ID NO: 27616 - DNA, 20 bp, synthetic construct
  misc_feature 1..20: note = chemically synthesized
  source 1..20: mol_type = other DNA
ataagaaaataggatataca

SEQ ID NO: 27617 - DNA, 20 bp, synthetic construct
  misc_feature 1..20: note = chemically synthesized
  source 1..20: mol_type = other DNA
aagaaaataggatatacacg

SEQ ID NO: 27618 - DNA, 20 bp, synthetic construct
  misc_feature 1..20: note = chemically synthesized
  source 1..20: mol_type = other DNA
gaaaataggatatacacgga

SEQ ID NO: 27619 - DNA, 20 bp, synthetic construct
  misc_feature 1..20: note = chemically synthesized
  source 1..20: mol_type = other DNA
gatatacacggagagaaaat

SEQ ID NO: 27620 - DNA, 20 bp, synthetic construct
  misc_feature 1..20: note = chemically synthesized
  source 1..20: mol_type = other DNA
atatacacggagagaaaata

SEQ ID NO: 27621 - DNA, 20 bp, synthetic construct
  misc_feature 1..20: note = chemically synthesized
  source 1..20: mol_type = other DNA
tacacggagagaaaataagg

SEQ ID NO: 27622 - DNA, 20 bp, synthetic construct
  misc_feature 1..20: note = chemically synthesized
  source 1..20: mol_type = other DNA
acacggagagaaaataaggt

SEQ ID NO: 27623 - DNA, 20 bp, synthetic construct
  misc_feature 1..20: note = chemically synthesized
  source 1..20: mol_type = other DNA
cacggagagaaaataaggta

SEQ ID NO: 27624 - DNA, 20 bp, synthetic construct
  misc_feature 1..20: note = chemically synthesized
  source 1..20: mol_type = other DNA
tatacgtctctcttgctata

SEQ ID NO: 27625 - DNA, 20 bp, synthetic construct
  misc_feature 1..20: note = chemically synthesized
  source 1..20: mol_type = other DNA
acgtctctcttgctatatag

SEQ ID NO: 27626 - DNA, 20 bp, synthetic construct
  misc_feature 1..20: note = chemically synthesized
  source 1..20: mol_type = other DNA
atatagtagtcaactgaata

SEQ ID NO: 27627 - DNA, 20 bp, synthetic construct
  misc_feature 1..20: note = chemically synthesized
  source 1..20: mol_type = other DNA
tagtagtcaactgaatacag

SEQ ID NO: 27628 - DNA, 20 bp, synthetic construct
  misc_feature 1..20: note = chemically synthesized
  source 1..20: mol_type = other DNA
aactgaatacagtagtacaa

SEQ ID NO: 27629 - DNA, 20 bp, synthetic construct
  misc_feature 1..20: note = chemically synthesized
  source 1..20: mol_type = other DNA
aatacagtagtacaaaagat

SEQ ID NO: 27630 - DNA, 20 bp, synthetic construct
  misc_feature 1..20: note = chemically synthesized
  source 1..20: mol_type = other DNA
tagtacaaaagatgagtcac

SEQ ID NO: 27631 - DNA, 20 bp, synthetic construct
  misc_feature 1..20: note = chemically synthesized
  source 1..20: mol_type = other DNA
caaaagatgagtcactggaa

SEQ ID NO: 27632 - DNA, 20 bp, synthetic construct
  misc_feature 1..20: note = chemically synthesized
  source 1..20: mol_type = other DNA
agtcactggaatagtcctga

SEQ ID NO: 27633 - DNA, 20 bp, synthetic construct
  misc_feature 1..20: note = chemically synthesized
  source 1..20: mol_type = other DNA
tcactggaatagtcctgaaa

SEQ ID NO: 27634 - DNA, 20 bp, synthetic construct
  misc_feature 1..20: note = chemically synthesized
  source 1..20: mol_type = other DNA
cctgaaagagtgatctgaat

SEQ ID NO: 27635 - DNA, 20 bp, synthetic construct
  misc_feature 1..20: note = chemically synthesized
  source 1..20: mol_type = other DNA
aagagtgatctgaattagaa

SEQ ID NO: 27636 - DNA, 20 bp, synthetic construct
  misc_feature 1..20: note = chemically synthesized
  source 1..20: mol_type = other DNA
gaattagaatagcatcaatg

SEQ ID NO: 27637 - DNA, 20 bp, synthetic construct
  misc_feature 1..20: note = chemically synthesized
  source 1..20: mol_type = other DNA
aattagaatagcatcaatga

SEQ ID NO: 27638 - DNA, 20 bp, synthetic construct
  misc_feature 1..20: note = chemically synthesized
  source 1..20: mol_type = other DNA
aatagcatcaatgaaggtga

SEQ ID NO: 27639 - DNA, 20 bp, synthetic construct
  misc_feature 1..20: note = chemically synthesized
  source 1..20: mol_type = other DNA
gcatcaatgaaggtgacggt

SEQ ID NO: 27640 - DNA, 20 bp, synthetic construct
  misc_feature 1..20: note = chemically synthesized
  source 1..20: mol_type = other DNA
tgaaggtgacggtgagtaaa

SEQ ID NO: 27641 - DNA, 20 bp, synthetic construct
  misc_feature 1..20: note = chemically synthesized
  source 1..20: mol_type = other DNA
gacggtgagtaaacagactt

SEQ ID NO: 27642 - DNA, 20 bp, synthetic construct
  misc_feature 1..20: note = chemically synthesized
  source 1..20: mol_type = other DNA
acggtgagtaaacagacttg

SEQ ID NO: 27643 - DNA, 20 bp, synthetic construct
  misc_feature 1..20: note = chemically synthesized
  source 1..20: mol_type = other DNA
gtaaacagacttgaggtatt

SEQ ID NO: 27644 - DNA, 20 bp, synthetic construct
  misc_feature 1..20: note = chemically synthesized
  source 1..20: mol_type = other DNA
gacttgaggtattcagtaaa

SEQ ID NO: 27645 - DNA, 20 bp, synthetic construct
  misc_feature 1..20: note = chemically synthesized
  source 1..20: mol_type = other DNA
tattcagtaaacagaaaccc

SEQ ID NO: 27646 - DNA, 20 bp, synthetic construct
  misc_feature 1..20: note = chemically synthesized
  source 1..20: mol_type = other DNA
attcagtaaacagaaaccct

SEQ ID NO: 27647 - DNA, 20 bp, synthetic construct
  misc_feature 1..20: note = chemically synthesized
  source 1..20: mol_type = other DNA
taaacagaaaccctaggact

SEQ ID NO: 27648 - DNA, 20 bp, synthetic construct
  misc_feature 1..20: note = chemically synthesized
  source 1..20: mol_type = other DNA
aaaccctaggacttggtgat

SEQ ID NO: 27649 - DNA, 20 bp, synthetic construct
  misc_feature 1..20: note = chemically synthesized
  source 1..20: mol_type = other DNA
ggacttggtgattggttgat

SEQ ID NO: 27650 - DNA, 20 bp, synthetic construct
  misc_feature 1..20: note = chemically synthesized
  source 1..20: mol_type = other DNA
gattggttgattagatacta

SEQ ID NO: 27651 - DNA, 20 bp, synthetic construct
  misc_feature 1..20: note = chemically synthesized
  source 1..20: mol_type = other DNA
ttggttgattagatactatg

SEQ ID NO: 27652 - DNA, 20 bp, synthetic construct
  misc_feature 1..20: note = chemically synthesized
  source 1..20: mol_type = other DNA
ggttgattagatactatgga

SEQ ID NO: 27653 - DNA, 20 bp, synthetic construct
  misc_feature 1..20: note = chemically synthesized
  source 1..20: mol_type = other DNA
tactatggagagatgtgata

SEQ ID NO: 27654 - DNA, 20 bp, synthetic construct
  misc_feature 1..20: note = chemically synthesized
  source 1..20: mol_type = other DNA
ctatggagagatgtgatatg

SEQ ID NO: 27655 - DNA, 20 bp, synthetic construct
  misc_feature 1..20: note = chemically synthesized
  source 1..20: mol_type = other DNA
tggagagatgtgatatggag

SEQ ID NO: 27656 - DNA, 20 bp, synthetic construct
  misc_feature 1..20: note = chemically synthesized
  source 1..20: mol_type = other DNA
taaaacatgacatttgactt

SEQ ID NO: 27657 - DNA, 20 bp, synthetic construct
  misc_feature 1..20: note = chemically synthesized
  source 1..20: mol_type = other DNA
gacatttgacttgagccact

SEQ ID NO: 27658 - DNA, 20 bp, synthetic construct
  misc_feature 1..20: note = chemically synthesized
  source 1..20: mol_type = other DNA
tgagccactgagataatgaa

SEQ ID NO: 27659 - DNA, 20 bp, synthetic construct
  misc_feature 1..20: note = chemically synthesized
  source 1..20: mol_type = other DNA
cactgagataatgaaaagta

SEQ ID NO: 27660 - DNA, 20 bp, synthetic construct
  misc_feature 1..20: note = chemically synthesized
  source 1..20: mol_type = other DNA
atgaaaagtacagatgttgc

SEQ ID NO: 27661 - DNA, 20 bp, synthetic construct
  misc_feature 1..20: note = chemically synthesized
  source 1..20: mol_type = other DNA
gaaaagtacagatgttgcta

SEQ ID NO: 27662 - DNA, 20 bp, synthetic construct
  misc_feature 1..20: note = chemically synthesized
  source 1..20: mol_type = other DNA
gtacagatgttgctagagtc

SEQ ID NO: 27663 - DNA, 20 bp, synthetic construct
  misc_feature 1..20: note = chemically synthesized
  source 1..20: mol_type = other DNA
tgctagagtctggaaatcaa

SEQ ID NO: 27664 - DNA, 20 bp, synthetic construct
  misc_feature 1..20: note = chemically synthesized
  source 1..20: mol_type = other DNA
ctagagtctggaaatcaaaa

SEQ ID NO: 27665 - DNA, 20 bp, synthetic construct
  misc_feature 1..20: note = chemically synthesized
  source 1..20: mol_type = other DNA
agagtctggaaatcaaaaga

SEQ ID NO: 27666 - DNA, 20 bp, synthetic construct
  misc_feature 1..20: note = chemically synthesized
  source 1..20: mol_type = other DNA
tctggaaatcaaaagagaga

SEQ ID NO: 27667 - DNA, 20 bp, synthetic construct
  misc_feature 1..20: note = chemically synthesized
  source 1..20: mol_type = other DNA
aaatcaaaagagagaaagac

SEQ ID NO: 27668 - DNA, 20 bp, synthetic construct
  misc_feature 1..20: note = chemically synthesized
  source 1..20: mol_type = other DNA
aaagagagaaagacaagttc

SEQ ID NO: 27669 - DNA, 20 bp, synthetic construct
  misc_feature 1..20: note = chemically synthesized
  source 1..20: mol_type = other DNA
atttgttatttatcaatata

SEQ ID NO: 27670 - DNA, 20 bp, synthetic construct
  misc_feature 1..20: note = chemically synthesized
  source 1..20: mol_type = other DNA
gttatttatcaatatatgga

SEQ ID NO: 27671 - DNA, 20 bp, synthetic construct
  misc_feature 1..20: note = chemically synthesized
  source 1..20: mol_type = other DNA
atggatggtaaatgaaatca

SEQ ID NO: 27672 - DNA, 20 bp, synthetic construct
  misc_feature 1..20: note = chemically synthesized
  source 1..20: mol_type = other DNA
gatggtaaatgaaatcatgg

SEQ ID NO: 27673 - DNA, 20 bp, synthetic construct
  misc_feature 1..20: note = chemically synthesized
  source 1..20: mol_type = other DNA
ggtaaatgaaatcatggtag

SEQ ID NO: 27674 - DNA, 20 bp, synthetic construct
  misc_feature 1..20: note = chemically synthesized
  source 1..20: mol_type = other DNA
tcatggtagtggatgacatt

SEQ ID NO: 27675 - DNA, 20 bp, synthetic construct
  misc_feature 1..20: note = chemically synthesized
  source 1..20: mol_type = other DNA
tggtagtggatgacattaag

SEQ ID NO: 27676 - DNA, 20 bp, synthetic construct
  misc_feature 1..20: note = chemically synthesized
  source 1..20: mol_type = other DNA
atgacattaagaagaaataa

SEQ ID NO: 27677 - DNA, 20 bp, synthetic construct
  misc_feature 1..20: note = chemically synthesized
  source 1..20: mol_type = other DNA
taagaagaaataatagaata

SEQ ID NO: 27678 - DNA, 20 bp, synthetic construct
  misc_feature 1..20: note = chemically synthesized
  source 1..20: mol_type = other DNA
aagaaataatagaatatggc

SEQ ID NO: 27679 - DNA, 20 bp, synthetic construct
  misc_feature 1..20: note = chemically synthesized
  source 1..20: mol_type = other DNA
agaaataatagaatatggcc

SEQ ID NO: 27680 - DNA, 20 bp, synthetic construct
  misc_feature 1..20: note = chemically synthesized
  source 1..20: mol_type = other DNA
aatatggccaggaaattgcc

SEQ ID NO: 27681 - DNA, 20 bp, synthetic construct
  misc_feature 1..20: note = chemically synthesized
  source 1..20: mol_type = other DNA
atatggccaggaaattgcca

SEQ ID NO: 27682 - DNA, 20 bp, synthetic construct
  misc_feature 1..20: note = chemically synthesized
  source 1..20: mol_type = other DNA
ggccaggaaattgccaagga

SEQ ID NO: 27683 - DNA, 20 bp, synthetic construct
  misc_feature 1..20: note = chemically synthesized
  source 1..20: mol_type = other DNA
gccaggaaattgccaaggat

SEQ ID NO: 27684 - DNA, 20 bp, synthetic construct
  misc_feature 1..20: note = chemically synthesized
  source 1..20: mol_type = other DNA
aggaaattgccaaggatggg

SEQ ID NO: 27685 - DNA, 20 bp, synthetic construct
  misc_feature 1..20: note = chemically synthesized
  source 1..20: mol_type = other DNA
ggatgggaagaactatactt

SEQ ID NO: 27686 - DNA, 20 bp, synthetic construct
  misc_feature 1..20: note = chemically synthesized
  source 1..20: mol_type = other DNA
gatgggaagaactatactta

SEQ ID NO: 27687 - DNA, 20 bp, synthetic construct
  misc_feature 1..20: note = chemically synthesized
  source 1..20: mol_type = other DNA
atgggaagaactatacttaa

SEQ ID NO: 27688 - DNA, 20 bp, synthetic construct
  misc_feature 1..20: note = chemically synthesized
  source 1..20: mol_type = other DNA
aagaactatacttaagggtt

SEQ ID NO: 27689 - DNA, 20 bp, synthetic construct
  misc_feature 1..20: note = chemically synthesized
  source 1..20: mol_type = other DNA
tacttaagggttgagcaata

SEQ ID NO: 27690 - DNA, 20 bp, synthetic construct
  misc_feature 1..20: note = chemically synthesized
  source 1..20: mol_type = other DNA
acttaagggttgagcaataa

SEQ ID NO: 27691 - DNA, 20 bp, synthetic construct
  misc_feature 1..20: note = chemically synthesized
  source 1..20: mol_type = other DNA
gttgagcaataaaggcacac

SEQ ID NO: 27692 - DNA, 20 bp, synthetic construct
  misc_feature 1..20: note = chemically synthesized
  source 1..20: mol_type = other DNA
gcaataaaggcacaccagca

SEQ ID NO: 27693 - DNA, 20 bp, synthetic construct
  misc_feature 1..20: note = chemically synthesized
  source 1..20: mol_type = other DNA
aataaaggcacaccagcaaa

SEQ ID NO: 27694 - DNA, 20 bp, synthetic construct
  misc_feature 1..20: note = chemically synthesized
  source 1..20: mol_type = other DNA
ataaaggcacaccagcaaag

SEQ ID NO: 27695 - DNA, 20 bp, synthetic construct
  misc_feature 1..20: note = chemically synthesized
  source 1..20: mol_type = other DNA
aaggcacaccagcaaagagg

SEQ ID NO: 27696 - DNA, 20 bp, synthetic construct
  misc_feature 1..20: note = chemically synthesized
  source 1..20: mol_type = other DNA
ggcacaccagcaaagaggca

SEQ ID NO: 27697 - DNA, 20 bp, synthetic construct
  misc_feature 1..20: note = chemically synthesized
  source 1..20: mol_type = other DNA
cacaccagcaaagaggcaga

SEQ ID NO: 27698 - DNA, 20 bp, synthetic construct
  misc_feature 1..20: note = chemically synthesized
  source 1..20: mol_type = other DNA
acaccagcaaagaggcagag

SEQ ID NO: 27699 - DNA, 20 bp, synthetic construct
  misc_feature 1..20: note = chemically synthesized
  source 1..20: mol_type = other DNA
gaactgaaataattgaaata

SEQ ID NO: 27700 - DNA, 20 bp, synthetic construct
  misc_feature 1..20: note = chemically synthesized
  source 1..20: mol_type = other DNA
actgaaataattgaaataca

SEQ ID NO: 27701 - DNA, 20 bp, synthetic construct
  misc_feature 1..20: note = chemically synthesized
  source 1..20: mol_type = other DNA
ctgaaataattgaaatacag

SEQ ID NO: 27702 - DNA, 20 bp, synthetic construct
  misc_feature 1..20: note = chemically synthesized
  source 1..20: mol_type = other DNA
attgaaatacagaggaaaac

SEQ ID NO: 27703 - DNA, 20 bp, synthetic construct
  misc_feature 1..20: note = chemically synthesized
  source 1..20: mol_type = other DNA
aaatacagaggaaaactggt

SEQ ID NO: 27704 - DNA, 20 bp, synthetic construct
  misc_feature 1..20: note = chemically synthesized
  source 1..20: mol_type = other DNA
aatacagaggaaaactggtg

SEQ ID NO: 27705 - DNA, 20 bp, synthetic construct
  misc_feature 1..20: note = chemically synthesized
  source 1..20: mol_type = other DNA
atacagaggaaaactggtga

SEQ ID NO: 27706 - DNA, 20 bp, synthetic construct
  misc_feature 1..20: note = chemically synthesized
  source 1..20: mol_type = other DNA
agaggaaaactggtgagggc

SEQ ID NO: 27707 - DNA, 20 bp, synthetic construct
  misc_feature 1..20: note = chemically synthesized
  source 1..20: mol_type = other DNA
gaggaaaactggtgagggcg

SEQ ID NO: 27708 - DNA, 20 bp, synthetic construct
  misc_feature 1..20: note = chemically synthesized
  source 1..20: mol_type = other DNA
tggtgagggcgaggttatca

SEQ ID NO: 27709 - DNA, 20 bp, synthetic construct
  misc_feature 1..20: note = chemically synthesized
  source 1..20: mol_type = other DNA
gagggcgaggttatcaaaga

SEQ ID NO: 27710 - DNA, 20 bp, synthetic construct
  misc_feature 1..20: note = chemically synthesized
  source 1..20: mol_type = other DNA
ttatcaaagaaagttcaata

SEQ ID NO: 27711 - DNA, 20 bp, synthetic construct
  misc_feature 1..20: note = chemically synthesized
  source 1..20: mol_type = other DNA
tcaaagaaagttcaataaag

SEQ ID NO: 27712 - DNA, 20 bp, synthetic construct
  misc_feature 1..20: note = chemically synthesized
  source 1..20: mol_type = other DNA
agaaagttcaataaagtagt

SEQ ID NO: 27713 - DNA, 20 bp, synthetic construct
  misc_feature 1..20: note = chemically synthesized
  source 1..20: mol_type = other DNA
gttcaataaagtagtgagat

SEQ ID NO: 27714 - DNA, 20 bp, synthetic construct
  misc_feature 1..20: note = chemically synthesized
  source 1..20: mol_type = other DNA
caataaagtagtgagattgg

SEQ ID NO: 27715 - DNA, 20 bp, synthetic construct
  misc_feature 1..20: note = chemically synthesized
  source 1..20: mol_type = other DNA
gtgagattggcagaattcat

SEQ ID NO: 27716 - DNA, 20 bp, synthetic construct
  misc_feature 1..20: note = chemically synthesized
  source 1..20: mol_type = other DNA
tgagattggcagaattcata

SEQ ID NO: 27717 - DNA, 20 bp, synthetic construct
  misc_feature 1..20: note = chemically synthesized
  source 1..20: mol_type = other DNA
gagattggcagaattcataa

SEQ ID NO: 27718 - DNA, 20 bp, synthetic construct
  misc_feature 1..20: note = chemically synthesized
  source 1..20: mol_type = other DNA
attggcagaattcataaggg

SEQ ID NO: 27719 - DNA, 20 bp, synthetic construct
  misc_feature 1..20: note = chemically synthesized
  source 1..20: mol_type = other DNA
tggcagaattcataagggtg

SEQ ID NO: 27720 - DNA, 20 bp, synthetic construct
  misc_feature 1..20: note = chemically synthesized
  source 1..20: mol_type = other DNA
cagaattcataagggtggag

SEQ ID NO: 27721 - DNA, 20 bp, synthetic construct
  misc_feature 1..20: note = chemically synthesized
  source 1..20: mol_type = other DNA
gggtggagtagataatacta

SEQ ID NO: 27722 - DNA, 20 bp, synthetic construct
  misc_feature 1..20: note = chemically synthesized
  source 1..20: mol_type = other DNA
ggtggagtagataatactaa

SEQ ID NO: 27723 - DNA, 20 bp, synthetic construct
  misc_feature 1..20: note = chemically synthesized
  source 1..20: mol_type = other DNA
actaaaggtgatgatgacca

SEQ ID NO: 27724 - DNA, 20 bp, synthetic construct
  misc_feature 1..20: note = chemically synthesized
  source 1..20: mol_type = other DNA
gcttgtgatgttgtgaatgt

SEQ ID NO: 27725 - DNA, 20 bp, synthetic construct
  misc_feature 1..20: note = chemically synthesized
  source 1..20: mol_type = other DNA
tgatgttgtgaatgttagtg

SEQ ID NO: 27726 - DNA, 20 bp, synthetic construct
  misc_feature 1..20: note = chemically synthesized
  source 1..20: mol_type = other DNA
tgtgaatgttagtgaagctg

SEQ ID NO: 27727 - DNA, 20 bp, synthetic construct
  misc_feature 1..20: note = chemically synthesized
  source 1..20: mol_type = other DNA
gaagctgaagaattaataac

SEQ ID NO: 27728 - DNA, 20 bp, synthetic construct
  misc_feature 1..20: note = chemically synthesized
  source 1..20: mol_type = other DNA
cagaaatatccatttatttt

SEQ ID NO: 27729 - DNA, 20 bp, synthetic construct
  misc_feature 1..20: note = chemically synthesized
  source 1..20: mol_type = other DNA
ttattttcagctcaatcccc

SEQ ID NO: 27730 - DNA, 20 bp, synthetic construct
  misc_feature 1..20: note = chemically synthesized
  source 1..20: mol_type = other DNA
tattttcagctcaatccccg

SEQ ID NO: 27731 - DNA, 20 bp, synthetic construct
  misc_feature 1..20: note = chemically synthesized
  source 1..20: mol_type = other DNA
gctcaatccccgaggaatgt

SEQ ID NO: 27732 - DNA, 20 bp, synthetic construct
  misc_feature 1..20: note = chemically synthesized
  source 1..20: mol_type = other DNA
atgtcagtccaatattcgct

SEQ ID NO: 27733 - DNA, 20 bp, synthetic construct
  misc_feature 1..20: note = chemically synthesized
  source 1..20: mol_type = other DNA
tgctgctatccaacattact

SEQ ID NO: 27734 - DNA, 20 bp, synthetic construct
  misc_feature 1..20: note = chemically synthesized
  source 1..20: mol_type = other DNA
ctatccaacattactcagtt

SEQ ID NO: 27735 - DNA, 20 bp, synthetic construct
  misc_feature 1..20: note = chemically synthesized
  source 1..20: mol_type = other DNA
agccccatattctatctcac

SEQ ID NO: 27736 - DNA, 20 bp, synthetic construct
  misc_feature 1..20: note = chemically synthesized
  source 1..20: mol_type = other DNA
ttctatctcaccagctttcc

SEQ ID NO: 27737 - DNA, 20 bp, synthetic construct
  misc_feature 1..20: note = chemically synthesized
  source 1..20: mol_type = other DNA
tctcaccagctttcctggat

SEQ ID NO: 27738 - DNA, 20 bp, synthetic construct
  misc_feature 1..20: note = chemically synthesized
  source 1..20: mol_type = other DNA
caccagctttcctggattgg

SEQ ID NO: 27739 - DNA, 20 bp, synthetic construct
  misc_feature 1..20: note = chemically synthesized
  source 1..20: mol_type = other DNA
accagctttcctggattgga

SEQ ID NO: 27740 - DNA, 20 bp, synthetic construct
  misc_feature 1..20: note = chemically synthesized
  source 1..20: mol_type = other DNA
gattggaaggcatcaaacac

SEQ ID NO: 27741 - DNA, 20 bp, synthetic construct
  misc_feature 1..20: note = chemically synthesized
  source 1..20: mol_type = other DNA
cccctttttctttatgtaca

SEQ ID NO: 27742 - DNA, 20 bp, synthetic construct
  misc_feature 1..20: note = chemically synthesized
  source 1..20: mol_type = other DNA
tatgtacatggttgccatct

SEQ ID NO: 27743 - DNA, 20 bp, synthetic construct
  misc_feature 1..20: note = chemically synthesized
  source 1..20: mol_type = other DNA
atgtacatggttgccatctc

SEQ ID NO: 27744 - DNA, 20 bp, synthetic construct
  misc_feature 1..20: note = chemically synthesized
  source 1..20: mol_type = other DNA
gtttcattctgatcattatt

SEQ ID NO: 27745 - DNA, 20 bp, synthetic construct
  misc_feature 1..20: note = chemically synthesized
  source 1..20: mol_type = other DNA
gtactatctactatccttgc

SEQ ID NO: 27746 - DNA, 20 bp, synthetic construct
  misc_feature 1..20: note = chemically synthesized
  source 1..20: mol_type = other DNA
cttgctggccctcactgacc

SEQ ID NO: 27747 - DNA, 20 bp, synthetic construct
  misc_feature 1..20: note = chemically synthesized
  source 1..20: mol_type = other DNA
ttgctggccctcactgacct

SEQ ID NO: 27748 - DNA, 20 bp, synthetic construct
  misc_feature 1..20: note = chemically synthesized
  source 1..20: mol_type = other DNA
tgctggccctcactgacctg

SEQ ID NO: 27749 - DNA, 20 bp, synthetic construct
  misc_feature 1..20: note = chemically synthesized
  source 1..20: mol_type = other DNA
gtccacgttgcccaccacta

SEQ ID NO: 27750 - DNA, 20 bp, synthetic construct
  misc_feature 1..20: note = chemically synthesized
  source 1..20: mol_type = other DNA
tccacgttgcccaccactat

SEQ ID NO: 27751 - DNA, 20 bp, synthetic construct
  misc_feature 1..20: note = chemically synthesized
  source 1..20: mol_type = other DNA
ccacgttgcccaccactatg

SEQ ID NO: 27752 - DNA, 20 bp, synthetic construct
  misc_feature 1..20: note = chemically synthesized
  source 1..20: mol_type = other DNA
ccaccactatggggatcttc

SEQ ID NO: 27753 - DNA, 20 bp, synthetic construct
  misc_feature 1..20: note = chemically synthesized
  source 1..20: mol_type = other DNA
atcttctggtttaactccca

SEQ ID NO: 27754 - DNA, 20 bp, synthetic construct
  misc_feature 1..20: note = chemically synthesized
  source 1..20: mol_type = other DNA
aactcccatagtatctactt

SEQ ID NO: 27755 - DNA, 20 bp, synthetic construct
  misc_feature 1..20: note = chemically synthesized
  source 1..20: mol_type = other DNA
ctcccatagtatctactttg

SEQ ID NO: 27756 - DNA, 20 bp, synthetic construct
  misc_feature 1..20: note = chemically synthesized
  source 1..20: mol_type = other DNA
actttggagcgtgtcaaatc

SEQ ID NO: 27757 - DNA, 20 bp, synthetic construct
  misc_feature 1..20: note = chemically synthesized
  source 1..20: mol_type = other DNA
catccactctttttccttca

SEQ ID NO: 27758 - DNA, 20 bp, synthetic construct
  misc_feature 1..20: note = chemically synthesized
  source 1..20: mol_type = other DNA
tccactctttttccttcatg

SEQ ID NO: 27759 - DNA, 20 bp, synthetic construct
  misc_feature 1..20: note = chemically synthesized
  source 1..20: mol_type = other DNA
tttttccttcatggagtcct

SEQ ID NO: 27760 - DNA, 20 bp, synthetic construct
  misc_feature 1..20: note = chemically synthesized
  source 1..20: mol_type = other DNA
gatgtcctttgaccgccttg

SEQ ID NO: 27761 - DNA, 20 bp, synthetic construct
  misc_feature 1..20: note = chemically synthesized
  source 1..20: mol_type = other DNA
gtggccatctgccaccctct

SEQ ID NO: 27762 - DNA, 20 bp, synthetic construct
  misc_feature 1..20: note = chemically synthesized
  source 1..20: mol_type = other DNA
tggccatctgccaccctctg

SEQ ID NO: 27763 - DNA, 20 bp, synthetic construct
  misc_feature 1..20: note = chemically synthesized
  source 1..20: mol_type = other DNA
ctgccaccctctgaggtatt

SEQ ID NO: 27764 - DNA, 20 bp, synthetic construct
  misc_feature 1..20: note = chemically synthesized
  source 1..20: mol_type = other DNA
aggtattcggtcattatcac

SEQ ID NO: 27765 - DNA, 20 bp, synthetic construct
  misc_feature 1..20: note = chemically synthesized
  source 1..20: mol_type = other DNA
attcggtcattatcactggc

SEQ ID NO: 27766 - DNA, 20 bp, synthetic construct
  misc_feature 1..20: note = chemically synthesized
  source 1..20: mol_type = other DNA
ggtcattatcactggccagc

SEQ ID NO: 27767 - DNA, 20 bp, synthetic construct
  misc_feature 1..20: note = chemically synthesized
  source 1..20: mol_type = other DNA
cattatcactggccagcaag

SEQ ID NO: 27768 - DNA, 20 bp, synthetic construct
  misc_feature 1..20: note = chemically synthesized
  source 1..20: mol_type = other DNA
atcactggccagcaagtggt

SEQ ID NO: 27769 - DNA, 20 bp, synthetic construct
  misc_feature 1..20: note = chemically synthesized
  source 1..20: mol_type = other DNA
cactggccagcaagtggtca

SEQ ID NO: 27770 - DNA, 20 bp, synthetic construct
  misc_feature 1..20: note = chemically synthesized
  source 1..20: mol_type = other DNA
tggccagcaagtggtcagag

SEQ ID NO: 27771 - DNA, 20 bp, synthetic construct
  misc_feature 1..20: note = chemically synthesized
  source 1..20: mol_type = other DNA
ggccagcaagtggtcagagc

SEQ ID NO: 27772 - DNA, 20 bp, synthetic construct
  misc_feature 1..20: note = chemically synthesized
  source 1..20: mol_type = other DNA
caggcctaattgtcatcttc

SEQ ID NO: 27773 - DNA, 20 bp, synthetic construct
  misc_feature 1..20: note = chemically synthesized
  source 1..20: mol_type = other DNA
aggcctaattgtcatcttcc

SEQ ID NO: 27774 - DNA, 20 bp, synthetic construct
  misc_feature 1..20: note = chemically synthesized
  source 1..20: mol_type = other DNA
ggcctaattgtcatcttccg

SEQ ID NO: 27775 - DNA, 20 bp, synthetic construct
  misc_feature 1..20: note = chemically synthesized
  source 1..20: mol_type = other DNA
tgtcatcttccggggacctg

SEQ ID NO: 27776 - DNA, 20 bp, synthetic construct
  misc_feature 1..20: note = chemically synthesized
  source 1..20: mol_type = other DNA
tccctattgtcctcctcctg

SEQ ID NO: 27777 - DNA, 20 bp, synthetic construct
  misc_feature 1..20: note = chemically synthesized
  source 1..20: mol_type = other DNA
ccctattgtcctcctcctga

SEQ ID NO: 27778 - DNA, 20 bp, synthetic construct
  misc_feature 1..20: note = chemically synthesized
  source 1..20: mol_type = other DNA
ctgaaggcttttccctactg

SEQ ID NO: 27779 - DNA, 20 bp, synthetic construct
  misc_feature 1..20: note = chemically synthesized
  source 1..20: mol_type = other DNA
ttttccctactgtggatctg

SEQ ID NO: 27780 - DNA, 20 bp, synthetic construct
  misc_feature 1..20: note = chemically synthesized
  source 1..20: mol_type = other DNA
cccactcattttgcctgcac

SEQ ID NO: 27781 - DNA, 20 bp, synthetic construct
  misc_feature 1..20: note = chemically synthesized
  source 1..20: mol_type = other DNA
ccactcattttgcctgcacc

SEQ ID NO: 27782 - DNA, 20 bp, synthetic construct
  misc_feature 1..20: note = chemically synthesized
  source 1..20: mol_type = other DNA
ctcattttgcctgcaccagg

SEQ ID NO: 27783 - DNA, 20 bp, synthetic construct
  misc_feature 1..20: note = chemically synthesized
  source 1..20: mol_type = other DNA
gcctgcaccaggaagtgata

SEQ ID NO: 27784 - DNA, 20 bp, synthetic construct
  misc_feature 1..20: note = chemically synthesized
  source 1..20: mol_type = other DNA
gcaccaggaagtgatacagc

SEQ ID NO: 27785 - DNA, 20 bp, synthetic construct
  misc_feature 1..20: note = chemically synthesized
  source 1..20: mol_type = other DNA
agtgatacagctggcctgca

SEQ ID NO: 27786 - DNA, 20 bp, synthetic construct
  misc_feature 1..20: note = chemically synthesized
  source 1..20: mol_type = other DNA
atcaccttcaataatctgta

SEQ ID NO: 27787 - DNA, 20 bp, synthetic construct
  misc_feature 1..20: note = chemically synthesized
  source 1..20: mol_type = other DNA
caataatctgtatggactga

SEQ ID NO: 27788 - DNA, 20 bp, synthetic construct
  misc_feature 1..20: note = chemically synthesized
  source 1..20: mol_type = other DNA
taatctgtatggactgatgg

SEQ ID NO: 27789 - DNA, 20 bp, synthetic construct
  misc_feature 1..20: note = chemically synthesized
  source 1..20: mol_type = other DNA
tctgtatggactgatggtgg

SEQ ID NO: 27790 - DNA, 20 bp, synthetic construct
  misc_feature 1..20: note = chemically synthesized
  source 1..20: mol_type = other DNA
ggtagttttcactgtgatgc

SEQ ID NO: 27791 - DNA, 20 bp, synthetic construct
  misc_feature 1..20: note = chemically synthesized
  source 1..20: mol_type = other DNA
tttcactgtgatgctggacc

SEQ ID NO: 27792 - DNA, 20 bp, synthetic construct
  misc_feature 1..20: note = chemically synthesized
  source 1..20: mol_type = other DNA
gtgctcatcgcactgtccta

SEQ ID NO: 27793 - DNA, 20 bp, synthetic construct
  misc_feature 1..20: note = chemically synthesized
  source 1..20: mol_type = other DNA
ctatggactcatcctgcaca

SEQ ID NO: 27794 - DNA, 20 bp, synthetic construct
  misc_feature 1..20: note = chemically synthesized
  source 1..20: mol_type = other DNA
tggactcatcctgcacacag

SEQ ID NO: 27795 - DNA, 20 bp, synthetic construct
  misc_feature 1..20: note = chemically synthesized
  source 1..20: mol_type = other DNA
actcatcctgcacacagtag

SEQ ID NO: 27796 - DNA, 20 bp, synthetic construct
  misc_feature 1..20: note = chemically synthesized
  source 1..20: mol_type = other DNA
ctcatcctgcacacagtagc

SEQ ID NO: 27797 - DNA, 20 bp, synthetic construct
  misc_feature 1..20: note = chemically synthesized
  source 1..20: mol_type = other DNA
cctgcacacagtagcaggcc

SEQ ID NO: 27798 - DNA, 20 bp, synthetic construct
  misc_feature 1..20: note = chemically synthesized
  source 1..20: mol_type = other DNA
agtagcaggcctggcctccc

SEQ ID NO: 27799 - DNA, 20 bp, synthetic construct
  misc_feature 1..20: note = chemically synthesized
  source 1..20: mol_type = other DNA
tagcaggcctggcctcccaa

SEQ ID NO: 27800 - DNA, 20 bp, synthetic construct
  misc_feature 1..20: note = chemically synthesized
  source 1..20: mol_type = other DNA
agcaggcctggcctcccaag

SEQ ID NO: 27801 - DNA, 20 bp, synthetic construct
  misc_feature 1..20: note = chemically synthesized
  source 1..20: mol_type = other DNA
caggcctggcctcccaagag

SEQ ID NO: 27802 - DNA, 20 bp, synthetic construct
  misc_feature 1..20: note = chemically synthesized
  source 1..20: mol_type = other DNA
gcctggcctcccaagaggag

SEQ ID NO: 27803 - DNA, 20 bp, synthetic construct
  misc_feature 1..20: note = chemically synthesized
  source 1..20: mol_type = other DNA
aggagcagcgccgtgccttt

SEQ ID NO: 27804 - DNA, 20 bp, synthetic construct
  misc_feature 1..20: note = chemically synthesized
  source 1..20: mol_type = other DNA
cgctcctctctgtgctgtgc

SEQ ID NO: 27805 - DNA, 20 bp, synthetic construct
  misc_feature 1..20: note = chemically synthesized
  source 1..20: mol_type = other DNA
agtattctttgtgcccatga

SEQ ID NO: 27806 - DNA, 20 bp, synthetic construct
  misc_feature 1..20: note = chemically synthesized
  source 1..20: mol_type = other DNA
gtattctttgtgcccatgat

SEQ ID NO: 27807 - DNA, 20 bp, synthetic construct
  misc_feature 1..20: note = chemically synthesized
  source 1..20: mol_type = other DNA
tattctttgtgcccatgatg

SEQ ID NO: 27808 - DNA, 20 bp, synthetic construct
  misc_feature 1..20: note = chemically synthesized
  source 1..20: mol_type = other DNA
gcccatgatggggctgtccc

SEQ ID NO: 27809 - DNA, 20 bp, synthetic construct
  misc_feature 1..20: note = chemically synthesized
  source 1..20: mol_type = other DNA
ctgtccctggtgcaccgttt

SEQ ID NO: 27810 - DNA, 20 bp, synthetic construct
  misc_feature 1..20: note = chemically synthesized
  source 1..20: mol_type = other DNA
tgtccctggtgcaccgtttt

SEQ ID NO: 27811 - DNA, 20 bp, synthetic construct
  misc_feature 1..20: note = chemically synthesized
  source 1..20: mol_type = other DNA
ccctggtgcaccgttttggg

SEQ ID NO: 27812 - DNA, 20 bp, synthetic construct
  misc_feature 1..20: note = chemically synthesized
  source 1..20: mol_type = other DNA
acctgctattcatcttctta

SEQ ID NO: 27813 - DNA, 20 bp, synthetic construct
  misc_feature 1..20: note = chemically synthesized
  source 1..20: mol_type = other DNA
atgcttaacccaatcatata

SEQ ID NO: 27814 - DNA, 20 bp, synthetic construct
  misc_feature 1..20: note = chemically synthesized
  source 1..20: mol_type = other DNA
acccaatcatatacagcatt

SEQ ID NO: 27815 - DNA, 20 bp, synthetic construct
  misc_feature 1..20: note = chemically synthesized
  source 1..20: mol_type = other DNA
tcatatacagcattaagacc

SEQ ID NO: 27816 - DNA, 20 bp, synthetic construct
  misc_feature 1..20: note = chemically synthesized
  source 1..20: mol_type = other DNA
catatacagcattaagacca

SEQ ID NO: 27817 - DNA, 20 bp, synthetic construct
  misc_feature 1..20: note = chemically synthesized
  source 1..20: mol_type = other DNA
tatacagcattaagaccaag

SEQ ID NO: 27818 - DNA, 20 bp, synthetic construct
  misc_feature 1..20: note = chemically synthesized
  source 1..20: mol_type = other DNA
agatccaccgtgccattatc

SEQ ID NO: 27819 - DNA, 20 bp, synthetic construct
  misc_feature 1..20: note = chemically synthesized
  source 1..20: mol_type = other DNA
ccgtgccattatcaagttcc

SEQ ID NO: 27820 - DNA, 20 bp, synthetic construct
  misc_feature 1..20: note = chemically synthesized
  source 1..20: mol_type = other DNA
cgtgccattatcaagttcct

SEQ ID NO: 27821 - DNA, 20 bp, synthetic construct
  misc_feature 1..20: note = chemically synthesized
  source 1..20: mol_type = other DNA
tcaagttcctaggtcttaaa

SEQ ID NO: 27822 - DNA, 20 bp, synthetic construct
  misc_feature 1..20: note = chemically synthesized
  source 1..20: mol_type = other DNA
caagttcctaggtcttaaaa

SEQ ID NO: 27823 - DNA, 20 bp, synthetic construct
  misc_feature 1..20: note = chemically synthesized
  source 1..20: mol_type = other DNA
ttcctaggtcttaaaaaggc

SEQ ID NO: 27824 - DNA, 20 bp, synthetic construct
  misc_feature 1..20: note = chemically synthesized
  source 1..20: mol_type = other DNA
tcttaaaaaggccagtaaat

SEQ ID NO: 27825 - DNA, 20 bp, synthetic construct
  misc_feature 1..20: note = chemically synthesized
  source 1..20: mol_type = other DNA
aaaggccagtaaatgagtcc

SEQ ID NO: 27826 - DNA, 20 bp, synthetic construct
  misc_feature 1..20: note = chemically synthesized
  source 1..20: mol_type = other DNA
aaggccagtaaatgagtcct

SEQ ID NO: 27827 - DNA, 20 bp, synthetic construct
  misc_feature 1..20: note = chemically synthesized
  source 1..20: mol_type = other DNA
aggccagtaaatgagtcctg

SEQ ID NO: 27828 - DNA, 20 bp, synthetic construct
  misc_feature 1..20: note = chemically synthesized
  source 1..20: mol_type = other DNA
cctggggctaaaactccccc

SEQ ID NO: 27829 - DNA, 20 bp, synthetic construct
  misc_feature 1..20: note = chemically synthesized
  source 1..20: mol_type = other DNA
tggggctaaaactcccccta

SEQ ID NO: 27830 - DNA, 20 bp, synthetic construct
  misc_feature 1..20: note = chemically synthesized
  source 1..20: mol_type = other DNA
ggggctaaaactccccctag

SEQ ID NO: 27831 - DNA, 20 bp, synthetic construct
  misc_feature 1..20: note = chemically synthesized
  source 1..20: mol_type = other DNA
aactccccctagaggcctat

SEQ ID NO: 27832 - DNA, 20 bp, synthetic construct
  misc_feature 1..20: note = chemically synthesized
  source 1..20: mol_type = other DNA
tccccctagaggcctataag

SEQ ID NO: 27833 - DNA, 20 bp, synthetic construct
  misc_feature 1..20: note = chemically synthesized
  source 1..20: mol_type = other DNA
ccccctagaggcctataaga

SEQ ID NO: 27834 - DNA, 20 bp, synthetic construct
  misc_feature 1..20: note = chemically synthesized
  source 1..20: mol_type = other DNA
cctataagaaggccccaaat

SEQ ID NO: 27835 - DNA, 20 bp, synthetic construct
  misc_feature 1..20: note = chemically synthesized
  source 1..20: mol_type = other DNA
cccaaattggactgaaaatt

SEQ ID NO: 27836 - DNA, 20 bp, synthetic construct
  misc_feature 1..20: note = chemically synthesized
  source 1..20: mol_type = other DNA
caaattggactgaaaatttg

SEQ ID NO: 27837 - DNA, 20 bp, synthetic construct
  misc_feature 1..20: note = chemically synthesized
  source 1..20: mol_type = other DNA
gactgaaaatttggagtatt

SEQ ID NO: 27838 - DNA, 20 bp, synthetic construct
  misc_feature 1..20: note = chemically synthesized
  source 1..20: mol_type = other DNA
aatttggagtattgagtata

SEQ ID NO: 27839 - DNA, 20 bp, synthetic construct
  misc_feature 1..20: note = chemically synthesized
  source 1..20: mol_type = other DNA
gagtatatagcatgctctta

SEQ ID NO: 27840 - DNA, 20 bp, synthetic construct
  misc_feature 1..20: note = chemically synthesized
  source 1..20: mol_type = other DNA
cccctgtcctaaataaaata

SEQ ID NO: 27841 - DNA, 20 bp, synthetic construct
  misc_feature 1..20: note = chemically synthesized
  source 1..20: mol_type = other DNA
ccctgtcctaaataaaatat

SEQ ID NO: 27842 - DNA, 20 bp, synthetic construct
  misc_feature 1..20: note = chemically synthesized
  source 1..20: mol_type = other DNA
aatatgggcaaatttatgtc

SEQ ID NO: 27843 - DNA, 20 bp, synthetic construct
  misc_feature 1..20: note = chemically synthesized
  source 1..20: mol_type = other DNA
tatgggcaaatttatgtctg

SEQ ID NO: 27844 - DNA, 20 bp, synthetic construct
  misc_feature 1..20: note = chemically synthesized
  source 1..20: mol_type = other DNA
caaatttatgtctggagttg

SEQ ID NO: 27845 - DNA, 20 bp, synthetic construct
  misc_feature 1..20: note = chemically synthesized
  source 1..20: mol_type = other DNA
aaaactgaacttctcttgct

SEQ ID NO: 27846 - DNA, 20 bp, synthetic construct
  misc_feature 1..20: note = chemically synthesized
  source 1..20: mol_type = other DNA
ttctcttgcttagattttaa

SEQ ID NO: 27847 - DNA, 20 bp, synthetic construct
  misc_feature 1..20: note = chemically synthesized
  source 1..20: mol_type = other DNA
gattttaatggctcctccta

SEQ ID NO: 27848 - DNA, 20 bp, synthetic construct
  misc_feature 1..20: note = chemically synthesized
  source 1..20: mol_type = other DNA
taatggctcctcctacagct

SEQ ID NO: 27849 - DNA, 20 bp, synthetic construct
  misc_feature 1..20: note = chemically synthesized
  source 1..20: mol_type = other DNA
ctcctcctacagctgagaac

SEQ ID NO: 27850 - DNA, 20 bp, synthetic construct
  misc_feature 1..20: note = chemically synthesized
  source 1..20: mol_type = other DNA
cagctgagaactggcatttt

SEQ ID NO: 27851 - DNA, 20 bp, synthetic construct
  misc_feature 1..20: note = chemically synthesized
  source 1..20: mol_type = other DNA
ctgagaactggcatttttgg

SEQ ID NO: 27852 - DNA, 20 bp, synthetic construct
  misc_feature 1..20: note = chemically synthesized
  source 1..20: mol_type = other DNA
tggcatttttggtagcatca

SEQ ID NO: 27853 - DNA, 20 bp, synthetic construct
  misc_feature 1..20: note = chemically synthesized
  source 1..20: mol_type = other DNA
ttggtagcatcaaagctatc

SEQ ID NO: 27854 - DNA, 20 bp, synthetic construct
  misc_feature 1..20: note = chemically synthesized
  source 1..20: mol_type = other DNA
gtagcatcaaagctatccag

SEQ ID NO: 27855 - DNA, 20 bp, synthetic construct
  misc_feature 1..20: note = chemically synthesized
  source 1..20: mol_type = other DNA
tagcatcaaagctatccaga

SEQ ID NO: 27856 - DNA, 20 bp, synthetic construct
  misc_feature 1..20: note = chemically synthesized
  source 1..20: mol_type = other DNA
tccagaaggcaactttattg

SEQ ID NO: 27857 - DNA, 20 bp, synthetic construct
  misc_feature 1..20: note = chemically synthesized
  source 1..20: mol_type = other DNA
ccagaaggcaactttattga

SEQ ID NO: 27858 - DNA, 20 bp, synthetic construct
  misc_feature 1..20: note = chemically synthesized
  source 1..20: mol_type = other DNA
gaaactaaataaaaactaaa

SEQ ID NO: 27859 - DNA, 20 bp, synthetic construct
  misc_feature 1..20: note = chemically synthesized
  source 1..20: mol_type = other DNA
ctaaaaagaacaataaatac

SEQ ID NO: 27860 - DNA, 20 bp, synthetic construct
  misc_feature 1..20: note = chemically synthesized
  source 1..20: mol_type = other DNA
aaaaagaacaataaatacca

SEQ ID NO: 27861 - DNA, 20 bp, synthetic construct
  misc_feature 1..20: note = chemically synthesized
  source 1..20: mol_type = other DNA
acaataaataccagagcacc

SEQ ID NO: 27862 - DNA, 20 bp, synthetic construct
  misc_feature 1..20: note = chemically synthesized
  source 1..20: mol_type = other DNA
aataaataccagagcaccca

SEQ ID NO: 27863 - DNA, 20 bp, synthetic construct
  misc_feature 1..20: note = chemically synthesized
  source 1..20: mol_type = other DNA
ataaataccagagcacccag

SEQ ID NO: 27864 - DNA, 20 bp, synthetic construct
  misc_feature 1..20: note = chemically synthesized
  source 1..20: mol_type = other DNA
aaataccagagcacccagag

SEQ ID NO: 27865 - DNA, 20 bp, synthetic construct
  misc_feature 1..20: note = chemically synthesized
  source 1..20: mol_type = other DNA
ataccagagcacccagagga

SEQ ID NO: 27866 - DNA, 20 bp, synthetic construct
  misc_feature 1..20: note = chemically synthesized
  source 1..20: mol_type = other DNA
agagcacccagaggagagcc

SEQ ID NO: 27867 - DNA, 20 bp, synthetic construct
  misc_feature 1..20: note = chemically synthesized
  source 1..20: mol_type = other DNA
gcacccagaggagagcctgg

SEQ ID NO: 27868 - DNA, 20 bp, synthetic construct
  misc_feature 1..20: note = chemically synthesized
  source 1..20: mol_type = other DNA
acccagaggagagcctggca

SEQ ID NO: 27869 - DNA, 20 bp, synthetic construct
  misc_feature 1..20: note = chemically synthesized
  source 1..20: mol_type = other DNA
gaggagagcctggcagagac

SEQ ID NO: 27870 - DNA, 20 bp, synthetic construct
  misc_feature 1..20: note = chemically synthesized
  source 1..20: mol_type = other DNA
aggagagcctggcagagacc

SEQ ID NO: 27871 - DNA, 20 bp, synthetic construct
  misc_feature 1..20: note = chemically synthesized
  source 1..20: mol_type = other DNA
catttgctctaactcacctc

SEQ ID NO: 27872 - DNA, 20 bp, synthetic construct
  misc_feature 1..20: note = chemically synthesized
  source 1..20: mol_type = other DNA
cggaaatacacctccttcca

SEQ ID NO: 27873 - DNA, 20 bp, synthetic construct
  misc_feature 1..20: note = chemically synthesized
  source 1..20: mol_type = other DNA
cacctccttccatggttcct

SEQ ID NO: 27874 - DNA, 20 bp, synthetic construct
  misc_feature 1..20: note = chemically synthesized
  source 1..20: mol_type = other DNA
acctccttccatggttcctt

SEQ ID NO: 27875 - DNA, 20 bp, synthetic construct
  misc_feature 1..20: note = chemically synthesized
  source 1..20: mol_type = other DNA
ctgcttccatcttatctacc

SEQ ID NO: 27876 - DNA, 20 bp, synthetic construct
  misc_feature 1..20: note = chemically synthesized
  source 1..20: mol_type = other DNA
tccatcttatctacctggcc

SEQ ID NO: 27877 - DNA, 20 bp, synthetic construct
  misc_feature 1..20: note = chemically synthesized
  source 1..20: mol_type = other DNA
cttctcatctttttctatcc

SEQ ID NO: 27878 - DNA, 20 bp, synthetic construct
  misc_feature 1..20: note = chemically synthesized
  source 1..20: mol_type = other DNA
tcatctttttctatcctggt

SEQ ID NO: 27879 - DNA, 20 bp, synthetic construct
  misc_feature 1..20: note = chemically synthesized
  source 1..20: mol_type = other DNA
tctttttctatcctggtcag

SEQ ID NO: 27880 - DNA, 20 bp, synthetic construct
  misc_feature 1..20: note = chemically synthesized
  source 1..20: mol_type = other DNA
tcctggtcagcagtaacttt

SEQ ID NO: 27881 - DNA, 20 bp, synthetic construct
  misc_feature 1..20: note = chemically synthesized
  source 1..20: mol_type = other DNA
gcagtaactttcagaccccc

SEQ ID NO: 27882 - DNA, 20 bp, synthetic construct
  misc_feature 1..20: note = chemically synthesized
  source 1..20: mol_type = other DNA
ttcagacccccaagtcacat

SEQ ID NO: 27883 - DNA, 20 bp, synthetic construct
  misc_feature 1..20: note = chemically synthesized
  source 1..20: mol_type = other DNA
ccaagtcacatcagaaacct

SEQ ID NO: 27884 - DNA, 20 bp, synthetic construct
  misc_feature 1..20: note = chemically synthesized
  source 1..20: mol_type = other DNA
tcttcctcaacacctgtttc

SEQ ID NO: 27885 - DNA, 20 bp, synthetic construct
  misc_feature 1..20: note = chemically synthesized
  source 1..20: mol_type = other DNA
caacacccccccaaatttct

SEQ ID NO: 27886 - DNA, 20 bp, synthetic construct
  misc_feature 1..20: note = chemically synthesized
  source 1..20: mol_type = other DNA
aacacccccccaaatttcta

SEQ ID NO: 27887 - DNA, 20 bp, synthetic construct
  misc_feature 1..20: note = chemically synthesized
  source 1..20: mol_type = other DNA
ctctcctgaccatattcctc

SEQ ID NO: 27888 - DNA, 20 bp, synthetic construct
  misc_feature 1..20: note = chemically synthesized
  source 1..20: mol_type = other DNA
tcctgaccatattcctctag

SEQ ID NO: 27889 - DNA, 20 bp, synthetic construct
  misc_feature 1..20: note = chemically synthesized
  source 1..20: mol_type = other DNA
tgaccatattcctctagaag

SEQ ID NO: 27890 - DNA, 20 bp, synthetic construct
  misc_feature 1..20: note = chemically synthesized
  source 1..20: mol_type = other DNA
accatattcctctagaagaa

SEQ ID NO: 27891 - DNA, 20 bp, synthetic construct
  misc_feature 1..20: note = chemically synthesized
  source 1..20: mol_type = other DNA
tgattttaccttacaacctc

SEQ ID NO: 27892 - DNA, 20 bp, synthetic construct
  misc_feature 1..20: note = chemically synthesized
  source 1..20: mol_type = other DNA
acaacctcaagtctgacatt

SEQ ID NO: 27893 - DNA, 20 bp, synthetic construct
  misc_feature 1..20: note = chemically synthesized
  source 1..20: mol_type = other DNA
tcaagtctgacattaagcta

SEQ ID NO: 27894 - DNA, 20 bp, synthetic construct
  misc_feature 1..20: note = chemically synthesized
  source 1..20: mol_type = other DNA
gtctgacattaagctacagt

SEQ ID NO: 27895 - DNA, 20 bp, synthetic construct
  misc_feature 1..20: note = chemically synthesized
  source 1..20: mol_type = other DNA
ctacagtcagtatttacttg

SEQ ID NO: 27896 - DNA, 20 bp, synthetic construct
  misc_feature 1..20: note = chemically synthesized
  source 1..20: mol_type = other DNA
tacagtcagtatttacttgt

SEQ ID NO: 27897 - DNA, 20 bp, synthetic construct
  misc_feature 1..20: note = chemically synthesized
  source 1..20: mol_type = other DNA
gtatttacttgtaggtgttt

SEQ ID NO: 27898 - DNA, 20 bp, synthetic construct
  misc_feature 1..20: note = chemically synthesized
  source 1..20: mol_type = other DNA
tgaacaatgacatgtaacgt

SEQ ID NO: 27899 - DNA, 20 bp, synthetic construct
  misc_feature 1..20: note = chemically synthesized
  source 1..20: mol_type = other DNA
caatgacatgtaacgtgaga

SEQ ID NO: 27900 - DNA, 20 bp, synthetic construct
  misc_feature 1..20: note = chemically synthesized
  source 1..20: mol_type = other DNA
catgtaacgtgagaaagctt

SEQ ID NO: 27901 - DNA, 20 bp, synthetic construct
  misc_feature 1..20: note = chemically synthesized
  source 1..20: mol_type = other DNA
aacgtgagaaagcttcagcc

SEQ ID NO: 27902 - DNA, 20 bp, synthetic construct
  misc_feature 1..20: note = chemically synthesized
  source 1..20: mol_type = other DNA
acgtgagaaagcttcagcca

SEQ ID NO: 27903 - DNA, 20 bp, synthetic construct
  misc_feature 1..20: note = chemically synthesized
  source 1..20: mol_type = other DNA
aaactcacacaaacatattg

SEQ ID NO: 27904 - DNA, 20 bp, synthetic construct
  misc_feature 1..20: note = chemically synthesized
  source 1..20: mol_type = other DNA
gaagtcacaatcccattgct

SEQ ID NO: 27905 - DNA, 20 bp, synthetic construct
  misc_feature 1..20: note = chemically synthesized
  source 1..20: mol_type = other DNA
aagtcacaatcccattgctc

SEQ ID NO: 27906 - DNA, 20 bp, synthetic construct
  misc_feature 1..20: note = chemically synthesized
  source 1..20: mol_type = other DNA
gtcacaatcccattgctcag

SEQ ID NO: 27907 - DNA, 20 bp, synthetic construct
  misc_feature 1..20: note = chemically synthesized
  source 1..20: mol_type = other DNA
tcacaatcccattgctcagg

SEQ ID NO: 27908 - DNA, 20 bp, synthetic construct
  misc_feature 1..20: note = chemically synthesized
  source 1..20: mol_type = other DNA
ggaggaaataaactttacat

SEQ ID NO: 27909 - DNA, 20 bp, synthetic construct
  misc_feature 1..20: note = chemically synthesized
  source 1..20: mol_type = other DNA
taaactttacattggctgat

SEQ ID NO: 27910 - DNA, 20 bp, synthetic construct
  misc_feature 1..20: note = chemically synthesized
  source 1..20: mol_type = other DNA
gctgatcagcctgtccctac

SEQ ID NO: 27911 - DNA, 20 bp, synthetic construct
  misc_feature 1..20: note = chemically synthesized
  source 1..20: mol_type = other DNA
gtgactaaatgcaatccttg

SEQ ID NO: 27912 - DNA, 20 bp, synthetic construct
  misc_feature 1..20: note = chemically synthesized
  source 1..20: mol_type = other DNA
tgactaaatgcaatccttgc

SEQ ID NO: 27913 - DNA, 20 bp, synthetic construct
  misc_feature 1..20: note = chemically synthesized
  source 1..20: mol_type = other DNA
gactaaatgcaatccttgca

SEQ ID NO: 27914 - DNA, 20 bp, synthetic construct
  misc_feature 1..20: note = chemically synthesized
  source 1..20: mol_type = other DNA
actaaatgcaatccttgcag

SEQ ID NO: 27915 - DNA, 20 bp, synthetic construct
  misc_feature 1..20: note = chemically synthesized
  source 1..20: mol_type = other DNA
tgcaatccttgcaggggtct

SEQ ID NO: 27916 - DNA, 20 bp, synthetic construct
  misc_feature 1..20: note = chemically synthesized
  source 1..20: mol_type = other DNA
agctttgaaattgcttcctc

SEQ ID NO: 27917 - DNA, 20 bp, synthetic construct
  misc_feature 1..20: note = chemically synthesized
  source 1..20: mol_type = other DNA
gctttgaaattgcttcctca

SEQ ID NO: 27918 - DNA, 20 bp, synthetic construct
  misc_feature 1..20: note = chemically synthesized
  source 1..20: mol_type = other DNA
cttcctcaaggacattttca

SEQ ID NO: 27919 - DNA, 20 bp, synthetic construct
  misc_feature 1..20: note = chemically synthesized
  source 1..20: mol_type = other DNA
ctcaaggacattttcacaga

SEQ ID NO: 27920 - DNA, 20 bp, synthetic construct
  misc_feature 1..20: note = chemically synthesized
  source 1..20: mol_type = other DNA
gatagctcctccctttccaa

SEQ ID NO: 27921 - DNA, 20 bp, synthetic construct
  misc_feature 1..20: note = chemically synthesized
  source 1..20: mol_type = other DNA
ctcctccctttccaatggta

SEQ ID NO: 27922 - DNA, 20 bp, synthetic construct
  misc_feature 1..20: note = chemically synthesized
  source 1..20: mol_type = other DNA
taaagcaccaaatgctccat

SEQ ID NO: 27923 - DNA, 20 bp, synthetic construct
  misc_feature 1..20: note = chemically synthesized
  source 1..20: mol_type = other DNA
gctccatcggtttccttcca

SEQ ID NO: 27924 - DNA, 20 bp, synthetic construct
  misc_feature 1..20: note = chemically synthesized
  source 1..20: mol_type = other DNA
ccgttgtaacatttgtcaca

SEQ ID NO: 27925 - DNA, 20 bp, synthetic construct
  misc_feature 1..20: note = chemically synthesized
  source 1..20: mol_type = other DNA
acagtaatgtcctgtttatg

SEQ ID NO: 27926 - DNA, 20 bp, synthetic construct
  misc_feature 1..20: note = chemically synthesized
  source 1..20: mol_type = other DNA
cagtaatgtcctgtttatga

SEQ ID NO: 27927 - DNA, 20 bp, synthetic construct
  misc_feature 1..20: note = chemically synthesized
  source 1..20: mol_type = other DNA
aggtgtgtgcatgtgtccat

SEQ ID NO: 27928 - DNA, 20 bp, synthetic construct
  misc_feature 1..20: note = chemically synthesized
  source 1..20: mol_type = other DNA
tccattagaatgactaaatc

SEQ ID NO: 27929 - DNA, 20 bp, synthetic construct
  misc_feature 1..20: note = chemically synthesized
  source 1..20: mol_type = other DNA
aatgactaaatcaagatccc

SEQ ID NO: 27930 - DNA, 20 bp, synthetic construct
  misc_feature 1..20: note = chemically synthesized
  source 1..20: mol_type = other DNA
tgactaaatcaagatccctg

SEQ ID NO: 27931 - DNA, 20 bp, synthetic construct
  misc_feature 1..20: note = chemically synthesized
  source 1..20: mol_type = other DNA
gactaaatcaagatccctgg

SEQ ID NO: 27932 - DNA, 20 bp, synthetic construct
  misc_feature 1..20: note = chemically synthesized
  source 1..20: mol_type = other DNA
atcaagatccctggaggaat

SEQ ID NO: 27933 - DNA, 20 bp, synthetic construct
  misc_feature 1..20: note = chemically synthesized
  source 1..20: mol_type = other DNA
tcaagatccctggaggaatt

SEQ ID NO: 27934 - DNA, 20 bp, synthetic construct
  misc_feature 1..20: note = chemically synthesized
  source 1..20: mol_type = other DNA
attaggcatgtcttgctcgc

SEQ ID NO: 27935 - DNA, 20 bp, synthetic construct
  misc_feature 1..20: note = chemically synthesized
  source 1..20: mol_type = other DNA
atgtatataaatacaatgcc

SEQ ID NO: 27936 - DNA, 20 bp, synthetic construct
  misc_feature 1..20: note = chemically synthesized
  source 1..20: mol_type = other DNA
ataaatattaaatgtatgcg

SEQ ID NO: 27937 - DNA, 20 bp, synthetic construct
  misc_feature 1..20: note = chemically synthesized
  source 1..20: mol_type = other DNA
taaatgtatgcgtggacata

SEQ ID NO: 27938 - DNA, 20 bp, synthetic construct
  misc_feature 1..20: note = chemically synthesized
  source 1..20: mol_type = other DNA
cgtggacatatagatacata

SEQ ID NO: 27939 - DNA, 20 bp, synthetic construct
  misc_feature 1..20: note = chemically synthesized
  source 1..20: mol_type = other DNA
tggacatatagatacataaa

SEQ ID NO: 27940 - DNA, 20 bp, synthetic construct
  misc_feature 1..20: note = chemically synthesized
  source 1..20: mol_type = other DNA
ggacatatagatacataaag

SEQ ID NO: 27941 - DNA, 20 bp, synthetic construct
  misc_feature 1..20: note = chemically synthesized
  source 1..20: mol_type = other DNA
gacatatagatacataaaga

SEQ ID NO: 27942 - DNA, 20 bp, synthetic construct
  misc_feature 1..20: note = chemically synthesized
  source 1..20: mol_type = other DNA
tagatacataaagagggatc

SEQ ID NO: 27943 - DNA, 20 bp, synthetic construct
  misc_feature 1..20: note = chemically synthesized
  source 1..20: mol_type = other DNA
gatacataaagagggatcca

SEQ ID NO: 27944 - DNA, 20 bp, synthetic construct
  misc_feature 1..20: note = chemically synthesized
  source 1..20: mol_type = other DNA
aaagagggatccagagctaa

SEQ ID NO: 27945 - DNA, 20 bp, synthetic construct
  misc_feature 1..20: note = chemically synthesized
  source 1..20: mol_type = other DNA
gagggatccagagctaacag

SEQ ID NO: 27946 - DNA, 20 bp, synthetic construct
  misc_feature 1..20: note = chemically synthesized
  source 1..20: mol_type = other DNA
agaagttctcttcttgtctc

SEQ ID NO: 27947 - DNA, 20 bp, synthetic construct
  misc_feature 1..20: note = chemically synthesized
  source 1..20: mol_type = other DNA
gaagttctcttcttgtctcg

SEQ ID NO: 27948 - DNA, 20 bp, synthetic construct
  misc_feature 1..20: note = chemically synthesized
  source 1..20: mol_type = other DNA
gaactcctcctcttcacatt

SEQ ID NO: 27949 - DNA, 20 bp, synthetic construct
  misc_feature 1..20: note = chemically synthesized
  source 1..20: mol_type = other DNA
ctcctcctcttcacattcag

SEQ ID NO: 27950 - DNA, 20 bp, synthetic construct
  misc_feature 1..20: note = chemically synthesized
  source 1..20: mol_type = other DNA
ctcttcacattcagaagccc

SEQ ID NO: 27951 - DNA, 20 bp, synthetic construct
  misc_feature 1..20: note = chemically synthesized
  source 1..20: mol_type = other DNA
ttcacattcagaagcccaag

SEQ ID NO: 27952 - DNA, 20 bp, synthetic construct
  misc_feature 1..20: note = chemically synthesized
  source 1..20: mol_type = other DNA
ccaagaagacacctttctgc

SEQ ID NO: 27953 - DNA, 20 bp, synthetic construct
  misc_feature 1..20: note = chemically synthesized
  source 1..20: mol_type = other DNA
cctttctgctggcatccatc

SEQ ID NO: 27954 - DNA, 20 bp, synthetic construct
  misc_feature 1..20: note = chemically synthesized
  source 1..20: mol_type = other DNA
ctttctgctggcatccatca

SEQ ID NO: 27955 - DNA, 20 bp, synthetic construct
  misc_feature 1..20: note = chemically synthesized
  source 1..20: mol_type = other DNA
tctgctggcatccatcaagg

SEQ ID NO: 27956 - DNA, 20 bp, synthetic construct
  misc_feature 1..20: note = chemically synthesized
  source 1..20: mol_type = other DNA
gtggtatatcttcattgtcc

SEQ ID NO: 27957 - DNA, 20 bp, synthetic construct
  misc_feature 1..20: note = chemically synthesized
  source 1..20: mol_type = other DNA
tgtcccagttctactttact

SEQ ID NO: 27958 - DNA, 20 bp, synthetic construct
  misc_feature 1..20: note = chemically synthesized
  source 1..20: mol_type = other DNA
gtcccagttctactttactc

SEQ ID NO: 27959 - DNA, 20 bp, synthetic construct
  misc_feature 1..20: note = chemically synthesized
  source 1..20: mol_type = other DNA
tctactttactcaggccctc

SEQ ID NO: 27960 - DNA, 20 bp, synthetic construct
  misc_feature 1..20: note = chemically synthesized
  source 1..20: mol_type = other DNA
tcctcccacccattctccta

SEQ ID NO: 27961 - DNA, 20 bp, synthetic construct
  misc_feature 1..20: note = chemically synthesized
  source 1..20: mol_type = other DNA
cctcccacccattctcctac

SEQ ID NO: 27962 - DNA, 20 bp, synthetic construct
  misc_feature 1..20: note = chemically synthesized
  source 1..20: mol_type = other DNA
ctacaggttaaaattaccat

SEQ ID NO: 27963 - DNA, 20 bp, synthetic construct
  misc_feature 1..20: note = chemically synthesized
  source 1..20: mol_type = other DNA
tacaggttaaaattaccatg

SEQ ID NO: 27964 - DNA, 20 bp, synthetic construct
  misc_feature 1..20: note = chemically synthesized
  source 1..20: mol_type = other DNA
ggttaaaattaccatgaggc

SEQ ID NO: 27965 - DNA, 20 bp, synthetic construct
  misc_feature 1..20: note = chemically synthesized
  source 1..20: mol_type = other DNA
gttaaaattaccatgaggcc

SEQ ID NO: 27966 - DNA, 20 bp, synthetic construct
  misc_feature 1..20: note = chemically synthesized
  source 1..20: mol_type = other DNA
aattaccatgaggccaggca

SEQ ID NO: 27967 - DNA, 20 bp, synthetic construct
  misc_feature 1..20: note = chemically synthesized
  source 1..20: mol_type = other DNA
taccatgaggccaggcacgg

SEQ ID NO: 27968 - DNA, 20 bp, synthetic construct
  misc_feature 1..20: note = chemically synthesized
  source 1..20: mol_type = other DNA
ggtggcttatgctataatcc

SEQ ID NO: 27969 - DNA, 20 bp, synthetic construct
  misc_feature 1..20: note = chemically synthesized
  source 1..20: mol_type = other DNA
atgctataatcccagcactt

SEQ ID NO: 27970 - DNA, 20 bp, synthetic construct
  misc_feature 1..20: note = chemically synthesized
  source 1..20: mol_type = other DNA
tgctataatcccagcacttt

SEQ ID NO: 27971 - DNA, 20 bp, synthetic construct
  misc_feature 1..20: note = chemically synthesized
  source 1..20: mol_type = other DNA
ctataatcccagcactttgg

SEQ ID NO: 27972 - DNA, 20 bp, synthetic construct
  misc_feature 1..20: note = chemically synthesized
  source 1..20: mol_type = other DNA
tcccagcactttgggagacc

SEQ ID NO: 27973 - DNA, 20 bp, synthetic construct
  misc_feature 1..20: note = chemically synthesized
  source 1..20: mol_type = other DNA
cccagcactttgggagacca

SEQ ID NO: 27974 - DNA, 20 bp, synthetic construct
  misc_feature 1..20: note = chemically synthesized
  source 1..20: mol_type = other DNA
agcactttgggagaccaagg

SEQ ID NO: 27975 - DNA, 20 bp, synthetic construct
  misc_feature 1..20: note = chemically synthesized
  source 1..20: mol_type = other DNA
gcactttgggagaccaaggt

SEQ ID NO: 27976 - DNA, 20 bp, synthetic construct
  misc_feature 1..20: note = chemically synthesized
  source 1..20: mol_type = other DNA
actttgggagaccaaggtgg

SEQ ID NO: 27977 - DNA, 20 bp, synthetic construct
  misc_feature 1..20: note = chemically synthesized
  source 1..20: mol_type = other DNA
ctttgggagaccaaggtggg

SEQ ID NO: 27978 - DNA, 20 bp, synthetic construct
  misc_feature 1..20: note = chemically synthesized
  source 1..20: mol_type = other DNA
ccaaggtgggaggattgctg

SEQ ID NO: 27979 - DNA, 20 bp, synthetic construct
  misc_feature 1..20: note = chemically synthesized
  source 1..20: mol_type = other DNA
caaggtgggaggattgctga

SEQ ID NO: 27980 - DNA, 20 bp, synthetic construct
  misc_feature 1..20: note = chemically synthesized
  source 1..20: mol_type = other DNA
gtgggaggattgctgaaggc

SEQ ID NO: 27981 - DNA, 20 bp, synthetic construct
  misc_feature 1..20: note = chemically synthesized
  source 1..20: mol_type = other DNA
tgggaggattgctgaaggcc

SEQ ID NO: 27982 - DNA, 20 bp, synthetic construct
  misc_feature 1..20: note = chemically synthesized
  source 1..20: mol_type = other DNA
ggaggattgctgaaggccag

SEQ ID NO: 27983 - DNA, 20 bp, synthetic construct
  misc_feature 1..20: note = chemically synthesized
  source 1..20: mol_type = other DNA
ttgctgaaggccaggagttt

SEQ ID NO: 27984 - DNA, 20 bp, synthetic construct
  misc_feature 1..20: note = chemically synthesized
  source 1..20: mol_type = other DNA
caggagtttgagaccaactt

SEQ ID NO: 27985 - DNA, 20 bp, synthetic construct
  misc_feature 1..20: note = chemically synthesized
  source 1..20: mol_type = other DNA
aggagtttgagaccaacttc

SEQ ID NO: 27986 - DNA, 20 bp, synthetic construct
  misc_feature 1..20: note = chemically synthesized
  source 1..20: mol_type = other DNA
gtttgagaccaacttcaggc

SEQ ID NO: 27987 - DNA, 20 bp, synthetic construct
  misc_feature 1..20: note = chemically synthesized
  source 1..20: mol_type = other DNA
tgagaccaacttcaggcaag

SEQ ID NO: 27988 - DNA, 20 bp, synthetic construct
  misc_feature 1..20: note = chemically synthesized
  source 1..20: mol_type = other DNA
ttcaggcaagaagattactt

SEQ ID NO: 27989 - DNA, 20 bp, synthetic construct
  misc_feature 1..20: note = chemically synthesized
  source 1..20: mol_type = other DNA
gcaagaagattacttgagtc

SEQ ID NO: 27990 - DNA, 20 bp, synthetic construct
  misc_feature 1..20: note = chemically synthesized
  source 1..20: mol_type = other DNA
caagaagattacttgagtcc

SEQ ID NO: 27991 - DNA, 20 bp, synthetic construct
  misc_feature 1..20: note = chemically synthesized
  source 1..20: mol_type = other DNA
agaagattacttgagtccag

SEQ ID NO: 27992 - DNA, 20 bp, synthetic construct
  misc_feature 1..20: note = chemically synthesized
  source 1..20: mol_type = other DNA
ttacttgagtccaggagttt

SEQ ID NO: 27993 - DNA, 20 bp, synthetic construct
  misc_feature 1..20: note = chemically synthesized
  source 1..20: mol_type = other DNA
tgagtccaggagtttgagac

SEQ ID NO: 27994 - DNA, 20 bp, synthetic construct
  misc_feature 1..20: note = chemically synthesized
  source 1..20: mol_type = other DNA
tgagaccagcctgaacaata

SEQ ID NO: 27995 - DNA, 20 bp, synthetic construct
  misc_feature 1..20: note = chemically synthesized
  source 1..20: mol_type = other DNA
accagcctgaacaatacagc

SEQ ID NO: 27996 - DNA, 20 bp, synthetic construct
  misc_feature 1..20: note = chemically synthesized
  source 1..20: mol_type = other DNA
tctacaaaaaaaattaaaat

SEQ ID NO: 27997 - DNA, 20 bp, synthetic construct
  misc_feature 1..20: note = chemically synthesized
  source 1..20: mol_type = other DNA
aaattaaaattagccatgtg

SEQ ID NO: 27998 - DNA, 20 bp, synthetic construct
  misc_feature 1..20: note = chemically synthesized
  source 1..20: mol_type = other DNA
ttaaaattagccatgtgtgg

SEQ ID NO: 27999 - DNA, 20 bp, synthetic construct
  misc_feature 1..20: note = chemically synthesized
  source 1..20: mol_type = other DNA
tgtgtggcggtgcacgtctg

SEQ ID NO: 28000 - DNA, 20 bp, synthetic construct
  misc_feature 1..20: note = chemically synthesized
  source 1..20: mol_type = other DNA
gcggtgcacgtctgtagtct

SEQ ID NO: 28001 - DNA, 20 bp, synthetic construct
  misc_feature 1..20: note = chemically synthesized
  source 1..20: mol_type = other DNA
cgtctgtagtctcagctacc

SEQ ID NO: 28002 - DNA, 20 bp, synthetic construct
  misc_feature 1..20: note = chemically synthesized
  source 1..20: mol_type = other DNA
gtctgtagtctcagctacct

SEQ ID NO: 28003 - DNA, 20 bp, synthetic construct
  misc_feature 1..20: note = chemically synthesized
  source 1..20: mol_type = other DNA
ctgtagtctcagctacctgg

SEQ ID NO: 28004 - DNA, 20 bp, synthetic construct
  misc_feature 1..20: note = chemically synthesized
  source 1..20: mol_type = other DNA
tgtagtctcagctacctggg

SEQ ID NO: 28005 - DNA, 20 bp, synthetic construct
  misc_feature 1..20: note = chemically synthesized
  source 1..20: mol_type = other DNA
tctcagctacctgggaggct

SEQ ID NO: 28006 - DNA, 20 bp, synthetic construct
  misc_feature 1..20: note = chemically synthesized
  source 1..20: mol_type = other DNA
ctcagctacctgggaggctg

SEQ ID NO: 28007 - DNA, 20 bp, synthetic construct
  misc_feature 1..20: note = chemically synthesized
  source 1..20: mol_type = other DNA
agctacctgggaggctgagg

SEQ ID NO: 28008 - DNA, 20 bp, synthetic construct
  misc_feature 1..20: note = chemically synthesized
  source 1..20: mol_type = other DNA
gctacctgggaggctgaggt

SEQ ID NO: 28009 - DNA, 20 bp, synthetic construct
  misc_feature 1..20: note = chemically synthesized
  source 1..20: mol_type = other DNA
acctgggaggctgaggtggg

SEQ ID NO: 28010 - DNA, 20 bp, synthetic construct
  misc_feature 1..20: note = chemically synthesized
  source 1..20: mol_type = other DNA
ctgaggtgggaagaatgctt

SEQ ID NO: 28011 - DNA, 20 bp, synthetic construct
  misc_feature 1..20: note = chemically synthesized
  source 1..20: mol_type = other DNA
gtgggaagaatgcttgagcc

SEQ ID NO: 28012 - DNA, 20 bp, synthetic construct
  misc_feature 1..20: note = chemically synthesized
  source 1..20: mol_type = other DNA
tgggaagaatgcttgagccc

SEQ ID NO: 28013 - DNA, 20 bp, synthetic construct
  misc_feature 1..20: note = chemically synthesized
  source 1..20: mol_type = other DNA
ggaagaatgcttgagcccag

SEQ ID NO: 28014 - DNA, 20 bp, synthetic construct
  misc_feature 1..20: note = chemically synthesized
  source 1..20: mol_type = other DNA
gaagaatgcttgagcccagg

SEQ ID NO: 28015 - DNA, 20 bp, synthetic construct
  misc_feature 1..20: note = chemically synthesized
  source 1..20: mol_type = other DNA
atgcttgagcccaggaggtt

SEQ ID NO: 28016 - DNA, 20 bp, synthetic construct
  misc_feature 1..20: note = chemically synthesized
  source 1..20: mol_type = other DNA
tgcttgagcccaggaggttg

SEQ ID NO: 28017 - DNA, 20 bp, synthetic construct
  misc_feature 1..20: note = chemically synthesized
  source 1..20: mol_type = other DNA
agcccaggaggttgaggctg

SEQ ID NO: 28018 - DNA, 20 bp, synthetic construct
  misc_feature 1..20: note = chemically synthesized
  source 1..20: mol_type = other DNA
caggaggttgaggctgcagt

SEQ ID NO: 28019 - DNA, 20 bp, synthetic construct
  misc_feature 1..20: note = chemically synthesized
  source 1..20: mol_type = other DNA
gccataatcacactactgcc

SEQ ID NO: 28020 - DNA, 20 bp, synthetic construct
  misc_feature 1..20: note = chemically synthesized
  source 1..20: mol_type = other DNA
ccataatcacactactgcct

SEQ ID NO: 28021 - DNA, 20 bp, synthetic construct
  misc_feature 1..20: note = chemically synthesized
  source 1..20: mol_type = other DNA
acactactgcctgggtgacc

SEQ ID NO: 28022 - DNA, 20 bp, synthetic construct
  misc_feature 1..20: note = chemically synthesized
  source 1..20: mol_type = other DNA
tactgcctgggtgaccaagt

SEQ ID NO: 28023 - DNA, 20 bp, synthetic construct
  misc_feature 1..20: note = chemically synthesized
  source 1..20: mol_type = other DNA
gaccccgattcaaaaataaa

SEQ ID NO: 28024 - DNA, 20 bp, synthetic construct
  misc_feature 1..20: note = chemically synthesized
  source 1..20: mol_type = other DNA
accccgattcaaaaataaaa

SEQ ID NO: 28025 - DNA, 20 bp, synthetic construct
  misc_feature 1..20: note = chemically synthesized
  source 1..20: mol_type = other DNA
ggaaaacaaacaaaattaca

SEQ ID NO: 28026 - DNA, 20 bp, synthetic construct
  misc_feature 1..20: note = chemically synthesized
  source 1..20: mol_type = other DNA
ttacaaagcgaaatttaaaa

SEQ ID NO: 28027 - DNA, 20 bp, synthetic construct
  misc_feature 1..20: note = chemically synthesized
  source 1..20: mol_type = other DNA
aatatgtatgtatgtttgtg

SEQ ID NO: 28028 - DNA, 20 bp, synthetic construct
  misc_feature 1..20: note = chemically synthesized
  source 1..20: mol_type = other DNA
gtttcttgtgtatgtttgtg

SEQ ID NO: 28029 - DNA, 20 bp, synthetic construct
  misc_feature 1..20: note = chemically synthesized
  source 1..20: mol_type = other DNA
gtatctcatgtttgtatgtg

SEQ ID NO: 28030 - DNA, 20 bp, synthetic construct
  misc_feature 1..20: note = chemically synthesized
  source 1..20: mol_type = other DNA
tatctcatgtttgtatgtgt

SEQ ID NO: 28031 - DNA, 20 bp, synthetic construct
  misc_feature 1..20: note = chemically synthesized
  source 1..20: mol_type = other DNA
tttgtatgtgtgggtgttat

SEQ ID NO: 28032 - DNA, 20 bp, synthetic construct
  misc_feature 1..20: note = chemically synthesized
  source 1..20: mol_type = other DNA
tgtgggtgttatcagactct

SEQ ID NO: 28033 - DNA, 20 bp, synthetic construct
  misc_feature 1..20: note = chemically synthesized
  source 1..20: mol_type = other DNA
gtgggtgttatcagactctc

SEQ ID NO: 28034 - DNA, 20 bp, synthetic construct
  misc_feature 1..20: note = chemically synthesized
  source 1..20: mol_type = other DNA
tgttatcagactctcaggct

SEQ ID NO: 28035 - DNA, 20 bp, synthetic construct
  misc_feature 1..20: note = chemically synthesized
  source 1..20: mol_type = other DNA
gttatcagactctcaggctt

SEQ ID NO: 28036 - DNA, 20 bp, synthetic construct
  misc_feature 1..20: note = chemically synthesized
  source 1..20: mol_type = other DNA
tatcagactctcaggcttgg

SEQ ID NO: 28037 - DNA, 20 bp, synthetic construct
  misc_feature 1..20: note = chemically synthesized
  source 1..20: mol_type = other DNA
ctcaggcttgggagcccctc

SEQ ID NO: 28038 - DNA, 20 bp, synthetic construct
  misc_feature 1..20: note = chemically synthesized
  source 1..20: mol_type = other DNA
ttgggagcccctctggaacc

SEQ ID NO: 28039 - DNA, 20 bp, synthetic construct
  misc_feature 1..20: note = chemically synthesized
  source 1..20: mol_type = other DNA
ggagcccctctggaacccag

SEQ ID NO: 28040 - DNA, 20 bp, synthetic construct
  misc_feature 1..20: note = chemically synthesized
  source 1..20: mol_type = other DNA
ctggaacccagcagtttctg

SEQ ID NO: 28041 - DNA, 20 bp, synthetic construct
  misc_feature 1..20: note = chemically synthesized
  source 1..20: mol_type = other DNA
cagcagtttctgcagcctta

SEQ ID NO: 28042 - DNA, 20 bp, synthetic construct
  misc_feature 1..20: note = chemically synthesized
  source 1..20: mol_type = other DNA
agcagtttctgcagccttac

SEQ ID NO: 28043 - DNA, 20 bp, synthetic construct
  misc_feature 1..20: note = chemically synthesized
  source 1..20: mol_type = other DNA
gtttctgcagccttacaggc

SEQ ID NO: 28044 - DNA, 20 bp, synthetic construct
  misc_feature 1..20: note = chemically synthesized
  source 1..20: mol_type = other DNA
aggctggcactccttaaaca

SEQ ID NO: 28045 - DNA, 20 bp, synthetic construct
  misc_feature 1..20: note = chemically synthesized
  source 1..20: mol_type = other DNA
ggctggcactccttaaacat

SEQ ID NO: 28046 - DNA, 20 bp, synthetic construct
  misc_feature 1..20: note = chemically synthesized
  source 1..20: mol_type = other DNA
aactttaatttacatccaca

SEQ ID NO: 28047 - DNA, 20 bp, synthetic construct
  misc_feature 1..20: note = chemically synthesized
  source 1..20: mol_type = other DNA
tttaatttacatccacatag

SEQ ID NO: 28048 - DNA, 20 bp, synthetic construct
  misc_feature 1..20: note = chemically synthesized
  source 1..20: mol_type = other DNA
ttaatttacatccacatagt

SEQ ID NO: 28049 - DNA, 20 bp, synthetic construct
  misc_feature 1..20: note = chemically synthesized
  source 1..20: mol_type = other DNA
tagtaggccacattactcaa

SEQ ID NO: 28050 - DNA, 20 bp, synthetic construct
  misc_feature 1..20: note = chemically synthesized
  source 1..20: mol_type = other DNA
taggccacattactcaatag

SEQ ID NO: 28051 - DNA, 20 bp, synthetic construct
  misc_feature 1..20: note = chemically synthesized
  source 1..20: mol_type = other DNA
cattactcaatagcagttcc

SEQ ID NO: 28052 - DNA, 20 bp, synthetic construct
  misc_feature 1..20: note = chemically synthesized
  source 1..20: mol_type = other DNA
tcaatagcagttccgagact

SEQ ID NO: 28053 - DNA, 20 bp, synthetic construct
  misc_feature 1..20: note = chemically synthesized
  source 1..20: mol_type = other DNA
agaatattcttctccatgtt

SEQ ID NO: 28054 - DNA, 20 bp, synthetic construct
  misc_feature 1..20: note = chemically synthesized
  source 1..20: mol_type = other DNA
aatattcttctccatgttga

SEQ ID NO: 28055 - DNA, 20 bp, synthetic construct
  misc_feature 1..20: note = chemically synthesized
  source 1..20: mol_type = other DNA
atattcttctccatgttgag

SEQ ID NO: 28056 - DNA, 20 bp, synthetic construct
  misc_feature 1..20: note = chemically synthesized
  source 1..20: mol_type = other DNA
gagaggaaattcctattcta

SEQ ID NO: 28057 - DNA, 20 bp, synthetic construct
  misc_feature 1..20: note = chemically synthesized
  source 1..20: mol_type = other DNA
cctattctatagatctcatt

SEQ ID NO: 28058 - DNA, 20 bp, synthetic construct
  misc_feature 1..20: note = chemically synthesized
  source 1..20: mol_type = other DNA
attctatagatctcatttgg

SEQ ID NO: 28059 - DNA, 20 bp, synthetic construct
  misc_feature 1..20: note = chemically synthesized
  source 1..20: mol_type = other DNA
atagatctcatttggtagaa

SEQ ID NO: 28060 - DNA, 20 bp, synthetic construct
  misc_feature 1..20: note = chemically synthesized
  source 1..20: mol_type = other DNA
tagatctcatttggtagaat

SEQ ID NO: 28061 - DNA, 20 bp, synthetic construct
  misc_feature 1..20: note = chemically synthesized
  source 1..20: mol_type = other DNA
agatctcatttggtagaatg

SEQ ID NO: 28062 - DNA, 20 bp, synthetic construct
  misc_feature 1..20: note = chemically synthesized
  source 1..20: mol_type = other DNA
agaatggggtacaaaaaatt

SEQ ID NO: 28063 - DNA, 20 bp, synthetic construct
  misc_feature 1..20: note = chemically synthesized
  source 1..20: mol_type = other DNA
gaatggggtacaaaaaattt

SEQ ID NO: 28064 - DNA, 20 bp, synthetic construct
  misc_feature 1..20: note = chemically synthesized
  source 1..20: mol_type = other DNA
ggtacaaaaaatttaggatt

SEQ ID NO: 28065 - DNA, 20 bp, synthetic construct
  misc_feature 1..20: note = chemically synthesized
  source 1..20: mol_type = other DNA
aaaaatttaggatttggatt

SEQ ID NO: 28066 - DNA, 20 bp, synthetic construct
  misc_feature 1..20: note = chemically synthesized
  source 1..20: mol_type = other DNA
tttaggatttggatttagat

SEQ ID NO: 28067 - DNA, 20 bp, synthetic construct
  misc_feature 1..20: note = chemically synthesized
  source 1..20: mol_type = other DNA
ttggatttagattagcactg

SEQ ID NO: 28068 - DNA, 20 bp, synthetic construct
  misc_feature 1..20: note = chemically synthesized
  source 1..20: mol_type = other DNA
ttttgcctcttattaacaaa

SEQ ID NO: 28069 - DNA, 20 bp, synthetic construct
  misc_feature 1..20: note = chemically synthesized
  source 1..20: mol_type = other DNA
tctaaatttcattttcaaat

SEQ ID NO: 28070 - DNA, 20 bp, synthetic construct
  misc_feature 1..20: note = chemically synthesized
  source 1..20: mol_type = other DNA
ctaaatttcattttcaaatt

SEQ ID NO: 28071 - DNA, 20 bp, synthetic construct
  misc_feature 1..20: note = chemically synthesized
  source 1..20: mol_type = other DNA
ttcaaattaggaaatacgta

SEQ ID NO: 28072 - DNA, 20 bp, synthetic construct
  misc_feature 1..20: note = chemically synthesized
  source 1..20: mol_type = other DNA
tcaaattaggaaatacgtac

SEQ ID NO: 28073 - DNA, 20 bp, synthetic construct
  misc_feature 1..20: note = chemically synthesized
  source 1..20: mol_type = other DNA
ttgttactaaacgaatattg

SEQ ID NO: 28074 - DNA, 20 bp, synthetic construct
  misc_feature 1..20: note = chemically synthesized
  source 1..20: mol_type = other DNA
actaaacgaatattgaagaa

SEQ ID NO: 28075 - DNA, 20 bp, synthetic construct
  misc_feature 1..20: note = chemically synthesized
  source 1..20: mol_type = other DNA
taaacgaatattgaagaata

SEQ ID NO: 28076 - DNA, 20 bp, synthetic construct
  misc_feature 1..20: note = chemically synthesized
  source 1..20: mol_type = other DNA
tagagttaacaatcaatatc

SEQ ID NO: 28077 - DNA, 20 bp, synthetic construct
  misc_feature 1..20: note = chemically synthesized
  source 1..20: mol_type = other DNA
gttaacaatcaatatctggc

SEQ ID NO: 28078 - DNA, 20 bp, synthetic construct
  misc_feature 1..20: note = chemically synthesized
  source 1..20: mol_type = other DNA
ttaacaatcaatatctggct

SEQ ID NO: 28079 - DNA, 20 bp, synthetic construct
  misc_feature 1..20: note = chemically synthesized
  source 1..20: mol_type = other DNA
aatcaatatctggctgggcg

SEQ ID NO: 28080 - DNA, 20 bp, synthetic construct
  misc_feature 1..20: note = chemically synthesized
  source 1..20: mol_type = other DNA
caatatctggctgggcgcgg

SEQ ID NO: 28081 - DNA, 20 bp, synthetic construct
  misc_feature 1..20: note = chemically synthesized
  source 1..20: mol_type = other DNA
gtggctcacgcctgtaatcc

SEQ ID NO: 28082 - DNA, 20 bp, synthetic construct
  misc_feature 1..20: note = chemically synthesized
  source 1..20: mol_type = other DNA
cgcctgtaatcccagcactc

SEQ ID NO: 28083 - DNA, 20 bp, synthetic construct
  misc_feature 1..20: note = chemically synthesized
  source 1..20: mol_type = other DNA
gcctgtaatcccagcactct

SEQ ID NO: 28084 - DNA, 20 bp, synthetic construct
  misc_feature 1..20: note = chemically synthesized
  source 1..20: mol_type = other DNA
ctgtaatcccagcactctgg

SEQ ID NO: 28085 - DNA, 20 bp, synthetic construct
  misc_feature 1..20: note = chemically synthesized
  source 1..20: mol_type = other DNA
tgtaatcccagcactctggg

SEQ ID NO: 28086 - DNA, 20 bp, synthetic construct
  misc_feature 1..20: note = chemically synthesized
  source 1..20: mol_type = other DNA
tcccagcactctgggaggcc

SEQ ID NO: 28087 - DNA, 20 bp, synthetic construct
  misc_feature 1..20: note = chemically synthesized
  source 1..20: mol_type = other DNA
cccagcactctgggaggccg

SEQ ID NO: 28088 - DNA, 20 bp, synthetic construct
  misc_feature 1..20: note = chemically synthesized
  source 1..20: mol_type = other DNA
agcactctgggaggccgagg

SEQ ID NO: 28089 - DNA, 20 bp, synthetic construct
  misc_feature 1..20: note = chemically synthesized
  source 1..20: mol_type = other DNA
gcactctgggaggccgaggc

SEQ ID NO: 28090 - DNA, 20 bp, synthetic construct
  misc_feature 1..20: note = chemically synthesized
  source 1..20: mol_type = other DNA
ctctgggaggccgaggcggg

SEQ ID NO: 28091 - DNA, 20 bp, synthetic construct
  misc_feature 1..20: note = chemically synthesized
  source 1..20: mol_type = other DNA
ggccgaggcgggtggatcac

SEQ ID NO: 28092 - DNA, 20 bp, synthetic construct
  misc_feature 1..20: note = chemically synthesized
  source 1..20: mol_type = other DNA
gccgaggcgggtggatcacg

SEQ ID NO: 28093 - DNA, 20 bp, synthetic construct
  misc_feature 1..20: note = chemically synthesized
  source 1..20: mol_type = other DNA
aggcgggtggatcacgaggt

SEQ ID NO: 28094 - DNA, 20 bp, synthetic construct
  misc_feature 1..20: note = chemically synthesized
  source 1..20: mol_type = other DNA
ggcgggtggatcacgaggtc

SEQ ID NO: 28095 - DNA, 20 bp, synthetic construct
  misc_feature 1..20: note = chemically synthesized
  source 1..20: mol_type = other DNA
cgggtggatcacgaggtcag

SEQ ID NO: 28096 - DNA, 20 bp, synthetic construct
  misc_feature 1..20: note = chemically synthesized
  source 1..20: mol_type = other DNA
gatcacgaggtcaggagatc

SEQ ID NO: 28097 - DNA, 20 bp, synthetic construct
  misc_feature 1..20: note = chemically synthesized
  source 1..20: mol_type = other DNA
tcaggagatcgagaccatcc

SEQ ID NO: 28098 - DNA, 20 bp, synthetic construct
  misc_feature 1..20: note = chemically synthesized
  source 1..20: mol_type = other DNA
cgagaccatcctggctaaca

SEQ ID NO: 28099 - DNA, 20 bp, synthetic construct
  misc_feature 1..20: note = chemically synthesized
  source 1..20: mol_type = other DNA
gaccatcctggctaacacgg

SEQ ID NO: 28100 - DNA, 20 bp, synthetic construct
  misc_feature 1..20: note = chemically synthesized
  source 1..20: mol_type = other DNA
ctggctaacacggtggaacc

SEQ ID NO: 28101 - DNA, 20 bp, synthetic construct
  misc_feature 1..20: note = chemically synthesized
  source 1..20: mol_type = other DNA
gtctctactaaaaatacaaa

SEQ ID NO: 28102 - DNA, 20 bp, synthetic construct
  misc_feature 1..20: note = chemically synthesized
  source 1..20: mol_type = other DNA
ctactaaaaatacaaaaagt

SEQ ID NO: 28103 - DNA, 20 bp, synthetic construct
  misc_feature 1..20: note = chemically synthesized
  source 1..20: mol_type = other DNA
taaaaatacaaaaagttagc

SEQ ID NO: 28104 - DNA, 20 bp, synthetic construct
  misc_feature 1..20: note = chemically synthesized
  source 1..20: mol_type = other DNA
aaaaatacaaaaagttagcc

SEQ ID NO: 28105 - DNA, 20 bp, synthetic construct
  misc_feature 1..20: note = chemically synthesized
  source 1..20: mol_type = other DNA
tacaaaaagttagccgggca

SEQ ID NO: 28106 - DNA, 20 bp, synthetic construct
  misc_feature 1..20: note = chemically synthesized
  source 1..20: mol_type = other DNA
aaaaagttagccgggcatgg

SEQ ID NO: 28107 - DNA, 20 bp, synthetic construct
  misc_feature 1..20: note = chemically synthesized
  source 1..20: mol_type = other DNA
aagttagccgggcatggtgg

SEQ ID NO: 28108 - DNA, 20 bp, synthetic construct
  misc_feature 1..20: note = chemically synthesized
  source 1..20: mol_type = other DNA
agttagccgggcatggtggt

SEQ ID NO: 28109 - DNA, 20 bp, synthetic construct
  misc_feature 1..20: note = chemically synthesized
  source 1..20: mol_type = other DNA
ggcatggtggtgggcacctg

SEQ ID NO: 28110 - DNA, 20 bp, synthetic construct
  misc_feature 1..20: note = chemically synthesized
  source 1..20: mol_type = other DNA
gtggtgggcacctgtagtcc

SEQ ID NO: 28111 - DNA, 20 bp, synthetic construct
  misc_feature 1..20: note = chemically synthesized
  source 1..20: mol_type = other DNA
cacctgtagtcccagctact

SEQ ID NO: 28112 - DNA, 20 bp, synthetic construct
  misc_feature 1..20: note = chemically synthesized
  source 1..20: mol_type = other DNA
acctgtagtcccagctactc

SEQ ID NO: 28113 - DNA, 20 bp, synthetic construct
  misc_feature 1..20: note = chemically synthesized
  source 1..20: mol_type = other DNA
ctgtagtcccagctactcag

SEQ ID NO: 28114 - DNA, 20 bp, synthetic construct
  misc_feature 1..20: note = chemically synthesized
  source 1..20: mol_type = other DNA
tgtagtcccagctactcagg

SEQ ID NO: 28115 - DNA, 20 bp, synthetic construct
  misc_feature 1..20: note = chemically synthesized
  source 1..20: mol_type = other DNA
gtcccagctactcaggaggc

SEQ ID NO: 28116 - DNA, 20 bp, synthetic construct
  misc_feature 1..20: note = chemically synthesized
  source 1..20: mol_type = other DNA
tcccagctactcaggaggct

SEQ ID NO: 28117 - DNA, 20 bp, synthetic construct
  misc_feature 1..20: note = chemically synthesized
  source 1..20: mol_type = other DNA
cccagctactcaggaggctg

SEQ ID NO: 28118 - DNA, 20 bp, synthetic construct
  misc_feature 1..20: note = chemically synthesized
  source 1..20: mol_type = other DNA
agctactcaggaggctgggg

SEQ ID NO: 28119 - DNA, 20 bp, synthetic construct
  misc_feature 1..20: note = chemically synthesized
  source 1..20: mol_type = other DNA
tactcaggaggctggggcag

SEQ ID NO: 28120 - DNA, 20 bp, synthetic construct
  misc_feature 1..20: note = chemically synthesized
  source 1..20: mol_type = other DNA
aggaggctggggcagcagaa

SEQ ID NO: 28121 - DNA, 20 bp, synthetic construct
  misc_feature 1..20: note = chemically synthesized
  source 1..20: mol_type = other DNA
gcagcagaatggcgtgaacc

SEQ ID NO: 28122 - DNA, 20 bp, synthetic construct
  misc_feature 1..20: note = chemically synthesized
  source 1..20: mol_type = other DNA
cagcagaatggcgtgaaccc

SEQ ID NO: 28123 - DNA, 20 bp, synthetic construct
  misc_feature 1..20: note = chemically synthesized
  source 1..20: mol_type = other DNA
gcagaatggcgtgaacccag

SEQ ID NO: 28124 - DNA, 20 bp, synthetic construct
  misc_feature 1..20: note = chemically synthesized
  source 1..20: mol_type = other DNA
cagaatggcgtgaacccagg

SEQ ID NO: 28125 - DNA, 20 bp, synthetic construct
  misc_feature 1..20: note = chemically synthesized
  source 1..20: mol_type = other DNA
aatggcgtgaacccaggagg

SEQ ID NO: 28126 - DNA, 20 bp, synthetic construct
  misc_feature 1..20: note = chemically synthesized
  source 1..20: mol_type = other DNA
tggcgtgaacccaggaggtg

SEQ ID NO: 28127 - DNA, 20 bp, synthetic construct
  misc_feature 1..20: note = chemically synthesized
  source 1..20: mol_type = other DNA
aacccaggaggtggagcttg

SEQ ID NO: 28128 - DNA, 20 bp, synthetic construct
  misc_feature 1..20: note = chemically synthesized
  source 1..20: mol_type = other DNA
caggaggtggagcttgcagt

SEQ ID NO: 28129 - DNA, 20 bp, synthetic construct
  misc_feature 1..20: note = chemically synthesized
  source 1..20: mol_type = other DNA
ggtggagcttgcagtgagcc

SEQ ID NO: 28130 - DNA, 20 bp, synthetic construct
  misc_feature 1..20: note = chemically synthesized
  source 1..20: mol_type = other DNA
gagatcgtgccactgcactc

SEQ ID NO: 28131 - DNA, 20 bp, synthetic construct
  misc_feature 1..20: note = chemically synthesized
  source 1..20: mol_type = other DNA
cgtgccactgcactccagcc

SEQ ID NO: 28132 - DNA, 20 bp, synthetic construct
  misc_feature 1..20: note = chemically synthesized
  source 1..20: mol_type = other DNA
gtgccactgcactccagcct

SEQ ID NO: 28133 - DNA, 20 bp, synthetic construct
  misc_feature 1..20: note = chemically synthesized
  source 1..20: mol_type = other DNA
ctgcactccagcctgggcaa

SEQ ID NO: 28134 - DNA, 20 bp, synthetic construct
  misc_feature 1..20: note = chemically synthesized
  source 1..20: mol_type = other DNA
gcactccagcctgggcaaca

SEQ ID NO: 28135 - DNA, 20 bp, synthetic construct
  misc_feature 1..20: note = chemically synthesized
  source 1..20: mol_type = other DNA
tccagcctgggcaacagagc

SEQ ID NO: 28136 - DNA, 20 bp, synthetic construct
  misc_feature 1..20: note = chemically synthesized
  source 1..20: mol_type = other DNA
ccttctcaaaaacaaaaaaa

SEQ ID NO: 28137 - DNA, 20 bp, synthetic construct
  misc_feature 1..20: note = chemically synthesized
  source 1..20: mol_type = other DNA
aaataaatatctgtgctgtt

SEQ ID NO: 28138 - DNA, 20 bp, synthetic construct
  misc_feature 1..20: note = chemically synthesized
  source 1..20: mol_type = other DNA
tatctgtgctgttaagtatg

SEQ ID NO: 28139 - DNA, 20 bp, synthetic construct
  misc_feature 1..20: note = chemically synthesized
  source 1..20: mol_type = other DNA
tgctgttaagtatgtggtaa

SEQ ID NO: 28140 - DNA, 20 bp, synthetic construct
  misc_feature 1..20: note = chemically synthesized
  source 1..20: mol_type = other DNA
ctgttaagtatgtggtaaaa

SEQ ID NO: 28141 - DNA, 20 bp, synthetic construct
  misc_feature 1..20: note = chemically synthesized
  source 1..20: mol_type = other DNA
tgttaagtatgtggtaaaag

SEQ ID NO: 28142 - DNA, 20 bp, synthetic construct
  misc_feature 1..20: note = chemically synthesized
  source 1..20: mol_type = other DNA
aaagaggtattttcacatac

SEQ ID NO: 28143 - DNA, 20 bp, synthetic construct
  misc_feature 1..20: note = chemically synthesized
  source 1..20: mol_type = other DNA
taaaaaacaaaatacatcaa

SEQ ID NO: 28144 - DNA, 20 bp, synthetic construct
  misc_feature 1..20: note = chemically synthesized
  source 1..20: mol_type = other DNA
aatattcatgctctgtgtct

SEQ ID NO: 28145 - DNA, 20 bp, synthetic construct
  misc_feature 1..20: note = chemically synthesized
  source 1..20: mol_type = other DNA
taaatgataaattaaaaatt

SEQ ID NO: 28146 - DNA, 20 bp, synthetic construct
  misc_feature 1..20: note = chemically synthesized
  source 1..20: mol_type = other DNA
aaatgataaattaaaaattt

SEQ ID NO: 28147 - DNA, 20 bp, synthetic construct
  misc_feature 1..20: note = chemically synthesized
  source 1..20: mol_type = other DNA
aaattaaaaatttaggatgt

SEQ ID NO: 28148 - DNA, 20 bp, synthetic construct
  misc_feature 1..20: note = chemically synthesized
  source 1..20: mol_type = other DNA
tttaggatgtaagctgtttg

SEQ ID NO: 28149 - DNA, 20 bp, synthetic construct
  misc_feature 1..20: note = chemically synthesized
  source 1..20: mol_type = other DNA
atttttttcctgtttgctca

SEQ ID NO: 28150 - DNA, 20 bp, synthetic construct
  misc_feature 1..20: note = chemically synthesized
  source 1..20: mol_type = other DNA
acagttctaaatccatctcc

SEQ ID NO: 28151 - DNA, 20 bp, synthetic construct
  misc_feature 1..20: note = chemically synthesized
  source 1..20: mol_type = other DNA
cagttctaaatccatctcct

SEQ ID NO: 28152 - DNA, 20 bp, synthetic construct
  misc_feature 1..20: note = chemically synthesized
  source 1..20: mol_type = other DNA
tctaaatccatctcctaggt

SEQ ID NO: 28153 - DNA, 20 bp, synthetic construct
  misc_feature 1..20: note = chemically synthesized
  source 1..20: mol_type = other DNA
tatgtgttgaactatttaat

SEQ ID NO: 28154 - DNA, 20 bp, synthetic construct
  misc_feature 1..20: note = chemically synthesized
  source 1..20: mol_type = other DNA
gtgttattgttcataatttt

SEQ ID NO: 28155 - DNA, 20 bp, synthetic construct
  misc_feature 1..20: note = chemically synthesized
  source 1..20: mol_type = other DNA
gttcataattttaagaatgt

SEQ ID NO: 28156 - DNA, 20 bp, synthetic construct
  misc_feature 1..20: note = chemically synthesized
  source 1..20: mol_type = other DNA
atgtaagcatacaaaatgtc

SEQ ID NO: 28157 - DNA, 20 bp, synthetic construct
  misc_feature 1..20: note = chemically synthesized
  source 1..20: mol_type = other DNA
taaaaatattacataaatca

SEQ ID NO: 28158 - DNA, 20 bp, synthetic construct
  misc_feature 1..20: note = chemically synthesized
  source 1..20: mol_type = other DNA
taaaatgacatttaaatgct

SEQ ID NO: 28159 - DNA, 20 bp, synthetic construct
  misc_feature 1..20: note = chemically synthesized
  source 1..20: mol_type = other DNA
aaaatgacatttaaatgctt

SEQ ID NO: 28160 - DNA, 20 bp, synthetic construct
  misc_feature 1..20: note = chemically synthesized
  source 1..20: mol_type = other DNA
ttaaatgcttaggaaactgt

SEQ ID NO: 28161 - DNA, 20 bp, synthetic construct
  misc_feature 1..20: note = chemically synthesized
  source 1..20: mol_type = other DNA
gcaaaatattaaataaaaat

SEQ ID NO: 28162 - DNA, 20 bp, synthetic construct
  misc_feature 1..20: note = chemically synthesized
  source 1..20: mol_type = other DNA
taaataaaaataagcaaaat

SEQ ID NO: 28163 - DNA, 20 bp, synthetic construct
  misc_feature 1..20: note = chemically synthesized
  source 1..20: mol_type = other DNA
aaataaaaataagcaaaatt

SEQ ID NO: 28164 - DNA, 20 bp, synthetic construct
  misc_feature 1..20: note = chemically synthesized
  source 1..20: mol_type = other DNA
aaaataagcaaaattaggta

SEQ ID NO: 28165 - DNA, 20 bp, synthetic construct
  misc_feature 1..20: note = chemically synthesized
  source 1..20: mol_type = other DNA
acagaacaatcactatgtaa

SEQ ID NO: 28166 - DNA, 20 bp, synthetic construct
  misc_feature 1..20: note = chemically synthesized
  source 1..20: mol_type = other DNA
cagaacaatcactatgtaaa

SEQ ID NO: 28167 - DNA, 20 bp, synthetic construct
  misc_feature 1..20: note = chemically synthesized
  source 1..20: mol_type = other DNA
gctataaatatttgtatcaa

SEQ ID NO: 28168 - DNA, 20 bp, synthetic construct
  misc_feature 1..20: note = chemically synthesized
  source 1..20: mol_type = other DNA
tatttgtatcaaaagaaaaa

SEQ ID NO: 28169 - DNA, 20 bp, synthetic construct
  misc_feature 1..20: note = chemically synthesized
  source 1..20: mol_type = other DNA
atataatcttattttctata

SEQ ID NO: 28170 - DNA, 20 bp, synthetic construct
  misc_feature 1..20: note = chemically synthesized
  source 1..20: mol_type = other DNA
tgccgtatacaaattttctg

SEQ ID NO: 28171 - DNA, 20 bp, synthetic construct
  misc_feature 1..20: note = chemically synthesized
  source 1..20: mol_type = other DNA
cgtatacaaattttctgaag

SEQ ID NO: 28172 - DNA, 20 bp, synthetic construct
  misc_feature 1..20: note = chemically synthesized
  source 1..20: mol_type = other DNA
attttctgaagaagacattt

SEQ ID NO: 28173 - DNA, 20 bp, synthetic construct
  misc_feature 1..20: note = chemically synthesized
  source 1..20: mol_type = other DNA
tttcggttttataatctaaa

SEQ ID NO: 28174 - DNA, 20 bp, synthetic construct
  misc_feature 1..20: note = chemically synthesized
  source 1..20: mol_type = other DNA
tcggttttataatctaaaaa

SEQ ID NO: 28175 - DNA, 20 bp, synthetic construct
  misc_feature 1..20: note = chemically synthesized
  source 1..20: mol_type = other DNA
cattttacaatgactataaa

SEQ ID NO: 28176 - DNA, 20 bp, synthetic construct
  misc_feature 1..20: note = chemically synthesized
  source 1..20: mol_type = other DNA
agttatatacgattatgctg

SEQ ID NO: 28177 - DNA, 20 bp, synthetic construct
  misc_feature 1..20: note = chemically synthesized
  source 1..20: mol_type = other DNA
ttatgctgaagatgacaatg

SEQ ID NO: 28178 - DNA, 20 bp, synthetic construct
  misc_feature 1..20: note = chemically synthesized
  source 1..20: mol_type = other DNA
gataaatgctaatgtttatt

SEQ ID NO: 28179 - DNA, 20 bp, synthetic construct
  misc_feature 1..20: note = chemically synthesized
  source 1..20: mol_type = other DNA
tttattaagcatttaactca

SEQ ID NO: 28180 - DNA, 20 bp, synthetic construct
  misc_feature 1..20: note = chemically synthesized
  source 1..20: mol_type = other DNA
attaagcatttaactcacgg

SEQ ID NO: 28181 - DNA, 20 bp, synthetic construct
  misc_feature 1..20: note = chemically synthesized
  source 1..20: mol_type = other DNA
taagcatttaactcacggta

SEQ ID NO: 28182 - DNA, 20 bp, synthetic construct
  misc_feature 1..20: note = chemically synthesized
  source 1..20: mol_type = other DNA
agcatttaactcacggtaga

SEQ ID NO: 28183 - DNA, 20 bp, synthetic construct
  misc_feature 1..20: note = chemically synthesized
  source 1..20: mol_type = other DNA
gcatttaactcacggtagag

SEQ ID NO: 28184 - DNA, 20 bp, synthetic construct
  misc_feature 1..20: note = chemically synthesized
  source 1..20: mol_type = other DNA
catttaactcacggtagaga

SEQ ID NO: 28185 - DNA, 20 bp, synthetic construct
  misc_feature 1..20: note = chemically synthesized
  source 1..20: mol_type = other DNA
aactcacggtagagagggct

SEQ ID NO: 28186 - DNA, 20 bp, synthetic construct
  misc_feature 1..20: note = chemically synthesized
  source 1..20: mol_type = other DNA
attttctcaccaaacctgtg

SEQ ID NO: 28187 - DNA, 20 bp, synthetic construct
  misc_feature 1..20: note = chemically synthesized
  source 1..20: mol_type = other DNA
ttctcaccaaacctgtgaag

SEQ ID NO: 28188 - DNA, 20 bp, synthetic construct
  misc_feature 1..20: note = chemically synthesized
  source 1..20: mol_type = other DNA
tctcaccaaacctgtgaagt

SEQ ID NO: 28189 - DNA, 20 bp, synthetic construct
  misc_feature 1..20: note = chemically synthesized
  source 1..20: mol_type = other DNA
ctcaccaaacctgtgaagta

SEQ ID NO: 28190 - DNA, 20 bp, synthetic construct
  misc_feature 1..20: note = chemically synthesized
  source 1..20: mol_type = other DNA
caccaaacctgtgaagtagg

SEQ ID NO: 28191 - DNA, 20 bp, synthetic construct
  misc_feature 1..20: note = chemically synthesized
  source 1..20: mol_type = other DNA
accaaacctgtgaagtaggg

SEQ ID NO: 28192 - DNA, 20 bp, synthetic construct
  misc_feature 1..20: note = chemically synthesized
  source 1..20: mol_type = other DNA
tattttcaatgttttaaaat

SEQ ID NO: 28193 - DNA, 20 bp, synthetic construct
  misc_feature 1..20: note = chemically synthesized
  source 1..20: mol_type = other DNA
attttcaatgttttaaaatt

SEQ ID NO: 28194 - DNA, 20 bp, synthetic construct
  misc_feature 1..20: note = chemically synthesized
  source 1..20: mol_type = other DNA
tgttttaaaattaggaaact

SEQ ID NO: 28195 - DNA, 20 bp, synthetic construct
  misc_feature 1..20: note = chemically synthesized
  source 1..20: mol_type = other DNA
gttttaaaattaggaaactg

SEQ ID NO: 28196 - DNA, 20 bp, synthetic construct
  misc_feature 1..20: note = chemically synthesized
  source 1..20: mol_type = other DNA
aattaggaaactgaggctca

SEQ ID NO: 28197 - DNA, 20 bp, synthetic construct
  misc_feature 1..20: note = chemically synthesized
  source 1..20: mol_type = other DNA
ttaggaaactgaggctcaca

SEQ ID NO: 28198 - DNA, 20 bp, synthetic construct
  misc_feature 1..20: note = chemically synthesized
  source 1..20: mol_type = other DNA
taggaaactgaggctcacag

SEQ ID NO: 28199 - DNA, 20 bp, synthetic construct
  misc_feature 1..20: note = chemically synthesized
  source 1..20: mol_type = other DNA
aaactgaggctcacagagga

SEQ ID NO: 28200 - DNA, 20 bp, synthetic construct
  misc_feature 1..20: note = chemically synthesized
  source 1..20: mol_type = other DNA
cagaggaaagcaactttcct

SEQ ID NO: 28201 - DNA, 20 bp, synthetic construct
  misc_feature 1..20: note = chemically synthesized
  source 1..20: mol_type = other DNA
cttagttaaatcattaatgt

SEQ ID NO: 28202 - DNA, 20 bp, synthetic construct
  misc_feature 1..20: note = chemically synthesized
  source 1..20: mol_type = other DNA
gttaaatcattaatgtaagt

SEQ ID NO: 28203 - DNA, 20 bp, synthetic construct
  misc_feature 1..20: note = chemically synthesized
  source 1..20: mol_type = other DNA
cagaactgaaattcaatatc

SEQ ID NO: 28204 - DNA, 20 bp, synthetic construct
  misc_feature 1..20: note = chemically synthesized
  source 1..20: mol_type = other DNA
attttcttaaaccattatgc

SEQ ID NO: 28205 - DNA, 20 bp, synthetic construct
  misc_feature 1..20: note = chemically synthesized
  source 1..20: mol_type = other DNA
atgctggactcctctccaaa

SEQ ID NO: 28206 - DNA, 20 bp, synthetic construct
  misc_feature 1..20: note = chemically synthesized
  source 1..20: mol_type = other DNA
tgctggactcctctccaaac

SEQ ID NO: 28207 - DNA, 20 bp, synthetic construct
  misc_feature 1..20: note = chemically synthesized
  source 1..20: mol_type = other DNA
ccaaacaggaccactcgttt

SEQ ID NO: 28208 - DNA, 20 bp, synthetic construct
  misc_feature 1..20: note = chemically synthesized
  source 1..20: mol_type = other DNA
caaacaggaccactcgtttc

SEQ ID NO: 28209 - DNA, 20 bp, synthetic construct
  misc_feature 1..20: note = chemically synthesized
  source 1..20: mol_type = other DNA
aaacaggaccactcgtttca

SEQ ID NO: 28210 - DNA, 20 bp, synthetic construct
  misc_feature 1..20: note = chemically synthesized
  source 1..20: mol_type = other DNA
atgttttccatgttatactg

SEQ ID NO: 28211 - DNA, 20 bp, synthetic construct
  misc_feature 1..20: note = chemically synthesized
  source 1..20: mol_type = other DNA
tgttttccatgttatactga

SEQ ID NO: 28212 - DNA, 20 bp, synthetic construct
  misc_feature 1..20: note = chemically synthesized
  source 1..20: mol_type = other DNA
tttccatgttatactgaagg

SEQ ID NO: 28213 - DNA, 20 bp, synthetic construct
  misc_feature 1..20: note = chemically synthesized
  source 1..20: mol_type = other DNA
actgaaggaagtcccatcat

SEQ ID NO: 28214 - DNA, 20 bp, synthetic construct
  misc_feature 1..20: note = chemically synthesized
  source 1..20: mol_type = other DNA
taactttttgttccctttcc

SEQ ID NO: 28215 - DNA, 20 bp, synthetic construct
  misc_feature 1..20: note = chemically synthesized
  source 1..20: mol_type = other DNA
atgttatctatttttccatt

SEQ ID NO: 28216 - DNA, 20 bp, synthetic construct
  misc_feature 1..20: note = chemically synthesized
  source 1..20: mol_type = other DNA
tctatttttccatttagtat

SEQ ID NO: 28217 - DNA, 20 bp, synthetic construct
  misc_feature 1..20: note = chemically synthesized
  source 1..20: mol_type = other DNA
ctatttttccatttagtatc

SEQ ID NO: 28218 - DNA, 20 bp, synthetic construct
  misc_feature 1..20: note = chemically synthesized
  source 1..20: mol_type = other DNA
tttccatttagtatcaggaa

SEQ ID NO: 28219 - DNA, 20 bp, synthetic construct
  misc_feature 1..20: note = chemically synthesized
  source 1..20: mol_type = other DNA
catttagtatcaggaaaaga

SEQ ID NO: 28220 - DNA, 20 bp, synthetic construct
  misc_feature 1..20: note = chemically synthesized
  source 1..20: mol_type = other DNA
gtatcaggaaaagatagcaa

SEQ ID NO: 28221 - DNA, 20 bp, synthetic construct
  misc_feature 1..20: note = chemically synthesized
  source 1..20: mol_type = other DNA
gaaaagatagcaacagaaaa

SEQ ID NO: 28222 - DNA, 20 bp, synthetic construct
  misc_feature 1..20: note = chemically synthesized
  source 1..20: mol_type = other DNA
ttgtattaaatactttttaa

SEQ ID NO: 28223 - DNA, 20 bp, synthetic construct
  misc_feature 1..20: note = chemically synthesized
  source 1..20: mol_type = other DNA
tttttaatagacttgatttt

SEQ ID NO: 28224 - DNA, 20 bp, synthetic construct
  misc_feature 1..20: note = chemically synthesized
  source 1..20: mol_type = other DNA
tttaatagacttgattttaa

SEQ ID NO: 28225 - DNA, 20 bp, synthetic construct
  misc_feature 1..20: note = chemically synthesized
  source 1..20: mol_type = other DNA
agacttgattttaagagtta

SEQ ID NO: 28226 - DNA, 20 bp, synthetic construct
  misc_feature 1..20: note = chemically synthesized
  source 1..20: mol_type = other DNA
ttttaagagttatagattca

SEQ ID NO: 28227 - DNA, 20 bp, synthetic construct
  misc_feature 1..20: note = chemically synthesized
  source 1..20: mol_type = other DNA
tatagattcacagaaaaact

SEQ ID NO: 28228 - DNA, 20 bp, synthetic construct
  misc_feature 1..20: note = chemically synthesized
  source 1..20: mol_type = other DNA
agattcacagaaaaactcag

SEQ ID NO: 28229 - DNA, 20 bp, synthetic construct
  misc_feature 1..20: note = chemically synthesized
  source 1..20: mol_type = other DNA
ttcacagaaaaactcagtag

SEQ ID NO: 28230 - DNA, 20 bp, synthetic construct
  misc_feature 1..20: note = chemically synthesized
  source 1..20: mol_type = other DNA
tcacagaaaaactcagtaga

SEQ ID NO: 28231 - DNA, 20 bp, synthetic construct
  misc_feature 1..20: note = chemically synthesized
  source 1..20: mol_type = other DNA
aaaactcagtagaaggtact

SEQ ID NO: 28232 - DNA, 20 bp, synthetic construct
  misc_feature 1..20: note = chemically synthesized
  source 1..20: mol_type = other DNA
accttctattttgcatatca

SEQ ID NO: 28233 - DNA, 20 bp, synthetic construct
  misc_feature 1..20: note = chemically synthesized
  source 1..20: mol_type = other DNA
tttgcatatcatggtttttt

SEQ ID NO: 28234 - DNA, 20 bp, synthetic construct
  misc_feature 1..20: note = chemically synthesized
  source 1..20: mol_type = other DNA
tttaagcacatattataacc

SEQ ID NO: 28235 - DNA, 20 bp, synthetic construct
  misc_feature 1..20: note = chemically synthesized
  source 1..20: mol_type = other DNA
ttaagcacatattataacct

SEQ ID NO: 28236 - DNA, 20 bp, synthetic construct
  misc_feature 1..20: note = chemically synthesized
  source 1..20: mol_type = other DNA
tataacctaggtattattct

SEQ ID NO: 28237 - DNA, 20 bp, synthetic construct
  misc_feature 1..20: note = chemically synthesized
  source 1..20: mol_type = other DNA
ataacctaggtattattcta

SEQ ID NO: 28238 - DNA, 20 bp, synthetic construct
  misc_feature 1..20: note = chemically synthesized
  source 1..20: mol_type = other DNA
taacctaggtattattctaa

SEQ ID NO: 28239 - DNA, 20 bp, synthetic construct
  misc_feature 1..20: note = chemically synthesized
  source 1..20: mol_type = other DNA
ctaagggcataatacactat

SEQ ID NO: 28240 - DNA, 20 bp, synthetic construct
  misc_feature 1..20: note = chemically synthesized
  source 1..20: mol_type = other DNA
tatcttgacaataaccttat

SEQ ID NO: 28241 - DNA, 20 bp, synthetic construct
  misc_feature 1..20: note = chemically synthesized
  source 1..20: mol_type = other DNA
ttgacaataaccttatgaga

SEQ ID NO: 28242 - DNA, 20 bp, synthetic construct
  misc_feature 1..20: note = chemically synthesized
  source 1..20: mol_type = other DNA
ccttatgagatggatactac

SEQ ID NO: 28243 - DNA, 20 bp, synthetic construct
  misc_feature 1..20: note = chemically synthesized
  source 1..20: mol_type = other DNA
ctactagattacccatttta

SEQ ID NO: 28244 - DNA, 20 bp, synthetic construct
  misc_feature 1..20: note = chemically synthesized
  source 1..20: mol_type = other DNA
agattacccattttacagat

SEQ ID NO: 28245 - DNA, 20 bp, synthetic construct
  misc_feature 1..20: note = chemically synthesized
  source 1..20: mol_type = other DNA
attttacagataagtacact

SEQ ID NO: 28246 - DNA, 20 bp, synthetic construct
  misc_feature 1..20: note = chemically synthesized
  source 1..20: mol_type = other DNA
ttttacagataagtacactg

SEQ ID NO: 28247 - DNA, 20 bp, synthetic construct
  misc_feature 1..20: note = chemically synthesized
  source 1..20: mol_type = other DNA
cagataagtacactgaggct

SEQ ID NO: 28248 - DNA, 20 bp, synthetic construct
  misc_feature 1..20: note = chemically synthesized
  source 1..20: mol_type = other DNA
gataagtacactgaggctca

SEQ ID NO: 28249 - DNA, 20 bp, synthetic construct
  misc_feature 1..20: note = chemically synthesized
  source 1..20: mol_type = other DNA
atcttgcccaatattatacc

SEQ ID NO: 28250 - DNA, 20 bp, synthetic construct
  misc_feature 1..20: note = chemically synthesized
  source 1..20: mol_type = other DNA
caatattataccaagtttga

SEQ ID NO: 28251 - DNA, 20 bp, synthetic construct
  misc_feature 1..20: note = chemically synthesized
  source 1..20: mol_type = other DNA
aagtttgacagttctgactg

SEQ ID NO: 28252 - DNA, 20 bp, synthetic construct
  misc_feature 1..20: note = chemically synthesized
  source 1..20: mol_type = other DNA
agttctgactgtggtgcttg

SEQ ID NO: 28253 - DNA, 20 bp, synthetic construct
  misc_feature 1..20: note = chemically synthesized
  source 1..20: mol_type = other DNA
aaccaaaaaaaacataaaat

SEQ ID NO: 28254 - DNA, 20 bp, synthetic construct
  misc_feature 1..20: note = chemically synthesized
  source 1..20: mol_type = other DNA
aaaaaacataaaatcagcca

SEQ ID NO: 28255 - DNA, 20 bp, synthetic construct
  misc_feature 1..20: note = chemically synthesized
  source 1..20: mol_type = other DNA
gtacatattcctgctaatga

SEQ ID NO: 28256 - DNA, 20 bp, synthetic construct
  misc_feature 1..20: note = chemically synthesized
  source 1..20: mol_type = other DNA
agtatctgctttaaatcatc

SEQ ID NO: 28257 - DNA, 20 bp, synthetic construct
  misc_feature 1..20: note = chemically synthesized
  source 1..20: mol_type = other DNA
aaatcatctggcccattcct

SEQ ID NO: 28258 - DNA, 20 bp, synthetic construct
  misc_feature 1..20: note = chemically synthesized
  source 1..20: mol_type = other DNA
tctggcccattcctcagcac

SEQ ID NO: 28259 - DNA, 20 bp, synthetic construct
  misc_feature 1..20: note = chemically synthesized
  source 1..20: mol_type = other DNA
agcacaagcctatattcctg

SEQ ID NO: 28260 - DNA, 20 bp, synthetic construct
  misc_feature 1..20: note = chemically synthesized
  source 1..20: mol_type = other DNA
gcacaagcctatattcctgc

SEQ ID NO: 28261 - DNA, 20 bp, synthetic construct
  misc_feature 1..20: note = chemically synthesized
  source 1..20: mol_type = other DNA
tcccgttatttaatatccac

SEQ ID NO: 28262 - DNA, 20 bp, synthetic construct
  misc_feature 1..20: note = chemically synthesized
  source 1..20: mol_type = other DNA
taatatccacaagcctctct

SEQ ID NO: 28263 - DNA, 20 bp, synthetic construct
  misc_feature 1..20: note = chemically synthesized
  source 1..20: mol_type = other DNA
gatactgtatttgtaaaaca

SEQ ID NO: 28264 - DNA, 20 bp, synthetic construct
  misc_feature 1..20: note = chemically synthesized
  source 1..20: mol_type = other DNA
ctgtatttgtaaaacacaga

SEQ ID NO: 28265 - DNA, 20 bp, synthetic construct
  misc_feature 1..20: note = chemically synthesized
  source 1..20: mol_type = other DNA
acagatggctcatgtaattg

SEQ ID NO: 28266 - DNA, 20 bp, synthetic construct
  misc_feature 1..20: note = chemically synthesized
  source 1..20: mol_type = other DNA
gctcatgtaattgaagttca

SEQ ID NO: 28267 - DNA, 20 bp, synthetic construct
  misc_feature 1..20: note = chemically synthesized
  source 1..20: mol_type = other DNA
ttttgctttgtgacaactct

SEQ ID NO: 28268 - DNA, 20 bp, synthetic construct
  misc_feature 1..20: note = chemically synthesized
  source 1..20: mol_type = other DNA
atgttacctattttgaatga

SEQ ID NO: 28269 - DNA, 20 bp, synthetic construct
  misc_feature 1..20: note = chemically synthesized
  source 1..20: mol_type = other DNA
acctattttgaatgatagtg

SEQ ID NO: 28270 - DNA, 20 bp, synthetic construct
  misc_feature 1..20: note = chemically synthesized
  source 1..20: mol_type = other DNA
ttgaatgatagtgcagacat

SEQ ID NO: 28271 - DNA, 20 bp, synthetic construct
  misc_feature 1..20: note = chemically synthesized
  source 1..20: mol_type = other DNA
atgatagtgcagacattagt

SEQ ID NO: 28272 - DNA, 20 bp, synthetic construct
  misc_feature 1..20: note = chemically synthesized
  source 1..20: mol_type = other DNA
tgatagtgcagacattagta

SEQ ID NO: 28273 - DNA, 20 bp, synthetic construct
  misc_feature 1..20: note = chemically synthesized
  source 1..20: mol_type = other DNA
agtgcagacattagtaagga

SEQ ID NO: 28274 - DNA, 20 bp, synthetic construct
  misc_feature 1..20: note = chemically synthesized
  source 1..20: mol_type = other DNA
tgctaaatatttgtatcacc

SEQ ID NO: 28275 - DNA, 20 bp, synthetic construct
  misc_feature 1..20: note = chemically synthesized
  source 1..20: mol_type = other DNA
gctaaatatttgtatcacct

SEQ ID NO: 28276 - DNA, 20 bp, synthetic construct
  misc_feature 1..20: note = chemically synthesized
  source 1..20: mol_type = other DNA
aaatatttgtatcacctggg

SEQ ID NO: 28277 - DNA, 20 bp, synthetic construct
  misc_feature 1..20: note = chemically synthesized
  source 1..20: mol_type = other DNA
gaagcctgtttttgcttcat

SEQ ID NO: 28278 - DNA, 20 bp, synthetic construct
  misc_feature 1..20: note = chemically synthesized
  source 1..20: mol_type = other DNA
aagcctgtttttgcttcatc

SEQ ID NO: 28279 - DNA, 20 bp, synthetic construct
  misc_feature 1..20: note = chemically synthesized
  source 1..20: mol_type = other DNA
agcctgtttttgcttcatca

SEQ ID NO: 28280 - DNA, 20 bp, synthetic construct
  misc_feature 1..20: note = chemically synthesized
  source 1..20: mol_type = other DNA
gcctgtttttgcttcatcag

SEQ ID NO: 28281 - DNA, 20 bp, synthetic construct
  misc_feature 1..20: note = chemically synthesized
  source 1..20: mol_type = other DNA
tttgcttcatcaggggacgt

SEQ ID NO: 28282 - DNA, 20 bp, synthetic construct
  misc_feature 1..20: note = chemically synthesized
  source 1..20: mol_type = other DNA
tttttcacatcaacctcctg

SEQ ID NO: 28283 - DNA, 20 bp, synthetic construct
  misc_feature 1..20: note = chemically synthesized
  source 1..20: mol_type = other DNA
ttcacatcaacctcctgcag

SEQ ID NO: 28284 - DNA, 20 bp, synthetic construct
  misc_feature 1..20: note = chemically synthesized
  source 1..20: mol_type = other DNA
cagaagacaatgctttctga

SEQ ID NO: 28285 - DNA, 20 bp, synthetic construct
  misc_feature 1..20: note = chemically synthesized
  source 1..20: mol_type = other DNA
agacaatgctttctgaaaga

SEQ ID NO: 28286 - DNA, 20 bp, synthetic construct
  misc_feature 1..20: note = chemically synthesized
  source 1..20: mol_type = other DNA
acaatgctttctgaaagaca

SEQ ID NO: 28287 - DNA, 20 bp, synthetic construct
  misc_feature 1..20: note = chemically synthesized
  source 1..20: mol_type = other DNA
gcattcaaatatctgaccca

SEQ ID NO: 28288 - DNA, 20 bp, synthetic construct
  misc_feature 1..20: note = chemically synthesized
  source 1..20: mol_type = other DNA
gtgatctttacatacttgct

SEQ ID NO: 28289 - DNA, 20 bp, synthetic construct
  misc_feature 1..20: note = chemically synthesized
  source 1..20: mol_type = other DNA
catacttgctcagtgaatga

SEQ ID NO: 28290 - DNA, 20 bp, synthetic construct
  misc_feature 1..20: note = chemically synthesized
  source 1..20: mol_type = other DNA
aatgacagtgaataactacc

SEQ ID NO: 28291 - DNA, 20 bp, synthetic construct
  misc_feature 1..20: note = chemically synthesized
  source 1..20: mol_type = other DNA
tgaataactacctggttgta

SEQ ID NO: 28292 - DNA, 20 bp, synthetic construct
  misc_feature 1..20: note = chemically synthesized
  source 1..20: mol_type = other DNA
ctggttgtaaagactgtctc

SEQ ID NO: 28293 - DNA, 20 bp, synthetic construct
  misc_feature 1..20: note = chemically synthesized
  source 1..20: mol_type = other DNA
tggttgtaaagactgtctca

SEQ ID NO: 28294 - DNA, 20 bp, synthetic construct
  misc_feature 1..20: note = chemically synthesized
  source 1..20: mol_type = other DNA
ggttgtaaagactgtctcaa

SEQ ID NO: 28295 - DNA, 20 bp, synthetic construct
  misc_feature 1..20: note = chemically synthesized
  source 1..20: mol_type = other DNA
gttgtaaagactgtctcaag

SEQ ID NO: 28296 - DNA, 20 bp, synthetic construct
  misc_feature 1..20: note = chemically synthesized
  source 1..20: mol_type = other DNA
gtctcaaggggacttttgtc

SEQ ID NO: 28297 - DNA, 20 bp, synthetic construct
  misc_feature 1..20: note = chemically synthesized
  source 1..20: mol_type = other DNA
tctcaaggggacttttgtct

SEQ ID NO: 28298 - DNA, 20 bp, synthetic construct
  misc_feature 1..20: note = chemically synthesized
  source 1..20: mol_type = other DNA
aggggacttttgtctgggaa

SEQ ID NO: 28299 - DNA, 20 bp, synthetic construct
  misc_feature 1..20: note = chemically synthesized
  source 1..20: mol_type = other DNA
acttttgtctgggaaaagaa

SEQ ID NO: 28300 - DNA, 20 bp, synthetic construct
  misc_feature 1..20: note = chemically synthesized
  source 1..20: mol_type = other DNA
ttgtctgggaaaagaaaaga

SEQ ID NO: 28301 - DNA, 20 bp, synthetic construct
  misc_feature 1..20: note = chemically synthesized
  source 1..20: mol_type = other DNA
aaaagaaaagaaagacaaaa

SEQ ID NO: 28302 - DNA, 20 bp, synthetic construct
  misc_feature 1..20: note = chemically synthesized
  source 1..20: mol_type = other DNA
aagaaaagaaagacaaaaaa

SEQ ID NO: 28303 - DNA, 20 bp, synthetic construct
  misc_feature 1..20: note = chemically synthesized
  source 1..20: mol_type = other DNA
agaaaagaaagacaaaaaag

SEQ ID NO: 28304 - DNA, 20 bp, synthetic construct
  misc_feature 1..20: note = chemically synthesized
  source 1..20: mol_type = other DNA
gaaagacaaaaaagaggatt

SEQ ID NO: 28305 - DNA, 20 bp, synthetic construct
  misc_feature 1..20: note = chemically synthesized
  source 1..20: mol_type = other DNA
agacaaaaaagaggattgag

SEQ ID NO: 28306 - DNA, 20 bp, synthetic construct
  misc_feature 1..20: note = chemically synthesized
  source 1..20: mol_type = other DNA
acccaataaattttcttatg

SEQ ID NO: 28307 - DNA, 20 bp, synthetic construct
  misc_feature 1..20: note = chemically synthesized
  source 1..20: mol_type = other DNA
aataaattttcttatgaagt

SEQ ID NO: 28308 - DNA, 20 bp, synthetic construct
  misc_feature 1..20: note = chemically synthesized
  source 1..20: mol_type = other DNA
aaattttcttatgaagttgg

SEQ ID NO: 28309 - DNA, 20 bp, synthetic construct
  misc_feature 1..20: note = chemically synthesized
  source 1..20: mol_type = other DNA
tttcttatgaagttggcagc

SEQ ID NO: 28310 - DNA, 20 bp, synthetic construct
  misc_feature 1..20: note = chemically synthesized
  source 1..20: mol_type = other DNA
ttcttatgaagttggcagct

SEQ ID NO: 28311 - DNA, 20 bp, synthetic construct
  misc_feature 1..20: note = chemically synthesized
  source 1..20: mol_type = other DNA
tcttatgaagttggcagctg

SEQ ID NO: 28312 - DNA, 20 bp, synthetic construct
  misc_feature 1..20: note = chemically synthesized
  source 1..20: mol_type = other DNA
ttatgaagttggcagctggg

SEQ ID NO: 28313 - DNA, 20 bp, synthetic construct
  misc_feature 1..20: note = chemically synthesized
  source 1..20: mol_type = other DNA
atgaagttggcagctgggga

SEQ ID NO: 28314 - DNA, 20 bp, synthetic construct
  misc_feature 1..20: note = chemically synthesized
  source 1..20: mol_type = other DNA
aagttggcagctggggagag

SEQ ID NO: 28315 - DNA, 20 bp, synthetic construct
  misc_feature 1..20: note = chemically synthesized
  source 1..20: mol_type = other DNA
tggcagctggggagagaaga

SEQ ID NO: 28316 - DNA, 20 bp, synthetic construct
  misc_feature 1..20: note = chemically synthesized
  source 1..20: mol_type = other DNA
gctggggagagaagacagtc

SEQ ID NO: 28317 - DNA, 20 bp, synthetic construct
  misc_feature 1..20: note = chemically synthesized
  source 1..20: mol_type = other DNA
ctggggagagaagacagtca

SEQ ID NO: 28318 - DNA, 20 bp, synthetic construct
  misc_feature 1..20: note = chemically synthesized
  source 1..20: mol_type = other DNA
gaagacagtcaaggatcctc

SEQ ID NO: 28319 - DNA, 20 bp, synthetic construct
  misc_feature 1..20: note = chemically synthesized
  source 1..20: mol_type = other DNA
tggctcactgaaatacctcc

SEQ ID NO: 28320 - DNA, 20 bp, synthetic construct
  misc_feature 1..20: note = chemically synthesized
  source 1..20: mol_type = other DNA
gctcactgaaatacctccta

SEQ ID NO: 28321 - DNA, 20 bp, synthetic construct
  misc_feature 1..20: note = chemically synthesized
  source 1..20: mol_type = other DNA
ctcactgaaatacctcctag

SEQ ID NO: 28322 - DNA, 20 bp, synthetic construct
  misc_feature 1..20: note = chemically synthesized
  source 1..20: mol_type = other DNA
atacctcctagaggtactca

SEQ ID NO: 28323 - DNA, 20 bp, synthetic construct
  misc_feature 1..20: note = chemically synthesized
  source 1..20: mol_type = other DNA
ggttcactaaatttccattt

SEQ ID NO: 28324 - DNA, 20 bp, synthetic construct
  misc_feature 1..20: note = chemically synthesized
  source 1..20: mol_type = other DNA
aaatttccatttaagataac

SEQ ID NO: 28325 - DNA, 20 bp, synthetic construct
  misc_feature 1..20: note = chemically synthesized
  source 1..20: mol_type = other DNA
aatttccatttaagataact

SEQ ID NO: 28326 - DNA, 20 bp, synthetic construct
  misc_feature 1..20: note = chemically synthesized
  source 1..20: mol_type = other DNA
actgggcatctcaaatgctt

SEQ ID NO: 28327 - DNA, 20 bp, synthetic construct
  misc_feature 1..20: note = chemically synthesized
  source 1..20: mol_type = other DNA
gcatctcaaatgctttggtc

SEQ ID NO: 28328 - DNA, 20 bp, synthetic construct
  misc_feature 1..20: note = chemically synthesized
  source 1..20: mol_type = other DNA
catctcaaatgctttggtct

SEQ ID NO: 28329 - DNA, 20 bp, synthetic construct
  misc_feature 1..20: note = chemically synthesized
  source 1..20: mol_type = other DNA
tctcaaatgctttggtctag

SEQ ID NO: 28330 - DNA, 20 bp, synthetic construct
  misc_feature 1..20: note = chemically synthesized
  source 1..20: mol_type = other DNA
ctcaaatgctttggtctagg

SEQ ID NO: 28331 - DNA, 20 bp, synthetic construct
  misc_feature 1..20: note = chemically synthesized
  source 1..20: mol_type = other DNA
atccctctttgacattcatc

SEQ ID NO: 28332 - DNA, 20 bp, synthetic construct
  misc_feature 1..20: note = chemically synthesized
  source 1..20: mol_type = other DNA
tcatcaagtctgcgtccatc

SEQ ID NO: 28333 - DNA, 20 bp, synthetic construct
  misc_feature 1..20: note = chemically synthesized
  source 1..20: mol_type = other DNA
catcaagtctgcgtccatct

SEQ ID NO: 28334 - DNA, 20 bp, synthetic construct
  misc_feature 1..20: note = chemically synthesized
  source 1..20: mol_type = other DNA
atcaagtctgcgtccatcta

SEQ ID NO: 28335 - DNA, 20 bp, synthetic construct
  misc_feature 1..20: note = chemically synthesized
  source 1..20: mol_type = other DNA
caagtctgcgtccatctagg

SEQ ID NO: 28336 - DNA, 20 bp, synthetic construct
  misc_feature 1..20: note = chemically synthesized
  source 1..20: mol_type = other DNA
ccatctagggagattccttt

SEQ ID NO: 28337 - DNA, 20 bp, synthetic construct
  misc_feature 1..20: note = chemically synthesized
  source 1..20: mol_type = other DNA
catctagggagattcctttg

SEQ ID NO: 28338 - DNA, 20 bp, synthetic construct
  misc_feature 1..20: note = chemically synthesized
  source 1..20: mol_type = other DNA
atctagggagattcctttga

SEQ ID NO: 28339 - DNA, 20 bp, synthetic construct
  misc_feature 1..20: note = chemically synthesized
  source 1..20: mol_type = other DNA
ggagattcctttgagggcca

SEQ ID NO: 28340 - DNA, 20 bp, synthetic construct
  misc_feature 1..20: note = chemically synthesized
  source 1..20: mol_type = other DNA
cctttgagggccaaagaccc

SEQ ID NO: 28341 - DNA, 20 bp, synthetic construct
  misc_feature 1..20: note = chemically synthesized
  source 1..20: mol_type = other DNA
ctttgagggccaaagaccca

SEQ ID NO: 28342 - DNA, 20 bp, synthetic construct
  misc_feature 1..20: note = chemically synthesized
  source 1..20: mol_type = other DNA
tgagggccaaagacccaagg

SEQ ID NO: 28343 - DNA, 20 bp, synthetic construct
  misc_feature 1..20: note = chemically synthesized
  source 1..20: mol_type = other DNA
agggccaaagacccaaggaa

SEQ ID NO: 28344 - DNA, 20 bp, synthetic construct
  misc_feature 1..20: note = chemically synthesized
  source 1..20: mol_type = other DNA
ggccaaagacccaaggaaga

SEQ ID NO: 28345 - DNA, 20 bp, synthetic construct
  misc_feature 1..20: note = chemically synthesized
  source 1..20: mol_type = other DNA
aaagacccaaggaagagaga

SEQ ID NO: 28346 - DNA, 20 bp, synthetic construct
  misc_feature 1..20: note = chemically synthesized
  source 1..20: mol_type = other DNA
aggaagagagacagctttat

SEQ ID NO: 28347 - DNA, 20 bp, synthetic construct
  misc_feature 1..20: note = chemically synthesized
  source 1..20: mol_type = other DNA
agagacagctttataagtgc

SEQ ID NO: 28348 - DNA, 20 bp, synthetic construct
  misc_feature 1..20: note = chemically synthesized
  source 1..20: mol_type = other DNA
cagctttataagtgccagtg

SEQ ID NO: 28349 - DNA, 20 bp, synthetic construct
  misc_feature 1..20: note = chemically synthesized
  source 1..20: mol_type = other DNA
aagtgccagtgcagcccacg

SEQ ID NO: 28350 - DNA, 20 bp, synthetic construct
  misc_feature 1..20: note = chemically synthesized
  source 1..20: mol_type = other DNA
ccagtgcagcccacgtagaa

SEQ ID NO: 28351 - DNA, 20 bp, synthetic construct
  misc_feature 1..20: note = chemically synthesized
  source 1..20: mol_type = other DNA
cccacgtagaacagcatcct

SEQ ID NO: 28352 - DNA, 20 bp, synthetic construct
  misc_feature 1..20: note = chemically synthesized
  source 1..20: mol_type = other DNA
gaacagcatcctgagtcaaa

SEQ ID NO: 28353 - DNA, 20 bp, synthetic construct
  misc_feature 1..20: note = chemically synthesized
  source 1..20: mol_type = other DNA
cagcatcctgagtcaaatgg

SEQ ID NO: 28354 - DNA, 20 bp, synthetic construct
  misc_feature 1..20: note = chemically synthesized
  source 1..20: mol_type = other DNA
ctgagtcaaatggaagatgc

SEQ ID NO: 28355 - DNA, 20 bp, synthetic construct
  misc_feature 1..20: note = chemically synthesized
  source 1..20: mol_type = other DNA
tcaaatggaagatgctggca

SEQ ID NO: 28356 - DNA, 20 bp, synthetic construct
  misc_feature 1..20: note = chemically synthesized
  source 1..20: mol_type = other DNA
aaatggaagatgctggcatg

SEQ ID NO: 28357 - DNA, 20 bp, synthetic construct
  misc_feature 1..20: note = chemically synthesized
  source 1..20: mol_type = other DNA
tggaagatgctggcatggag

SEQ ID NO: 28358 - DNA, 20 bp, synthetic construct
  misc_feature 1..20: note = chemically synthesized
  source 1..20: mol_type = other DNA
aagatgctggcatggagtgg

SEQ ID NO: 28359 - DNA, 20 bp, synthetic construct
  misc_feature 1..20: note = chemically synthesized
  source 1..20: mol_type = other DNA
agatgctggcatggagtgga

SEQ ID NO: 28360 - DNA, 20 bp, synthetic construct
  misc_feature 1..20: note = chemically synthesized
  source 1..20: mol_type = other DNA
gatgctggcatggagtggaa

SEQ ID NO: 28361 - DNA, 20 bp, synthetic construct
  misc_feature 1..20: note = chemically synthesized
  source 1..20: mol_type = other DNA
atggagtggaagggctgcat

SEQ ID NO: 28362 - DNA, 20 bp, synthetic construct
  misc_feature 1..20: note = chemically synthesized
  source 1..20: mol_type = other DNA
agtggaagggctgcatgaga

SEQ ID NO: 28363 - DNA, 20 bp, synthetic construct
  misc_feature 1..20: note = chemically synthesized
  source 1..20: mol_type = other DNA
ggaagggctgcatgagaaag

SEQ ID NO: 28364 - DNA, 20 bp, synthetic construct
  misc_feature 1..20: note = chemically synthesized
  source 1..20: mol_type = other DNA
gctgcatgagaaagaagcta

SEQ ID NO: 28365 - DNA, 20 bp, synthetic construct
  misc_feature 1..20: note = chemically synthesized
  source 1..20: mol_type = other DNA
tgcatgagaaagaagctaca

SEQ ID NO: 28366 - DNA, 20 bp, synthetic construct
  misc_feature 1..20: note = chemically synthesized
  source 1..20: mol_type = other DNA
atgagaaagaagctacagag

SEQ ID NO: 28367 - DNA, 20 bp, synthetic construct
  misc_feature 1..20: note = chemically synthesized
  source 1..20: mol_type = other DNA
gaaagaagctacagagaaga

SEQ ID NO: 28368 - DNA, 20 bp, synthetic construct
  misc_feature 1..20: note = chemically synthesized
  source 1..20: mol_type = other DNA
aaagaagctacagagaagaa

SEQ ID NO: 28369 - DNA, 20 bp, synthetic construct
  misc_feature 1..20: note = chemically synthesized
  source 1..20: mol_type = other DNA
agctacagagaagaaaggac

SEQ ID NO: 28370 - DNA, 20 bp, synthetic construct
  misc_feature 1..20: note = chemically synthesized
  source 1..20: mol_type = other DNA
acagagaagaaaggaccagt

SEQ ID NO: 28371 - DNA, 20 bp, synthetic construct
  misc_feature 1..20: note = chemically synthesized
  source 1..20: mol_type = other DNA
aaaggaccagtaagttgctg

SEQ ID NO: 28372 - DNA, 20 bp, synthetic construct
  misc_feature 1..20: note = chemically synthesized
  source 1..20: mol_type = other DNA
aaggaccagtaagttgctga

SEQ ID NO: 28373 - DNA, 20 bp, synthetic construct
  misc_feature 1..20: note = chemically synthesized
  source 1..20: mol_type = other DNA
gctgaaggtcctttgttttg

SEQ ID NO: 28374 - DNA, 20 bp, synthetic construct
  misc_feature 1..20: note = chemically synthesized
  source 1..20: mol_type = other DNA
ggtcctttgttttgtggata

SEQ ID NO: 28375 - DNA, 20 bp, synthetic construct
  misc_feature 1..20: note = chemically synthesized
  source 1..20: mol_type = other DNA
gtcctttgttttgtggataa

SEQ ID NO: 28376 - DNA, 20 bp, synthetic construct
  misc_feature 1..20: note = chemically synthesized
  source 1..20: mol_type = other DNA
ctttgttttgtggataaagg

SEQ ID NO: 28377 - DNA, 20 bp, synthetic construct
  misc_feature 1..20: note = chemically synthesized
  source 1..20: mol_type = other DNA
ttgtggataaaggaagtcat

SEQ ID NO: 28378 - DNA, 20 bp, synthetic construct
  misc_feature 1..20: note = chemically synthesized
  source 1..20: mol_type = other DNA
gtggataaaggaagtcattg

SEQ ID NO: 28379 - DNA, 20 bp, synthetic construct
  misc_feature 1..20: note = chemically synthesized
  source 1..20: mol_type = other DNA
cctctctaatatcccttatc

SEQ ID NO: 28380 - DNA, 20 bp, synthetic construct
  misc_feature 1..20: note = chemically synthesized
  source 1..20: mol_type = other DNA
ttatctagcatgactatatg

SEQ ID NO: 28381 - DNA, 20 bp, synthetic construct
  misc_feature 1..20: note = chemically synthesized
  source 1..20: mol_type = other DNA
tatctagcatgactatatgc

SEQ ID NO: 28382 - DNA, 20 bp, synthetic construct
  misc_feature 1..20: note = chemically synthesized
  source 1..20: mol_type = other DNA
atctagcatgactatatgca

SEQ ID NO: 28383 - DNA, 20 bp, synthetic construct
  misc_feature 1..20: note = chemically synthesized
  source 1..20: mol_type = other DNA
catgactatatgcagggtta

SEQ ID NO: 28384 - DNA, 20 bp, synthetic construct
  misc_feature 1..20: note = chemically synthesized
  source 1..20: mol_type = other DNA
ctatatgcagggttatggaa

SEQ ID NO: 28385 - DNA, 20 bp, synthetic construct
  misc_feature 1..20: note = chemically synthesized
  source 1..20: mol_type = other DNA
tatatgcagggttatggaat

SEQ ID NO: 28386 - DNA, 20 bp, synthetic construct
  misc_feature 1..20: note = chemically synthesized
  source 1..20: mol_type = other DNA
atatgcagggttatggaata

SEQ ID NO: 28387 - DNA, 20 bp, synthetic construct
  misc_feature 1..20: note = chemically synthesized
  source 1..20: mol_type = other DNA
tgcagggttatggaataggg

SEQ ID NO: 28388 - DNA, 20 bp, synthetic construct
  misc_feature 1..20: note = chemically synthesized
  source 1..20: mol_type = other DNA
ttatggaatagggcagcttc

SEQ ID NO: 28389 - DNA, 20 bp, synthetic construct
  misc_feature 1..20: note = chemically synthesized
  source 1..20: mol_type = other DNA
tatggaatagggcagcttcc

SEQ ID NO: 28390 - DNA, 20 bp, synthetic construct
  misc_feature 1..20: note = chemically synthesized
  source 1..20: mol_type = other DNA
ggaatagggcagcttccagg

SEQ ID NO: 28391 - DNA, 20 bp, synthetic construct
  misc_feature 1..20: note = chemically synthesized
  source 1..20: mol_type = other DNA
tagggcagcttccaggaaga

SEQ ID NO: 28392 - DNA, 20 bp, synthetic construct
  misc_feature 1..20: note = chemically synthesized
  source 1..20: mol_type = other DNA
gaagatggccaatctgttgt

SEQ ID NO: 28393 - DNA, 20 bp, synthetic construct
  misc_feature 1..20: note = chemically synthesized
  source 1..20: mol_type = other DNA
aagatggccaatctgttgtt

SEQ ID NO: 28394 - DNA, 20 bp, synthetic construct
  misc_feature 1..20: note = chemically synthesized
  source 1..20: mol_type = other DNA
agatggccaatctgttgtta

SEQ ID NO: 28395 - DNA, 20 bp, synthetic construct
  misc_feature 1..20: note = chemically synthesized
  source 1..20: mol_type = other DNA
atctcccgtgatgtttttga

SEQ ID NO: 28396 - DNA, 20 bp, synthetic construct
  misc_feature 1..20: note = chemically synthesized
  source 1..20: mol_type = other DNA
tctcccgtgatgtttttgat

SEQ ID NO: 28397 - DNA, 20 bp, synthetic construct
  misc_feature 1..20: note = chemically synthesized
  source 1..20: mol_type = other DNA
ctcccgtgatgtttttgatg

SEQ ID NO: 28398 - DNA, 20 bp, synthetic construct
  misc_feature 1..20: note = chemically synthesized
  source 1..20: mol_type = other DNA
ccgtgatgtttttgatgggg

SEQ ID NO: 28399 - DNA, 20 bp, synthetic construct
  misc_feature 1..20: note = chemically synthesized
  source 1..20: mol_type = other DNA
gatgtttttgatggggaaga

SEQ ID NO: 28400 - DNA, 20 bp, synthetic construct
  misc_feature 1..20: note = chemically synthesized
  source 1..20: mol_type = other DNA
tttgatggggaagacagatc

SEQ ID NO: 28401 - DNA, 20 bp, synthetic construct
  misc_feature 1..20: note = chemically synthesized
  source 1..20: mol_type = other DNA
gacagatctggacttgttac

SEQ ID NO: 28402 - DNA, 20 bp, synthetic construct
  misc_feature 1..20: note = chemically synthesized
  source 1..20: mol_type = other DNA
acagatctggacttgttact

SEQ ID NO: 28403 - DNA, 20 bp, synthetic construct
  misc_feature 1..20: note = chemically synthesized
  source 1..20: mol_type = other DNA
tgttactgggctatgccttg

SEQ ID NO: 28404 - DNA, 20 bp, synthetic construct
  misc_feature 1..20: note = chemically synthesized
  source 1..20: mol_type = other DNA
ttactgggctatgccttgta

SEQ ID NO: 28405 - DNA, 20 bp, synthetic construct
  misc_feature 1..20: note = chemically synthesized
  source 1..20: mol_type = other DNA
atgccttgtagagaatgata

SEQ ID NO: 28406 - DNA, 20 bp, synthetic construct
  misc_feature 1..20: note = chemically synthesized
  source 1..20: mol_type = other DNA
tgccttgtagagaatgatac

SEQ ID NO: 28407 - DNA, 20 bp, synthetic construct
  misc_feature 1..20: note = chemically synthesized
  source 1..20: mol_type = other DNA
gccttgtagagaatgataca

SEQ ID NO: 28408 - DNA, 20 bp, synthetic construct
  misc_feature 1..20: note = chemically synthesized
  source 1..20: mol_type = other DNA
tagagaatgatacagggttg

SEQ ID NO: 28409 - DNA, 20 bp, synthetic construct
  misc_feature 1..20: note = chemically synthesized
  source 1..20: mol_type = other DNA
agaatgatacagggttgtgg

SEQ ID NO: 28410 - DNA, 20 bp, synthetic construct
  misc_feature 1..20: note = chemically synthesized
  source 1..20: mol_type = other DNA
gaatgatacagggttgtggc

SEQ ID NO: 28411 - DNA, 20 bp, synthetic construct
  misc_feature 1..20: note = chemically synthesized
  source 1..20: mol_type = other DNA
gatacagggttgtggcaggc

SEQ ID NO: 28412 - DNA, 20 bp, synthetic construct
  misc_feature 1..20: note = chemically synthesized
  source 1..20: mol_type = other DNA
atacagggttgtggcaggca

SEQ ID NO: 28413 - DNA, 20 bp, synthetic construct
  misc_feature 1..20: note = chemically synthesized
  source 1..20: mol_type = other DNA
caggcaaggaaacataatct

SEQ ID NO: 28414 - DNA, 20 bp, synthetic construct
  misc_feature 1..20: note = chemically synthesized
  source 1..20: mol_type = other DNA
agcaattgctccaattgatg

SEQ ID NO: 28415 - DNA, 20 bp, synthetic construct
  misc_feature 1..20: note = chemically synthesized
  source 1..20: mol_type = other DNA
tgatgaagcttctaacattt

SEQ ID NO: 28416 - DNA, 20 bp, synthetic construct
  misc_feature 1..20: note = chemically synthesized
  source 1..20: mol_type = other DNA
atgaagcttctaacatttca

SEQ ID NO: 28417 - DNA, 20 bp, synthetic construct
  misc_feature 1..20: note = chemically synthesized
  source 1..20: mol_type = other DNA
tttcagagtgctttcctcca

SEQ ID NO: 28418 - DNA, 20 bp, synthetic construct
  misc_feature 1..20: note = chemically synthesized
  source 1..20: mol_type = other DNA
acctaatcatttctctcgaa

SEQ ID NO: 28419 - DNA, 20 bp, synthetic construct
  misc_feature 1..20: note = chemically synthesized
  source 1..20: mol_type = other DNA
ctaatcatttctctcgaaaa

SEQ ID NO: 28420 - DNA, 20 bp, synthetic construct
  misc_feature 1..20: note = chemically synthesized
  source 1..20: mol_type = other DNA
taatcatttctctcgaaaag

SEQ ID NO: 28421 - DNA, 20 bp, synthetic construct
  misc_feature 1..20: note = chemically synthesized
  source 1..20: mol_type = other DNA
tcatttctctcgaaaagagg

SEQ ID NO: 28422 - DNA, 20 bp, synthetic construct
  misc_feature 1..20: note = chemically synthesized
  source 1..20: mol_type = other DNA
catttctctcgaaaagaggc

SEQ ID NO: 28423 - DNA, 20 bp, synthetic construct
  misc_feature 1..20: note = chemically synthesized
  source 1..20: mol_type = other DNA
atttctctcgaaaagaggca

SEQ ID NO: 28424 - DNA, 20 bp, synthetic construct
  misc_feature 1..20: note = chemically synthesized
  source 1..20: mol_type = other DNA
gaaaagaggcagggcccatg

SEQ ID NO: 28425 - DNA, 20 bp, synthetic construct
  misc_feature 1..20: note = chemically synthesized
  source 1..20: mol_type = other DNA
catgtggaaatctttcaaca

SEQ ID NO: 28426 - DNA, 20 bp, synthetic construct
  misc_feature 1..20: note = chemically synthesized
  source 1..20: mol_type = other DNA
aatctttcaacatagtaaaa

SEQ ID NO: 28427 - DNA, 20 bp, synthetic construct
  misc_feature 1..20: note = chemically synthesized
  source 1..20: mol_type = other DNA
ttcaacatagtaaaaaagct

SEQ ID NO: 28428 - DNA, 20 bp, synthetic construct
  misc_feature 1..20: note = chemically synthesized
  source 1..20: mol_type = other DNA
tcaacatagtaaaaaagcta

SEQ ID NO: 28429 - DNA, 20 bp, synthetic construct
  misc_feature 1..20: note = chemically synthesized
  source 1..20: mol_type = other DNA
atagtaaaaaagctaaggtt

SEQ ID NO: 28430 - DNA, 20 bp, synthetic construct
  misc_feature 1..20: note = chemically synthesized
  source 1..20: mol_type = other DNA
taaaaaagctaaggtttaga

SEQ ID NO: 28431 - DNA, 20 bp, synthetic construct
  misc_feature 1..20: note = chemically synthesized
  source 1..20: mol_type = other DNA
agctaaggtttagaaagatt

SEQ ID NO: 28432 - DNA, 20 bp, synthetic construct
  misc_feature 1..20: note = chemically synthesized
  source 1..20: mol_type = other DNA
aagattcagtaactttgcca

SEQ ID NO: 28433 - DNA, 20 bp, synthetic construct
  misc_feature 1..20: note = chemically synthesized
  source 1..20: mol_type = other DNA
gtaactttgccaaagccata

SEQ ID NO: 28434 - DNA, 20 bp, synthetic construct
  misc_feature 1..20: note = chemically synthesized
  source 1..20: mol_type = other DNA
actttgccaaagccatatgg

SEQ ID NO: 28435 - DNA, 20 bp, synthetic construct
  misc_feature 1..20: note = chemically synthesized
  source 1..20: mol_type = other DNA
ctttgccaaagccatatgga

SEQ ID NO: 28436 - DNA, 20 bp, synthetic construct
  misc_feature 1..20: note = chemically synthesized
  source 1..20: mol_type = other DNA
gattgtccaaaaacctgtgc

SEQ ID NO: 28437 - DNA, 20 bp, synthetic construct
  misc_feature 1..20: note = chemically synthesized
  source 1..20: mol_type = other DNA
ttgtccaaaaacctgtgcaa

SEQ ID NO: 28438 - DNA, 20 bp, synthetic construct
  misc_feature 1..20: note = chemically synthesized
  source 1..20: mol_type = other DNA
aaaacctgtgcaagagctca

SEQ ID NO: 28439 - DNA, 20 bp, synthetic construct
  misc_feature 1..20: note = chemically synthesized
  source 1..20: mol_type = other DNA
accttacgcttcattgttgt

SEQ ID NO: 28440 - DNA, 20 bp, synthetic construct
  misc_feature 1..20: note = chemically synthesized
  source 1..20: mol_type = other DNA
attatttttcaatcttttct

SEQ ID NO: 28441 - DNA, 20 bp, synthetic construct
  misc_feature 1..20: note = chemically synthesized
  source 1..20: mol_type = other DNA
tatttttcaatcttttctta

SEQ ID NO: 28442 - DNA, 20 bp, synthetic construct
  misc_feature 1..20: note = chemically synthesized
  source 1..20: mol_type = other DNA
ctcactgcaacattgctcac

SEQ ID NO: 28443 - DNA, 20 bp, synthetic construct
  misc_feature 1..20: note = chemically synthesized
  source 1..20: mol_type = other DNA
aacattgctcactggaatgc

SEQ ID NO: 28444 - DNA, 20 bp, synthetic construct
  misc_feature 1..20: note = chemically synthesized
  source 1..20: mol_type = other DNA
ttgctcactggaatgctgga

SEQ ID NO: 28445 - DNA, 20 bp, synthetic construct
  misc_feature 1..20: note = chemically synthesized
  source 1..20: mol_type = other DNA
actaataaaatgtgtctatt

SEQ ID NO: 28446 - DNA, 20 bp, synthetic construct
  misc_feature 1..20: note = chemically synthesized
  source 1..20: mol_type = other DNA
catttaaaattgcatatgaa

SEQ ID NO: 28447 - DNA, 20 bp, synthetic construct
  misc_feature 1..20: note = chemically synthesized
  source 1..20: mol_type = other DNA
atgaatggctctctaatcta

SEQ ID NO: 28448 - DNA, 20 bp, synthetic construct
  misc_feature 1..20: note = chemically synthesized
  source 1..20: mol_type = other DNA
gaatggctctctaatctatg

SEQ ID NO: 28449 - DNA, 20 bp, synthetic construct
  misc_feature 1..20: note = chemically synthesized
  source 1..20: mol_type = other DNA
tggctctctaatctatggag

SEQ ID NO: 28450 - DNA, 20 bp, synthetic construct
  misc_feature 1..20: note = chemically synthesized
  source 1..20: mol_type = other DNA
ggctctctaatctatggagt

SEQ ID NO: 28451 - DNA, 20 bp, synthetic construct
  misc_feature 1..20: note = chemically synthesized
  source 1..20: mol_type = other DNA
tctctaatctatggagtagg

SEQ ID NO: 28452 - DNA, 20 bp, synthetic construct
  misc_feature 1..20: note = chemically synthesized
  source 1..20: mol_type = other DNA
gtagaattgtctcaattttt

SEQ ID NO: 28453 - DNA, 20 bp, synthetic construct
  misc_feature 1..20: note = chemically synthesized
  source 1..20: mol_type = other DNA
ttgtctcaatttttcagatg

SEQ ID NO: 28454 - DNA, 20 bp, synthetic construct
  misc_feature 1..20: note = chemically synthesized
  source 1..20: mol_type = other DNA
atttttcagatgaagaaact

SEQ ID NO: 28455 - DNA, 20 bp, synthetic construct
  misc_feature 1..20: note = chemically synthesized
  source 1..20: mol_type = other DNA
atgaagaaactaagattaat

SEQ ID NO: 28456 - DNA, 20 bp, synthetic construct
  misc_feature 1..20: note = chemically synthesized
  source 1..20: mol_type = other DNA
tcagatactttgcacaatca

SEQ ID NO: 28457 - DNA, 20 bp, synthetic construct
  misc_feature 1..20: note = chemically synthesized
  source 1..20: mol_type = other DNA
agatactttgcacaatcata

SEQ ID NO: 28458 - DNA, 20 bp, synthetic construct
  misc_feature 1..20: note = chemically synthesized
  source 1..20: mol_type = other DNA
ctttgcacaatcatagagtg

SEQ ID NO: 28459 - DNA, 20 bp, synthetic construct
  misc_feature 1..20: note = chemically synthesized
  source 1..20: mol_type = other DNA
ttgcacaatcatagagtgaa

SEQ ID NO: 28460 - DNA, 20 bp, synthetic construct
  misc_feature 1..20: note = chemically synthesized
  source 1..20: mol_type = other DNA
catagagtgaagagctattg

SEQ ID NO: 28461 - DNA, 20 bp, synthetic construct
  misc_feature 1..20: note = chemically synthesized
  source 1..20: mol_type = other DNA
ttgaagttatgattgtaata

SEQ ID NO: 28462 - DNA, 20 bp, synthetic construct
  misc_feature 1..20: note = chemically synthesized
  source 1..20: mol_type = other DNA
ttatgattgtaatacagatc

SEQ ID NO: 28463 - DNA, 20 bp, synthetic construct
  misc_feature 1..20: note = chemically synthesized
  source 1..20: mol_type = other DNA
ttgtaatacagatctggtcc

SEQ ID NO: 28464 - DNA, 20 bp, synthetic construct
  misc_feature 1..20: note = chemically synthesized
  source 1..20: mol_type = other DNA
gtaatacagatctggtccca

SEQ ID NO: 28465 - DNA, 20 bp, synthetic construct
  misc_feature 1..20: note = chemically synthesized
  source 1..20: mol_type = other DNA
ctgcctaatgaaaatgtgcc

SEQ ID NO: 28466 - DNA, 20 bp, synthetic construct
  misc_feature 1..20: note = chemically synthesized
  source 1..20: mol_type = other DNA
tgcctaatgaaaatgtgcct

SEQ ID NO: 28467 - DNA, 20 bp, synthetic construct
  misc_feature 1..20: note = chemically synthesized
  source 1..20: mol_type = other DNA
tgaaaatgtgcctaggctgc

SEQ ID NO: 28468 - DNA, 20 bp, synthetic construct
  misc_feature 1..20: note = chemically synthesized
  source 1..20: mol_type = other DNA
aatgtgcctaggctgcaaga

SEQ ID NO: 28469 - DNA, 20 bp, synthetic construct
  misc_feature 1..20: note = chemically synthesized
  source 1..20: mol_type = other DNA
atgtgcctaggctgcaagac

SEQ ID NO: 28470 - DNA, 20 bp, synthetic construct
  misc_feature 1..20: note = chemically synthesized
  source 1..20: mol_type = other DNA
tgtgcctaggctgcaagaca

SEQ ID NO: 28471 - DNA, 20 bp, synthetic construct
  misc_feature 1..20: note = chemically synthesized
  source 1..20: mol_type = other DNA
ctcaccactcctattcaaca

SEQ ID NO: 28472 - DNA, 20 bp, synthetic construct
  misc_feature 1..20: note = chemically synthesized
  source 1..20: mol_type = other DNA
actcctattcaacatagtgt

SEQ ID NO: 28473 - DNA, 20 bp, synthetic construct
  misc_feature 1..20: note = chemically synthesized
  source 1..20: mol_type = other DNA
cctattcaacatagtgttgg

SEQ ID NO: 28474 - DNA, 20 bp, synthetic construct
  misc_feature 1..20: note = chemically synthesized
  source 1..20: mol_type = other DNA
caacatagtgttggaagttc

SEQ ID NO: 28475 - DNA, 20 bp, synthetic construct
  misc_feature 1..20: note = chemically synthesized
  source 1..20: mol_type = other DNA
tagtgttggaagttctggcc

SEQ ID NO: 28476 - DNA, 20 bp, synthetic construct
  misc_feature 1..20: note = chemically synthesized
  source 1..20: mol_type = other DNA
agtgttggaagttctggccc

SEQ ID NO: 28477 - DNA, 20 bp, synthetic construct
  misc_feature 1..20: note = chemically synthesized
  source 1..20: mol_type = other DNA
gaagttctggcccgggcaat

SEQ ID NO: 28478 - DNA, 20 bp, synthetic construct
  misc_feature 1..20: note = chemically synthesized
  source 1..20: mol_type = other DNA
aagttctggcccgggcaatc

SEQ ID NO: 28479 - DNA, 20 bp, synthetic construct
  misc_feature 1..20: note = chemically synthesized
  source 1..20: mol_type = other DNA
ttctggcccgggcaatcggg

SEQ ID NO: 28480 - DNA, 20 bp, synthetic construct
  misc_feature 1..20: note = chemically synthesized
  source 1..20: mol_type = other DNA
tctggcccgggcaatcgggc

SEQ ID NO: 28481 - DNA, 20 bp, synthetic construct
  misc_feature 1..20: note = chemically synthesized
  source 1..20: mol_type = other DNA
tggcccgggcaatcgggcag

SEQ ID NO: 28482 - DNA, 20 bp, synthetic construct
  misc_feature 1..20: note = chemically synthesized
  source 1..20: mol_type = other DNA
cccgggcaatcgggcaggag

SEQ ID NO: 28483 - DNA, 20 bp, synthetic construct
  misc_feature 1..20: note = chemically synthesized
  source 1..20: mol_type = other DNA
ccgggcaatcgggcaggaga

SEQ ID NO: 28484 - DNA, 20 bp, synthetic construct
  misc_feature 1..20: note = chemically synthesized
  source 1..20: mol_type = other DNA
cgggcaggagaaggaaataa

SEQ ID NO: 28485 - DNA, 20 bp, synthetic construct
  misc_feature 1..20: note = chemically synthesized
  source 1..20: mol_type = other DNA
gggcaggagaaggaaataaa

SEQ ID NO: 28486 - DNA, 20 bp, synthetic construct
  misc_feature 1..20: note = chemically synthesized
  source 1..20: mol_type = other DNA
aaaaggcattcaattatgta

SEQ ID NO: 28487 - DNA, 20 bp, synthetic construct
  misc_feature 1..20: note = chemically synthesized
  source 1..20: mol_type = other DNA
aaggcattcaattatgtaaa

SEQ ID NO: 28488 - DNA, 20 bp, synthetic construct
  misc_feature 1..20: note = chemically synthesized
  source 1..20: mol_type = other DNA
cattcaattatgtaaagaga

SEQ ID NO: 28489 - DNA, 20 bp, synthetic construct
  misc_feature 1..20: note = chemically synthesized
  source 1..20: mol_type = other DNA
agtcaaattgtccctgtttg

SEQ ID NO: 28490 - DNA, 20 bp, synthetic construct
  misc_feature 1..20: note = chemically synthesized
  source 1..20: mol_type = other DNA
agatgacgtgattgcatatc

SEQ ID NO: 28491 - DNA, 20 bp, synthetic construct
  misc_feature 1..20: note = chemically synthesized
  source 1..20: mol_type = other DNA
tctagaaaaccccattgtct

SEQ ID NO: 28492 - DNA, 20 bp, synthetic construct
  misc_feature 1..20: note = chemically synthesized
  source 1..20: mol_type = other DNA
tctcagcccaaaatcccctt

SEQ ID NO: 28493 - DNA, 20 bp, synthetic construct
  misc_feature 1..20: note = chemically synthesized
  source 1..20: mol_type = other DNA
caaaatccccttaagctgat

SEQ ID NO: 28494 - DNA, 20 bp, synthetic construct
  misc_feature 1..20: note = chemically synthesized
  source 1..20: mol_type = other DNA
cttaagctgataagcaactt

SEQ ID NO: 28495 - DNA, 20 bp, synthetic construct
  misc_feature 1..20: note = chemically synthesized
  source 1..20: mol_type = other DNA
gctgataagcaacttcagca

SEQ ID NO: 28496 - DNA, 20 bp, synthetic construct
  misc_feature 1..20: note = chemically synthesized
  source 1..20: mol_type = other DNA
aagcaacttcagcaaagtct

SEQ ID NO: 28497 - DNA, 20 bp, synthetic construct
  misc_feature 1..20: note = chemically synthesized
  source 1..20: mol_type = other DNA
agcaacttcagcaaagtctc

SEQ ID NO: 28498 - DNA, 20 bp, synthetic construct
  misc_feature 1..20: note = chemically synthesized
  source 1..20: mol_type = other DNA
aatcaatgtgcaaaaatcac

SEQ ID NO: 28499 - DNA, 20 bp, synthetic construct
  misc_feature 1..20: note = chemically synthesized
  source 1..20: mol_type = other DNA
gcattcttatacaccaataa

SEQ ID NO: 28500 - DNA, 20 bp, synthetic construct
  misc_feature 1..20: note = chemically synthesized
  source 1..20: mol_type = other DNA
atacaccaataacagacaaa

SEQ ID NO: 28501 - DNA, 20 bp, synthetic construct
  misc_feature 1..20: note = chemically synthesized
  source 1..20: mol_type = other DNA
accaataacagacaaacagt

SEQ ID NO: 28502 - DNA, 20 bp, synthetic construct
  misc_feature 1..20: note = chemically synthesized
  source 1..20: mol_type = other DNA
actcccattcacaattgctt

SEQ ID NO: 28503 - DNA, 20 bp, synthetic construct
  misc_feature 1..20: note = chemically synthesized
  source 1..20: mol_type = other DNA
tcccattcacaattgcttca

SEQ ID NO: 28504 - DNA, 20 bp, synthetic construct
  misc_feature 1..20: note = chemically synthesized
  source 1..20: mol_type = other DNA
ccattcacaattgcttcaga

SEQ ID NO: 28505 - DNA, 20 bp, synthetic construct
  misc_feature 1..20: note = chemically synthesized
  source 1..20: mol_type = other DNA
ttcagagagaatataatacc

SEQ ID NO: 28506 - DNA, 20 bp, synthetic construct
  misc_feature 1..20: note = chemically synthesized
  source 1..20: mol_type = other DNA
tcagagagaatataatacct

SEQ ID NO: 28507 - DNA, 20 bp, synthetic construct
  misc_feature 1..20: note = chemically synthesized
  source 1..20: mol_type = other DNA
tacctaggaatccaacttac

SEQ ID NO: 28508 - DNA, 20 bp, synthetic construct
  misc_feature 1..20: note = chemically synthesized
  source 1..20: mol_type = other DNA
acctaggaatccaacttaca

SEQ ID NO: 28509 - DNA, 20 bp, synthetic construct
  misc_feature 1..20: note = chemically synthesized
  source 1..20: mol_type = other DNA
cctaggaatccaacttacaa

SEQ ID NO: 28510 - DNA, 20 bp, synthetic construct
  misc_feature 1..20: note = chemically synthesized
  source 1..20: mol_type = other DNA
tccaacttacaagggatgtg

SEQ ID NO: 28511 - DNA, 20 bp, synthetic construct
  misc_feature 1..20: note = chemically synthesized
  source 1..20: mol_type = other DNA
ccaacttacaagggatgtga

SEQ ID NO: 28512 - DNA, 20 bp, synthetic construct
  misc_feature 1..20: note = chemically synthesized
  source 1..20: mol_type = other DNA
gggatgtgaaggacctcttc

SEQ ID NO: 28513 - DNA, 20 bp, synthetic construct
  misc_feature 1..20: note = chemically synthesized
  source 1..20: mol_type = other DNA
ggatgtgaaggacctcttca

SEQ ID NO: 28514 - DNA, 20 bp, synthetic construct
  misc_feature 1..20: note = chemically synthesized
  source 1..20: mol_type = other DNA
atgtgaaggacctcttcaag

SEQ ID NO: 28515 - DNA, 20 bp, synthetic construct
  misc_feature 1..20: note = chemically synthesized
  source 1..20: mol_type = other DNA
agaactacaaaccactgctc

SEQ ID NO: 28516 - DNA, 20 bp, synthetic construct
  misc_feature 1..20: note = chemically synthesized
  source 1..20: mol_type = other DNA
gaactacaaaccactgctca

SEQ ID NO: 28517 - DNA, 20 bp, synthetic construct
  misc_feature 1..20: note = chemically synthesized
  source 1..20: mol_type = other DNA
aaaccactgctcaaggaaat

SEQ ID NO: 28518 - DNA, 20 bp, synthetic construct
  misc_feature 1..20: note = chemically synthesized
  source 1..20: mol_type = other DNA
ggaaataagatacaaacaaa

SEQ ID NO: 28519 - DNA, 20 bp, synthetic construct
  misc_feature 1..20: note = chemically synthesized
  source 1..20: mol_type = other DNA
aataagatacaaacaaatgg

SEQ ID NO: 28520 - DNA, 20 bp, synthetic construct
  misc_feature 1..20: note = chemically synthesized
  source 1..20: mol_type = other DNA
ggaagaacattccatgctca

SEQ ID NO: 28521 - DNA, 20 bp, synthetic construct
  misc_feature 1..20: note = chemically synthesized
  source 1..20: mol_type = other DNA
gaacattccatgctcatgga

SEQ ID NO: 28522 - DNA, 20 bp, synthetic construct
  misc_feature 1..20: note = chemically synthesized
  source 1..20: mol_type = other DNA
aacattccatgctcatggat

SEQ ID NO: 28523 - DNA, 20 bp, synthetic construct
  misc_feature 1..20: note = chemically synthesized
  source 1..20: mol_type = other DNA
attccatgctcatggatagg

SEQ ID NO: 28524 - DNA, 20 bp, synthetic construct
  misc_feature 1..20: note = chemically synthesized
  source 1..20: mol_type = other DNA
aagaaacaatatcgtgaaaa

SEQ ID NO: 28525 - DNA, 20 bp, synthetic construct
  misc_feature 1..20: note = chemically synthesized
  source 1..20: mol_type = other DNA
tgaaaatggccatactgccc

SEQ ID NO: 28526 - DNA, 20 bp, synthetic construct
  misc_feature 1..20: note = chemically synthesized
  source 1..20: mol_type = other DNA
gaaaatggccatactgccca

SEQ ID NO: 28527 - DNA, 20 bp, synthetic construct
  misc_feature 1..20: note = chemically synthesized
  source 1..20: mol_type = other DNA
atactgcccaaggtaattta

SEQ ID NO: 28528 - DNA, 20 bp, synthetic construct
  misc_feature 1..20: note = chemically synthesized
  source 1..20: mol_type = other DNA
gattcaatgccatccccatc

SEQ ID NO: 28529 - DNA, 20 bp, synthetic construct
  misc_feature 1..20: note = chemically synthesized
  source 1..20: mol_type = other DNA
gctaccaatgactttcttca

SEQ ID NO: 28530 - DNA, 20 bp, synthetic construct
  misc_feature 1..20: note = chemically synthesized
  source 1..20: mol_type = other DNA
aatgactttcttcacagaat

SEQ ID NO: 28531 - DNA, 20 bp, synthetic construct
  misc_feature 1..20: note = chemically synthesized
  source 1..20: mol_type = other DNA
aattggaaaaaactacttta

SEQ ID NO: 28532 - DNA, 20 bp, synthetic construct
  misc_feature 1..20: note = chemically synthesized
  source 1..20: mol_type = other DNA
aaactactttaaagttcata

SEQ ID NO: 28533 - DNA, 20 bp, synthetic construct
  misc_feature 1..20: note = chemically synthesized
  source 1..20: mol_type = other DNA
aagttcatatggaaccaaaa

SEQ ID NO: 28534 - DNA, 20 bp, synthetic construct
  misc_feature 1..20: note = chemically synthesized
  source 1..20: mol_type = other DNA
gttcatatggaaccaaaaaa

SEQ ID NO: 28535 - DNA, 20 bp, synthetic construct
  misc_feature 1..20: note = chemically synthesized
  source 1..20: mol_type = other DNA
aaaaaagagcccgcatcgcc

SEQ ID NO: 28536 - DNA, 20 bp, synthetic construct
  misc_feature 1..20: note = chemically synthesized
  source 1..20: mol_type = other DNA
cgcatcgccaagtcaatcct

SEQ ID NO: 28537 - DNA, 20 bp, synthetic construct
  misc_feature 1..20: note = chemically synthesized
  source 1..20: mol_type = other DNA
ccaagtcaatcctaagccaa

SEQ ID NO: 28538 - DNA, 20 bp, synthetic construct
  misc_feature 1..20: note = chemically synthesized
  source 1..20: mol_type = other DNA
aatcctaagccaaaagaaca

SEQ ID NO: 28539 - DNA, 20 bp, synthetic construct
  misc_feature 1..20: note = chemically synthesized
  source 1..20: mol_type = other DNA
ctaagccaaaagaacaaagc

SEQ ID NO: 28540 - DNA, 20 bp, synthetic construct
  misc_feature 1..20: note = chemically synthesized
  source 1..20: mol_type = other DNA
aagccaaaagaacaaagctg

SEQ ID NO: 28541 - DNA, 20 bp, synthetic construct
  misc_feature 1..20: note = chemically synthesized
  source 1..20: mol_type = other DNA
agccaaaagaacaaagctgg

SEQ ID NO: 28542 - DNA, 20 bp, synthetic construct
  misc_feature 1..20: note = chemically synthesized
  source 1..20: mol_type = other DNA
ctgatttcaaactatactac

SEQ ID NO: 28543 - DNA, 20 bp, synthetic construct
  misc_feature 1..20: note = chemically synthesized
  source 1..20: mol_type = other DNA
tgatttcaaactatactaca

SEQ ID NO: 28544 - DNA, 20 bp, synthetic construct
  misc_feature 1..20: note = chemically synthesized
  source 1..20: mol_type = other DNA
caaactatactacaaggcta

SEQ ID NO: 28545 - DNA, 20 bp, synthetic construct
  misc_feature 1..20: note = chemically synthesized
  source 1..20: mol_type = other DNA
caaggctacagtaaccaaaa

SEQ ID NO: 28546 - DNA, 20 bp, synthetic construct
  misc_feature 1..20: note = chemically synthesized
  source 1..20: mol_type = other DNA
ctacagtaaccaaaacagca

SEQ ID NO: 28547 - DNA, 20 bp, synthetic construct
  misc_feature 1..20: note = chemically synthesized
  source 1..20: mol_type = other DNA
taaccaaaacagcatagtac

SEQ ID NO: 28548 - DNA, 20 bp, synthetic construct
  misc_feature 1..20: note = chemically synthesized
  source 1..20: mol_type = other DNA
gcatagtactggtaccaaaa

SEQ ID NO: 28549 - DNA, 20 bp, synthetic construct
  misc_feature 1..20: note = chemically synthesized
  source 1..20: mol_type = other DNA
atagtactggtaccaaaaca

SEQ ID NO: 28550 - DNA, 20 bp, synthetic construct
  misc_feature 1..20: note = chemically synthesized
  source 1..20: mol_type = other DNA
ctggtaccaaaacagagata

SEQ ID NO: 28551 - DNA, 20 bp, synthetic construct
  misc_feature 1..20: note = chemically synthesized
  source 1..20: mol_type = other DNA
aaaacagagatatagaccaa

SEQ ID NO: 28552 - DNA, 20 bp, synthetic construct
  misc_feature 1..20: note = chemically synthesized
  source 1..20: mol_type = other DNA
tatagaccaatggaacaaaa

SEQ ID NO: 28553 - DNA, 20 bp, synthetic construct
  misc_feature 1..20: note = chemically synthesized
  source 1..20: mol_type = other DNA
tagaccaatggaacaaaaca

SEQ ID NO: 28554 - DNA, 20 bp, synthetic construct
  misc_feature 1..20: note = chemically synthesized
  source 1..20: mol_type = other DNA
atggaacaaaacagagccct

SEQ ID NO: 28555 - DNA, 20 bp, synthetic construct
  misc_feature 1..20: note = chemically synthesized
  source 1..20: mol_type = other DNA
atctgatctttgacaaacct

SEQ ID NO: 28556 - DNA, 20 bp, synthetic construct
  misc_feature 1..20: note = chemically synthesized
  source 1..20: mol_type = other DNA
ttgacaaacctgagaaaaac

SEQ ID NO: 28557 - DNA, 20 bp, synthetic construct
  misc_feature 1..20: note = chemically synthesized
  source 1..20: mol_type = other DNA
aacctgagaaaaacaagaaa

SEQ ID NO: 28558 - DNA, 20 bp, synthetic construct
  misc_feature 1..20: note = chemically synthesized
  source 1..20: mol_type = other DNA
acctgagaaaaacaagaaat

SEQ ID NO: 28559 - DNA, 20 bp, synthetic construct
  misc_feature 1..20: note = chemically synthesized
  source 1..20: mol_type = other DNA
cctgagaaaaacaagaaatg

SEQ ID NO: 28560 - DNA, 20 bp, synthetic construct
  misc_feature 1..20: note = chemically synthesized
  source 1..20: mol_type = other DNA
agaaaaacaagaaatgggga

SEQ ID NO: 28561 - DNA, 20 bp, synthetic construct
  misc_feature 1..20: note = chemically synthesized
  source 1..20: mol_type = other DNA
gaaaaacaagaaatggggaa

SEQ ID NO: 28562 - DNA, 20 bp, synthetic construct
  misc_feature 1..20: note = chemically synthesized
  source 1..20: mol_type = other DNA
aggattccctgtttaataaa

SEQ ID NO: 28563 - DNA, 20 bp, synthetic construct
  misc_feature 1..20: note = chemically synthesized
  source 1..20: mol_type = other DNA
ccctgtttaataaatggtgc

SEQ ID NO: 28564 - DNA, 20 bp, synthetic construct
  misc_feature 1..20: note = chemically synthesized
  source 1..20: mol_type = other DNA
cctgtttaataaatggtgct

SEQ ID NO: 28565 - DNA, 20 bp, synthetic construct
  misc_feature 1..20: note = chemically synthesized
  source 1..20: mol_type = other DNA
ataaatggtgctgggaaaac

SEQ ID NO: 28566 - DNA, 20 bp, synthetic construct
  misc_feature 1..20: note = chemically synthesized
  source 1..20: mol_type = other DNA
atggtgctgggaaaactggc

SEQ ID NO: 28567 - DNA, 20 bp, synthetic construct
  misc_feature 1..20: note = chemically synthesized
  source 1..20: mol_type = other DNA
gaaaactggctagccaaatg

SEQ ID NO: 28568 - DNA, 20 bp, synthetic construct
  misc_feature 1..20: note = chemically synthesized
  source 1..20: mol_type = other DNA
aaaactggctagccaaatgt

SEQ ID NO: 28569 - DNA, 20 bp, synthetic construct
  misc_feature 1..20: note = chemically synthesized
  source 1..20: mol_type = other DNA
actggctagccaaatgtagg

SEQ ID NO: 28570 - DNA, 20 bp, synthetic construct
  misc_feature 1..20: note = chemically synthesized
  source 1..20: mol_type = other DNA
caaatgtaggaagctgaaac

SEQ ID NO: 28571 - DNA, 20 bp, synthetic construct
  misc_feature 1..20: note = chemically synthesized
  source 1..20: mol_type = other DNA
ccttatacaaaaattaactc

SEQ ID NO: 28572 - DNA, 20 bp, synthetic construct
  misc_feature 1..20: note = chemically synthesized
  source 1..20: mol_type = other DNA
atacaaaaattaactcaaga

SEQ ID NO: 28573 - DNA, 20 bp, synthetic construct
  misc_feature 1..20: note = chemically synthesized
  source 1..20: mol_type = other DNA
aattaactcaagatggatta

SEQ ID NO: 28574 - DNA, 20 bp, synthetic construct
  misc_feature 1..20: note = chemically synthesized
  source 1..20: mol_type = other DNA
tggattaaagacttaaatgt

SEQ ID NO: 28575 - DNA, 20 bp, synthetic construct
  misc_feature 1..20: note = chemically synthesized
  source 1..20: mol_type = other DNA
acctaaaaccataaaaactc

SEQ ID NO: 28576 - DNA, 20 bp, synthetic construct
  misc_feature 1..20: note = chemically synthesized
  source 1..20: mol_type = other DNA
taaaaccataaaaactctag

SEQ ID NO: 28577 - DNA, 20 bp, synthetic construct
  misc_feature 1..20: note = chemically synthesized
  source 1..20: mol_type = other DNA
aaaactctagaagaaaacct

SEQ ID NO: 28578 - DNA, 20 bp, synthetic construct
  misc_feature 1..20: note = chemically synthesized
  source 1..20: mol_type = other DNA
aaaacctaagcaataccatt

SEQ ID NO: 28579 - DNA, 20 bp, synthetic construct
  misc_feature 1..20: note = chemically synthesized
  source 1..20: mol_type = other DNA
aaacctaagcaataccattc

SEQ ID NO: 28580 - DNA, 20 bp, synthetic construct
  misc_feature 1..20: note = chemically synthesized
  source 1..20: mol_type = other DNA
aagcaataccattcaggaca

SEQ ID NO: 28581 - DNA, 20 bp, synthetic construct
  misc_feature 1..20: note = chemically synthesized
  source 1..20: mol_type = other DNA
agcaataccattcaggacat

SEQ ID NO: 28582 - DNA, 20 bp, synthetic construct
  misc_feature 1..20: note = chemically synthesized
  source 1..20: mol_type = other DNA
taccattcaggacataggca

SEQ ID NO: 28583 - DNA, 20 bp, synthetic construct
  misc_feature 1..20: note = chemically synthesized
  source 1..20: mol_type = other DNA
accattcaggacataggcat

SEQ ID NO: 28584 - DNA, 20 bp, synthetic construct
  misc_feature 1..20: note = chemically synthesized
  source 1..20: mol_type = other DNA
tcaggacataggcatgggca

SEQ ID NO: 28585 - DNA, 20 bp, synthetic construct
  misc_feature 1..20: note = chemically synthesized
  source 1..20: mol_type = other DNA
cttcatgtctaaaacaccaa

SEQ ID NO: 28586 - DNA, 20 bp, synthetic construct
  misc_feature 1..20: note = chemically synthesized
  source 1..20: mol_type = other DNA
gtctaaaacaccaaaagcaa

SEQ ID NO: 28587 - DNA, 20 bp, synthetic construct
  misc_feature 1..20: note = chemically synthesized
  source 1..20: mol_type = other DNA
accaaaagcaatggcaacaa

SEQ ID NO: 28588 - DNA, 20 bp, synthetic construct
  misc_feature 1..20: note = chemically synthesized
  source 1..20: mol_type = other DNA
caaaagccaaaattcactaa

SEQ ID NO: 28589 - DNA, 20 bp, synthetic construct
  misc_feature 1..20: note = chemically synthesized
  source 1..20: mol_type = other DNA
aaaagccaaaattcactaat

SEQ ID NO: 28590 - DNA, 20 bp, synthetic construct
  misc_feature 1..20: note = chemically synthesized
  source 1..20: mol_type = other DNA
aatgggatctaattaaacta

SEQ ID NO: 28591 - DNA, 20 bp, synthetic construct
  misc_feature 1..20: note = chemically synthesized
  source 1..20: mol_type = other DNA
taaactaaagatcttctgca

SEQ ID NO: 28592 - DNA, 20 bp, synthetic construct
  misc_feature 1..20: note = chemically synthesized
  source 1..20: mol_type = other DNA
aaagatcttctgcacagcaa

SEQ ID NO: 28593 - DNA, 20 bp, synthetic construct
  misc_feature 1..20: note = chemically synthesized
  source 1..20: mol_type = other DNA
acagcaaaagaaactaccat

SEQ ID NO: 28594 - DNA, 20 bp, synthetic construct
  misc_feature 1..20: note = chemically synthesized
  source 1..20: mol_type = other DNA
agcaaaagaaactaccatca

SEQ ID NO: 28595 - DNA, 20 bp, synthetic construct
  misc_feature 1..20: note = chemically synthesized
  source 1..20: mol_type = other DNA
gaaactaccatcagagtgaa

SEQ ID NO: 28596 - DNA, 20 bp, synthetic construct
  misc_feature 1..20: note = chemically synthesized
  source 1..20: mol_type = other DNA
aaactaccatcagagtgaac

SEQ ID NO: 28597 - DNA, 20 bp, synthetic construct
  misc_feature 1..20: note = chemically synthesized
  source 1..20: mol_type = other DNA
tgaacaggcaacctacacaa

SEQ ID NO: 28598 - DNA, 20 bp, synthetic construct
  misc_feature 1..20: note = chemically synthesized
  source 1..20: mol_type = other DNA
gaacaggcaacctacacaat

SEQ ID NO: 28599 - DNA, 20 bp, synthetic construct
  misc_feature 1..20: note = chemically synthesized
  source 1..20: mol_type = other DNA
acaggcaacctacacaatgg

SEQ ID NO: 28600 - DNA, 20 bp, synthetic construct
  misc_feature 1..20: note = chemically synthesized
  source 1..20: mol_type = other DNA
tgcaatctactcatctgaca

SEQ ID NO: 28601 - DNA, 20 bp, synthetic construct
  misc_feature 1..20: note = chemically synthesized
  source 1..20: mol_type = other DNA
gcaatctactcatctgacaa

SEQ ID NO: 28602 - DNA, 20 bp, synthetic construct
  misc_feature 1..20: note = chemically synthesized
  source 1..20: mol_type = other DNA
caatctactcatctgacaaa

SEQ ID NO: 28603 - DNA, 20 bp, synthetic construct
  misc_feature 1..20: note = chemically synthesized
  source 1..20: mol_type = other DNA
tctgacaaagggctaatatc

SEQ ID NO: 28604 - DNA, 20 bp, synthetic construct
  misc_feature 1..20: note = chemically synthesized
  source 1..20: mol_type = other DNA
atgaactcaaacaaatttac

SEQ ID NO: 28605 - DNA, 20 bp, synthetic construct
  misc_feature 1..20: note = chemically synthesized
  source 1..20: mol_type = other DNA
gaactcaaacaaatttacaa

SEQ ID NO: 28606 - DNA, 20 bp, synthetic construct
  misc_feature 1..20: note = chemically synthesized
  source 1..20: mol_type = other DNA
agaaaaaaaaccccatcaaa

SEQ ID NO: 28607 - DNA, 20 bp, synthetic construct
  misc_feature 1..20: note = chemically synthesized
  source 1..20: mol_type = other DNA
aaaaaaaccccatcaaaaag

SEQ ID NO: 28608 - DNA, 20 bp, synthetic construct
  misc_feature 1..20: note = chemically synthesized
  source 1..20: mol_type = other DNA
aaaaaaccccatcaaaaagt

SEQ ID NO: 28609 - DNA, 20 bp, synthetic construct
  misc_feature 1..20: note = chemically synthesized
  source 1..20: mol_type = other DNA
accccatcaaaaagtgggca

SEQ ID NO: 28610 - DNA, 20 bp, synthetic construct
  misc_feature 1..20: note = chemically synthesized
  source 1..20: mol_type = other DNA
ccccatcaaaaagtgggcaa

SEQ ID NO: 28611 - DNA, 20 bp, synthetic construct
  misc_feature 1..20: note = chemically synthesized
  source 1..20: mol_type = other DNA
aagtgggcaaaggatatgaa

SEQ ID NO: 28612 - DNA, 20 bp, synthetic construct
  misc_feature 1..20: note = chemically synthesized
  source 1..20: mol_type = other DNA
tatgaacagacacttctcaa

SEQ ID NO: 28613 - DNA, 20 bp, synthetic construct
  misc_feature 1..20: note = chemically synthesized
  source 1..20: mol_type = other DNA
gaacagacacttctcaaaag

SEQ ID NO: 28614 - DNA, 20 bp, synthetic construct
  misc_feature 1..20: note = chemically synthesized
  source 1..20: mol_type = other DNA
ctcaaaagaagacatttatg

SEQ ID NO: 28615 - DNA, 20 bp, synthetic construct
  misc_feature 1..20: note = chemically synthesized
  source 1..20: mol_type = other DNA
gaagacatttatgcagccaa

SEQ ID NO: 28616 - DNA, 20 bp, synthetic construct
  misc_feature 1..20: note = chemically synthesized
  source 1..20: mol_type = other DNA
gaaaaaatgctcatcatcac

SEQ ID NO: 28617 - DNA, 20 bp, synthetic construct
  misc_feature 1..20: note = chemically synthesized
  source 1..20: mol_type = other DNA
tgctcatcatcactggccat

SEQ ID NO: 28618 - DNA, 20 bp, synthetic construct
  misc_feature 1..20: note = chemically synthesized
  source 1..20: mol_type = other DNA
ctcatcatcactggccatca

SEQ ID NO: 28619 - DNA, 20 bp, synthetic construct
  misc_feature 1..20: note = chemically synthesized
  source 1..20: mol_type = other DNA
atgcaaatcaaaaccacaat

SEQ ID NO: 28620 - DNA, 20 bp, synthetic construct
  misc_feature 1..20: note = chemically synthesized
  source 1..20: mol_type = other DNA
aatgagataccatctcacac

SEQ ID NO: 28621 - DNA, 20 bp, synthetic construct
  misc_feature 1..20: note = chemically synthesized
  source 1..20: mol_type = other DNA
agataccatctcacaccagt

SEQ ID NO: 28622 - DNA, 20 bp, synthetic construct
  misc_feature 1..20: note = chemically synthesized
  source 1..20: mol_type = other DNA
ccatctcacaccagttagaa

SEQ ID NO: 28623 - DNA, 20 bp, synthetic construct
  misc_feature 1..20: note = chemically synthesized
  source 1..20: mol_type = other DNA
ttagaatggcaatcattaaa

SEQ ID NO: 28624 - DNA, 20 bp, synthetic construct
  misc_feature 1..20: note = chemically synthesized
  source 1..20: mol_type = other DNA
aatggcaatcattaaaaagt

SEQ ID NO: 28625 - DNA, 20 bp, synthetic construct
  misc_feature 1..20: note = chemically synthesized
  source 1..20: mol_type = other DNA
atggcaatcattaaaaagtc

SEQ ID NO: 28626 - DNA, 20 bp, synthetic construct
  misc_feature 1..20: note = chemically synthesized
  source 1..20: mol_type = other DNA
attaaaaagtcaggaaacaa

SEQ ID NO: 28627 - DNA, 20 bp, synthetic construct
  misc_feature 1..20: note = chemically synthesized
  source 1..20: mol_type = other DNA
ttaaaaagtcaggaaacaac

SEQ ID NO: 28628 - DNA, 20 bp, synthetic construct
  misc_feature 1..20: note = chemically synthesized
  source 1..20: mol_type = other DNA
agtcaggaaacaacaggtgc

SEQ ID NO: 28629 - DNA, 20 bp, synthetic construct
  misc_feature 1..20: note = chemically synthesized
  source 1..20: mol_type = other DNA
tcaggaaacaacaggtgctg

SEQ ID NO: 28630 - DNA, 20 bp, synthetic construct
  misc_feature 1..20: note = chemically synthesized
  source 1..20: mol_type = other DNA
aggaaacaacaggtgctgga

SEQ ID NO: 28631 - DNA, 20 bp, synthetic construct
  misc_feature 1..20: note = chemically synthesized
  source 1..20: mol_type = other DNA
ggaaacaacaggtgctggag

SEQ ID NO: 28632 - DNA, 20 bp, synthetic construct
  misc_feature 1..20: note = chemically synthesized
  source 1..20: mol_type = other DNA
aacaggtgctggagaggatg

SEQ ID NO: 28633 - DNA, 20 bp, synthetic construct
  misc_feature 1..20: note = chemically synthesized
  source 1..20: mol_type = other DNA
caggtgctggagaggatgtg

SEQ ID NO: 28634 - DNA, 20 bp, synthetic construct
  misc_feature 1..20: note = chemically synthesized
  source 1..20: mol_type = other DNA
ctggagaggatgtggagaaa

SEQ ID NO: 28635 - DNA, 20 bp, synthetic construct
  misc_feature 1..20: note = chemically synthesized
  source 1..20: mol_type = other DNA
tggagaggatgtggagaaat

SEQ ID NO: 28636 - DNA, 20 bp, synthetic construct
  misc_feature 1..20: note = chemically synthesized
  source 1..20: mol_type = other DNA
taggaacacttttacactgt

SEQ ID NO: 28637 - DNA, 20 bp, synthetic construct
  misc_feature 1..20: note = chemically synthesized
  source 1..20: mol_type = other DNA
gaacacttttacactgttgg

SEQ ID NO: 28638 - DNA, 20 bp, synthetic construct
  misc_feature 1..20: note = chemically synthesized
  source 1..20: mol_type = other DNA
aacacttttacactgttggt

SEQ ID NO: 28639 - DNA, 20 bp, synthetic construct
  misc_feature 1..20: note = chemically synthesized
  source 1..20: mol_type = other DNA
ctgttggtgggactgtaaac

SEQ ID NO: 28640 - DNA, 20 bp, synthetic construct
  misc_feature 1..20: note = chemically synthesized
  source 1..20: mol_type = other DNA
gtaaactagttcaaacattg

SEQ ID NO: 28641 - DNA, 20 bp, synthetic construct
  misc_feature 1..20: note = chemically synthesized
  source 1..20: mol_type = other DNA
aactagttcaaacattgtgg

SEQ ID NO: 28642 - DNA, 20 bp, synthetic construct
  misc_feature 1..20: note = chemically synthesized
  source 1..20: mol_type = other DNA
agttcaaacattgtggaagt

SEQ ID NO: 28643 - DNA, 20 bp, synthetic construct
  misc_feature 1..20: note = chemically synthesized
  source 1..20: mol_type = other DNA
aaacattgtggaagtcagtg

SEQ ID NO: 28644 - DNA, 20 bp, synthetic construct
  misc_feature 1..20: note = chemically synthesized
  source 1..20: mol_type = other DNA
aagtcagtgtggtgattcct

SEQ ID NO: 28645 - DNA, 20 bp, synthetic construct
  misc_feature 1..20: note = chemically synthesized
  source 1..20: mol_type = other DNA
agtcagtgtggtgattcctc

SEQ ID NO: 28646 - DNA, 20 bp, synthetic construct
  misc_feature 1..20: note = chemically synthesized
  source 1..20: mol_type = other DNA
gtcagtgtggtgattcctca

SEQ ID NO: 28647 - DNA, 20 bp, synthetic construct
  misc_feature 1..20: note = chemically synthesized
  source 1..20: mol_type = other DNA
gtggtgattcctcagggatc

SEQ ID NO: 28648 - DNA, 20 bp, synthetic construct
  misc_feature 1..20: note = chemically synthesized
  source 1..20: mol_type = other DNA
attcctcagggatctagaac

SEQ ID NO: 28649 - DNA, 20 bp, synthetic construct
  misc_feature 1..20: note = chemically synthesized
  source 1..20: mol_type = other DNA
actagaaataccatttgacc

SEQ ID NO: 28650 - DNA, 20 bp, synthetic construct
  misc_feature 1..20: note = chemically synthesized
  source 1..20: mol_type = other DNA
tgacccagccatcccattac

SEQ ID NO: 28651 - DNA, 20 bp, synthetic construct
  misc_feature 1..20: note = chemically synthesized
  source 1..20: mol_type = other DNA
gacccagccatcccattact

SEQ ID NO: 28652 - DNA, 20 bp, synthetic construct
  misc_feature 1..20: note = chemically synthesized
  source 1..20: mol_type = other DNA
cattactgggtatacaccca

SEQ ID NO: 28653 - DNA, 20 bp, synthetic construct
  misc_feature 1..20: note = chemically synthesized
  source 1..20: mol_type = other DNA
attactgggtatacacccaa

SEQ ID NO: 28654 - DNA, 20 bp, synthetic construct
  misc_feature 1..20: note = chemically synthesized
  source 1..20: mol_type = other DNA
ttataaatcatgctgctata

SEQ ID NO: 28655 - DNA, 20 bp, synthetic construct
  misc_feature 1..20: note = chemically synthesized
  source 1..20: mol_type = other DNA
atgcacacgtatgtttattg

SEQ ID NO: 28656 - DNA, 20 bp, synthetic construct
  misc_feature 1..20: note = chemically synthesized
  source 1..20: mol_type = other DNA
tattgcggcactattcacaa

SEQ ID NO: 28657 - DNA, 20 bp, synthetic construct
  misc_feature 1..20: note = chemically synthesized
  source 1..20: mol_type = other DNA
cggcactattcacaatagca

SEQ ID NO: 28658 - DNA, 20 bp, synthetic construct
  misc_feature 1..20: note = chemically synthesized
  source 1..20: mol_type = other DNA
tattcacaatagcaaagact

SEQ ID NO: 28659 - DNA, 20 bp, synthetic construct
  misc_feature 1..20: note = chemically synthesized
  source 1..20: mol_type = other DNA
acccaaatgtccaacaatga

SEQ ID NO: 28660 - DNA, 20 bp, synthetic construct
  misc_feature 1..20: note = chemically synthesized
  source 1..20: mol_type = other DNA
aatgtccaacaatgatagac

SEQ ID NO: 28661 - DNA, 20 bp, synthetic construct
  misc_feature 1..20: note = chemically synthesized
  source 1..20: mol_type = other DNA
caacaatgatagactggatt

SEQ ID NO: 28662 - DNA, 20 bp, synthetic construct
  misc_feature 1..20: note = chemically synthesized
  source 1..20: mol_type = other DNA
tagactggattaagaaaatg

SEQ ID NO: 28663 - DNA, 20 bp, synthetic construct
  misc_feature 1..20: note = chemically synthesized
  source 1..20: mol_type = other DNA
aatgtggcacatatacacca

SEQ ID NO: 28664 - DNA, 20 bp, synthetic construct
  misc_feature 1..20: note = chemically synthesized
  source 1..20: mol_type = other DNA
atacaccatggaatactatg

SEQ ID NO: 28665 - DNA, 20 bp, synthetic construct
  misc_feature 1..20: note = chemically synthesized
  source 1..20: mol_type = other DNA
atgcagccataaaaaatgat

SEQ ID NO: 28666 - DNA, 20 bp, synthetic construct
  misc_feature 1..20: note = chemically synthesized
  source 1..20: mol_type = other DNA
tgatgagttcatgtcctttg

SEQ ID NO: 28667 - DNA, 20 bp, synthetic construct
  misc_feature 1..20: note = chemically synthesized
  source 1..20: mol_type = other DNA
gatgagttcatgtcctttgt

SEQ ID NO: 28668 - DNA, 20 bp, synthetic construct
  misc_feature 1..20: note = chemically synthesized
  source 1..20: mol_type = other DNA
atgagttcatgtcctttgta

SEQ ID NO: 28669 - DNA, 20 bp, synthetic construct
  misc_feature 1..20: note = chemically synthesized
  source 1..20: mol_type = other DNA
tcatgtcctttgtagggaca

SEQ ID NO: 28670 - DNA, 20 bp, synthetic construct
  misc_feature 1..20: note = chemically synthesized
  source 1..20: mol_type = other DNA
cctttgtagggacatggatg

SEQ ID NO: 28671 - DNA, 20 bp, synthetic construct
  misc_feature 1..20: note = chemically synthesized
  source 1..20: mol_type = other DNA
tgtagggacatggatgaagc

SEQ ID NO: 28672 - DNA, 20 bp, synthetic construct
  misc_feature 1..20: note = chemically synthesized
  source 1..20: mol_type = other DNA
aagctggaaaccatcattct

SEQ ID NO: 28673 - DNA, 20 bp, synthetic construct
  misc_feature 1..20: note = chemically synthesized
  source 1..20: mol_type = other DNA
cattctcagcaaactatcac

SEQ ID NO: 28674 - DNA, 20 bp, synthetic construct
  misc_feature 1..20: note = chemically synthesized
  source 1..20: mol_type = other DNA
attctcagcaaactatcaca

SEQ ID NO: 28675 - DNA, 20 bp, synthetic construct
  misc_feature 1..20: note = chemically synthesized
  source 1..20: mol_type = other DNA
caaactatcacaaggacaaa

SEQ ID NO: 28676 - DNA, 20 bp, synthetic construct
  misc_feature 1..20: note = chemically synthesized
  source 1..20: mol_type = other DNA
acaccacatgttctcactca

SEQ ID NO: 28677 - DNA, 20 bp, synthetic construct
  misc_feature 1..20: note = chemically synthesized
  source 1..20: mol_type = other DNA
caccacatgttctcactcat

SEQ ID NO: 28678 - DNA, 20 bp, synthetic construct
  misc_feature 1..20: note = chemically synthesized
  source 1..20: mol_type = other DNA
cacatgttctcactcatagg

SEQ ID NO: 28679 - DNA, 20 bp, synthetic construct
  misc_feature 1..20: note = chemically synthesized
  source 1..20: mol_type = other DNA
acatgttctcactcataggt

SEQ ID NO: 28680 - DNA, 20 bp, synthetic construct
  misc_feature 1..20: note = chemically synthesized
  source 1..20: mol_type = other DNA
ataggtgggaactgaacaat

SEQ ID NO: 28681 - DNA, 20 bp, synthetic construct
  misc_feature 1..20: note = chemically synthesized
  source 1..20: mol_type = other DNA
aactgaacaatgagaacaca

SEQ ID NO: 28682 - DNA, 20 bp, synthetic construct
  misc_feature 1..20: note = chemically synthesized
  source 1..20: mol_type = other DNA
acaatgagaacacatggaca

SEQ ID NO: 28683 - DNA, 20 bp, synthetic construct
  misc_feature 1..20: note = chemically synthesized
  source 1..20: mol_type = other DNA
caatgagaacacatggacac

SEQ ID NO: 28684 - DNA, 20 bp, synthetic construct
  misc_feature 1..20: note = chemically synthesized
  source 1..20: mol_type = other DNA
tgagaacacatggacacagg

SEQ ID NO: 28685 - DNA, 20 bp, synthetic construct
  misc_feature 1..20: note = chemically synthesized
  source 1..20: mol_type = other DNA
gagaacacatggacacagga

SEQ ID NO: 28686 - DNA, 20 bp, synthetic construct
  misc_feature 1..20: note = chemically synthesized
  source 1..20: mol_type = other DNA
agaacacatggacacaggaa

SEQ ID NO: 28687 - DNA, 20 bp, synthetic construct
  misc_feature 1..20: note = chemically synthesized
  source 1..20: mol_type = other DNA
gaacacatggacacaggaag

SEQ ID NO: 28688 - DNA, 20 bp, synthetic construct
  misc_feature 1..20: note = chemically synthesized
  source 1..20: mol_type = other DNA
ggaaggggaacatcacacac

SEQ ID NO: 28689 - DNA, 20 bp, synthetic construct
  misc_feature 1..20: note = chemically synthesized
  source 1..20: mol_type = other DNA
gaaggggaacatcacacacc

SEQ ID NO: 28690 - DNA, 20 bp, synthetic construct
  misc_feature 1..20: note = chemically synthesized
  source 1..20: mol_type = other DNA
aaggggaacatcacacaccg

SEQ ID NO: 28691 - DNA, 20 bp, synthetic construct
  misc_feature 1..20: note = chemically synthesized
  source 1..20: mol_type = other DNA
tcacacaccggggcctgttg

SEQ ID NO: 28692 - DNA, 20 bp, synthetic construct
  misc_feature 1..20: note = chemically synthesized
  source 1..20: mol_type = other DNA
cacacaccggggcctgttgt

SEQ ID NO: 28693 - DNA, 20 bp, synthetic construct
  misc_feature 1..20: note = chemically synthesized
  source 1..20: mol_type = other DNA
acacaccggggcctgttgtg

SEQ ID NO: 28694 - DNA, 20 bp, synthetic construct
  misc_feature 1..20: note = chemically synthesized
  source 1..20: mol_type = other DNA
caccggggcctgttgtgggg

SEQ ID NO: 28695 - DNA, 20 bp, synthetic construct
  misc_feature 1..20: note = chemically synthesized
  source 1..20: mol_type = other DNA
accggggcctgttgtggggt

SEQ ID NO: 28696 - DNA, 20 bp, synthetic construct
  misc_feature 1..20: note = chemically synthesized
  source 1..20: mol_type = other DNA
cggggcctgttgtggggtgg

SEQ ID NO: 28697 - DNA, 20 bp, synthetic construct
  misc_feature 1..20: note = chemically synthesized
  source 1..20: mol_type = other DNA
ggggcctgttgtggggtggg

SEQ ID NO: 28698 - DNA, 20 bp, synthetic construct
  misc_feature 1..20: note = chemically synthesized
  source 1..20: mol_type = other DNA
ggcctgttgtggggtgggag

SEQ ID NO: 28699 - DNA, 20 bp, synthetic construct
  misc_feature 1..20: note = chemically synthesized
  source 1..20: mol_type = other DNA
gcctgttgtggggtgggagg

SEQ ID NO: 28700 - DNA, 20 bp, synthetic construct
  misc_feature 1..20: note = chemically synthesized
  source 1..20: mol_type = other DNA
cctgttgtggggtgggagga

SEQ ID NO: 28701 - DNA, 20 bp, synthetic construct
  misc_feature 1..20: note = chemically synthesized
  source 1..20: mol_type = other DNA
ctgttgtggggtgggaggag

SEQ ID NO: 28702 - DNA, 20 bp, synthetic construct
  misc_feature 1..20: note = chemically synthesized
  source 1..20: mol_type = other DNA
tgttgtggggtgggaggagg

SEQ ID NO: 28703 - DNA, 20 bp, synthetic construct
  misc_feature 1..20: note = chemically synthesized
  source 1..20: mol_type = other DNA
tgtggggtgggaggaggggg

SEQ ID NO: 28704 - DNA, 20 bp, synthetic construct
  misc_feature 1..20: note = chemically synthesized
  source 1..20: mol_type = other DNA
gtggggtgggaggagggggc

SEQ ID NO: 28705 - DNA, 20 bp, synthetic construct
  misc_feature 1..20: note = chemically synthesized
  source 1..20: mol_type = other DNA
tggggtgggaggagggggca

SEQ ID NO: 28706 - DNA, 20 bp, synthetic construct
  misc_feature 1..20: note = chemically synthesized
  source 1..20: mol_type = other DNA
gtgggaggagggggcaggga

SEQ ID NO: 28707 - DNA, 20 bp, synthetic construct
  misc_feature 1..20: note = chemically synthesized
  source 1..20: mol_type = other DNA
ggagggggcagggatagcat

SEQ ID NO: 28708 - DNA, 20 bp, synthetic construct
  misc_feature 1..20: note = chemically synthesized
  source 1..20: mol_type = other DNA
gagggggcagggatagcatt

SEQ ID NO: 28709 - DNA, 20 bp, synthetic construct
  misc_feature 1..20: note = chemically synthesized
  source 1..20: mol_type = other DNA
gggggcagggatagcattag

SEQ ID NO: 28710 - DNA, 20 bp, synthetic construct
  misc_feature 1..20: note = chemically synthesized
  source 1..20: mol_type = other DNA
gagatatacctaatgttaaa

SEQ ID NO: 28711 - DNA, 20 bp, synthetic construct
  misc_feature 1..20: note = chemically synthesized
  source 1..20: mol_type = other DNA
tatacctaatgttaaatggt

SEQ ID NO: 28712 - DNA, 20 bp, synthetic construct
  misc_feature 1..20: note = chemically synthesized
  source 1..20: mol_type = other DNA
aatgttaaatggtgagttaa

SEQ ID NO: 28713 - DNA, 20 bp, synthetic construct
  misc_feature 1..20: note = chemically synthesized
  source 1..20: mol_type = other DNA
atgttaaatggtgagttaat

SEQ ID NO: 28714 - DNA, 20 bp, synthetic construct
  misc_feature 1..20: note = chemically synthesized
  source 1..20: mol_type = other DNA
aaatggtgagttaatgggtg

SEQ ID NO: 28715 - DNA, 20 bp, synthetic construct
  misc_feature 1..20: note = chemically synthesized
  source 1..20: mol_type = other DNA
atgggtgcagcacaccaaca

SEQ ID NO: 28716 - DNA, 20 bp, synthetic construct
  misc_feature 1..20: note = chemically synthesized
  source 1..20: mol_type = other DNA
acatgtaccctaaaacttaa

SEQ ID NO: 28717 - DNA, 20 bp, synthetic construct
  misc_feature 1..20: note = chemically synthesized
  source 1..20: mol_type = other DNA
ttaaaagtataacaaaaaat

SEQ ID NO: 28718 - DNA, 20 bp, synthetic construct
  misc_feature 1..20: note = chemically synthesized
  source 1..20: mol_type = other DNA
aagtataacaaaaaataagt

SEQ ID NO: 28719 - DNA, 20 bp, synthetic construct
  misc_feature 1..20: note = chemically synthesized
  source 1..20: mol_type = other DNA
acaaaaaataagttagaaaa

SEQ ID NO: 28720 - DNA, 20 bp, synthetic construct
  misc_feature 1..20: note = chemically synthesized
  source 1..20: mol_type = other DNA
aaaaagaaatttacatatat

SEQ ID NO: 28721 - DNA, 20 bp, synthetic construct
  misc_feature 1..20: note = chemically synthesized
  source 1..20: mol_type = other DNA
tattagttatttaaatatgc

SEQ ID NO: 28722 - DNA, 20 bp, synthetic construct
  misc_feature 1..20: note = chemically synthesized
  source 1..20: mol_type = other DNA
actattacactcatttcaca

SEQ ID NO: 28723 - DNA, 20 bp, synthetic construct
  misc_feature 1..20: note = chemically synthesized
  source 1..20: mol_type = other DNA
atatctttgcttgtttccct

SEQ ID NO: 28724 - DNA, 20 bp, synthetic construct
  misc_feature 1..20: note = chemically synthesized
  source 1..20: mol_type = other DNA
tatctttgcttgtttccctt

SEQ ID NO: 28725 - DNA, 20 bp, synthetic construct
  misc_feature 1..20: note = chemically synthesized
  source 1..20: mol_type = other DNA
cttgtttcccttaggttctc

SEQ ID NO: 28726 - DNA, 20 bp, synthetic construct
  misc_feature 1..20: note = chemically synthesized
  source 1..20: mol_type = other DNA
ccttaggttctctggatatt

SEQ ID NO: 28727 - DNA, 20 bp, synthetic construct
  misc_feature 1..20: note = chemically synthesized
  source 1..20: mol_type = other DNA
ttaggttctctggatattga

SEQ ID NO: 28728 - DNA, 20 bp, synthetic construct
  misc_feature 1..20: note = chemically synthesized
  source 1..20: mol_type = other DNA
aggttctctggatattgaga

SEQ ID NO: 28729 - DNA, 20 bp, synthetic construct
  misc_feature 1..20: note = chemically synthesized
  source 1..20: mol_type = other DNA
ggttctctggatattgagag

SEQ ID NO: 28730 - DNA, 20 bp, synthetic construct
  misc_feature 1..20: note = chemically synthesized
  source 1..20: mol_type = other DNA
gagaggctaatgtaattacc

SEQ ID NO: 28731 - DNA, 20 bp, synthetic construct
  misc_feature 1..20: note = chemically synthesized
  source 1..20: mol_type = other DNA
agaggctaatgtaattacct

SEQ ID NO: 28732 - DNA, 20 bp, synthetic construct
  misc_feature 1..20: note = chemically synthesized
  source 1..20: mol_type = other DNA
ttacctgggtaattgctcct

SEQ ID NO: 28733 - DNA, 20 bp, synthetic construct
  misc_feature 1..20: note = chemically synthesized
  source 1..20: mol_type = other DNA
tacctgggtaattgctcctc

SEQ ID NO: 28734 - DNA, 20 bp, synthetic construct
  misc_feature 1..20: note = chemically synthesized
  source 1..20: mol_type = other DNA
acctgggtaattgctcctca

SEQ ID NO: 28735 - DNA, 20 bp, synthetic construct
  misc_feature 1..20: note = chemically synthesized
  source 1..20: mol_type = other DNA
tctccccattactctactcc

SEQ ID NO: 28736 - DNA, 20 bp, synthetic construct
  misc_feature 1..20: note = chemically synthesized
  source 1..20: mol_type = other DNA
tccccattactctactccta

SEQ ID NO: 28737 - DNA, 20 bp, synthetic construct
  misc_feature 1..20: note = chemically synthesized
  source 1..20: mol_type = other DNA
ctactcctagagactctgat

SEQ ID NO: 28738 - DNA, 20 bp, synthetic construct
  misc_feature 1..20: note = chemically synthesized
  source 1..20: mol_type = other DNA
tgatcagctttttcaaaaaa

SEQ ID NO: 28739 - DNA, 20 bp, synthetic construct
  misc_feature 1..20: note = chemically synthesized
  source 1..20: mol_type = other DNA
gatcagctttttcaaaaaat

SEQ ID NO: 28740 - DNA, 20 bp, synthetic construct
  misc_feature 1..20: note = chemically synthesized
  source 1..20: mol_type = other DNA
cagctttttcaaaaaatggg

SEQ ID NO: 28741 - DNA, 20 bp, synthetic construct
  misc_feature 1..20: note = chemically synthesized
  source 1..20: mol_type = other DNA
tcaaaaaatgggcagcattc

SEQ ID NO: 28742 - DNA, 20 bp, synthetic construct
  misc_feature 1..20: note = chemically synthesized
  source 1..20: mol_type = other DNA
aatgggcagcattccagccc

SEQ ID NO: 28743 - DNA, 20 bp, synthetic construct
  misc_feature 1..20: note = chemically synthesized
  source 1..20: mol_type = other DNA
atgggcagcattccagcccc

SEQ ID NO: 28744 - DNA, 20 bp, synthetic construct
  misc_feature 1..20: note = chemically synthesized
  source 1..20: mol_type = other DNA
agcattccagccccaggact

SEQ ID NO: 28745 - DNA, 20 bp, synthetic construct
  misc_feature 1..20: note = chemically synthesized
  source 1..20: mol_type = other DNA
attccagccccaggactaag

SEQ ID NO: 28746 - DNA, 20 bp, synthetic construct
  misc_feature 1..20: note = chemically synthesized
  source 1..20: mol_type = other DNA
ctaagaagatatgaatgcca

SEQ ID NO: 28747 - DNA, 20 bp, synthetic construct
  misc_feature 1..20: note = chemically synthesized
  source 1..20: mol_type = other DNA
agaagatatgaatgccacag

SEQ ID NO: 28748 - DNA, 20 bp, synthetic construct
  misc_feature 1..20: note = chemically synthesized
  source 1..20: mol_type = other DNA
agatatgaatgccacagtgg

SEQ ID NO: 28749 - DNA, 20 bp, synthetic construct
  misc_feature 1..20: note = chemically synthesized
  source 1..20: mol_type = other DNA
gatatgaatgccacagtggc

SEQ ID NO: 28750 - DNA, 20 bp, synthetic construct
  misc_feature 1..20: note = chemically synthesized
  source 1..20: mol_type = other DNA
atatgaatgccacagtggca

SEQ ID NO: 28751 - DNA, 20 bp, synthetic construct
  misc_feature 1..20: note = chemically synthesized
  source 1..20: mol_type = other DNA
acagtggcagggacttgctg

SEQ ID NO: 28752 - DNA, 20 bp, synthetic construct
  misc_feature 1..20: note = chemically synthesized
  source 1..20: mol_type = other DNA
tggcagggacttgctgaagt

SEQ ID NO: 28753 - DNA, 20 bp, synthetic construct
  misc_feature 1..20: note = chemically synthesized
  source 1..20: mol_type = other DNA
tgagcttccccatcccacct

SEQ ID NO: 28754 - DNA, 20 bp, synthetic construct
  misc_feature 1..20: note = chemically synthesized
  source 1..20: mol_type = other DNA
gagcttccccatcccacctg

SEQ ID NO: 28755 - DNA, 20 bp, synthetic construct
  misc_feature 1..20: note = chemically synthesized
  source 1..20: mol_type = other DNA
tccccatcccacctgaggct

SEQ ID NO: 28756 - DNA, 20 bp, synthetic construct
  misc_feature 1..20: note = chemically synthesized
  source 1..20: mol_type = other DNA
cccatcccacctgaggctca

SEQ ID NO: 28757 - DNA, 20 bp, synthetic construct
  misc_feature 1..20: note = chemically synthesized
  source 1..20: mol_type = other DNA
ccatcccacctgaggctcag

SEQ ID NO: 28758 - DNA, 20 bp, synthetic construct
  misc_feature 1..20: note = chemically synthesized
  source 1..20: mol_type = other DNA
cccacctgaggctcagaggc

SEQ ID NO: 28759 - DNA, 20 bp, synthetic construct
  misc_feature 1..20: note = chemically synthesized
  source 1..20: mol_type = other DNA
tcagaggccagtttcacttg

SEQ ID NO: 28760 - DNA, 20 bp, synthetic construct
  misc_feature 1..20: note = chemically synthesized
  source 1..20: mol_type = other DNA
aggccagtttcacttgtggt

SEQ ID NO: 28761 - DNA, 20 bp, synthetic construct
  misc_feature 1..20: note = chemically synthesized
  source 1..20: mol_type = other DNA
ttcacttgtggtgagtgcac

SEQ ID NO: 28762 - DNA, 20 bp, synthetic construct
  misc_feature 1..20: note = chemically synthesized
  source 1..20: mol_type = other DNA
caagcccatgatccctgata

SEQ ID NO: 28763 - DNA, 20 bp, synthetic construct
  misc_feature 1..20: note = chemically synthesized
  source 1..20: mol_type = other DNA
ccatgatccctgatatggct

SEQ ID NO: 28764 - DNA, 20 bp, synthetic construct
  misc_feature 1..20: note = chemically synthesized
  source 1..20: mol_type = other DNA
tccccataatccctatatgt

SEQ ID NO: 28765 - DNA, 20 bp, synthetic construct
  misc_feature 1..20: note = chemically synthesized
  source 1..20: mol_type = other DNA
ccccataatccctatatgtc

SEQ ID NO: 28766 - DNA, 20 bp, synthetic construct
  misc_feature 1..20: note = chemically synthesized
  source 1..20: mol_type = other DNA
cccataatccctatatgtcg

SEQ ID NO: 28767 - DNA, 20 bp, synthetic construct
  misc_feature 1..20: note = chemically synthesized
  source 1..20: mol_type = other DNA
ccataatccctatatgtcgg

SEQ ID NO: 28768 - DNA, 20 bp, synthetic construct
  misc_feature 1..20: note = chemically synthesized
  source 1..20: mol_type = other DNA
ataatccctatatgtcgggg

SEQ ID NO: 28769 - DNA, 20 bp, synthetic construct
  misc_feature 1..20: note = chemically synthesized
  source 1..20: mol_type = other DNA
taatccctatatgtcggggg

SEQ ID NO: 28770 - DNA, 20 bp, synthetic construct
  misc_feature 1..20: note = chemically synthesized
  source 1..20: mol_type = other DNA
aatccctatatgtcggggga

SEQ ID NO: 28771 - DNA, 20 bp, synthetic construct
  misc_feature 1..20: note = chemically synthesized
  source 1..20: mol_type = other DNA
ctatatgtcgggggagggac

SEQ ID NO: 28772 - DNA, 20 bp, synthetic construct
  misc_feature 1..20: note = chemically synthesized
  source 1..20: mol_type = other DNA
tatatgtcgggggagggacc

SEQ ID NO: 28773 - DNA, 20 bp, synthetic construct
  misc_feature 1..20: note = chemically synthesized
  source 1..20: mol_type = other DNA
atgtcgggggagggaccagg

SEQ ID NO: 28774 - DNA, 20 bp, synthetic construct
  misc_feature 1..20: note = chemically synthesized
  source 1..20: mol_type = other DNA
tgtcgggggagggaccaggt

SEQ ID NO: 28775 - DNA, 20 bp, synthetic construct
  misc_feature 1..20: note = chemically synthesized
  source 1..20: mol_type = other DNA
tcgggggagggaccaggtgg

SEQ ID NO: 28776 - DNA, 20 bp, synthetic construct
  misc_feature 1..20: note = chemically synthesized
  source 1..20: mol_type = other DNA
gggaccaggtgggagattat

SEQ ID NO: 28777 - DNA, 20 bp, synthetic construct
  misc_feature 1..20: note = chemically synthesized
  source 1..20: mol_type = other DNA
ggtgggagattattggatca

SEQ ID NO: 28778 - DNA, 20 bp, synthetic construct
  misc_feature 1..20: note = chemically synthesized
  source 1..20: mol_type = other DNA
gtgggagattattggatcat

SEQ ID NO: 28779 - DNA, 20 bp, synthetic construct
  misc_feature 1..20: note = chemically synthesized
  source 1..20: mol_type = other DNA
gggagattattggatcatgg

SEQ ID NO: 28780 - DNA, 20 bp, synthetic construct
  misc_feature 1..20: note = chemically synthesized
  source 1..20: mol_type = other DNA
agattattggatcatgggag

SEQ ID NO: 28781 - DNA, 20 bp, synthetic construct
  misc_feature 1..20: note = chemically synthesized
  source 1..20: mol_type = other DNA
tgggagcagtttcccccatg

SEQ ID NO: 28782 - DNA, 20 bp, synthetic construct
  misc_feature 1..20: note = chemically synthesized
  source 1..20: mol_type = other DNA
catgcagttctcgtgatact

SEQ ID NO: 28783 - DNA, 20 bp, synthetic construct
  misc_feature 1..20: note = chemically synthesized
  source 1..20: mol_type = other DNA
cagttctcgtgatactgagt

SEQ ID NO: 28784 - DNA, 20 bp, synthetic construct
  misc_feature 1..20: note = chemically synthesized
  source 1..20: mol_type = other DNA
gatactgagtgagttttcat

SEQ ID NO: 28785 - DNA, 20 bp, synthetic construct
  misc_feature 1..20: note = chemically synthesized
  source 1..20: mol_type = other DNA
tgagttttcatgagatctga

SEQ ID NO: 28786 - DNA, 20 bp, synthetic construct
  misc_feature 1..20: note = chemically synthesized
  source 1..20: mol_type = other DNA
atgagatctgatggttttat

SEQ ID NO: 28787 - DNA, 20 bp, synthetic construct
  misc_feature 1..20: note = chemically synthesized
  source 1..20: mol_type = other DNA
tgagatctgatggttttata

SEQ ID NO: 28788 - DNA, 20 bp, synthetic construct
  misc_feature 1..20: note = chemically synthesized
  source 1..20: mol_type = other DNA
gatctgatggttttataagg

SEQ ID NO: 28789 - DNA, 20 bp, synthetic construct
  misc_feature 1..20: note = chemically synthesized
  source 1..20: mol_type = other DNA
actctctcttgcctgccacc

SEQ ID NO: 28790 - DNA, 20 bp, synthetic construct
  misc_feature 1..20: note = chemically synthesized
  source 1..20: mol_type = other DNA
tctcttgcctgccaccaagt

SEQ ID NO: 28791 - DNA, 20 bp, synthetic construct
  misc_feature 1..20: note = chemically synthesized
  source 1..20: mol_type = other DNA
tctccttctgccataattgt

SEQ ID NO: 28792 - DNA, 20 bp, synthetic construct
  misc_feature 1..20: note = chemically synthesized
  source 1..20: mol_type = other DNA
gccataattgtaagtttcct

SEQ ID NO: 28793 - DNA, 20 bp, synthetic construct
  misc_feature 1..20: note = chemically synthesized
  source 1..20: mol_type = other DNA
ccataattgtaagtttcctg

SEQ ID NO: 28794 - DNA, 20 bp, synthetic construct
  misc_feature 1..20: note = chemically synthesized
  source 1..20: mol_type = other DNA
taagtttcctgaggcctccc

SEQ ID NO: 28795 - DNA, 20 bp, synthetic construct
  misc_feature 1..20: note = chemically synthesized
  source 1..20: mol_type = other DNA
ctgaggcctccccagctatg

SEQ ID NO: 28796 - DNA, 20 bp, synthetic construct
  misc_feature 1..20: note = chemically synthesized
  source 1..20: mol_type = other DNA
ccccagctatgtggaaatgt

SEQ ID NO: 28797 - DNA, 20 bp, synthetic construct
  misc_feature 1..20: note = chemically synthesized
  source 1..20: mol_type = other DNA
tcctttgttaataaattacc

SEQ ID NO: 28798 - DNA, 20 bp, synthetic construct
  misc_feature 1..20: note = chemically synthesized
  source 1..20: mol_type = other DNA
gttaataaattacccagtct

SEQ ID NO: 28799 - DNA, 20 bp, synthetic construct
  misc_feature 1..20: note = chemically synthesized
  source 1..20: mol_type = other DNA
ttaataaattacccagtctc

SEQ ID NO: 28800 - DNA, 20 bp, synthetic construct
  misc_feature 1..20: note = chemically synthesized
  source 1..20: mol_type = other DNA
ataaattacccagtctcagg

SEQ ID NO: 28801 - DNA, 20 bp, synthetic construct
  misc_feature 1..20: note = chemically synthesized
  source 1..20: mol_type = other DNA
ccagtctcaggtagtatctt

SEQ ID NO: 28802 - DNA, 20 bp, synthetic construct
  misc_feature 1..20: note = chemically synthesized
  source 1..20: mol_type = other DNA
agtctcaggtagtatcttta

SEQ ID NO: 28803 - DNA, 20 bp, synthetic construct
  misc_feature 1..20: note = chemically synthesized
  source 1..20: mol_type = other DNA
ctcaggtagtatctttagag

SEQ ID NO: 28804 - DNA, 20 bp, synthetic construct
  misc_feature 1..20: note = chemically synthesized
  source 1..20: mol_type = other DNA
tagtatctttagagcagtgt

SEQ ID NO: 28805 - DNA, 20 bp, synthetic construct
  misc_feature 1..20: note = chemically synthesized
  source 1..20: mol_type = other DNA
aatgaactaatacaatcccc

SEQ ID NO: 28806 - DNA, 20 bp, synthetic construct
  misc_feature 1..20: note = chemically synthesized
  source 1..20: mol_type = other DNA
tccccaagccctgccttctg

SEQ ID NO: 28807 - DNA, 20 bp, synthetic construct
  misc_feature 1..20: note = chemically synthesized
  source 1..20: mol_type = other DNA
ccaagccctgccttctgaag

SEQ ID NO: 28808 - DNA, 20 bp, synthetic construct
  misc_feature 1..20: note = chemically synthesized
  source 1..20: mol_type = other DNA
ctgccttctgaagcagcatt

SEQ ID NO: 28809 - DNA, 20 bp, synthetic construct
  misc_feature 1..20: note = chemically synthesized
  source 1..20: mol_type = other DNA
tgccttctgaagcagcattc

SEQ ID NO: 28810 - DNA, 20 bp, synthetic construct
  misc_feature 1..20: note = chemically synthesized
  source 1..20: mol_type = other DNA
ggactcccaaccccatgtca

SEQ ID NO: 28811 - DNA, 20 bp, synthetic construct
  misc_feature 1..20: note = chemically synthesized
  source 1..20: mol_type = other DNA
caaccccatgtcacagtgtg

SEQ ID NO: 28812 - DNA, 20 bp, synthetic construct
  misc_feature 1..20: note = chemically synthesized
  source 1..20: mol_type = other DNA
atgtcacagtgtgaagccct

SEQ ID NO: 28813 - DNA, 20 bp, synthetic construct
  misc_feature 1..20: note = chemically synthesized
  source 1..20: mol_type = other DNA
aagcccttagcatttttcct

SEQ ID NO: 28814 - DNA, 20 bp, synthetic construct
  misc_feature 1..20: note = chemically synthesized
  source 1..20: mol_type = other DNA
ccttagcatttttcctaaga

SEQ ID NO: 28815 - DNA, 20 bp, synthetic construct
  misc_feature 1..20: note = chemically synthesized
  source 1..20: mol_type = other DNA
tagcatttttcctaagacag

SEQ ID NO: 28816 - DNA, 20 bp, synthetic construct
  misc_feature 1..20: note = chemically synthesized
  source 1..20: mol_type = other DNA
taagacagtagtcacctccc

SEQ ID NO: 28817 - DNA, 20 bp, synthetic construct
  misc_feature 1..20: note = chemically synthesized
  source 1..20: mol_type = other DNA
cctagcttcttgaacctgtc

SEQ ID NO: 28818 - DNA, 20 bp, synthetic construct
  misc_feature 1..20: note = chemically synthesized
  source 1..20: mol_type = other DNA
agcttcttgaacctgtctgg

SEQ ID NO: 28819 - DNA, 20 bp, synthetic construct
  misc_feature 1..20: note = chemically synthesized
  source 1..20: mol_type = other DNA
ttcttgaacctgtctggcag

SEQ ID NO: 28820 - DNA, 20 bp, synthetic construct
  misc_feature 1..20: note = chemically synthesized
  source 1..20: mol_type = other DNA
tcttgaacctgtctggcaga

SEQ ID NO: 28821 - DNA, 20 bp, synthetic construct
  misc_feature 1..20: note = chemically synthesized
  source 1..20: mol_type = other DNA
ttgaacctgtctggcagaag

SEQ ID NO: 28822 - DNA, 20 bp, synthetic construct
  misc_feature 1..20: note = chemically synthesized
  source 1..20: mol_type = other DNA
gaacctgtctggcagaagga

SEQ ID NO: 28823 - DNA, 20 bp, synthetic construct
  misc_feature 1..20: note = chemically synthesized
  source 1..20: mol_type = other DNA
aacctgtctggcagaaggag

SEQ ID NO: 28824 - DNA, 20 bp, synthetic construct
  misc_feature 1..20: note = chemically synthesized
  source 1..20: mol_type = other DNA
agaggaatcacatcctaaat

SEQ ID NO: 28825 - DNA, 20 bp, synthetic construct
  misc_feature 1..20: note = chemically synthesized
  source 1..20: mol_type = other DNA
ggaatcacatcctaaattgg

SEQ ID NO: 28826 - DNA, 20 bp, synthetic construct
  misc_feature 1..20: note = chemically synthesized
  source 1..20: mol_type = other DNA
atcacatcctaaattggtgg

SEQ ID NO: 28827 - DNA, 20 bp, synthetic construct
  misc_feature 1..20: note = chemically synthesized
  source 1..20: mol_type = other DNA
catcctaaattggtggcaga

SEQ ID NO: 28828 - DNA, 20 bp, synthetic construct
  misc_feature 1..20: note = chemically synthesized
  source 1..20: mol_type = other DNA
ggaaaacaaaacaaaaacac

SEQ ID NO: 28829 - DNA, 20 bp, synthetic construct
  misc_feature 1..20: note = chemically synthesized
  source 1..20: mol_type = other DNA
aaaacaaaacaaaaacacca

SEQ ID NO: 28830 - DNA, 20 bp, synthetic construct
  misc_feature 1..20: note = chemically synthesized
  source 1..20: mol_type = other DNA
cacatcatgaattcttgaaa

SEQ ID NO: 28831 - DNA, 20 bp, synthetic construct
  misc_feature 1..20: note = chemically synthesized
  source 1..20: mol_type = other DNA
gttttgccatcatattatct

SEQ ID NO: 28832 - DNA, 20 bp, synthetic construct
  misc_feature 1..20: note = chemically synthesized
  source 1..20: mol_type = other DNA
ttttgccatcatattatctt

SEQ ID NO: 28833 - DNA, 20 bp, synthetic construct
  misc_feature 1..20: note = chemically synthesized
  source 1..20: mol_type = other DNA
actcacaaaatgcttatgtc

SEQ ID NO: 28834 - DNA, 20 bp, synthetic construct
  misc_feature 1..20: note = chemically synthesized
  source 1..20: mol_type = other DNA
ggtttatatgctcatctatt

SEQ ID NO: 28835 - DNA, 20 bp, synthetic construct
  misc_feature 1..20: note = chemically synthesized
  source 1..20: mol_type = other DNA
ttatatgctcatctattaag

SEQ ID NO: 28836 - DNA, 20 bp, synthetic construct
  misc_feature 1..20: note = chemically synthesized
  source 1..20: mol_type = other DNA
tatatgctcatctattaagt

SEQ ID NO: 28837 - DNA, 20 bp, synthetic construct
  misc_feature 1..20: note = chemically synthesized
  source 1..20: mol_type = other DNA
ttgtctccttgtttacctca

SEQ ID NO: 28838 - DNA, 20 bp, synthetic construct
  misc_feature 1..20: note = chemically synthesized
  source 1..20: mol_type = other DNA
ccttgtttacctcacagatg

SEQ ID NO: 28839 - DNA, 20 bp, synthetic construct
  misc_feature 1..20: note = chemically synthesized
  source 1..20: mol_type = other DNA
ttacctcacagatgtggtct

SEQ ID NO: 28840 - DNA, 20 bp, synthetic construct
  misc_feature 1..20: note = chemically synthesized
  source 1..20: mol_type = other DNA
cacagatgtggtctgagtat

SEQ ID NO: 28841 - DNA, 20 bp, synthetic construct
  misc_feature 1..20: note = chemically synthesized
  source 1..20: mol_type = other DNA
gatgtggtctgagtatcagt

SEQ ID NO: 28842 - DNA, 20 bp, synthetic construct
  misc_feature 1..20: note = chemically synthesized
  source 1..20: mol_type = other DNA
agtatcagtgagccaataac

SEQ ID NO: 28843 - DNA, 20 bp, synthetic construct
  misc_feature 1..20: note = chemically synthesized
  source 1..20: mol_type = other DNA
gtatcagtgagccaataaca

SEQ ID NO: 28844 - DNA, 20 bp, synthetic construct
  misc_feature 1..20: note = chemically synthesized
  source 1..20: mol_type = other DNA
cagtgagccaataacaagga

SEQ ID NO: 28845 - DNA, 20 bp, synthetic construct
  misc_feature 1..20: note = chemically synthesized
  source 1..20: mol_type = other DNA
gaaagacaattattaataaa

SEQ ID NO: 28846 - DNA, 20 bp, synthetic construct
  misc_feature 1..20: note = chemically synthesized
  source 1..20: mol_type = other DNA
gacaattattaataaaaagt

SEQ ID NO: 28847 - DNA, 20 bp, synthetic construct
  misc_feature 1..20: note = chemically synthesized
  source 1..20: mol_type = other DNA
attaataaaaagttggaaat

SEQ ID NO: 28848 - DNA, 20 bp, synthetic construct
  misc_feature 1..20: note = chemically synthesized
  source 1..20: mol_type = other DNA
gctgactgtgattgactcct

SEQ ID NO: 28849 - DNA, 20 bp, synthetic construct
  misc_feature 1..20: note = chemically synthesized
  source 1..20: mol_type = other DNA
tgactcctgagaattcctga

SEQ ID NO: 28850 - DNA, 20 bp, synthetic construct
  misc_feature 1..20: note = chemically synthesized
  source 1..20: mol_type = other DNA
actcctgagaattcctgaaa

SEQ ID NO: 28851 - DNA, 20 bp, synthetic construct
  misc_feature 1..20: note = chemically synthesized
  source 1..20: mol_type = other DNA
gagaattcctgaaagagata

SEQ ID NO: 28852 - DNA, 20 bp, synthetic construct
  misc_feature 1..20: note = chemically synthesized
  source 1..20: mol_type = other DNA
gaattcctgaaagagatata

SEQ ID NO: 28853 - DNA, 20 bp, synthetic construct
  misc_feature 1..20: note = chemically synthesized
  source 1..20: mol_type = other DNA
ttcctgaaagagatatagag

SEQ ID NO: 28854 - DNA, 20 bp, synthetic construct
  misc_feature 1..20: note = chemically synthesized
  source 1..20: mol_type = other DNA
cctgaaagagatatagagtg

SEQ ID NO: 28855 - DNA, 20 bp, synthetic construct
  misc_feature 1..20: note = chemically synthesized
  source 1..20: mol_type = other DNA
tgaaagagatatagagtgga

SEQ ID NO: 28856 - DNA, 20 bp, synthetic construct
  misc_feature 1..20: note = chemically synthesized
  source 1..20: mol_type = other DNA
gagagaatattaacattcac

SEQ ID NO: 28857 - DNA, 20 bp, synthetic construct
  misc_feature 1..20: note = chemically synthesized
  source 1..20: mol_type = other DNA
ttaacattcactggttgcta

SEQ ID NO: 28858 - DNA, 20 bp, synthetic construct
  misc_feature 1..20: note = chemically synthesized
  source 1..20: mol_type = other DNA
taacattcactggttgctaa

SEQ ID NO: 28859 - DNA, 20 bp, synthetic construct
  misc_feature 1..20: note = chemically synthesized
  source 1..20: mol_type = other DNA
aaaggctcacattaaatatt

SEQ ID NO: 28860 - DNA, 20 bp, synthetic construct
  misc_feature 1..20: note = chemically synthesized
  source 1..20: mol_type = other DNA
aggctcacattaaatattta

SEQ ID NO: 28861 - DNA, 20 bp, synthetic construct
  misc_feature 1..20: note = chemically synthesized
  source 1..20: mol_type = other DNA
tcacattaaatatttagagc

SEQ ID NO: 28862 - DNA, 20 bp, synthetic construct
  misc_feature 1..20: note = chemically synthesized
  source 1..20: mol_type = other DNA
aatatttagagccagtccct

SEQ ID NO: 28863 - DNA, 20 bp, synthetic construct
  misc_feature 1..20: note = chemically synthesized
  source 1..20: mol_type = other DNA
atatttagagccagtccctg

SEQ ID NO: 28864 - DNA, 20 bp, synthetic construct
  misc_feature 1..20: note = chemically synthesized
  source 1..20: mol_type = other DNA
ttagagccagtccctgaggt

SEQ ID NO: 28865 - DNA, 20 bp, synthetic construct
  misc_feature 1..20: note = chemically synthesized
  source 1..20: mol_type = other DNA
catctttatctttaaaaaca

SEQ ID NO: 28866 - DNA, 20 bp, synthetic construct
  misc_feature 1..20: note = chemically synthesized
  source 1..20: mol_type = other DNA
caaagatactaatgtgcaca

SEQ ID NO: 28867 - DNA, 20 bp, synthetic construct
  misc_feature 1..20: note = chemically synthesized
  source 1..20: mol_type = other DNA
aaagatactaatgtgcacaa

SEQ ID NO: 28868 - DNA, 20 bp, synthetic construct
  misc_feature 1..20: note = chemically synthesized
  source 1..20: mol_type = other DNA
tactaatgtgcacaaaggta

SEQ ID NO: 28869 - DNA, 20 bp, synthetic construct
  misc_feature 1..20: note = chemically synthesized
  source 1..20: mol_type = other DNA
gcacaaaggtaaagtacgta

SEQ ID NO: 28870 - DNA, 20 bp, synthetic construct
  misc_feature 1..20: note = chemically synthesized
  source 1..20: mol_type = other DNA
cgtaaagttataccgaacat

SEQ ID NO: 28871 - DNA, 20 bp, synthetic construct
  misc_feature 1..20: note = chemically synthesized
  source 1..20: mol_type = other DNA
gattcacctccaattctgtc

SEQ ID NO: 28872 - DNA, 20 bp, synthetic construct
  misc_feature 1..20: note = chemically synthesized
  source 1..20: mol_type = other DNA
cctccaattctgtccagctc

SEQ ID NO: 28873 - DNA, 20 bp, synthetic construct
  misc_feature 1..20: note = chemically synthesized
  source 1..20: mol_type = other DNA
ctccaattctgtccagctcc

SEQ ID NO: 28874 - DNA, 20 bp, synthetic construct
  misc_feature 1..20: note = chemically synthesized
  source 1..20: mol_type = other DNA
tccaattctgtccagctcca

SEQ ID NO: 28875 - DNA, 20 bp, synthetic construct
  misc_feature 1..20: note = chemically synthesized
  source 1..20: mol_type = other DNA
ccaattctgtccagctccag

SEQ ID NO: 28876 - DNA, 20 bp, synthetic construct
  misc_feature 1..20: note = chemically synthesized
  source 1..20: mol_type = other DNA
tctgtccagctccaggggta

SEQ ID NO: 28877 - DNA, 20 bp, synthetic construct
  misc_feature 1..20: note = chemically synthesized
  source 1..20: mol_type = other DNA
tttgttgtgtcctattatac

SEQ ID NO: 28878 - DNA, 20 bp, synthetic construct
  misc_feature 1..20: note = chemically synthesized
  source 1..20: mol_type = other DNA
ttgttgtgtcctattatact

SEQ ID NO: 28879 - DNA, 20 bp, synthetic construct
  misc_feature 1..20: note = chemically synthesized
  source 1..20: mol_type = other DNA
tgtcctattatactgggcta

SEQ ID NO: 28880 - DNA, 20 bp, synthetic construct
  misc_feature 1..20: note = chemically synthesized
  source 1..20: mol_type = other DNA
gatcccttttgtaacctttc

SEQ ID NO: 28881 - DNA, 20 bp, synthetic construct
  misc_feature 1..20: note = chemically synthesized
  source 1..20: mol_type = other DNA
tgtcaaacaaatcctaaact

SEQ ID NO: 28882 - DNA, 20 bp, synthetic construct
  misc_feature 1..20: note = chemically synthesized
  source 1..20: mol_type = other DNA
gtcaaacaaatcctaaactc

SEQ ID NO: 28883 - DNA, 20 bp, synthetic construct
  misc_feature 1..20: note = chemically synthesized
  source 1..20: mol_type = other DNA
caaacaaatcctaaactcag

SEQ ID NO: 28884 - DNA, 20 bp, synthetic construct
  misc_feature 1..20: note = chemically synthesized
  source 1..20: mol_type = other DNA
caggagaatgattgtgtttt

SEQ ID NO: 28885 - DNA, 20 bp, synthetic construct
  misc_feature 1..20: note = chemically synthesized
  source 1..20: mol_type = other DNA
tgtgttttaagatctctttc

SEQ ID NO: 28886 - DNA, 20 bp, synthetic construct
  misc_feature 1..20: note = chemically synthesized
  source 1..20: mol_type = other DNA
gtgttttaagatctctttca

SEQ ID NO: 28887 - DNA, 20 bp, synthetic construct
  misc_feature 1..20: note = chemically synthesized
  source 1..20: mol_type = other DNA
gttttaagatctctttcaag

SEQ ID NO: 28888 - DNA, 20 bp, synthetic construct
  misc_feature 1..20: note = chemically synthesized
  source 1..20: mol_type = other DNA
aaggagatctgacccttatc

SEQ ID NO: 28889 - DNA, 20 bp, synthetic construct
  misc_feature 1..20: note = chemically synthesized
  source 1..20: mol_type = other DNA
gagatctgacccttatctgg

SEQ ID NO: 28890 - DNA, 20 bp, synthetic construct
  misc_feature 1..20: note = chemically synthesized
  source 1..20: mol_type = other DNA
atctgacccttatctggcgg

SEQ ID NO: 28891 - DNA, 20 bp, synthetic construct
  misc_feature 1..20: note = chemically synthesized
  source 1..20: mol_type = other DNA
ctgacccttatctggcggta

SEQ ID NO: 28892 - DNA, 20 bp, synthetic construct
  misc_feature 1..20: note = chemically synthesized
  source 1..20: mol_type = other DNA
ttatctggcggtagagactc

SEQ ID NO: 28893 - DNA, 20 bp, synthetic construct
  misc_feature 1..20: note = chemically synthesized
  source 1..20: mol_type = other DNA
atctggcggtagagactctg

SEQ ID NO: 28894 - DNA, 20 bp, synthetic construct
  misc_feature 1..20: note = chemically synthesized
  source 1..20: mol_type = other DNA
ggcggtagagactctggaga

SEQ ID NO: 28895 - DNA, 20 bp, synthetic construct
  misc_feature 1..20: note = chemically synthesized
  source 1..20: mol_type = other DNA
agactctggagatggaaact

SEQ ID NO: 28896 - DNA, 20 bp, synthetic construct
  misc_feature 1..20: note = chemically synthesized
  source 1..20: mol_type = other DNA
ctctggagatggaaactgag

SEQ ID NO: 28897 - DNA, 20 bp, synthetic construct
  misc_feature 1..20: note = chemically synthesized
  source 1..20: mol_type = other DNA
tctggagatggaaactgaga

SEQ ID NO: 28898 - DNA, 20 bp, synthetic construct
  misc_feature 1..20: note = chemically synthesized
  source 1..20: mol_type = other DNA
atgcaaaaaaaaaaaaatgc

SEQ ID NO: 28899 - DNA, 20 bp, synthetic construct
  misc_feature 1..20: note = chemically synthesized
  source 1..20: mol_type = other DNA
aaaaaaaaaaaaatgcaaga

SEQ ID NO: 28900 - DNA, 20 bp, synthetic construct
  misc_feature 1..20: note = chemically synthesized
  source 1..20: mol_type = other DNA
aaatgcaagaaagaaaaaaa

SEQ ID NO: 28901 - DNA, 20 bp, synthetic construct
  misc_feature 1..20: note = chemically synthesized
  source 1..20: mol_type = other DNA
aatgcaagaaagaaaaaaaa

SEQ ID NO: 28902 - DNA, 20 bp, synthetic construct
  misc_feature 1..20: note = chemically synthesized
  source 1..20: mol_type = other DNA
gcaagaaagaaaaaaaaagg

SEQ ID NO: 28903 - DNA, 20 bp, synthetic construct
  misc_feature 1..20: note = chemically synthesized
  source 1..20: mol_type = other DNA
aaaaaaaaggaagaaaacaa

SEQ ID NO: 28904 - DNA, 20 bp, synthetic construct
  misc_feature 1..20: note = chemically synthesized
  source 1..20: mol_type = other DNA
aaaaaaggaagaaaacaaaa

SEQ ID NO: 28905 - DNA, 20 bp, synthetic construct
  misc_feature 1..20: note = chemically synthesized
  source 1..20: mol_type = other DNA
gaagaaaacaaaagagacca

SEQ ID NO: 28906 - DNA, 20 bp, synthetic construct
  misc_feature 1..20: note = chemically synthesized
  source 1..20: mol_type = other DNA
aaaacaaaagagaccacaga

SEQ ID NO: 28907 - DNA, 20 bp, synthetic construct
  misc_feature 1..20: note = chemically synthesized
  source 1..20: mol_type = other DNA
aaacaaaagagaccacagac

SEQ ID NO: 28908 - DNA, 20 bp, synthetic construct
  misc_feature 1..20: note = chemically synthesized
  source 1..20: mol_type = other DNA
caaaagagaccacagacagg

SEQ ID NO: 28909 - DNA, 20 bp, synthetic construct
  misc_feature 1..20: note = chemically synthesized
  source 1..20: mol_type = other DNA
aaagagaccacagacaggca

SEQ ID NO: 28910 - DNA, 20 bp, synthetic construct
  misc_feature 1..20: note = chemically synthesized
  source 1..20: mol_type = other DNA
gagaccacagacaggcagag

SEQ ID NO: 28911 - DNA, 20 bp, synthetic construct
  misc_feature 1..20: note = chemically synthesized
  source 1..20: mol_type = other DNA
agaccacagacaggcagaga

SEQ ID NO: 28912 - DNA, 20 bp, synthetic construct
  misc_feature 1..20: note = chemically synthesized
  source 1..20: mol_type = other DNA
ccacagacaggcagagaagg

SEQ ID NO: 28913 - DNA, 20 bp, synthetic construct
  misc_feature 1..20: note = chemically synthesized
  source 1..20: mol_type = other DNA
acagacaggcagagaaggca

SEQ ID NO: 28914 - DNA, 20 bp, synthetic construct
  misc_feature 1..20: note = chemically synthesized
  source 1..20: mol_type = other DNA
cagacaggcagagaaggcag

SEQ ID NO: 28915 - DNA, 20 bp, synthetic construct
  misc_feature 1..20: note = chemically synthesized
  source 1..20: mol_type = other DNA
gacaggcagagaaggcagag

SEQ ID NO: 28916 - DNA, 20 bp, synthetic construct
  misc_feature 1..20: note = chemically synthesized
  source 1..20: mol_type = other DNA
acaggcagagaaggcagagg

SEQ ID NO: 28917 - DNA, 20 bp, synthetic construct
  misc_feature 1..20: note = chemically synthesized
  source 1..20: mol_type = other DNA
aggcagagaaggcagaggag

SEQ ID NO: 28918 - DNA, 20 bp, synthetic construct
  misc_feature 1..20: note = chemically synthesized
  source 1..20: mol_type = other DNA
gcagagaaggcagaggagga

SEQ ID NO: 28919 - DNA, 20 bp, synthetic construct
  misc_feature 1..20: note = chemically synthesized
  source 1..20: mol_type = other DNA
aggcagaggaggagagactc

SEQ ID NO: 28920 - DNA, 20 bp, synthetic construct
  misc_feature 1..20: note = chemically synthesized
  source 1..20: mol_type = other DNA
ggaggagagactctagtttc

SEQ ID NO: 28921 - DNA, 20 bp, synthetic construct
  misc_feature 1..20: note = chemically synthesized
  source 1..20: mol_type = other DNA
gagactctagtttcaagtat

SEQ ID NO: 28922 - DNA, 20 bp, synthetic construct
  misc_feature 1..20: note = chemically synthesized
  source 1..20: mol_type = other DNA
tctagtttcaagtatcagtc

SEQ ID NO: 28923 - DNA, 20 bp, synthetic construct
  misc_feature 1..20: note = chemically synthesized
  source 1..20: mol_type = other DNA
gatttgtttcttccaatatc

SEQ ID NO: 28924 - DNA, 20 bp, synthetic construct
  misc_feature 1..20: note = chemically synthesized
  source 1..20: mol_type = other DNA
cttccaatatccggttattt

SEQ ID NO: 28925 - DNA, 20 bp, synthetic construct
  misc_feature 1..20: note = chemically synthesized
  source 1..20: mol_type = other DNA
ttccaatatccggttatttg

SEQ ID NO: 28926 - DNA, 20 bp, synthetic construct
  misc_feature 1..20: note = chemically synthesized
  source 1..20: mol_type = other DNA
atatccggttatttgaggtg

SEQ ID NO: 28927 - DNA, 20 bp, synthetic construct
  misc_feature 1..20: note = chemically synthesized
  source 1..20: mol_type = other DNA
tccggttatttgaggtgtgg

SEQ ID NO: 28928 - DNA, 20 bp, synthetic construct
  misc_feature 1..20: note = chemically synthesized
  source 1..20: mol_type = other DNA
ccggttatttgaggtgtggc

SEQ ID NO: 28929 - DNA, 20 bp, synthetic construct
  misc_feature 1..20: note = chemically synthesized
  source 1..20: mol_type = other DNA
ttatttgaggtgtggcaggc

SEQ ID NO: 28930 - DNA, 20 bp, synthetic construct
  misc_feature 1..20: note = chemically synthesized
  source 1..20: mol_type = other DNA
gaggtgtggcaggcaagata

SEQ ID NO: 28931 - DNA, 20 bp, synthetic construct
  misc_feature 1..20: note = chemically synthesized
  source 1..20: mol_type = other DNA
aggtgtggcaggcaagatac

SEQ ID NO: 28932 - DNA, 20 bp, synthetic construct
  misc_feature 1..20: note = chemically synthesized
  source 1..20: mol_type = other DNA
ggtgtggcaggcaagataca

SEQ ID NO: 28933 - DNA, 20 bp, synthetic construct
  misc_feature 1..20: note = chemically synthesized
  source 1..20: mol_type = other DNA
ggcaggcaagatacagggtg

SEQ ID NO: 28934 - DNA, 20 bp, synthetic construct
  misc_feature 1..20: note = chemically synthesized
  source 1..20: mol_type = other DNA
aggcaagatacagggtgcag

SEQ ID NO: 28935 - DNA, 20 bp, synthetic construct
  misc_feature 1..20: note = chemically synthesized
  source 1..20: mol_type = other DNA
ggcaagatacagggtgcagt

SEQ ID NO: 28936 - DNA, 20 bp, synthetic construct
  misc_feature 1..20: note = chemically synthesized
  source 1..20: mol_type = other DNA
atacagggtgcagtgggatc

SEQ ID NO: 28937 - DNA, 20 bp, synthetic construct
  misc_feature 1..20: note = chemically synthesized
  source 1..20: mol_type = other DNA
tacagggtgcagtgggatca

SEQ ID NO: 28938 - DNA, 20 bp, synthetic construct
  misc_feature 1..20: note = chemically synthesized
  source 1..20: mol_type = other DNA
gtgcagtgggatcaaggatt

SEQ ID NO: 28939 - DNA, 20 bp, synthetic construct
  misc_feature 1..20: note = chemically synthesized
  source 1..20: mol_type = other DNA
agtgggatcaaggattcagt

SEQ ID NO: 28940 - DNA, 20 bp, synthetic construct
  misc_feature 1..20: note = chemically synthesized
  source 1..20: mol_type = other DNA
gtgggatcaaggattcagta

SEQ ID NO: 28941 - DNA, 20 bp, synthetic construct
  misc_feature 1..20: note = chemically synthesized
  source 1..20: mol_type = other DNA
ggatcaaggattcagtaagg

SEQ ID NO: 28942 - DNA, 20 bp, synthetic construct
  misc_feature 1..20: note = chemically synthesized
  source 1..20: mol_type = other DNA
ggattcagtaaggcagcaca

SEQ ID NO: 28943 - DNA, 20 bp, synthetic construct
  misc_feature 1..20: note = chemically synthesized
  source 1..20: mol_type = other DNA
gattcagtaaggcagcacac

SEQ ID NO: 28944 - DNA, 20 bp, synthetic construct
  misc_feature 1..20: note = chemically synthesized
  source 1..20: mol_type = other DNA
tcagtaaggcagcacacggg

SEQ ID NO: 28945 - DNA, 20 bp, synthetic construct
  misc_feature 1..20: note = chemically synthesized
  source 1..20: mol_type = other DNA
aaggcagcacacgggaagaa

SEQ ID NO: 28946 - DNA, 20 bp, synthetic construct
  misc_feature 1..20: note = chemically synthesized
  source 1..20: mol_type = other DNA
ggaagaacagctgctcaatc

SEQ ID NO: 28947 - DNA, 20 bp, synthetic construct
  misc_feature 1..20: note = chemically synthesized
  source 1..20: mol_type = other DNA
aagaacagctgctcaatcca

SEQ ID NO: 28948 - DNA, 20 bp, synthetic construct
  misc_feature 1..20: note = chemically synthesized
  source 1..20: mol_type = other DNA
agaacagctgctcaatccag

SEQ ID NO: 28949 - DNA, 20 bp, synthetic construct
  misc_feature 1..20: note = chemically synthesized
  source 1..20: mol_type = other DNA
acagctgctcaatccagagg

SEQ ID NO: 28950 - DNA, 20 bp, synthetic construct
  misc_feature 1..20: note = chemically synthesized
  source 1..20: mol_type = other DNA
tattgatctgcctctggatt

SEQ ID NO: 28951 - DNA, 20 bp, synthetic construct
  misc_feature 1..20: note = chemically synthesized
  source 1..20: mol_type = other DNA
tgatctgcctctggattgag

SEQ ID NO: 28952 - DNA, 20 bp, synthetic construct
  misc_feature 1..20: note = chemically synthesized
  source 1..20: mol_type = other DNA
cctgccacacctcaaataac

SEQ ID NO: 28953 - DNA, 20 bp, synthetic construct
  misc_feature 1..20: note = chemically synthesized
  source 1..20: mol_type = other DNA
cacctcaaataaccggatat

SEQ ID NO: 28954 - DNA, 20 bp, synthetic construct
  misc_feature 1..20: note = chemically synthesized
  source 1..20: mol_type = other DNA
ctcaaataaccggatattgg

SEQ ID NO: 28955 - DNA, 20 bp, synthetic construct
  misc_feature 1..20: note = chemically synthesized
  source 1..20: mol_type = other DNA
tcttgactgatacttgaaac

SEQ ID NO: 28956 - DNA, 20 bp, synthetic construct
  misc_feature 1..20: note = chemically synthesized
  source 1..20: mol_type = other DNA
ttgactgatacttgaaacta

SEQ ID NO: 28957 - DNA, 20 bp, synthetic construct
  misc_feature 1..20: note = chemically synthesized
  source 1..20: mol_type = other DNA
ctgccttctctgcctgtctg

SEQ ID NO: 28958 - DNA, 20 bp, synthetic construct
  misc_feature 1..20: note = chemically synthesized
  source 1..20: mol_type = other DNA
ttttttttttgcatccttct

SEQ ID NO: 28959 - DNA, 20 bp, synthetic construct
  misc_feature 1..20: note = chemically synthesized
  source 1..20: mol_type = other DNA
tccttctcagtttccatctc

SEQ ID NO: 28960 - DNA, 20 bp, synthetic construct
  misc_feature 1..20: note = chemically synthesized
  source 1..20: mol_type = other DNA
cttctcagtttccatctcca

SEQ ID NO: 28961 - DNA, 20 bp, synthetic construct
  misc_feature 1..20: note = chemically synthesized
  source 1..20: mol_type = other DNA
atctccagagtctctaccgc

SEQ ID NO: 28962 - DNA, 20 bp, synthetic construct
  misc_feature 1..20: note = chemically synthesized
  source 1..20: mol_type = other DNA
cagagtctctaccgccagat

SEQ ID NO: 28963 - DNA, 20 bp, synthetic construct
  misc_feature 1..20: note = chemically synthesized
  source 1..20: mol_type = other DNA
agagtctctaccgccagata

SEQ ID NO: 28964 - DNA, 20 bp, synthetic construct
  misc_feature 1..20: note = chemically synthesized
  source 1..20: mol_type = other DNA
gagtctctaccgccagataa

SEQ ID NO: 28965 - DNA, 20 bp, synthetic construct
  misc_feature 1..20: note = chemically synthesized
  source 1..20: mol_type = other DNA
ctctaccgccagataagggt

SEQ ID NO: 28966 - DNA, 20 bp, synthetic construct
  misc_feature 1..20: note = chemically synthesized
  source 1..20: mol_type = other DNA
taagggtcagatctccttga

SEQ ID NO: 28967 - DNA, 20 bp, synthetic construct
  misc_feature 1..20: note = chemically synthesized
  source 1..20: mol_type = other DNA
agggtcagatctccttgaaa

SEQ ID NO: 28968 - DNA, 20 bp, synthetic construct
  misc_feature 1..20: note = chemically synthesized
  source 1..20: mol_type = other DNA
taaaacacaatcattctcct

SEQ ID NO: 28969 - DNA, 20 bp, synthetic construct
  misc_feature 1..20: note = chemically synthesized
  source 1..20: mol_type = other DNA
cacaatcattctcctgagtt

SEQ ID NO: 28970 - DNA, 20 bp, synthetic construct
  misc_feature 1..20: note = chemically synthesized
  source 1..20: mol_type = other DNA
acaatcattctcctgagttt

SEQ ID NO: 28971 - DNA, 20 bp, synthetic construct
  misc_feature 1..20: note = chemically synthesized
  source 1..20: mol_type = other DNA
gagtttaggatttgtttgac

SEQ ID NO: 28972 - DNA, 20 bp, synthetic construct
  misc_feature 1..20: note = chemically synthesized
  source 1..20: mol_type = other DNA
gtttaggatttgtttgacaa

SEQ ID NO: 28973 - DNA, 20 bp, synthetic construct
  misc_feature 1..20: note = chemically synthesized
  source 1..20: mol_type = other DNA
tttgtttgacaagagcattt

SEQ ID NO: 28974 - DNA, 20 bp, synthetic construct
  misc_feature 1..20: note = chemically synthesized
  source 1..20: mol_type = other DNA
acaagagcattttagcttga

SEQ ID NO: 28975 - DNA, 20 bp, synthetic construct
  misc_feature 1..20: note = chemically synthesized
  source 1..20: mol_type = other DNA
caagagcattttagcttgaa

SEQ ID NO: 28976 - DNA, 20 bp, synthetic construct
  misc_feature 1..20: note = chemically synthesized
  source 1..20: mol_type = other DNA
tttagcttgaaaggttacaa

SEQ ID NO: 28977 - DNA, 20 bp, synthetic construct
  misc_feature 1..20: note = chemically synthesized
  source 1..20: mol_type = other DNA
ttagcttgaaaggttacaaa

SEQ ID NO: 28978 - DNA, 20 bp, synthetic construct
  misc_feature 1..20: note = chemically synthesized
  source 1..20: mol_type = other DNA
tagcttgaaaggttacaaaa

SEQ ID NO: 28979 - DNA, 20 bp, synthetic construct
  misc_feature 1..20: note = chemically synthesized
  source 1..20: mol_type = other DNA
aggttacaaaagggatcatg

SEQ ID NO: 28980 - DNA, 20 bp, synthetic construct
  misc_feature 1..20: note = chemically synthesized
  source 1..20: mol_type = other DNA
aaaagggatcatgtagtcta

SEQ ID NO: 28981 - DNA, 20 bp, synthetic construct
  misc_feature 1..20: note = chemically synthesized
  source 1..20: mol_type = other DNA
ggatcatgtagtctatagcc

SEQ ID NO: 28982 - DNA, 20 bp, synthetic construct
  misc_feature 1..20: note = chemically synthesized
  source 1..20: mol_type = other DNA
tagtctatagcccagtataa

SEQ ID NO: 28983 - DNA, 20 bp, synthetic construct
  misc_feature 1..20: note = chemically synthesized
  source 1..20: mol_type = other DNA
agtctatagcccagtataat

SEQ ID NO: 28984 - DNA, 20 bp, synthetic construct
  misc_feature 1..20: note = chemically synthesized
  source 1..20: mol_type = other DNA
tataataggacacaacaaat

SEQ ID NO: 28985 - DNA, 20 bp, synthetic construct
  misc_feature 1..20: note = chemically synthesized
  source 1..20: mol_type = other DNA
gacacaacaaatcagaaaaa

SEQ ID NO: 28986 - DNA, 20 bp, synthetic construct
  misc_feature 1..20: note = chemically synthesized
  source 1..20: mol_type = other DNA
acaacaaatcagaaaaaaag

SEQ ID NO: 28987 - DNA, 20 bp, synthetic construct
  misc_feature 1..20: note = chemically synthesized
  source 1..20: mol_type = other DNA
atcagaaaaaaagtagaatg

SEQ ID NO: 28988 - DNA, 20 bp, synthetic construct
  misc_feature 1..20: note = chemically synthesized
  source 1..20: mol_type = other DNA
tcagaaaaaaagtagaatgt

SEQ ID NO: 28989 - DNA, 20 bp, synthetic construct
  misc_feature 1..20: note = chemically synthesized
  source 1..20: mol_type = other DNA
aaaaaaagtagaatgtggga

SEQ ID NO: 28990 - DNA, 20 bp, synthetic construct
  misc_feature 1..20: note = chemically synthesized
  source 1..20: mol_type = other DNA
gacagtgatgactgtacccc

SEQ ID NO: 28991 - DNA, 20 bp, synthetic construct
  misc_feature 1..20: note = chemically synthesized
  source 1..20: mol_type = other DNA
cagtgatgactgtacccctg

SEQ ID NO: 28992 - DNA, 20 bp, synthetic construct
  misc_feature 1..20: note = chemically synthesized
  source 1..20: mol_type = other DNA
gatgactgtacccctggagc

SEQ ID NO: 28993 - DNA, 20 bp, synthetic construct
  misc_feature 1..20: note = chemically synthesized
  source 1..20: mol_type = other DNA
actgtacccctggagctgga

SEQ ID NO: 28994 - DNA, 20 bp, synthetic construct
  misc_feature 1..20: note = chemically synthesized
  source 1..20: mol_type = other DNA
cccctggagctggacagaat

SEQ ID NO: 28995 - DNA, 20 bp, synthetic construct
  misc_feature 1..20: note = chemically synthesized
  source 1..20: mol_type = other DNA
cctggagctggacagaattg

SEQ ID NO: 28996 - DNA, 20 bp, synthetic construct
  misc_feature 1..20: note = chemically synthesized
  source 1..20: mol_type = other DNA
ctggagctggacagaattgg

SEQ ID NO: 28997 - DNA, 20 bp, synthetic construct
  misc_feature 1..20: note = chemically synthesized
  source 1..20: mol_type = other DNA
ttggaggtgaatcttatgtt

SEQ ID NO: 28998 - DNA, 20 bp, synthetic construct
  misc_feature 1..20: note = chemically synthesized
  source 1..20: mol_type = other DNA
tactttacctttgtgcacat

SEQ ID NO: 28999 - DNA, 20 bp, synthetic construct
  misc_feature 1..20: note = chemically synthesized
  source 1..20: mol_type = other DNA
cattagtatctttgttttta

SEQ ID NO: 29000 - DNA, 20 bp, synthetic construct
  misc_feature 1..20: note = chemically synthesized
  source 1..20: mol_type = other DNA
tatctttgtttttaaagata

SEQ ID NO: 29001 - DNA, 20 bp, synthetic construct
  misc_feature 1..20: note = chemically synthesized
  source 1..20: mol_type = other DNA
aaagatgttaatacttacct

SEQ ID NO: 29002 - DNA, 20 bp, synthetic construct
  misc_feature 1..20: note = chemically synthesized
  source 1..20: mol_type = other DNA
aagatgttaatacttacctc

SEQ ID NO: 29003 - DNA, 20 bp, synthetic construct
  misc_feature 1..20: note = chemically synthesized
  source 1..20: mol_type = other DNA
agatgttaatacttacctca

SEQ ID NO: 29004 - DNA, 20 bp, synthetic construct
  misc_feature 1..20: note = chemically synthesized
  source 1..20: mol_type = other DNA
ttaatacttacctcagggac

SEQ ID NO: 29005 - DNA, 20 bp, synthetic construct
  misc_feature 1..20: note = chemically synthesized
  source 1..20: mol_type = other DNA
tggctctaaatatttaatgt

SEQ ID NO: 29006 - DNA, 20 bp, synthetic construct
  misc_feature 1..20: note = chemically synthesized
  source 1..20: mol_type = other DNA
aaatatttaatgtgagcctt

SEQ ID NO: 29007 - DNA, 20 bp, synthetic construct
  misc_feature 1..20: note = chemically synthesized
  source 1..20: mol_type = other DNA
taatgtgagcctttagcaac

SEQ ID NO: 29008 - DNA, 20 bp, synthetic construct
  misc_feature 1..20: note = chemically synthesized
  source 1..20: mol_type = other DNA
tctccactctatatctcttt

SEQ ID NO: 29009 - DNA, 20 bp, synthetic construct
  misc_feature 1..20: note = chemically synthesized
  source 1..20: mol_type = other DNA
ctccactctatatctctttc

SEQ ID NO: 29010 - DNA, 20 bp, synthetic construct
  misc_feature 1..20: note = chemically synthesized
  source 1..20: mol_type = other DNA
atatctctttcaggaattct

SEQ ID NO: 29011 - DNA, 20 bp, synthetic construct
  misc_feature 1..20: note = chemically synthesized
  source 1..20: mol_type = other DNA
tatctctttcaggaattctc

SEQ ID NO: 29012 - DNA, 20 bp, synthetic construct
  misc_feature 1..20: note = chemically synthesized
  source 1..20: mol_type = other DNA
tctctttcaggaattctcag

SEQ ID NO: 29013 - DNA, 20 bp, synthetic construct
  misc_feature 1..20: note = chemically synthesized
  source 1..20: mol_type = other DNA
gaattctcaggagtcaatca

SEQ ID NO: 29014 - DNA, 20 bp, synthetic construct
  misc_feature 1..20: note = chemically synthesized
  source 1..20: mol_type = other DNA
tctcaggagtcaatcacagt

SEQ ID NO: 29015 - DNA, 20 bp, synthetic construct
  misc_feature 1..20: note = chemically synthesized
  source 1..20: mol_type = other DNA
taattgtctttccttgttat

SEQ ID NO: 29016 - DNA, 20 bp, synthetic construct
  misc_feature 1..20: note = chemically synthesized
  source 1..20: mol_type = other DNA
gttattggctcactgatact

SEQ ID NO: 29017 - DNA, 20 bp, synthetic construct
  misc_feature 1..20: note = chemically synthesized
  source 1..20: mol_type = other DNA
gatactcagaccacatctgt

SEQ ID NO: 29018 - DNA, 20 bp, synthetic construct
  misc_feature 1..20: note = chemically synthesized
  source 1..20: mol_type = other DNA
atactcagaccacatctgtg

SEQ ID NO: 29019 - DNA, 20 bp, synthetic construct
  misc_feature 1..20: note = chemically synthesized
  source 1..20: mol_type = other DNA
accacatctgtgaggtaaac

SEQ ID NO: 29020 - DNA, 20 bp, synthetic construct
  misc_feature 1..20: note = chemically synthesized
  source 1..20: mol_type = other DNA
ccacatctgtgaggtaaaca

SEQ ID NO: 29021 - DNA, 20 bp, synthetic construct
  misc_feature 1..20: note = chemically synthesized
  source 1..20: mol_type = other DNA
acatctgtgaggtaaacaag

SEQ ID NO: 29022 - DNA, 20 bp, synthetic construct
  misc_feature 1..20: note = chemically synthesized
  source 1..20: mol_type = other DNA
tgtgaggtaaacaaggagac

SEQ ID NO: 29023 - DNA, 20 bp, synthetic construct
  misc_feature 1..20: note = chemically synthesized
  source 1..20: mol_type = other DNA
gacaagaatttcccacttaa

SEQ ID NO: 29024 - DNA, 20 bp, synthetic construct
  misc_feature 1..20: note = chemically synthesized
  source 1..20: mol_type = other DNA
gaatttcccacttaatagat

SEQ ID NO: 29025 - DNA, 20 bp, synthetic construct
  misc_feature 1..20: note = chemically synthesized
  source 1..20: mol_type = other DNA
taatagatgagcatataaac

SEQ ID NO: 29026 - DNA, 20 bp, synthetic construct
  misc_feature 1..20: note = chemically synthesized
  source 1..20: mol_type = other DNA
tgagcatataaaccagacat

SEQ ID NO: 29027 - DNA, 20 bp, synthetic construct
  misc_feature 1..20: note = chemically synthesized
  source 1..20: mol_type = other DNA
accagacataagcattttgt

SEQ ID NO: 29028 - DNA, 20 bp, synthetic construct
  misc_feature 1..20: note = chemically synthesized
  source 1..20: mol_type = other DNA
aagcattttgtgagtaaccc

SEQ ID NO: 29029 - DNA, 20 bp, synthetic construct
  misc_feature 1..20: note = chemically synthesized
  source 1..20: mol_type = other DNA
agtaacccaagataatatga

SEQ ID NO: 29030 - DNA, 20 bp, synthetic construct
  misc_feature 1..20: note = chemically synthesized
  source 1..20: mol_type = other DNA
tatgatggcaaaactatttc

SEQ ID NO: 29031 - DNA, 20 bp, synthetic construct
  misc_feature 1..20: note = chemically synthesized
  source 1..20: mol_type = other DNA
caagaattcatgatgtgctc

SEQ ID NO: 29032 - DNA, 20 bp, synthetic construct
  misc_feature 1..20: note = chemically synthesized
  source 1..20: mol_type = other DNA
ttttccatctgccaccaatt

SEQ ID NO: 29033 - DNA, 20 bp, synthetic construct
  misc_feature 1..20: note = chemically synthesized
  source 1..20: mol_type = other DNA
tttccatctgccaccaattt

SEQ ID NO: 29034 - DNA, 20 bp, synthetic construct
  misc_feature 1..20: note = chemically synthesized
  source 1..20: mol_type = other DNA
tgtgattcctctccttctgc

SEQ ID NO: 29035 - DNA, 20 bp, synthetic construct
  misc_feature 1..20: note = chemically synthesized
  source 1..20: mol_type = other DNA
attcctctccttctgccaga

SEQ ID NO: 29036 - DNA, 20 bp, synthetic construct
  misc_feature 1..20: note = chemically synthesized
  source 1..20: mol_type = other DNA
ttcctctccttctgccagac

SEQ ID NO: 29037 - DNA, 20 bp, synthetic construct
  misc_feature 1..20: note = chemically synthesized
  source 1..20: mol_type = other DNA
tccttctgccagacaggttc

SEQ ID NO: 29038 - DNA, 20 bp, synthetic construct
  misc_feature 1..20: note = chemically synthesized
  source 1..20: mol_type = other DNA
ttctgccagacaggttcaag

SEQ ID NO: 29039 - DNA, 20 bp, synthetic construct
  misc_feature 1..20: note = chemically synthesized
  source 1..20: mol_type = other DNA
gccagacaggttcaagaagc

SEQ ID NO: 29040 - DNA, 20 bp, synthetic construct
  misc_feature 1..20: note = chemically synthesized
  source 1..20: mol_type = other DNA
ccagacaggttcaagaagct

SEQ ID NO: 29041 - DNA, 20 bp, synthetic construct
  misc_feature 1..20: note = chemically synthesized
  source 1..20: mol_type = other DNA
cagacaggttcaagaagcta

SEQ ID NO: 29042 - DNA, 20 bp, synthetic construct
  misc_feature 1..20: note = chemically synthesized
  source 1..20: mol_type = other DNA
gacaggttcaagaagctagg

SEQ ID NO: 29043 - DNA, 20 bp, synthetic construct
  misc_feature 1..20: note = chemically synthesized
  source 1..20: mol_type = other DNA
acaggttcaagaagctaggg

SEQ ID NO: 29044 - DNA, 20 bp, synthetic construct
  misc_feature 1..20: note = chemically synthesized
  source 1..20: mol_type = other DNA
tagggaggtgactactgtct

SEQ ID NO: 29045 - DNA, 20 bp, synthetic construct
  misc_feature 1..20: note = chemically synthesized
  source 1..20: mol_type = other DNA
agggaggtgactactgtctt

SEQ ID NO: 29046 - DNA, 20 bp, synthetic construct
  misc_feature 1..20: note = chemically synthesized
  source 1..20: mol_type = other DNA
actgtcttaggaaaaatgct

SEQ ID NO: 29047 - DNA, 20 bp, synthetic construct
  misc_feature 1..20: note = chemically synthesized
  source 1..20: mol_type = other DNA
ctgtcttaggaaaaatgcta

SEQ ID NO: 29048 - DNA, 20 bp, synthetic construct
  misc_feature 1..20: note = chemically synthesized
  source 1..20: mol_type = other DNA
tgtcttaggaaaaatgctaa

SEQ ID NO: 29049 - DNA, 20 bp, synthetic construct
  misc_feature 1..20: note = chemically synthesized
  source 1..20: mol_type = other DNA
aagggcttcacactgtgaca

SEQ ID NO: 29050 - DNA, 20 bp, synthetic construct
  misc_feature 1..20: note = chemically synthesized
  source 1..20: mol_type = other DNA
agggcttcacactgtgacat

SEQ ID NO: 29051 - DNA, 20 bp, synthetic construct
  misc_feature 1..20: note = chemically synthesized
  source 1..20: mol_type = other DNA
gggcttcacactgtgacatg

SEQ ID NO: 29052 - DNA, 20 bp, synthetic construct
  misc_feature 1..20: note = chemically synthesized
  source 1..20: mol_type = other DNA
ttcacactgtgacatggggt

SEQ ID NO: 29053 - DNA, 20 bp, synthetic construct
  misc_feature 1..20: note = chemically synthesized
  source 1..20: mol_type = other DNA
tcacactgtgacatggggtt

SEQ ID NO: 29054 - DNA, 20 bp, synthetic construct
  misc_feature 1..20: note = chemically synthesized
  source 1..20: mol_type = other DNA
acactgtgacatggggttgg

SEQ ID NO: 29055 - DNA, 20 bp, synthetic construct
  misc_feature 1..20: note = chemically synthesized
  source 1..20: mol_type = other DNA
gggagtcctgaatgctgctt

SEQ ID NO: 29056 - DNA, 20 bp, synthetic construct
  misc_feature 1..20: note = chemically synthesized
  source 1..20: mol_type = other DNA
agtcctgaatgctgcttcag

SEQ ID NO: 29057 - DNA, 20 bp, synthetic construct
  misc_feature 1..20: note = chemically synthesized
  source 1..20: mol_type = other DNA
gtcctgaatgctgcttcaga

SEQ ID NO: 29058 - DNA, 20 bp, synthetic construct
  misc_feature 1..20: note = chemically synthesized
  source 1..20: mol_type = other DNA
ctgaatgctgcttcagaagg

SEQ ID NO: 29059 - DNA, 20 bp, synthetic construct
  misc_feature 1..20: note = chemically synthesized
  source 1..20: mol_type = other DNA
tgaatgctgcttcagaaggc

SEQ ID NO: 29060 - DNA, 20 bp, synthetic construct
  misc_feature 1..20: note = chemically synthesized
  source 1..20: mol_type = other DNA
gaatgctgcttcagaaggca

SEQ ID NO: 29061 - DNA, 20 bp, synthetic construct
  misc_feature 1..20: note = chemically synthesized
  source 1..20: mol_type = other DNA
ctgcttcagaaggcagggct

SEQ ID NO: 29062 - DNA, 20 bp, synthetic construct
  misc_feature 1..20: note = chemically synthesized
  source 1..20: mol_type = other DNA
tgcttcagaaggcagggctt

SEQ ID NO: 29063 - DNA, 20 bp, synthetic construct
  misc_feature 1..20: note = chemically synthesized
  source 1..20: mol_type = other DNA
gcttcagaaggcagggcttg

SEQ ID NO: 29064 - DNA, 20 bp, synthetic construct
  misc_feature 1..20: note = chemically synthesized
  source 1..20: mol_type = other DNA
gcagggcttggggattgtat

SEQ ID NO: 29065 - DNA, 20 bp, synthetic construct
  misc_feature 1..20: note = chemically synthesized
  source 1..20: mol_type = other DNA
ttcattctcacactgctcta

SEQ ID NO: 29066 - DNA, 20 bp, synthetic construct
  misc_feature 1..20: note = chemically synthesized
  source 1..20: mol_type = other DNA
ctgctctaaagatactacct

SEQ ID NO: 29067 - DNA, 20 bp, synthetic construct
  misc_feature 1..20: note = chemically synthesized
  source 1..20: mol_type = other DNA
ctaaagatactacctgagac

SEQ ID NO: 29068 - DNA, 20 bp, synthetic construct
  misc_feature 1..20: note = chemically synthesized
  source 1..20: mol_type = other DNA
taaagatactacctgagact

SEQ ID NO: 29069 - DNA, 20 bp, synthetic construct
  misc_feature 1..20: note = chemically synthesized
  source 1..20: mol_type = other DNA
gactgggtaatttattaaca

SEQ ID NO: 29070 - DNA, 20 bp, synthetic construct
  misc_feature 1..20: note = chemically synthesized
  source 1..20: mol_type = other DNA
actgggtaatttattaacaa

SEQ ID NO: 29071 - DNA, 20 bp, synthetic construct
  misc_feature 1..20: note = chemically synthesized
  source 1..20: mol_type = other DNA
tgggtaatttattaacaaag

SEQ ID NO: 29072 - DNA, 20 bp, synthetic construct
  misc_feature 1..20: note = chemically synthesized
  source 1..20: mol_type = other DNA
gggtaatttattaacaaagg

SEQ ID NO: 29073 - DNA, 20 bp, synthetic construct
  misc_feature 1..20: note = chemically synthesized
  source 1..20: mol_type = other DNA
aattgactcacatttccaca

SEQ ID NO: 29074 - DNA, 20 bp, synthetic construct
  misc_feature 1..20: note = chemically synthesized
  source 1..20: mol_type = other DNA
gactcacatttccacatagc

SEQ ID NO: 29075 - DNA, 20 bp, synthetic construct
  misc_feature 1..20: note = chemically synthesized
  source 1..20: mol_type = other DNA
actcacatttccacatagct

SEQ ID NO: 29076 - DNA, 20 bp, synthetic construct
  misc_feature 1..20: note = chemically synthesized
  source 1..20: mol_type = other DNA
ctcacatttccacatagctg

SEQ ID NO: 29077 - DNA, 20 bp, synthetic construct
  misc_feature 1..20: note = chemically synthesized
  source 1..20: mol_type = other DNA
cacatttccacatagctggg

SEQ ID NO: 29078 - DNA, 20 bp, synthetic construct
  misc_feature 1..20: note = chemically synthesized
  source 1..20: mol_type = other DNA
acatttccacatagctgggg

SEQ ID NO: 29079 - DNA, 20 bp, synthetic construct
  misc_feature 1..20: note = chemically synthesized
  source 1..20: mol_type = other DNA
ccacatagctggggaggcct

SEQ ID NO: 29080 - DNA, 20 bp, synthetic construct
  misc_feature 1..20: note = chemically synthesized
  source 1..20: mol_type = other DNA
cacatagctggggaggcctc

SEQ ID NO: 29081 - DNA, 20 bp, synthetic construct
  misc_feature 1..20: note = chemically synthesized
  source 1..20: mol_type = other DNA
cctcaggaaacttacaatta

SEQ ID NO: 29082 - DNA, 20 bp, synthetic construct
  misc_feature 1..20: note = chemically synthesized
  source 1..20: mol_type = other DNA
caggaaacttacaattatgg

SEQ ID NO: 29083 - DNA, 20 bp, synthetic construct
  misc_feature 1..20: note = chemically synthesized
  source 1..20: mol_type = other DNA
gaaacttacaattatggcag

SEQ ID NO: 29084 - DNA, 20 bp, synthetic construct
  misc_feature 1..20: note = chemically synthesized
  source 1..20: mol_type = other DNA
aaacttacaattatggcaga

SEQ ID NO: 29085 - DNA, 20 bp, synthetic construct
  misc_feature 1..20: note = chemically synthesized
  source 1..20: mol_type = other DNA
acttacaattatggcagaag

SEQ ID NO: 29086 - DNA, 20 bp, synthetic construct
  misc_feature 1..20: note = chemically synthesized
  source 1..20: mol_type = other DNA
tacaattatggcagaaggag

SEQ ID NO: 29087 - DNA, 20 bp, synthetic construct
  misc_feature 1..20: note = chemically synthesized
  source 1..20: mol_type = other DNA
aattatggcagaaggagaag

SEQ ID NO: 29088 - DNA, 20 bp, synthetic construct
  misc_feature 1..20: note = chemically synthesized
  source 1..20: mol_type = other DNA
attatggcagaaggagaagc

SEQ ID NO: 29089 - DNA, 20 bp, synthetic construct
  misc_feature 1..20: note = chemically synthesized
  source 1..20: mol_type = other DNA
agaagcaggcacatcttact

SEQ ID NO: 29090 - DNA, 20 bp, synthetic construct
  misc_feature 1..20: note = chemically synthesized
  source 1..20: mol_type = other DNA
agcaggcacatcttacttgg

SEQ ID NO: 29091 - DNA, 20 bp, synthetic construct
  misc_feature 1..20: note = chemically synthesized
  source 1..20: mol_type = other DNA
aggcacatcttacttggtgg

SEQ ID NO: 29092 - DNA, 20 bp, synthetic construct
  misc_feature 1..20: note = chemically synthesized
  source 1..20: mol_type = other DNA
ggcacatcttacttggtggc

SEQ ID NO: 29093 - DNA, 20 bp, synthetic construct
  misc_feature 1..20: note = chemically synthesized
  source 1..20: mol_type = other DNA
catcttacttggtggcaggc

SEQ ID NO: 29094 - DNA, 20 bp, synthetic construct
  misc_feature 1..20: note = chemically synthesized
  source 1..20: mol_type = other DNA
tcttacttggtggcaggcaa

SEQ ID NO: 29095 - DNA, 20 bp, synthetic construct
  misc_feature 1..20: note = chemically synthesized
  source 1..20: mol_type = other DNA
ttacttggtggcaggcaaga

SEQ ID NO: 29096 - DNA, 20 bp, synthetic construct
  misc_feature 1..20: note = chemically synthesized
  source 1..20: mol_type = other DNA
acttggtggcaggcaagaga

SEQ ID NO: 29097 - DNA, 20 bp, synthetic construct
  misc_feature 1..20: note = chemically synthesized
  source 1..20: mol_type = other DNA
ggtggcaggcaagagagagt

SEQ ID NO: 29098 - DNA, 20 bp, synthetic construct
  misc_feature 1..20: note = chemically synthesized
  source 1..20: mol_type = other DNA
gcaggcaagagagagtgagc

SEQ ID NO: 29099 - DNA, 20 bp, synthetic construct
  misc_feature 1..20: note = chemically synthesized
  source 1..20: mol_type = other DNA
ggcaagagagagtgagcaag

SEQ ID NO: 29100 - DNA, 20 bp, synthetic construct
  misc_feature 1..20: note = chemically synthesized
  source 1..20: mol_type = other DNA
caagagagagtgagcaagaa

SEQ ID NO: 29101 - DNA, 20 bp, synthetic construct
  misc_feature 1..20: note = chemically synthesized
  source 1..20: mol_type = other DNA
aagagagagtgagcaagaag

SEQ ID NO: 29102 - DNA, 20 bp, synthetic construct
  misc_feature 1..20: note = chemically synthesized
  source 1..20: mol_type = other DNA
agagagagtgagcaagaaga

SEQ ID NO: 29103 - DNA, 20 bp, synthetic construct
  misc_feature 1..20: note = chemically synthesized
  source 1..20: mol_type = other DNA
aaactgccttataaaaccat

SEQ ID NO: 29104 - DNA, 20 bp, synthetic construct
  misc_feature 1..20: note = chemically synthesized
  source 1..20: mol_type = other DNA
agatctcatgaaaactcact

SEQ ID NO: 29105 - DNA, 20 bp, synthetic construct
  misc_feature 1..20: note = chemically synthesized
  source 1..20: mol_type = other DNA
gaaaactcactcagtatcac

SEQ ID NO: 29106 - DNA, 20 bp, synthetic construct
  misc_feature 1..20: note = chemically synthesized
  source 1..20: mol_type = other DNA
tcagtatcacgagaactgca

SEQ ID NO: 29107 - DNA, 20 bp, synthetic construct
  misc_feature 1..20: note = chemically synthesized
  source 1..20: mol_type = other DNA
cagtatcacgagaactgcat

SEQ ID NO: 29108 - DNA, 20 bp, synthetic construct
  misc_feature 1..20: note = chemically synthesized
  source 1..20: mol_type = other DNA
agtatcacgagaactgcatg

SEQ ID NO: 29109 - DNA, 20 bp, synthetic construct
  misc_feature 1..20: note = chemically synthesized
  source 1..20: mol_type = other DNA
gtatcacgagaactgcatgg

SEQ ID NO: 29110 - DNA, 20 bp, synthetic construct
  misc_feature 1..20: note = chemically synthesized
  source 1..20: mol_type = other DNA
tgatccaataatctcccacc

SEQ ID NO: 29111 - DNA, 20 bp, synthetic construct
  misc_feature 1..20: note = chemically synthesized
  source 1..20: mol_type = other DNA
ctggtccctcccccgacata

SEQ ID NO: 29112 - DNA, 20 bp, synthetic construct
  misc_feature 1..20: note = chemically synthesized
  source 1..20: mol_type = other DNA
tggtccctcccccgacatat

SEQ ID NO: 29113 - DNA, 20 bp, synthetic construct
  misc_feature 1..20: note = chemically synthesized
  source 1..20: mol_type = other DNA
ggtccctcccccgacatata

SEQ ID NO: 29114 - DNA, 20 bp, synthetic construct
  misc_feature 1..20: note = chemically synthesized
  source 1..20: mol_type = other DNA
cccccgacatatagggatta

SEQ ID NO: 29115 - DNA, 20 bp, synthetic construct
  misc_feature 1..20: note = chemically synthesized
  source 1..20: mol_type = other DNA
ccccgacatatagggattat

SEQ ID NO: 29116 - DNA, 20 bp, synthetic construct
  misc_feature 1..20: note = chemically synthesized
  source 1..20: mol_type = other DNA
cccgacatatagggattatg

SEQ ID NO: 29117 - DNA, 20 bp, synthetic construct
  misc_feature 1..20: note = chemically synthesized
  source 1..20: mol_type = other DNA
ttacaattcaatatgaaatt

SEQ ID NO: 29118 - DNA, 20 bp, synthetic construct
  misc_feature 1..20: note = chemically synthesized
  source 1..20: mol_type = other DNA
tacaattcaatatgaaattt

SEQ ID NO: 29119 - DNA, 20 bp, synthetic construct
  misc_feature 1..20: note = chemically synthesized
  source 1..20: mol_type = other DNA
aattcaatatgaaatttggg

SEQ ID NO: 29120 - DNA, 20 bp, synthetic construct
  misc_feature 1..20: note = chemically synthesized
  source 1..20: mol_type = other DNA
ttcaatatgaaatttgggtg

SEQ ID NO: 29121 - DNA, 20 bp, synthetic construct
  misc_feature 1..20: note = chemically synthesized
  source 1..20: mol_type = other DNA
atgaaatttgggtggagaca

SEQ ID NO: 29122 - DNA, 20 bp, synthetic construct
  misc_feature 1..20: note = chemically synthesized
  source 1..20: mol_type = other DNA
gaaatttgggtggagacaca

SEQ ID NO: 29123 - DNA, 20 bp, synthetic construct
  misc_feature 1..20: note = chemically synthesized
  source 1..20: mol_type = other DNA
ttgggtggagacacagagcc

SEQ ID NO: 29124 - DNA, 20 bp, synthetic construct
  misc_feature 1..20: note = chemically synthesized
  source 1..20: mol_type = other DNA
gacacagagccaagccatat

SEQ ID NO: 29125 - DNA, 20 bp, synthetic construct
  misc_feature 1..20: note = chemically synthesized
  source 1..20: mol_type = other DNA
acacagagccaagccatatc

SEQ ID NO: 29126 - DNA, 20 bp, synthetic construct
  misc_feature 1..20: note = chemically synthesized
  source 1..20: mol_type = other DNA
cacagagccaagccatatca

SEQ ID NO: 29127 - DNA, 20 bp, synthetic construct
  misc_feature 1..20: note = chemically synthesized
  source 1..20: mol_type = other DNA
ccaagccatatcagggatca

SEQ ID NO: 29128 - DNA, 20 bp, synthetic construct
  misc_feature 1..20: note = chemically synthesized
  source 1..20: mol_type = other DNA
caagccatatcagggatcat

SEQ ID NO: 29129 - DNA, 20 bp, synthetic construct
  misc_feature 1..20: note = chemically synthesized
  source 1..20: mol_type = other DNA
tgggcttgtgcactcaccac

SEQ ID NO: 29130 - DNA, 20 bp, synthetic construct
  misc_feature 1..20: note = chemically synthesized
  source 1..20: mol_type = other DNA
gcactcaccacaagtgaaac

SEQ ID NO: 29131 - DNA, 20 bp, synthetic construct
  misc_feature 1..20: note = chemically synthesized
  source 1..20: mol_type = other DNA
cacaagtgaaactggcctct

SEQ ID NO: 29132 - DNA, 20 bp, synthetic construct
  misc_feature 1..20: note = chemically synthesized
  source 1..20: mol_type = other DNA
tgaaactggcctctgagcct

SEQ ID NO: 29133 - DNA, 20 bp, synthetic construct
  misc_feature 1..20: note = chemically synthesized
  source 1..20: mol_type = other DNA
gaaactggcctctgagcctc

SEQ ID NO: 29134 - DNA, 20 bp, synthetic construct
  misc_feature 1..20: note = chemically synthesized
  source 1..20: mol_type = other DNA
actggcctctgagcctcagg

SEQ ID NO: 29135 - DNA, 20 bp, synthetic construct
  misc_feature 1..20: note = chemically synthesized
  source 1..20: mol_type = other DNA
ctggcctctgagcctcaggt

SEQ ID NO: 29136 - DNA, 20 bp, synthetic construct
  misc_feature 1..20: note = chemically synthesized
  source 1..20: mol_type = other DNA
cctctgagcctcaggtggga

SEQ ID NO: 29137 - DNA, 20 bp, synthetic construct
  misc_feature 1..20: note = chemically synthesized
  source 1..20: mol_type = other DNA
ctctgagcctcaggtgggat

SEQ ID NO: 29138 - DNA, 20 bp, synthetic construct
  misc_feature 1..20: note = chemically synthesized
  source 1..20: mol_type = other DNA
tctgagcctcaggtgggatg

SEQ ID NO: 29139 - DNA, 20 bp, synthetic construct
  misc_feature 1..20: note = chemically synthesized
  source 1..20: mol_type = other DNA
gagcctcaggtgggatgggg

SEQ ID NO: 29140 - DNA, 20 bp, synthetic construct
  misc_feature 1..20: note = chemically synthesized
  source 1..20: mol_type = other DNA
tgggatggggaagctcactt

SEQ ID NO: 29141 - DNA, 20 bp, synthetic construct
  misc_feature 1..20: note = chemically synthesized
  source 1..20: mol_type = other DNA
atggggaagctcacttcagc

SEQ ID NO: 29142 - DNA, 20 bp, synthetic construct
  misc_feature 1..20: note = chemically synthesized
  source 1..20: mol_type = other DNA
tcagcaagtccctgccactg

SEQ ID NO: 29143 - DNA, 20 bp, synthetic construct
  misc_feature 1..20: note = chemically synthesized
  source 1..20: mol_type = other DNA
ctgtggcattcatatcttct

SEQ ID NO: 29144 - DNA, 20 bp, synthetic construct
  misc_feature 1..20: note = chemically synthesized
  source 1..20: mol_type = other DNA
cattcatatcttcttagtcc

SEQ ID NO: 29145 - DNA, 20 bp, synthetic construct
  misc_feature 1..20: note = chemically synthesized
  source 1..20: mol_type = other DNA
attcatatcttcttagtcct

SEQ ID NO: 29146 - DNA, 20 bp, synthetic construct
  misc_feature 1..20: note = chemically synthesized
  source 1..20: mol_type = other DNA
ttcatatcttcttagtcctg

SEQ ID NO: 29147 - DNA, 20 bp, synthetic construct
  misc_feature 1..20: note = chemically synthesized
  source 1..20: mol_type = other DNA
tatcttcttagtcctggggc

SEQ ID NO: 29148 - DNA, 20 bp, synthetic construct
  misc_feature 1..20: note = chemically synthesized
  source 1..20: mol_type = other DNA
atgctgcccattttttgaaa

SEQ ID NO: 29149 - DNA, 20 bp, synthetic construct
  misc_feature 1..20: note = chemically synthesized
  source 1..20: mol_type = other DNA
cattttttgaaaaagctgat

SEQ ID NO: 29150 - DNA, 20 bp, synthetic construct
  misc_feature 1..20: note = chemically synthesized
  source 1..20: mol_type = other DNA
ttttttgaaaaagctgatca

SEQ ID NO: 29151 - DNA, 20 bp, synthetic construct
  misc_feature 1..20: note = chemically synthesized
  source 1..20: mol_type = other DNA
aaaaagctgatcagagtctc

SEQ ID NO: 29152 - DNA, 20 bp, synthetic construct
  misc_feature 1..20: note = chemically synthesized
  source 1..20: mol_type = other DNA
aaaagctgatcagagtctct

SEQ ID NO: 29153 - DNA, 20 bp, synthetic construct
  misc_feature 1..20: note = chemically synthesized
  source 1..20: mol_type = other DNA
aagctgatcagagtctctag

SEQ ID NO: 29154 - DNA, 20 bp, synthetic construct
  misc_feature 1..20: note = chemically synthesized
  source 1..20: mol_type = other DNA
ctgatcagagtctctaggag

SEQ ID NO: 29155 - DNA, 20 bp, synthetic construct
  misc_feature 1..20: note = chemically synthesized
  source 1..20: mol_type = other DNA
gatcagagtctctaggagta

SEQ ID NO: 29156 - DNA, 20 bp, synthetic construct
  misc_feature 1..20: note = chemically synthesized
  source 1..20: mol_type = other DNA
agtctctaggagtagagtaa

SEQ ID NO: 29157 - DNA, 20 bp, synthetic construct
  misc_feature 1..20: note = chemically synthesized
  source 1..20: mol_type = other DNA
gtctctaggagtagagtaat

SEQ ID NO: 29158 - DNA, 20 bp, synthetic construct
  misc_feature 1..20: note = chemically synthesized
  source 1..20: mol_type = other DNA
tctctaggagtagagtaatg

SEQ ID NO: 29159 - DNA, 20 bp, synthetic construct
  misc_feature 1..20: note = chemically synthesized
  source 1..20: mol_type = other DNA
tctaggagtagagtaatggg

SEQ ID NO: 29160 - DNA, 20 bp, synthetic construct
  misc_feature 1..20: note = chemically synthesized
  source 1..20: mol_type = other DNA
ggagtagagtaatggggaga

SEQ ID NO: 29161 - DNA, 20 bp, synthetic construct
  misc_feature 1..20: note = chemically synthesized
  source 1..20: mol_type = other DNA
tagagtaatggggagaaagt

SEQ ID NO: 29162 - DNA, 20 bp, synthetic construct
  misc_feature 1..20: note = chemically synthesized
  source 1..20: mol_type = other DNA
agagtaatggggagaaagtt

SEQ ID NO: 29163 - DNA, 20 bp, synthetic construct
  misc_feature 1..20: note = chemically synthesized
  source 1..20: mol_type = other DNA
gggagaaagttaggttccct

SEQ ID NO: 29164 - DNA, 20 bp, synthetic construct
  misc_feature 1..20: note = chemically synthesized
  source 1..20: mol_type = other DNA
ggagaaagttaggttccctg

SEQ ID NO: 29165 - DNA, 20 bp, synthetic construct
  misc_feature 1..20: note = chemically synthesized
  source 1..20: mol_type = other DNA
agaaagttaggttccctgag

SEQ ID NO: 29166 - DNA, 20 bp, synthetic construct
  misc_feature 1..20: note = chemically synthesized
  source 1..20: mol_type = other DNA
ttccctgaggagcaattacc

SEQ ID NO: 29167 - DNA, 20 bp, synthetic construct
  misc_feature 1..20: note = chemically synthesized
  source 1..20: mol_type = other DNA
tccctgaggagcaattaccc

SEQ ID NO: 29168 - DNA, 20 bp, synthetic construct
  misc_feature 1..20: note = chemically synthesized
  source 1..20: mol_type = other DNA
aattacccaggtaattacat

SEQ ID NO: 29169 - DNA, 20 bp, synthetic construct
  misc_feature 1..20: note = chemically synthesized
  source 1..20: mol_type = other DNA
cattagcctctctcaatatc

SEQ ID NO: 29170 - DNA, 20 bp, synthetic construct
  misc_feature 1..20: note = chemically synthesized
  source 1..20: mol_type = other DNA
ttagcctctctcaatatcca

SEQ ID NO: 29171 - DNA, 20 bp, synthetic construct
  misc_feature 1..20: note = chemically synthesized
  source 1..20: mol_type = other DNA
tctcaatatccagagaacct

SEQ ID NO: 29172 - DNA, 20 bp, synthetic construct
  misc_feature 1..20: note = chemically synthesized
  source 1..20: mol_type = other DNA
ctcaatatccagagaaccta

SEQ ID NO: 29173 - DNA, 20 bp, synthetic construct
  misc_feature 1..20: note = chemically synthesized
  source 1..20: mol_type = other DNA
tcaatatccagagaacctaa

SEQ ID NO: 29174 - DNA, 20 bp, synthetic construct
  misc_feature 1..20: note = chemically synthesized
  source 1..20: mol_type = other DNA
ccagagaacctaagggaaac

SEQ ID NO: 29175 - DNA, 20 bp, synthetic construct
  misc_feature 1..20: note = chemically synthesized
  source 1..20: mol_type = other DNA
gaacctaagggaaacaagca

SEQ ID NO: 29176 - DNA, 20 bp, synthetic construct
  misc_feature 1..20: note = chemically synthesized
  source 1..20: mol_type = other DNA
aagggaaacaagcaaagata

SEQ ID NO: 29177 - DNA, 20 bp, synthetic construct
  misc_feature 1..20: note = chemically synthesized
  source 1..20: mol_type = other DNA
gggaaacaagcaaagatata

SEQ ID NO: 29178 - DNA, 20 bp, synthetic construct
  misc_feature 1..20: note = chemically synthesized
  source 1..20: mol_type = other DNA
aacaagcaaagatatagagt

SEQ ID NO: 29179 - DNA, 20 bp, synthetic construct
  misc_feature 1..20: note = chemically synthesized
  source 1..20: mol_type = other DNA
agtcagtatctttgtgaaat

SEQ ID NO: 29180 - DNA, 20 bp, synthetic construct
  misc_feature 1..20: note = chemically synthesized
  source 1..20: mol_type = other DNA
tctttgtgaaatgagtgtaa

SEQ ID NO: 29181 - DNA, 20 bp, synthetic construct
  misc_feature 1..20: note = chemically synthesized
  source 1..20: mol_type = other DNA
tgagtgtaatagtatttatc

SEQ ID NO: 29182 - DNA, 20 bp, synthetic construct
  misc_feature 1..20: note = chemically synthesized
  source 1..20: mol_type = other DNA
ttattttttgttatactttt

SEQ ID NO: 29183 - DNA, 20 bp, synthetic construct
  misc_feature 1..20: note = chemically synthesized
  source 1..20: mol_type = other DNA
tttgttatacttttaagttt

SEQ ID NO: 29184 - DNA, 20 bp, synthetic construct
  misc_feature 1..20: note = chemically synthesized
  source 1..20: mol_type = other DNA
ttgttatacttttaagtttt

SEQ ID NO: 29185 - DNA, 20 bp, synthetic construct
  misc_feature 1..20: note = chemically synthesized
  source 1..20: mol_type = other DNA
tgttatacttttaagtttta

SEQ ID NO: 29186 - DNA, 20 bp, synthetic construct
  misc_feature 1..20: note = chemically synthesized
  source 1..20: mol_type = other DNA
gttttagggtacatgtgcac

SEQ ID NO: 29187 - DNA, 20 bp, synthetic construct
  misc_feature 1..20: note = chemically synthesized
  source 1..20: mol_type = other DNA
ttttagggtacatgtgcaca

SEQ ID NO: 29188 - DNA, 20 bp, synthetic construct
  misc_feature 1..20: note = chemically synthesized
  source 1..20: mol_type = other DNA
gggtacatgtgcacaaggtg

SEQ ID NO: 29189 - DNA, 20 bp, synthetic construct
  misc_feature 1..20: note = chemically synthesized
  source 1..20: mol_type = other DNA
ggtacatgtgcacaaggtgc

SEQ ID NO: 29190 - DNA, 20 bp, synthetic construct
  misc_feature 1..20: note = chemically synthesized
  source 1..20: mol_type = other DNA
catgtgcacaaggtgcaggt

SEQ ID NO: 29191 - DNA, 20 bp, synthetic construct
  misc_feature 1..20: note = chemically synthesized
  source 1..20: mol_type = other DNA
tatgtatacatgtgccatgt

SEQ ID NO: 29192 - DNA, 20 bp, synthetic construct
  misc_feature 1..20: note = chemically synthesized
  source 1..20: mol_type = other DNA
attaactcaccatttaacat

SEQ ID NO: 29193 - DNA, 20 bp, synthetic construct
  misc_feature 1..20: note = chemically synthesized
  source 1..20: mol_type = other DNA
ttaactcaccatttaacatt

SEQ ID NO: 29194 - DNA, 20 bp, synthetic construct
  misc_feature 1..20: note = chemically synthesized
  source 1..20: mol_type = other DNA
cccctcctcccaccccacaa

SEQ ID NO: 29195 - DNA, 20 bp, synthetic construct
  misc_feature 1..20: note = chemically synthesized
  source 1..20: mol_type = other DNA
ccctcctcccaccccacaac

SEQ ID NO: 29196 - DNA, 20 bp, synthetic construct
  misc_feature 1..20: note = chemically synthesized
  source 1..20: mol_type = other DNA
tcccaccccacaacaggccc

SEQ ID NO: 29197 - DNA, 20 bp, synthetic construct
  misc_feature 1..20: note = chemically synthesized
  source 1..20: mol_type = other DNA
gtccatgtgttctcattgtt

SEQ ID NO: 29198 - DNA, 20 bp, synthetic construct
  misc_feature 1..20: note = chemically synthesized
  source 1..20: mol_type = other DNA
attgttcagttcccacctat

SEQ ID NO: 29199 - DNA, 20 bp, synthetic construct
  misc_feature 1..20: note = chemically synthesized
  source 1..20: mol_type = other DNA
ttcagttcccacctatgagt

SEQ ID NO: 29200 - DNA, 20 bp, synthetic construct
  misc_feature 1..20: note = chemically synthesized
  source 1..20: mol_type = other DNA
cacctatgagtgagaacatg

SEQ ID NO: 29201 - DNA, 20 bp, synthetic construct
  misc_feature 1..20: note = chemically synthesized
  source 1..20: mol_type = other DNA
gagtgagaacatgtggtgtt

SEQ ID NO: 29202 - DNA, 20 bp, synthetic construct
  misc_feature 1..20: note = chemically synthesized
  source 1..20: mol_type = other DNA
ttggctttttgtccttgtga

SEQ ID NO: 29203 - DNA, 20 bp, synthetic construct
  misc_feature 1..20: note = chemically synthesized
  source 1..20: mol_type = other DNA
tgtccttgtgatagtttgct

SEQ ID NO: 29204 - DNA, 20 bp, synthetic construct
  misc_feature 1..20: note = chemically synthesized
  source 1..20: mol_type = other DNA
tgatagtttgctgagaatga

SEQ ID NO: 29205 - DNA, 20 bp, synthetic construct
  misc_feature 1..20: note = chemically synthesized
  source 1..20: mol_type = other DNA
ttgctgagaatgatggtttc

SEQ ID NO: 29206 - DNA, 20 bp, synthetic construct
  misc_feature 1..20: note = chemically synthesized
  source 1..20: mol_type = other DNA
gcttcatccatgtccctaca

SEQ ID NO: 29207 - DNA, 20 bp, synthetic construct
  misc_feature 1..20: note = chemically synthesized
  source 1..20: mol_type = other DNA
cttcatccatgtccctacaa

SEQ ID NO: 29208 - DNA, 20 bp, synthetic construct
  misc_feature 1..20: note = chemically synthesized
  source 1..20: mol_type = other DNA
catgaactcatcatttttta

SEQ ID NO: 29209 - DNA, 20 bp, synthetic construct
  misc_feature 1..20: note = chemically synthesized
  source 1..20: mol_type = other DNA
catcattttttatggctgca

SEQ ID NO: 29210 - DNA, 20 bp, synthetic construct
  misc_feature 1..20: note = chemically synthesized
  source 1..20: mol_type = other DNA
tatggctgcatagtattcca

SEQ ID NO: 29211 - DNA, 20 bp, synthetic construct
  misc_feature 1..20: note = chemically synthesized
  source 1..20: mol_type = other DNA
tgtgccacattttcttaatc

SEQ ID NO: 29212 - DNA, 20 bp, synthetic construct
  misc_feature 1..20: note = chemically synthesized
  source 1..20: mol_type = other DNA
ttaatccagtctatcattgt

SEQ ID NO: 29213 - DNA, 20 bp, synthetic construct
  misc_feature 1..20: note = chemically synthesized
  source 1..20: mol_type = other DNA
gtctatcattgttggacatt

SEQ ID NO: 29214 - DNA, 20 bp, synthetic construct
  misc_feature 1..20: note = chemically synthesized
  source 1..20: mol_type = other DNA
tctatcattgttggacattt

SEQ ID NO: 29215 - DNA, 20 bp, synthetic construct
  misc_feature 1..20: note = chemically synthesized
  source 1..20: mol_type = other DNA
tcattgttggacatttgggt

SEQ ID NO: 29216 - DNA, 20 bp, synthetic construct
  misc_feature 1..20: note = chemically synthesized
  source 1..20: mol_type = other DNA
tggacatttgggttggttcc

SEQ ID NO: 29217 - DNA, 20 bp, synthetic construct
  misc_feature 1..20: note = chemically synthesized
  source 1..20: mol_type = other DNA
caagtctttgctattgtgaa

SEQ ID NO: 29218 - DNA, 20 bp, synthetic construct
  misc_feature 1..20: note = chemically synthesized
  source 1..20: mol_type = other DNA
tacgtgtgcatgtgtcttta

SEQ ID NO: 29219 - DNA, 20 bp, synthetic construct
  misc_feature 1..20: note = chemically synthesized
  source 1..20: mol_type = other DNA
gtgtgcatgtgtctttatag

SEQ ID NO: 29220 - DNA, 20 bp, synthetic construct
  misc_feature 1..20: note = chemically synthesized
  source 1..20: mol_type = other DNA
cagcatgatttataatcctt

SEQ ID NO: 29221 - DNA, 20 bp, synthetic construct
  misc_feature 1..20: note = chemically synthesized
  source 1..20: mol_type = other DNA
agcatgatttataatccttt

SEQ ID NO: 29222 - DNA, 20 bp, synthetic construct
  misc_feature 1..20: note = chemically synthesized
  source 1..20: mol_type = other DNA
taatcctttgggtgtatacc

SEQ ID NO: 29223 - DNA, 20 bp, synthetic construct
  misc_feature 1..20: note = chemically synthesized
  source 1..20: mol_type = other DNA
tttgggtgtatacccagtaa

SEQ ID NO: 29224 - DNA, 20 bp, synthetic construct
  misc_feature 1..20: note = chemically synthesized
  source 1..20: mol_type = other DNA
ttgggtgtatacccagtaat

SEQ ID NO: 29225 - DNA, 20 bp, synthetic construct
  misc_feature 1..20: note = chemically synthesized
  source 1..20: mol_type = other DNA
gtgtatacccagtaatggga

SEQ ID NO: 29226 - DNA, 20 bp, synthetic construct
  misc_feature 1..20: note = chemically synthesized
  source 1..20: mol_type = other DNA
atacccagtaatgggatggc

SEQ ID NO: 29227 - DNA, 20 bp, synthetic construct
  misc_feature 1..20: note = chemically synthesized
  source 1..20: mol_type = other DNA
tacccagtaatgggatggct

SEQ ID NO: 29228 - DNA, 20 bp, synthetic construct
  misc_feature 1..20: note = chemically synthesized
  source 1..20: mol_type = other DNA
aatgggatggctgggtcaaa

SEQ ID NO: 29229 - DNA, 20 bp, synthetic construct
  misc_feature 1..20: note = chemically synthesized
  source 1..20: mol_type = other DNA
gctgggtcaaatggtatttc

SEQ ID NO: 29230 - DNA, 20 bp, synthetic construct
  misc_feature 1..20: note = chemically synthesized
  source 1..20: mol_type = other DNA
tcaaatggtatttctagttc

SEQ ID NO: 29231 - DNA, 20 bp, synthetic construct
  misc_feature 1..20: note = chemically synthesized
  source 1..20: mol_type = other DNA
atttctagttctagatccct

SEQ ID NO: 29232 - DNA, 20 bp, synthetic construct
  misc_feature 1..20: note = chemically synthesized
  source 1..20: mol_type = other DNA
tttctagttctagatccctg

SEQ ID NO: 29233 - DNA, 20 bp, synthetic construct
  misc_feature 1..20: note = chemically synthesized
  source 1..20: mol_type = other DNA
gacttccacaatgtttgaac

SEQ ID NO: 29234 - DNA, 20 bp, synthetic construct
  misc_feature 1..20: note = chemically synthesized
  source 1..20: mol_type = other DNA
acaatgtttgaactagttta

SEQ ID NO: 29235 - DNA, 20 bp, synthetic construct
  misc_feature 1..20: note = chemically synthesized
  source 1..20: mol_type = other DNA
ctagtttacagtcccaccaa

SEQ ID NO: 29236 - DNA, 20 bp, synthetic construct
  misc_feature 1..20: note = chemically synthesized
  source 1..20: mol_type = other DNA
cagtcccaccaacagtgtaa

SEQ ID NO: 29237 - DNA, 20 bp, synthetic construct
  misc_feature 1..20: note = chemically synthesized
  source 1..20: mol_type = other DNA
ctatttctccacatcctctc

SEQ ID NO: 29238 - DNA, 20 bp, synthetic construct
  misc_feature 1..20: note = chemically synthesized
  source 1..20: mol_type = other DNA
ttaatgattgccattctaac

SEQ ID NO: 29239 - DNA, 20 bp, synthetic construct
  misc_feature 1..20: note = chemically synthesized
  source 1..20: mol_type = other DNA
attgccattctaactggtgt

SEQ ID NO: 29240 - DNA, 20 bp, synthetic construct
  misc_feature 1..20: note = chemically synthesized
  source 1..20: mol_type = other DNA
ccattctaactggtgtgaga

SEQ ID NO: 29241 - DNA, 20 bp, synthetic construct
  misc_feature 1..20: note = chemically synthesized
  source 1..20: mol_type = other DNA
tgtgagatggtatctcattg

SEQ ID NO: 29242 - DNA, 20 bp, synthetic construct
  misc_feature 1..20: note = chemically synthesized
  source 1..20: mol_type = other DNA
tttgatttgcatttctctga

SEQ ID NO: 29243 - DNA, 20 bp, synthetic construct
  misc_feature 1..20: note = chemically synthesized
  source 1..20: mol_type = other DNA
atttgcatttctctgatggc

SEQ ID NO: 29244 - DNA, 20 bp, synthetic construct
  misc_feature 1..20: note = chemically synthesized
  source 1..20: mol_type = other DNA
ctctgatggccagtgatgat

SEQ ID NO: 29245 - DNA, 20 bp, synthetic construct
  misc_feature 1..20: note = chemically synthesized
  source 1..20: mol_type = other DNA
gcattttttcatgtgtcttt

SEQ ID NO: 29246 - DNA, 20 bp, synthetic construct
  misc_feature 1..20: note = chemically synthesized
  source 1..20: mol_type = other DNA
ctgcataaatgtcttctttt

SEQ ID NO: 29247 - DNA, 20 bp, synthetic construct
  misc_feature 1..20: note = chemically synthesized
  source 1..20: mol_type = other DNA
cataaatgtcttcttttgag

SEQ ID NO: 29248 - DNA, 20 bp, synthetic construct
  misc_feature 1..20: note = chemically synthesized
  source 1..20: mol_type = other DNA
atcctttgcccactttttga

SEQ ID NO: 29249 - DNA, 20 bp, synthetic construct
  misc_feature 1..20: note = chemically synthesized
  source 1..20: mol_type = other DNA
tcctttgcccactttttgat

SEQ ID NO: 29250 - DNA, 20 bp, synthetic construct
  misc_feature 1..20: note = chemically synthesized
  source 1..20: mol_type = other DNA
cctttgcccactttttgatg

SEQ ID NO: 29251 - DNA, 20 bp, synthetic construct
  misc_feature 1..20: note = chemically synthesized
  source 1..20: mol_type = other DNA
tttctcttgtaaatttgttt

SEQ ID NO: 29252 - DNA, 20 bp, synthetic construct
  misc_feature 1..20: note = chemically synthesized
  source 1..20: mol_type = other DNA
aaatttgtttgagttcattg

SEQ ID NO: 29253 - DNA, 20 bp, synthetic construct
  misc_feature 1..20: note = chemically synthesized
  source 1..20: mol_type = other DNA
tttgagttcattgtagattc

SEQ ID NO: 29254 - DNA, 20 bp, synthetic construct
  misc_feature 1..20: note = chemically synthesized
  source 1..20: mol_type = other DNA
tcattgtagattctggatat

SEQ ID NO: 29255 - DNA, 20 bp, synthetic construct
  misc_feature 1..20: note = chemically synthesized
  source 1..20: mol_type = other DNA
tctggatattagccctttgt

SEQ ID NO: 29256 - DNA, 20 bp, synthetic construct
  misc_feature 1..20: note = chemically synthesized
  source 1..20: mol_type = other DNA
atattagccctttgtcagat

SEQ ID NO: 29257 - DNA, 20 bp, synthetic construct
  misc_feature 1..20: note = chemically synthesized
  source 1..20: mol_type = other DNA
ttagccctttgtcagatgag

SEQ ID NO: 29258 - DNA, 20 bp, synthetic construct
  misc_feature 1..20: note = chemically synthesized
  source 1..20: mol_type = other DNA
aaaaattttctcccattgtg

SEQ ID NO: 29259 - DNA, 20 bp, synthetic construct
  misc_feature 1..20: note = chemically synthesized
  source 1..20: mol_type = other DNA
aaaattttctcccattgtgt

SEQ ID NO: 29260 - DNA, 20 bp, synthetic construct
  misc_feature 1..20: note = chemically synthesized
  source 1..20: mol_type = other DNA
aggttgcctgttcactctga

SEQ ID NO: 29261 - DNA, 20 bp, synthetic construct
  misc_feature 1..20: note = chemically synthesized
  source 1..20: mol_type = other DNA
ttgcctgttcactctgatgg

SEQ ID NO: 29262 - DNA, 20 bp, synthetic construct
  misc_feature 1..20: note = chemically synthesized
  source 1..20: mol_type = other DNA
tggtagtttcttttgctgtg

SEQ ID NO: 29263 - DNA, 20 bp, synthetic construct
  misc_feature 1..20: note = chemically synthesized
  source 1..20: mol_type = other DNA
tagtttcttttgctgtgcag

SEQ ID NO: 29264 - DNA, 20 bp, synthetic construct
  misc_feature 1..20: note = chemically synthesized
  source 1..20: mol_type = other DNA
tttgctgtgcagaagatctt

SEQ ID NO: 29265 - DNA, 20 bp, synthetic construct
  misc_feature 1..20: note = chemically synthesized
  source 1..20: mol_type = other DNA
cagaagatctttagtttaat

SEQ ID NO: 29266 - DNA, 20 bp, synthetic construct
  misc_feature 1..20: note = chemically synthesized
  source 1..20: mol_type = other DNA
ttagtttaattagatcccat

SEQ ID NO: 29267 - DNA, 20 bp, synthetic construct
  misc_feature 1..20: note = chemically synthesized
  source 1..20: mol_type = other DNA
tagatcccattagtgaattt

SEQ ID NO: 29268 - DNA, 20 bp, synthetic construct
  misc_feature 1..20: note = chemically synthesized
  source 1..20: mol_type = other DNA
gcttttgttgccattgcttt

SEQ ID NO: 29269 - DNA, 20 bp, synthetic construct
  misc_feature 1..20: note = chemically synthesized
  source 1..20: mol_type = other DNA
tgccattgcttttggtgttt

SEQ ID NO: 29270 - DNA, 20 bp, synthetic construct
  misc_feature 1..20: note = chemically synthesized
  source 1..20: mol_type = other DNA
cttttggtgttttagacatg

SEQ ID NO: 29271 - DNA, 20 bp, synthetic construct
  misc_feature 1..20: note = chemically synthesized
  source 1..20: mol_type = other DNA
gcccatgcctatgtcctgaa

SEQ ID NO: 29272 - DNA, 20 bp, synthetic construct
  misc_feature 1..20: note = chemically synthesized
  source 1..20: mol_type = other DNA
atgtcctgaatggtattgct

SEQ ID NO: 29273 - DNA, 20 bp, synthetic construct
  misc_feature 1..20: note = chemically synthesized
  source 1..20: mol_type = other DNA
tgtcctgaatggtattgctt

SEQ ID NO: 29274 - DNA, 20 bp, synthetic construct
  misc_feature 1..20: note = chemically synthesized
  source 1..20: mol_type = other DNA
gtattgcttaggttttcttc

SEQ ID NO: 29275 - DNA, 20 bp, synthetic construct
  misc_feature 1..20: note = chemically synthesized
  source 1..20: mol_type = other DNA
attgcttaggttttcttcta

SEQ ID NO: 29276 - DNA, 20 bp, synthetic construct
  misc_feature 1..20: note = chemically synthesized
  source 1..20: mol_type = other DNA
gttttcttctagagttttta

SEQ ID NO: 29277 - DNA, 20 bp, synthetic construct
  misc_feature 1..20: note = chemically synthesized
  source 1..20: mol_type = other DNA
ttctagagtttttatggttt

SEQ ID NO: 29278 - DNA, 20 bp, synthetic construct
  misc_feature 1..20: note = chemically synthesized
  source 1..20: mol_type = other DNA
tctagagtttttatggtttt

SEQ ID NO: 29279 - DNA, 20 bp, synthetic construct
  misc_feature 1..20: note = chemically synthesized
  source 1..20: mol_type = other DNA
tggttttaggtctaacattt

SEQ ID NO: 29280 - DNA, 20 bp, synthetic construct
  misc_feature 1..20: note = chemically synthesized
  source 1..20: mol_type = other DNA
ttaagtctttaatccatctt

SEQ ID NO: 29281 - DNA, 20 bp, synthetic construct
  misc_feature 1..20: note = chemically synthesized
  source 1..20: mol_type = other DNA
tcttgagttaatttttgtat

SEQ ID NO: 29282 - DNA, 20 bp, synthetic construct
  misc_feature 1..20: note = chemically synthesized
  source 1..20: mol_type = other DNA
cttgagttaatttttgtata

SEQ ID NO: 29283 - DNA, 20 bp, synthetic construct
  misc_feature 1..20: note = chemically synthesized
  source 1..20: mol_type = other DNA
ttaatttttgtataaggtgt

SEQ ID NO: 29284 - DNA, 20 bp, synthetic construct
  misc_feature 1..20: note = chemically synthesized
  source 1..20: mol_type = other DNA
taatttttgtataaggtgta

SEQ ID NO: 29285 - DNA, 20 bp, synthetic construct
  misc_feature 1..20: note = chemically synthesized
  source 1..20: mol_type = other DNA
tttttgtataaggtgtaagg

SEQ ID NO: 29286 - DNA, 20 bp, synthetic construct
  misc_feature 1..20: note = chemically synthesized
  source 1..20: mol_type = other DNA
ttttgtataaggtgtaagga

SEQ ID NO: 29287 - DNA, 20 bp, synthetic construct
  misc_feature 1..20: note = chemically synthesized
  source 1..20: mol_type = other DNA
tttgtataaggtgtaaggaa

SEQ ID NO: 29288 - DNA, 20 bp, synthetic construct
  misc_feature 1..20: note = chemically synthesized
  source 1..20: mol_type = other DNA
taaggtgtaaggaagggatc

SEQ ID NO: 29289 - DNA, 20 bp, synthetic construct
  misc_feature 1..20: note = chemically synthesized
  source 1..20: mol_type = other DNA
gtaaggaagggatccagttt

SEQ ID NO: 29290 - DNA, 20 bp, synthetic construct
  misc_feature 1..20: note = chemically synthesized
  source 1..20: mol_type = other DNA
cagtttcagcttcctacatt

SEQ ID NO: 29291 - DNA, 20 bp, synthetic construct
  misc_feature 1..20: note = chemically synthesized
  source 1..20: mol_type = other DNA
ttcagcttcctacatttggc

SEQ ID NO: 29292 - DNA, 20 bp, synthetic construct
  misc_feature 1..20: note = chemically synthesized
  source 1..20: mol_type = other DNA
gcttcctacatttggctagc

SEQ ID NO: 29293 - DNA, 20 bp, synthetic construct
  misc_feature 1..20: note = chemically synthesized
  source 1..20: mol_type = other DNA
atttggctagccagttttcc

SEQ ID NO: 29294 - DNA, 20 bp, synthetic construct
  misc_feature 1..20: note = chemically synthesized
  source 1..20: mol_type = other DNA
tcccagcaccatttattaaa

SEQ ID NO: 29295 - DNA, 20 bp, synthetic construct
  misc_feature 1..20: note = chemically synthesized
  source 1..20: mol_type = other DNA
cccagcaccatttattaaac

SEQ ID NO: 29296 - DNA, 20 bp, synthetic construct
  misc_feature 1..20: note = chemically synthesized
  source 1..20: mol_type = other DNA
ccagcaccatttattaaaca

SEQ ID NO: 29297 - DNA, 20 bp, synthetic construct
  misc_feature 1..20: note = chemically synthesized
  source 1..20: mol_type = other DNA
tccccatttcttgtttttct

SEQ ID NO: 29298 - DNA, 20 bp, synthetic construct
  misc_feature 1..20: note = chemically synthesized
  source 1..20: mol_type = other DNA
ccccatttcttgtttttctc

SEQ ID NO: 29299 - DNA, 20 bp, synthetic construct
  misc_feature 1..20: note = chemically synthesized
  source 1..20: mol_type = other DNA
tgtttttctcaggtttgtca

SEQ ID NO: 29300 - DNA, 20 bp, synthetic construct
  misc_feature 1..20: note = chemically synthesized
  source 1..20: mol_type = other DNA
ttctcaggtttgtcaaagat

SEQ ID NO: 29301 - DNA, 20 bp, synthetic construct
  misc_feature 1..20: note = chemically synthesized
  source 1..20: mol_type = other DNA
caggtttgtcaaagatcaga

SEQ ID NO: 29302 - DNA, 20 bp, synthetic construct
  misc_feature 1..20: note = chemically synthesized
  source 1..20: mol_type = other DNA
tgtcaaagatcagatagttg

SEQ ID NO: 29303 - DNA, 20 bp, synthetic construct
  misc_feature 1..20: note = chemically synthesized
  source 1..20: mol_type = other DNA
aaagatcagatagttgtaga

SEQ ID NO: 29304 - DNA, 20 bp, synthetic construct
  misc_feature 1..20: note = chemically synthesized
  source 1..20: mol_type = other DNA
atcagatagttgtagataga

SEQ ID NO: 29305 - DNA, 20 bp, synthetic construct
  misc_feature 1..20: note = chemically synthesized
  source 1..20: mol_type = other DNA
agatagacagcattatttct

SEQ ID NO: 29306 - DNA, 20 bp, synthetic construct
  misc_feature 1..20: note = chemically synthesized
  source 1..20: mol_type = other DNA
gatagacagcattatttctg

SEQ ID NO: 29307 - DNA, 20 bp, synthetic construct
  misc_feature 1..20: note = chemically synthesized
  source 1..20: mol_type = other DNA
atagacagcattatttctga

SEQ ID NO: 29308 - DNA, 20 bp, synthetic construct
  misc_feature 1..20: note = chemically synthesized
  source 1..20: mol_type = other DNA
agggctctgttttgttccat

SEQ ID NO: 29309 - DNA, 20 bp, synthetic construct
  misc_feature 1..20: note = chemically synthesized
  source 1..20: mol_type = other DNA
attggtctatatctctgttt

SEQ ID NO: 29310 - DNA, 20 bp, synthetic construct
  misc_feature 1..20: note = chemically synthesized
  source 1..20: mol_type = other DNA
ctatatctctgttttggtac

SEQ ID NO: 29311 - DNA, 20 bp, synthetic construct
  misc_feature 1..20: note = chemically synthesized
  source 1..20: mol_type = other DNA
gtaccagtactatgctgttt

SEQ ID NO: 29312 - DNA, 20 bp, synthetic construct
  misc_feature 1..20: note = chemically synthesized
  source 1..20: mol_type = other DNA
ctatgctgttttggttactg

SEQ ID NO: 29313 - DNA, 20 bp, synthetic construct
  misc_feature 1..20: note = chemically synthesized
  source 1..20: mol_type = other DNA
ttttggttactgtagccttg

SEQ ID NO: 29314 - DNA, 20 bp, synthetic construct
  misc_feature 1..20: note = chemically synthesized
  source 1..20: mol_type = other DNA
gttactgtagccttgtagta

SEQ ID NO: 29315 - DNA, 20 bp, synthetic construct
  misc_feature 1..20: note = chemically synthesized
  source 1..20: mol_type = other DNA
cttgtagtatagtttgaaat

SEQ ID NO: 29316 - DNA, 20 bp, synthetic construct
  misc_feature 1..20: note = chemically synthesized
  source 1..20: mol_type = other DNA
ttgtagtatagtttgaaatc

SEQ ID NO: 29317 - DNA, 20 bp, synthetic construct
  misc_feature 1..20: note = chemically synthesized
  source 1..20: mol_type = other DNA
tagtatagtttgaaatcagg

SEQ ID NO: 29318 - DNA, 20 bp, synthetic construct
  misc_feature 1..20: note = chemically synthesized
  source 1..20: mol_type = other DNA
atcaggtagtgtgatgcctc

SEQ ID NO: 29319 - DNA, 20 bp, synthetic construct
  misc_feature 1..20: note = chemically synthesized
  source 1..20: mol_type = other DNA
tgcctccagctttgttcttt

SEQ ID NO: 29320 - DNA, 20 bp, synthetic construct
  misc_feature 1..20: note = chemically synthesized
  source 1..20: mol_type = other DNA
ccagctttgttcttttggct

SEQ ID NO: 29321 - DNA, 20 bp, synthetic construct
  misc_feature 1..20: note = chemically synthesized
  source 1..20: mol_type = other DNA
cagctttgttcttttggctt

SEQ ID NO: 29322 - DNA, 20 bp, synthetic construct
  misc_feature 1..20: note = chemically synthesized
  source 1..20: mol_type = other DNA
cttttggcttaggattgact

SEQ ID NO: 29323 - DNA, 20 bp, synthetic construct
  misc_feature 1..20: note = chemically synthesized
  source 1..20: mol_type = other DNA
ttaggattgacttggcgatg

SEQ ID NO: 29324 - DNA, 20 bp, synthetic construct
  misc_feature 1..20: note = chemically synthesized
  source 1..20: mol_type = other DNA
taggattgacttggcgatgc

SEQ ID NO: 29325 - DNA, 20 bp, synthetic construct
  misc_feature 1..20: note = chemically synthesized
  source 1..20: mol_type = other DNA
tggcgatgcgggctcttttt

SEQ ID NO: 29326 - DNA, 20 bp, synthetic construct
  misc_feature 1..20: note = chemically synthesized
  source 1..20: mol_type = other DNA
ttggttccatatgaacttta

SEQ ID NO: 29327 - DNA, 20 bp, synthetic construct
  misc_feature 1..20: note = chemically synthesized
  source 1..20: mol_type = other DNA
gttccatatgaactttaaag

SEQ ID NO: 29328 - DNA, 20 bp, synthetic construct
  misc_feature 1..20: note = chemically synthesized
  source 1..20: mol_type = other DNA
tagttttttccaattctgtg

SEQ ID NO: 29329 - DNA, 20 bp, synthetic construct
  misc_feature 1..20: note = chemically synthesized
  source 1..20: mol_type = other DNA
tttttccaattctgtgaaga

SEQ ID NO: 29330 - DNA, 20 bp, synthetic construct
  misc_feature 1..20: note = chemically synthesized
  source 1..20: mol_type = other DNA
aattctgtgaagaaagtcat

SEQ ID NO: 29331 - DNA, 20 bp, synthetic construct
  misc_feature 1..20: note = chemically synthesized
  source 1..20: mol_type = other DNA
tctgtgaagaaagtcattgg

SEQ ID NO: 29332 - DNA, 20 bp, synthetic construct
  misc_feature 1..20: note = chemically synthesized
  source 1..20: mol_type = other DNA
gaaagtcattggtagcttga

SEQ ID NO: 29333 - DNA, 20 bp, synthetic construct
  misc_feature 1..20: note = chemically synthesized
  source 1..20: mol_type = other DNA
aaagtcattggtagcttgat

SEQ ID NO: 29334 - DNA, 20 bp, synthetic construct
  misc_feature 1..20: note = chemically synthesized
  source 1..20: mol_type = other DNA
aagtcattggtagcttgatg

SEQ ID NO: 29335 - DNA, 20 bp, synthetic construct
  misc_feature 1..20: note = chemically synthesized
  source 1..20: mol_type = other DNA
cattggtagcttgatgggga

SEQ ID NO: 29336 - DNA, 20 bp, synthetic construct
  misc_feature 1..20: note = chemically synthesized
  source 1..20: mol_type = other DNA
attgaatctataaattacct

SEQ ID NO: 29337 - DNA, 20 bp, synthetic construct
  misc_feature 1..20: note = chemically synthesized
  source 1..20: mol_type = other DNA
ttgaatctataaattacctt

SEQ ID NO: 29338 - DNA, 20 bp, synthetic construct
  misc_feature 1..20: note = chemically synthesized
  source 1..20: mol_type = other DNA
aatctataaattaccttggg

SEQ ID NO: 29339 - DNA, 20 bp, synthetic construct
  misc_feature 1..20: note = chemically synthesized
  source 1..20: mol_type = other DNA
ataaattaccttgggcagta

SEQ ID NO: 29340 - DNA, 20 bp, synthetic construct
  misc_feature 1..20: note = chemically synthesized
  source 1..20: mol_type = other DNA
tattgtttcttcctatccat

SEQ ID NO: 29341 - DNA, 20 bp, synthetic construct
  misc_feature 1..20: note = chemically synthesized
  source 1..20: mol_type = other DNA
tttcttcctatccatgagca

SEQ ID NO: 29342 - DNA, 20 bp, synthetic construct
  misc_feature 1..20: note = chemically synthesized
  source 1..20: mol_type = other DNA
tgtttgtatcttatttcctt

SEQ ID NO: 29343 - DNA, 20 bp, synthetic construct
  misc_feature 1..20: note = chemically synthesized
  source 1..20: mol_type = other DNA
ttgtatcttatttccttgag

SEQ ID NO: 29344 - DNA, 20 bp, synthetic construct
  misc_feature 1..20: note = chemically synthesized
  source 1..20: mol_type = other DNA
tatcttatttccttgagcag

SEQ ID NO: 29345 - DNA, 20 bp, synthetic construct
  misc_feature 1..20: note = chemically synthesized
  source 1..20: mol_type = other DNA
tttccttgagcagtggtttg

SEQ ID NO: 29346 - DNA, 20 bp, synthetic construct
  misc_feature 1..20: note = chemically synthesized
  source 1..20: mol_type = other DNA
gtggtttgtagttctccttg

SEQ ID NO: 29347 - DNA, 20 bp, synthetic construct
  misc_feature 1..20: note = chemically synthesized
  source 1..20: mol_type = other DNA
ggtttgtagttctccttgaa

SEQ ID NO: 29348 - DNA, 20 bp, synthetic construct
  misc_feature 1..20: note = chemically synthesized
  source 1..20: mol_type = other DNA
gtttgtagttctccttgaag

SEQ ID NO: 29349 - DNA, 20 bp, synthetic construct
  misc_feature 1..20: note = chemically synthesized
  source 1..20: mol_type = other DNA
aggtccttcacatcccttgt

SEQ ID NO: 29350 - DNA, 20 bp, synthetic construct
  misc_feature 1..20: note = chemically synthesized
  source 1..20: mol_type = other DNA
ccttcacatcccttgtaagt

SEQ ID NO: 29351 - DNA, 20 bp, synthetic construct
  misc_feature 1..20: note = chemically synthesized
  source 1..20: mol_type = other DNA
tcccttgtaagttggattcc

SEQ ID NO: 29352 - DNA, 20 bp, synthetic construct
  misc_feature 1..20: note = chemically synthesized
  source 1..20: mol_type = other DNA
cccttgtaagttggattcct

SEQ ID NO: 29353 - DNA, 20 bp, synthetic construct
  misc_feature 1..20: note = chemically synthesized
  source 1..20: mol_type = other DNA
taggtattatattctctctg

SEQ ID NO: 29354 - DNA, 20 bp, synthetic construct
  misc_feature 1..20: note = chemically synthesized
  source 1..20: mol_type = other DNA
ctctctgaagcaattgtgaa

SEQ ID NO: 29355 - DNA, 20 bp, synthetic construct
  misc_feature 1..20: note = chemically synthesized
  source 1..20: mol_type = other DNA
tctctgaagcaattgtgaat

SEQ ID NO: 29356 - DNA, 20 bp, synthetic construct
  misc_feature 1..20: note = chemically synthesized
  source 1..20: mol_type = other DNA
tctgaagcaattgtgaatgg

SEQ ID NO: 29357 - DNA, 20 bp, synthetic construct
  misc_feature 1..20: note = chemically synthesized
  source 1..20: mol_type = other DNA
actcactgtttgtctgttat

SEQ ID NO: 29358 - DNA, 20 bp, synthetic construct
  misc_feature 1..20: note = chemically synthesized
  source 1..20: mol_type = other DNA
tttgtctgttattggtgtat

SEQ ID NO: 29359 - DNA, 20 bp, synthetic construct
  misc_feature 1..20: note = chemically synthesized
  source 1..20: mol_type = other DNA
gcacattgattttgtatcct

SEQ ID NO: 29360 - DNA, 20 bp, synthetic construct
  misc_feature 1..20: note = chemically synthesized
  source 1..20: mol_type = other DNA
tgtatcctgagactttgctg

SEQ ID NO: 29361 - DNA, 20 bp, synthetic construct
  misc_feature 1..20: note = chemically synthesized
  source 1..20: mol_type = other DNA
actttgctgaagttgcttat

SEQ ID NO: 29362 - DNA, 20 bp, synthetic construct
  misc_feature 1..20: note = chemically synthesized
  source 1..20: mol_type = other DNA
ctgaagttgcttatcagctt

SEQ ID NO: 29363 - DNA, 20 bp, synthetic construct
  misc_feature 1..20: note = chemically synthesized
  source 1..20: mol_type = other DNA
tgaagttgcttatcagctta

SEQ ID NO: 29364 - DNA, 20 bp, synthetic construct
  misc_feature 1..20: note = chemically synthesized
  source 1..20: mol_type = other DNA
gaagttgcttatcagcttaa

SEQ ID NO: 29365 - DNA, 20 bp, synthetic construct
  misc_feature 1..20: note = chemically synthesized
  source 1..20: mol_type = other DNA
aagttgcttatcagcttaag

SEQ ID NO: 29366 - DNA, 20 bp, synthetic construct
  misc_feature 1..20: note = chemically synthesized
  source 1..20: mol_type = other DNA
ttatcagcttaaggggattt

SEQ ID NO: 29367 - DNA, 20 bp, synthetic construct
  misc_feature 1..20: note = chemically synthesized
  source 1..20: mol_type = other DNA
tatcagcttaaggggatttt

SEQ ID NO: 29368 - DNA, 20 bp, synthetic construct
  misc_feature 1..20: note = chemically synthesized
  source 1..20: mol_type = other DNA
gcttaaggggattttgggct

SEQ ID NO: 29369 - DNA, 20 bp, synthetic construct
  misc_feature 1..20: note = chemically synthesized
  source 1..20: mol_type = other DNA
gggattttgggctgagacaa

SEQ ID NO: 29370 - DNA, 20 bp, synthetic construct
  misc_feature 1..20: note = chemically synthesized
  source 1..20: mol_type = other DNA
ggattttgggctgagacaat

SEQ ID NO: 29371 - DNA, 20 bp, synthetic construct
  misc_feature 1..20: note = chemically synthesized
  source 1..20: mol_type = other DNA
gattttgggctgagacaatg

SEQ ID NO: 29372 - DNA, 20 bp, synthetic construct
  misc_feature 1..20: note = chemically synthesized
  source 1..20: mol_type = other DNA
gctgagacaatggggttttc

SEQ ID NO: 29373 - DNA, 20 bp, synthetic construct
  misc_feature 1..20: note = chemically synthesized
  source 1..20: mol_type = other DNA
gcaatcacgtcatctgcaaa

SEQ ID NO: 29374 - DNA, 20 bp, synthetic construct
  misc_feature 1..20: note = chemically synthesized
  source 1..20: mol_type = other DNA
caatcacgtcatctgcaaac

SEQ ID NO: 29375 - DNA, 20 bp, synthetic construct
  misc_feature 1..20: note = chemically synthesized
  source 1..20: mol_type = other DNA
aatcacgtcatctgcaaaca

SEQ ID NO: 29376 - DNA, 20 bp, synthetic construct
  misc_feature 1..20: note = chemically synthesized
  source 1..20: mol_type = other DNA
ccttctcctgcccgattgcc

SEQ ID NO: 29377 - DNA, 20 bp, synthetic construct
  misc_feature 1..20: note = chemically synthesized
  source 1..20: mol_type = other DNA
cttctcctgcccgattgccc

SEQ ID NO: 29378 - DNA, 20 bp, synthetic construct
  misc_feature 1..20: note = chemically synthesized
  source 1..20: mol_type = other DNA
tcctgcccgattgcccgggc

SEQ ID NO: 29379 - DNA, 20 bp, synthetic construct
  misc_feature 1..20: note = chemically synthesized
  source 1..20: mol_type = other DNA
acttccaacactatgttgaa

SEQ ID NO: 29380 - DNA, 20 bp, synthetic construct
  misc_feature 1..20: note = chemically synthesized
  source 1..20: mol_type = other DNA
cttccaacactatgttgaat

SEQ ID NO: 29381 - DNA, 20 bp, synthetic construct
  misc_feature 1..20: note = chemically synthesized
  source 1..20: mol_type = other DNA
tccaacactatgttgaatag

SEQ ID NO: 29382 - DNA, 20 bp, synthetic construct
  misc_feature 1..20: note = chemically synthesized
  source 1..20: mol_type = other DNA
aacactatgttgaataggag

SEQ ID NO: 29383 - DNA, 20 bp, synthetic construct
  misc_feature 1..20: note = chemically synthesized
  source 1..20: mol_type = other DNA
ctatgttgaataggagtggt

SEQ ID NO: 29384 - DNA, 20 bp, synthetic construct
  misc_feature 1..20: note = chemically synthesized
  source 1..20: mol_type = other DNA
atgttgaataggagtggtga

SEQ ID NO: 29385 - DNA, 20 bp, synthetic construct
  misc_feature 1..20: note = chemically synthesized
  source 1..20: mol_type = other DNA
gttgaataggagtggtgaga

SEQ ID NO: 29386 - DNA, 20 bp, synthetic construct
  misc_feature 1..20: note = chemically synthesized
  source 1..20: mol_type = other DNA
ttgaataggagtggtgagag

SEQ ID NO: 29387 - DNA, 20 bp, synthetic construct
  misc_feature 1..20: note = chemically synthesized
  source 1..20: mol_type = other DNA
tgaataggagtggtgagaga

SEQ ID NO: 29388 - DNA, 20 bp, synthetic construct
  misc_feature 1..20: note = chemically synthesized
  source 1..20: mol_type = other DNA
gagagggcatccctgtcttg

SEQ ID NO: 29389 - DNA, 20 bp, synthetic construct
  misc_feature 1..20: note = chemically synthesized
  source 1..20: mol_type = other DNA
ggcatccctgtcttgcagcc

SEQ ID NO: 29390 - DNA, 20 bp, synthetic construct
  misc_feature 1..20: note = chemically synthesized
  source 1..20: mol_type = other DNA
gcatccctgtcttgcagcct

SEQ ID NO: 29391 - DNA, 20 bp, synthetic construct
  misc_feature 1..20: note = chemically synthesized
  source 1..20: mol_type = other DNA
cagcctaggcacattttcat

SEQ ID NO: 29392 - DNA, 20 bp, synthetic construct
  misc_feature 1..20: note = chemically synthesized
  source 1..20: mol_type = other DNA
agcctaggcacattttcatt

SEQ ID NO: 29393 - DNA, 20 bp, synthetic construct
  misc_feature 1..20: note = chemically synthesized
  source 1..20: mol_type = other DNA
ctaggcacattttcattagg

SEQ ID NO: 29394 - DNA, 20 bp, synthetic construct
  misc_feature 1..20: note = chemically synthesized
  source 1..20: mol_type = other DNA
cacattttcattaggcagtg

SEQ ID NO: 29395 - DNA, 20 bp, synthetic construct
  misc_feature 1..20: note = chemically synthesized
  source 1..20: mol_type = other DNA
tttcattaggcagtgcagtg

SEQ ID NO: 29396 - DNA, 20 bp, synthetic construct
  misc_feature 1..20: note = chemically synthesized
  source 1..20: mol_type = other DNA
ttaggcagtgcagtgtggtt

SEQ ID NO: 29397 - DNA, 20 bp, synthetic construct
  misc_feature 1..20: note = chemically synthesized
  source 1..20: mol_type = other DNA
aggcagtgcagtgtggttaa

SEQ ID NO: 29398 - DNA, 20 bp, synthetic construct
  misc_feature 1..20: note = chemically synthesized
  source 1..20: mol_type = other DNA
cagtgcagtgtggttaagag

SEQ ID NO: 29399 - DNA, 20 bp, synthetic construct
  misc_feature 1..20: note = chemically synthesized
  source 1..20: mol_type = other DNA
gtggttaagagcagtgtctc

SEQ ID NO: 29400 - DNA, 20 bp, synthetic construct
  misc_feature 1..20: note = chemically synthesized
  source 1..20: mol_type = other DNA
tggttaagagcagtgtctct

SEQ ID NO: 29401 - DNA, 20 bp, synthetic construct
  misc_feature 1..20: note = chemically synthesized
  source 1..20: mol_type = other DNA
aagagcagtgtctctgggac

SEQ ID NO: 29402 - DNA, 20 bp, synthetic construct
  misc_feature 1..20: note = chemically synthesized
  source 1..20: mol_type = other DNA
tattacaatcataacttcaa

SEQ ID NO: 29403 - DNA, 20 bp, synthetic construct
  misc_feature 1..20: note = chemically synthesized
  source 1..20: mol_type = other DNA
cttcactctatgattgtgca

SEQ ID NO: 29404 - DNA, 20 bp, synthetic construct
  misc_feature 1..20: note = chemically synthesized
  source 1..20: mol_type = other DNA
gcaaagtatctgattaatct

SEQ ID NO: 29405 - DNA, 20 bp, synthetic construct
  misc_feature 1..20: note = chemically synthesized
  source 1..20: mol_type = other DNA
gtttcttcatctgaaaaatt

SEQ ID NO: 29406 - DNA, 20 bp, synthetic construct
  misc_feature 1..20: note = chemically synthesized
  source 1..20: mol_type = other DNA
agacaattctacctactcca

SEQ ID NO: 29407 - DNA, 20 bp, synthetic construct
  misc_feature 1..20: note = chemically synthesized
  source 1..20: mol_type = other DNA
attctacctactccatagat

SEQ ID NO: 29408 - DNA, 20 bp, synthetic construct
  misc_feature 1..20: note = chemically synthesized
  source 1..20: mol_type = other DNA
tctacctactccatagatta

SEQ ID NO: 29409 - DNA, 20 bp, synthetic construct
  misc_feature 1..20: note = chemically synthesized
  source 1..20: mol_type = other DNA
tacctactccatagattaga

SEQ ID NO: 29410 - DNA, 20 bp, synthetic construct
  misc_feature 1..20: note = chemically synthesized
  source 1..20: mol_type = other DNA
cattcatatgcaattttaaa

SEQ ID NO: 29411 - DNA, 20 bp, synthetic construct
  misc_feature 1..20: note = chemically synthesized
  source 1..20: mol_type = other DNA
ttcatatgcaattttaaatg

SEQ ID NO: 29412 - DNA, 20 bp, synthetic construct
  misc_feature 1..20: note = chemically synthesized
  source 1..20: mol_type = other DNA
atgcaattttaaatggagta

SEQ ID NO: 29413 - DNA, 20 bp, synthetic construct
  misc_feature 1..20: note = chemically synthesized
  source 1..20: mol_type = other DNA
aattttaaatggagtacagt

SEQ ID NO: 29414 - DNA, 20 bp, synthetic construct
  misc_feature 1..20: note = chemically synthesized
  source 1..20: mol_type = other DNA
tttaaatggagtacagttag

SEQ ID NO: 29415 - DNA, 20 bp, synthetic construct
  misc_feature 1..20: note = chemically synthesized
  source 1..20: mol_type = other DNA
agttagaagcaaatactcaa

SEQ ID NO: 29416 - DNA, 20 bp, synthetic construct
  misc_feature 1..20: note = chemically synthesized
  source 1..20: mol_type = other DNA
actcaatagacacattttat

SEQ ID NO: 29417 - DNA, 20 bp, synthetic construct
  misc_feature 1..20: note = chemically synthesized
  source 1..20: mol_type = other DNA
attttattagttgtactttc

SEQ ID NO: 29418 - DNA, 20 bp, synthetic construct
  misc_feature 1..20: note = chemically synthesized
  source 1..20: mol_type = other DNA
agttgtactttccagcattc

SEQ ID NO: 29419 - DNA, 20 bp, synthetic construct
  misc_feature 1..20: note = chemically synthesized
  source 1..20: mol_type = other DNA
gtactttccagcattccagt

SEQ ID NO: 29420 - DNA, 20 bp, synthetic construct
  misc_feature 1..20: note = chemically synthesized
  source 1..20: mol_type = other DNA
cattccagtgagcaatgttg

SEQ ID NO: 29421 - DNA, 20 bp, synthetic construct
  misc_feature 1..20: note = chemically synthesized
  source 1..20: mol_type = other DNA
ccagtgagcaatgttgcagt

SEQ ID NO: 29422 - DNA, 20 bp, synthetic construct
  misc_feature 1..20: note = chemically synthesized
  source 1..20: mol_type = other DNA
gcaatgttgcagtgagctct

SEQ ID NO: 29423 - DNA, 20 bp, synthetic construct
  misc_feature 1..20: note = chemically synthesized
  source 1..20: mol_type = other DNA
gttgcagtgagctctaagaa

SEQ ID NO: 29424 - DNA, 20 bp, synthetic construct
  misc_feature 1..20: note = chemically synthesized
  source 1..20: mol_type = other DNA
aaaataatctgacaacaatg

SEQ ID NO: 29425 - DNA, 20 bp, synthetic construct
  misc_feature 1..20: note = chemically synthesized
  source 1..20: mol_type = other DNA
atctgacaacaatgaagcgt

SEQ ID NO: 29426 - DNA, 20 bp, synthetic construct
  misc_feature 1..20: note = chemically synthesized
  source 1..20: mol_type = other DNA
tctgacaacaatgaagcgta

SEQ ID NO: 29427 - DNA, 20 bp, synthetic construct
  misc_feature 1..20: note = chemically synthesized
  source 1..20: mol_type = other DNA
acaatgaagcgtaaggtatt

SEQ ID NO: 29428 - DNA, 20 bp, synthetic construct
  misc_feature 1..20: note = chemically synthesized
  source 1..20: mol_type = other DNA
aatgaagcgtaaggtatttg

SEQ ID NO: 29429 - DNA, 20 bp, synthetic construct
  misc_feature 1..20: note = chemically synthesized
  source 1..20: mol_type = other DNA
gaagcgtaaggtatttggag

SEQ ID NO: 29430 - DNA, 20 bp, synthetic construct
  misc_feature 1..20: note = chemically synthesized
  source 1..20: mol_type = other DNA
aagcgtaaggtatttggagt

SEQ ID NO: 29431 - DNA, 20 bp, synthetic construct
  misc_feature 1..20: note = chemically synthesized
  source 1..20: mol_type = other DNA
cgtaaggtatttggagtggg

SEQ ID NO: 29432 - DNA, 20 bp, synthetic construct
  misc_feature 1..20: note = chemically synthesized
  source 1..20: mol_type = other DNA
tatttggagtgggaagccat

SEQ ID NO: 29433 - DNA, 20 bp, synthetic construct
  misc_feature 1..20: note = chemically synthesized
  source 1..20: mol_type = other DNA
ggaagccatgagctcttgca

SEQ ID NO: 29434 - DNA, 20 bp, synthetic construct
  misc_feature 1..20: note = chemically synthesized
  source 1..20: mol_type = other DNA
gaagccatgagctcttgcac

SEQ ID NO: 29435 - DNA, 20 bp, synthetic construct
  misc_feature 1..20: note = chemically synthesized
  source 1..20: mol_type = other DNA
tgagctcttgcacaggtttt

SEQ ID NO: 29436 - DNA, 20 bp, synthetic construct
  misc_feature 1..20: note = chemically synthesized
  source 1..20: mol_type = other DNA
ttttggacaatccttccata

SEQ ID NO: 29437 - DNA, 20 bp, synthetic construct
  misc_feature 1..20: note = chemically synthesized
  source 1..20: mol_type = other DNA
acaatccttccatatggctt

SEQ ID NO: 29438 - DNA, 20 bp, synthetic construct
  misc_feature 1..20: note = chemically synthesized
  source 1..20: mol_type = other DNA
ccttccatatggctttggca

SEQ ID NO: 29439 - DNA, 20 bp, synthetic construct
  misc_feature 1..20: note = chemically synthesized
  source 1..20: mol_type = other DNA
tactgaatctttctaaacct

SEQ ID NO: 29440 - DNA, 20 bp, synthetic construct
  misc_feature 1..20: note = chemically synthesized
  source 1..20: mol_type = other DNA
tagcttttttactatgttga

SEQ ID NO: 29441 - DNA, 20 bp, synthetic construct
  misc_feature 1..20: note = chemically synthesized
  source 1..20: mol_type = other DNA
tatgttgaaagatttccaca

SEQ ID NO: 29442 - DNA, 20 bp, synthetic construct
  misc_feature 1..20: note = chemically synthesized
  source 1..20: mol_type = other DNA
atgttgaaagatttccacat

SEQ ID NO: 29443 - DNA, 20 bp, synthetic construct
  misc_feature 1..20: note = chemically synthesized
  source 1..20: mol_type = other DNA
catgggccctgcctcttttc

SEQ ID NO: 29444 - DNA, 20 bp, synthetic construct
  misc_feature 1..20: note = chemically synthesized
  source 1..20: mol_type = other DNA
tgggccctgcctcttttcga

SEQ ID NO: 29445 - DNA, 20 bp, synthetic construct
  misc_feature 1..20: note = chemically synthesized
  source 1..20: mol_type = other DNA
ctcttttcgagagaaatgat

SEQ ID NO: 29446 - DNA, 20 bp, synthetic construct
  misc_feature 1..20: note = chemically synthesized
  source 1..20: mol_type = other DNA
tcttttcgagagaaatgatt

SEQ ID NO: 29447 - DNA, 20 bp, synthetic construct
  misc_feature 1..20: note = chemically synthesized
  source 1..20: mol_type = other DNA
agagaaatgattaggtttaa

SEQ ID NO: 29448 - DNA, 20 bp, synthetic construct
  misc_feature 1..20: note = chemically synthesized
  source 1..20: mol_type = other DNA
gagaaatgattaggtttaat

SEQ ID NO: 29449 - DNA, 20 bp, synthetic construct
  misc_feature 1..20: note = chemically synthesized
  source 1..20: mol_type = other DNA
agaaatgattaggtttaatg

SEQ ID NO: 29450 - DNA, 20 bp, synthetic construct
  misc_feature 1..20: note = chemically synthesized
  source 1..20: mol_type = other DNA
gattaggtttaatggggctg

SEQ ID NO: 29451 - DNA, 20 bp, synthetic construct
  misc_feature 1..20: note = chemically synthesized
  source 1..20: mol_type = other DNA
ttaggtttaatggggctgtg

SEQ ID NO: 29452 - DNA, 20 bp, synthetic construct
  misc_feature 1..20: note = chemically synthesized
  source 1..20: mol_type = other DNA
taggtttaatggggctgtgg

SEQ ID NO: 29453 - DNA, 20 bp, synthetic construct
  misc_feature 1..20: note = chemically synthesized
  source 1..20: mol_type = other DNA
tttaatggggctgtggagga

SEQ ID NO: 29454 - DNA, 20 bp, synthetic construct
  misc_feature 1..20: note = chemically synthesized
  source 1..20: mol_type = other DNA
aggaaagcactctgaaatgt

SEQ ID NO: 29455 - DNA, 20 bp, synthetic construct
  misc_feature 1..20: note = chemically synthesized
  source 1..20: mol_type = other DNA
aaagcactctgaaatgttag

SEQ ID NO: 29456 - DNA, 20 bp, synthetic construct
  misc_feature 1..20: note = chemically synthesized
  source 1..20: mol_type = other DNA
atgttagaagcttcatcaat

SEQ ID NO: 29457 - DNA, 20 bp, synthetic construct
  misc_feature 1..20: note = chemically synthesized
  source 1..20: mol_type = other DNA
gttagaagcttcatcaattg

SEQ ID NO: 29458 - DNA, 20 bp, synthetic construct
  misc_feature 1..20: note = chemically synthesized
  source 1..20: mol_type = other DNA
catcaattggagcaattgct

SEQ ID NO: 29459 - DNA, 20 bp, synthetic construct
  misc_feature 1..20: note = chemically synthesized
  source 1..20: mol_type = other DNA
aaccctgtatcattctctac

SEQ ID NO: 29460 - DNA, 20 bp, synthetic construct
  misc_feature 1..20: note = chemically synthesized
  source 1..20: mol_type = other DNA
accctgtatcattctctaca

SEQ ID NO: 29461 - DNA, 20 bp, synthetic construct
  misc_feature 1..20: note = chemically synthesized
  source 1..20: mol_type = other DNA
gtatcattctctacaaggca

SEQ ID NO: 29462 - DNA, 20 bp, synthetic construct
  misc_feature 1..20: note = chemically synthesized
  source 1..20: mol_type = other DNA
attctctacaaggcatagcc

SEQ ID NO: 29463 - DNA, 20 bp, synthetic construct
  misc_feature 1..20: note = chemically synthesized
  source 1..20: mol_type = other DNA
acaaggcatagcccagtaac

SEQ ID NO: 29464 - DNA, 20 bp, synthetic construct
  misc_feature 1..20: note = chemically synthesized
  source 1..20: mol_type = other DNA
gcatagcccagtaacaagtc

SEQ ID NO: 29465 - DNA, 20 bp, synthetic construct
  misc_feature 1..20: note = chemically synthesized
  source 1..20: mol_type = other DNA
cttccccatcaaaaacatca

SEQ ID NO: 29466 - DNA, 20 bp, synthetic construct
  misc_feature 1..20: note = chemically synthesized
  source 1..20: mol_type = other DNA
ttccccatcaaaaacatcac

SEQ ID NO: 29467 - DNA, 20 bp, synthetic construct
  misc_feature 1..20: note = chemically synthesized
  source 1..20: mol_type = other DNA
ccccatcaaaaacatcacgg

SEQ ID NO: 29468 - DNA, 20 bp, synthetic construct
  misc_feature 1..20: note = chemically synthesized
  source 1..20: mol_type = other DNA
aaacatcacgggagatatga

SEQ ID NO: 29469 - DNA, 20 bp, synthetic construct
  misc_feature 1..20: note = chemically synthesized
  source 1..20: mol_type = other DNA
tcacgggagatatgatagaa

SEQ ID NO: 29470 - DNA, 20 bp, synthetic construct
  misc_feature 1..20: note = chemically synthesized
  source 1..20: mol_type = other DNA
cgggagatatgatagaacag

SEQ ID NO: 29471 - DNA, 20 bp, synthetic construct
  misc_feature 1..20: note = chemically synthesized
  source 1..20: mol_type = other DNA
tagaacagcagccctaacaa

SEQ ID NO: 29472 - DNA, 20 bp, synthetic construct
  misc_feature 1..20: note = chemically synthesized
  source 1..20: mol_type = other DNA
cagcagccctaacaacagat

SEQ ID NO: 29473 - DNA, 20 bp, synthetic construct
  misc_feature 1..20: note = chemically synthesized
  source 1..20: mol_type = other DNA
caacagattggccatcttcc

SEQ ID NO: 29474 - DNA, 20 bp, synthetic construct
  misc_feature 1..20: note = chemically synthesized
  source 1..20: mol_type = other DNA
cagattggccatcttcctgg

SEQ ID NO: 29475 - DNA, 20 bp, synthetic construct
  misc_feature 1..20: note = chemically synthesized
  source 1..20: mol_type = other DNA
ctattccataaccctgcata

SEQ ID NO: 29476 - DNA, 20 bp, synthetic construct
  misc_feature 1..20: note = chemically synthesized
  source 1..20: mol_type = other DNA
aaccctgcatatagtcatgc

SEQ ID NO: 29477 - DNA, 20 bp, synthetic construct
  misc_feature 1..20: note = chemically synthesized
  source 1..20: mol_type = other DNA
tgcatatagtcatgctagat

SEQ ID NO: 29478 - DNA, 20 bp, synthetic construct
  misc_feature 1..20: note = chemically synthesized
  source 1..20: mol_type = other DNA
gcatatagtcatgctagata

SEQ ID NO: 29479 - DNA, 20 bp, synthetic construct
  misc_feature 1..20: note = chemically synthesized
  source 1..20: mol_type = other DNA
catatagtcatgctagataa

SEQ ID NO: 29480 - DNA, 20 bp, synthetic construct
  misc_feature 1..20: note = chemically synthesized
  source 1..20: mol_type = other DNA
tcatgctagataagggatat

SEQ ID NO: 29481 - DNA, 20 bp, synthetic construct
  misc_feature 1..20: note = chemically synthesized
  source 1..20: mol_type = other DNA
atgctagataagggatatta

SEQ ID NO: 29482 - DNA, 20 bp, synthetic construct
  misc_feature 1..20: note = chemically synthesized
  source 1..20: mol_type = other DNA
gctagataagggatattaga

SEQ ID NO: 29483 - DNA, 20 bp, synthetic construct
  misc_feature 1..20: note = chemically synthesized
  source 1..20: mol_type = other DNA
ctagataagggatattagag

SEQ ID NO: 29484 - DNA, 20 bp, synthetic construct
  misc_feature 1..20: note = chemically synthesized
  source 1..20: mol_type = other DNA
cttcctttatccacaaaaca

SEQ ID NO: 29485 - DNA, 20 bp, synthetic construct
  misc_feature 1..20: note = chemically synthesized
  source 1..20: mol_type = other DNA
ttcctttatccacaaaacaa

SEQ ID NO: 29486 - DNA, 20 bp, synthetic construct
  misc_feature 1..20: note = chemically synthesized
  source 1..20: mol_type = other DNA
tccacaaaacaaaggacctt

SEQ ID NO: 29487 - DNA, 20 bp, synthetic construct
  misc_feature 1..20: note = chemically synthesized
  source 1..20: mol_type = other DNA
aaggaccttcagcaacttac

SEQ ID NO: 29488 - DNA, 20 bp, synthetic construct
  misc_feature 1..20: note = chemically synthesized
  source 1..20: mol_type = other DNA
tactggtcctttcttctctg

SEQ ID NO: 29489 - DNA, 20 bp, synthetic construct
  misc_feature 1..20: note = chemically synthesized
  source 1..20: mol_type = other DNA
tctgtagcttctttctcatg

SEQ ID NO: 29490 - DNA, 20 bp, synthetic construct
  misc_feature 1..20: note = chemically synthesized
  source 1..20: mol_type = other DNA
gcagcccttccactccatgc

SEQ ID NO: 29491 - DNA, 20 bp, synthetic construct
  misc_feature 1..20: note = chemically synthesized
  source 1..20: mol_type = other DNA
ccagcatcttccatttgact

SEQ ID NO: 29492 - DNA, 20 bp, synthetic construct
  misc_feature 1..20: note = chemically synthesized
  source 1..20: mol_type = other DNA
cagcatcttccatttgactc

SEQ ID NO: 29493 - DNA, 20 bp, synthetic construct
  misc_feature 1..20: note = chemically synthesized
  source 1..20: mol_type = other DNA
actcaggatgctgttctacg

SEQ ID NO: 29494 - DNA, 20 bp, synthetic construct
  misc_feature 1..20: note = chemically synthesized
  source 1..20: mol_type = other DNA
ctcaggatgctgttctacgt

SEQ ID NO: 29495 - DNA, 20 bp, synthetic construct
  misc_feature 1..20: note = chemically synthesized
  source 1..20: mol_type = other DNA
ctgttctacgtgggctgcac

SEQ ID NO: 29496 - DNA, 20 bp, synthetic construct
  misc_feature 1..20: note = chemically synthesized
  source 1..20: mol_type = other DNA
gggctgcactggcacttata

SEQ ID NO: 29497 - DNA, 20 bp, synthetic construct
  misc_feature 1..20: note = chemically synthesized
  source 1..20: mol_type = other DNA
ataaagctgtctctcttcct

SEQ ID NO: 29498 - DNA, 20 bp, synthetic construct
  misc_feature 1..20: note = chemically synthesized
  source 1..20: mol_type = other DNA
taaagctgtctctcttcctt

SEQ ID NO: 29499 - DNA, 20 bp, synthetic construct
  misc_feature 1..20: note = chemically synthesized
  source 1..20: mol_type = other DNA
gtctctcttccttgggtctt

SEQ ID NO: 29500 - DNA, 20 bp, synthetic construct
  misc_feature 1..20: note = chemically synthesized
  source 1..20: mol_type = other DNA
ccttgggtctttggccctca

SEQ ID NO: 29501 - DNA, 20 bp, synthetic construct
  misc_feature 1..20: note = chemically synthesized
  source 1..20: mol_type = other DNA
cttgggtctttggccctcaa

SEQ ID NO: 29502 - DNA, 20 bp, synthetic construct
  misc_feature 1..20: note = chemically synthesized
  source 1..20: mol_type = other DNA
ggccctcaaaggaatctccc

SEQ ID NO: 29503 - DNA, 20 bp, synthetic construct
  misc_feature 1..20: note = chemically synthesized
  source 1..20: mol_type = other DNA
ctcaaaggaatctccctaga

SEQ ID NO: 29504 - DNA, 20 bp, synthetic construct
  misc_feature 1..20: note = chemically synthesized
  source 1..20: mol_type = other DNA
ggaatctccctagatggacg

SEQ ID NO: 29505 - DNA, 20 bp, synthetic construct
  misc_feature 1..20: note = chemically synthesized
  source 1..20: mol_type = other DNA
cgcagacttgatgaatgtca

SEQ ID NO: 29506 - DNA, 20 bp, synthetic construct
  misc_feature 1..20: note = chemically synthesized
  source 1..20: mol_type = other DNA
cagacttgatgaatgtcaaa

SEQ ID NO: 29507 - DNA, 20 bp, synthetic construct
  misc_feature 1..20: note = chemically synthesized
  source 1..20: mol_type = other DNA
agacttgatgaatgtcaaag

SEQ ID NO: 29508 - DNA, 20 bp, synthetic construct
  misc_feature 1..20: note = chemically synthesized
  source 1..20: mol_type = other DNA
gacttgatgaatgtcaaaga

SEQ ID NO: 29509 - DNA, 20 bp, synthetic construct
  misc_feature 1..20: note = chemically synthesized
  source 1..20: mol_type = other DNA
gatgaatgtcaaagagggat

SEQ ID NO: 29510 - DNA, 20 bp, synthetic construct
  misc_feature 1..20: note = chemically synthesized
  source 1..20: mol_type = other DNA
aagagggattagcatcctcc

SEQ ID NO: 29511 - DNA, 20 bp, synthetic construct
  misc_feature 1..20: note = chemically synthesized
  source 1..20: mol_type = other DNA
attagcatcctcctagacca

SEQ ID NO: 29512 - DNA, 20 bp, synthetic construct
  misc_feature 1..20: note = chemically synthesized
  source 1..20: mol_type = other DNA
cctcctagaccaaagcattt

SEQ ID NO: 29513 - DNA, 20 bp, synthetic construct
  misc_feature 1..20: note = chemically synthesized
  source 1..20: mol_type = other DNA
accaaagcatttgagatgcc

SEQ ID NO: 29514 - DNA, 20 bp, synthetic construct
  misc_feature 1..20: note = chemically synthesized
  source 1..20: mol_type = other DNA
agatgcccagttatcttaaa

SEQ ID NO: 29515 - DNA, 20 bp, synthetic construct
  misc_feature 1..20: note = chemically synthesized
  source 1..20: mol_type = other DNA
agttatcttaaatggaaatt

SEQ ID NO: 29516 - DNA, 20 bp, synthetic construct
  misc_feature 1..20: note = chemically synthesized
  source 1..20: mol_type = other DNA
atggaaatttagtgaaccat

SEQ ID NO: 29517 - DNA, 20 bp, synthetic construct
  misc_feature 1..20: note = chemically synthesized
  source 1..20: mol_type = other DNA
tagtgaaccatgagtacctc

SEQ ID NO: 29518 - DNA, 20 bp, synthetic construct
  misc_feature 1..20: note = chemically synthesized
  source 1..20: mol_type = other DNA
agtgaaccatgagtacctct

SEQ ID NO: 29519 - DNA, 20 bp, synthetic construct
  misc_feature 1..20: note = chemically synthesized
  source 1..20: mol_type = other DNA
tgaaccatgagtacctctag

SEQ ID NO: 29520 - DNA, 20 bp, synthetic construct
  misc_feature 1..20: note = chemically synthesized
  source 1..20: mol_type = other DNA
gaaccatgagtacctctagg

SEQ ID NO: 29521 - DNA, 20 bp, synthetic construct
  misc_feature 1..20: note = chemically synthesized
  source 1..20: mol_type = other DNA
agtacctctaggaggtattt

SEQ ID NO: 29522 - DNA, 20 bp, synthetic construct
  misc_feature 1..20: note = chemically synthesized
  source 1..20: mol_type = other DNA
cctctaggaggtatttcagt

SEQ ID NO: 29523 - DNA, 20 bp, synthetic construct
  misc_feature 1..20: note = chemically synthesized
  source 1..20: mol_type = other DNA
taggaggtatttcagtgagc

SEQ ID NO: 29524 - DNA, 20 bp, synthetic construct
  misc_feature 1..20: note = chemically synthesized
  source 1..20: mol_type = other DNA
ggaggtatttcagtgagcca

SEQ ID NO: 29525 - DNA, 20 bp, synthetic construct
  misc_feature 1..20: note = chemically synthesized
  source 1..20: mol_type = other DNA
gaggtatttcagtgagccag

SEQ ID NO: 29526 - DNA, 20 bp, synthetic construct
  misc_feature 1..20: note = chemically synthesized
  source 1..20: mol_type = other DNA
ccttgactgtcttctctccc

SEQ ID NO: 29527 - DNA, 20 bp, synthetic construct
  misc_feature 1..20: note = chemically synthesized
  source 1..20: mol_type = other DNA
tccccagctgccaacttcat

SEQ ID NO: 29528 - DNA, 20 bp, synthetic construct
  misc_feature 1..20: note = chemically synthesized
  source 1..20: mol_type = other DNA
aacttcataagaaaatttat

SEQ ID NO: 29529 - DNA, 20 bp, synthetic construct
  misc_feature 1..20: note = chemically synthesized
  source 1..20: mol_type = other DNA
acttcataagaaaatttatt

SEQ ID NO: 29530 - DNA, 20 bp, synthetic construct
  misc_feature 1..20: note = chemically synthesized
  source 1..20: mol_type = other DNA
ttgtctttcttttcttttcc

SEQ ID NO: 29531 - DNA, 20 bp, synthetic construct
  misc_feature 1..20: note = chemically synthesized
  source 1..20: mol_type = other DNA
tcttttcttttcccagacaa

SEQ ID NO: 29532 - DNA, 20 bp, synthetic construct
  misc_feature 1..20: note = chemically synthesized
  source 1..20: mol_type = other DNA
tcccagacaaaagtcccctt

SEQ ID NO: 29533 - DNA, 20 bp, synthetic construct
  misc_feature 1..20: note = chemically synthesized
  source 1..20: mol_type = other DNA
agacaaaagtccccttgaga

SEQ ID NO: 29534 - DNA, 20 bp, synthetic construct
  misc_feature 1..20: note = chemically synthesized
  source 1..20: mol_type = other DNA
cttgagacagtctttacaac

SEQ ID NO: 29535 - DNA, 20 bp, synthetic construct
  misc_feature 1..20: note = chemically synthesized
  source 1..20: mol_type = other DNA
ttgagacagtctttacaacc

SEQ ID NO: 29536 - DNA, 20 bp, synthetic construct
  misc_feature 1..20: note = chemically synthesized
  source 1..20: mol_type = other DNA
agacagtctttacaaccagg

SEQ ID NO: 29537 - DNA, 20 bp, synthetic construct
  misc_feature 1..20: note = chemically synthesized
  source 1..20: mol_type = other DNA
gttattcactgtcattcact

SEQ ID NO: 29538 - DNA, 20 bp, synthetic construct
  misc_feature 1..20: note = chemically synthesized
  source 1..20: mol_type = other DNA
ttcactgtcattcactgagc

SEQ ID NO: 29539 - DNA, 20 bp, synthetic construct
  misc_feature 1..20: note = chemically synthesized
  source 1..20: mol_type = other DNA
attcactgagcaagtatgta

SEQ ID NO: 29540 - DNA, 20 bp, synthetic construct
  misc_feature 1..20: note = chemically synthesized
  source 1..20: mol_type = other DNA
agcaagtatgtaaagatcac

SEQ ID NO: 29541 - DNA, 20 bp, synthetic construct
  misc_feature 1..20: note = chemically synthesized
  source 1..20: mol_type = other DNA
tatgtaaagatcacaagctt

SEQ ID NO: 29542 - DNA, 20 bp, synthetic construct
  misc_feature 1..20: note = chemically synthesized
  source 1..20: mol_type = other DNA
atgtaaagatcacaagcttt

SEQ ID NO: 29543 - DNA, 20 bp, synthetic construct
  misc_feature 1..20: note = chemically synthesized
  source 1..20: mol_type = other DNA
aaagatcacaagctttgggt

SEQ ID NO: 29544 - DNA, 20 bp, synthetic construct
  misc_feature 1..20: note = chemically synthesized
  source 1..20: mol_type = other DNA
tgggtcagatatttgaatgc

SEQ ID NO: 29545 - DNA, 20 bp, synthetic construct
  misc_feature 1..20: note = chemically synthesized
  source 1..20: mol_type = other DNA
atttgaatgcaagcattaat

SEQ ID NO: 29546 - DNA, 20 bp, synthetic construct
  misc_feature 1..20: note = chemically synthesized
  source 1..20: mol_type = other DNA
aagacacaaactctgtcttt

SEQ ID NO: 29547 - DNA, 20 bp, synthetic construct
  misc_feature 1..20: note = chemically synthesized
  source 1..20: mol_type = other DNA
cacaaactctgtctttcaga

SEQ ID NO: 29548 - DNA, 20 bp, synthetic construct
  misc_feature 1..20: note = chemically synthesized
  source 1..20: mol_type = other DNA
tcagaaagcattgtcttctg

SEQ ID NO: 29549 - DNA, 20 bp, synthetic construct
  misc_feature 1..20: note = chemically synthesized
  source 1..20: mol_type = other DNA
cagaaagcattgtcttctgc

SEQ ID NO: 29550 - DNA, 20 bp, synthetic construct
  misc_feature 1..20: note = chemically synthesized
  source 1..20: mol_type = other DNA
gaaagcattgtcttctgcag

SEQ ID NO: 29551 - DNA, 20 bp, synthetic construct
  misc_feature 1..20: note = chemically synthesized
  source 1..20: mol_type = other DNA
aaagcattgtcttctgcagg

SEQ ID NO: 29552 - DNA, 20 bp, synthetic construct
  misc_feature 1..20: note = chemically synthesized
  source 1..20: mol_type = other DNA
aaaactaacgtcccctgatg

SEQ ID NO: 29553 - DNA, 20 bp, synthetic construct
  misc_feature 1..20: note = chemically synthesized
  source 1..20: mol_type = other DNA
gtcccctgatgaagcaaaaa

SEQ ID NO: 29554 - DNA, 20 bp, synthetic construct
  misc_feature 1..20: note = chemically synthesized
  source 1..20: mol_type = other DNA
tcccctgatgaagcaaaaac

SEQ ID NO: 29555 - DNA, 20 bp, synthetic construct
  misc_feature 1..20: note = chemically synthesized
  source 1..20: mol_type = other DNA
tgaagcaaaaacaggcttcc

SEQ ID NO: 29556 - DNA, 20 bp, synthetic construct
  misc_feature 1..20: note = chemically synthesized
  source 1..20: mol_type = other DNA
gaagcaaaaacaggcttccc

SEQ ID NO: 29557 - DNA, 20 bp, synthetic construct
  misc_feature 1..20: note = chemically synthesized
  source 1..20: mol_type = other DNA
tcccaggtgatacaaatatt

SEQ ID NO: 29558 - DNA, 20 bp, synthetic construct
  misc_feature 1..20: note = chemically synthesized
  source 1..20: mol_type = other DNA
aggtgatacaaatatttagc

SEQ ID NO: 29559 - DNA, 20 bp, synthetic construct
  misc_feature 1..20: note = chemically synthesized
  source 1..20: mol_type = other DNA
gtctgcactatcattcaaaa

SEQ ID NO: 29560 - DNA, 20 bp, synthetic construct
  misc_feature 1..20: note = chemically synthesized
  source 1..20: mol_type = other DNA
tctgcactatcattcaaaat

SEQ ID NO: 29561 - DNA, 20 bp, synthetic construct
  misc_feature 1..20: note = chemically synthesized
  source 1..20: mol_type = other DNA
attcaaaataggtaacattt

SEQ ID NO: 29562 - DNA, 20 bp, synthetic construct
  misc_feature 1..20: note = chemically synthesized
  source 1..20: mol_type = other DNA
aaaataggtaacattttaga

SEQ ID NO: 29563 - DNA, 20 bp, synthetic construct
  misc_feature 1..20: note = chemically synthesized
  source 1..20: mol_type = other DNA
aataggtaacattttagata

SEQ ID NO: 29564 - DNA, 20 bp, synthetic construct
  misc_feature 1..20: note = chemically synthesized
  source 1..20: mol_type = other DNA
ataggtaacattttagatag

SEQ ID NO: 29565 - DNA, 20 bp, synthetic construct
  misc_feature 1..20: note = chemically synthesized
  source 1..20: mol_type = other DNA
taggtaacattttagataga

SEQ ID NO: 29566 - DNA, 20 bp, synthetic construct
  misc_feature 1..20: note = chemically synthesized
  source 1..20: mol_type = other DNA
aggtaacattttagatagag

SEQ ID NO: 29567 - DNA, 20 bp, synthetic construct
  misc_feature 1..20: note = chemically synthesized
  source 1..20: mol_type = other DNA
tagaggggaaaacatgtaca

SEQ ID NO: 29568 - DNA, 20 bp, synthetic construct
  misc_feature 1..20: note = chemically synthesized
  source 1..20: mol_type = other DNA
agaggggaaaacatgtacaa

SEQ ID NO: 29569 - DNA, 20 bp, synthetic construct
  misc_feature 1..20: note = chemically synthesized
  source 1..20: mol_type = other DNA
ggaaaacatgtacaaaggct

SEQ ID NO: 29570 - DNA, 20 bp, synthetic construct
  misc_feature 1..20: note = chemically synthesized
  source 1..20: mol_type = other DNA
aaaacatgtacaaaggctca

SEQ ID NO: 29571 - DNA, 20 bp, synthetic construct
  misc_feature 1..20: note = chemically synthesized
  source 1..20: mol_type = other DNA
aaaggctcagagttgtcaca

SEQ ID NO: 29572 - DNA, 20 bp, synthetic construct
  misc_feature 1..20: note = chemically synthesized
  source 1..20: mol_type = other DNA
tctgtgaacttcaattacat

SEQ ID NO: 29573 - DNA, 20 bp, synthetic construct
  misc_feature 1..20: note = chemically synthesized
  source 1..20: mol_type = other DNA
ccatctgtgttttacaaata

SEQ ID NO: 29574 - DNA, 20 bp, synthetic construct
  misc_feature 1..20: note = chemically synthesized
  source 1..20: mol_type = other DNA
caaatacagtatcaatttca

SEQ ID NO: 29575 - DNA, 20 bp, synthetic construct
  misc_feature 1..20: note = chemically synthesized
  source 1..20: mol_type = other DNA
aaatacagtatcaatttcaa

SEQ ID NO: 29576 - DNA, 20 bp, synthetic construct
  misc_feature 1..20: note = chemically synthesized
  source 1..20: mol_type = other DNA
cagtatcaatttcaaaggct

SEQ ID NO: 29577 - DNA, 20 bp, synthetic construct
  misc_feature 1..20: note = chemically synthesized
  source 1..20: mol_type = other DNA
gtatcaatttcaaaggctta

SEQ ID NO: 29578 - DNA, 20 bp, synthetic construct
  misc_feature 1..20: note = chemically synthesized
  source 1..20: mol_type = other DNA
atcaatttcaaaggcttaga

SEQ ID NO: 29579 - DNA, 20 bp, synthetic construct
  misc_feature 1..20: note = chemically synthesized
  source 1..20: mol_type = other DNA
tcaatttcaaaggcttagag

SEQ ID NO: 29580 - DNA, 20 bp, synthetic construct
  misc_feature 1..20: note = chemically synthesized
  source 1..20: mol_type = other DNA
caaaggcttagagaggcttg

SEQ ID NO: 29581 - DNA, 20 bp, synthetic construct
  misc_feature 1..20: note = chemically synthesized
  source 1..20: mol_type = other DNA
ggcttgtggatattaaataa

SEQ ID NO: 29582 - DNA, 20 bp, synthetic construct
  misc_feature 1..20: note = chemically synthesized
  source 1..20: mol_type = other DNA
gcttgtggatattaaataac

SEQ ID NO: 29583 - DNA, 20 bp, synthetic construct
  misc_feature 1..20: note = chemically synthesized
  source 1..20: mol_type = other DNA
gtggatattaaataacggga

SEQ ID NO: 29584 - DNA, 20 bp, synthetic construct
  misc_feature 1..20: note = chemically synthesized
  source 1..20: mol_type = other DNA
taaataacgggatagttgta

SEQ ID NO: 29585 - DNA, 20 bp, synthetic construct
  misc_feature 1..20: note = chemically synthesized
  source 1..20: mol_type = other DNA
gttgtaaagatttttgcctg

SEQ ID NO: 29586 - DNA, 20 bp, synthetic construct
  misc_feature 1..20: note = chemically synthesized
  source 1..20: mol_type = other DNA
ttgtaaagatttttgcctgc

SEQ ID NO: 29587 - DNA, 20 bp, synthetic construct
  misc_feature 1..20: note = chemically synthesized
  source 1..20: mol_type = other DNA
gatttttgcctgcaggaata

SEQ ID NO: 29588 - DNA, 20 bp, synthetic construct
  misc_feature 1..20: note = chemically synthesized
  source 1..20: mol_type = other DNA
atttttgcctgcaggaatat

SEQ ID NO: 29589 - DNA, 20 bp, synthetic construct
  misc_feature 1..20: note = chemically synthesized
  source 1..20: mol_type = other DNA
caggaatataggcttgtgct

SEQ ID NO: 29590 - DNA, 20 bp, synthetic construct
  misc_feature 1..20: note = chemically synthesized
  source 1..20: mol_type = other DNA
aggaatataggcttgtgctg

SEQ ID NO: 29591 - DNA, 20 bp, synthetic construct
  misc_feature 1..20: note = chemically synthesized
  source 1..20: mol_type = other DNA
tataggcttgtgctgaggaa

SEQ ID NO: 29592 - DNA, 20 bp, synthetic construct
  misc_feature 1..20: note = chemically synthesized
  source 1..20: mol_type = other DNA
ataggcttgtgctgaggaat

SEQ ID NO: 29593 - DNA, 20 bp, synthetic construct
  misc_feature 1..20: note = chemically synthesized
  source 1..20: mol_type = other DNA
gcttgtgctgaggaatgggc

SEQ ID NO: 29594 - DNA, 20 bp, synthetic construct
  misc_feature 1..20: note = chemically synthesized
  source 1..20: mol_type = other DNA
ggaatgggccagatgattta

SEQ ID NO: 29595 - DNA, 20 bp, synthetic construct
  misc_feature 1..20: note = chemically synthesized
  source 1..20: mol_type = other DNA
atgggccagatgatttaaag

SEQ ID NO: 29596 - DNA, 20 bp, synthetic construct
  misc_feature 1..20: note = chemically synthesized
  source 1..20: mol_type = other DNA
tttaaagcagatactgtcat

SEQ ID NO: 29597 - DNA, 20 bp, synthetic construct
  misc_feature 1..20: note = chemically synthesized
  source 1..20: mol_type = other DNA
aaagcagatactgtcattag

SEQ ID NO: 29598 - DNA, 20 bp, synthetic construct
  misc_feature 1..20: note = chemically synthesized
  source 1..20: mol_type = other DNA
aagcagatactgtcattagc

SEQ ID NO: 29599 - DNA, 20 bp, synthetic construct
  misc_feature 1..20: note = chemically synthesized
  source 1..20: mol_type = other DNA
gtcattagcaggaatatgta

SEQ ID NO: 29600 - DNA, 20 bp, synthetic construct
  misc_feature 1..20: note = chemically synthesized
  source 1..20: mol_type = other DNA
agcaggaatatgtacagctt

SEQ ID NO: 29601 - DNA, 20 bp, synthetic construct
  misc_feature 1..20: note = chemically synthesized
  source 1..20: mol_type = other DNA
ggctgattttatgttttttt

SEQ ID NO: 29602 - DNA, 20 bp, synthetic construct
  misc_feature 1..20: note = chemically synthesized
  source 1..20: mol_type = other DNA
gtttgttgttgttgttgaat

SEQ ID NO: 29603 - DNA, 20 bp, synthetic construct
  misc_feature 1..20: note = chemically synthesized
  source 1..20: mol_type = other DNA
tgttgttgttgttgaatcag

SEQ ID NO: 29604 - DNA, 20 bp, synthetic construct
  misc_feature 1..20: note = chemically synthesized
  source 1..20: mol_type = other DNA
ttgttgttgttgaatcagtg

SEQ ID NO: 29605 - DNA, 20 bp, synthetic construct
  misc_feature 1..20: note = chemically synthesized
  source 1..20: mol_type = other DNA
gttgttgaatcagtggagca

SEQ ID NO: 29606 - DNA, 20 bp, synthetic construct
  misc_feature 1..20: note = chemically synthesized
  source 1..20: mol_type = other DNA
tggagcatagttaaaactac

SEQ ID NO: 29607 - DNA, 20 bp, synthetic construct
  misc_feature 1..20: note = chemically synthesized
  source 1..20: mol_type = other DNA
agttaaaactacaagcacca

SEQ ID NO: 29608 - DNA, 20 bp, synthetic construct
  misc_feature 1..20: note = chemically synthesized
  source 1..20: mol_type = other DNA
aaaactacaagcaccacagt

SEQ ID NO: 29609 - DNA, 20 bp, synthetic construct
  misc_feature 1..20: note = chemically synthesized
  source 1..20: mol_type = other DNA
acagtcagaactgtcaaact

SEQ ID NO: 29610 - DNA, 20 bp, synthetic construct
  misc_feature 1..20: note = chemically synthesized
  source 1..20: mol_type = other DNA
tgtcaaacttggtataatat

SEQ ID NO: 29611 - DNA, 20 bp, synthetic construct
  misc_feature 1..20: note = chemically synthesized
  source 1..20: mol_type = other DNA
gtcaaacttggtataatatt

SEQ ID NO: 29612 - DNA, 20 bp, synthetic construct
  misc_feature 1..20: note = chemically synthesized
  source 1..20: mol_type = other DNA
aacttggtataatattgggc

SEQ ID NO: 29613 - DNA, 20 bp, synthetic construct
  misc_feature 1..20: note = chemically synthesized
  source 1..20: mol_type = other DNA
gggcaagatattttgtctct

SEQ ID NO: 29614 - DNA, 20 bp, synthetic construct
  misc_feature 1..20: note = chemically synthesized
  source 1..20: mol_type = other DNA
gatattttgtctctgagcct

SEQ ID NO: 29615 - DNA, 20 bp, synthetic construct
  misc_feature 1..20: note = chemically synthesized
  source 1..20: mol_type = other DNA
cagtgtacttatctgtaaaa

SEQ ID NO: 29616 - DNA, 20 bp, synthetic construct
  misc_feature 1..20: note = chemically synthesized
  source 1..20: mol_type = other DNA
agtgtacttatctgtaaaat

SEQ ID NO: 29617 - DNA, 20 bp, synthetic construct
  misc_feature 1..20: note = chemically synthesized
  source 1..20: mol_type = other DNA
tatctgtaaaatgggtaatc

SEQ ID NO: 29618 - DNA, 20 bp, synthetic construct
  misc_feature 1..20: note = chemically synthesized
  source 1..20: mol_type = other DNA
ctgtaaaatgggtaatctag

SEQ ID NO: 29619 - DNA, 20 bp, synthetic construct
  misc_feature 1..20: note = chemically synthesized
  source 1..20: mol_type = other DNA
tctagtagtatccatctcat

SEQ ID NO: 29620 - DNA, 20 bp, synthetic construct
  misc_feature 1..20: note = chemically synthesized
  source 1..20: mol_type = other DNA
ctagtagtatccatctcata

SEQ ID NO: 29621 - DNA, 20 bp, synthetic construct
  misc_feature 1..20: note = chemically synthesized
  source 1..20: mol_type = other DNA
catctcataaggttattgtc

SEQ ID NO: 29622 - DNA, 20 bp, synthetic construct
  misc_feature 1..20: note = chemically synthesized
  source 1..20: mol_type = other DNA
ataaggttattgtcaagata

SEQ ID NO: 29623 - DNA, 20 bp, synthetic construct
  misc_feature 1..20: note = chemically synthesized
  source 1..20: mol_type = other DNA
tgtcaagataaagtgactta

SEQ ID NO: 29624 - DNA, 20 bp, synthetic construct
  misc_feature 1..20: note = chemically synthesized
  source 1..20: mol_type = other DNA
cttatagtgtattatgccct

SEQ ID NO: 29625 - DNA, 20 bp, synthetic construct
  misc_feature 1..20: note = chemically synthesized
  source 1..20: mol_type = other DNA
tatgcccttagaataatacc

SEQ ID NO: 29626 - DNA, 20 bp, synthetic construct
  misc_feature 1..20: note = chemically synthesized
  source 1..20: mol_type = other DNA
atgcccttagaataatacct

SEQ ID NO: 29627 - DNA, 20 bp, synthetic construct
  misc_feature 1..20: note = chemically synthesized
  source 1..20: mol_type = other DNA
aaaaaccatgatatgcaaaa

SEQ ID NO: 29628 - DNA, 20 bp, synthetic construct
  misc_feature 1..20: note = chemically synthesized
  source 1..20: mol_type = other DNA
aaccatgatatgcaaaatag

SEQ ID NO: 29629 - DNA, 20 bp, synthetic construct
  misc_feature 1..20: note = chemically synthesized
  source 1..20: mol_type = other DNA
accatgatatgcaaaataga

SEQ ID NO: 29630 - DNA, 20 bp, synthetic construct
  misc_feature 1..20: note = chemically synthesized
  source 1..20: mol_type = other DNA
tatgcaaaatagaaggtact

SEQ ID NO: 29631 - DNA, 20 bp, synthetic construct
  misc_feature 1..20: note = chemically synthesized
  source 1..20: mol_type = other DNA
ggtactcagtaccttctact

SEQ ID NO: 29632 - DNA, 20 bp, synthetic construct
  misc_feature 1..20: note = chemically synthesized
  source 1..20: mol_type = other DNA
aatctataactcttaaaatc

SEQ ID NO: 29633 - DNA, 20 bp, synthetic construct
  misc_feature 1..20: note = chemically synthesized
  source 1..20: mol_type = other DNA
ttaaaatcaagtctattaaa

SEQ ID NO: 29634 - DNA, 20 bp, synthetic construct
  misc_feature 1..20: note = chemically synthesized
  source 1..20: mol_type = other DNA
tatcttttcctgatactaaa

SEQ ID NO: 29635 - DNA, 20 bp, synthetic construct
  misc_feature 1..20: note = chemically synthesized
  source 1..20: mol_type = other DNA
cctgatactaaatggaaaaa

SEQ ID NO: 29636 - DNA, 20 bp, synthetic construct
  misc_feature 1..20: note = chemically synthesized
  source 1..20: mol_type = other DNA
gaaaaatagataacatattc

SEQ ID NO: 29637 - DNA, 20 bp, synthetic construct
  misc_feature 1..20: note = chemically synthesized
  source 1..20: mol_type = other DNA
aaaaatagataacatattct

SEQ ID NO: 29638 - DNA, 20 bp, synthetic construct
  misc_feature 1..20: note = chemically synthesized
  source 1..20: mol_type = other DNA
atagataacatattctagga

SEQ ID NO: 29639 - DNA, 20 bp, synthetic construct
  misc_feature 1..20: note = chemically synthesized
  source 1..20: mol_type = other DNA
tagataacatattctaggaa

SEQ ID NO: 29640 - DNA, 20 bp, synthetic construct
  misc_feature 1..20: note = chemically synthesized
  source 1..20: mol_type = other DNA
agataacatattctaggaaa

SEQ ID NO: 29641 - DNA, 20 bp, synthetic construct
  misc_feature 1..20: note = chemically synthesized
  source 1..20: mol_type = other DNA
attctaggaaagggaacaaa

SEQ ID NO: 29642 - DNA, 20 bp, synthetic construct
  misc_feature 1..20: note = chemically synthesized
  source 1..20: mol_type = other DNA
taggaaagggaacaaaaagt

SEQ ID NO: 29643 - DNA, 20 bp, synthetic construct
  misc_feature 1..20: note = chemically synthesized
  source 1..20: mol_type = other DNA
aggaaagggaacaaaaagtt

SEQ ID NO: 29644 - DNA, 20 bp, synthetic construct
  misc_feature 1..20: note = chemically synthesized
  source 1..20: mol_type = other DNA
ggaaagggaacaaaaagtta

SEQ ID NO: 29645 - DNA, 20 bp, synthetic construct
  misc_feature 1..20: note = chemically synthesized
  source 1..20: mol_type = other DNA
aaagggaacaaaaagttagg

SEQ ID NO: 29646 - DNA, 20 bp, synthetic construct
  misc_feature 1..20: note = chemically synthesized
  source 1..20: mol_type = other DNA
gggaacaaaaagttagggag

SEQ ID NO: 29647 - DNA, 20 bp, synthetic construct
  misc_feature 1..20: note = chemically synthesized
  source 1..20: mol_type = other DNA
agttagggagaagccaatga

SEQ ID NO: 29648 - DNA, 20 bp, synthetic construct
  misc_feature 1..20: note = chemically synthesized
  source 1..20: mol_type = other DNA
gttagggagaagccaatgat

SEQ ID NO: 29649 - DNA, 20 bp, synthetic construct
  misc_feature 1..20: note = chemically synthesized
  source 1..20: mol_type = other DNA
gccaatgatgggacttcctt

SEQ ID NO: 29650 - DNA, 20 bp, synthetic construct
  misc_feature 1..20: note = chemically synthesized
  source 1..20: mol_type = other DNA
ggacttccttcagtataaca

SEQ ID NO: 29651 - DNA, 20 bp, synthetic construct
  misc_feature 1..20: note = chemically synthesized
  source 1..20: mol_type = other DNA
tcagtataacatggaaaaca

SEQ ID NO: 29652 - DNA, 20 bp, synthetic construct
  misc_feature 1..20: note = chemically synthesized
  source 1..20: mol_type = other DNA
ggaaaacatggccctgaaac

SEQ ID NO: 29653 - DNA, 20 bp, synthetic construct
  misc_feature 1..20: note = chemically synthesized
  source 1..20: mol_type = other DNA
aaacatggccctgaaacgag

SEQ ID NO: 29654 - DNA, 20 bp, synthetic construct
  misc_feature 1..20: note = chemically synthesized
  source 1..20: mol_type = other DNA
ctgaaacgagtggtcctgtt

SEQ ID NO: 29655 - DNA, 20 bp, synthetic construct
  misc_feature 1..20: note = chemically synthesized
  source 1..20: mol_type = other DNA
gaaacgagtggtcctgtttg

SEQ ID NO: 29656 - DNA, 20 bp, synthetic construct
  misc_feature 1..20: note = chemically synthesized
  source 1..20: mol_type = other DNA
aacgagtggtcctgtttgga

SEQ ID NO: 29657 - DNA, 20 bp, synthetic construct
  misc_feature 1..20: note = chemically synthesized
  source 1..20: mol_type = other DNA
acgagtggtcctgtttggag

SEQ ID NO: 29658 - DNA, 20 bp, synthetic construct
  misc_feature 1..20: note = chemically synthesized
  source 1..20: mol_type = other DNA
gagtggtcctgtttggagag

SEQ ID NO: 29659 - DNA, 20 bp, synthetic construct
  misc_feature 1..20: note = chemically synthesized
  source 1..20: mol_type = other DNA
gtcctgtttggagaggagtc

SEQ ID NO: 29660 - DNA, 20 bp, synthetic construct
  misc_feature 1..20: note = chemically synthesized
  source 1..20: mol_type = other DNA
tggagaggagtccagcataa

SEQ ID NO: 29661 - DNA, 20 bp, synthetic construct
  misc_feature 1..20: note = chemically synthesized
  source 1..20: mol_type = other DNA
ggagtccagcataatggttt

SEQ ID NO: 29662 - DNA, 20 bp, synthetic construct
  misc_feature 1..20: note = chemically synthesized
  source 1..20: mol_type = other DNA
gcataatggtttaagaaaat

SEQ ID NO: 29663 - DNA, 20 bp, synthetic construct
  misc_feature 1..20: note = chemically synthesized
  source 1..20: mol_type = other DNA
atgcgcttgatattgaattt

SEQ ID NO: 29664 - DNA, 20 bp, synthetic construct
  misc_feature 1..20: note = chemically synthesized
  source 1..20: mol_type = other DNA
cttacattaatgatttaact

SEQ ID NO: 29665 - DNA, 20 bp, synthetic construct
  misc_feature 1..20: note = chemically synthesized
  source 1..20: mol_type = other DNA
ttacattaatgatttaacta

SEQ ID NO: 29666 - DNA, 20 bp, synthetic construct
  misc_feature 1..20: note = chemically synthesized
  source 1..20: mol_type = other DNA
attaatgatttaactaagga

SEQ ID NO: 29667 - DNA, 20 bp, synthetic construct
  misc_feature 1..20: note = chemically synthesized
  source 1..20: mol_type = other DNA
ggaaagttgctttcctctgt

SEQ ID NO: 29668 - DNA, 20 bp, synthetic construct
  misc_feature 1..20: note = chemically synthesized
  source 1..20: mol_type = other DNA
ttgctttcctctgtgagcct

SEQ ID NO: 29669 - DNA, 20 bp, synthetic construct
  misc_feature 1..20: note = chemically synthesized
  source 1..20: mol_type = other DNA
aataatacctccctacttca

SEQ ID NO: 29670 - DNA, 20 bp, synthetic construct
  misc_feature 1..20: note = chemically synthesized
  source 1..20: mol_type = other DNA
ataatacctccctacttcac

SEQ ID NO: 29671 - DNA, 20 bp, synthetic construct
  misc_feature 1..20: note = chemically synthesized
  source 1..20: mol_type = other DNA
acctccctacttcacaggtt

SEQ ID NO: 29672 - DNA, 20 bp, synthetic construct
  misc_feature 1..20: note = chemically synthesized
  source 1..20: mol_type = other DNA
ccctacttcacaggtttggt

SEQ ID NO: 29673 - DNA, 20 bp, synthetic construct
  misc_feature 1..20: note = chemically synthesized
  source 1..20: mol_type = other DNA
tgtaaaataatgaaaataaa

SEQ ID NO: 29674 - DNA, 20 bp, synthetic construct
  misc_feature 1..20: note = chemically synthesized
  source 1..20: mol_type = other DNA
taatgaaaataaaaagtact

SEQ ID NO: 29675 - DNA, 20 bp, synthetic construct
  misc_feature 1..20: note = chemically synthesized
  source 1..20: mol_type = other DNA
tactcagccctctctaccgt

SEQ ID NO: 29676 - DNA, 20 bp, synthetic construct
  misc_feature 1..20: note = chemically synthesized
  source 1..20: mol_type = other DNA
gttaaatgcttaataaacat

SEQ ID NO: 29677 - DNA, 20 bp, synthetic construct
  misc_feature 1..20: note = chemically synthesized
  source 1..20: mol_type = other DNA
atcatcttcattgtcatctt

SEQ ID NO: 29678 - DNA, 20 bp, synthetic construct
  misc_feature 1..20: note = chemically synthesized
  source 1..20: mol_type = other DNA
taatcgtatataacttttta

SEQ ID NO: 29679 - DNA, 20 bp, synthetic construct
  misc_feature 1..20: note = chemically synthesized
  source 1..20: mol_type = other DNA
tcattgtaaaatgctctttt

SEQ ID NO: 29680 - DNA, 20 bp, synthetic construct
  misc_feature 1..20: note = chemically synthesized
  source 1..20: mol_type = other DNA
taaaaccgaaatgtcttctt

SEQ ID NO: 29681 - DNA, 20 bp, synthetic construct
  misc_feature 1..20: note = chemically synthesized
  source 1..20: mol_type = other DNA
ttcttcagaaaatttgtata

SEQ ID NO: 29682 - DNA, 20 bp, synthetic construct
  misc_feature 1..20: note = chemically synthesized
  source 1..20: mol_type = other DNA
cagaaaatttgtatacggca

SEQ ID NO: 29683 - DNA, 20 bp, synthetic construct
  misc_feature 1..20: note = chemically synthesized
  source 1..20: mol_type = other DNA
aaatttgtatacggcaaaga

SEQ ID NO: 29684 - DNA, 20 bp, synthetic construct
  misc_feature 1..20: note = chemically synthesized
  source 1..20: mol_type = other DNA
atttgtatacggcaaagata

SEQ ID NO: 29685 - DNA, 20 bp, synthetic construct
  misc_feature 1..20: note = chemically synthesized
  source 1..20: mol_type = other DNA
caaagatagagaaatctata

SEQ ID NO: 29686 - DNA, 20 bp, synthetic construct
  misc_feature 1..20: note = chemically synthesized
  source 1..20: mol_type = other DNA
gagaaatctatatagaaaat

SEQ ID NO: 29687 - DNA, 20 bp, synthetic construct
  misc_feature 1..20: note = chemically synthesized
  source 1..20: mol_type = other DNA
gaaaataagattatatataa

SEQ ID NO: 29688 - DNA, 20 bp, synthetic construct
  misc_feature 1..20: note = chemically synthesized
  source 1..20: mol_type = other DNA
tcttttgatacaaatattta

SEQ ID NO: 29689 - DNA, 20 bp, synthetic construct
  misc_feature 1..20: note = chemically synthesized
  source 1..20: mol_type = other DNA
aatatttatagccttttaca

SEQ ID NO: 29690 - DNA, 20 bp, synthetic construct
  misc_feature 1..20: note = chemically synthesized
  source 1..20: mol_type = other DNA
tttatttaatattttgccaa

SEQ ID NO: 29691 - DNA, 20 bp, synthetic construct
  misc_feature 1..20: note = chemically synthesized
  source 1..20: mol_type = other DNA
tattttgccaacagtttcct

SEQ ID NO: 29692 - DNA, 20 bp, synthetic construct
  misc_feature 1..20: note = chemically synthesized
  source 1..20: mol_type = other DNA
tttaaatgtcattttaataa

SEQ ID NO: 29693 - DNA, 20 bp, synthetic construct
  misc_feature 1..20: note = chemically synthesized
  source 1..20: mol_type = other DNA
tttatgtaatatttttattc

SEQ ID NO: 29694 - DNA, 20 bp, synthetic construct
  misc_feature 1..20: note = chemically synthesized
  source 1..20: mol_type = other DNA
tataatattcacttattaaa

SEQ ID NO: 29695 - DNA, 20 bp, synthetic construct
  misc_feature 1..20: note = chemically synthesized
  source 1..20: mol_type = other DNA
atatttattgatcactgacc

SEQ ID NO: 29696 - DNA, 20 bp, synthetic construct
  misc_feature 1..20: note = chemically synthesized
  source 1..20: mol_type = other DNA
tatttattgatcactgacct

SEQ ID NO: 29697 - DNA, 20 bp, synthetic construct
  misc_feature 1..20: note = chemically synthesized
  source 1..20: mol_type = other DNA
tttattgatcactgacctag

SEQ ID NO: 29698 - DNA, 20 bp, synthetic construct
  misc_feature 1..20: note = chemically synthesized
  source 1..20: mol_type = other DNA
ttgatcactgacctaggaga

SEQ ID NO: 29699 - DNA, 20 bp, synthetic construct
  misc_feature 1..20: note = chemically synthesized
  source 1..20: mol_type = other DNA
actgacctaggagatggatt

SEQ ID NO: 29700 - DNA, 20 bp, synthetic construct
  misc_feature 1..20: note = chemically synthesized
  source 1..20: mol_type = other DNA
ggagatggatttagaactgt

SEQ ID NO: 29701 - DNA, 20 bp, synthetic construct
  misc_feature 1..20: note = chemically synthesized
  source 1..20: mol_type = other DNA
gatttagaactgtgagcaaa

SEQ ID NO: 29702 - DNA, 20 bp, synthetic construct
  misc_feature 1..20: note = chemically synthesized
  source 1..20: mol_type = other DNA
atttagaactgtgagcaaac

SEQ ID NO: 29703 - DNA, 20 bp, synthetic construct
  misc_feature 1..20: note = chemically synthesized
  source 1..20: mol_type = other DNA
gaaaaaaattttgccacaaa

SEQ ID NO: 29704 - DNA, 20 bp, synthetic construct
  misc_feature 1..20: note = chemically synthesized
  source 1..20: mol_type = other DNA
tttttaatttatcatttatt

SEQ ID NO: 29705 - DNA, 20 bp, synthetic construct
  misc_feature 1..20: note = chemically synthesized
  source 1..20: mol_type = other DNA
ttttaatttatcatttattt

SEQ ID NO: 29706 - DNA, 20 bp, synthetic construct
  misc_feature 1..20: note = chemically synthesized
  source 1..20: mol_type = other DNA
aatttatcatttatttagga

SEQ ID NO: 29707 - DNA, 20 bp, synthetic construct
  misc_feature 1..20: note = chemically synthesized
  source 1..20: mol_type = other DNA
atttatttaggacagatttt

SEQ ID NO: 29708 - DNA, 20 bp, synthetic construct
  misc_feature 1..20: note = chemically synthesized
  source 1..20: mol_type = other DNA
tatttaggacagatttttag

SEQ ID NO: 29709 - DNA, 20 bp, synthetic construct
  misc_feature 1..20: note = chemically synthesized
  source 1..20: mol_type = other DNA
ttaggacagatttttagaag

SEQ ID NO: 29710 - DNA, 20 bp, synthetic construct
  misc_feature 1..20: note = chemically synthesized
  source 1..20: mol_type = other DNA
tttttagaagtggcatttct

SEQ ID NO: 29711 - DNA, 20 bp, synthetic construct
  misc_feature 1..20: note = chemically synthesized
  source 1..20: mol_type = other DNA
gaagtggcatttctgagaca

SEQ ID NO: 29712 - DNA, 20 bp, synthetic construct
  misc_feature 1..20: note = chemically synthesized
  source 1..20: mol_type = other DNA
agtggcatttctgagacaca

SEQ ID NO: 29713 - DNA, 20 bp, synthetic construct
  misc_feature 1..20: note = chemically synthesized
  source 1..20: mol_type = other DNA
cacagagcatgaatattttc

SEQ ID NO: 29714 - DNA, 20 bp, synthetic construct
  misc_feature 1..20: note = chemically synthesized
  source 1..20: mol_type = other DNA
atgtattttgttttttataa

SEQ ID NO: 29715 - DNA, 20 bp, synthetic construct
  misc_feature 1..20: note = chemically synthesized
  source 1..20: mol_type = other DNA
tgtattttgttttttataaa

SEQ ID NO: 29716 - DNA, 20 bp, synthetic construct
  misc_feature 1..20: note = chemically synthesized
  source 1..20: mol_type = other DNA
attaaattatgttttcattc

SEQ ID NO: 29717 - DNA, 20 bp, synthetic construct
  misc_feature 1..20: note = chemically synthesized
  source 1..20: mol_type = other DNA
ctcttttaccacatacttaa

SEQ ID NO: 29718 - DNA, 20 bp, synthetic construct
  misc_feature 1..20: note = chemically synthesized
  source 1..20: mol_type = other DNA
ttaccacatacttaacagca

SEQ ID NO: 29719 - DNA, 20 bp, synthetic construct
  misc_feature 1..20: note = chemically synthesized
  source 1..20: mol_type = other DNA
ttttctttttttttgttttt

SEQ ID NO: 29720 - DNA, 20 bp, synthetic construct
  misc_feature 1..20: note = chemically synthesized
  source 1..20: mol_type = other DNA
tctttttttttgtttttgag

SEQ ID NO: 29721 - DNA, 20 bp, synthetic construct
  misc_feature 1..20: note = chemically synthesized
  source 1..20: mol_type = other DNA
ctttttttttgtttttgaga

SEQ ID NO: 29722 - DNA, 20 bp, synthetic construct
  misc_feature 1..20: note = chemically synthesized
  source 1..20: mol_type = other DNA
ttttttttgtttttgagaag

SEQ ID NO: 29723 - DNA, 20 bp, synthetic construct
  misc_feature 1..20: note = chemically synthesized
  source 1..20: mol_type = other DNA
aggagtcttgctctgttgcc

SEQ ID NO: 29724 - DNA, 20 bp, synthetic construct
  misc_feature 1..20: note = chemically synthesized
  source 1..20: mol_type = other DNA
ggagtcttgctctgttgccc

SEQ ID NO: 29725 - DNA, 20 bp, synthetic construct
  misc_feature 1..20: note = chemically synthesized
  source 1..20: mol_type = other DNA
tcttgctctgttgcccaggc

SEQ ID NO: 29726 - DNA, 20 bp, synthetic construct
  misc_feature 1..20: note = chemically synthesized
  source 1..20: mol_type = other DNA
ttgctctgttgcccaggctg

SEQ ID NO: 29727 - DNA, 20 bp, synthetic construct
  misc_feature 1..20: note = chemically synthesized
  source 1..20: mol_type = other DNA
ctgttgcccaggctggagtg

SEQ ID NO: 29728 - DNA, 20 bp, synthetic construct
  misc_feature 1..20: note = chemically synthesized
  source 1..20: mol_type = other DNA
ttgcccaggctggagtgcag

SEQ ID NO: 29729 - DNA, 20 bp, synthetic construct
  misc_feature 1..20: note = chemically synthesized
  source 1..20: mol_type = other DNA
ggagtgcagtggcacgatct

SEQ ID NO: 29730 - DNA, 20 bp, synthetic construct
  misc_feature 1..20: note = chemically synthesized
  source 1..20: mol_type = other DNA
gcacgatctcggctcactgc

SEQ ID NO: 29731 - DNA, 20 bp, synthetic construct
  misc_feature 1..20: note = chemically synthesized
  source 1..20: mol_type = other DNA
tcactgcaagctccacctcc

SEQ ID NO: 29732 - DNA, 20 bp, synthetic construct
  misc_feature 1..20: note = chemically synthesized
  source 1..20: mol_type = other DNA
cactgcaagctccacctcct

SEQ ID NO: 29733 - DNA, 20 bp, synthetic construct
  misc_feature 1..20: note = chemically synthesized
  source 1..20: mol_type = other DNA
ttcacgccattctgctgccc

SEQ ID NO: 29734 - DNA, 20 bp, synthetic construct
  misc_feature 1..20: note = chemically synthesized
  source 1..20: mol_type = other DNA
ttctgctgccccagcctcct

SEQ ID NO: 29735 - DNA, 20 bp, synthetic construct
  misc_feature 1..20: note = chemically synthesized
  source 1..20: mol_type = other DNA
tgctgccccagcctcctgag

SEQ ID NO: 29736 - DNA, 20 bp, synthetic construct
  misc_feature 1..20: note = chemically synthesized
  source 1..20: mol_type = other DNA
gccccagcctcctgagtagc

SEQ ID NO: 29737 - DNA, 20 bp, synthetic construct
  misc_feature 1..20: note = chemically synthesized
  source 1..20: mol_type = other DNA
ccccagcctcctgagtagct

SEQ ID NO: 29738 - DNA, 20 bp, synthetic construct
  misc_feature 1..20: note = chemically synthesized
  source 1..20: mol_type = other DNA
ctcctgagtagctgggacta

SEQ ID NO: 29739 - DNA, 20 bp, synthetic construct
  misc_feature 1..20: note = chemically synthesized
  source 1..20: mol_type = other DNA
tcctgagtagctgggactac

SEQ ID NO: 29740 - DNA, 20 bp, synthetic construct
  misc_feature 1..20: note = chemically synthesized
  source 1..20: mol_type = other DNA
caggtgcccaccaccatgcc

SEQ ID NO: 29741 - DNA, 20 bp, synthetic construct
  misc_feature 1..20: note = chemically synthesized
  source 1..20: mol_type = other DNA
cggctaactttttgtatttt

SEQ ID NO: 29742 - DNA, 20 bp, synthetic construct
  misc_feature 1..20: note = chemically synthesized
  source 1..20: mol_type = other DNA
ctaactttttgtatttttag

SEQ ID NO: 29743 - DNA, 20 bp, synthetic construct
  misc_feature 1..20: note = chemically synthesized
  source 1..20: mol_type = other DNA
aactttttgtatttttagta

SEQ ID NO: 29744 - DNA, 20 bp, synthetic construct
  misc_feature 1..20: note = chemically synthesized
  source 1..20: mol_type = other DNA
tttgtatttttagtagagac

SEQ ID NO: 29745 - DNA, 20 bp, synthetic construct
  misc_feature 1..20: note = chemically synthesized
  source 1..20: mol_type = other DNA
ttgtatttttagtagagact

SEQ ID NO: 29746 - DNA, 20 bp, synthetic construct
  misc_feature 1..20: note = chemically synthesized
  source 1..20: mol_type = other DNA
gagactgggttccaccgtgt

SEQ ID NO: 29747 - DNA, 20 bp, synthetic construct
  misc_feature 1..20: note = chemically synthesized
  source 1..20: mol_type = other DNA
ctgggttccaccgtgttagc

SEQ ID NO: 29748 - DNA, 20 bp, synthetic construct
  misc_feature 1..20: note = chemically synthesized
  source 1..20: mol_type = other DNA
tgggttccaccgtgttagcc

SEQ ID NO: 29749 - DNA, 20 bp, synthetic construct
  misc_feature 1..20: note = chemically synthesized
  source 1..20: mol_type = other DNA
ttccaccgtgttagccagga

SEQ ID NO: 29750 - DNA, 20 bp, synthetic construct
  misc_feature 1..20: note = chemically synthesized
  source 1..20: mol_type = other DNA
acctcgtgatccacccgcct

SEQ ID NO: 29751 - DNA, 20 bp, synthetic construct
  misc_feature 1..20: note = chemically synthesized
  source 1..20: mol_type = other DNA
atccacccgcctcggcctcc

SEQ ID NO: 29752 - DNA, 20 bp, synthetic construct
  misc_feature 1..20: note = chemically synthesized
  source 1..20: mol_type = other DNA
ccacccgcctcggcctccca

SEQ ID NO: 29753 - DNA, 20 bp, synthetic construct
  misc_feature 1..20: note = chemically synthesized
  source 1..20: mol_type = other DNA
gcctcggcctcccagagtgc

SEQ ID NO: 29754 - DNA, 20 bp, synthetic construct
  misc_feature 1..20: note = chemically synthesized
  source 1..20: mol_type = other DNA
cctcggcctcccagagtgct

SEQ ID NO: 29755 - DNA, 20 bp, synthetic construct
  misc_feature 1..20: note = chemically synthesized
  source 1..20: mol_type = other DNA
ctcccagagtgctgggatta

SEQ ID NO: 29756 - DNA, 20 bp, synthetic construct
  misc_feature 1..20: note = chemically synthesized
  source 1..20: mol_type = other DNA
tcccagagtgctgggattac

SEQ ID NO: 29757 - DNA, 20 bp, synthetic construct
  misc_feature 1..20: note = chemically synthesized
  source 1..20: mol_type = other DNA
agtgctgggattacaggcgt

SEQ ID NO: 29758 - DNA, 20 bp, synthetic construct
  misc_feature 1..20: note = chemically synthesized
  source 1..20: mol_type = other DNA
caggcgtgagccaccgcgcc

SEQ ID NO: 29759 - DNA, 20 bp, synthetic construct
  misc_feature 1..20: note = chemically synthesized
  source 1..20: mol_type = other DNA
cgtgagccaccgcgcccagc

SEQ ID NO: 29760 - DNA, 20 bp, synthetic construct
  misc_feature 1..20: note = chemically synthesized
  source 1..20: mol_type = other DNA
tctattcttcaatattcgtt

SEQ ID NO: 29761 - DNA, 20 bp, synthetic construct
  misc_feature 1..20: note = chemically synthesized
  source 1..20: mol_type = other DNA
tattcgtttagtaacaaatt

SEQ ID NO: 29762 - DNA, 20 bp, synthetic construct
  misc_feature 1..20: note = chemically synthesized
  source 1..20: mol_type = other DNA
ttaatttgcattttaaattt

SEQ ID NO: 29763 - DNA, 20 bp, synthetic construct
  misc_feature 1..20: note = chemically synthesized
  source 1..20: mol_type = other DNA
tttgcattttaaatttgagt

SEQ ID NO: 29764 - DNA, 20 bp, synthetic construct
  misc_feature 1..20: note = chemically synthesized
  source 1..20: mol_type = other DNA
ttgcattttaaatttgagta

SEQ ID NO: 29765 - DNA, 20 bp, synthetic construct
  misc_feature 1..20: note = chemically synthesized
  source 1..20: mol_type = other DNA
cattttaaatttgagtaagg

SEQ ID NO: 29766 - DNA, 20 bp, synthetic construct
  misc_feature 1..20: note = chemically synthesized
  source 1..20: mol_type = other DNA
tttaaatttgagtaaggtag

SEQ ID NO: 29767 - DNA, 20 bp, synthetic construct
  misc_feature 1..20: note = chemically synthesized
  source 1..20: mol_type = other DNA
cctaatttgaaaatgaaatt

SEQ ID NO: 29768 - DNA, 20 bp, synthetic construct
  misc_feature 1..20: note = chemically synthesized
  source 1..20: mol_type = other DNA
tgaaaatgaaatttagatgt

SEQ ID NO: 29769 - DNA, 20 bp, synthetic construct
  misc_feature 1..20: note = chemically synthesized
  source 1..20: mol_type = other DNA
aaatgaaatttagatgtcag

SEQ ID NO: 29770 - DNA, 20 bp, synthetic construct
  misc_feature 1..20: note = chemically synthesized
  source 1..20: mol_type = other DNA
tcagtggtctatttgttaat

SEQ ID NO: 29771 - DNA, 20 bp, synthetic construct
  misc_feature 1..20: note = chemically synthesized
  source 1..20: mol_type = other DNA
agtggtctatttgttaataa

SEQ ID NO: 29772 - DNA, 20 bp, synthetic construct
  misc_feature 1..20: note = chemically synthesized
  source 1..20: mol_type = other DNA
gtggtctatttgttaataag

SEQ ID NO: 29773 - DNA, 20 bp, synthetic construct
  misc_feature 1..20: note = chemically synthesized
  source 1..20: mol_type = other DNA
tttgttaataagaggcaaaa

SEQ ID NO: 29774 - DNA, 20 bp, synthetic construct
  misc_feature 1..20: note = chemically synthesized
  source 1..20: mol_type = other DNA
ttgttaataagaggcaaaat

SEQ ID NO: 29775 - DNA, 20 bp, synthetic construct
  misc_feature 1..20: note = chemically synthesized
  source 1..20: mol_type = other DNA
taagaggcaaaatgggactt

SEQ ID NO: 29776 - DNA, 20 bp, synthetic construct
  misc_feature 1..20: note = chemically synthesized
  source 1..20: mol_type = other DNA
tgtaccccattctaccaaat

SEQ ID NO: 29777 - DNA, 20 bp, synthetic construct
  misc_feature 1..20: note = chemically synthesized
  source 1..20: mol_type = other DNA
attctaccaaatgagatcta

SEQ ID NO: 29778 - DNA, 20 bp, synthetic construct
  misc_feature 1..20: note = chemically synthesized
  source 1..20: mol_type = other DNA
accaaatgagatctatagaa

SEQ ID NO: 29779 - DNA, 20 bp, synthetic construct
  misc_feature 1..20: note = chemically synthesized
  source 1..20: mol_type = other DNA
ccaaatgagatctatagaat

SEQ ID NO: 29780 - DNA, 20 bp, synthetic construct
  misc_feature 1..20: note = chemically synthesized
  source 1..20: mol_type = other DNA
ataggaatttcctctcaaca

SEQ ID NO: 29781 - DNA, 20 bp, synthetic construct
  misc_feature 1..20: note = chemically synthesized
  source 1..20: mol_type = other DNA
aggaatttcctctcaacatg

SEQ ID NO: 29782 - DNA, 20 bp, synthetic construct
  misc_feature 1..20: note = chemically synthesized
  source 1..20: mol_type = other DNA
aatttcctctcaacatggag

SEQ ID NO: 29783 - DNA, 20 bp, synthetic construct
  misc_feature 1..20: note = chemically synthesized
  source 1..20: mol_type = other DNA
aacatggagaagaatattct

SEQ ID NO: 29784 - DNA, 20 bp, synthetic construct
  misc_feature 1..20: note = chemically synthesized
  source 1..20: mol_type = other DNA
gagaagaatattctaagtct

SEQ ID NO: 29785 - DNA, 20 bp, synthetic construct
  misc_feature 1..20: note = chemically synthesized
  source 1..20: mol_type = other DNA
taagtctcggaactgctatt

SEQ ID NO: 29786 - DNA, 20 bp, synthetic construct
  misc_feature 1..20: note = chemically synthesized
  source 1..20: mol_type = other DNA
ggaactgctattgagtaatg

SEQ ID NO: 29787 - DNA, 20 bp, synthetic construct
  misc_feature 1..20: note = chemically synthesized
  source 1..20: mol_type = other DNA
gagtaatgtggcctactatg

SEQ ID NO: 29788 - DNA, 20 bp, synthetic construct
  misc_feature 1..20: note = chemically synthesized
  source 1..20: mol_type = other DNA
tactatgtggatgtaaatta

SEQ ID NO: 29789 - DNA, 20 bp, synthetic construct
  misc_feature 1..20: note = chemically synthesized
  source 1..20: mol_type = other DNA
tgtggatgtaaattaaagtt

SEQ ID NO: 29790 - DNA, 20 bp, synthetic construct
  misc_feature 1..20: note = chemically synthesized
  source 1..20: mol_type = other DNA
atgtaaattaaagtttagaa

SEQ ID NO: 29791 - DNA, 20 bp, synthetic construct
  misc_feature 1..20: note = chemically synthesized
  source 1..20: mol_type = other DNA
ttagaatggaacctatgttt

SEQ ID NO: 29792 - DNA, 20 bp, synthetic construct
  misc_feature 1..20: note = chemically synthesized
  source 1..20: mol_type = other DNA
tagaatggaacctatgttta

SEQ ID NO: 29793 - DNA, 20 bp, synthetic construct
  misc_feature 1..20: note = chemically synthesized
  source 1..20: mol_type = other DNA
gaatggaacctatgtttaag

SEQ ID NO: 29794 - DNA, 20 bp, synthetic construct
  misc_feature 1..20: note = chemically synthesized
  source 1..20: mol_type = other DNA
aacctatgtttaaggagtgc

SEQ ID NO: 29795 - DNA, 20 bp, synthetic construct
  misc_feature 1..20: note = chemically synthesized
  source 1..20: mol_type = other DNA
tttaaggagtgccagcctgt

SEQ ID NO: 29796 - DNA, 20 bp, synthetic construct
  misc_feature 1..20: note = chemically synthesized
  source 1..20: mol_type = other DNA
ttaaggagtgccagcctgta

SEQ ID NO: 29797 - DNA, 20 bp, synthetic construct
  misc_feature 1..20: note = chemically synthesized
  source 1..20: mol_type = other DNA
agtgccagcctgtaaggctg

SEQ ID NO: 29798 - DNA, 20 bp, synthetic construct
  misc_feature 1..20: note = chemically synthesized
  source 1..20: mol_type = other DNA
tgtaaggctgcagaaactgc

SEQ ID NO: 29799 - DNA, 20 bp, synthetic construct
  misc_feature 1..20: note = chemically synthesized
  source 1..20: mol_type = other DNA
gtaaggctgcagaaactgct

SEQ ID NO: 29800 - DNA, 20 bp, synthetic construct
  misc_feature 1..20: note = chemically synthesized
  source 1..20: mol_type = other DNA
ctgcagaaactgctgggttc

SEQ ID NO: 29801 - DNA, 20 bp, synthetic construct
  misc_feature 1..20: note = chemically synthesized
  source 1..20: mol_type = other DNA
gcagaaactgctgggttcca

SEQ ID NO: 29802 - DNA, 20 bp, synthetic construct
  misc_feature 1..20: note = chemically synthesized
  source 1..20: mol_type = other DNA
cagaaactgctgggttccag

SEQ ID NO: 29803 - DNA, 20 bp, synthetic construct
  misc_feature 1..20: note = chemically synthesized
  source 1..20: mol_type = other DNA
agaaactgctgggttccaga

SEQ ID NO: 29804 - DNA, 20 bp, synthetic construct
  misc_feature 1..20: note = chemically synthesized
  source 1..20: mol_type = other DNA
gaaactgctgggttccagag

SEQ ID NO: 29805 - DNA, 20 bp, synthetic construct
  misc_feature 1..20: note = chemically synthesized
  source 1..20: mol_type = other DNA
tgggttccagaggggctccc

SEQ ID NO: 29806 - DNA, 20 bp, synthetic construct
  misc_feature 1..20: note = chemically synthesized
  source 1..20: mol_type = other DNA
ccagaggggctcccaagcct

SEQ ID NO: 29807 - DNA, 20 bp, synthetic construct
  misc_feature 1..20: note = chemically synthesized
  source 1..20: mol_type = other DNA
agaggggctcccaagcctga

SEQ ID NO: 29808 - DNA, 20 bp, synthetic construct
  misc_feature 1..20: note = chemically synthesized
  source 1..20: mol_type = other DNA
acacccacacatacaaacat

SEQ ID NO: 29809 - DNA, 20 bp, synthetic construct
  misc_feature 1..20: note = chemically synthesized
  source 1..20: mol_type = other DNA
gataccacacaaacatacac

SEQ ID NO: 29810 - DNA, 20 bp, synthetic construct
  misc_feature 1..20: note = chemically synthesized
  source 1..20: mol_type = other DNA
caaacatacatacatatttt

SEQ ID NO: 29811 - DNA, 20 bp, synthetic construct
  misc_feature 1..20: note = chemically synthesized
  source 1..20: mol_type = other DNA
aacatacatacatattttta

SEQ ID NO: 29812 - DNA, 20 bp, synthetic construct
  misc_feature 1..20: note = chemically synthesized
  source 1..20: mol_type = other DNA
acatacatatttttagagtt

SEQ ID NO: 29813 - DNA, 20 bp, synthetic construct
  misc_feature 1..20: note = chemically synthesized
  source 1..20: mol_type = other DNA
tttcctttttatttttgaat

SEQ ID NO: 29814 - DNA, 20 bp, synthetic construct
  misc_feature 1..20: note = chemically synthesized
  source 1..20: mol_type = other DNA
ttcctttttatttttgaatc

SEQ ID NO: 29815 - DNA, 20 bp, synthetic construct
  misc_feature 1..20: note = chemically synthesized
  source 1..20: mol_type = other DNA
tcctttttatttttgaatcg

SEQ ID NO: 29816 - DNA, 20 bp, synthetic construct
  misc_feature 1..20: note = chemically synthesized
  source 1..20: mol_type = other DNA
ttttgaatcggggtctcact

SEQ ID NO: 29817 - DNA, 20 bp, synthetic construct
  misc_feature 1..20: note = chemically synthesized
  source 1..20: mol_type = other DNA
cggggtctcacttggtcacc

SEQ ID NO: 29818 - DNA, 20 bp, synthetic construct
  misc_feature 1..20: note = chemically synthesized
  source 1..20: mol_type = other DNA
ggggtctcacttggtcaccc

SEQ ID NO: 29819 - DNA, 20 bp, synthetic construct
  misc_feature 1..20: note = chemically synthesized
  source 1..20: mol_type = other DNA
gtctcacttggtcacccagg

SEQ ID NO: 29820 - DNA, 20 bp, synthetic construct
  misc_feature 1..20: note = chemically synthesized
  source 1..20: mol_type = other DNA
tcacttggtcacccaggcag

SEQ ID NO: 29821 - DNA, 20 bp, synthetic construct
  misc_feature 1..20: note = chemically synthesized
  source 1..20: mol_type = other DNA
cccaggcagtagtgtgatta

SEQ ID NO: 29822 - DNA, 20 bp, synthetic construct
  misc_feature 1..20: note = chemically synthesized
  source 1..20: mol_type = other DNA
agtgtgattatggctcactg

SEQ ID NO: 29823 - DNA, 20 bp, synthetic construct
  misc_feature 1..20: note = chemically synthesized
  source 1..20: mol_type = other DNA
tcactgcagcctcaacctcc

SEQ ID NO: 29824 - DNA, 20 bp, synthetic construct
  misc_feature 1..20: note = chemically synthesized
  source 1..20: mol_type = other DNA
cactgcagcctcaacctcct

SEQ ID NO: 29825 - DNA, 20 bp, synthetic construct
  misc_feature 1..20: note = chemically synthesized
  source 1..20: mol_type = other DNA
agcctcaacctcctgggctc

SEQ ID NO: 29826 - DNA, 20 bp, synthetic construct
  misc_feature 1..20: note = chemically synthesized
  source 1..20: mol_type = other DNA
ctcaagcattcttcccacct

SEQ ID NO: 29827 - DNA, 20 bp, synthetic construct
  misc_feature 1..20: note = chemically synthesized
  source 1..20: mol_type = other DNA
ttcttcccacctcagcctcc

SEQ ID NO: 29828 - DNA, 20 bp, synthetic construct
  misc_feature 1..20: note = chemically synthesized
  source 1..20: mol_type = other DNA
tcttcccacctcagcctccc

SEQ ID NO: 29829 - DNA, 20 bp, synthetic construct
  misc_feature 1..20: note = chemically synthesized
  source 1..20: mol_type = other DNA
tcccacctcagcctcccagg

SEQ ID NO: 29830 - DNA, 20 bp, synthetic construct
  misc_feature 1..20: note = chemically synthesized
  source 1..20: mol_type = other DNA
cctcagcctcccaggtagct

SEQ ID NO: 29831 - DNA, 20 bp, synthetic construct
  misc_feature 1..20: note = chemically synthesized
  source 1..20: mol_type = other DNA
ctcccaggtagctgagacta

SEQ ID NO: 29832 - DNA, 20 bp, synthetic construct
  misc_feature 1..20: note = chemically synthesized
  source 1..20: mol_type = other DNA
cagacgtgcaccgccacaca

SEQ ID NO: 29833 - DNA, 20 bp, synthetic construct
  misc_feature 1..20: note = chemically synthesized
  source 1..20: mol_type = other DNA
gctaattttaattttttttg

SEQ ID NO: 29834 - DNA, 20 bp, synthetic construct
  misc_feature 1..20: note = chemically synthesized
  source 1..20: mol_type = other DNA
taattttaattttttttgta

SEQ ID NO: 29835 - DNA, 20 bp, synthetic construct
  misc_feature 1..20: note = chemically synthesized
  source 1..20: mol_type = other DNA
tttaattttttttgtagaga

SEQ ID NO: 29836 - DNA, 20 bp, synthetic construct
  misc_feature 1..20: note = chemically synthesized
  source 1..20: mol_type = other DNA
ttaattttttttgtagagat

SEQ ID NO: 29837 - DNA, 20 bp, synthetic construct
  misc_feature 1..20: note = chemically synthesized
  source 1..20: mol_type = other DNA
taattttttttgtagagata

SEQ ID NO: 29838 - DNA, 20 bp, synthetic construct
  misc_feature 1..20: note = chemically synthesized
  source 1..20: mol_type = other DNA
tagggtcttgctgtattgtt

SEQ ID NO: 29839 - DNA, 20 bp, synthetic construct
  misc_feature 1..20: note = chemically synthesized
  source 1..20: mol_type = other DNA
agggtcttgctgtattgttc

SEQ ID NO: 29840 - DNA, 20 bp, synthetic construct
  misc_feature 1..20: note = chemically synthesized
  source 1..20: mol_type = other DNA
tcttgctgtattgttcaggc

SEQ ID NO: 29841 - DNA, 20 bp, synthetic construct
  misc_feature 1..20: note = chemically synthesized
  source 1..20: mol_type = other DNA
tcaggctggtctcaaactcc

SEQ ID NO: 29842 - DNA, 20 bp, synthetic construct
  misc_feature 1..20: note = chemically synthesized
  source 1..20: mol_type = other DNA
ggtctcaaactcctggactc

SEQ ID NO: 29843 - DNA, 20 bp, synthetic construct
  misc_feature 1..20: note = chemically synthesized
  source 1..20: mol_type = other DNA
tcaagtaatcttcttgcctg

SEQ ID NO: 29844 - DNA, 20 bp, synthetic construct
  misc_feature 1..20: note = chemically synthesized
  source 1..20: mol_type = other DNA
gtaatcttcttgcctgaagt

SEQ ID NO: 29845 - DNA, 20 bp, synthetic construct
  misc_feature 1..20: note = chemically synthesized
  source 1..20: mol_type = other DNA
tgaagttggtctcaaactcc

SEQ ID NO: 29846 - DNA, 20 bp, synthetic construct
  misc_feature 1..20: note = chemically synthesized
  source 1..20: mol_type = other DNA
ggtctcaaactcctggcctt

SEQ ID NO: 29847 - DNA, 20 bp, synthetic construct
  misc_feature 1..20: note = chemically synthesized
  source 1..20: mol_type = other DNA
cttcagcaatcctcccacct

SEQ ID NO: 29848 - DNA, 20 bp, synthetic construct
  misc_feature 1..20: note = chemically synthesized
  source 1..20: mol_type = other DNA
cctcccaccttggtctccca

SEQ ID NO: 29849 - DNA, 20 bp, synthetic construct
  misc_feature 1..20: note = chemically synthesized
  source 1..20: mol_type = other DNA
accttggtctcccaaagtgc

SEQ ID NO: 29850 - DNA, 20 bp, synthetic construct
  misc_feature 1..20: note = chemically synthesized
  source 1..20: mol_type = other DNA
ccttggtctcccaaagtgct

SEQ ID NO: 29851 - DNA, 20 bp, synthetic construct
  misc_feature 1..20: note = chemically synthesized
  source 1..20: mol_type = other DNA
ctcccaaagtgctgggatta

SEQ ID NO: 29852 - DNA, 20 bp, synthetic construct
  misc_feature 1..20: note = chemically synthesized
  source 1..20: mol_type = other DNA
aagtgctgggattatagcat

SEQ ID NO: 29853 - DNA, 20 bp, synthetic construct
  misc_feature 1..20: note = chemically synthesized
  source 1..20: mol_type = other DNA
atagcataagccaccgtgcc

SEQ ID NO: 29854 - DNA, 20 bp, synthetic construct
  misc_feature 1..20: note = chemically synthesized
  source 1..20: mol_type = other DNA
agccaccgtgcctggcctca

SEQ ID NO: 29855 - DNA, 20 bp, synthetic construct
  misc_feature 1..20: note = chemically synthesized
  source 1..20: mol_type = other DNA
ctcatggtaattttaacctg

SEQ ID NO: 29856 - DNA, 20 bp, synthetic construct
  misc_feature 1..20: note = chemically synthesized
  source 1..20: mol_type = other DNA
tcatggtaattttaacctgt

SEQ ID NO: 29857 - DNA, 20 bp, synthetic construct
  misc_feature 1..20: note = chemically synthesized
  source 1..20: mol_type = other DNA
atggtaattttaacctgtag

SEQ ID NO: 29858 - DNA, 20 bp, synthetic construct
  misc_feature 1..20: note = chemically synthesized
  source 1..20: mol_type = other DNA
aattttaacctgtaggagaa

SEQ ID NO: 29859 - DNA, 20 bp, synthetic construct
  misc_feature 1..20: note = chemically synthesized
  source 1..20: mol_type = other DNA
attttaacctgtaggagaat

SEQ ID NO: 29860 - DNA, 20 bp, synthetic construct
  misc_feature 1..20: note = chemically synthesized
  source 1..20: mol_type = other DNA
ttaacctgtaggagaatggg

SEQ ID NO: 29861 - DNA, 20 bp, synthetic construct
  misc_feature 1..20: note = chemically synthesized
  source 1..20: mol_type = other DNA
taacctgtaggagaatgggt

SEQ ID NO: 29862 - DNA, 20 bp, synthetic construct
  misc_feature 1..20: note = chemically synthesized
  source 1..20: mol_type = other DNA
acctgtaggagaatgggtgg

SEQ ID NO: 29863 - DNA, 20 bp, synthetic construct
  misc_feature 1..20: note = chemically synthesized
  source 1..20: mol_type = other DNA
cctgtaggagaatgggtggg

SEQ ID NO: 29864 - DNA, 20 bp, synthetic construct
  misc_feature 1..20: note = chemically synthesized
  source 1..20: mol_type = other DNA
ggagaatgggtgggaggatc

SEQ ID NO: 29865 - DNA, 20 bp, synthetic construct
  misc_feature 1..20: note = chemically synthesized
  source 1..20: mol_type = other DNA
agaatgggtgggaggatcca

SEQ ID NO: 29866 - DNA, 20 bp, synthetic construct
  misc_feature 1..20: note = chemically synthesized
  source 1..20: mol_type = other DNA
gaatgggtgggaggatccag

SEQ ID NO: 29867 - DNA, 20 bp, synthetic construct
  misc_feature 1..20: note = chemically synthesized
  source 1..20: mol_type = other DNA
aatgggtgggaggatccaga

SEQ ID NO: 29868 - DNA, 20 bp, synthetic construct
  misc_feature 1..20: note = chemically synthesized
  source 1..20: mol_type = other DNA
tgggaggatccagagggcct

SEQ ID NO: 29869 - DNA, 20 bp, synthetic construct
  misc_feature 1..20: note = chemically synthesized
  source 1..20: mol_type = other DNA
ggatccagagggcctgagta

SEQ ID NO: 29870 - DNA, 20 bp, synthetic construct
  misc_feature 1..20: note = chemically synthesized
  source 1..20: mol_type = other DNA
tccagagggcctgagtaaag

SEQ ID NO: 29871 - DNA, 20 bp, synthetic construct
  misc_feature 1..20: note = chemically synthesized
  source 1..20: mol_type = other DNA
gggcctgagtaaagtagaac

SEQ ID NO: 29872 - DNA, 20 bp, synthetic construct
  misc_feature 1..20: note = chemically synthesized
  source 1..20: mol_type = other DNA
ggcctgagtaaagtagaact

SEQ ID NO: 29873 - DNA, 20 bp, synthetic construct
  misc_feature 1..20: note = chemically synthesized
  source 1..20: mol_type = other DNA
aaagtagaactgggacaatg

SEQ ID NO: 29874 - DNA, 20 bp, synthetic construct
  misc_feature 1..20: note = chemically synthesized
  source 1..20: mol_type = other DNA
atgaagatataccaccttga

SEQ ID NO: 29875 - DNA, 20 bp, synthetic construct
  misc_feature 1..20: note = chemically synthesized
  source 1..20: mol_type = other DNA
tataccaccttgatggatgc

SEQ ID NO: 29876 - DNA, 20 bp, synthetic construct
  misc_feature 1..20: note = chemically synthesized
  source 1..20: mol_type = other DNA
accaccttgatggatgccag

SEQ ID NO: 29877 - DNA, 20 bp, synthetic construct
  misc_feature 1..20: note = chemically synthesized
  source 1..20: mol_type = other DNA
ccttgatggatgccagcaga

SEQ ID NO: 29878 - DNA, 20 bp, synthetic construct
  misc_feature 1..20: note = chemically synthesized
  source 1..20: mol_type = other DNA
cttgatggatgccagcagaa

SEQ ID NO: 29879 - DNA, 20 bp, synthetic construct
  misc_feature 1..20: note = chemically synthesized
  source 1..20: mol_type = other DNA
ccagcagaaaggtgtcttct

SEQ ID NO: 29880 - DNA, 20 bp, synthetic construct
  misc_feature 1..20: note = chemically synthesized
  source 1..20: mol_type = other DNA
cagcagaaaggtgtcttctt

SEQ ID NO: 29881 - DNA, 20 bp, synthetic construct
  misc_feature 1..20: note = chemically synthesized
  source 1..20: mol_type = other DNA
ttcttgggcttctgaatgtg

SEQ ID NO: 29882 - DNA, 20 bp, synthetic construct
  misc_feature 1..20: note = chemically synthesized
  source 1..20: mol_type = other DNA
cttgggcttctgaatgtgaa

SEQ ID NO: 29883 - DNA, 20 bp, synthetic construct
  misc_feature 1..20: note = chemically synthesized
  source 1..20: mol_type = other DNA
ttgggcttctgaatgtgaag

SEQ ID NO: 29884 - DNA, 20 bp, synthetic construct
  misc_feature 1..20: note = chemically synthesized
  source 1..20: mol_type = other DNA
gggcttctgaatgtgaagag

SEQ ID NO: 29885 - DNA, 20 bp, synthetic construct
  misc_feature 1..20: note = chemically synthesized
  source 1..20: mol_type = other DNA
ggcttctgaatgtgaagagg

SEQ ID NO: 29886 - DNA, 20 bp, synthetic construct
  misc_feature 1..20: note = chemically synthesized
  source 1..20: mol_type = other DNA
cttctgaatgtgaagaggag

SEQ ID NO: 29887 - DNA, 20 bp, synthetic construct
  misc_feature 1..20: note = chemically synthesized
  source 1..20: mol_type = other DNA
gtgaagaggaggagttcctc

SEQ ID NO: 29888 - DNA, 20 bp, synthetic construct
  misc_feature 1..20: note = chemically synthesized
  source 1..20: mol_type = other DNA
gaggaggagttcctcgagac

SEQ ID NO: 29889 - DNA, 20 bp, synthetic construct
  misc_feature 1..20: note = chemically synthesized
  source 1..20: mol_type = other DNA
gaggagttcctcgagacaag

SEQ ID NO: 29890 - DNA, 20 bp, synthetic construct
  misc_feature 1..20: note = chemically synthesized
  source 1..20: mol_type = other DNA
ggagttcctcgagacaagaa

SEQ ID NO: 29891 - DNA, 20 bp, synthetic construct
  misc_feature 1..20: note = chemically synthesized
  source 1..20: mol_type = other DNA
gacaagaagagaacttctgt

SEQ ID NO: 29892 - DNA, 20 bp, synthetic construct
  misc_feature 1..20: note = chemically synthesized
  source 1..20: mol_type = other DNA
aagagaacttctgttagctc

SEQ ID NO: 29893 - DNA, 20 bp, synthetic construct
  misc_feature 1..20: note = chemically synthesized
  source 1..20: mol_type = other DNA
gcatacatttaatatttatt

SEQ ID NO: 29894 - DNA, 20 bp, synthetic construct
  misc_feature 1..20: note = chemically synthesized
  source 1..20: mol_type = other DNA
tttaatatttattgagtata

SEQ ID NO: 29895 - DNA, 20 bp, synthetic construct
  misc_feature 1..20: note = chemically synthesized
  source 1..20: mol_type = other DNA
attgagtatatggcatgtgc

SEQ ID NO: 29896 - DNA, 20 bp, synthetic construct
  misc_feature 1..20: note = chemically synthesized
  source 1..20: mol_type = other DNA
ttgagtatatggcatgtgct

SEQ ID NO: 29897 - DNA, 20 bp, synthetic construct
  misc_feature 1..20: note = chemically synthesized
  source 1..20: mol_type = other DNA
ttgtatttatatacatttac

SEQ ID NO: 29898 - DNA, 20 bp, synthetic construct
  misc_feature 1..20: note = chemically synthesized
  source 1..20: mol_type = other DNA
atttatatacatttactggc

SEQ ID NO: 29899 - DNA, 20 bp, synthetic construct
  misc_feature 1..20: note = chemically synthesized
  source 1..20: mol_type = other DNA
atatacatttactggcgagc

SEQ ID NO: 29900 - DNA, 20 bp, synthetic construct
  misc_feature 1..20: note = chemically synthesized
  source 1..20: mol_type = other DNA
caagacatgcctaattcctc

SEQ ID NO: 29901 - DNA, 20 bp, synthetic construct
  misc_feature 1..20: note = chemically synthesized
  source 1..20: mol_type = other DNA
aagacatgcctaattcctcc

SEQ ID NO: 29902 - DNA, 20 bp, synthetic construct
  misc_feature 1..20: note = chemically synthesized
  source 1..20: mol_type = other DNA
agacatgcctaattcctcca

SEQ ID NO: 29903 - DNA, 20 bp, synthetic construct
  misc_feature 1..20: note = chemically synthesized
  source 1..20: mol_type = other DNA
ttcctccagggatcttgatt

SEQ ID NO: 29904 - DNA, 20 bp, synthetic construct
  misc_feature 1..20: note = chemically synthesized
  source 1..20: mol_type = other DNA
tcttgatttagtcattctaa

SEQ ID NO: 29905 - DNA, 20 bp, synthetic construct
  misc_feature 1..20: note = chemically synthesized
  source 1..20: mol_type = other DNA
catgcacacaccttcataaa

SEQ ID NO: 29906 - DNA, 20 bp, synthetic construct
  misc_feature 1..20: note = chemically synthesized
  source 1..20: mol_type = other DNA
atgcacacaccttcataaac

SEQ ID NO: 29907 - DNA, 20 bp, synthetic construct
  misc_feature 1..20: note = chemically synthesized
  source 1..20: mol_type = other DNA
ctgtgtgacaaatgttacaa

SEQ ID NO: 29908 - DNA, 20 bp, synthetic construct
  misc_feature 1..20: note = chemically synthesized
  source 1..20: mol_type = other DNA
tgtgtgacaaatgttacaac

SEQ ID NO: 29909 - DNA, 20 bp, synthetic construct
  misc_feature 1..20: note = chemically synthesized
  source 1..20: mol_type = other DNA
aaatgttacaacgggaaatg

SEQ ID NO: 29910 - DNA, 20 bp, synthetic construct
  misc_feature 1..20: note = chemically synthesized
  source 1..20: mol_type = other DNA
aatgttacaacgggaaatgc

SEQ ID NO: 29911 - DNA, 20 bp, synthetic construct
  misc_feature 1..20: note = chemically synthesized
  source 1..20: mol_type = other DNA
atgttacaacgggaaatgca

SEQ ID NO: 29912 - DNA, 20 bp, synthetic construct
  misc_feature 1..20: note = chemically synthesized
  source 1..20: mol_type = other DNA
acgggaaatgcagggcactg

SEQ ID NO: 29913 - DNA, 20 bp, synthetic construct
  misc_feature 1..20: note = chemically synthesized
  source 1..20: mol_type = other DNA
ggaaatgcagggcactgtgg

SEQ ID NO: 29914 - DNA, 20 bp, synthetic construct
  misc_feature 1..20: note = chemically synthesized
  source 1..20: mol_type = other DNA
gaaatgcagggcactgtgga

SEQ ID NO: 29915 - DNA, 20 bp, synthetic construct
  misc_feature 1..20: note = chemically synthesized
  source 1..20: mol_type = other DNA
gcactgtggaaggaaaccga

SEQ ID NO: 29916 - DNA, 20 bp, synthetic construct
  misc_feature 1..20: note = chemically synthesized
  source 1..20: mol_type = other DNA
actgtggaaggaaaccgatg

SEQ ID NO: 29917 - DNA, 20 bp, synthetic construct
  misc_feature 1..20: note = chemically synthesized
  source 1..20: mol_type = other DNA
aaggaaaccgatggagcatt

SEQ ID NO: 29918 - DNA, 20 bp, synthetic construct
  misc_feature 1..20: note = chemically synthesized
  source 1..20: mol_type = other DNA
agcatttggtgctttaccat

SEQ ID NO: 29919 - DNA, 20 bp, synthetic construct
  misc_feature 1..20: note = chemically synthesized
  source 1..20: mol_type = other DNA
tttggtgctttaccattgga

SEQ ID NO: 29920 - DNA, 20 bp, synthetic construct
  misc_feature 1..20: note = chemically synthesized
  source 1..20: mol_type = other DNA
ttggtgctttaccattggaa

SEQ ID NO: 29921 - DNA, 20 bp, synthetic construct
  misc_feature 1..20: note = chemically synthesized
  source 1..20: mol_type = other DNA
tggtgctttaccattggaaa

SEQ ID NO: 29922 - DNA, 20 bp, synthetic construct
  misc_feature 1..20: note = chemically synthesized
  source 1..20: mol_type = other DNA
gtgctttaccattggaaagg

SEQ ID NO: 29923 - DNA, 20 bp, synthetic construct
  misc_feature 1..20: note = chemically synthesized
  source 1..20: mol_type = other DNA
tgctttaccattggaaaggg

SEQ ID NO: 29924 - DNA, 20 bp, synthetic construct
  misc_feature 1..20: note = chemically synthesized
  source 1..20: mol_type = other DNA
ctttaccattggaaagggag

SEQ ID NO: 29925 - DNA, 20 bp, synthetic construct
  misc_feature 1..20: note = chemically synthesized
  source 1..20: mol_type = other DNA
ctatctgtgaaaatgtcctt

SEQ ID NO: 29926 - DNA, 20 bp, synthetic construct
  misc_feature 1..20: note = chemically synthesized
  source 1..20: mol_type = other DNA
tatctgtgaaaatgtccttg

SEQ ID NO: 29927 - DNA, 20 bp, synthetic construct
  misc_feature 1..20: note = chemically synthesized
  source 1..20: mol_type = other DNA
ctgtgaaaatgtccttgagg

SEQ ID NO: 29928 - DNA, 20 bp, synthetic construct
  misc_feature 1..20: note = chemically synthesized
  source 1..20: mol_type = other DNA
tccttgaggaagcaatttca

SEQ ID NO: 29929 - DNA, 20 bp, synthetic construct
  misc_feature 1..20: note = chemically synthesized
  source 1..20: mol_type = other DNA
gaggaagcaatttcaaagct

SEQ ID NO: 29930 - DNA, 20 bp, synthetic construct
  misc_feature 1..20: note = chemically synthesized
  source 1..20: mol_type = other DNA
ttcaaagctgagacccctgc

SEQ ID NO: 29931 - DNA, 20 bp, synthetic construct
  misc_feature 1..20: note = chemically synthesized
  source 1..20: mol_type = other DNA
tcaaagctgagacccctgca

SEQ ID NO: 29932 - DNA, 20 bp, synthetic construct
  misc_feature 1..20: note = chemically synthesized
  source 1..20: mol_type = other DNA
acccctgcaaggattgcatt

SEQ ID NO: 29933 - DNA, 20 bp, synthetic construct
  misc_feature 1..20: note = chemically synthesized
  source 1..20: mol_type = other DNA
ggattgcatttagtcactcg

SEQ ID NO: 29934 - DNA, 20 bp, synthetic construct
  misc_feature 1..20: note = chemically synthesized
  source 1..20: mol_type = other DNA
gattgcatttagtcactcgt

SEQ ID NO: 29935 - DNA, 20 bp, synthetic construct
  misc_feature 1..20: note = chemically synthesized
  source 1..20: mol_type = other DNA
attgcatttagtcactcgta

SEQ ID NO: 29936 - DNA, 20 bp, synthetic construct
  misc_feature 1..20: note = chemically synthesized
  source 1..20: mol_type = other DNA
catttagtcactcgtaggga

SEQ ID NO: 29937 - DNA, 20 bp, synthetic construct
  misc_feature 1..20: note = chemically synthesized
  source 1..20: mol_type = other DNA
atttagtcactcgtagggac

SEQ ID NO: 29938 - DNA, 20 bp, synthetic construct
  misc_feature 1..20: note = chemically synthesized
  source 1..20: mol_type = other DNA
actcgtagggacaggctgat

SEQ ID NO: 29939 - DNA, 20 bp, synthetic construct
  misc_feature 1..20: note = chemically synthesized
  source 1..20: mol_type = other DNA
caggctgatcagccaatgta

SEQ ID NO: 29940 - DNA, 20 bp, synthetic construct
  misc_feature 1..20: note = chemically synthesized
  source 1..20: mol_type = other DNA
tgtaaagtttatttcctcct

SEQ ID NO: 29941 - DNA, 20 bp, synthetic construct
  misc_feature 1..20: note = chemically synthesized
  source 1..20: mol_type = other DNA
gtttatttcctcctgagcaa

SEQ ID NO: 29942 - DNA, 20 bp, synthetic construct
  misc_feature 1..20: note = chemically synthesized
  source 1..20: mol_type = other DNA
tttatttcctcctgagcaat

SEQ ID NO: 29943 - DNA, 20 bp, synthetic construct
  misc_feature 1..20: note = chemically synthesized
  source 1..20: mol_type = other DNA
tgacttcaatatgtttgtgt

SEQ ID NO: 29944 - DNA, 20 bp, synthetic construct
  misc_feature 1..20: note = chemically synthesized
  source 1..20: mol_type = other DNA
tatgtttgtgtgagtttcct

SEQ ID NO: 29945 - DNA, 20 bp, synthetic construct
  misc_feature 1..20: note = chemically synthesized
  source 1..20: mol_type = other DNA
tgtgtgagtttccttggctg

SEQ ID NO: 29946 - DNA, 20 bp, synthetic construct
  misc_feature 1..20: note = chemically synthesized
  source 1..20: mol_type = other DNA
cacacaactaaaacacctac

SEQ ID NO: 29947 - DNA, 20 bp, synthetic construct
  misc_feature 1..20: note = chemically synthesized
  source 1..20: mol_type = other DNA
ctacaagtaaatactgactg

SEQ ID NO: 29948 - DNA, 20 bp, synthetic construct
  misc_feature 1..20: note = chemically synthesized
  source 1..20: mol_type = other DNA
tactgactgtagcttaatgt

SEQ ID NO: 29949 - DNA, 20 bp, synthetic construct
  misc_feature 1..20: note = chemically synthesized
  source 1..20: mol_type = other DNA
tgtagcttaatgtcagactt

SEQ ID NO: 29950 - DNA, 20 bp, synthetic construct
  misc_feature 1..20: note = chemically synthesized
  source 1..20: mol_type = other DNA
gtagcttaatgtcagacttg

SEQ ID NO: 29951 - DNA, 20 bp, synthetic construct
  misc_feature 1..20: note = chemically synthesized
  source 1..20: mol_type = other DNA
aatgtcagacttgaggttgt

SEQ ID NO: 29952 - DNA, 20 bp, synthetic construct
  misc_feature 1..20: note = chemically synthesized
  source 1..20: mol_type = other DNA
atgtcagacttgaggttgta

SEQ ID NO: 29953 - DNA, 20 bp, synthetic construct
  misc_feature 1..20: note = chemically synthesized
  source 1..20: mol_type = other DNA
ttgaggttgtaaggtaaaat

SEQ ID NO: 29954 - DNA, 20 bp, synthetic construct
  misc_feature 1..20: note = chemically synthesized
  source 1..20: mol_type = other DNA
gaggttgtaaggtaaaatca

SEQ ID NO: 29955 - DNA, 20 bp, synthetic construct
  misc_feature 1..20: note = chemically synthesized
  source 1..20: mol_type = other DNA
tgtaaggtaaaatcagagat

SEQ ID NO: 29956 - DNA, 20 bp, synthetic construct
  misc_feature 1..20: note = chemically synthesized
  source 1..20: mol_type = other DNA
taaggtaaaatcagagatga

SEQ ID NO: 29957 - DNA, 20 bp, synthetic construct
  misc_feature 1..20: note = chemically synthesized
  source 1..20: mol_type = other DNA
aaggtaaaatcagagatgag

SEQ ID NO: 29958 - DNA, 20 bp, synthetic construct
  misc_feature 1..20: note = chemically synthesized
  source 1..20: mol_type = other DNA
ggtaaaatcagagatgagag

SEQ ID NO: 29959 - DNA, 20 bp, synthetic construct
  misc_feature 1..20: note = chemically synthesized
  source 1..20: mol_type = other DNA
aatcagagatgagaggagtc

SEQ ID NO: 29960 - DNA, 20 bp, synthetic construct
  misc_feature 1..20: note = chemically synthesized
  source 1..20: mol_type = other DNA
atcagagatgagaggagtca

SEQ ID NO: 29961 - DNA, 20 bp, synthetic construct
  misc_feature 1..20: note = chemically synthesized
  source 1..20: mol_type = other DNA
gagatgagaggagtcaagga

SEQ ID NO: 29962 - DNA, 20 bp, synthetic construct
  misc_feature 1..20: note = chemically synthesized
  source 1..20: mol_type = other DNA
agatgagaggagtcaaggat

SEQ ID NO: 29963 - DNA, 20 bp, synthetic construct
  misc_feature 1..20: note = chemically synthesized
  source 1..20: mol_type = other DNA
aggagtcaaggataggatca

SEQ ID NO: 29964 - DNA, 20 bp, synthetic construct
  misc_feature 1..20: note = chemically synthesized
  source 1..20: mol_type = other DNA
aggatcaaagtctcttcttc

SEQ ID NO: 29965 - DNA, 20 bp, synthetic construct
  misc_feature 1..20: note = chemically synthesized
  source 1..20: mol_type = other DNA
gatcaaagtctcttcttcta

SEQ ID NO: 29966 - DNA, 20 bp, synthetic construct
  misc_feature 1..20: note = chemically synthesized
  source 1..20: mol_type = other DNA
atcaaagtctcttcttctag

SEQ ID NO: 29967 - DNA, 20 bp, synthetic construct
  misc_feature 1..20: note = chemically synthesized
  source 1..20: mol_type = other DNA
tctcttcttctagaggaata

SEQ ID NO: 29968 - DNA, 20 bp, synthetic construct
  misc_feature 1..20: note = chemically synthesized
  source 1..20: mol_type = other DNA
ttcttctagaggaatatggt

SEQ ID NO: 29969 - DNA, 20 bp, synthetic construct
  misc_feature 1..20: note = chemically synthesized
  source 1..20: mol_type = other DNA
tcttctagaggaatatggtc

SEQ ID NO: 29970 - DNA, 20 bp, synthetic construct
  misc_feature 1..20: note = chemically synthesized
  source 1..20: mol_type = other DNA
ttctagaggaatatggtcag

SEQ ID NO: 29971 - DNA, 20 bp, synthetic construct
  misc_feature 1..20: note = chemically synthesized
  source 1..20: mol_type = other DNA
ctagaggaatatggtcagga

SEQ ID NO: 29972 - DNA, 20 bp, synthetic construct
  misc_feature 1..20: note = chemically synthesized
  source 1..20: mol_type = other DNA
agaggaatatggtcaggaga

SEQ ID NO: 29973 - DNA, 20 bp, synthetic construct
  misc_feature 1..20: note = chemically synthesized
  source 1..20: mol_type = other DNA
gtcaggagagagcacaacct

SEQ ID NO: 29974 - DNA, 20 bp, synthetic construct
  misc_feature 1..20: note = chemically synthesized
  source 1..20: mol_type = other DNA
agagcacaaccttagaaatt

SEQ ID NO: 29975 - DNA, 20 bp, synthetic construct
  misc_feature 1..20: note = chemically synthesized
  source 1..20: mol_type = other DNA
gagcacaaccttagaaattt

SEQ ID NO: 29976 - DNA, 20 bp, synthetic construct
  misc_feature 1..20: note = chemically synthesized
  source 1..20: mol_type = other DNA
agcacaaccttagaaatttg

SEQ ID NO: 29977 - DNA, 20 bp, synthetic construct
  misc_feature 1..20: note = chemically synthesized
  source 1..20: mol_type = other DNA
gcacaaccttagaaatttgg

SEQ ID NO: 29978 - DNA, 20 bp, synthetic construct
  misc_feature 1..20: note = chemically synthesized
  source 1..20: mol_type = other DNA
cacaaccttagaaatttggg

SEQ ID NO: 29979 - DNA, 20 bp, synthetic construct
  misc_feature 1..20: note = chemically synthesized
  source 1..20: mol_type = other DNA
acaaccttagaaatttgggg

SEQ ID NO: 29980 - DNA, 20 bp, synthetic construct
  misc_feature 1..20: note = chemically synthesized
  source 1..20: mol_type = other DNA
tgggggggtgttgcttgaaa

SEQ ID NO: 29981 - DNA, 20 bp, synthetic construct
  misc_feature 1..20: note = chemically synthesized
  source 1..20: mol_type = other DNA
gggggggtgttgcttgaaac

SEQ ID NO: 29982 - DNA, 20 bp, synthetic construct
  misc_feature 1..20: note = chemically synthesized
  source 1..20: mol_type = other DNA
tgttgcttgaaacaggtgtt

SEQ ID NO: 29983 - DNA, 20 bp, synthetic construct
  misc_feature 1..20: note = chemically synthesized
  source 1..20: mol_type = other DNA
gttgcttgaaacaggtgttg

SEQ ID NO: 29984 - DNA, 20 bp, synthetic construct
  misc_feature 1..20: note = chemically synthesized
  source 1..20: mol_type = other DNA
gcttgaaacaggtgttgagg

SEQ ID NO: 29985 - DNA, 20 bp, synthetic construct
  misc_feature 1..20: note = chemically synthesized
  source 1..20: mol_type = other DNA
acaggtgttgaggaagaatg

SEQ ID NO: 29986 - DNA, 20 bp, synthetic construct
  misc_feature 1..20: note = chemically synthesized
  source 1..20: mol_type = other DNA
caggtgttgaggaagaatgc

SEQ ID NO: 29987 - DNA, 20 bp, synthetic construct
  misc_feature 1..20: note = chemically synthesized
  source 1..20: mol_type = other DNA
ggtgttgaggaagaatgcag

SEQ ID NO: 29988 - DNA, 20 bp, synthetic construct
  misc_feature 1..20: note = chemically synthesized
  source 1..20: mol_type = other DNA
aggaagaatgcaggagttct

SEQ ID NO: 29989 - DNA, 20 bp, synthetic construct
  misc_feature 1..20: note = chemically synthesized
  source 1..20: mol_type = other DNA
ggaagaatgcaggagttctg

SEQ ID NO: 29990 - DNA, 20 bp, synthetic construct
  misc_feature 1..20: note = chemically synthesized
  source 1..20: mol_type = other DNA
ctgaggtttctgatgtgact

SEQ ID NO: 29991 - DNA, 20 bp, synthetic construct
  misc_feature 1..20: note = chemically synthesized
  source 1..20: mol_type = other DNA
tgaggtttctgatgtgactt

SEQ ID NO: 29992 - DNA, 20 bp, synthetic construct
  misc_feature 1..20: note = chemically synthesized
  source 1..20: mol_type = other DNA
gaggtttctgatgtgacttg

SEQ ID NO: 29993 - DNA, 20 bp, synthetic construct
  misc_feature 1..20: note = chemically synthesized
  source 1..20: mol_type = other DNA
aggtttctgatgtgacttgg

SEQ ID NO: 29994 - DNA, 20 bp, synthetic construct
  misc_feature 1..20: note = chemically synthesized
  source 1..20: mol_type = other DNA
gatgtgacttgggggtctga

SEQ ID NO: 29995 - DNA, 20 bp, synthetic construct
  misc_feature 1..20: note = chemically synthesized
  source 1..20: mol_type = other DNA
gtctgaaagttactgctgac

SEQ ID NO: 29996 - DNA, 20 bp, synthetic construct
  misc_feature 1..20: note = chemically synthesized
  source 1..20: mol_type = other DNA
tctgaaagttactgctgacc

SEQ ID NO: 29997 - DNA, 20 bp, synthetic construct
  misc_feature 1..20: note = chemically synthesized
  source 1..20: mol_type = other DNA
aaagttactgctgaccagga

SEQ ID NO: 29998 - DNA, 20 bp, synthetic construct
  misc_feature 1..20: note = chemically synthesized
  source 1..20: mol_type = other DNA
actgctgaccaggatagaaa

SEQ ID NO: 29999 - DNA, 20 bp, synthetic construct
  misc_feature 1..20: note = chemically synthesized
  source 1..20: mol_type = other DNA
tgaccaggatagaaaaagat

SEQ ID NO: 30000 - DNA, 20 bp, synthetic construct
  misc_feature 1..20: note = chemically synthesized
  source 1..20: mol_type = other DNA
ccaggatagaaaaagatgag

SEQ ID NO: 30001 - DNA, 20 bp, synthetic construct
  misc_feature 1..20: note = chemically synthesized
  source 1..20: mol_type = other DNA
gaaaaagatgagaagaaact

SEQ ID NO: 30002 - DNA, 20 bp, synthetic construct
  misc_feature 1..20: note = chemically synthesized
  source 1..20: mol_type = other DNA
aagatgagaagaaacttggc

SEQ ID NO: 30003 - DNA, 20 bp, synthetic construct
  misc_feature 1..20: note = chemically synthesized
  source 1..20: mol_type = other DNA
agatgagaagaaacttggcc

SEQ ID NO: 30004 - DNA, 20 bp, synthetic construct
  misc_feature 1..20: note = chemically synthesized
  source 1..20: mol_type = other DNA
tgagaagaaacttggccagg

SEQ ID NO: 30005 - DNA, 20 bp, synthetic construct
  misc_feature 1..20: note = chemically synthesized
  source 1..20: mol_type = other DNA
agaaacttggccaggtagat

SEQ ID NO: 30006 - DNA, 20 bp, synthetic construct
  misc_feature 1..20: note = chemically synthesized
  source 1..20: mol_type = other DNA
acttggccaggtagataaga

SEQ ID NO: 30007 - DNA, 20 bp, synthetic construct
  misc_feature 1..20: note = chemically synthesized
  source 1..20: mol_type = other DNA
tggccaggtagataagatgg

SEQ ID NO: 30008 - DNA, 20 bp, synthetic construct
  misc_feature 1..20: note = chemically synthesized
  source 1..20: mol_type = other DNA
ccaggtagataagatggaag

SEQ ID NO: 30009 - DNA, 20 bp, synthetic construct
  misc_feature 1..20: note = chemically synthesized
  source 1..20: mol_type = other DNA
gataagatggaagcagtccc

SEQ ID NO: 30010 - DNA, 20 bp, synthetic construct
  misc_feature 1..20: note = chemically synthesized
  source 1..20: mol_type = other DNA
ataagatggaagcagtccca

SEQ ID NO: 30011 - DNA, 20 bp, synthetic construct
  misc_feature 1..20: note = chemically synthesized
  source 1..20: mol_type = other DNA
gaagcagtcccaaggaacca

SEQ ID NO: 30012 - DNA, 20 bp, synthetic construct
  misc_feature 1..20: note = chemically synthesized
  source 1..20: mol_type = other DNA
gcagtcccaaggaaccatgg

SEQ ID NO: 30013 - DNA, 20 bp, synthetic construct
  misc_feature 1..20: note = chemically synthesized
  source 1..20: mol_type = other DNA
cagtcccaaggaaccatgga

SEQ ID NO: 30014 - DNA, 20 bp, synthetic construct
  misc_feature 1..20: note = chemically synthesized
  source 1..20: mol_type = other DNA
gtcccaaggaaccatggaag

SEQ ID NO: 30015 - DNA, 20 bp, synthetic construct
  misc_feature 1..20: note = chemically synthesized
  source 1..20: mol_type = other DNA
tcccaaggaaccatggaagg

SEQ ID NO: 30016 - DNA, 20 bp, synthetic construct
  misc_feature 1..20: note = chemically synthesized
  source 1..20: mol_type = other DNA
catggaaggaggtgtatttc

SEQ ID NO: 30017 - DNA, 20 bp, synthetic construct
  misc_feature 1..20: note = chemically synthesized
  source 1..20: mol_type = other DNA
tggaaggaggtgtatttccg

SEQ ID NO: 30018 - DNA, 20 bp, synthetic construct
  misc_feature 1..20: note = chemically synthesized
  source 1..20: mol_type = other DNA
ggaaggaggtgtatttccgg

SEQ ID NO: 30019 - DNA, 20 bp, synthetic construct
  misc_feature 1..20: note = chemically synthesized
  source 1..20: mol_type = other DNA
ggaggtgtatttccggaggt

SEQ ID NO: 30020 - DNA, 20 bp, synthetic construct
  misc_feature 1..20: note = chemically synthesized
  source 1..20: mol_type = other DNA
gtgtatttccggaggtgagt

SEQ ID NO: 30021 - DNA, 20 bp, synthetic construct
  misc_feature 1..20: note = chemically synthesized
  source 1..20: mol_type = other DNA
gtatttccggaggtgagtta

SEQ ID NO: 30022 - DNA, 20 bp, synthetic construct
  misc_feature 1..20: note = chemically synthesized
  source 1..20: mol_type = other DNA
cggaggtgagttagagcaaa

SEQ ID NO: 30023 - DNA, 20 bp, synthetic construct
  misc_feature 1..20: note = chemically synthesized
  source 1..20: mol_type = other DNA
tagagcaaatggcatttacc

SEQ ID NO: 30024 - DNA, 20 bp, synthetic construct
  misc_feature 1..20: note = chemically synthesized
  source 1..20: mol_type = other DNA
ggcatttacctggtctctgc

SEQ ID NO: 30025 - DNA, 20 bp, synthetic construct
  misc_feature 1..20: note = chemically synthesized
  source 1..20: mol_type = other DNA
gcatttacctggtctctgcc

SEQ ID NO: 30026 - DNA, 20 bp, synthetic construct
  misc_feature 1..20: note = chemically synthesized
  source 1..20: mol_type = other DNA
gtctctgccaggctctcctc

SEQ ID NO: 30027 - DNA, 20 bp, synthetic construct
  misc_feature 1..20: note = chemically synthesized
  source 1..20: mol_type = other DNA
tctctgccaggctctcctct

SEQ ID NO: 30028 - DNA, 20 bp, synthetic construct
  misc_feature 1..20: note = chemically synthesized
  source 1..20: mol_type = other DNA
aggctctcctctgggtgctc

SEQ ID NO: 30029 - DNA, 20 bp, synthetic construct
  misc_feature 1..20: note = chemically synthesized
  source 1..20: mol_type = other DNA
ctggtatttattgttctttt

SEQ ID NO: 30030 - DNA, 20 bp, synthetic construct
  misc_feature 1..20: note = chemically synthesized
  source 1..20: mol_type = other DNA
tgttctttttagtttttatt

SEQ ID NO: 30031 - DNA, 20 bp, synthetic construct
  misc_feature 1..20: note = chemically synthesized
  source 1..20: mol_type = other DNA
gtttttatttagtttcattt

SEQ ID NO: 30032 - DNA, 20 bp, synthetic construct
  misc_feature 1..20: note = chemically synthesized
  source 1..20: mol_type = other DNA
atttagtttcattttagttt

SEQ ID NO: 30033 - DNA, 20 bp, synthetic construct
  misc_feature 1..20: note = chemically synthesized
  source 1..20: mol_type = other DNA
attgatgatgaccttcaata

SEQ ID NO: 30034 - DNA, 20 bp, synthetic construct
  misc_feature 1..20: note = chemically synthesized
  source 1..20: mol_type = other DNA
ccttcaataaagttgccttc

SEQ ID NO: 30035 - DNA, 20 bp, synthetic construct
  misc_feature 1..20: note = chemically synthesized
  source 1..20: mol_type = other DNA
caataaagttgccttctgga

SEQ ID NO: 30036 - DNA, 20 bp, synthetic construct
  misc_feature 1..20: note = chemically synthesized
  source 1..20: mol_type = other DNA
tttgatgctaccaaaaatgc

SEQ ID NO: 30037 - DNA, 20 bp, synthetic construct
  misc_feature 1..20: note = chemically synthesized
  source 1..20: mol_type = other DNA
ctaccaaaaatgccagttct

SEQ ID NO: 30038 - DNA, 20 bp, synthetic construct
  misc_feature 1..20: note = chemically synthesized
  source 1..20: mol_type = other DNA
aaaatgccagttctcagctg

SEQ ID NO: 30039 - DNA, 20 bp, synthetic construct
  misc_feature 1..20: note = chemically synthesized
  source 1..20: mol_type = other DNA
aaatgccagttctcagctgt

SEQ ID NO: 30040 - DNA, 20 bp, synthetic construct
  misc_feature 1..20: note = chemically synthesized
  source 1..20: mol_type = other DNA
atgccagttctcagctgtag

SEQ ID NO: 30041 - DNA, 20 bp, synthetic construct
  misc_feature 1..20: note = chemically synthesized
  source 1..20: mol_type = other DNA
tgccagttctcagctgtagg

SEQ ID NO: 30042 - DNA, 20 bp, synthetic construct
  misc_feature 1..20: note = chemically synthesized
  source 1..20: mol_type = other DNA
ccagttctcagctgtaggag

SEQ ID NO: 30043 - DNA, 20 bp, synthetic construct
  misc_feature 1..20: note = chemically synthesized
  source 1..20: mol_type = other DNA
aggaggagccattaaaatct

SEQ ID NO: 30044 - DNA, 20 bp, synthetic construct
  misc_feature 1..20: note = chemically synthesized
  source 1..20: mol_type = other DNA
ggagccattaaaatctaagc

SEQ ID NO: 30045 - DNA, 20 bp, synthetic construct
  misc_feature 1..20: note = chemically synthesized
  source 1..20: mol_type = other DNA
agccattaaaatctaagcaa

SEQ ID NO: 30046 - DNA, 20 bp, synthetic construct
  misc_feature 1..20: note = chemically synthesized
  source 1..20: mol_type = other DNA
cattaaaatctaagcaagag

SEQ ID NO: 30047 - DNA, 20 bp, synthetic construct
  misc_feature 1..20: note = chemically synthesized
  source 1..20: mol_type = other DNA
aaatctaagcaagagaagtt

SEQ ID NO: 30048 - DNA, 20 bp, synthetic construct
  misc_feature 1..20: note = chemically synthesized
  source 1..20: mol_type = other DNA
aagagaagttcagtttttta

SEQ ID NO: 30049 - DNA, 20 bp, synthetic construct
  misc_feature 1..20: note = chemically synthesized
  source 1..20: mol_type = other DNA
gttttttaaagccacaactc

SEQ ID NO: 30050 - DNA, 20 bp, synthetic construct
  misc_feature 1..20: note = chemically synthesized
  source 1..20: mol_type = other DNA
aaatttgcccatattttatt

SEQ ID NO: 30051 - DNA, 20 bp, synthetic construct
  misc_feature 1..20: note = chemically synthesized
  source 1..20: mol_type = other DNA
aatttgcccatattttattt

SEQ ID NO: 30052 - DNA, 20 bp, synthetic construct
  misc_feature 1..20: note = chemically synthesized
  source 1..20: mol_type = other DNA
tgcccatattttatttagga

SEQ ID NO: 30053 - DNA, 20 bp, synthetic construct
  misc_feature 1..20: note = chemically synthesized
  source 1..20: mol_type = other DNA
gcccatattttatttaggac

SEQ ID NO: 30054 - DNA, 20 bp, synthetic construct
  misc_feature 1..20: note = chemically synthesized
  source 1..20: mol_type = other DNA
cccatattttatttaggaca

SEQ ID NO: 30055 - DNA, 20 bp, synthetic construct
  misc_feature 1..20: note = chemically synthesized
  source 1..20: mol_type = other DNA
ccatattttatttaggacag

SEQ ID NO: 30056 - DNA, 20 bp, synthetic construct
  misc_feature 1..20: note = chemically synthesized
  source 1..20: mol_type = other DNA
gacaggggcaaaaaatcttt

SEQ ID NO: 30057 - DNA, 20 bp, synthetic construct
  misc_feature 1..20: note = chemically synthesized
  source 1..20: mol_type = other DNA
caggggcaaaaaatctttaa

SEQ ID NO: 30058 - DNA, 20 bp, synthetic construct
  misc_feature 1..20: note = chemically synthesized
  source 1..20: mol_type = other DNA
tactcaatactccaaatttt

SEQ ID NO: 30059 - DNA, 20 bp, synthetic construct
  misc_feature 1..20: note = chemically synthesized
  source 1..20: mol_type = other DNA
tccaaattttcagtccaatt

SEQ ID NO: 30060 - DNA, 20 bp, synthetic construct
  misc_feature 1..20: note = chemically synthesized
  source 1..20: mol_type = other DNA
ccaaattttcagtccaattt

SEQ ID NO: 30061 - DNA, 20 bp, synthetic construct
  misc_feature 1..20: note = chemically synthesized
  source 1..20: mol_type = other DNA
caaattttcagtccaatttg

SEQ ID NO: 30062 - DNA, 20 bp, synthetic construct
  misc_feature 1..20: note = chemically synthesized
  source 1..20: mol_type = other DNA
tccaatttggggccttctta

SEQ ID NO: 30063 - DNA, 20 bp, synthetic construct
  misc_feature 1..20: note = chemically synthesized
  source 1..20: mol_type = other DNA
ccaatttggggccttcttat

SEQ ID NO: 30064 - DNA, 20 bp, synthetic construct
  misc_feature 1..20: note = chemically synthesized
  source 1..20: mol_type = other DNA
ggggccttcttataggcctc

SEQ ID NO: 30065 - DNA, 20 bp, synthetic construct
  misc_feature 1..20: note = chemically synthesized
  source 1..20: mol_type = other DNA
gggccttcttataggcctct

SEQ ID NO: 30066 - DNA, 20 bp, synthetic construct
  misc_feature 1..20: note = chemically synthesized
  source 1..20: mol_type = other DNA
ggccttcttataggcctcta

SEQ ID NO: 30067 - DNA, 20 bp, synthetic construct
  misc_feature 1..20: note = chemically synthesized
  source 1..20: mol_type = other DNA
gccttcttataggcctctag

SEQ ID NO: 30068 - DNA, 20 bp, synthetic construct
  misc_feature 1..20: note = chemically synthesized
  source 1..20: mol_type = other DNA
ccttcttataggcctctagg

SEQ ID NO: 30069 - DNA, 20 bp, synthetic construct
  misc_feature 1..20: note = chemically synthesized
  source 1..20: mol_type = other DNA
ttcttataggcctctagggg

SEQ ID NO: 30070 - DNA, 20 bp, synthetic construct
  misc_feature 1..20: note = chemically synthesized
  source 1..20: mol_type = other DNA
taggcctctagggggagttt

SEQ ID NO: 30071 - DNA, 20 bp, synthetic construct
  misc_feature 1..20: note = chemically synthesized
  source 1..20: mol_type = other DNA
tctagggggagttttagccc

SEQ ID NO: 30072 - DNA, 20 bp, synthetic construct
  misc_feature 1..20: note = chemically synthesized
  source 1..20: mol_type = other DNA
ctagggggagttttagcccc

SEQ ID NO: 30073 - DNA, 20 bp, synthetic construct
  misc_feature 1..20: note = chemically synthesized
  source 1..20: mol_type = other DNA
tagccccaggactcatttac

SEQ ID NO: 30074 - DNA, 20 bp, synthetic construct
  misc_feature 1..20: note = chemically synthesized
  source 1..20: mol_type = other DNA
actcatttactggccttttt

SEQ ID NO: 30075 - DNA, 20 bp, synthetic construct
  misc_feature 1..20: note = chemically synthesized
  source 1..20: mol_type = other DNA
ttactggcctttttaagacc

SEQ ID NO: 30076 - DNA, 20 bp, synthetic construct
  misc_feature 1..20: note = chemically synthesized
  source 1..20: mol_type = other DNA
tactggcctttttaagacct

SEQ ID NO: 30077 - DNA, 20 bp, synthetic construct
  misc_feature 1..20: note = chemically synthesized
  source 1..20: mol_type = other DNA
aagacctaggaacttgataa

SEQ ID NO: 30078 - DNA, 20 bp, synthetic construct
  misc_feature 1..20: note = chemically synthesized
  source 1..20: mol_type = other DNA
ctaggaacttgataatggca

SEQ ID NO: 30079 - DNA, 20 bp, synthetic construct
  misc_feature 1..20: note = chemically synthesized
  source 1..20: mol_type = other DNA
ggaacttgataatggcacgg

SEQ ID NO: 30080 - DNA, 20 bp, synthetic construct
  misc_feature 1..20: note = chemically synthesized
  source 1..20: mol_type = other DNA
aatggcacggtggatctcct

SEQ ID NO: 30081 - DNA, 20 bp, synthetic construct
  misc_feature 1..20: note = chemically synthesized
  source 1..20: mol_type = other DNA
gtcttaatgctgtatatgat

SEQ ID NO: 30082 - DNA, 20 bp, synthetic construct
  misc_feature 1..20: note = chemically synthesized
  source 1..20: mol_type = other DNA
tcttaatgctgtatatgatt

SEQ ID NO: 30083 - DNA, 20 bp, synthetic construct
  misc_feature 1..20: note = chemically synthesized
  source 1..20: mol_type = other DNA
atgctgtatatgattgggtt

SEQ ID NO: 30084 - DNA, 20 bp, synthetic construct
  misc_feature 1..20: note = chemically synthesized
  source 1..20: mol_type = other DNA
gtatatgattgggttaagca

SEQ ID NO: 30085 - DNA, 20 bp, synthetic construct
  misc_feature 1..20: note = chemically synthesized
  source 1..20: mol_type = other DNA
tatatgattgggttaagcat

SEQ ID NO: 30086 - DNA, 20 bp, synthetic construct
  misc_feature 1..20: note = chemically synthesized
  source 1..20: mol_type = other DNA
tatgattgggttaagcatgg

SEQ ID NO: 30087 - DNA, 20 bp, synthetic construct
  misc_feature 1..20: note = chemically synthesized
  source 1..20: mol_type = other DNA
atgattgggttaagcatggg

SEQ ID NO: 30088 - DNA, 20 bp, synthetic construct
  misc_feature 1..20: note = chemically synthesized
  source 1..20: mol_type = other DNA
ttaagcatgggaggcacaaa

SEQ ID NO: 30089 - DNA, 20 bp, synthetic construct
  misc_feature 1..20: note = chemically synthesized
  source 1..20: mol_type = other DNA
taagcatgggaggcacaaaa

SEQ ID NO: 30090 - DNA, 20 bp, synthetic construct
  misc_feature 1..20: note = chemically synthesized
  source 1..20: mol_type = other DNA
gcatgggaggcacaaaaagg

SEQ ID NO: 30091 - DNA, 20 bp, synthetic construct
  misc_feature 1..20: note = chemically synthesized
  source 1..20: mol_type = other DNA
aggcacaaaaaggtagacat

SEQ ID NO: 30092 - DNA, 20 bp, synthetic construct
  misc_feature 1..20: note = chemically synthesized
  source 1..20: mol_type = other DNA
aaaaggtagacattggccat

SEQ ID NO: 30093 - DNA, 20 bp, synthetic construct
  misc_feature 1..20: note = chemically synthesized
  source 1..20: mol_type = other DNA
aggtagacattggccataag

SEQ ID NO: 30094 - DNA, 20 bp, synthetic construct
  misc_feature 1..20: note = chemically synthesized
  source 1..20: mol_type = other DNA
attggccataagaagatgaa

SEQ ID NO: 30095 - DNA, 20 bp, synthetic construct
  misc_feature 1..20: note = chemically synthesized
  source 1..20: mol_type = other DNA
ggccataagaagatgaatag

SEQ ID NO: 30096 - DNA, 20 bp, synthetic construct
  misc_feature 1..20: note = chemically synthesized
  source 1..20: mol_type = other DNA
gccataagaagatgaatagc

SEQ ID NO: 30097 - DNA, 20 bp, synthetic construct
  misc_feature 1..20: note = chemically synthesized
  source 1..20: mol_type = other DNA
ataagaagatgaatagcagg

SEQ ID NO: 30098 - DNA, 20 bp, synthetic construct
  misc_feature 1..20: note = chemically synthesized
  source 1..20: mol_type = other DNA
taagaagatgaatagcaggt

SEQ ID NO: 30099 - DNA, 20 bp, synthetic construct
  misc_feature 1..20: note = chemically synthesized
  source 1..20: mol_type = other DNA
aagaagatgaatagcaggtg

SEQ ID NO: 30100 - DNA, 20 bp, synthetic construct
  misc_feature 1..20: note = chemically synthesized
  source 1..20: mol_type = other DNA
gtggggcatgcttcccaaaa

SEQ ID NO: 30101 - DNA, 20 bp, synthetic construct
  misc_feature 1..20: note = chemically synthesized
  source 1..20: mol_type = other DNA
tgcttcccaaaacggtgcac

SEQ ID NO: 30102 - DNA, 20 bp, synthetic construct
  misc_feature 1..20: note = chemically synthesized
  source 1..20: mol_type = other DNA
gcttcccaaaacggtgcacc

SEQ ID NO: 30103 - DNA, 20 bp, synthetic construct
  misc_feature 1..20: note = chemically synthesized
  source 1..20: mol_type = other DNA
cttcccaaaacggtgcacca

SEQ ID NO: 30104 - DNA, 20 bp, synthetic construct
  misc_feature 1..20: note = chemically synthesized
  source 1..20: mol_type = other DNA
ccaaaacggtgcaccaggga

SEQ ID NO: 30105 - DNA, 20 bp, synthetic construct
  misc_feature 1..20: note = chemically synthesized
  source 1..20: mol_type = other DNA
caccagggacagccccatca

SEQ ID NO: 30106 - DNA, 20 bp, synthetic construct
  misc_feature 1..20: note = chemically synthesized
  source 1..20: mol_type = other DNA
accagggacagccccatcat

SEQ ID NO: 30107 - DNA, 20 bp, synthetic construct
  misc_feature 1..20: note = chemically synthesized
  source 1..20: mol_type = other DNA
acagccccatcatgggcaca

SEQ ID NO: 30108 - DNA, 20 bp, synthetic construct
  misc_feature 1..20: note = chemically synthesized
  source 1..20: mol_type = other DNA
atcatgggcacaaagaatac

SEQ ID NO: 30109 - DNA, 20 bp, synthetic construct
  misc_feature 1..20: note = chemically synthesized
  source 1..20: mol_type = other DNA
gggcacaaagaatactagca

SEQ ID NO: 30110 - DNA, 20 bp, synthetic construct
  misc_feature 1..20: note = chemically synthesized
  source 1..20: mol_type = other DNA
caaagaatactagcacagca

SEQ ID NO: 30111 - DNA, 20 bp, synthetic construct
  misc_feature 1..20: note = chemically synthesized
  source 1..20: mol_type = other DNA
aagaatactagcacagcaca

SEQ ID NO: 30112 - DNA, 20 bp, synthetic construct
  misc_feature 1..20: note = chemically synthesized
  source 1..20: mol_type = other DNA
gaatactagcacagcacaga

SEQ ID NO: 30113 - DNA, 20 bp, synthetic construct
  misc_feature 1..20: note = chemically synthesized
  source 1..20: mol_type = other DNA
aatactagcacagcacagag

SEQ ID NO: 30114 - DNA, 20 bp, synthetic construct
  misc_feature 1..20: note = chemically synthesized
  source 1..20: mol_type = other DNA
tactagcacagcacagagag

SEQ ID NO: 30115 - DNA, 20 bp, synthetic construct
  misc_feature 1..20: note = chemically synthesized
  source 1..20: mol_type = other DNA
tagcacagcacagagaggag

SEQ ID NO: 30116 - DNA, 20 bp, synthetic construct
  misc_feature 1..20: note = chemically synthesized
  source 1..20: mol_type = other DNA
gaggagcggtgcatgtctga

SEQ ID NO: 30117 - DNA, 20 bp, synthetic construct
  misc_feature 1..20: note = chemically synthesized
  source 1..20: mol_type = other DNA
aggagcggtgcatgtctgaa

SEQ ID NO: 30118 - DNA, 20 bp, synthetic construct
  misc_feature 1..20: note = chemically synthesized
  source 1..20: mol_type = other DNA
cggtgcatgtctgaaaggca

SEQ ID NO: 30119 - DNA, 20 bp, synthetic construct
  misc_feature 1..20: note = chemically synthesized
  source 1..20: mol_type = other DNA
aggcacggcgctgctcctct

SEQ ID NO: 30120 - DNA, 20 bp, synthetic construct
  misc_feature 1..20: note = chemically synthesized
  source 1..20: mol_type = other DNA
ggcacggcgctgctcctctt

SEQ ID NO: 30121 - DNA, 20 bp, synthetic construct
  misc_feature 1..20: note = chemically synthesized
  source 1..20: mol_type = other DNA
cacggcgctgctcctcttgg

SEQ ID NO: 30122 - DNA, 20 bp, synthetic construct
  misc_feature 1..20: note = chemically synthesized
  source 1..20: mol_type = other DNA
acggcgctgctcctcttggg

SEQ ID NO: 30123 - DNA, 20 bp, synthetic construct
  misc_feature 1..20: note = chemically synthesized
  source 1..20: mol_type = other DNA
cgctgctcctcttgggaggc

SEQ ID NO: 30124 - DNA, 20 bp, synthetic construct
  misc_feature 1..20: note = chemically synthesized
  source 1..20: mol_type = other DNA
gctgctcctcttgggaggcc

SEQ ID NO: 30125 - DNA, 20 bp, synthetic construct
  misc_feature 1..20: note = chemically synthesized
  source 1..20: mol_type = other DNA
gccaggcctgctactgtgtg

SEQ ID NO: 30126 - DNA, 20 bp, synthetic construct
  misc_feature 1..20: note = chemically synthesized
  source 1..20: mol_type = other DNA
ccaggcctgctactgtgtgc

SEQ ID NO: 30127 - DNA, 20 bp, synthetic construct
  misc_feature 1..20: note = chemically synthesized
  source 1..20: mol_type = other DNA
cctgctactgtgtgcaggat

SEQ ID NO: 30128 - DNA, 20 bp, synthetic construct
  misc_feature 1..20: note = chemically synthesized
  source 1..20: mol_type = other DNA
ctgtgtgcaggatgagtcca

SEQ ID NO: 30129 - DNA, 20 bp, synthetic construct
  misc_feature 1..20: note = chemically synthesized
  source 1..20: mol_type = other DNA
tgtgtgcaggatgagtccat

SEQ ID NO: 30130 - DNA, 20 bp, synthetic construct
  misc_feature 1..20: note = chemically synthesized
  source 1..20: mol_type = other DNA
tgcaggatgagtccatagga

SEQ ID NO: 30131 - DNA, 20 bp, synthetic construct
  misc_feature 1..20: note = chemically synthesized
  source 1..20: mol_type = other DNA
agtccataggacagtgcgat

SEQ ID NO: 30132 - DNA, 20 bp, synthetic construct
  misc_feature 1..20: note = chemically synthesized
  source 1..20: mol_type = other DNA
taggacagtgcgatgagcac

SEQ ID NO: 30133 - DNA, 20 bp, synthetic construct
  misc_feature 1..20: note = chemically synthesized
  source 1..20: mol_type = other DNA
aggacagtgcgatgagcacc

SEQ ID NO: 30134 - DNA, 20 bp, synthetic construct
  misc_feature 1..20: note = chemically synthesized
  source 1..20: mol_type = other DNA
agtgcgatgagcaccaggtc

SEQ ID NO: 30135 - DNA, 20 bp, synthetic construct
  misc_feature 1..20: note = chemically synthesized
  source 1..20: mol_type = other DNA
gagcaccaggtccagcatca

SEQ ID NO: 30136 - DNA, 20 bp, synthetic construct
  misc_feature 1..20: note = chemically synthesized
  source 1..20: mol_type = other DNA
acagtgaaaactaccaccat

SEQ ID NO: 30137 - DNA, 20 bp, synthetic construct
  misc_feature 1..20: note = chemically synthesized
  source 1..20: mol_type = other DNA
actaccaccatcagtccata

SEQ ID NO: 30138 - DNA, 20 bp, synthetic construct
  misc_feature 1..20: note = chemically synthesized
  source 1..20: mol_type = other DNA
tcagtccatacagattattg

SEQ ID NO: 30139 - DNA, 20 bp, synthetic construct
  misc_feature 1..20: note = chemically synthesized
  source 1..20: mol_type = other DNA
cagtccatacagattattga

SEQ ID NO: 30140 - DNA, 20 bp, synthetic construct
  misc_feature 1..20: note = chemically synthesized
  source 1..20: mol_type = other DNA
tattgaaggtgatatctgtg

SEQ ID NO: 30141 - DNA, 20 bp, synthetic construct
  misc_feature 1..20: note = chemically synthesized
  source 1..20: mol_type = other DNA
attgaaggtgatatctgtgc

SEQ ID NO: 30142 - DNA, 20 bp, synthetic construct
  misc_feature 1..20: note = chemically synthesized
  source 1..20: mol_type = other DNA
aaggtgatatctgtgcaggc

SEQ ID NO: 30143 - DNA, 20 bp, synthetic construct
  misc_feature 1..20: note = chemically synthesized
  source 1..20: mol_type = other DNA
aggccagctgtatcacttcc

SEQ ID NO: 30144 - DNA, 20 bp, synthetic construct
  misc_feature 1..20: note = chemically synthesized
  source 1..20: mol_type = other DNA
agctgtatcacttcctggtg

SEQ ID NO: 30145 - DNA, 20 bp, synthetic construct
  misc_feature 1..20: note = chemically synthesized
  source 1..20: mol_type = other DNA
gctgtatcacttcctggtgc

SEQ ID NO: 30146 - DNA, 20 bp, synthetic construct
  misc_feature 1..20: note = chemically synthesized
  source 1..20: mol_type = other DNA
cttcctggtgcaggcaaaat

SEQ ID NO: 30147 - DNA, 20 bp, synthetic construct
  misc_feature 1..20: note = chemically synthesized
  source 1..20: mol_type = other DNA
cctggtgcaggcaaaatgag

SEQ ID NO: 30148 - DNA, 20 bp, synthetic construct
  misc_feature 1..20: note = chemically synthesized
  source 1..20: mol_type = other DNA
ctggtgcaggcaaaatgagt

SEQ ID NO: 30149 - DNA, 20 bp, synthetic construct
  misc_feature 1..20: note = chemically synthesized
  source 1..20: mol_type = other DNA
ggtgcaggcaaaatgagtgg

SEQ ID NO: 30150 - DNA, 20 bp, synthetic construct
  misc_feature 1..20: note = chemically synthesized
  source 1..20: mol_type = other DNA
tgcaggcaaaatgagtggga

SEQ ID NO: 30151 - DNA, 20 bp, synthetic construct
  misc_feature 1..20: note = chemically synthesized
  source 1..20: mol_type = other DNA
gcaggcaaaatgagtgggag

SEQ ID NO: 30152 - DNA, 20 bp, synthetic construct
  misc_feature 1..20: note = chemically synthesized
  source 1..20: mol_type = other DNA
aaatgagtgggagaggacca

SEQ ID NO: 30153 - DNA, 20 bp, synthetic construct
  misc_feature 1..20: note = chemically synthesized
  source 1..20: mol_type = other DNA
gggagaggaccacagatcca

SEQ ID NO: 30154 - DNA, 20 bp, synthetic construct
  misc_feature 1..20: note = chemically synthesized
  source 1..20: mol_type = other DNA
agaggaccacagatccacag

SEQ ID NO: 30155 - DNA, 20 bp, synthetic construct
  misc_feature 1..20: note = chemically synthesized
  source 1..20: mol_type = other DNA
gaggaccacagatccacagt

SEQ ID NO: 30156 - DNA, 20 bp, synthetic construct
  misc_feature 1..20: note = chemically synthesized
  source 1..20: mol_type = other DNA
aggaccacagatccacagta

SEQ ID NO: 30157 - DNA, 20 bp, synthetic construct
  misc_feature 1..20: note = chemically synthesized
  source 1..20: mol_type = other DNA
cacagatccacagtagggaa

SEQ ID NO: 30158 - DNA, 20 bp, synthetic construct
  misc_feature 1..20: note = chemically synthesized
  source 1..20: mol_type = other DNA
ccacagtagggaaaagcctt

SEQ ID NO: 30159 - DNA, 20 bp, synthetic construct
  misc_feature 1..20: note = chemically synthesized
  source 1..20: mol_type = other DNA
cacagtagggaaaagccttc

SEQ ID NO: 30160 - DNA, 20 bp, synthetic construct
  misc_feature 1..20: note = chemically synthesized
  source 1..20: mol_type = other DNA
cagtagggaaaagccttcag

SEQ ID NO: 30161 - DNA, 20 bp, synthetic construct
  misc_feature 1..20: note = chemically synthesized
  source 1..20: mol_type = other DNA
agtagggaaaagccttcagg

SEQ ID NO: 30162 - DNA, 20 bp, synthetic construct
  misc_feature 1..20: note = chemically synthesized
  source 1..20: mol_type = other DNA
tagggaaaagccttcaggag

SEQ ID NO: 30163 - DNA, 20 bp, synthetic construct
  misc_feature 1..20: note = chemically synthesized
  source 1..20: mol_type = other DNA
agggaaaagccttcaggagg

SEQ ID NO: 30164 - DNA, 20 bp, synthetic construct
  misc_feature 1..20: note = chemically synthesized
  source 1..20: mol_type = other DNA
agccttcaggaggaggacaa

SEQ ID NO: 30165 - DNA, 20 bp, synthetic construct
  misc_feature 1..20: note = chemically synthesized
  source 1..20: mol_type = other DNA
gccttcaggaggaggacaat

SEQ ID NO: 30166 - DNA, 20 bp, synthetic construct
  misc_feature 1..20: note = chemically synthesized
  source 1..20: mol_type = other DNA
ccttcaggaggaggacaata

SEQ ID NO: 30167 - DNA, 20 bp, synthetic construct
  misc_feature 1..20: note = chemically synthesized
  source 1..20: mol_type = other DNA
caggaggaggacaataggga

SEQ ID NO: 30168 - DNA, 20 bp, synthetic construct
  misc_feature 1..20: note = chemically synthesized
  source 1..20: mol_type = other DNA
gaggaggacaatagggatag

SEQ ID NO: 30169 - DNA, 20 bp, synthetic construct
  misc_feature 1..20: note = chemically synthesized
  source 1..20: mol_type = other DNA
gacaatagggatagtggcca

SEQ ID NO: 30170 - DNA, 20 bp, synthetic construct
  misc_feature 1..20: note = chemically synthesized
  source 1..20: mol_type = other DNA
acaatagggatagtggccac

SEQ ID NO: 30171 - DNA, 20 bp, synthetic construct
  misc_feature 1..20: note = chemically synthesized
  source 1..20: mol_type = other DNA
ggatagtggccacaggtccc

SEQ ID NO: 30172 - DNA, 20 bp, synthetic construct
  misc_feature 1..20: note = chemically synthesized
  source 1..20: mol_type = other DNA
tagtggccacaggtccccgg

SEQ ID NO: 30173 - DNA, 20 bp, synthetic construct
  misc_feature 1..20: note = chemically synthesized
  source 1..20: mol_type = other DNA
ggtccccggaagatgacaat

SEQ ID NO: 30174 - DNA, 20 bp, synthetic construct
  misc_feature 1..20: note = chemically synthesized
  source 1..20: mol_type = other DNA
gtccccggaagatgacaatt

SEQ ID NO: 30175 - DNA, 20 bp, synthetic construct
  misc_feature 1..20: note = chemically synthesized
  source 1..20: mol_type = other DNA
ggcctgctctgaccacttgc

SEQ ID NO: 30176 - DNA, 20 bp, synthetic construct
  misc_feature 1..20: note = chemically synthesized
  source 1..20: mol_type = other DNA
tgctctgaccacttgctggc

SEQ ID NO: 30177 - DNA, 20 bp, synthetic construct
  misc_feature 1..20: note = chemically synthesized
  source 1..20: mol_type = other DNA
gtgataatgaccgaatacct

SEQ ID NO: 30178 - DNA, 20 bp, synthetic construct
  misc_feature 1..20: note = chemically synthesized
  source 1..20: mol_type = other DNA
gataatgaccgaatacctca

SEQ ID NO: 30179 - DNA, 20 bp, synthetic construct
  misc_feature 1..20: note = chemically synthesized
  source 1..20: mol_type = other DNA
ataatgaccgaatacctcag

SEQ ID NO: 30180 - DNA, 20 bp, synthetic construct
  misc_feature 1..20: note = chemically synthesized
  source 1..20: mol_type = other DNA
taatgaccgaatacctcaga

SEQ ID NO: 30181 - DNA, 20 bp, synthetic construct
  misc_feature 1..20: note = chemically synthesized
  source 1..20: mol_type = other DNA
tgaccgaatacctcagaggg

SEQ ID NO: 30182 - DNA, 20 bp, synthetic construct
  misc_feature 1..20: note = chemically synthesized
  source 1..20: mol_type = other DNA
ccgaatacctcagagggtgg

SEQ ID NO: 30183 - DNA, 20 bp, synthetic construct
  misc_feature 1..20: note = chemically synthesized
  source 1..20: mol_type = other DNA
atacctcagagggtggcaga

SEQ ID NO: 30184 - DNA, 20 bp, synthetic construct
  misc_feature 1..20: note = chemically synthesized
  source 1..20: mol_type = other DNA
agagggtggcagatggccac

SEQ ID NO: 30185 - DNA, 20 bp, synthetic construct
  misc_feature 1..20: note = chemically synthesized
  source 1..20: mol_type = other DNA
gagggtggcagatggccaca

SEQ ID NO: 30186 - DNA, 20 bp, synthetic construct
  misc_feature 1..20: note = chemically synthesized
  source 1..20: mol_type = other DNA
ggtggcagatggccacaagg

SEQ ID NO: 30187 - DNA, 20 bp, synthetic construct
  misc_feature 1..20: note = chemically synthesized
  source 1..20: mol_type = other DNA
agatggccacaaggcggtca

SEQ ID NO: 30188 - DNA, 20 bp, synthetic construct
  misc_feature 1..20: note = chemically synthesized
  source 1..20: mol_type = other DNA
gatggccacaaggcggtcaa

SEQ ID NO: 30189 - DNA, 20 bp, synthetic construct
  misc_feature 1..20: note = chemically synthesized
  source 1..20: mol_type = other DNA
aggcggtcaaaggacatcat

SEQ ID NO: 30190 - DNA, 20 bp, synthetic construct
  misc_feature 1..20: note = chemically synthesized
  source 1..20: mol_type = other DNA
ggcggtcaaaggacatcatg

SEQ ID NO: 30191 - DNA, 20 bp, synthetic construct
  misc_feature 1..20: note = chemically synthesized
  source 1..20: mol_type = other DNA
cggtcaaaggacatcatgag

SEQ ID NO: 30192 - DNA, 20 bp, synthetic construct
  misc_feature 1..20: note = chemically synthesized
  source 1..20: mol_type = other DNA
aggacatcatgaggagcact

SEQ ID NO: 30193 - DNA, 20 bp, synthetic construct
  misc_feature 1..20: note = chemically synthesized
  source 1..20: mol_type = other DNA
ggacatcatgaggagcactg

SEQ ID NO: 30194 - DNA, 20 bp, synthetic construct
  misc_feature 1..20: note = chemically synthesized
  source 1..20: mol_type = other DNA
ggagcactgaggactccatg

SEQ ID NO: 30195 - DNA, 20 bp, synthetic construct
  misc_feature 1..20: note = chemically synthesized
  source 1..20: mol_type = other DNA
gagcactgaggactccatga

SEQ ID NO: 30196 - DNA, 20 bp, synthetic construct
  misc_feature 1..20: note = chemically synthesized
  source 1..20: mol_type = other DNA
tgaggactccatgaaggaaa

SEQ ID NO: 30197 - DNA, 20 bp, synthetic construct
  misc_feature 1..20: note = chemically synthesized
  source 1..20: mol_type = other DNA
aggactccatgaaggaaaaa

SEQ ID NO: 30198 - DNA, 20 bp, synthetic construct
  misc_feature 1..20: note = chemically synthesized
  source 1..20: mol_type = other DNA
actccatgaaggaaaaagag

SEQ ID NO: 30199 - DNA, 20 bp, synthetic construct
  misc_feature 1..20: note = chemically synthesized
  source 1..20: mol_type = other DNA
tgaaggaaaaagagtggatg

SEQ ID NO: 30200 - DNA, 20 bp, synthetic construct
  misc_feature 1..20: note = chemically synthesized
  source 1..20: mol_type = other DNA
aagagtggatgcagaacatc

SEQ ID NO: 30201 - DNA, 20 bp, synthetic construct
  misc_feature 1..20: note = chemically synthesized
  source 1..20: mol_type = other DNA
tctggatttgacacgctcca

SEQ ID NO: 30202 - DNA, 20 bp, synthetic construct
  misc_feature 1..20: note = chemically synthesized
  source 1..20: mol_type = other DNA
ggatttgacacgctccaaag

SEQ ID NO: 30203 - DNA, 20 bp, synthetic construct
  misc_feature 1..20: note = chemically synthesized
  source 1..20: mol_type = other DNA
acgctccaaagtagatacta

SEQ ID NO: 30204 - DNA, 20 bp, synthetic construct
  misc_feature 1..20: note = chemically synthesized
  source 1..20: mol_type = other DNA
cgctccaaagtagatactat

SEQ ID NO: 30205 - DNA, 20 bp, synthetic construct
  misc_feature 1..20: note = chemically synthesized
  source 1..20: mol_type = other DNA
ctccaaagtagatactatgg

SEQ ID NO: 30206 - DNA, 20 bp, synthetic construct
  misc_feature 1..20: note = chemically synthesized
  source 1..20: mol_type = other DNA
agatactatgggagttaaac

SEQ ID NO: 30207 - DNA, 20 bp, synthetic construct
  misc_feature 1..20: note = chemically synthesized
  source 1..20: mol_type = other DNA
tactatgggagttaaaccag

SEQ ID NO: 30208 - DNA, 20 bp, synthetic construct
  misc_feature 1..20: note = chemically synthesized
  source 1..20: mol_type = other DNA
gttaaaccagaagatcccca

SEQ ID NO: 30209 - DNA, 20 bp, synthetic construct
  misc_feature 1..20: note = chemically synthesized
  source 1..20: mol_type = other DNA
aaaccagaagatccccatag

SEQ ID NO: 30210 - DNA, 20 bp, synthetic construct
  misc_feature 1..20: note = chemically synthesized
  source 1..20: mol_type = other DNA
ccagaagatccccatagtgg

SEQ ID NO: 30211 - DNA, 20 bp, synthetic construct
  misc_feature 1..20: note = chemically synthesized
  source 1..20: mol_type = other DNA
cagaagatccccatagtggt

SEQ ID NO: 30212 - DNA, 20 bp, synthetic construct
  misc_feature 1..20: note = chemically synthesized
  source 1..20: mol_type = other DNA
ccccatagtggtgggcaacg

SEQ ID NO: 30213 - DNA, 20 bp, synthetic construct
  misc_feature 1..20: note = chemically synthesized
  source 1..20: mol_type = other DNA
gtgggcaacgtggacacaca

SEQ ID NO: 30214 - DNA, 20 bp, synthetic construct
  misc_feature 1..20: note = chemically synthesized
  source 1..20: mol_type = other DNA
aacgtggacacacacagccc

SEQ ID NO: 30215 - DNA, 20 bp, synthetic construct
  misc_feature 1..20: note = chemically synthesized
  source 1..20: mol_type = other DNA
acgtggacacacacagcccc

SEQ ID NO: 30216 - DNA, 20 bp, synthetic construct
  misc_feature 1..20: note = chemically synthesized
  source 1..20: mol_type = other DNA
ggacacacacagccccaggt

SEQ ID NO: 30217 - DNA, 20 bp, synthetic construct
  misc_feature 1..20: note = chemically synthesized
  source 1..20: mol_type = other DNA
acacacagccccaggtcagt

SEQ ID NO: 30218 - DNA, 20 bp, synthetic construct
  misc_feature 1..20: note = chemically synthesized
  source 1..20: mol_type = other DNA
cacacagccccaggtcagtg

SEQ ID NO: 30219 - DNA, 20 bp, synthetic construct
  misc_feature 1..20: note = chemically synthesized
  source 1..20: mol_type = other DNA
acacagccccaggtcagtga

SEQ ID NO: 30220 - DNA, 20 bp, synthetic construct
  misc_feature 1..20: note = chemically synthesized
  source 1..20: mol_type = other DNA
agccccaggtcagtgagggc

SEQ ID NO: 30221 - DNA, 20 bp, synthetic construct
  misc_feature 1..20: note = chemically synthesized
  source 1..20: mol_type = other DNA
ccaggtcagtgagggccagc

SEQ ID NO: 30222 - DNA, 20 bp, synthetic construct
  misc_feature 1..20: note = chemically synthesized
  source 1..20: mol_type = other DNA
caggtcagtgagggccagca

SEQ ID NO: 30223 - DNA, 20 bp, synthetic construct
  misc_feature 1..20: note = chemically synthesized
  source 1..20: mol_type = other DNA
tcagtgagggccagcaagga

SEQ ID NO: 30224 - DNA, 20 bp, synthetic construct
  misc_feature 1..20: note = chemically synthesized
  source 1..20: mol_type = other DNA
gtgagggccagcaaggatag

SEQ ID NO: 30225 - DNA, 20 bp, synthetic construct
  misc_feature 1..20: note = chemically synthesized
  source 1..20: mol_type = other DNA
gggccagcaaggatagtaga

SEQ ID NO: 30226 - DNA, 20 bp, synthetic construct
  misc_feature 1..20: note = chemically synthesized
  source 1..20: mol_type = other DNA
caaggatagtagatagtaca

SEQ ID NO: 30227 - DNA, 20 bp, synthetic construct
  misc_feature 1..20: note = chemically synthesized
  source 1..20: mol_type = other DNA
aaggatagtagatagtacat

SEQ ID NO: 30228 - DNA, 20 bp, synthetic construct
  misc_feature 1..20: note = chemically synthesized
  source 1..20: mol_type = other DNA
agatagtacatgggtgtgtg

SEQ ID NO: 30229 - DNA, 20 bp, synthetic construct
  misc_feature 1..20: note = chemically synthesized
  source 1..20: mol_type = other DNA
gtacatgggtgtgtgcagac

SEQ ID NO: 30230 - DNA, 20 bp, synthetic construct
  misc_feature 1..20: note = chemically synthesized
  source 1..20: mol_type = other DNA
tacatgggtgtgtgcagacg

SEQ ID NO: 30231 - DNA, 20 bp, synthetic construct
  misc_feature 1..20: note = chemically synthesized
  source 1..20: mol_type = other DNA
acatgggtgtgtgcagacga

SEQ ID NO: 30232 - DNA, 20 bp, synthetic construct
  misc_feature 1..20: note = chemically synthesized
  source 1..20: mol_type = other DNA
gggtgtgtgcagacgagggt

SEQ ID NO: 30233 - DNA, 20 bp, synthetic construct
  misc_feature 1..20: note = chemically synthesized
  source 1..20: mol_type = other DNA
gggttggtcttaataatgat

SEQ ID NO: 30234 - DNA, 20 bp, synthetic construct
  misc_feature 1..20: note = chemically synthesized
  source 1..20: mol_type = other DNA
tcagaatgaaacaattgcct

SEQ ID NO: 30235 - DNA, 20 bp, synthetic construct
  misc_feature 1..20: note = chemically synthesized
  source 1..20: mol_type = other DNA
aatgaaacaattgcctgaga

SEQ ID NO: 30236 - DNA, 20 bp, synthetic construct
  misc_feature 1..20: note = chemically synthesized
  source 1..20: mol_type = other DNA
agatggcaaccatgtacata

SEQ ID NO: 30237 - DNA, 20 bp, synthetic construct
  misc_feature 1..20: note = chemically synthesized
  source 1..20: mol_type = other DNA
caaccatgtacataaagaaa

SEQ ID NO: 30238 - DNA, 20 bp, synthetic construct
  misc_feature 1..20: note = chemically synthesized
  source 1..20: mol_type = other DNA
aaccatgtacataaagaaaa

SEQ ID NO: 30239 - DNA, 20 bp, synthetic construct
  misc_feature 1..20: note = chemically synthesized
  source 1..20: mol_type = other DNA
accatgtacataaagaaaaa

SEQ ID NO: 30240 - DNA, 20 bp, synthetic construct
  misc_feature 1..20: note = chemically synthesized
  source 1..20: mol_type = other DNA
ccatgtacataaagaaaaag

SEQ ID NO: 30241 - DNA, 20 bp, synthetic construct
  misc_feature 1..20: note = chemically synthesized
  source 1..20: mol_type = other DNA
agaaaaaggggatgaaaatc

SEQ ID NO: 30242 - DNA, 20 bp, synthetic construct
  misc_feature 1..20: note = chemically synthesized
  source 1..20: mol_type = other DNA
gtgtttgatgccttccaatc

SEQ ID NO: 30243 - DNA, 20 bp, synthetic construct
  misc_feature 1..20: note = chemically synthesized
  source 1..20: mol_type = other DNA
tgtttgatgccttccaatcc

SEQ ID NO: 30244 - DNA, 20 bp, synthetic construct
  misc_feature 1..20: note = chemically synthesized
  source 1..20: mol_type = other DNA
tgatgccttccaatccagga

SEQ ID NO: 30245 - DNA, 20 bp, synthetic construct
  misc_feature 1..20: note = chemically synthesized
  source 1..20: mol_type = other DNA
gccttccaatccaggaaagc

SEQ ID NO: 30246 - DNA, 20 bp, synthetic construct
  misc_feature 1..20: note = chemically synthesized
  source 1..20: mol_type = other DNA
tccaatccaggaaagctggt

SEQ ID NO: 30247 - DNA, 20 bp, synthetic construct
  misc_feature 1..20: note = chemically synthesized
  source 1..20: mol_type = other DNA
atccaggaaagctggtgaga

SEQ ID NO: 30248 - DNA, 20 bp, synthetic construct
  misc_feature 1..20: note = chemically synthesized
  source 1..20: mol_type = other DNA
aaagctggtgagatagaata

SEQ ID NO: 30249 - DNA, 20 bp, synthetic construct
  misc_feature 1..20: note = chemically synthesized
  source 1..20: mol_type = other DNA
aagctggtgagatagaatat

SEQ ID NO: 30250 - DNA, 20 bp, synthetic construct
  misc_feature 1..20: note = chemically synthesized
  source 1..20: mol_type = other DNA
agctggtgagatagaatatg

SEQ ID NO: 30251 - DNA, 20 bp, synthetic construct
  misc_feature 1..20: note = chemically synthesized
  source 1..20: mol_type = other DNA
atagaatatggggctaaact

SEQ ID NO: 30252 - DNA, 20 bp, synthetic construct
  misc_feature 1..20: note = chemically synthesized
  source 1..20: mol_type = other DNA
ggggctaaactgagtaatgt

SEQ ID NO: 30253 - DNA, 20 bp, synthetic construct
  misc_feature 1..20: note = chemically synthesized
  source 1..20: mol_type = other DNA
ctaaactgagtaatgttgga

SEQ ID NO: 30254 - DNA, 20 bp, synthetic construct
  misc_feature 1..20: note = chemically synthesized
  source 1..20: mol_type = other DNA
aactgagtaatgttggatag

SEQ ID NO: 30255 - DNA, 20 bp, synthetic construct
  misc_feature 1..20: note = chemically synthesized
  source 1..20: mol_type = other DNA
gttggatagcagcatgaatt

SEQ ID NO: 30256 - DNA, 20 bp, synthetic construct
  misc_feature 1..20: note = chemically synthesized
  source 1..20: mol_type = other DNA
ttggatagcagcatgaattg

SEQ ID NO: 30257 - DNA, 20 bp, synthetic construct
  misc_feature 1..20: note = chemically synthesized
  source 1..20: mol_type = other DNA
agcagcatgaattgaggact

SEQ ID NO: 30258 - DNA, 20 bp, synthetic construct
  misc_feature 1..20: note = chemically synthesized
  source 1..20: mol_type = other DNA
attgaggactgagcgaatat

SEQ ID NO: 30259 - DNA, 20 bp, synthetic construct
  misc_feature 1..20: note = chemically synthesized
  source 1..20: mol_type = other DNA
aatattggactgacattcct

SEQ ID NO: 30260 - DNA, 20 bp, synthetic construct
  misc_feature 1..20: note = chemically synthesized
  source 1..20: mol_type = other DNA
atattggactgacattcctc

SEQ ID NO: 30261 - DNA, 20 bp, synthetic construct
  misc_feature 1..20: note = chemically synthesized
  source 1..20: mol_type = other DNA
tattggactgacattcctcg

SEQ ID NO: 30262 - DNA, 20 bp, synthetic construct
  misc_feature 1..20: note = chemically synthesized
  source 1..20: mol_type = other DNA
actgacattcctcggggatt

SEQ ID NO: 30263 - DNA, 20 bp, synthetic construct
  misc_feature 1..20: note = chemically synthesized
  source 1..20: mol_type = other DNA
gggattgagctgaaaataaa

SEQ ID NO: 30264 - DNA, 20 bp, synthetic construct
  misc_feature 1..20: note = chemically synthesized
  source 1..20: mol_type = other DNA
tgaaaataaatggatatttc

SEQ ID NO: 30265 - DNA, 20 bp, synthetic construct
  misc_feature 1..20: note = chemically synthesized
  source 1..20: mol_type = other DNA
atttctggttattaattctt

SEQ ID NO: 30266 - DNA, 20 bp, synthetic construct
  misc_feature 1..20: note = chemically synthesized
  source 1..20: mol_type = other DNA
actaacattcacaacatcac

SEQ ID NO: 30267 - DNA, 20 bp, synthetic construct
  misc_feature 1..20: note = chemically synthesized
  source 1..20: mol_type = other DNA
aacattcacaacatcacaag

SEQ ID NO: 30268 - DNA, 20 bp, synthetic construct
  misc_feature 1..20: note = chemically synthesized
  source 1..20: mol_type = other DNA
caacatcacaagcagtacca

SEQ ID NO: 30269 - DNA, 20 bp, synthetic construct
  misc_feature 1..20: note = chemically synthesized
  source 1..20: mol_type = other DNA
accatggtcatcatcacctt

SEQ ID NO: 30270 - DNA, 20 bp, synthetic construct
  misc_feature 1..20: note = chemically synthesized
  source 1..20: mol_type = other DNA
tttgataacctcgccctcac

SEQ ID NO: 30271 - DNA, 20 bp, synthetic construct
  misc_feature 1..20: note = chemically synthesized
  source 1..20: mol_type = other DNA
cctctgtatttcaattattt

SEQ ID NO: 30272 - DNA, 20 bp, synthetic construct
  misc_feature 1..20: note = chemically synthesized
  source 1..20: mol_type = other DNA
gttcctctctgcctctttgc

SEQ ID NO: 30273 - DNA, 20 bp, synthetic construct
  misc_feature 1..20: note = chemically synthesized
  source 1..20: mol_type = other DNA
gcctttattgctcaaccctt

SEQ ID NO: 30274 - DNA, 20 bp, synthetic construct
  misc_feature 1..20: note = chemically synthesized
  source 1..20: mol_type = other DNA
tattgctcaacccttaagta

SEQ ID NO: 30275 - DNA, 20 bp, synthetic construct
  misc_feature 1..20: note = chemically synthesized
  source 1..20: mol_type = other DNA
agtatagttcttcccatcct

SEQ ID NO: 30276 - DNA, 20 bp, synthetic construct
  misc_feature 1..20: note = chemically synthesized
  source 1..20: mol_type = other DNA
tcccatccttggcaatttcc

SEQ ID NO: 30277 - DNA, 20 bp, synthetic construct
  misc_feature 1..20: note = chemically synthesized
  source 1..20: mol_type = other DNA
aaataacaaatatataattc

SEQ ID NO: 30278 - DNA, 20 bp, synthetic construct
  misc_feature 1..20: note = chemically synthesized
  source 1..20: mol_type = other DNA
tctttctctcttttgatttc

SEQ ID NO: 30279 - DNA, 20 bp, synthetic construct
  misc_feature 1..20: note = chemically synthesized
  source 1..20: mol_type = other DNA
ctcttttgatttccagactc

SEQ ID NO: 30280 - DNA, 20 bp, synthetic construct
  misc_feature 1..20: note = chemically synthesized
  source 1..20: mol_type = other DNA
atctgtacttttcattatct

SEQ ID NO: 30281 - DNA, 20 bp, synthetic construct
  misc_feature 1..20: note = chemically synthesized
  source 1..20: mol_type = other DNA
tgtacttttcattatctcag

SEQ ID NO: 30282 - DNA, 20 bp, synthetic construct
  misc_feature 1..20: note = chemically synthesized
  source 1..20: mol_type = other DNA
tttcattatctcagtggctc

SEQ ID NO: 30283 - DNA, 20 bp, synthetic construct
  misc_feature 1..20: note = chemically synthesized
  source 1..20: mol_type = other DNA
tcaaatgtcatgttttatgt

SEQ ID NO: 30284 - DNA, 20 bp, synthetic construct
  misc_feature 1..20: note = chemically synthesized
  source 1..20: mol_type = other DNA
ctccatatcacatctctcca

SEQ ID NO: 30285 - DNA, 20 bp, synthetic construct
  misc_feature 1..20: note = chemically synthesized
  source 1..20: mol_type = other DNA
tatctaatcaaccaatcacc

SEQ ID NO: 30286 - DNA, 20 bp, synthetic construct
  misc_feature 1..20: note = chemically synthesized
  source 1..20: mol_type = other DNA
atcaaccaatcaccaagtcc

SEQ ID NO: 30287 - DNA, 20 bp, synthetic construct
  misc_feature 1..20: note = chemically synthesized
  source 1..20: mol_type = other DNA
tcaaccaatcaccaagtcct

SEQ ID NO: 30288 - DNA, 20 bp, synthetic construct
  misc_feature 1..20: note = chemically synthesized
  source 1..20: mol_type = other DNA
caaccaatcaccaagtccta

SEQ ID NO: 30289 - DNA, 20 bp, synthetic construct
  misc_feature 1..20: note = chemically synthesized
  source 1..20: mol_type = other DNA
ttctgtttactgaatacctc

SEQ ID NO: 30290 - DNA, 20 bp, synthetic construct
  misc_feature 1..20: note = chemically synthesized
  source 1..20: mol_type = other DNA
tcattgatgctattctaatt

SEQ ID NO: 30291 - DNA, 20 bp, synthetic construct
  misc_feature 1..20: note = chemically synthesized
  source 1..20: mol_type = other DNA
tctaattcagatcactcttt

SEQ ID NO: 30292 - DNA, 20 bp, synthetic construct
  misc_feature 1..20: note = chemically synthesized
  source 1..20: mol_type = other DNA
ctaattcagatcactctttc

SEQ ID NO: 30293 - DNA, 20 bp, synthetic construct
  misc_feature 1..20: note = chemically synthesized
  source 1..20: mol_type = other DNA
tcactctttcaggactattc

SEQ ID NO: 30294 - DNA, 20 bp, synthetic construct
  misc_feature 1..20: note = chemically synthesized
  source 1..20: mol_type = other DNA
atcttttgtactactgtatt

SEQ ID NO: 30295 - DNA, 20 bp, synthetic construct
  misc_feature 1..20: note = chemically synthesized
  source 1..20: mol_type = other DNA
gtattcagttgactactata

SEQ ID NO: 30296 - DNA, 20 bp, synthetic construct
  misc_feature 1..20: note = chemically synthesized
  source 1..20: mol_type = other DNA
tcagttgactactatatagc

SEQ ID NO: 30297 - DNA, 20 bp, synthetic construct
  misc_feature 1..20: note = chemically synthesized
  source 1..20: mol_type = other DNA
agttgactactatatagcaa

SEQ ID NO: 30298 - DNA, 20 bp, synthetic construct
  misc_feature 1..20: note = chemically synthesized
  source 1..20: mol_type = other DNA
ttgactactatatagcaaga

SEQ ID NO: 30299 - DNA, 20 bp, synthetic construct
  misc_feature 1..20: note = chemically synthesized
  source 1..20: mol_type = other DNA
agagagacgtatacataaac

SEQ ID NO: 30300 - DNA, 20 bp, synthetic construct
  misc_feature 1..20: note = chemically synthesized
  source 1..20: mol_type = other DNA
acataaacaagtttttaatg

SEQ ID NO: 30301 - DNA, 20 bp, synthetic construct
  misc_feature 1..20: note = chemically synthesized
  source 1..20: mol_type = other DNA
aagtttttaatgaagtaaaa

SEQ ID NO: 30302 - DNA, 20 bp, synthetic construct
  misc_feature 1..20: note = chemically synthesized
  source 1..20: mol_type = other DNA
agtttttaatgaagtaaaaa

SEQ ID NO: 30303 - DNA, 20 bp, synthetic construct
  misc_feature 1..20: note = chemically synthesized
  source 1..20: mol_type = other DNA
aaaggtttaaaatgacattc

SEQ ID NO: 30304 - DNA, 20 bp, synthetic construct
  misc_feature 1..20: note = chemically synthesized
  source 1..20: mol_type = other DNA
taatttcctctgtatattca

SEQ ID NO: 30305 - DNA, 20 bp, synthetic construct
  misc_feature 1..20: note = chemically synthesized
  source 1..20: mol_type = other DNA
atgacactaaacaattcttc

SEQ ID NO: 30306 - DNA, 20 bp, synthetic construct
  misc_feature 1..20: note = chemically synthesized
  source 1..20: mol_type = other DNA
aacaattcttccagtttatc

SEQ ID NO: 30307 - DNA, 20 bp, synthetic construct
  misc_feature 1..20: note = chemically synthesized
  source 1..20: mol_type = other DNA
ttatctagtatgcttgctca

SEQ ID NO: 30308 - DNA, 20 bp, synthetic construct
  misc_feature 1..20: note = chemically synthesized
  source 1..20: mol_type = other DNA
tatctagtatgcttgctcat

SEQ ID NO: 30309 - DNA, 20 bp, synthetic construct
  misc_feature 1..20: note = chemically synthesized
  source 1..20: mol_type = other DNA
atttgtattttcattcttcc

SEQ ID NO: 30310 - DNA, 20 bp, synthetic construct
  misc_feature 1..20: note = chemically synthesized
  source 1..20: mol_type = other DNA
aaaaacattttttcctgaaa

SEQ ID NO: 30311 - DNA, 20 bp, synthetic construct
  misc_feature 1..20: note = chemically synthesized
  source 1..20: mol_type = other DNA
gctttcccttaatctttgtc

SEQ ID NO: 30312 - DNA, 20 bp, synthetic construct
  misc_feature 1..20: note = chemically synthesized
  source 1..20: mol_type = other DNA
tctactaatataacccacct

SEQ ID NO: 30313 - DNA, 20 bp, synthetic construct
  misc_feature 1..20: note = chemically synthesized
  source 1..20: mol_type = other DNA
taatataacccaccttagct

SEQ ID NO: 30314 - DNA, 20 bp, synthetic construct
  misc_feature 1..20: note = chemically synthesized
  source 1..20: mol_type = other DNA
agcttagatatgatgtcctt

SEQ ID NO: 30315 - DNA, 20 bp, synthetic construct
  misc_feature 1..20: note = chemically synthesized
  source 1..20: mol_type = other DNA
ttagatatgatgtccttcag

SEQ ID NO: 30316 - DNA, 20 bp, synthetic construct
  misc_feature 1..20: note = chemically synthesized
  source 1..20: mol_type = other DNA
tagatatgatgtccttcaga

SEQ ID NO: 30317 - DNA, 20 bp, synthetic construct
  misc_feature 1..20: note = chemically synthesized
  source 1..20: mol_type = other DNA
aaggccttcttaaattcccc

SEQ ID NO: 30318 - DNA, 20 bp, synthetic construct
  misc_feature 1..20: note = chemically synthesized
  source 1..20: mol_type = other DNA
cttcttaaattccccaagtt

SEQ ID NO: 30319 - DNA, 20 bp, synthetic construct
  misc_feature 1..20: note = chemically synthesized
  source 1..20: mol_type = other DNA
ccctctcctatgtgttcctg

SEQ ID NO: 30320 - DNA, 20 bp, synthetic construct
  misc_feature 1..20: note = chemically synthesized
  source 1..20: mol_type = other DNA
ttaccatgatattttccctg

SEQ ID NO: 30321 - DNA, 20 bp, synthetic construct
  misc_feature 1..20: note = chemically synthesized
  source 1..20: mol_type = other DNA
tctataatgtgaattccttg

SEQ ID NO: 30322 - DNA, 20 bp, synthetic construct
  misc_feature 1..20: note = chemically synthesized
  source 1..20: mol_type = other DNA
ctcttttttaattttaatat

SEQ ID NO: 30323 - DNA, 20 bp, synthetic construct
  misc_feature 1..20: note = chemically synthesized
  source 1..20: mol_type = other DNA
tttaattttaatattagctc

SEQ ID NO: 30324 - DNA, 20 bp, synthetic construct
  misc_feature 1..20: note = chemically synthesized
  source 1..20: mol_type = other DNA
ttaattttaatattagctct

SEQ ID NO: 30325 - DNA, 20 bp, synthetic construct
  misc_feature 1..20: note = chemically synthesized
  source 1..20: mol_type = other DNA
taattttaatattagctcta

SEQ ID NO: 30326 - DNA, 20 bp, synthetic construct
  misc_feature 1..20: note = chemically synthesized
  source 1..20: mol_type = other DNA
gctctagggattgacttttt

SEQ ID NO: 30327 - DNA, 20 bp, synthetic construct
  misc_feature 1..20: note = chemically synthesized
  source 1..20: mol_type = other DNA
ttttttagccaccatatcat

SEQ ID NO: 30328 - DNA, 20 bp, synthetic construct
  misc_feature 1..20: note = chemically synthesized
  source 1..20: mol_type = other DNA
catattgaaattgtattaca

SEQ ID NO: 30329 - DNA, 20 bp, synthetic construct
  misc_feature 1..20: note = chemically synthesized
  source 1..20: mol_type = other DNA
attgaaattgtattacatgg

SEQ ID NO: 30330 - DNA, 20 bp, synthetic construct
  misc_feature 1..20: note = chemically synthesized
  source 1..20: mol_type = other DNA
catggcagacataattctat

SEQ ID NO: 30331 - DNA, 20 bp, synthetic construct
  misc_feature 1..20: note = chemically synthesized
  source 1..20: mol_type = other DNA
atggcagacataattctatt

SEQ ID NO: 30332 - DNA, 20 bp, synthetic construct
  misc_feature 1..20: note = chemically synthesized
  source 1..20: mol_type = other DNA
cagacataattctattaggt

SEQ ID NO: 30333 - DNA, 20 bp, synthetic construct
  misc_feature 1..20: note = chemically synthesized
  source 1..20: mol_type = other DNA
attctattaggttggtgcaa

SEQ ID NO: 30334 - DNA, 20 bp, synthetic construct
  misc_feature 1..20: note = chemically synthesized
  source 1..20: mol_type = other DNA
ggttggtgcaaaagtaattg

SEQ ID NO: 30335 - DNA, 20 bp, synthetic construct
  misc_feature 1..20: note = chemically synthesized
  source 1..20: mol_type = other DNA
gtttttaccattactttcaa

SEQ ID NO: 30336 - DNA, 20 bp, synthetic construct
  misc_feature 1..20: note = chemically synthesized
  source 1..20: mol_type = other DNA
ttaccattactttcaatggc

SEQ ID NO: 30337 - DNA, 20 bp, synthetic construct
  misc_feature 1..20: note = chemically synthesized
  source 1..20: mol_type = other DNA
actgcaattacttttacacc

SEQ ID NO: 30338 - DNA, 20 bp, synthetic construct
  misc_feature 1..20: note = chemically synthesized
  source 1..20: mol_type = other DNA
ctgcaattacttttacacct

SEQ ID NO: 30339 - DNA, 20 bp, synthetic construct
  misc_feature 1..20: note = chemically synthesized
  source 1..20: mol_type = other DNA
ggtactgaaaatacaatgaa

SEQ ID NO: 30340 - DNA, 20 bp, synthetic construct
  misc_feature 1..20: note = chemically synthesized
  source 1..20: mol_type = other DNA
gaaaatacaatgaacagaaa

SEQ ID NO: 30341 - DNA, 20 bp, synthetic construct
  misc_feature 1..20: note = chemically synthesized
  source 1..20: mol_type = other DNA
tacaatgaacagaaacagaa

SEQ ID NO: 30342 - DNA, 20 bp, synthetic construct
  misc_feature 1..20: note = chemically synthesized
  source 1..20: mol_type = other DNA
caatgaacagaaacagaaca

SEQ ID NO: 30343 - DNA, 20 bp, synthetic construct
  misc_feature 1..20: note = chemically synthesized
  source 1..20: mol_type = other DNA
atacatacatactgcaatgc

SEQ ID NO: 30344 - DNA, 20 bp, synthetic construct
  misc_feature 1..20: note = chemically synthesized
  source 1..20: mol_type = other DNA
tacatacatactgcaatgca

SEQ ID NO: 30345 - DNA, 20 bp, synthetic construct
  misc_feature 1..20: note = chemically synthesized
  source 1..20: mol_type = other DNA
caaggtaatgtaatgcaata

SEQ ID NO: 30346 - DNA, 20 bp, synthetic construct
  misc_feature 1..20: note = chemically synthesized
  source 1..20: mol_type = other DNA
ggtaatgtaatgcaataaag

SEQ ID NO: 30347 - DNA, 20 bp, synthetic construct
  misc_feature 1..20: note = chemically synthesized
  source 1..20: mol_type = other DNA
aatgtaatgcaataaagaag

SEQ ID NO: 30348 - DNA, 20 bp, synthetic construct
  misc_feature 1..20: note = chemically synthesized
  source 1..20: mol_type = other DNA
atgtaatgcaataaagaagt

SEQ ID NO: 30349 - DNA, 20 bp, synthetic construct
  misc_feature 1..20: note = chemically synthesized
  source 1..20: mol_type = other DNA
tgtaatgcaataaagaagta

SEQ ID NO: 30350 - DNA, 20 bp, synthetic construct
  misc_feature 1..20: note = chemically synthesized
  source 1..20: mol_type = other DNA
taatgcaataaagaagtagg

SEQ ID NO: 30351 - DNA, 20 bp, synthetic construct
  misc_feature 1..20: note = chemically synthesized
  source 1..20: mol_type = other DNA
caataaagaagtagggagca

SEQ ID NO: 30352 - DNA, 20 bp, synthetic construct
  misc_feature 1..20: note = chemically synthesized
  source 1..20: mol_type = other DNA
aataaagaagtagggagcaa

SEQ ID NO: 30353 - DNA, 20 bp, synthetic construct
  misc_feature 1..20: note = chemically synthesized
  source 1..20: mol_type = other DNA
taaagaagtagggagcaaag

SEQ ID NO: 30354 - DNA, 20 bp, synthetic construct
  misc_feature 1..20: note = chemically synthesized
  source 1..20: mol_type = other DNA
aaagaagtagggagcaaagg

SEQ ID NO: 30355 - DNA, 20 bp, synthetic construct
  misc_feature 1..20: note = chemically synthesized
  source 1..20: mol_type = other DNA
gaagtagggagcaaaggagg

SEQ ID NO: 30356 - DNA, 20 bp, synthetic construct
  misc_feature 1..20: note = chemically synthesized
  source 1..20: mol_type = other DNA
aagtagggagcaaaggagga

SEQ ID NO: 30357 - DNA, 20 bp, synthetic construct
  misc_feature 1..20: note = chemically synthesized
  source 1..20: mol_type = other DNA
agggagcaaaggaggaaggt

SEQ ID NO: 30358 - DNA, 20 bp, synthetic construct
  misc_feature 1..20: note = chemically synthesized
  source 1..20: mol_type = other DNA
ggagcaaaggaggaaggtaa

SEQ ID NO: 30359 - DNA, 20 bp, synthetic construct
  misc_feature 1..20: note = chemically synthesized
  source 1..20: mol_type = other DNA
taagagtgatgcattttata

SEQ ID NO: 30360 - DNA, 20 bp, synthetic construct
  misc_feature 1..20: note = chemically synthesized
  source 1..20: mol_type = other DNA
aagagtgatgcattttatat

SEQ ID NO: 30361 - DNA, 20 bp, synthetic construct
  misc_feature 1..20: note = chemically synthesized
  source 1..20: mol_type = other DNA
agagtgatgcattttatata

SEQ ID NO: 30362 - DNA, 20 bp, synthetic construct
  misc_feature 1..20: note = chemically synthesized
  source 1..20: mol_type = other DNA
gtgatgcattttatataggg

SEQ ID NO: 30363 - DNA, 20 bp, synthetic construct
  misc_feature 1..20: note = chemically synthesized
  source 1..20: mol_type = other DNA
tgcattttatatagggtagt

SEQ ID NO: 30364 - DNA, 20 bp, synthetic construct
  misc_feature 1..20: note = chemically synthesized
  source 1..20: mol_type = other DNA
cattttatatagggtagtca

SEQ ID NO: 30365 - DNA, 20 bp, synthetic construct
  misc_feature 1..20: note = chemically synthesized
  source 1..20: mol_type = other DNA
tttatatagggtagtcagag

SEQ ID NO: 30366 - DNA, 20 bp, synthetic construct
  misc_feature 1..20: note = chemically synthesized
  source 1..20: mol_type = other DNA
tagtcagagaagacctctct

SEQ ID NO: 30367 - DNA, 20 bp, synthetic construct
  misc_feature 1..20: note = chemically synthesized
  source 1..20: mol_type = other DNA
tcagagaagacctctctgag

SEQ ID NO: 30368 - DNA, 20 bp, synthetic construct
  misc_feature 1..20: note = chemically synthesized
  source 1..20: mol_type = other DNA
cagagaagacctctctgagt

SEQ ID NO: 30369 - DNA, 20 bp, synthetic construct
  misc_feature 1..20: note = chemically synthesized
  source 1..20: mol_type = other DNA
cctctctgagtaggtaattt

SEQ ID NO: 30370 - DNA, 20 bp, synthetic construct
  misc_feature 1..20: note = chemically synthesized
  source 1..20: mol_type = other DNA
tctctgagtaggtaatttta

SEQ ID NO: 30371 - DNA, 20 bp, synthetic construct
  misc_feature 1..20: note = chemically synthesized
  source 1..20: mol_type = other DNA
ctgagtaggtaattttagag

SEQ ID NO: 30372 - DNA, 20 bp, synthetic construct
  misc_feature 1..20: note = chemically synthesized
  source 1..20: mol_type = other DNA
tttagagaagaaatcaaaat

SEQ ID NO: 30373 - DNA, 20 bp, synthetic construct
  misc_feature 1..20: note = chemically synthesized
  source 1..20: mol_type = other DNA
tagagaagaaatcaaaatca

SEQ ID NO: 30374 - DNA, 20 bp, synthetic construct
  misc_feature 1..20: note = chemically synthesized
  source 1..20: mol_type = other DNA
agagaagaaatcaaaatcag

SEQ ID NO: 30375 - DNA, 20 bp, synthetic construct
  misc_feature 1..20: note = chemically synthesized
  source 1..20: mol_type = other DNA
gagaagaaatcaaaatcaga

SEQ ID NO: 30376 - DNA, 20 bp, synthetic construct
  misc_feature 1..20: note = chemically synthesized
  source 1..20: mol_type = other DNA
agaaatcaaaatcagagggc

SEQ ID NO: 30377 - DNA, 20 bp, synthetic construct
  misc_feature 1..20: note = chemically synthesized
  source 1..20: mol_type = other DNA
aaaatcagagggcaagtgtg

SEQ ID NO: 30378 - DNA, 20 bp, synthetic construct
  misc_feature 1..20: note = chemically synthesized
  source 1..20: mol_type = other DNA
gggcaagtgtgtggctatct

SEQ ID NO: 30379 - DNA, 20 bp, synthetic construct
  misc_feature 1..20: note = chemically synthesized
  source 1..20: mol_type = other DNA
ggcaagtgtgtggctatctt

SEQ ID NO: 30380 - DNA, 20 bp, synthetic construct
  misc_feature 1..20: note = chemically synthesized
  source 1..20: mol_type = other DNA
gcaagtgtgtggctatctta

SEQ ID NO: 30381 - DNA, 20 bp, synthetic construct
  misc_feature 1..20: note = chemically synthesized
  source 1..20: mol_type = other DNA
tatcttagggaaaaacattc

SEQ ID NO: 30382 - DNA, 20 bp, synthetic construct
  misc_feature 1..20: note = chemically synthesized
  source 1..20: mol_type = other DNA
atcttagggaaaaacattca

SEQ ID NO: 30383 - DNA, 20 bp, synthetic construct
  misc_feature 1..20: note = chemically synthesized
  source 1..20: mol_type = other DNA
ttagggaaaaacattcaagg

SEQ ID NO: 30384 - DNA, 20 bp, synthetic construct
  misc_feature 1..20: note = chemically synthesized
  source 1..20: mol_type = other DNA
tagggaaaaacattcaagga

SEQ ID NO: 30385 - DNA, 20 bp, synthetic construct
  misc_feature 1..20: note = chemically synthesized
  source 1..20: mol_type = other DNA
gggaaaaacattcaaggaag

SEQ ID NO: 30386 - DNA, 20 bp, synthetic construct
  misc_feature 1..20: note = chemically synthesized
  source 1..20: mol_type = other DNA
ggaaaaacattcaaggaagg

SEQ ID NO: 30387 - DNA, 20 bp, synthetic construct
  misc_feature 1..20: note = chemically synthesized
  source 1..20: mol_type = other DNA
aaaacattcaaggaaggagg

SEQ ID NO: 30388 - DNA, 20 bp, synthetic construct
  misc_feature 1..20: note = chemically synthesized
  source 1..20: mol_type = other DNA
ttcaaggaaggaggaagaac

SEQ ID NO: 30389 - DNA, 20 bp, synthetic construct
  misc_feature 1..20: note = chemically synthesized
  source 1..20: mol_type = other DNA
gaaggaggaagaacaagtga

SEQ ID NO: 30390 - DNA, 20 bp, synthetic construct
  misc_feature 1..20: note = chemically synthesized
  source 1..20: mol_type = other DNA
agaacaagtgaaagttcctg

SEQ ID NO: 30391 - DNA, 20 bp, synthetic construct
  misc_feature 1..20: note = chemically synthesized
  source 1..20: mol_type = other DNA
acaagtgaaagttcctgaag

SEQ ID NO: 30392 - DNA, 20 bp, synthetic construct
  misc_feature 1..20: note = chemically synthesized
  source 1..20: mol_type = other DNA
aagtgaaagttcctgaagca

SEQ ID NO: 30393 - DNA, 20 bp, synthetic construct
  misc_feature 1..20: note = chemically synthesized
  source 1..20: mol_type = other DNA
gtgaaagttcctgaagcaga

SEQ ID NO: 30394 - DNA, 20 bp, synthetic construct
  misc_feature 1..20: note = chemically synthesized
  source 1..20: mol_type = other DNA
aaagttcctgaagcagagag

SEQ ID NO: 30395 - DNA, 20 bp, synthetic construct
  misc_feature 1..20: note = chemically synthesized
  source 1..20: mol_type = other DNA
gaagcagagagcagcttgac

SEQ ID NO: 30396 - DNA, 20 bp, synthetic construct
  misc_feature 1..20: note = chemically synthesized
  source 1..20: mol_type = other DNA
gagcagcttgacaagtttaa

SEQ ID NO: 30397 - DNA, 20 bp, synthetic construct
  misc_feature 1..20: note = chemically synthesized
  source 1..20: mol_type = other DNA
ttgacaagtttaaaagacaa

SEQ ID NO: 30398 - DNA, 20 bp, synthetic construct
  misc_feature 1..20: note = chemically synthesized
  source 1..20: mol_type = other DNA
acaagtttaaaagacaaaag

SEQ ID NO: 30399 - DNA, 20 bp, synthetic construct
  misc_feature 1..20: note = chemically synthesized
  source 1..20: mol_type = other DNA
caagtttaaaagacaaaaga

SEQ ID NO: 30400 - DNA, 20 bp, synthetic construct
  misc_feature 1..20: note = chemically synthesized
  source 1..20: mol_type = other DNA
gaaggccaatgtatattcaa

SEQ ID NO: 30401 - DNA, 20 bp, synthetic construct
  misc_feature 1..20: note = chemically synthesized
  source 1..20: mol_type = other DNA
aggccaatgtatattcaatg

SEQ ID NO: 30402 - DNA, 20 bp, synthetic construct
  misc_feature 1..20: note = chemically synthesized
  source 1..20: mol_type = other DNA
ggccaatgtatattcaatgg

SEQ ID NO: 30403 - DNA, 20 bp, synthetic construct
  misc_feature 1..20: note = chemically synthesized
  source 1..20: mol_type = other DNA
caatgtatattcaatggagg

SEQ ID NO: 30404 - DNA, 20 bp, synthetic construct
  misc_feature 1..20: note = chemically synthesized
  source 1..20: mol_type = other DNA
gtatattcaatggaggaagc

SEQ ID NO: 30405 - DNA, 20 bp, synthetic construct
  misc_feature 1..20: note = chemically synthesized
  source 1..20: mol_type = other DNA
tatattcaatggaggaagca

SEQ ID NO: 30406 - DNA, 20 bp, synthetic construct
  misc_feature 1..20: note = chemically synthesized
  source 1..20: mol_type = other DNA
attcaatggaggaagcaagg

SEQ ID NO: 30407 - DNA, 20 bp, synthetic construct
  misc_feature 1..20: note = chemically synthesized
  source 1..20: mol_type = other DNA
ttcaatggaggaagcaaggt

SEQ ID NO: 30408 - DNA, 20 bp, synthetic construct
  misc_feature 1..20: note = chemically synthesized
  source 1..20: mol_type = other DNA
tcaatggaggaagcaaggtg

SEQ ID NO: 30409 - DNA, 20 bp, synthetic construct
  misc_feature 1..20: note = chemically synthesized
  source 1..20: mol_type = other DNA
ggaggaagcaaggtggggaa

SEQ ID NO: 30410 - DNA, 20 bp, synthetic construct
  misc_feature 1..20: note = chemically synthesized
  source 1..20: mol_type = other DNA
ggaagcaaggtggggaatgg

SEQ ID NO: 30411 - DNA, 20 bp, synthetic construct
  misc_feature 1..20: note = chemically synthesized
  source 1..20: mol_type = other DNA
aatggtggcaaatccacttg

SEQ ID NO: 30412 - DNA, 20 bp, synthetic construct
  misc_feature 1..20: note = chemically synthesized
  source 1..20: mol_type = other DNA
ggtggcaaatccacttgaag

SEQ ID NO: 30413 - DNA, 20 bp, synthetic construct
  misc_feature 1..20: note = chemically synthesized
  source 1..20: mol_type = other DNA
ggcaaatccacttgaagtag

SEQ ID NO: 30414 - DNA, 20 bp, synthetic construct
  misc_feature 1..20: note = chemically synthesized
  source 1..20: mol_type = other DNA
ctacgtcatgtatgatcttg

SEQ ID NO: 30415 - DNA, 20 bp, synthetic construct
  misc_feature 1..20: note = chemically synthesized
  source 1..20: mol_type = other DNA
tacgtcatgtatgatcttgc

SEQ ID NO: 30416 - DNA, 20 bp, synthetic construct
  misc_feature 1..20: note = chemically synthesized
  source 1..20: mol_type = other DNA
tatgatcttgcaggtcacgc

SEQ ID NO: 30417 - DNA, 20 bp, synthetic construct
  misc_feature 1..20: note = chemically synthesized
  source 1..20: mol_type = other DNA
ttgaattttattatacttgt

SEQ ID NO: 30418 - DNA, 20 bp, synthetic construct
  misc_feature 1..20: note = chemically synthesized
  source 1..20: mol_type = other DNA
ttattatacttgtgagcttc

SEQ ID NO: 30419 - DNA, 20 bp, synthetic construct
  misc_feature 1..20: note = chemically synthesized
  source 1..20: mol_type = other DNA
atacttgtgagcttcgagtt

SEQ ID NO: 30420 - DNA, 20 bp, synthetic construct
  misc_feature 1..20: note = chemically synthesized
  source 1..20: mol_type = other DNA
acttgtgagcttcgagttga

SEQ ID NO: 30421 - DNA, 20 bp, synthetic construct
  misc_feature 1..20: note = chemically synthesized
  source 1..20: mol_type = other DNA
tgtgagcttcgagttgagag

SEQ ID NO: 30422 - DNA, 20 bp, synthetic construct
  misc_feature 1..20: note = chemically synthesized
  source 1..20: mol_type = other DNA
tgagcttcgagttgagagca

SEQ ID NO: 30423 - DNA, 20 bp, synthetic construct
  misc_feature 1..20: note = chemically synthesized
  source 1..20: mol_type = other DNA
gagcttcgagttgagagcag

SEQ ID NO: 30424 - DNA, 20 bp, synthetic construct
  misc_feature 1..20: note = chemically synthesized
  source 1..20: mol_type = other DNA
ttgagagcagaggtgctgca

SEQ ID NO: 30425 - DNA, 20 bp, synthetic construct
  misc_feature 1..20: note = chemically synthesized
  source 1..20: mol_type = other DNA
cagaggtgctgcatggatat

SEQ ID NO: 30426 - DNA, 20 bp, synthetic construct
  misc_feature 1..20: note = chemically synthesized
  source 1..20: mol_type = other DNA
agaggtgctgcatggatata

SEQ ID NO: 30427 - DNA, 20 bp, synthetic construct
  misc_feature 1..20: note = chemically synthesized
  source 1..20: mol_type = other DNA
atataaggcttacatcactt

SEQ ID NO: 30428 - DNA, 20 bp, synthetic construct
  misc_feature 1..20: note = chemically synthesized
  source 1..20: mol_type = other DNA
aaggcttacatcactttggc

SEQ ID NO: 30429 - DNA, 20 bp, synthetic construct
  misc_feature 1..20: note = chemically synthesized
  source 1..20: mol_type = other DNA
aggcttacatcactttggca

SEQ ID NO: 30430 - DNA, 20 bp, synthetic construct
  misc_feature 1..20: note = chemically synthesized
  source 1..20: mol_type = other DNA
ggcttacatcactttggcaa

SEQ ID NO: 30431 - DNA, 20 bp, synthetic construct
  misc_feature 1..20: note = chemically synthesized
  source 1..20: mol_type = other DNA
gcttacatcactttggcaag

SEQ ID NO: 30432 - DNA, 20 bp, synthetic construct
  misc_feature 1..20: note = chemically synthesized
  source 1..20: mol_type = other DNA
ctttggcaaggggtaaaaaa

SEQ ID NO: 30433 - DNA, 20 bp, synthetic construct
  misc_feature 1..20: note = chemically synthesized
  source 1..20: mol_type = other DNA
ttttccatttctttacttct

SEQ ID NO: 30434 - DNA, 20 bp, synthetic construct
  misc_feature 1..20: note = chemically synthesized
  source 1..20: mol_type = other DNA
tgttttttttaaaacccact

SEQ ID NO: 30435 - DNA, 20 bp, synthetic construct
  misc_feature 1..20: note = chemically synthesized
  source 1..20: mol_type = other DNA
ttttaaaacccacttagcta

SEQ ID NO: 30436 - DNA, 20 bp, synthetic construct
  misc_feature 1..20: note = chemically synthesized
  source 1..20: mol_type = other DNA
gcaatgctccttaaattcac

SEQ ID NO: 30437 - DNA, 20 bp, synthetic construct
  misc_feature 1..20: note = chemically synthesized
  source 1..20: mol_type = other DNA
ttaaattcaccagtgacttc

SEQ ID NO: 30438 - DNA, 20 bp, synthetic construct
  misc_feature 1..20: note = chemically synthesized
  source 1..20: mol_type = other DNA
taaattcaccagtgacttct

SEQ ID NO: 30439 - DNA, 20 bp, synthetic construct
  misc_feature 1..20: note = chemically synthesized
  source 1..20: mol_type = other DNA
aaattcaccagtgacttcta

SEQ ID NO: 30440 - DNA, 20 bp, synthetic construct
  misc_feature 1..20: note = chemically synthesized
  source 1..20: mol_type = other DNA
aattcaccagtgacttctag

SEQ ID NO: 30441 - DNA, 20 bp, synthetic construct
  misc_feature 1..20: note = chemically synthesized
  source 1..20: mol_type = other DNA
cttctaggggccaaatgcaa

SEQ ID NO: 30442 - DNA, 20 bp, synthetic construct
  misc_feature 1..20: note = chemically synthesized
  source 1..20: mol_type = other DNA
tctaggggccaaatgcaatg

SEQ ID NO: 30443 - DNA, 20 bp, synthetic construct
  misc_feature 1..20: note = chemically synthesized
  source 1..20: mol_type = other DNA
taggggccaaatgcaatgga

SEQ ID NO: 30444 - DNA, 20 bp, synthetic construct
  misc_feature 1..20: note = chemically synthesized
  source 1..20: mol_type = other DNA
ttattgatttttttgtgcaa

SEQ ID NO: 30445 - DNA, 20 bp, synthetic construct
  misc_feature 1..20: note = chemically synthesized
  source 1..20: mol_type = other DNA
tgtgcaatagttgtgtgctc

SEQ ID NO: 30446 - DNA, 20 bp, synthetic construct
  misc_feature 1..20: note = chemically synthesized
  source 1..20: mol_type = other DNA
tctggccatgccttcctttt

SEQ ID NO: 30447 - DNA, 20 bp, synthetic construct
  misc_feature 1..20: note = chemically synthesized
  source 1..20: mol_type = other DNA
tggccatgccttccttttta

SEQ ID NO: 30448 - DNA, 20 bp, synthetic construct
  misc_feature 1..20: note = chemically synthesized
  source 1..20: mol_type = other DNA
ttcctttttagagctctctc

SEQ ID NO: 30449 - DNA, 20 bp, synthetic construct
  misc_feature 1..20: note = chemically synthesized
  source 1..20: mol_type = other DNA
ctctagaaattcttaatgcc

SEQ ID NO: 30450 - DNA, 20 bp, synthetic construct
  misc_feature 1..20: note = chemically synthesized
  source 1..20: mol_type = other DNA
ttcttaatgccaagatctgc

SEQ ID NO: 30451 - DNA, 20 bp, synthetic construct
  misc_feature 1..20: note = chemically synthesized
  source 1..20: mol_type = other DNA
ttctcttctgatttttgtga

SEQ ID NO: 30452 - DNA, 20 bp, synthetic construct
  misc_feature 1..20: note = chemically synthesized
  source 1..20: mol_type = other DNA
gctcaaatatttatgttatt

SEQ ID NO: 30453 - DNA, 20 bp, synthetic construct
  misc_feature 1..20: note = chemically synthesized
  source 1..20: mol_type = other DNA
tattattattattacttata

SEQ ID NO: 30454 - DNA, 20 bp, synthetic construct
  misc_feature 1..20: note = chemically synthesized
  source 1..20: mol_type = other DNA
tattattattacttatacag

SEQ ID NO: 30455 - DNA, 20 bp, synthetic construct
  misc_feature 1..20: note = chemically synthesized
  source 1..20: mol_type = other DNA
tattattacttatacagtgg

SEQ ID NO: 30456 - DNA, 20 bp, synthetic construct
  misc_feature 1..20: note = chemically synthesized
  source 1..20: mol_type = other DNA
acttatacagtggtggctct

SEQ ID NO: 30457 - DNA, 20 bp, synthetic construct
  misc_feature 1..20: note = chemically synthesized
  source 1..20: mol_type = other DNA
ggctcttagacattaatctc

SEQ ID NO: 30458 - DNA, 20 bp, synthetic construct
  misc_feature 1..20: note = chemically synthesized
  source 1..20: mol_type = other DNA
ttagacattaatctctagtc

SEQ ID NO: 30459 - DNA, 20 bp, synthetic construct
  misc_feature 1..20: note = chemically synthesized
  source 1..20: mol_type = other DNA
cagataactccgttacatat

SEQ ID NO: 30460 - DNA, 20 bp, synthetic construct
  misc_feature 1..20: note = chemically synthesized
  source 1..20: mol_type = other DNA
agataactccgttacatatc

SEQ ID NO: 30461 - DNA, 20 bp, synthetic construct
  misc_feature 1..20: note = chemically synthesized
  source 1..20: mol_type = other DNA
ctccgttacatatcaggcct

SEQ ID NO: 30462 - DNA, 20 bp, synthetic construct
  misc_feature 1..20: note = chemically synthesized
  source 1..20: mol_type = other DNA
ctgagtttctgccttctcac

SEQ ID NO: 30463 - DNA, 20 bp, synthetic construct
  misc_feature 1..20: note = chemically synthesized
  source 1..20: mol_type = other DNA
tgagtttctgccttctcact

SEQ ID NO: 30464 - DNA, 20 bp, synthetic construct
  misc_feature 1..20: note = chemically synthesized
  source 1..20: mol_type = other DNA
ttctcactaggtgtttccaa

SEQ ID NO: 30465 - DNA, 20 bp, synthetic construct
  misc_feature 1..20: note = chemically synthesized
  source 1..20: mol_type = other DNA
tctcactaggtgtttccaaa

SEQ ID NO: 30466 - DNA, 20 bp, synthetic construct
  misc_feature 1..20: note = chemically synthesized
  source 1..20: mol_type = other DNA
aactcaacacgtctaatatt

SEQ ID NO: 30467 - DNA, 20 bp, synthetic construct
  misc_feature 1..20: note = chemically synthesized
  source 1..20: mol_type = other DNA
aacacgtctaatattgagcc

SEQ ID NO: 30468 - DNA, 20 bp, synthetic construct
  misc_feature 1..20: note = chemically synthesized
  source 1..20: mol_type = other DNA
ttcaccatttcctgccattc

SEQ ID NO: 30469 - DNA, 20 bp, synthetic construct
  misc_feature 1..20: note = chemically synthesized
  source 1..20: mol_type = other DNA
ccattcaagacaacattttt

SEQ ID NO: 30470 - DNA, 20 bp, synthetic construct
  misc_feature 1..20: note = chemically synthesized
  source 1..20: mol_type = other DNA
tctgtatctaatttttaact

SEQ ID NO: 30471 - DNA, 20 bp, synthetic construct
  misc_feature 1..20: note = chemically synthesized
  source 1..20: mol_type = other DNA
tctattcatcttcatctctg

SEQ ID NO: 30472 - DNA, 20 bp, synthetic construct
  misc_feature 1..20: note = chemically synthesized
  source 1..20: mol_type = other DNA
gtagccaatgtccttgttct

SEQ ID NO: 30473 - DNA, 20 bp, synthetic construct
  misc_feature 1..20: note = chemically synthesized
  source 1..20: mol_type = other DNA
gacctgtcattcaacatgca

SEQ ID NO: 30474 - DNA, 20 bp, synthetic construct
  misc_feature 1..20: note = chemically synthesized
  source 1..20: mol_type = other DNA
tgtcattcaacatgcaaagc

SEQ ID NO: 30475 - DNA, 20 bp, synthetic construct
  misc_feature 1..20: note = chemically synthesized
  source 1..20: mol_type = other DNA
gtcattcaacatgcaaagcc

SEQ ID NO: 30476 - DNA, 20 bp, synthetic construct
  misc_feature 1..20: note = chemically synthesized
  source 1..20: mol_type = other DNA
agccaggctcctccttccct

SEQ ID NO: 30477 - DNA, 20 bp, synthetic construct
  misc_feature 1..20: note = chemically synthesized
  source 1..20: mol_type = other DNA
ccttggtccatcctctactg

SEQ ID NO: 30478 - DNA, 20 bp, synthetic construct
  misc_feature 1..20: note = chemically synthesized
  source 1..20: mol_type = other DNA
catcctctactgcagccacc

SEQ ID NO: 30479 - DNA, 20 bp, synthetic construct
  misc_feature 1..20: note = chemically synthesized
  source 1..20: mol_type = other DNA
ctgcagccaccgagattatg

SEQ ID NO: 30480 - DNA, 20 bp, synthetic construct
  misc_feature 1..20: note = chemically synthesized
  source 1..20: mol_type = other DNA
agccaccgagattatgcaga

SEQ ID NO: 30481 - DNA, 20 bp, synthetic construct
  misc_feature 1..20: note = chemically synthesized
  source 1..20: mol_type = other DNA
atgaatcactgcactgtttt

SEQ ID NO: 30482 - DNA, 20 bp, synthetic construct
  misc_feature 1..20: note = chemically synthesized
  source 1..20: mol_type = other DNA
ctgcactgttttcagtactt

SEQ ID NO: 30483 - DNA, 20 bp, synthetic construct
  misc_feature 1..20: note = chemically synthesized
  source 1..20: mol_type = other DNA
cactgttttcagtacttcag

SEQ ID NO: 30484 - DNA, 20 bp, synthetic construct
  misc_feature 1..20: note = chemically synthesized
  source 1..20: mol_type = other DNA
acttcagtagctcctatcat

SEQ ID NO: 30485 - DNA, 20 bp, synthetic construct
  misc_feature 1..20: note = chemically synthesized
  source 1..20: mol_type = other DNA
tagctcctatcattagaata

SEQ ID NO: 30486 - DNA, 20 bp, synthetic construct
  misc_feature 1..20: note = chemically synthesized
  source 1..20: mol_type = other DNA
aataaagttcaaacttgtaa

SEQ ID NO: 30487 - DNA, 20 bp, synthetic construct
  misc_feature 1..20: note = chemically synthesized
  source 1..20: mol_type = other DNA
tcaaacttgtaaaagatctg

SEQ ID NO: 30488 - DNA, 20 bp, synthetic construct
  misc_feature 1..20: note = chemically synthesized
  source 1..20: mol_type = other DNA
ttgtaaaagatctgtggtga

SEQ ID NO: 30489 - DNA, 20 bp, synthetic construct
  misc_feature 1..20: note = chemically synthesized
  source 1..20: mol_type = other DNA
tggtgatagtccaatttatt

SEQ ID NO: 30490 - DNA, 20 bp, synthetic construct
  misc_feature 1..20: note = chemically synthesized
  source 1..20: mol_type = other DNA
ggtgatagtccaatttattg

SEQ ID NO: 30491 - DNA, 20 bp, synthetic construct
  misc_feature 1..20: note = chemically synthesized
  source 1..20: mol_type = other DNA
tattgaggccatacatgatt

SEQ ID NO: 30492 - DNA, 20 bp, synthetic construct
  misc_feature 1..20: note = chemically synthesized
  source 1..20: mol_type = other DNA
catgatttagatgctgtgaa

SEQ ID NO: 30493 - DNA, 20 bp, synthetic construct
  misc_feature 1..20: note = chemically synthesized
  source 1..20: mol_type = other DNA
acattttattactacttcac

SEQ ID NO: 30494 - DNA, 20 bp, synthetic construct
  misc_feature 1..20: note = chemically synthesized
  source 1..20: mol_type = other DNA
cattttattactacttcaca

SEQ ID NO: 30495 - DNA, 20 bp, synthetic construct
  misc_feature 1..20: note = chemically synthesized
  source 1..20: mol_type = other DNA
ttttattactacttcacaag

SEQ ID NO: 30496 - DNA, 20 bp, synthetic construct
  misc_feature 1..20: note = chemically synthesized
  source 1..20: mol_type = other DNA
cacaaggagaaaactacaaa

SEQ ID NO: 30497 - DNA, 20 bp, synthetic construct
  misc_feature 1..20: note = chemically synthesized
  source 1..20: mol_type = other DNA
acaaggagaaaactacaaaa

SEQ ID NO: 30498 - DNA, 20 bp, synthetic construct
  misc_feature 1..20: note = chemically synthesized
  source 1..20: mol_type = other DNA
aaaaggtaaacaatcatccc

SEQ ID NO: 30499 - DNA, 20 bp, synthetic construct
  misc_feature 1..20: note = chemically synthesized
  source 1..20: mol_type = other DNA
aaaggtaaacaatcatccca

SEQ ID NO: 30500 - DNA, 20 bp, synthetic construct
  misc_feature 1..20: note = chemically synthesized
  source 1..20: mol_type = other DNA
taaacaatcatcccaaggcc

SEQ ID NO: 30501 - DNA, 20 bp, synthetic construct
  misc_feature 1..20: note = chemically synthesized
  source 1..20: mol_type = other DNA
acaatcatcccaaggcctgg

SEQ ID NO: 30502 - DNA, 20 bp, synthetic construct
  misc_feature 1..20: note = chemically synthesized
  source 1..20: mol_type = other DNA
tcatcccaaggcctggtagt

SEQ ID NO: 30503 - DNA, 20 bp, synthetic construct
  misc_feature 1..20: note = chemically synthesized
  source 1..20: mol_type = other DNA
gcctggtagtgagcgaaaat

SEQ ID NO: 30504 - DNA, 20 bp, synthetic construct
  misc_feature 1..20: note = chemically synthesized
  source 1..20: mol_type = other DNA
cctggtagtgagcgaaaatc

SEQ ID NO: 30505 - DNA, 20 bp, synthetic construct
  misc_feature 1..20: note = chemically synthesized
  source 1..20: mol_type = other DNA
tagtgagcgaaaatcaggat

SEQ ID NO: 30506 - DNA, 20 bp, synthetic construct
  misc_feature 1..20: note = chemically synthesized
  source 1..20: mol_type = other DNA
aacctttgtctctctatgca

SEQ ID NO: 30507 - DNA, 20 bp, synthetic construct
  misc_feature 1..20: note = chemically synthesized
  source 1..20: mol_type = other DNA
tgtctctctatgcatggccc

SEQ ID NO: 30508 - DNA, 20 bp, synthetic construct
  misc_feature 1..20: note = chemically synthesized
  source 1..20: mol_type = other DNA
ctctctatgcatggccctgg

SEQ ID NO: 30509 - DNA, 20 bp, synthetic construct
  misc_feature 1..20: note = chemically synthesized
  source 1..20: mol_type = other DNA
acaccctgtaacaccatctt

SEQ ID NO: 30510 - DNA, 20 bp, synthetic construct
  misc_feature 1..20: note = chemically synthesized
  source 1..20: mol_type = other DNA
ctgtaacaccatctttagcc

SEQ ID NO: 30511 - DNA, 20 bp, synthetic construct
  misc_feature 1..20: note = chemically synthesized
  source 1..20: mol_type = other DNA
tagcccggtccttcttgttt

SEQ ID NO: 30512 - DNA, 20 bp, synthetic construct
  misc_feature 1..20: note = chemically synthesized
  source 1..20: mol_type = other DNA
tttccaaacccatcttttcc

SEQ ID NO: 30513 - DNA, 20 bp, synthetic construct
  misc_feature 1..20: note = chemically synthesized
  source 1..20: mol_type = other DNA
ttctatatttattgctttct

SEQ ID NO: 30514 - DNA, 20 bp, synthetic construct
  misc_feature 1..20: note = chemically synthesized
  source 1..20: mol_type = other DNA
accacccctgtttttccaac

SEQ ID NO: 30515 - DNA, 20 bp, synthetic construct
  misc_feature 1..20: note = chemically synthesized
  source 1..20: mol_type = other DNA
ttccaaccagtaaacacttg

SEQ ID NO: 30516 - DNA, 20 bp, synthetic construct
  misc_feature 1..20: note = chemically synthesized
  source 1..20: mol_type = other DNA
taaacacttgcggatccttt

SEQ ID NO: 30517 - DNA, 20 bp, synthetic construct
  misc_feature 1..20: note = chemically synthesized
  source 1..20: mol_type = other DNA
cttgcggatcctttaagact

SEQ ID NO: 30518 - DNA, 20 bp, synthetic construct
  misc_feature 1..20: note = chemically synthesized
  source 1..20: mol_type = other DNA
tctctcctgacttccttctg

SEQ ID NO: 30519 - DNA, 20 bp, synthetic construct
  misc_feature 1..20: note = chemically synthesized
  source 1..20: mol_type = other DNA
ctgacttccttctgtagcat

SEQ ID NO: 30520 - DNA, 20 bp, synthetic construct
  misc_feature 1..20: note = chemically synthesized
  source 1..20: mol_type = other DNA
tgacttccttctgtagcatt

SEQ ID NO: 30521 - DNA, 20 bp, synthetic construct
  misc_feature 1..20: note = chemically synthesized
  source 1..20: mol_type = other DNA
catctttctctgttctcacg

SEQ ID NO: 30522 - DNA, 20 bp, synthetic construct
  misc_feature 1..20: note = chemically synthesized
  source 1..20: mol_type = other DNA
agtacctgtaatgtactatt

SEQ ID NO: 30523 - DNA, 20 bp, synthetic construct
  misc_feature 1..20: note = chemically synthesized
  source 1..20: mol_type = other DNA
gtacctgtaatgtactatta

SEQ ID NO: 30524 - DNA, 20 bp, synthetic construct
  misc_feature 1..20: note = chemically synthesized
  source 1..20: mol_type = other DNA
tatacttattgatatatata

SEQ ID NO: 30525 - DNA, 20 bp, synthetic construct
  misc_feature 1..20: note = chemically synthesized
  source 1..20: mol_type = other DNA
acatacttatacatccatat

SEQ ID NO: 30526 - DNA, 20 bp, synthetic construct
  misc_feature 1..20: note = chemically synthesized
  source 1..20: mol_type = other DNA
atataagtacacatatgtat

SEQ ID NO: 30527 - DNA, 20 bp, synthetic construct
  misc_feature 1..20: note = chemically synthesized
  source 1..20: mol_type = other DNA
tataagtttaaataacatat

SEQ ID NO: 30528 - DNA, 20 bp, synthetic construct
  misc_feature 1..20: note = chemically synthesized
  source 1..20: mol_type = other DNA
ttaaataacatataagtgta

SEQ ID NO: 30529 - DNA, 20 bp, synthetic construct
  misc_feature 1..20: note = chemically synthesized
  source 1..20: mol_type = other DNA
atttactcataaatacttta

SEQ ID NO: 30530 - DNA, 20 bp, synthetic construct
  misc_feature 1..20: note = chemically synthesized
  source 1..20: mol_type = other DNA
actttatagaatatacattt

SEQ ID NO: 30531 - DNA, 20 bp, synthetic construct
  misc_feature 1..20: note = chemically synthesized
  source 1..20: mol_type = other DNA
tatattctttatatacttta

SEQ ID NO: 30532 - DNA, 20 bp, synthetic construct
  misc_feature 1..20: note = chemically synthesized
  source 1..20: mol_type = other DNA
tttatagattttttatatat

SEQ ID NO: 30533 - DNA, 20 bp, synthetic construct
  misc_feature 1..20: note = chemically synthesized
  source 1..20: mol_type = other DNA
agattttttatatataagta

SEQ ID NO: 30534 - DNA, 20 bp, synthetic construct
  misc_feature 1..20: note = chemically synthesized
  source 1..20: mol_type = other DNA
gattttttatatataagtat

SEQ ID NO: 30535 - DNA, 20 bp, synthetic construct
  misc_feature 1..20: note = chemically synthesized
  source 1..20: mol_type = other DNA
attttttatatataagtata

SEQ ID NO: 30536 - DNA, 20 bp, synthetic construct
  misc_feature 1..20: note = chemically synthesized
  source 1..20: mol_type = other DNA
aaacaaatatacaaaaatat

SEQ ID NO: 30537 - DNA, 20 bp, synthetic construct
  misc_feature 1..20: note = chemically synthesized
  source 1..20: mol_type = other DNA
tttgtacaacatatatatta

SEQ ID NO: 30538 - DNA, 20 bp, synthetic construct
  misc_feature 1..20: note = chemically synthesized
  source 1..20: mol_type = other DNA
ttgtacaacatatatattat

SEQ ID NO: 30539 - DNA, 20 bp, synthetic construct
  misc_feature 1..20: note = chemically synthesized
  source 1..20: mol_type = other DNA
tacaacatatatattatagg

SEQ ID NO: 30540 - DNA, 20 bp, synthetic construct
  misc_feature 1..20: note = chemically synthesized
  source 1..20: mol_type = other DNA
tattctttattatacatgtt

SEQ ID NO: 30541 - DNA, 20 bp, synthetic construct
  misc_feature 1..20: note = chemically synthesized
  source 1..20: mol_type = other DNA
tttagaacataaatttatat

SEQ ID NO: 30542 - DNA, 20 bp, synthetic construct
  misc_feature 1..20: note = chemically synthesized
  source 1..20: mol_type = other DNA
aacctaataattcatttttt

SEQ ID NO: 30543 - DNA, 20 bp, synthetic construct
  misc_feature 1..20: note = chemically synthesized
  source 1..20: mol_type = other DNA
aattcattttttaagttgat

SEQ ID NO: 30544 - DNA, 20 bp, synthetic construct
  misc_feature 1..20: note = chemically synthesized
  source 1..20: mol_type = other DNA
attttttaagttgattagac

SEQ ID NO: 30545 - DNA, 20 bp, synthetic construct
  misc_feature 1..20: note = chemically synthesized
  source 1..20: mol_type = other DNA
gattagactggaattctcta

SEQ ID NO: 30546 - DNA, 20 bp, synthetic construct
  misc_feature 1..20: note = chemically synthesized
  source 1..20: mol_type = other DNA
attagactggaattctctaa

SEQ ID NO: 30547 - DNA, 20 bp, synthetic construct
  misc_feature 1..20: note = chemically synthesized
  source 1..20: mol_type = other DNA
tggaattctctaaaggcccc

SEQ ID NO: 30548 - DNA, 20 bp, synthetic construct
  misc_feature 1..20: note = chemically synthesized
  source 1..20: mol_type = other DNA
gaattctctaaaggcccctg

SEQ ID NO: 30549 - DNA, 20 bp, synthetic construct
  misc_feature 1..20: note = chemically synthesized
  source 1..20: mol_type = other DNA
taaaggcccctggagcctga

SEQ ID NO: 30550 - DNA, 20 bp, synthetic construct
  misc_feature 1..20: note = chemically synthesized
  source 1..20: mol_type = other DNA
cctggagcctgacagtgtct

SEQ ID NO: 30551 - DNA, 20 bp, synthetic construct
  misc_feature 1..20: note = chemically synthesized
  source 1..20: mol_type = other DNA
gcctgacagtgtctaagatg

SEQ ID NO: 30552 - DNA, 20 bp, synthetic construct
  misc_feature 1..20: note = chemically synthesized
  source 1..20: mol_type = other DNA
tgacagtgtctaagatgtgg

SEQ ID NO: 30553 - DNA, 20 bp, synthetic construct
  misc_feature 1..20: note = chemically synthesized
  source 1..20: mol_type = other DNA
gacagtgtctaagatgtggt

SEQ ID NO: 30554 - DNA, 20 bp, synthetic construct
  misc_feature 1..20: note = chemically synthesized
  source 1..20: mol_type = other DNA
tttttgcatgaaaaactaaa

SEQ ID NO: 30555 - DNA, 20 bp, synthetic construct
  misc_feature 1..20: note = chemically synthesized
  source 1..20: mol_type = other DNA
ttttgcatgaaaaactaaat

SEQ ID NO: 30556 - DNA, 20 bp, synthetic construct
  misc_feature 1..20: note = chemically synthesized
  source 1..20: mol_type = other DNA
actaaatgggtgaataaata

SEQ ID NO: 30557 - DNA, 20 bp, synthetic construct
  misc_feature 1..20: note = chemically synthesized
  source 1..20: mol_type = other DNA
ttatcctgattctttgtgcc

SEQ ID NO: 30558 - DNA, 20 bp, synthetic construct
  misc_feature 1..20: note = chemically synthesized
  source 1..20: mol_type = other DNA
tatcctgattctttgtgcct

SEQ ID NO: 30559 - DNA, 20 bp, synthetic construct
  misc_feature 1..20: note = chemically synthesized
  source 1..20: mol_type = other DNA
atcctgattctttgtgcctg

SEQ ID NO: 30560 - DNA, 20 bp, synthetic construct
  misc_feature 1..20: note = chemically synthesized
  source 1..20: mol_type = other DNA
tgtgcctggggttctgttgt

SEQ ID NO: 30561 - DNA, 20 bp, synthetic construct
  misc_feature 1..20: note = chemically synthesized
  source 1..20: mol_type = other DNA
agctctgtgttcaccaactt

SEQ ID NO: 30562 - DNA, 20 bp, synthetic construct
  misc_feature 1..20: note = chemically synthesized
  source 1..20: mol_type = other DNA
ctctgtgttcaccaacttca

SEQ ID NO: 30563 - DNA, 20 bp, synthetic construct
  misc_feature 1..20: note = chemically synthesized
  source 1..20: mol_type = other DNA
ttcaccaacttcagagtgat

SEQ ID NO: 30564 - DNA, 20 bp, synthetic construct
  misc_feature 1..20: note = chemically synthesized
  source 1..20: mol_type = other DNA
ccaacttcagagtgatgaga

SEQ ID NO: 30565 - DNA, 20 bp, synthetic construct
  misc_feature 1..20: note = chemically synthesized
  source 1..20: mol_type = other DNA
cttcagagtgatgagatgga

SEQ ID NO: 30566 - DNA, 20 bp, synthetic construct
  misc_feature 1..20: note = chemically synthesized
  source 1..20: mol_type = other DNA
ttcagagtgatgagatggac

SEQ ID NO: 30567 - DNA, 20 bp, synthetic construct
  misc_feature 1..20: note = chemically synthesized
  source 1..20: mol_type = other DNA
tcagagtgatgagatggaca

SEQ ID NO: 30568 - DNA, 20 bp, synthetic construct
  misc_feature 1..20: note = chemically synthesized
  source 1..20: mol_type = other DNA
agagtgatgagatggacagg

SEQ ID NO: 30569 - DNA, 20 bp, synthetic construct
  misc_feature 1..20: note = chemically synthesized
  source 1..20: mol_type = other DNA
gtgatgagatggacagggag

SEQ ID NO: 30570 - DNA, 20 bp, synthetic construct
  misc_feature 1..20: note = chemically synthesized
  source 1..20: mol_type = other DNA
tgatgagatggacagggaga

SEQ ID NO: 30571 - DNA, 20 bp, synthetic construct
  misc_feature 1..20: note = chemically synthesized
  source 1..20: mol_type = other DNA
gatggacagggagaaggatc

SEQ ID NO: 30572 - DNA, 20 bp, synthetic construct
  misc_feature 1..20: note = chemically synthesized
  source 1..20: mol_type = other DNA
ggacagggagaaggatctgg

SEQ ID NO: 30573 - DNA, 20 bp, synthetic construct
  misc_feature 1..20: note = chemically synthesized
  source 1..20: mol_type = other DNA
gagaaggatctggtagaaac

SEQ ID NO: 30574 - DNA, 20 bp, synthetic construct
  misc_feature 1..20: note = chemically synthesized
  source 1..20: mol_type = other DNA
gtagaaacaagatgtctata

SEQ ID NO: 30575 - DNA, 20 bp, synthetic construct
  misc_feature 1..20: note = chemically synthesized
  source 1..20: mol_type = other DNA
agaaacaagatgtctataca

SEQ ID NO: 30576 - DNA, 20 bp, synthetic construct
  misc_feature 1..20: note = chemically synthesized
  source 1..20: mol_type = other DNA
tgtctatacagagacaatga

SEQ ID NO: 30577 - DNA, 20 bp, synthetic construct
  misc_feature 1..20: note = chemically synthesized
  source 1..20: mol_type = other DNA
gtctatacagagacaatgac

SEQ ID NO: 30578 - DNA, 20 bp, synthetic construct
  misc_feature 1..20: note = chemically synthesized
  source 1..20: mol_type = other DNA
tctatacagagacaatgaca

SEQ ID NO: 30579 - DNA, 20 bp, synthetic construct
  misc_feature 1..20: note = chemically synthesized
  source 1..20: mol_type = other DNA
tacagagacaatgacagggc

SEQ ID NO: 30580 - DNA, 20 bp, synthetic construct
  misc_feature 1..20: note = chemically synthesized
  source 1..20: mol_type = other DNA
acagagacaatgacagggct

SEQ ID NO: 30581 - DNA, 20 bp, synthetic construct
  misc_feature 1..20: note = chemically synthesized
  source 1..20: mol_type = other DNA
agggctgggattatttctct

SEQ ID NO: 30582 - DNA, 20 bp, synthetic construct
  misc_feature 1..20: note = chemically synthesized
  source 1..20: mol_type = other DNA
ctgggattatttctcttgga

SEQ ID NO: 30583 - DNA, 20 bp, synthetic construct
  misc_feature 1..20: note = chemically synthesized
  source 1..20: mol_type = other DNA
ttggaaagtatacttcctct

SEQ ID NO: 30584 - DNA, 20 bp, synthetic construct
  misc_feature 1..20: note = chemically synthesized
  source 1..20: mol_type = other DNA
tggaaagtatacttcctctt

SEQ ID NO: 30585 - DNA, 20 bp, synthetic construct
  misc_feature 1..20: note = chemically synthesized
  source 1..20: mol_type = other DNA
aaagtatacttcctcttggg

SEQ ID NO: 30586 - DNA, 20 bp, synthetic construct
  misc_feature 1..20: note = chemically synthesized
  source 1..20: mol_type = other DNA
tatacttcctcttgggaaga

SEQ ID NO: 30587 - DNA, 20 bp, synthetic construct
  misc_feature 1..20: note = chemically synthesized
  source 1..20: mol_type = other DNA
tcctcttgggaagaaagctt

SEQ ID NO: 30588 - DNA, 20 bp, synthetic construct
  misc_feature 1..20: note = chemically synthesized
  source 1..20: mol_type = other DNA
cctcttgggaagaaagcttt

SEQ ID NO: 30589 - DNA, 20 bp, synthetic construct
  misc_feature 1..20: note = chemically synthesized
  source 1..20: mol_type = other DNA
ctcttgggaagaaagcttta

SEQ ID NO: 30590 - DNA, 20 bp, synthetic construct
  misc_feature 1..20: note = chemically synthesized
  source 1..20: mol_type = other DNA
tcttgggaagaaagctttag

SEQ ID NO: 30591 - DNA, 20 bp, synthetic construct
  misc_feature 1..20: note = chemically synthesized
  source 1..20: mol_type = other DNA
aagctttaggggatttctcc

SEQ ID NO: 30592 - DNA, 20 bp, synthetic construct
  misc_feature 1..20: note = chemically synthesized
  source 1..20: mol_type = other DNA
tttaggggatttctcctagc

SEQ ID NO: 30593 - DNA, 20 bp, synthetic construct
  misc_feature 1..20: note = chemically synthesized
  source 1..20: mol_type = other DNA
taggggatttctcctagcaa

SEQ ID NO: 30594 - DNA, 20 bp, synthetic construct
  misc_feature 1..20: note = chemically synthesized
  source 1..20: mol_type = other DNA
ggggatttctcctagcaaga

SEQ ID NO: 30595 - DNA, 20 bp, synthetic construct
  misc_feature 1..20: note = chemically synthesized
  source 1..20: mol_type = other DNA
agagagataattatccatga

SEQ ID NO: 30596 - DNA, 20 bp, synthetic construct
  misc_feature 1..20: note = chemically synthesized
  source 1..20: mol_type = other DNA
gagagataattatccatgat

SEQ ID NO: 30597 - DNA, 20 bp, synthetic construct
  misc_feature 1..20: note = chemically synthesized
  source 1..20: mol_type = other DNA
gagataattatccatgatag

SEQ ID NO: 30598 - DNA, 20 bp, synthetic construct
  misc_feature 1..20: note = chemically synthesized
  source 1..20: mol_type = other DNA
gataattatccatgatagga

SEQ ID NO: 30599 - DNA, 20 bp, synthetic construct
  misc_feature 1..20: note = chemically synthesized
  source 1..20: mol_type = other DNA
tatccatgataggagagcaa

SEQ ID NO: 30600 - DNA, 20 bp, synthetic construct
  misc_feature 1..20: note = chemically synthesized
  source 1..20: mol_type = other DNA
gtcattttttcatgtctact

SEQ ID NO: 30601 - DNA, 20 bp, synthetic construct
  misc_feature 1..20: note = chemically synthesized
  source 1..20: mol_type = other DNA
ttttcatgtctactaagcaa

SEQ ID NO: 30602 - DNA, 20 bp, synthetic construct
  misc_feature 1..20: note = chemically synthesized
  source 1..20: mol_type = other DNA
ttcatgtctactaagcaatg

SEQ ID NO: 30603 - DNA, 20 bp, synthetic construct
  misc_feature 1..20: note = chemically synthesized
  source 1..20: mol_type = other DNA
tcatgtctactaagcaatgg

SEQ ID NO: 30604 - DNA, 20 bp, synthetic construct
  misc_feature 1..20: note = chemically synthesized
  source 1..20: mol_type = other DNA
atgtctactaagcaatggag

SEQ ID NO: 30605 - DNA, 20 bp, synthetic construct
  misc_feature 1..20: note = chemically synthesized
  source 1..20: mol_type = other DNA
aagcaatggaggagtccact

SEQ ID NO: 30606 - DNA, 20 bp, synthetic construct
  misc_feature 1..20: note = chemically synthesized
  source 1..20: mol_type = other DNA
gcaatggaggagtccactca

SEQ ID NO: 30607 - DNA, 20 bp, synthetic construct
  misc_feature 1..20: note = chemically synthesized
  source 1..20: mol_type = other DNA
atggaggagtccactcagag

SEQ ID NO: 30608 - DNA, 20 bp, synthetic construct
  misc_feature 1..20: note = chemically synthesized
  source 1..20: mol_type = other DNA
aggagtccactcagagcagt

SEQ ID NO: 30609 - DNA, 20 bp, synthetic construct
  misc_feature 1..20: note = chemically synthesized
  source 1..20: mol_type = other DNA
acaacataattaaaatattc

SEQ ID NO: 30610 - DNA, 20 bp, synthetic construct
  misc_feature 1..20: note = chemically synthesized
  source 1..20: mol_type = other DNA
caacataattaaaatattca

SEQ ID NO: 30611 - DNA, 20 bp, synthetic construct
  misc_feature 1..20: note = chemically synthesized
  source 1..20: mol_type = other DNA
cataattaaaatattcaagg

SEQ ID NO: 30612 - DNA, 20 bp, synthetic construct
  misc_feature 1..20: note = chemically synthesized
  source 1..20: mol_type = other DNA
taattaaaatattcaaggca

SEQ ID NO: 30613 - DNA, 20 bp, synthetic construct
  misc_feature 1..20: note = chemically synthesized
  source 1..20: mol_type = other DNA
ttaaaatattcaaggcagag

SEQ ID NO: 30614 - DNA, 20 bp, synthetic construct
  misc_feature 1..20: note = chemically synthesized
  source 1..20: mol_type = other DNA
aaggcagagtagattcatct

SEQ ID NO: 30615 - DNA, 20 bp, synthetic construct
  misc_feature 1..20: note = chemically synthesized
  source 1..20: mol_type = other DNA
agtagattcatcttagatca

SEQ ID NO: 30616 - DNA, 20 bp, synthetic construct
  misc_feature 1..20: note = chemically synthesized
  source 1..20: mol_type = other DNA
gtagattcatcttagatcac

SEQ ID NO: 30617 - DNA, 20 bp, synthetic construct
  misc_feature 1..20: note = chemically synthesized
  source 1..20: mol_type = other DNA
agattcatcttagatcacag

SEQ ID NO: 30618 - DNA, 20 bp, synthetic construct
  misc_feature 1..20: note = chemically synthesized
  source 1..20: mol_type = other DNA
cacaggagaaaattcctgaa

SEQ ID NO: 30619 - DNA, 20 bp, synthetic construct
  misc_feature 1..20: note = chemically synthesized
  source 1..20: mol_type = other DNA
caggagaaaattcctgaaaa

SEQ ID NO: 30620 - DNA, 20 bp, synthetic construct
  misc_feature 1..20: note = chemically synthesized
  source 1..20: mol_type = other DNA
aattcctgaaaagagatttt

SEQ ID NO: 30621 - DNA, 20 bp, synthetic construct
  misc_feature 1..20: note = chemically synthesized
  source 1..20: mol_type = other DNA
agagattttcagtatacaat

SEQ ID NO: 30622 - DNA, 20 bp, synthetic construct
  misc_feature 1..20: note = chemically synthesized
  source 1..20: mol_type = other DNA
ttcagtatacaatgagtaat

SEQ ID NO: 30623 - DNA, 20 bp, synthetic construct
  misc_feature 1..20: note = chemically synthesized
  source 1..20: mol_type = other DNA
cttttgtttgaatttaatat

SEQ ID NO: 30624 - DNA, 20 bp, synthetic construct
  misc_feature 1..20: note = chemically synthesized
  source 1..20: mol_type = other DNA
tattttttaatgaactacat

SEQ ID NO: 30625 - DNA, 20 bp, synthetic construct
  misc_feature 1..20: note = chemically synthesized
  source 1..20: mol_type = other DNA
tttttaatgaactacattgg

SEQ ID NO: 30626 - DNA, 20 bp, synthetic construct
  misc_feature 1..20: note = chemically synthesized
  source 1..20: mol_type = other DNA
tttaatgaactacattggtg

SEQ ID NO: 30627 - DNA, 20 bp, synthetic construct
  misc_feature 1..20: note = chemically synthesized
  source 1..20: mol_type = other DNA
ttaatgaactacattggtgg

SEQ ID NO: 30628 - DNA, 20 bp, synthetic construct
  misc_feature 1..20: note = chemically synthesized
  source 1..20: mol_type = other DNA
aggatactgtttcttgtaaa

SEQ ID NO: 30629 - DNA, 20 bp, synthetic construct
  misc_feature 1..20: note = chemically synthesized
  source 1..20: mol_type = other DNA
ggatactgtttcttgtaaat

SEQ ID NO: 30630 - DNA, 20 bp, synthetic construct
  misc_feature 1..20: note = chemically synthesized
  source 1..20: mol_type = other DNA
atactgtttcttgtaaatag

SEQ ID NO: 30631 - DNA, 20 bp, synthetic construct
  misc_feature 1..20: note = chemically synthesized
  source 1..20: mol_type = other DNA
gtaaataggagaatatgcaa

SEQ ID NO: 30632 - DNA, 20 bp, synthetic construct
  misc_feature 1..20: note = chemically synthesized
  source 1..20: mol_type = other DNA
aagacgctgcacctaaacac

SEQ ID NO: 30633 - DNA, 20 bp, synthetic construct
  misc_feature 1..20: note = chemically synthesized
  source 1..20: mol_type = other DNA
agacgctgcacctaaacaca

SEQ ID NO: 30634 - DNA, 20 bp, synthetic construct
  misc_feature 1..20: note = chemically synthesized
  source 1..20: mol_type = other DNA
ctaaacacaaggacttgaac

SEQ ID NO: 30635 - DNA, 20 bp, synthetic construct
  misc_feature 1..20: note = chemically synthesized
  source 1..20: mol_type = other DNA
attattcatttttgaacccc

SEQ ID NO: 30636 - DNA, 20 bp, synthetic construct
  misc_feature 1..20: note = chemically synthesized
  source 1..20: mol_type = other DNA
tattcatttttgaaccccta

SEQ ID NO: 30637 - DNA, 20 bp, synthetic construct
  misc_feature 1..20: note = chemically synthesized
  source 1..20: mol_type = other DNA
acccctagagaacatttcca

SEQ ID NO: 30638 - DNA, 20 bp, synthetic construct
  misc_feature 1..20: note = chemically synthesized
  source 1..20: mol_type = other DNA
cctagagaacatttccacag

SEQ ID NO: 30639 - DNA, 20 bp, synthetic construct
  misc_feature 1..20: note = chemically synthesized
  source 1..20: mol_type = other DNA
tctgtaaacatgcctgtttt

SEQ ID NO: 30640 - DNA, 20 bp, synthetic construct
  misc_feature 1..20: note = chemically synthesized
  source 1..20: mol_type = other DNA
gtaaacatgcctgtttttag

SEQ ID NO: 30641 - DNA, 20 bp, synthetic construct
  misc_feature 1..20: note = chemically synthesized
  source 1..20: mol_type = other DNA
taaacatgcctgtttttagt

SEQ ID NO: 30642 - DNA, 20 bp, synthetic construct
  misc_feature 1..20: note = chemically synthesized
  source 1..20: mol_type = other DNA
catgcctgtttttagtagga

SEQ ID NO: 30643 - DNA, 20 bp, synthetic construct
  misc_feature 1..20: note = chemically synthesized
  source 1..20: mol_type = other DNA
tgcctgtttttagtaggata

SEQ ID NO: 30644 - DNA, 20 bp, synthetic construct
  misc_feature 1..20: note = chemically synthesized
  source 1..20: mol_type = other DNA
gcctgtttttagtaggatag

SEQ ID NO: 30645 - DNA, 20 bp, synthetic construct
  misc_feature 1..20: note = chemically synthesized
  source 1..20: mol_type = other DNA
ctgtttttagtaggatagag

SEQ ID NO: 30646 - DNA, 20 bp, synthetic construct
  misc_feature 1..20: note = chemically synthesized
  source 1..20: mol_type = other DNA
tgtttttagtaggatagagg

SEQ ID NO: 30647 - DNA, 20 bp, synthetic construct
  misc_feature 1..20: note = chemically synthesized
  source 1..20: mol_type = other DNA
agtaggatagaggaggattt

SEQ ID NO: 30648 - DNA, 20 bp, synthetic construct
  misc_feature 1..20: note = chemically synthesized
  source 1..20: mol_type = other DNA
aggatagaggaggattttgg

SEQ ID NO: 30649 - DNA, 20 bp, synthetic construct
  misc_feature 1..20: note = chemically synthesized
  source 1..20: mol_type = other DNA
ggatagaggaggattttgga

SEQ ID NO: 30650 - DNA, 20 bp, synthetic construct
  misc_feature 1..20: note = chemically synthesized
  source 1..20: mol_type = other DNA
gaggaggattttggaaggcg

SEQ ID NO: 30651 - DNA, 20 bp, synthetic construct
  misc_feature 1..20: note = chemically synthesized
  source 1..20: mol_type = other DNA
aggaggattttggaaggcga

SEQ ID NO: 30652 - DNA, 20 bp, synthetic construct
  misc_feature 1..20: note = chemically synthesized
  source 1..20: mol_type = other DNA
ggaaggcgaaggccatatcc

SEQ ID NO: 30653 - DNA, 20 bp, synthetic construct
  misc_feature 1..20: note = chemically synthesized
  source 1..20: mol_type = other DNA
gaaggccatatcctggatac

SEQ ID NO: 30654 - DNA, 20 bp, synthetic construct
  misc_feature 1..20: note = chemically synthesized
  source 1..20: mol_type = other DNA
aaggccatatcctggatact

SEQ ID NO: 30655 - DNA, 20 bp, synthetic construct
  misc_feature 1..20: note = chemically synthesized
  source 1..20: mol_type = other DNA
aggccatatcctggatactg

SEQ ID NO: 30656 - DNA, 20 bp, synthetic construct
  misc_feature 1..20: note = chemically synthesized
  source 1..20: mol_type = other DNA
ccatatcctggatactgggg

SEQ ID NO: 30657 - DNA, 20 bp, synthetic construct
  misc_feature 1..20: note = chemically synthesized
  source 1..20: mol_type = other DNA
ctggatactggggaagttac

SEQ ID NO: 30658 - DNA, 20 bp, synthetic construct
  misc_feature 1..20: note = chemically synthesized
  source 1..20: mol_type = other DNA
tggatactggggaagttaca

SEQ ID NO: 30659 - DNA, 20 bp, synthetic construct
  misc_feature 1..20: note = chemically synthesized
  source 1..20: mol_type = other DNA
ggaagttacaaggtgttgtt

SEQ ID NO: 30660 - DNA, 20 bp, synthetic construct
  misc_feature 1..20: note = chemically synthesized
  source 1..20: mol_type = other DNA
ggtgttgtttggattaaaat

SEQ ID NO: 30661 - DNA, 20 bp, synthetic construct
  misc_feature 1..20: note = chemically synthesized
  source 1..20: mol_type = other DNA
gttgtttggattaaaataag

SEQ ID NO: 30662 - DNA, 20 bp, synthetic construct
  misc_feature 1..20: note = chemically synthesized
  source 1..20: mol_type = other DNA
tggattaaaataagcagatt

SEQ ID NO: 30663 - DNA, 20 bp, synthetic construct
  misc_feature 1..20: note = chemically synthesized
  source 1..20: mol_type = other DNA
ggattaaaataagcagattg

SEQ ID NO: 30664 - DNA, 20 bp, synthetic construct
  misc_feature 1..20: note = chemically synthesized
  source 1..20: mol_type = other DNA
taaaataagcagattgagga

SEQ ID NO: 30665 - DNA, 20 bp, synthetic construct
  misc_feature 1..20: note = chemically synthesized
  source 1..20: mol_type = other DNA
aaaataagcagattgaggat

SEQ ID NO: 30666 - DNA, 20 bp, synthetic construct
  misc_feature 1..20: note = chemically synthesized
  source 1..20: mol_type = other DNA
aaataagcagattgaggatg

SEQ ID NO: 30667 - DNA, 20 bp, synthetic construct
  misc_feature 1..20: note = chemically synthesized
  source 1..20: mol_type = other DNA
ggggtcttttctatgttaac

SEQ ID NO: 30668 - DNA, 20 bp, synthetic construct
  misc_feature 1..20: note = chemically synthesized
  source 1..20: mol_type = other DNA
cttttctatgttaactggac

SEQ ID NO: 30669 - DNA, 20 bp, synthetic construct
  misc_feature 1..20: note = chemically synthesized
  source 1..20: mol_type = other DNA
catttaataatttgttgaat

SEQ ID NO: 30670 - DNA, 20 bp, synthetic construct
  misc_feature 1..20: note = chemically synthesized
  source 1..20: mol_type = other DNA
tgaatgactgtttttctgat

SEQ ID NO: 30671 - DNA, 20 bp, synthetic construct
  misc_feature 1..20: note = chemically synthesized
  source 1..20: mol_type = other DNA
aatgactgtttttctgatga

SEQ ID NO: 30672 - DNA, 20 bp, synthetic construct
  misc_feature 1..20: note = chemically synthesized
  source 1..20: mol_type = other DNA
actgtttttctgatgagagt

SEQ ID NO: 30673 - DNA, 20 bp, synthetic construct
  misc_feature 1..20: note = chemically synthesized
  source 1..20: mol_type = other DNA
ctgtttttctgatgagagta

SEQ ID NO: 30674 - DNA, 20 bp, synthetic construct
  misc_feature 1..20: note = chemically synthesized
  source 1..20: mol_type = other DNA
gtttttctgatgagagtaag

SEQ ID NO: 30675 - DNA, 20 bp, synthetic construct
  misc_feature 1..20: note = chemically synthesized
  source 1..20: mol_type = other DNA
ttttctgatgagagtaagga

SEQ ID NO: 30676 - DNA, 20 bp, synthetic construct
  misc_feature 1..20: note = chemically synthesized
  source 1..20: mol_type = other DNA
tttctgatgagagtaaggag

SEQ ID NO: 30677 - DNA, 20 bp, synthetic construct
  misc_feature 1..20: note = chemically synthesized
  source 1..20: mol_type = other DNA
ttctgatgagagtaaggaga

SEQ ID NO: 30678 - DNA, 20 bp, synthetic construct
  misc_feature 1..20: note = chemically synthesized
  source 1..20: mol_type = other DNA
taaggagagggtgtgtatac

SEQ ID NO: 30679 - DNA, 20 bp, synthetic construct
  misc_feature 1..20: note = chemically synthesized
  source 1..20: mol_type = other DNA
gagagggtgtgtataccaga

SEQ ID NO: 30680 - DNA, 20 bp, synthetic construct
  misc_feature 1..20: note = chemically synthesized
  source 1..20: mol_type = other DNA
ggtgtgtataccagatggct

SEQ ID NO: 30681 - DNA, 20 bp, synthetic construct
  misc_feature 1..20: note = chemically synthesized
  source 1..20: mol_type = other DNA
gtgtataccagatggctcgg

SEQ ID NO: 30682 - DNA, 20 bp, synthetic construct
  misc_feature 1..20: note = chemically synthesized
  source 1..20: mol_type = other DNA
tgtataccagatggctcggc

SEQ ID NO: 30683 - DNA, 20 bp, synthetic construct
  misc_feature 1..20: note = chemically synthesized
  source 1..20: mol_type = other DNA
taccagatggctcggcagga

SEQ ID NO: 30684 - DNA, 20 bp, synthetic construct
  misc_feature 1..20: note = chemically synthesized
  source 1..20: mol_type = other DNA
ccagatggctcggcaggaaa

SEQ ID NO: 30685 - DNA, 20 bp, synthetic construct
  misc_feature 1..20: note = chemically synthesized
  source 1..20: mol_type = other DNA
tggctcggcaggaaagagta

SEQ ID NO: 30686 - DNA, 20 bp, synthetic construct
  misc_feature 1..20: note = chemically synthesized
  source 1..20: mol_type = other DNA
gctcggcaggaaagagtata

SEQ ID NO: 30687 - DNA, 20 bp, synthetic construct
  misc_feature 1..20: note = chemically synthesized
  source 1..20: mol_type = other DNA
gcaggaaagagtatagagac

SEQ ID NO: 30688 - DNA, 20 bp, synthetic construct
  misc_feature 1..20: note = chemically synthesized
  source 1..20: mol_type = other DNA
aggaaagagtatagagacca

SEQ ID NO: 30689 - DNA, 20 bp, synthetic construct
  misc_feature 1..20: note = chemically synthesized
  source 1..20: mol_type = other DNA
ggaaagagtatagagaccag

SEQ ID NO: 30690 - DNA, 20 bp, synthetic construct
  misc_feature 1..20: note = chemically synthesized
  source 1..20: mol_type = other DNA
gaaagagtatagagaccaga

SEQ ID NO: 30691 - DNA, 20 bp, synthetic construct
  misc_feature 1..20: note = chemically synthesized
  source 1..20: mol_type = other DNA
gcttctgccatcctgacttc

SEQ ID NO: 30692 - DNA, 20 bp, synthetic construct
  misc_feature 1..20: note = chemically synthesized
  source 1..20: mol_type = other DNA
cctgacttctagacatgatc

SEQ ID NO: 30693 - DNA, 20 bp, synthetic construct
  misc_feature 1..20: note = chemically synthesized
  source 1..20: mol_type = other DNA
ctgacttctagacatgatcc

SEQ ID NO: 30694 - DNA, 20 bp, synthetic construct
  misc_feature 1..20: note = chemically synthesized
  source 1..20: mol_type = other DNA
tgacttctagacatgatcca

SEQ ID NO: 30695 - DNA, 20 bp, synthetic construct
  misc_feature 1..20: note = chemically synthesized
  source 1..20: mol_type = other DNA
acttctagacatgatccagg

SEQ ID NO: 30696 - DNA, 20 bp, synthetic construct
  misc_feature 1..20: note = chemically synthesized
  source 1..20: mol_type = other DNA
cttctagacatgatccaggg

SEQ ID NO: 30697 - DNA, 20 bp, synthetic construct
  misc_feature 1..20: note = chemically synthesized
  source 1..20: mol_type = other DNA
ttctagacatgatccaggga

SEQ ID NO: 30698 - DNA, 20 bp, synthetic construct
  misc_feature 1..20: note = chemically synthesized
  source 1..20: mol_type = other DNA
tctagacatgatccagggag

SEQ ID NO: 30699 - DNA, 20 bp, synthetic construct
  misc_feature 1..20: note = chemically synthesized
  source 1..20: mol_type = other DNA
gacatgatccagggaggggc

SEQ ID NO: 30700 - DNA, 20 bp, synthetic construct
  misc_feature 1..20: note = chemically synthesized
  source 1..20: mol_type = other DNA
gatccagggaggggctggcc

SEQ ID NO: 30701 - DNA, 20 bp, synthetic construct
  misc_feature 1..20: note = chemically synthesized
  source 1..20: mol_type = other DNA
gaggggctggcctggccatg

SEQ ID NO: 30702 - DNA, 20 bp, synthetic construct
  misc_feature 1..20: note = chemically synthesized
  source 1..20: mol_type = other DNA
aggggctggcctggccatgc

SEQ ID NO: 30703 - DNA, 20 bp, synthetic construct
  misc_feature 1..20: note = chemically synthesized
  source 1..20: mol_type = other DNA
ctggccatgcaggcactcat

SEQ ID NO: 30704 - DNA, 20 bp, synthetic construct
  misc_feature 1..20: note = chemically synthesized
  source 1..20: mol_type = other DNA
tggccatgcaggcactcatc

SEQ ID NO: 30705 - DNA, 20 bp, synthetic construct
  misc_feature 1..20: note = chemically synthesized
  source 1..20: mol_type = other DNA
ggccatgcaggcactcatca

SEQ ID NO: 30706 - DNA, 20 bp, synthetic construct
  misc_feature 1..20: note = chemically synthesized
  source 1..20: mol_type = other DNA
gccatgcaggcactcatcag

SEQ ID NO: 30707 - DNA, 20 bp, synthetic construct
  misc_feature 1..20: note = chemically synthesized
  source 1..20: mol_type = other DNA
catgcaggcactcatcaggg

SEQ ID NO: 30708 - DNA, 20 bp, synthetic construct
  misc_feature 1..20: note = chemically synthesized
  source 1..20: mol_type = other DNA
caggcactcatcaggggagt

SEQ ID NO: 30709 - DNA, 20 bp, synthetic construct
  misc_feature 1..20: note = chemically synthesized
  source 1..20: mol_type = other DNA
aggcactcatcaggggagtg

SEQ ID NO: 30710 - DNA, 20 bp, synthetic construct
  misc_feature 1..20: note = chemically synthesized
  source 1..20: mol_type = other DNA
cactcatcaggggagtgagg

SEQ ID NO: 30711 - DNA, 20 bp, synthetic construct
  misc_feature 1..20: note = chemically synthesized
  source 1..20: mol_type = other DNA
agtgaggcagccctgcctcc

SEQ ID NO: 30712 - DNA, 20 bp, synthetic construct
  misc_feature 1..20: note = chemically synthesized
  source 1..20: mol_type = other DNA
ctgcctcctggccttcctaa

SEQ ID NO: 30713 - DNA, 20 bp, synthetic construct
  misc_feature 1..20: note = chemically synthesized
  source 1..20: mol_type = other DNA
gccttcctaacagaatactg

SEQ ID NO: 30714 - DNA, 20 bp, synthetic construct
  misc_feature 1..20: note = chemically synthesized
  source 1..20: mol_type = other DNA
cctaacagaatactgcagat

SEQ ID NO: 30715 - DNA, 20 bp, synthetic construct
  misc_feature 1..20: note = chemically synthesized
  source 1..20: mol_type = other DNA
agatgagctcgcctcttttc

SEQ ID NO: 30716 - DNA, 20 bp, synthetic construct
  misc_feature 1..20: note = chemically synthesized
  source 1..20: mol_type = other DNA
gagctcgcctcttttccagc

SEQ ID NO: 30717 - DNA, 20 bp, synthetic construct
  misc_feature 1..20: note = chemically synthesized
  source 1..20: mol_type = other DNA
gctcgcctcttttccagcaa

SEQ ID NO: 30718 - DNA, 20 bp, synthetic construct
  misc_feature 1..20: note = chemically synthesized
  source 1..20: mol_type = other DNA
cgcctcttttccagcaagag

SEQ ID NO: 30719 - DNA, 20 bp, synthetic construct
  misc_feature 1..20: note = chemically synthesized
  source 1..20: mol_type = other DNA
gcctcttttccagcaagaga

SEQ ID NO: 30720 - DNA, 20 bp, synthetic construct
  misc_feature 1..20: note = chemically synthesized
  source 1..20: mol_type = other DNA
cctgttttctgttctttctc

SEQ ID NO: 30721 - DNA, 20 bp, synthetic construct
  misc_feature 1..20: note = chemically synthesized
  source 1..20: mol_type = other DNA
ttctgttctttctctggctc

SEQ ID NO: 30722 - DNA, 20 bp, synthetic construct
  misc_feature 1..20: note = chemically synthesized
  source 1..20: mol_type = other DNA
tctggctctggttctgtgca

SEQ ID NO: 30723 - DNA, 20 bp, synthetic construct
  misc_feature 1..20: note = chemically synthesized
  source 1..20: mol_type = other DNA
tggttctgtgcatagactct

SEQ ID NO: 30724 - DNA, 20 bp, synthetic construct
  misc_feature 1..20: note = chemically synthesized
  source 1..20: mol_type = other DNA
tgcatagactctgagaatat

SEQ ID NO: 30725 - DNA, 20 bp, synthetic construct
  misc_feature 1..20: note = chemically synthesized
  source 1..20: mol_type = other DNA
atagactctgagaatatcag

SEQ ID NO: 30726 - DNA, 20 bp, synthetic construct
  misc_feature 1..20: note = chemically synthesized
  source 1..20: mol_type = other DNA
agactctgagaatatcagaa

SEQ ID NO: 30727 - DNA, 20 bp, synthetic construct
  misc_feature 1..20: note = chemically synthesized
  source 1..20: mol_type = other DNA
aatatcagaagagattctgt

SEQ ID NO: 30728 - DNA, 20 bp, synthetic construct
  misc_feature 1..20: note = chemically synthesized
  source 1..20: mol_type = other DNA
aagagattctgtgagaaccc

SEQ ID NO: 30729 - DNA, 20 bp, synthetic construct
  misc_feature 1..20: note = chemically synthesized
  source 1..20: mol_type = other DNA
ctgtgagaaccctggtttct

SEQ ID NO: 30730 - DNA, 20 bp, synthetic construct
  misc_feature 1..20: note = chemically synthesized
  source 1..20: mol_type = other DNA
tttctaagacttcattttcc

SEQ ID NO: 30731 - DNA, 20 bp, synthetic construct
  misc_feature 1..20: note = chemically synthesized
  source 1..20: mol_type = other DNA
attttccaagtgaaaaatct

SEQ ID NO: 30732 - DNA, 20 bp, synthetic construct
  misc_feature 1..20: note = chemically synthesized
  source 1..20: mol_type = other DNA
ttttccaagtgaaaaatcta

SEQ ID NO: 30733 - DNA, 20 bp, synthetic construct
  misc_feature 1..20: note = chemically synthesized
  source 1..20: mol_type = other DNA
caagtgaaaaatctaaggcc

SEQ ID NO: 30734 - DNA, 20 bp, synthetic construct
  misc_feature 1..20: note = chemically synthesized
  source 1..20: mol_type = other DNA
aaggcccagactgctgtata

SEQ ID NO: 30735 - DNA, 20 bp, synthetic construct
  misc_feature 1..20: note = chemically synthesized
  source 1..20: mol_type = other DNA
gcccagactgctgtatatgg

SEQ ID NO: 30736 - DNA, 20 bp, synthetic construct
  misc_feature 1..20: note = chemically synthesized
  source 1..20: mol_type = other DNA
gtggttcacacttataatcc

SEQ ID NO: 30737 - DNA, 20 bp, synthetic construct
  misc_feature 1..20: note = chemically synthesized
  source 1..20: mol_type = other DNA
cacttataatcctggcaact

SEQ ID NO: 30738 - DNA, 20 bp, synthetic construct
  misc_feature 1..20: note = chemically synthesized
  source 1..20: mol_type = other DNA
ttataatcctggcaacttgg

SEQ ID NO: 30739 - DNA, 20 bp, synthetic construct
  misc_feature 1..20: note = chemically synthesized
  source 1..20: mol_type = other DNA
tcctggcaacttggaagaat

SEQ ID NO: 30740 - DNA, 20 bp, synthetic construct
  misc_feature 1..20: note = chemically synthesized
  source 1..20: mol_type = other DNA
cctggcaacttggaagaata

SEQ ID NO: 30741 - DNA, 20 bp, synthetic construct
  misc_feature 1..20: note = chemically synthesized
  source 1..20: mol_type = other DNA
ggcaacttggaagaataagg

SEQ ID NO: 30742 - DNA, 20 bp, synthetic construct
  misc_feature 1..20: note = chemically synthesized
  source 1..20: mol_type = other DNA
gcaacttggaagaataaggt

SEQ ID NO: 30743 - DNA, 20 bp, synthetic construct
  misc_feature 1..20: note = chemically synthesized
  source 1..20: mol_type = other DNA
aacttggaagaataaggtgg

SEQ ID NO: 30744 - DNA, 20 bp, synthetic construct
  misc_feature 1..20: note = chemically synthesized
  source 1..20: mol_type = other DNA
acttggaagaataaggtggg

SEQ ID NO: 30745 - DNA, 20 bp, synthetic construct
  misc_feature 1..20: note = chemically synthesized
  source 1..20: mol_type = other DNA
gtgggaggattgcttgaatc

SEQ ID NO: 30746 - DNA, 20 bp, synthetic construct
  misc_feature 1..20: note = chemically synthesized
  source 1..20: mol_type = other DNA
ggattgcttgaatccggttt

SEQ ID NO: 30747 - DNA, 20 bp, synthetic construct
  misc_feature 1..20: note = chemically synthesized
  source 1..20: mol_type = other DNA
ttgaatccggtttgagttta

SEQ ID NO: 30748 - DNA, 20 bp, synthetic construct
  misc_feature 1..20: note = chemically synthesized
  source 1..20: mol_type = other DNA
atccggtttgagtttacagt

SEQ ID NO: 30749 - DNA, 20 bp, synthetic construct
  misc_feature 1..20: note = chemically synthesized
  source 1..20: mol_type = other DNA
atgattacaccactgcactg

SEQ ID NO: 30750 - DNA, 20 bp, synthetic construct
  misc_feature 1..20: note = chemically synthesized
  source 1..20: mol_type = other DNA
tacaccactgcactgtagcc

SEQ ID NO: 30751 - DNA, 20 bp, synthetic construct
  misc_feature 1..20: note = chemically synthesized
  source 1..20: mol_type = other DNA
acaccactgcactgtagcct

SEQ ID NO: 30752 - DNA, 20 bp, synthetic construct
  misc_feature 1..20: note = chemically synthesized
  source 1..20: mol_type = other DNA
ctgcactgtagcctgggtaa

SEQ ID NO: 30753 - DNA, 20 bp, synthetic construct
  misc_feature 1..20: note = chemically synthesized
  source 1..20: mol_type = other DNA
gcactgtagcctgggtaaca

SEQ ID NO: 30754 - DNA, 20 bp, synthetic construct
  misc_feature 1..20: note = chemically synthesized
  source 1..20: mol_type = other DNA
tgtagcctgggtaacagagc

SEQ ID NO: 30755 - DNA, 20 bp, synthetic construct
  misc_feature 1..20: note = chemically synthesized
  source 1..20: mol_type = other DNA
atttctaaaaacaacaaaca

SEQ ID NO: 30756 - DNA, 20 bp, synthetic construct
  misc_feature 1..20: note = chemically synthesized
  source 1..20: mol_type = other DNA
aaacaaagaaacaacaacaa

SEQ ID NO: 30757 - DNA, 20 bp, synthetic construct
  misc_feature 1..20: note = chemically synthesized
  source 1..20: mol_type = other DNA
aacaacaacaaaagaaaaca

SEQ ID NO: 30758 - DNA, 20 bp, synthetic construct
  misc_feature 1..20: note = chemically synthesized
  source 1..20: mol_type = other DNA
caaagaaaaaaaaatcccat

SEQ ID NO: 30759 - DNA, 20 bp, synthetic construct
  misc_feature 1..20: note = chemically synthesized
  source 1..20: mol_type = other DNA
aaagaaaaaaaaatcccatt

SEQ ID NO: 30760 - DNA, 20 bp, synthetic construct
  misc_feature 1..20: note = chemically synthesized
  source 1..20: mol_type = other DNA
aaaaaaaatcccattaggct

SEQ ID NO: 30761 - DNA, 20 bp, synthetic construct
  misc_feature 1..20: note = chemically synthesized
  source 1..20: mol_type = other DNA
aaatcccattaggcttagtg

SEQ ID NO: 30762 - DNA, 20 bp, synthetic construct
  misc_feature 1..20: note = chemically synthesized
  source 1..20: mol_type = other DNA
aatcccattaggcttagtgc

SEQ ID NO: 30763 - DNA, 20 bp, synthetic construct
  misc_feature 1..20: note = chemically synthesized
  source 1..20: mol_type = other DNA
atcccattaggcttagtgca

SEQ ID NO: 30764 - DNA, 20 bp, synthetic construct
  misc_feature 1..20: note = chemically synthesized
  source 1..20: mol_type = other DNA
taggcttagtgcagggaatg

SEQ ID NO: 30765 - DNA, 20 bp, synthetic construct
  misc_feature 1..20: note = chemically synthesized
  source 1..20: mol_type = other DNA
aggcttagtgcagggaatgt

SEQ ID NO: 30766 - DNA, 20 bp, synthetic construct
  misc_feature 1..20: note = chemically synthesized
  source 1..20: mol_type = other DNA
ggcttagtgcagggaatgtg

SEQ ID NO: 30767 - DNA, 20 bp, synthetic construct
  misc_feature 1..20: note = chemically synthesized
  source 1..20: mol_type = other DNA
gggaatgtggggaatccatt

SEQ ID NO: 30768 - DNA, 20 bp, synthetic construct
  misc_feature 1..20: note = chemically synthesized
  source 1..20: mol_type = other DNA
tgtggggaatccatttggct

SEQ ID NO: 30769 - DNA, 20 bp, synthetic construct
  misc_feature 1..20: note = chemically synthesized
  source 1..20: mol_type = other DNA
gtggggaatccatttggcta

SEQ ID NO: 30770 - DNA, 20 bp, synthetic construct
  misc_feature 1..20: note = chemically synthesized
  source 1..20: mol_type = other DNA
gctaaggacattcaaacatt

SEQ ID NO: 30771 - DNA, 20 bp, synthetic construct
  misc_feature 1..20: note = chemically synthesized
  source 1..20: mol_type = other DNA
ctaaggacattcaaacattt

SEQ ID NO: 30772 - DNA, 20 bp, synthetic construct
  misc_feature 1..20: note = chemically synthesized
  source 1..20: mol_type = other DNA
taaggacattcaaacatttg

SEQ ID NO: 30773 - DNA, 20 bp, synthetic construct
  misc_feature 1..20: note = chemically synthesized
  source 1..20: mol_type = other DNA
aaggacattcaaacatttgg

SEQ ID NO: 30774 - DNA, 20 bp, synthetic construct
  misc_feature 1..20: note = chemically synthesized
  source 1..20: mol_type = other DNA
cattcaaacatttgggggaa

SEQ ID NO: 30775 - DNA, 20 bp, synthetic construct
  misc_feature 1..20: note = chemically synthesized
  source 1..20: mol_type = other DNA
gaaaagccttaattgtaact

SEQ ID NO: 30776 - DNA, 20 bp, synthetic construct
  misc_feature 1..20: note = chemically synthesized
  source 1..20: mol_type = other DNA
taactgagaccatgtctttt

SEQ ID NO: 30777 - DNA, 20 bp, synthetic construct
  misc_feature 1..20: note = chemically synthesized
  source 1..20: mol_type = other DNA
aactgagaccatgtcttttt

SEQ ID NO: 30778 - DNA, 20 bp, synthetic construct
  misc_feature 1..20: note = chemically synthesized
  source 1..20: mol_type = other DNA
attacccactcctgaaaccc

SEQ ID NO: 30779 - DNA, 20 bp, synthetic construct
  misc_feature 1..20: note = chemically synthesized
  source 1..20: mol_type = other DNA
cactcctgaaaccccggcac

SEQ ID NO: 30780 - DNA, 20 bp, synthetic construct
  misc_feature 1..20: note = chemically synthesized
  source 1..20: mol_type = other DNA
cctgaaaccccggcacaaga

SEQ ID NO: 30781 - DNA, 20 bp, synthetic construct
  misc_feature 1..20: note = chemically synthesized
  source 1..20: mol_type = other DNA
gaaaccccggcacaagacag

SEQ ID NO: 30782 - DNA, 20 bp, synthetic construct
  misc_feature 1..20: note = chemically synthesized
  source 1..20: mol_type = other DNA
ccccggcacaagacagtagt

SEQ ID NO: 30783 - DNA, 20 bp, synthetic construct
  misc_feature 1..20: note = chemically synthesized
  source 1..20: mol_type = other DNA
aagacagtagtgagactcac

SEQ ID NO: 30784 - DNA, 20 bp, synthetic construct
  misc_feature 1..20: note = chemically synthesized
  source 1..20: mol_type = other DNA
acagtagtgagactcaccag

SEQ ID NO: 30785 - DNA, 20 bp, synthetic construct
  misc_feature 1..20: note = chemically synthesized
  source 1..20: mol_type = other DNA
cagtagtgagactcaccagc

SEQ ID NO: 30786 - DNA, 20 bp, synthetic construct
  misc_feature 1..20: note = chemically synthesized
  source 1..20: mol_type = other DNA
caggtaataacaaaaatgtg

SEQ ID NO: 30787 - DNA, 20 bp, synthetic construct
  misc_feature 1..20: note = chemically synthesized
  source 1..20: mol_type = other DNA
aacaaaaatgtgaagccaat

SEQ ID NO: 30788 - DNA, 20 bp, synthetic construct
  misc_feature 1..20: note = chemically synthesized
  source 1..20: mol_type = other DNA
aaaaatgtgaagccaatgag

SEQ ID NO: 30789 - DNA, 20 bp, synthetic construct
  misc_feature 1..20: note = chemically synthesized
  source 1..20: mol_type = other DNA
aaaatgtgaagccaatgagt

SEQ ID NO: 30790 - DNA, 20 bp, synthetic construct
  misc_feature 1..20: note = chemically synthesized
  source 1..20: mol_type = other DNA
aagccaatgagtaggttcca

SEQ ID NO: 30791 - DNA, 20 bp, synthetic construct
  misc_feature 1..20: note = chemically synthesized
  source 1..20: mol_type = other DNA
agccaatgagtaggttccaa

SEQ ID NO: 30792 - DNA, 20 bp, synthetic construct
  misc_feature 1..20: note = chemically synthesized
  source 1..20: mol_type = other DNA
caatgagtaggttccaaagg

SEQ ID NO: 30793 - DNA, 20 bp, synthetic construct
  misc_feature 1..20: note = chemically synthesized
  source 1..20: mol_type = other DNA
gagtaggttccaaaggaaga

SEQ ID NO: 30794 - DNA, 20 bp, synthetic construct
  misc_feature 1..20: note = chemically synthesized
  source 1..20: mol_type = other DNA
taggttccaaaggaagaaag

SEQ ID NO: 30795 - DNA, 20 bp, synthetic construct
  misc_feature 1..20: note = chemically synthesized
  source 1..20: mol_type = other DNA
ggttccaaaggaagaaagaa

SEQ ID NO: 30796 - DNA, 20 bp, synthetic construct
  misc_feature 1..20: note = chemically synthesized
  source 1..20: mol_type = other DNA
caaaggaagaaagaagagta

SEQ ID NO: 30797 - DNA, 20 bp, synthetic construct
  misc_feature 1..20: note = chemically synthesized
  source 1..20: mol_type = other DNA
gaagaaagaagagtatagat

SEQ ID NO: 30798 - DNA, 20 bp, synthetic construct
  misc_feature 1..20: note = chemically synthesized
  source 1..20: mol_type = other DNA
aagaaagaagagtatagata

SEQ ID NO: 30799 - DNA, 20 bp, synthetic construct
  misc_feature 1..20: note = chemically synthesized
  source 1..20: mol_type = other DNA
agtatagataaggatgacac

SEQ ID NO: 30800 - DNA, 20 bp, synthetic construct
  misc_feature 1..20: note = chemically synthesized
  source 1..20: mol_type = other DNA
gtatagataaggatgacaca

SEQ ID NO: 30801 - DNA, 20 bp, synthetic construct
  misc_feature 1..20: note = chemically synthesized
  source 1..20: mol_type = other DNA
tatagataaggatgacacaa

SEQ ID NO: 30802 - DNA, 20 bp, synthetic construct
  misc_feature 1..20: note = chemically synthesized
  source 1..20: mol_type = other DNA
aggatgacacaagggtcact

SEQ ID NO: 30803 - DNA, 20 bp, synthetic construct
  misc_feature 1..20: note = chemically synthesized
  source 1..20: mol_type = other DNA
gatgacacaagggtcactga

SEQ ID NO: 30804 - DNA, 20 bp, synthetic construct
  misc_feature 1..20: note = chemically synthesized
  source 1..20: mol_type = other DNA
atgacacaagggtcactgag

SEQ ID NO: 30805 - DNA, 20 bp, synthetic construct
  misc_feature 1..20: note = chemically synthesized
  source 1..20: mol_type = other DNA
caagggtcactgagaggcac

SEQ ID NO: 30806 - DNA, 20 bp, synthetic construct
  misc_feature 1..20: note = chemically synthesized
  source 1..20: mol_type = other DNA
aagggtcactgagaggcaca

SEQ ID NO: 30807 - DNA, 20 bp, synthetic construct
  misc_feature 1..20: note = chemically synthesized
  source 1..20: mol_type = other DNA
cactgagaggcacaaggctg

SEQ ID NO: 30808 - DNA, 20 bp, synthetic construct
  misc_feature 1..20: note = chemically synthesized
  source 1..20: mol_type = other DNA
gcacaaggctgtggctgtca

SEQ ID NO: 30809 - DNA, 20 bp, synthetic construct
  misc_feature 1..20: note = chemically synthesized
  source 1..20: mol_type = other DNA
caaggctgtggctgtcacag

SEQ ID NO: 30810 - DNA, 20 bp, synthetic construct
  misc_feature 1..20: note = chemically synthesized
  source 1..20: mol_type = other DNA
aaggctgtggctgtcacaga

SEQ ID NO: 30811 - DNA, 20 bp, synthetic construct
  misc_feature 1..20: note = chemically synthesized
  source 1..20: mol_type = other DNA
cagaaggatttatcctccta

SEQ ID NO: 30812 - DNA, 20 bp, synthetic construct
  misc_feature 1..20: note = chemically synthesized
  source 1..20: mol_type = other DNA
atttatcctcctaaagacca

SEQ ID NO: 30813 - DNA, 20 bp, synthetic construct
  misc_feature 1..20: note = chemically synthesized
  source 1..20: mol_type = other DNA
cctcctaaagaccatggctc

SEQ ID NO: 30814 - DNA, 20 bp, synthetic construct
  misc_feature 1..20: note = chemically synthesized
  source 1..20: mol_type = other DNA
ctaaagaccatggctccagc

SEQ ID NO: 30815 - DNA, 20 bp, synthetic construct
  misc_feature 1..20: note = chemically synthesized
  source 1..20: mol_type = other DNA
taaagaccatggctccagct

SEQ ID NO: 30816 - DNA, 20 bp, synthetic construct
  misc_feature 1..20: note = chemically synthesized
  source 1..20: mol_type = other DNA
aagaccatggctccagctgg

SEQ ID NO: 30817 - DNA, 20 bp, synthetic construct
  misc_feature 1..20: note = chemically synthesized
  source 1..20: mol_type = other DNA
ctccagctgggagaacttaa

SEQ ID NO: 30818 - DNA, 20 bp, synthetic construct
  misc_feature 1..20: note = chemically synthesized
  source 1..20: mol_type = other DNA
ggagaacttaatggtaaaca

SEQ ID NO: 30819 - DNA, 20 bp, synthetic construct
  misc_feature 1..20: note = chemically synthesized
  source 1..20: mol_type = other DNA
gagaacttaatggtaaacaa

SEQ ID NO: 30820 - DNA, 20 bp, synthetic construct
  misc_feature 1..20: note = chemically synthesized
  source 1..20: mol_type = other DNA
agaacttaatggtaaacaaa

SEQ ID NO: 30821 - DNA, 20 bp, synthetic construct
  misc_feature 1..20: note = chemically synthesized
  source 1..20: mol_type = other DNA
aatggtaaacaaagggtccc

SEQ ID NO: 30822 - DNA, 20 bp, synthetic construct
  misc_feature 1..20: note = chemically synthesized
  source 1..20: mol_type = other DNA
atggtaaacaaagggtcccc

SEQ ID NO: 30823 - DNA, 20 bp, synthetic construct
  misc_feature 1..20: note = chemically synthesized
  source 1..20: mol_type = other DNA
tggtaaacaaagggtcccca

SEQ ID NO: 30824 - DNA, 20 bp, synthetic construct
  misc_feature 1..20: note = chemically synthesized
  source 1..20: mol_type = other DNA
aaacaaagggtccccagggc

SEQ ID NO: 30825 - DNA, 20 bp, synthetic construct
  misc_feature 1..20: note = chemically synthesized
  source 1..20: mol_type = other DNA
aacaaagggtccccagggct

SEQ ID NO: 30826 - DNA, 20 bp, synthetic construct
  misc_feature 1..20: note = chemically synthesized
  source 1..20: mol_type = other DNA
ccccagggctgggaatccta

SEQ ID NO: 30827 - DNA, 20 bp, synthetic construct
  misc_feature 1..20: note = chemically synthesized
  source 1..20: mol_type = other DNA
cccagggctgggaatcctat

SEQ ID NO: 30828 - DNA, 20 bp, synthetic construct
  misc_feature 1..20: note = chemically synthesized
  source 1..20: mol_type = other DNA
agggctgggaatcctatggg

SEQ ID NO: 30829 - DNA, 20 bp, synthetic construct
  misc_feature 1..20: note = chemically synthesized
  source 1..20: mol_type = other DNA
gggctgggaatcctatgggc

SEQ ID NO: 30830 - DNA, 20 bp, synthetic construct
  misc_feature 1..20: note = chemically synthesized
  source 1..20: mol_type = other DNA
atctccacccctgtctcctg

SEQ ID NO: 30831 - DNA, 20 bp, synthetic construct
  misc_feature 1..20: note = chemically synthesized
  source 1..20: mol_type = other DNA
acccctgtctcctgaagctg

SEQ ID NO: 30832 - DNA, 20 bp, synthetic construct
  misc_feature 1..20: note = chemically synthesized
  source 1..20: mol_type = other DNA
ccctgtctcctgaagctgaa

SEQ ID NO: 30833 - DNA, 20 bp, synthetic construct
  misc_feature 1..20: note = chemically synthesized
  source 1..20: mol_type = other DNA
gctgaagagccctaactttt

SEQ ID NO: 30834 - DNA, 20 bp, synthetic construct
  misc_feature 1..20: note = chemically synthesized
  source 1..20: mol_type = other DNA
agccctaactttttagcatt

SEQ ID NO: 30835 - DNA, 20 bp, synthetic construct
  misc_feature 1..20: note = chemically synthesized
  source 1..20: mol_type = other DNA
actttttagcattcagtccc

SEQ ID NO: 30836 - DNA, 20 bp, synthetic construct
  misc_feature 1..20: note = chemically synthesized
  source 1..20: mol_type = other DNA
ctttttagcattcagtcccc

SEQ ID NO: 30837 - DNA, 20 bp, synthetic construct
  misc_feature 1..20: note = chemically synthesized
  source 1..20: mol_type = other DNA
agcattcagtccccaggttt

SEQ ID NO: 30838 - DNA, 20 bp, synthetic construct
  misc_feature 1..20: note = chemically synthesized
  source 1..20: mol_type = other DNA
gtccccaggttttggctaca

SEQ ID NO: 30839 - DNA, 20 bp, synthetic construct
  misc_feature 1..20: note = chemically synthesized
  source 1..20: mol_type = other DNA
acagacatctgctgcaacaa

SEQ ID NO: 30840 - DNA, 20 bp, synthetic construct
  misc_feature 1..20: note = chemically synthesized
  source 1..20: mol_type = other DNA
tgtttatttttaatttcata

SEQ ID NO: 30841 - DNA, 20 bp, synthetic construct
  misc_feature 1..20: note = chemically synthesized
  source 1..20: mol_type = other DNA
ttatttttaatttcataaag

SEQ ID NO: 30842 - DNA, 20 bp, synthetic construct
  misc_feature 1..20: note = chemically synthesized
  source 1..20: mol_type = other DNA
tactgtcttctgttatccac

SEQ ID NO: 30843 - DNA, 20 bp, synthetic construct
  misc_feature 1..20: note = chemically synthesized
  source 1..20: mol_type = other DNA
cttctgttatccactagtaa

SEQ ID NO: 30844 - DNA, 20 bp, synthetic construct
  misc_feature 1..20: note = chemically synthesized
  source 1..20: mol_type = other DNA
gtaatggacccgtcgttttc

SEQ ID NO: 30845 - DNA, 20 bp, synthetic construct
  misc_feature 1..20: note = chemically synthesized
  source 1..20: mol_type = other DNA
aatggacccgtcgttttcca

SEQ ID NO: 30846 - DNA, 20 bp, synthetic construct
  misc_feature 1..20: note = chemically synthesized
  source 1..20: mol_type = other DNA
tggacccgtcgttttccaga

SEQ ID NO: 30847 - DNA, 20 bp, synthetic construct
  misc_feature 1..20: note = chemically synthesized
  source 1..20: mol_type = other DNA
ggacccgtcgttttccagag

SEQ ID NO: 30848 - DNA, 20 bp, synthetic construct
  misc_feature 1..20: note = chemically synthesized
  source 1..20: mol_type = other DNA
ccgtcgttttccagagaggt

SEQ ID NO: 30849 - DNA, 20 bp, synthetic construct
  misc_feature 1..20: note = chemically synthesized
  source 1..20: mol_type = other DNA
ttttccagagaggtcggatg

SEQ ID NO: 30850 - DNA, 20 bp, synthetic construct
  misc_feature 1..20: note = chemically synthesized
  source 1..20: mol_type = other DNA
gaggtcggatgtagtatatg

SEQ ID NO: 30851 - DNA, 20 bp, synthetic construct
  misc_feature 1..20: note = chemically synthesized
  source 1..20: mol_type = other DNA
ggtcggatgtagtatatgaa

SEQ ID NO: 30852 - DNA, 20 bp, synthetic construct
  misc_feature 1..20: note = chemically synthesized
  source 1..20: mol_type = other DNA
gtcggatgtagtatatgaag

SEQ ID NO: 30853 - DNA, 20 bp, synthetic construct
  misc_feature 1..20: note = chemically synthesized
  source 1..20: mol_type = other DNA
gattatccatgtgatgttca

SEQ ID NO: 30854 - DNA, 20 bp, synthetic construct
  misc_feature 1..20: note = chemically synthesized
  source 1..20: mol_type = other DNA
tatccatgtgatgttcacag

SEQ ID NO: 30855 - DNA, 20 bp, synthetic construct
  misc_feature 1..20: note = chemically synthesized
  source 1..20: mol_type = other DNA
taaattgcacatctgccttg

SEQ ID NO: 30856 - DNA, 20 bp, synthetic construct
  misc_feature 1..20: note = chemically synthesized
  source 1..20: mol_type = other DNA
accacaatcaccactacttc

SEQ ID NO: 30857 - DNA, 20 bp, synthetic construct
  misc_feature 1..20: note = chemically synthesized
  source 1..20: mol_type = other DNA
ttttatatttccatttactg

SEQ ID NO: 30858 - DNA, 20 bp, synthetic construct
  misc_feature 1..20: note = chemically synthesized
  source 1..20: mol_type = other DNA
aaattgccctccatctctgc

SEQ ID NO: 30859 - DNA, 20 bp, synthetic construct
  misc_feature 1..20: note = chemically synthesized
  source 1..20: mol_type = other DNA
tctgccagcctctatatctt

SEQ ID NO: 30860 - DNA, 20 bp, synthetic construct
  misc_feature 1..20: note = chemically synthesized
  source 1..20: mol_type = other DNA
agcctctatatctttggacc

SEQ ID NO: 30861 - DNA, 20 bp, synthetic construct
  misc_feature 1..20: note = chemically synthesized
  source 1..20: mol_type = other DNA
ctctatatctttggacctag

SEQ ID NO: 30862 - DNA, 20 bp, synthetic construct
  misc_feature 1..20: note = chemically synthesized
  source 1..20: mol_type = other DNA
tcctaccccaaacaaatgtc

SEQ ID NO: 30863 - DNA, 20 bp, synthetic construct
  misc_feature 1..20: note = chemically synthesized
  source 1..20: mol_type = other DNA
cctaccccaaacaaatgtcc

SEQ ID NO: 30864 - DNA, 20 bp, synthetic construct
  misc_feature 1..20: note = chemically synthesized
  source 1..20: mol_type = other DNA
ccccaaacaaatgtccaggt

SEQ ID NO: 30865 - DNA, 20 bp, synthetic construct
  misc_feature 1..20: note = chemically synthesized
  source 1..20: mol_type = other DNA
aaatgtccaggtcagtgtct

SEQ ID NO: 30866 - DNA, 20 bp, synthetic construct
  misc_feature 1..20: note = chemically synthesized
  source 1..20: mol_type = other DNA
aatgtccaggtcagtgtctc

SEQ ID NO: 30867 - DNA, 20 bp, synthetic construct
  misc_feature 1..20: note = chemically synthesized
  source 1..20: mol_type = other DNA
cagtgtctcaggctttccca

SEQ ID NO: 30868 - DNA, 20 bp, synthetic construct
  misc_feature 1..20: note = chemically synthesized
  source 1..20: mol_type = other DNA
tacttcatctttgaatgcac

SEQ ID NO: 30869 - DNA, 20 bp, synthetic construct
  misc_feature 1..20: note = chemically synthesized
  source 1..20: mol_type = other DNA
gcactggactttccttcaat

SEQ ID NO: 30870 - DNA, 20 bp, synthetic construct
  misc_feature 1..20: note = chemically synthesized
  source 1..20: mol_type = other DNA
ccttcaatgagccctacaac

SEQ ID NO: 30871 - DNA, 20 bp, synthetic construct
  misc_feature 1..20: note = chemically synthesized
  source 1..20: mol_type = other DNA
tcaatgagccctacaacaag

SEQ ID NO: 30872 - DNA, 20 bp, synthetic construct
  misc_feature 1..20: note = chemically synthesized
  source 1..20: mol_type = other DNA
aaacttttttccttcttttc

SEQ ID NO: 30873 - DNA, 20 bp, synthetic construct
  misc_feature 1..20: note = chemically synthesized
  source 1..20: mol_type = other DNA
cttttttccttcttttctgg

SEQ ID NO: 30874 - DNA, 20 bp, synthetic construct
  misc_feature 1..20: note = chemically synthesized
  source 1..20: mol_type = other DNA
tagcaaatgccatcaacatt

SEQ ID NO: 30875 - DNA, 20 bp, synthetic construct
  misc_feature 1..20: note = chemically synthesized
  source 1..20: mol_type = other DNA
aacatttagaaaaaaaaaaa

SEQ ID NO: 30876 - DNA, 20 bp, synthetic construct
  misc_feature 1..20: note = chemically synthesized
  source 1..20: mol_type = other DNA
atagtcttgtacttcttccc

SEQ ID NO: 30877 - DNA, 20 bp, synthetic construct
  misc_feature 1..20: note = chemically synthesized
  source 1..20: mol_type = other DNA
ttcttccccagactatgcta

SEQ ID NO: 30878 - DNA, 20 bp, synthetic construct
  misc_feature 1..20: note = chemically synthesized
  source 1..20: mol_type = other DNA
cagactatgctacagaacct

SEQ ID NO: 30879 - DNA, 20 bp, synthetic construct
  misc_feature 1..20: note = chemically synthesized
  source 1..20: mol_type = other DNA
agaacctgagttaatgtgat

SEQ ID NO: 30880 - DNA, 20 bp, synthetic construct
  misc_feature 1..20: note = chemically synthesized
  source 1..20: mol_type = other DNA
gaacctgagttaatgtgatc

SEQ ID NO: 30881 - DNA, 20 bp, synthetic construct
  misc_feature 1..20: note = chemically synthesized
  source 1..20: mol_type = other DNA
cacaaacacacacacactct

SEQ ID NO: 30882 - DNA, 20 bp, synthetic construct
  misc_feature 1..20: note = chemically synthesized
  source 1..20: mol_type = other DNA
caaacacacacacactcttg

SEQ ID NO: 30883 - DNA, 20 bp, synthetic construct
  misc_feature 1..20: note = chemically synthesized
  source 1..20: mol_type = other DNA
acacacacactcttggagac

SEQ ID NO: 30884 - DNA, 20 bp, synthetic construct
  misc_feature 1..20: note = chemically synthesized
  source 1..20: mol_type = other DNA
cactcttggagactggcatg

SEQ ID NO: 30885 - DNA, 20 bp, synthetic construct
  misc_feature 1..20: note = chemically synthesized
  source 1..20: mol_type = other DNA
cttggagactggcatgaagc

SEQ ID NO: 30886 - DNA, 20 bp, synthetic construct
  misc_feature 1..20: note = chemically synthesized
  source 1..20: mol_type = other DNA
ttggagactggcatgaagca

SEQ ID NO: 30887 - DNA, 20 bp, synthetic construct
  misc_feature 1..20: note = chemically synthesized
  source 1..20: mol_type = other DNA
aaggtattacatcctttaaa

SEQ ID NO: 30888 - DNA, 20 bp, synthetic construct
  misc_feature 1..20: note = chemically synthesized
  source 1..20: mol_type = other DNA
aggtattacatcctttaaat

SEQ ID NO: 30889 - DNA, 20 bp, synthetic construct
  misc_feature 1..20: note = chemically synthesized
  source 1..20: mol_type = other DNA
ggtattacatcctttaaata

SEQ ID NO: 30890 - DNA, 20 bp, synthetic construct
  misc_feature 1..20: note = chemically synthesized
  source 1..20: mol_type = other DNA
tacatcctttaaatagggca

SEQ ID NO: 30891 - DNA, 20 bp, synthetic construct
  misc_feature 1..20: note = chemically synthesized
  source 1..20: mol_type = other DNA
ttaaatagggcatggttgat

SEQ ID NO: 30892 - DNA, 20 bp, synthetic construct
  misc_feature 1..20: note = chemically synthesized
  source 1..20: mol_type = other DNA
aaatagggcatggttgatta

SEQ ID NO: 30893 - DNA, 20 bp, synthetic construct
  misc_feature 1..20: note = chemically synthesized
  source 1..20: mol_type = other DNA
catggttgattagagttgtg

SEQ ID NO: 30894 - DNA, 20 bp, synthetic construct
  misc_feature 1..20: note = chemically synthesized
  source 1..20: mol_type = other DNA
atggttgattagagttgtgt

SEQ ID NO: 30895 - DNA, 20 bp, synthetic construct
  misc_feature 1..20: note = chemically synthesized
  source 1..20: mol_type = other DNA
tggttgattagagttgtgtg

SEQ ID NO: 30896 - DNA, 20 bp, synthetic construct
  misc_feature 1..20: note = chemically synthesized
  source 1..20: mol_type = other DNA
gattagagttgtgtggggat

SEQ ID NO: 30897 - DNA, 20 bp, synthetic construct
  misc_feature 1..20: note = chemically synthesized
  source 1..20: mol_type = other DNA
tgtggggatgagctccaaaa

SEQ ID NO: 30898 - DNA, 20 bp, synthetic construct
  misc_feature 1..20: note = chemically synthesized
  source 1..20: mol_type = other DNA
gtggggatgagctccaaaac

SEQ ID NO: 30899 - DNA, 20 bp, synthetic construct
  misc_feature 1..20: note = chemically synthesized
  source 1..20: mol_type = other DNA
tggggatgagctccaaaacg

SEQ ID NO: 30900 - DNA, 20 bp, synthetic construct
  misc_feature 1..20: note = chemically synthesized
  source 1..20: mol_type = other DNA
gagctccaaaacggggcata

SEQ ID NO: 30901 - DNA, 20 bp, synthetic construct
  misc_feature 1..20: note = chemically synthesized
  source 1..20: mol_type = other DNA
ggggcatacagatctaaaac

SEQ ID NO: 30902 - DNA, 20 bp, synthetic construct
  misc_feature 1..20: note = chemically synthesized
  source 1..20: mol_type = other DNA
gggcatacagatctaaaacc

SEQ ID NO: 30903 - DNA, 20 bp, synthetic construct
  misc_feature 1..20: note = chemically synthesized
  source 1..20: mol_type = other DNA
atacagatctaaaaccagga

SEQ ID NO: 30904 - DNA, 20 bp, synthetic construct
  misc_feature 1..20: note = chemically synthesized
  source 1..20: mol_type = other DNA
acagatctaaaaccaggaca

SEQ ID NO: 30905 - DNA, 20 bp, synthetic construct
  misc_feature 1..20: note = chemically synthesized
  source 1..20: mol_type = other DNA
aaccaggacagagacccatg

SEQ ID NO: 30906 - DNA, 20 bp, synthetic construct
  misc_feature 1..20: note = chemically synthesized
  source 1..20: mol_type = other DNA
ttatgacatgccattgtgat

SEQ ID NO: 30907 - DNA, 20 bp, synthetic construct
  misc_feature 1..20: note = chemically synthesized
  source 1..20: mol_type = other DNA
cattgtgatcagaccacacc

SEQ ID NO: 30908 - DNA, 20 bp, synthetic construct
  misc_feature 1..20: note = chemically synthesized
  source 1..20: mol_type = other DNA
gtgatcagaccacacccaga

SEQ ID NO: 30909 - DNA, 20 bp, synthetic construct
  misc_feature 1..20: note = chemically synthesized
  source 1..20: mol_type = other DNA
atcagaccacacccagacag

SEQ ID NO: 30910 - DNA, 20 bp, synthetic construct
  misc_feature 1..20: note = chemically synthesized
  source 1..20: mol_type = other DNA
agaccacacccagacagaag

SEQ ID NO: 30911 - DNA, 20 bp, synthetic construct
  misc_feature 1..20: note = chemically synthesized
  source 1..20: mol_type = other DNA
gaagtggcaccaccttacac

SEQ ID NO: 30912 - DNA, 20 bp, synthetic construct
  misc_feature 1..20: note = chemically synthesized
  source 1..20: mol_type = other DNA
aagtggcaccaccttacacc

SEQ ID NO: 30913 - DNA, 20 bp, synthetic construct
  misc_feature 1..20: note = chemically synthesized
  source 1..20: mol_type = other DNA
ggcaccaccttacaccgggt

SEQ ID NO: 30914 - DNA, 20 bp, synthetic construct
  misc_feature 1..20: note = chemically synthesized
  source 1..20: mol_type = other DNA
ccttacaccgggtaagtaac

SEQ ID NO: 30915 - DNA, 20 bp, synthetic construct
  misc_feature 1..20: note = chemically synthesized
  source 1..20: mol_type = other DNA
ccgggtaagtaactggttgt

SEQ ID NO: 30916 - DNA, 20 bp, synthetic construct
  misc_feature 1..20: note = chemically synthesized
  source 1..20: mol_type = other DNA
cgggtaagtaactggttgtt

SEQ ID NO: 30917 - DNA, 20 bp, synthetic construct
  misc_feature 1..20: note = chemically synthesized
  source 1..20: mol_type = other DNA
gggtaagtaactggttgtta

SEQ ID NO: 30918 - DNA, 20 bp, synthetic construct
  misc_feature 1..20: note = chemically synthesized
  source 1..20: mol_type = other DNA
aagtaactggttgttagggc

SEQ ID NO: 30919 - DNA, 20 bp, synthetic construct
  misc_feature 1..20: note = chemically synthesized
  source 1..20: mol_type = other DNA
gtaactggttgttagggcca

SEQ ID NO: 30920 - DNA, 20 bp, synthetic construct
  misc_feature 1..20: note = chemically synthesized
  source 1..20: mol_type = other DNA
tggttgttagggccagagtg

SEQ ID NO: 30921 - DNA, 20 bp, synthetic construct
  misc_feature 1..20: note = chemically synthesized
  source 1..20: mol_type = other DNA
ggttgttagggccagagtgt

SEQ ID NO: 30922 - DNA, 20 bp, synthetic construct
  misc_feature 1..20: note = chemically synthesized
  source 1..20: mol_type = other DNA
ttgttagggccagagtgtag

SEQ ID NO: 30923 - DNA, 20 bp, synthetic construct
  misc_feature 1..20: note = chemically synthesized
  source 1..20: mol_type = other DNA
gttagggccagagtgtagga

SEQ ID NO: 30924 - DNA, 20 bp, synthetic construct
  misc_feature 1..20: note = chemically synthesized
  source 1..20: mol_type = other DNA
gggccagagtgtaggagagt

SEQ ID NO: 30925 - DNA, 20 bp, synthetic construct
  misc_feature 1..20: note = chemically synthesized
  source 1..20: mol_type = other DNA
ggccagagtgtaggagagtc

SEQ ID NO: 30926 - DNA, 20 bp, synthetic construct
  misc_feature 1..20: note = chemically synthesized
  source 1..20: mol_type = other DNA
gccagagtgtaggagagtca

SEQ ID NO: 30927 - DNA, 20 bp, synthetic construct
  misc_feature 1..20: note = chemically synthesized
  source 1..20: mol_type = other DNA
gtgtaggagagtcagggtga

SEQ ID NO: 30928 - DNA, 20 bp, synthetic construct
  misc_feature 1..20: note = chemically synthesized
  source 1..20: mol_type = other DNA
tgtaggagagtcagggtgat

SEQ ID NO: 30929 - DNA, 20 bp, synthetic construct
  misc_feature 1..20: note = chemically synthesized
  source 1..20: mol_type = other DNA
gagagtcagggtgataggac

SEQ ID NO: 30930 - DNA, 20 bp, synthetic construct
  misc_feature 1..20: note = chemically synthesized
  source 1..20: mol_type = other DNA
cagggtgataggacaagatg

SEQ ID NO: 30931 - DNA, 20 bp, synthetic construct
  misc_feature 1..20: note = chemically synthesized
  source 1..20: mol_type = other DNA
gggtgataggacaagatgca

SEQ ID NO: 30932 - DNA, 20 bp, synthetic construct
  misc_feature 1..20: note = chemically synthesized
  source 1..20: mol_type = other DNA
gtgataggacaagatgcaga

SEQ ID NO: 30933 - DNA, 20 bp, synthetic construct
  misc_feature 1..20: note = chemically synthesized
  source 1..20: mol_type = other DNA
ataggacaagatgcagagag

SEQ ID NO: 30934 - DNA, 20 bp, synthetic construct
  misc_feature 1..20: note = chemically synthesized
  source 1..20: mol_type = other DNA
taggacaagatgcagagagc

SEQ ID NO: 30935 - DNA, 20 bp, synthetic construct
  misc_feature 1..20: note = chemically synthesized
  source 1..20: mol_type = other DNA
caggatgtcttattaaattg

SEQ ID NO: 30936 - DNA, 20 bp, synthetic construct
  misc_feature 1..20: note = chemically synthesized
  source 1..20: mol_type = other DNA
tcttattaaattgtagttat

SEQ ID NO: 30937 - DNA, 20 bp, synthetic construct
  misc_feature 1..20: note = chemically synthesized
  source 1..20: mol_type = other DNA
cttattaaattgtagttatg

SEQ ID NO: 30938 - DNA, 20 bp, synthetic construct
  misc_feature 1..20: note = chemically synthesized
  source 1..20: mol_type = other DNA
attaaattgtagttatgagg

SEQ ID NO: 30939 - DNA, 20 bp, synthetic construct
  misc_feature 1..20: note = chemically synthesized
  source 1..20: mol_type = other DNA
ttaaattgtagttatgagga

SEQ ID NO: 30940 - DNA, 20 bp, synthetic construct
  misc_feature 1..20: note = chemically synthesized
  source 1..20: mol_type = other DNA
tgtagttatgaggaaggttc

SEQ ID NO: 30941 - DNA, 20 bp, synthetic construct
  misc_feature 1..20: note = chemically synthesized
  source 1..20: mol_type = other DNA
tatgaggaaggttctggctt

SEQ ID NO: 30942 - DNA, 20 bp, synthetic construct
  misc_feature 1..20: note = chemically synthesized
  source 1..20: mol_type = other DNA
aggttctggcttcggtacaa

SEQ ID NO: 30943 - DNA, 20 bp, synthetic construct
  misc_feature 1..20: note = chemically synthesized
  source 1..20: mol_type = other DNA
ggttctggcttcggtacaat

SEQ ID NO: 30944 - DNA, 20 bp, synthetic construct
  misc_feature 1..20: note = chemically synthesized
  source 1..20: mol_type = other DNA
tctggcttcggtacaatagg

SEQ ID NO: 30945 - DNA, 20 bp, synthetic construct
  misc_feature 1..20: note = chemically synthesized
  source 1..20: mol_type = other DNA
ctggcttcggtacaatagga

SEQ ID NO: 30946 - DNA, 20 bp, synthetic construct
  misc_feature 1..20: note = chemically synthesized
  source 1..20: mol_type = other DNA
ggcttcggtacaataggaag

SEQ ID NO: 30947 - DNA, 20 bp, synthetic construct
  misc_feature 1..20: note = chemically synthesized
  source 1..20: mol_type = other DNA
cggtacaataggaaggagct

SEQ ID NO: 30948 - DNA, 20 bp, synthetic construct
  misc_feature 1..20: note = chemically synthesized
  source 1..20: mol_type = other DNA
aggagctgagcatcttcatt

SEQ ID NO: 30949 - DNA, 20 bp, synthetic construct
  misc_feature 1..20: note = chemically synthesized
  source 1..20: mol_type = other DNA
ggagctgagcatcttcattt

SEQ ID NO: 30950 - DNA, 20 bp, synthetic construct
  misc_feature 1..20: note = chemically synthesized
  source 1..20: mol_type = other DNA
agcatcttcatttaggcttg

SEQ ID NO: 30951 - DNA, 20 bp, synthetic construct
  misc_feature 1..20: note = chemically synthesized
  source 1..20: mol_type = other DNA
gcatcttcatttaggcttgt

SEQ ID NO: 30952 - DNA, 20 bp, synthetic construct
  misc_feature 1..20: note = chemically synthesized
  source 1..20: mol_type = other DNA
atcttcatttaggcttgtag

SEQ ID NO: 30953 - DNA, 20 bp, synthetic construct
  misc_feature 1..20: note = chemically synthesized
  source 1..20: mol_type = other DNA
cttcatttaggcttgtagga

SEQ ID NO: 30954 - DNA, 20 bp, synthetic construct
  misc_feature 1..20: note = chemically synthesized
  source 1..20: mol_type = other DNA
ttcatttaggcttgtaggag

SEQ ID NO: 30955 - DNA, 20 bp, synthetic construct
  misc_feature 1..20: note = chemically synthesized
  source 1..20: mol_type = other DNA
tcatttaggcttgtaggaga

SEQ ID NO: 30956 - DNA, 20 bp, synthetic construct
  misc_feature 1..20: note = chemically synthesized
  source 1..20: mol_type = other DNA
gtaggagagggcaccactac

SEQ ID NO: 30957 - DNA, 20 bp, synthetic construct
  misc_feature 1..20: note = chemically synthesized
  source 1..20: mol_type = other DNA
caccactaccagaaaaattt

SEQ ID NO: 30958 - DNA, 20 bp, synthetic construct
  misc_feature 1..20: note = chemically synthesized
  source 1..20: mol_type = other DNA
cagaaaatcctgcatttatt

SEQ ID NO: 30959 - DNA, 20 bp, synthetic construct
  misc_feature 1..20: note = chemically synthesized
  source 1..20: mol_type = other DNA
atttattaagaacatgattt

SEQ ID NO: 30960 - DNA, 20 bp, synthetic construct
  misc_feature 1..20: note = chemically synthesized
  source 1..20: mol_type = other DNA
atgattttagcctatttcac

SEQ ID NO: 30961 - DNA, 20 bp, synthetic construct
  misc_feature 1..20: note = chemically synthesized
  source 1..20: mol_type = other DNA
tgattttagcctatttcact

SEQ ID NO: 30962 - DNA, 20 bp, synthetic construct
  misc_feature 1..20: note = chemically synthesized
  source 1..20: mol_type = other DNA
agcctatttcactgggatcc

SEQ ID NO: 30963 - DNA, 20 bp, synthetic construct
  misc_feature 1..20: note = chemically synthesized
  source 1..20: mol_type = other DNA
atttcactgggatcctagcc

SEQ ID NO: 30964 - DNA, 20 bp, synthetic construct
  misc_feature 1..20: note = chemically synthesized
  source 1..20: mol_type = other DNA
tttcactgggatcctagcca

SEQ ID NO: 30965 - DNA, 20 bp, synthetic construct
  misc_feature 1..20: note = chemically synthesized
  source 1..20: mol_type = other DNA
actgggatcctagccaagga

SEQ ID NO: 30966 - DNA, 20 bp, synthetic construct
  misc_feature 1..20: note = chemically synthesized
  source 1..20: mol_type = other DNA
cctagccaaggacagtataa

SEQ ID NO: 30967 - DNA, 20 bp, synthetic construct
  misc_feature 1..20: note = chemically synthesized
  source 1..20: mol_type = other DNA
aacaatgctgctattattac

SEQ ID NO: 30968 - DNA, 20 bp, synthetic construct
  misc_feature 1..20: note = chemically synthesized
  source 1..20: mol_type = other DNA
gctgctattattaccagcaa

SEQ ID NO: 30969 - DNA, 20 bp, synthetic construct
  misc_feature 1..20: note = chemically synthesized
  source 1..20: mol_type = other DNA
cagcaaatattgctattatt

SEQ ID NO: 30970 - DNA, 20 bp, synthetic construct
  misc_feature 1..20: note = chemically synthesized
  source 1..20: mol_type = other DNA
agcaaatattgctattattc

SEQ ID NO: 30971 - DNA, 20 bp, synthetic construct
  misc_feature 1..20: note = chemically synthesized
  source 1..20: mol_type = other DNA
gcaaatattgctattattca

SEQ ID NO: 30972 - DNA, 20 bp, synthetic construct
  misc_feature 1..20: note = chemically synthesized
  source 1..20: mol_type = other DNA
caaatattgctattattcag

SEQ ID NO: 30973 - DNA, 20 bp, synthetic construct
  misc_feature 1..20: note = chemically synthesized
  source 1..20: mol_type = other DNA
caggggcatctatcacacat

SEQ ID NO: 30974 - DNA, 20 bp, synthetic construct
  misc_feature 1..20: note = chemically synthesized
  source 1..20: mol_type = other DNA
ggcatctatcacacataaga

SEQ ID NO: 30975 - DNA, 20 bp, synthetic construct
  misc_feature 1..20: note = chemically synthesized
  source 1..20: mol_type = other DNA
gcatctatcacacataagat

SEQ ID NO: 30976 - DNA, 20 bp, synthetic construct
  misc_feature 1..20: note = chemically synthesized
  source 1..20: mol_type = other DNA
agataggaaaacaactatct

SEQ ID NO: 30977 - DNA, 20 bp, synthetic construct
  misc_feature 1..20: note = chemically synthesized
  source 1..20: mol_type = other DNA
caactatcttagcgcaatgt

SEQ ID NO: 30978 - DNA, 20 bp, synthetic construct
  misc_feature 1..20: note = chemically synthesized
  source 1..20: mol_type = other DNA
actatcttagcgcaatgtaa

SEQ ID NO: 30979 - DNA, 20 bp, synthetic construct
  misc_feature 1..20: note = chemically synthesized
  source 1..20: mol_type = other DNA
tcttagcgcaatgtaagaga

SEQ ID NO: 30980 - DNA, 20 bp, synthetic construct
  misc_feature 1..20: note = chemically synthesized
  source 1..20: mol_type = other DNA
cgcaatgtaagagatggaca

SEQ ID NO: 30981 - DNA, 20 bp, synthetic construct
  misc_feature 1..20: note = chemically synthesized
  source 1..20: mol_type = other DNA
ggcaattatattaatatttg

SEQ ID NO: 30982 - DNA, 20 bp, synthetic construct
  misc_feature 1..20: note = chemically synthesized
  source 1..20: mol_type = other DNA
gcaattatattaatatttgt

SEQ ID NO: 30983 - DNA, 20 bp, synthetic construct
  misc_feature 1..20: note = chemically synthesized
  source 1..20: mol_type = other DNA
attatattaatatttgtggg

SEQ ID NO: 30984 - DNA, 20 bp, synthetic construct
  misc_feature 1..20: note = chemically synthesized
  source 1..20: mol_type = other DNA
taatatttgtgggtagcacc

SEQ ID NO: 30985 - DNA, 20 bp, synthetic construct
  misc_feature 1..20: note = chemically synthesized
  source 1..20: mol_type = other DNA
tgtgggtagcacctggccca

SEQ ID NO: 30986 - DNA, 20 bp, synthetic construct
  misc_feature 1..20: note = chemically synthesized
  source 1..20: mol_type = other DNA
gtgggtagcacctggcccac

SEQ ID NO: 30987 - DNA, 20 bp, synthetic construct
  misc_feature 1..20: note = chemically synthesized
  source 1..20: mol_type = other DNA
gtagcacctggcccacaggt

SEQ ID NO: 30988 - DNA, 20 bp, synthetic construct
  misc_feature 1..20: note = chemically synthesized
  source 1..20: mol_type = other DNA
tagcacctggcccacaggtg

SEQ ID NO: 30989 - DNA, 20 bp, synthetic construct
  misc_feature 1..20: note = chemically synthesized
  source 1..20: mol_type = other DNA
agcacctggcccacaggtga

SEQ ID NO: 30990 - DNA, 20 bp, synthetic construct
  misc_feature 1..20: note = chemically synthesized
  source 1..20: mol_type = other DNA
cctggcccacaggtgagggc

SEQ ID NO: 30991 - DNA, 20 bp, synthetic construct
  misc_feature 1..20: note = chemically synthesized
  source 1..20: mol_type = other DNA
ctggcccacaggtgagggcc

SEQ ID NO: 30992 - DNA, 20 bp, synthetic construct
  misc_feature 1..20: note = chemically synthesized
  source 1..20: mol_type = other DNA
tggcccacaggtgagggcca

SEQ ID NO: 30993 - DNA, 20 bp, synthetic construct
  misc_feature 1..20: note = chemically synthesized
  source 1..20: mol_type = other DNA
cccacaggtgagggccaggg

SEQ ID NO: 30994 - DNA, 20 bp, synthetic construct
  misc_feature 1..20: note = chemically synthesized
  source 1..20: mol_type = other DNA
ccacaggtgagggccaggga

SEQ ID NO: 30995 - DNA, 20 bp, synthetic construct
  misc_feature 1..20: note = chemically synthesized
  source 1..20: mol_type = other DNA
gccagggaaggccccaacct

SEQ ID NO: 30996 - DNA, 20 bp, synthetic construct
  misc_feature 1..20: note = chemically synthesized
  source 1..20: mol_type = other DNA
aggccccaacctgagctatg

SEQ ID NO: 30997 - DNA, 20 bp, synthetic construct
  misc_feature 1..20: note = chemically synthesized
  source 1..20: mol_type = other DNA
ctgagctatgaagactaatt

SEQ ID NO: 30998 - DNA, 20 bp, synthetic construct
  misc_feature 1..20: note = chemically synthesized
  source 1..20: mol_type = other DNA
gactaattaagaatcaacca

SEQ ID NO: 30999 - DNA, 20 bp, synthetic construct
  misc_feature 1..20: note = chemically synthesized
  source 1..20: mol_type = other DNA
aattaagaatcaaccacaga

SEQ ID NO: 31000 - DNA, 20 bp, synthetic construct
  misc_feature 1..20: note = chemically synthesized
  source 1..20: mol_type = other DNA
attaagaatcaaccacagat

SEQ ID NO: 31001 - DNA, 20 bp, synthetic construct
  misc_feature 1..20: note = chemically synthesized
  source 1..20: mol_type = other DNA
ttaagaatcaaccacagata

SEQ ID NO: 31002 - DNA, 20 bp, synthetic construct
  misc_feature 1..20: note = chemically synthesized
  source 1..20: mol_type = other DNA
caaccacagatagggcttta

SEQ ID NO: 31003 - DNA, 20 bp, synthetic construct
  misc_feature 1..20: note = chemically synthesized
  source 1..20: mol_type = other DNA
cacagatagggctttataga

SEQ ID NO: 31004 - DNA, 20 bp, synthetic construct
  misc_feature 1..20: note = chemically synthesized
  source 1..20: mol_type = other DNA
acagatagggctttatagaa

SEQ ID NO: 31005 - DNA, 20 bp, synthetic construct
  misc_feature 1..20: note = chemically synthesized
  source 1..20: mol_type = other DNA
tatagaaaggtatttccaaa

SEQ ID NO: 31006 - DNA, 20 bp, synthetic construct
  misc_feature 1..20: note = chemically synthesized
  source 1..20: mol_type = other DNA
atagaaaggtatttccaaaa

SEQ ID NO: 31007 - DNA, 20 bp, synthetic construct
  misc_feature 1..20: note = chemically synthesized
  source 1..20: mol_type = other DNA
agaaaggtatttccaaaaag

SEQ ID NO: 31008 - DNA, 20 bp, synthetic construct
  misc_feature 1..20: note = chemically synthesized
  source 1..20: mol_type = other DNA
gaaaggtatttccaaaaagg

SEQ ID NO: 31009 - DNA, 20 bp, synthetic construct
  misc_feature 1..20: note = chemically synthesized
  source 1..20: mol_type = other DNA
aaaggtatttccaaaaagga

SEQ ID NO: 31010 - DNA, 20 bp, synthetic construct
  misc_feature 1..20: note = chemically synthesized
  source 1..20: mol_type = other DNA
aaggtatttccaaaaaggag

SEQ ID NO: 31011 - DNA, 20 bp, synthetic construct
  misc_feature 1..20: note = chemically synthesized
  source 1..20: mol_type = other DNA
gtatttccaaaaaggagggg

SEQ ID NO: 31012 - DNA, 20 bp, synthetic construct
  misc_feature 1..20: note = chemically synthesized
  source 1..20: mol_type = other DNA
ccaaaaaggaggggtagtgt

SEQ ID NO: 31013 - DNA, 20 bp, synthetic construct
  misc_feature 1..20: note = chemically synthesized
  source 1..20: mol_type = other DNA
aaaggaggggtagtgtaagc

SEQ ID NO: 31014 - DNA, 20 bp, synthetic construct
  misc_feature 1..20: note = chemically synthesized
  source 1..20: mol_type = other DNA
aaggaggggtagtgtaagca

SEQ ID NO: 31015 - DNA, 20 bp, synthetic construct
  misc_feature 1..20: note = chemically synthesized
  source 1..20: mol_type = other DNA
aggaggggtagtgtaagcaa

SEQ ID NO: 31016 - DNA, 20 bp, synthetic construct
  misc_feature 1..20: note = chemically synthesized
  source 1..20: mol_type = other DNA
gggtagtgtaagcaagggca

SEQ ID NO: 31017 - DNA, 20 bp, synthetic construct
  misc_feature 1..20: note = chemically synthesized
  source 1..20: mol_type = other DNA
gtagtgtaagcaagggcatg

SEQ ID NO: 31018 - DNA, 20 bp, synthetic construct
  misc_feature 1..20: note = chemically synthesized
  source 1..20: mol_type = other DNA
tagtgtaagcaagggcatgg

SEQ ID NO: 31019 - DNA, 20 bp, synthetic construct
  misc_feature 1..20: note = chemically synthesized
  source 1..20: mol_type = other DNA
gtaagcaagggcatggaggt

SEQ ID NO: 31020 - DNA, 20 bp, synthetic construct
  misc_feature 1..20: note = chemically synthesized
  source 1..20: mol_type = other DNA
taagcaagggcatggaggtg

SEQ ID NO: 31021 - DNA, 20 bp, synthetic construct
  misc_feature 1..20: note = chemically synthesized
  source 1..20: mol_type = other DNA
aagggcatggaggtgaggaa

SEQ ID NO: 31022 - DNA, 20 bp, synthetic construct
  misc_feature 1..20: note = chemically synthesized
  source 1..20: mol_type = other DNA
aaaagttgtttatgtgtttt

SEQ ID NO: 31023 - DNA, 20 bp, synthetic construct
  misc_feature 1..20: note = chemically synthesized
  source 1..20: mol_type = other DNA
ttatgtgttttgagaactat

SEQ ID NO: 31024 - DNA, 20 bp, synthetic construct
  misc_feature 1..20: note = chemically synthesized
  source 1..20: mol_type = other DNA
ttgagaactataagattttc

SEQ ID NO: 31025 - DNA, 20 bp, synthetic construct
  misc_feature 1..20: note = chemically synthesized
  source 1..20: mol_type = other DNA
ggtgatcaaatataacattt

SEQ ID NO: 31026 - DNA, 20 bp, synthetic construct
  misc_feature 1..20: note = chemically synthesized
  source 1..20: mol_type = other DNA
tgatcaaatataacatttaa

SEQ ID NO: 31027 - DNA, 20 bp, synthetic construct
  misc_feature 1..20: note = chemically synthesized
  source 1..20: mol_type = other DNA
atcaaatataacatttaaga

SEQ ID NO: 31028 - DNA, 20 bp, synthetic construct
  misc_feature 1..20: note = chemically synthesized
  source 1..20: mol_type = other DNA
atttaagagagttaatacct

SEQ ID NO: 31029 - DNA, 20 bp, synthetic construct
  misc_feature 1..20: note = chemically synthesized
  source 1..20: mol_type = other DNA
gttaataccttggaataaaa

SEQ ID NO: 31030 - DNA, 20 bp, synthetic construct
  misc_feature 1..20: note = chemically synthesized
  source 1..20: mol_type = other DNA
aataccttggaataaaacag

SEQ ID NO: 31031 - DNA, 20 bp, synthetic construct
  misc_feature 1..20: note = chemically synthesized
  source 1..20: mol_type = other DNA
taccttggaataaaacagta

SEQ ID NO: 31032 - DNA, 20 bp, synthetic construct
  misc_feature 1..20: note = chemically synthesized
  source 1..20: mol_type = other DNA
accttggaataaaacagtag

SEQ ID NO: 31033 - DNA, 20 bp, synthetic construct
  misc_feature 1..20: note = chemically synthesized
  source 1..20: mol_type = other DNA
ttggaataaaacagtagagg

SEQ ID NO: 31034 - DNA, 20 bp, synthetic construct
  misc_feature 1..20: note = chemically synthesized
  source 1..20: mol_type = other DNA
tggaataaaacagtagaggt

SEQ ID NO: 31035 - DNA, 20 bp, synthetic construct
  misc_feature 1..20: note = chemically synthesized
  source 1..20: mol_type = other DNA
aataaaacagtagaggtagg

SEQ ID NO: 31036 - DNA, 20 bp, synthetic construct
  misc_feature 1..20: note = chemically synthesized
  source 1..20: mol_type = other DNA
ataaaacagtagaggtaggc

SEQ ID NO: 31037 - DNA, 20 bp, synthetic construct
  misc_feature 1..20: note = chemically synthesized
  source 1..20: mol_type = other DNA
taaaacagtagaggtaggca

SEQ ID NO: 31038 - DNA, 20 bp, synthetic construct
  misc_feature 1..20: note = chemically synthesized
  source 1..20: mol_type = other DNA
aaaacagtagaggtaggcag

SEQ ID NO: 31039 - DNA, 20 bp, synthetic construct
  misc_feature 1..20: note = chemically synthesized
  source 1..20: mol_type = other DNA
cagtagaggtaggcaggggc

SEQ ID NO: 31040 - DNA, 20 bp, synthetic construct
  misc_feature 1..20: note = chemically synthesized
  source 1..20: mol_type = other DNA
gcaggggcaagaccctgaat

SEQ ID NO: 31041 - DNA, 20 bp, synthetic construct
  misc_feature 1..20: note = chemically synthesized
  source 1..20: mol_type = other DNA
tttatatgacatgtcaaaca

SEQ ID NO: 31042 - DNA, 20 bp, synthetic construct
  misc_feature 1..20: note = chemically synthesized
  source 1..20: mol_type = other DNA
aaacatggtacacattttga

SEQ ID NO: 31043 - DNA, 20 bp, synthetic construct
  misc_feature 1..20: note = chemically synthesized
  source 1..20: mol_type = other DNA
atggtacacattttgatggt

SEQ ID NO: 31044 - DNA, 20 bp, synthetic construct
  misc_feature 1..20: note = chemically synthesized
  source 1..20: mol_type = other DNA
tggtacacattttgatggtt

SEQ ID NO: 31045 - DNA, 20 bp, synthetic construct
  misc_feature 1..20: note = chemically synthesized
  source 1..20: mol_type = other DNA
ttttgatggttgggtttaaa

SEQ ID NO: 31046 - DNA, 20 bp, synthetic construct
  misc_feature 1..20: note = chemically synthesized
  source 1..20: mol_type = other DNA
tttgatggttgggtttaaaa

SEQ ID NO: 31047 - DNA, 20 bp, synthetic construct
  misc_feature 1..20: note = chemically synthesized
  source 1..20: mol_type = other DNA
gatggttgggtttaaaaagg

SEQ ID NO: 31048 - DNA, 20 bp, synthetic construct
  misc_feature 1..20: note = chemically synthesized
  source 1..20: mol_type = other DNA
atggttgggtttaaaaaggc

SEQ ID NO: 31049 - DNA, 20 bp, synthetic construct
  misc_feature 1..20: note = chemically synthesized
  source 1..20: mol_type = other DNA
ggttgggtttaaaaaggcag

SEQ ID NO: 31050 - DNA, 20 bp, synthetic construct
  misc_feature 1..20: note = chemically synthesized
  source 1..20: mol_type = other DNA
gagataacaatcatattttc

SEQ ID NO: 31051 - DNA, 20 bp, synthetic construct
  misc_feature 1..20: note = chemically synthesized
  source 1..20: mol_type = other DNA
gataacaatcatattttcca

SEQ ID NO: 31052 - DNA, 20 bp, synthetic construct
  misc_feature 1..20: note = chemically synthesized
  source 1..20: mol_type = other DNA
agtacattgttaacaatatg

SEQ ID NO: 31053 - DNA, 20 bp, synthetic construct
  misc_feature 1..20: note = chemically synthesized
  source 1..20: mol_type = other DNA
gtacattgttaacaatatgc

SEQ ID NO: 31054 - DNA, 20 bp, synthetic construct
  misc_feature 1..20: note = chemically synthesized
  source 1..20: mol_type = other DNA
cattgttaacaatatgcagg

SEQ ID NO: 31055 - DNA, 20 bp, synthetic construct
  misc_feature 1..20: note = chemically synthesized
  source 1..20: mol_type = other DNA
attgttaacaatatgcagga

SEQ ID NO: 31056 - DNA, 20 bp, synthetic construct
  misc_feature 1..20: note = chemically synthesized
  source 1..20: mol_type = other DNA
caatatgcaggaaggattta

SEQ ID NO: 31057 - DNA, 20 bp, synthetic construct
  misc_feature 1..20: note = chemically synthesized
  source 1..20: mol_type = other DNA
gaaggatttaaagtctgcac

SEQ ID NO: 31058 - DNA, 20 bp, synthetic construct
  misc_feature 1..20: note = chemically synthesized
  source 1..20: mol_type = other DNA
tttaaagtctgcactggaaa

SEQ ID NO: 31059 - DNA, 20 bp, synthetic construct
  misc_feature 1..20: note = chemically synthesized
  source 1..20: mol_type = other DNA
actggaaacagatgttattt

SEQ ID NO: 31060 - DNA, 20 bp, synthetic construct
  misc_feature 1..20: note = chemically synthesized
  source 1..20: mol_type = other DNA
acagatgttattttggtgta

SEQ ID NO: 31061 - DNA, 20 bp, synthetic construct
  misc_feature 1..20: note = chemically synthesized
  source 1..20: mol_type = other DNA
agatgttattttggtgtatg

SEQ ID NO: 31062 - DNA, 20 bp, synthetic construct
  misc_feature 1..20: note = chemically synthesized
  source 1..20: mol_type = other DNA
gttattttggtgtatggagc

SEQ ID NO: 31063 - DNA, 20 bp, synthetic construct
  misc_feature 1..20: note = chemically synthesized
  source 1..20: mol_type = other DNA
ttggtgtatggagctggatg

SEQ ID NO: 31064 - DNA, 20 bp, synthetic construct
  misc_feature 1..20: note = chemically synthesized
  source 1..20: mol_type = other DNA
ggatgcagatatgtaattga

SEQ ID NO: 31065 - DNA, 20 bp, synthetic construct
  misc_feature 1..20: note = chemically synthesized
  source 1..20: mol_type = other DNA
gtaattgacagctttttacg

SEQ ID NO: 31066 - DNA, 20 bp, synthetic construct
  misc_feature 1..20: note = chemically synthesized
  source 1..20: mol_type = other DNA
cgtagataaacaatactgtt

SEQ ID NO: 31067 - DNA, 20 bp, synthetic construct
  misc_feature 1..20: note = chemically synthesized
  source 1..20: mol_type = other DNA
agataaacaatactgtttag

SEQ ID NO: 31068 - DNA, 20 bp, synthetic construct
  misc_feature 1..20: note = chemically synthesized
  source 1..20: mol_type = other DNA
ttagtggataacctaccatt

SEQ ID NO: 31069 - DNA, 20 bp, synthetic construct
  misc_feature 1..20: note = chemically synthesized
  source 1..20: mol_type = other DNA
agtggataacctaccattta

SEQ ID NO: 31070 - DNA, 20 bp, synthetic construct
  misc_feature 1..20: note = chemically synthesized
  source 1..20: mol_type = other DNA
ttaaactaacatctgtataa

SEQ ID NO: 31071 - DNA, 20 bp, synthetic construct
  misc_feature 1..20: note = chemically synthesized
  source 1..20: mol_type = other DNA
ttctctgaattatataattg

SEQ ID NO: 31072 - DNA, 20 bp, synthetic construct
  misc_feature 1..20: note = chemically synthesized
  source 1..20: mol_type = other DNA
tctctgaattatataattga

SEQ ID NO: 31073 - DNA, 20 bp, synthetic construct
  misc_feature 1..20: note = chemically synthesized
  source 1..20: mol_type = other DNA
gaattatataattgaaggac

SEQ ID NO: 31074 - DNA, 20 bp, synthetic construct
  misc_feature 1..20: note = chemically synthesized
  source 1..20: mol_type = other DNA
taattgaaggaccagtttcc

SEQ ID NO: 31075 - DNA, 20 bp, synthetic construct
  misc_feature 1..20: note = chemically synthesized
  source 1..20: mol_type = other DNA
aaggaccagtttccaagcaa

SEQ ID NO: 31076 - DNA, 20 bp, synthetic construct
  misc_feature 1..20: note = chemically synthesized
  source 1..20: mol_type = other DNA
tttatttgaaaaccaaatga

SEQ ID NO: 31077 - DNA, 20 bp, synthetic construct
  misc_feature 1..20: note = chemically synthesized
  source 1..20: mol_type = other DNA
gaaaaccaaatgaaagaact

SEQ ID NO: 31078 - DNA, 20 bp, synthetic construct
  misc_feature 1..20: note = chemically synthesized
  source 1..20: mol_type = other DNA
ttattgctctaaatgacctt

SEQ ID NO: 31079 - DNA, 20 bp, synthetic construct
  misc_feature 1..20: note = chemically synthesized
  source 1..20: mol_type = other DNA
tgttttatcatatcacaaaa

SEQ ID NO: 31080 - DNA, 20 bp, synthetic construct
  misc_feature 1..20: note = chemically synthesized
  source 1..20: mol_type = other DNA
tcacaaaatagtcctctttg

SEQ ID NO: 31081 - DNA, 20 bp, synthetic construct
  misc_feature 1..20: note = chemically synthesized
  source 1..20: mol_type = other DNA
aattttcattgacgtgcatt

SEQ ID NO: 31082 - DNA, 20 bp, synthetic construct
  misc_feature 1..20: note = chemically synthesized
  source 1..20: mol_type = other DNA
gtgcattaagtgcgtcctgt

SEQ ID NO: 31083 - DNA, 20 bp, synthetic construct
  misc_feature 1..20: note = chemically synthesized
  source 1..20: mol_type = other DNA
tcctgtgagaaactctgatc

SEQ ID NO: 31084 - DNA, 20 bp, synthetic construct
  misc_feature 1..20: note = chemically synthesized
  source 1..20: mol_type = other DNA
aaactctgatcaagaacttg

SEQ ID NO: 31085 - DNA, 20 bp, synthetic construct
  misc_feature 1..20: note = chemically synthesized
  source 1..20: mol_type = other DNA
tctgatcaagaacttgaaga

SEQ ID NO: 31086 - DNA, 20 bp, synthetic construct
  misc_feature 1..20: note = chemically synthesized
  source 1..20: mol_type = other DNA
atcaagaacttgaagataga

SEQ ID NO: 31087 - DNA, 20 bp, synthetic construct
  misc_feature 1..20: note = chemically synthesized
  source 1..20: mol_type = other DNA
atagacagattaacatgtca

SEQ ID NO: 31088 - DNA, 20 bp, synthetic construct
  misc_feature 1..20: note = chemically synthesized
  source 1..20: mol_type = other DNA
gtcatggtcttgcctttatg

SEQ ID NO: 31089 - DNA, 20 bp, synthetic construct
  misc_feature 1..20: note = chemically synthesized
  source 1..20: mol_type = other DNA
gcctttatgaagctcacatt

SEQ ID NO: 31090 - DNA, 20 bp, synthetic construct
  misc_feature 1..20: note = chemically synthesized
  source 1..20: mol_type = other DNA
tatgaagctcacattgagta

SEQ ID NO: 31091 - DNA, 20 bp, synthetic construct
  misc_feature 1..20: note = chemically synthesized
  source 1..20: mol_type = other DNA
ctcacattgagtaaagatgt

SEQ ID NO: 31092 - DNA, 20 bp, synthetic construct
  misc_feature 1..20: note = chemically synthesized
  source 1..20: mol_type = other DNA
agatgttagattgttcaacg

SEQ ID NO: 31093 - DNA, 20 bp, synthetic construct
  misc_feature 1..20: note = chemically synthesized
  source 1..20: mol_type = other DNA
gttcaacgaagtttccaaaa

SEQ ID NO: 31094 - DNA, 20 bp, synthetic construct
  misc_feature 1..20: note = chemically synthesized
  source 1..20: mol_type = other DNA
ttcaacgaagtttccaaaat

SEQ ID NO: 31095 - DNA, 20 bp, synthetic construct
  misc_feature 1..20: note = chemically synthesized
  source 1..20: mol_type = other DNA
tcaacgaagtttccaaaata

SEQ ID NO: 31096 - DNA, 20 bp, synthetic construct
  misc_feature 1..20: note = chemically synthesized
  source 1..20: mol_type = other DNA
agtttccaaaatagggtcac

SEQ ID NO: 31097 - DNA, 20 bp, synthetic construct
  misc_feature 1..20: note = chemically synthesized
  source 1..20: mol_type = other DNA
ccaaaatagggtcactagcc

SEQ ID NO: 31098 - DNA, 20 bp, synthetic construct
  misc_feature 1..20: note = chemically synthesized
  source 1..20: mol_type = other DNA
caaaatagggtcactagccc

SEQ ID NO: 31099 - DNA, 20 bp, synthetic construct
  misc_feature 1..20: note = chemically synthesized
  source 1..20: mol_type = other DNA
atagggtcactagcccaggc

SEQ ID NO: 31100 - DNA, 20 bp, synthetic construct
  misc_feature 1..20: note = chemically synthesized
  source 1..20: mol_type = other DNA
tagggtcactagcccaggct

SEQ ID NO: 31101 - DNA, 20 bp, synthetic construct
  misc_feature 1..20: note = chemically synthesized
  source 1..20: mol_type = other DNA
ggtcactagcccaggctagg

SEQ ID NO: 31102 - DNA, 20 bp, synthetic construct
  misc_feature 1..20: note = chemically synthesized
  source 1..20: mol_type = other DNA
gtcactagcccaggctagga

SEQ ID NO: 31103 - DNA, 20 bp, synthetic construct
  misc_feature 1..20: note = chemically synthesized
  source 1..20: mol_type = other DNA
actagcccaggctaggaagg

SEQ ID NO: 31104 - DNA, 20 bp, synthetic construct
  misc_feature 1..20: note = chemically synthesized
  source 1..20: mol_type = other DNA
tagcccaggctaggaaggca

SEQ ID NO: 31105 - DNA, 20 bp, synthetic construct
  misc_feature 1..20: note = chemically synthesized
  source 1..20: mol_type = other DNA
agcccaggctaggaaggcag

SEQ ID NO: 31106 - DNA, 20 bp, synthetic construct
  misc_feature 1..20: note = chemically synthesized
  source 1..20: mol_type = other DNA
ccaggctaggaaggcagagg

SEQ ID NO: 31107 - DNA, 20 bp, synthetic construct
  misc_feature 1..20: note = chemically synthesized
  source 1..20: mol_type = other DNA
gaaggcagaggtagtttctg

SEQ ID NO: 31108 - DNA, 20 bp, synthetic construct
  misc_feature 1..20: note = chemically synthesized
  source 1..20: mol_type = other DNA
cagaggtagtttctgaagcc

SEQ ID NO: 31109 - DNA, 20 bp, synthetic construct
  misc_feature 1..20: note = chemically synthesized
  source 1..20: mol_type = other DNA
gaggtagtttctgaagcctg

SEQ ID NO: 31110 - DNA, 20 bp, synthetic construct
  misc_feature 1..20: note = chemically synthesized
  source 1..20: mol_type = other DNA
aggtagtttctgaagcctgg

SEQ ID NO: 31111 - DNA, 20 bp, synthetic construct
  misc_feature 1..20: note = chemically synthesized
  source 1..20: mol_type = other DNA
gtttctgaagcctggaggcc

SEQ ID NO: 31112 - DNA, 20 bp, synthetic construct
  misc_feature 1..20: note = chemically synthesized
  source 1..20: mol_type = other DNA
ttctgaagcctggaggccaa

SEQ ID NO: 31113 - DNA, 20 bp, synthetic construct
  misc_feature 1..20: note = chemically synthesized
  source 1..20: mol_type = other DNA
tctgaagcctggaggccaag

SEQ ID NO: 31114 - DNA, 20 bp, synthetic construct
  misc_feature 1..20: note = chemically synthesized
  source 1..20: mol_type = other DNA
tgaagcctggaggccaagag

SEQ ID NO: 31115 - DNA, 20 bp, synthetic construct
  misc_feature 1..20: note = chemically synthesized
  source 1..20: mol_type = other DNA
gaagcctggaggccaagagg

SEQ ID NO: 31116 - DNA, 20 bp, synthetic construct
  misc_feature 1..20: note = chemically synthesized
  source 1..20: mol_type = other DNA
ggaggccaagaggaggatga

SEQ ID NO: 31117 - DNA, 20 bp, synthetic construct
  misc_feature 1..20: note = chemically synthesized
  source 1..20: mol_type = other DNA
gaggccaagaggaggatgat

SEQ ID NO: 31118 - DNA, 20 bp, synthetic construct
  misc_feature 1..20: note = chemically synthesized
  source 1..20: mol_type = other DNA
aggccaagaggaggatgatg

SEQ ID NO: 31119 - DNA, 20 bp, synthetic construct
  misc_feature 1..20: note = chemically synthesized
  source 1..20: mol_type = other DNA
ggaggatgatggggacaatg

SEQ ID NO: 31120 - DNA, 20 bp, synthetic construct
  misc_feature 1..20: note = chemically synthesized
  source 1..20: mol_type = other DNA
gaggatgatggggacaatga

SEQ ID NO: 31121 - DNA, 20 bp, synthetic construct
  misc_feature 1..20: note = chemically synthesized
  source 1..20: mol_type = other DNA
ggatgatggggacaatgaag

SEQ ID NO: 31122 - DNA, 20 bp, synthetic construct
  misc_feature 1..20: note = chemically synthesized
  source 1..20: mol_type = other DNA
gatggggacaatgaaggagc

SEQ ID NO: 31123 - DNA, 20 bp, synthetic construct
  misc_feature 1..20: note = chemically synthesized
  source 1..20: mol_type = other DNA
acaatgaaggagcaagtcct

SEQ ID NO: 31124 - DNA, 20 bp, synthetic construct
  misc_feature 1..20: note = chemically synthesized
  source 1..20: mol_type = other DNA
cggacctatctctatcactg

SEQ ID NO: 31125 - DNA, 20 bp, synthetic construct
  misc_feature 1..20: note = chemically synthesized
  source 1..20: mol_type = other DNA
ggacctatctctatcactgt

SEQ ID NO: 31126 - DNA, 20 bp, synthetic construct
  misc_feature 1..20: note = chemically synthesized
  source 1..20: mol_type = other DNA
gtgggtaatcatgcgaatat

SEQ ID NO: 31127 - DNA, 20 bp, synthetic construct
  misc_feature 1..20: note = chemically synthesized
  source 1..20: mol_type = other DNA
tgggtaatcatgcgaatatt

SEQ ID NO: 31128 - DNA, 20 bp, synthetic construct
  misc_feature 1..20: note = chemically synthesized
  source 1..20: mol_type = other DNA
aatcatgcgaatattaggtg

SEQ ID NO: 31129 - DNA, 20 bp, synthetic construct
  misc_feature 1..20: note = chemically synthesized
  source 1..20: mol_type = other DNA
aatattaggtgaagtgaatg

SEQ ID NO: 31130 - DNA, 20 bp, synthetic construct
  misc_feature 1..20: note = chemically synthesized
  source 1..20: mol_type = other DNA
atattaggtgaagtgaatgt

SEQ ID NO: 31131 - DNA, 20 bp, synthetic construct
  misc_feature 1..20: note = chemically synthesized
  source 1..20: mol_type = other DNA
aagtgaatgtgggtgcatga

SEQ ID NO: 31132 - DNA, 20 bp, synthetic construct
  misc_feature 1..20: note = chemically synthesized
  source 1..20: mol_type = other DNA
gaatgtgggtgcatgatggt

SEQ ID NO: 31133 - DNA, 20 bp, synthetic construct
  misc_feature 1..20: note = chemically synthesized
  source 1..20: mol_type = other DNA
aatgtgggtgcatgatggtt

SEQ ID NO: 31134 - DNA, 20 bp, synthetic construct
  misc_feature 1..20: note = chemically synthesized
  source 1..20: mol_type = other DNA
atgtgggtgcatgatggttg

SEQ ID NO: 31135 - DNA, 20 bp, synthetic construct
  misc_feature 1..20: note = chemically synthesized
  source 1..20: mol_type = other DNA
tgggtgcatgatggttgggg

SEQ ID NO: 31136 - DNA, 20 bp, synthetic construct
  misc_feature 1..20: note = chemically synthesized
  source 1..20: mol_type = other DNA
gggtgcatgatggttgggga

SEQ ID NO: 31137 - DNA, 20 bp, synthetic construct
  misc_feature 1..20: note = chemically synthesized
  source 1..20: mol_type = other DNA
catgatggttggggaaggtg

SEQ ID NO: 31138 - DNA, 20 bp, synthetic construct
  misc_feature 1..20: note = chemically synthesized
  source 1..20: mol_type = other DNA
aaggtgaagtatcaacacat

SEQ ID NO: 31139 - DNA, 20 bp, synthetic construct
  misc_feature 1..20: note = chemically synthesized
  source 1..20: mol_type = other DNA
aagtatcaacacattagtgt

SEQ ID NO: 31140 - DNA, 20 bp, synthetic construct
  misc_feature 1..20: note = chemically synthesized
  source 1..20: mol_type = other DNA
agtatcaacacattagtgtg

SEQ ID NO: 31141 - DNA, 20 bp, synthetic construct
  misc_feature 1..20: note = chemically synthesized
  source 1..20: mol_type = other DNA
acacattagtgtgaggcatt

SEQ ID NO: 31142 - DNA, 20 bp, synthetic construct
  misc_feature 1..20: note = chemically synthesized
  source 1..20: mol_type = other DNA
cacattagtgtgaggcattc

SEQ ID NO: 31143 - DNA, 20 bp, synthetic construct
  misc_feature 1..20: note = chemically synthesized
  source 1..20: mol_type = other DNA
gcattcaggccttaaccttt

SEQ ID NO: 31144 - DNA, 20 bp, synthetic construct
  misc_feature 1..20: note = chemically synthesized
  source 1..20: mol_type = other DNA
cattcaggccttaaccttta

SEQ ID NO: 31145 - DNA, 20 bp, synthetic construct
  misc_feature 1..20: note = chemically synthesized
  source 1..20: mol_type = other DNA
ggccttaacctttaaggtat

SEQ ID NO: 31146 - DNA, 20 bp, synthetic construct
  misc_feature 1..20: note = chemically synthesized
  source 1..20: mol_type = other DNA
ggtattagaattcattatta

SEQ ID NO: 31147 - DNA, 20 bp, synthetic construct
  misc_feature 1..20: note = chemically synthesized
  source 1..20: mol_type = other DNA
gaatctaaatccattactaa

SEQ ID NO: 31148 - DNA, 20 bp, synthetic construct
  misc_feature 1..20: note = chemically synthesized
  source 1..20: mol_type = other DNA
aatccattactaaaagtgaa

SEQ ID NO: 31149 - DNA, 20 bp, synthetic construct
  misc_feature 1..20: note = chemically synthesized
  source 1..20: mol_type = other DNA
agtgaaaagtgtcactgtaa

SEQ ID NO: 31150 - DNA, 20 bp, synthetic construct
  misc_feature 1..20: note = chemically synthesized
  source 1..20: mol_type = other DNA
cctatttgttaatgtgcaaa

SEQ ID NO: 31151 - DNA, 20 bp, synthetic construct
  misc_feature 1..20: note = chemically synthesized
  source 1..20: mol_type = other DNA
aatattgtttgtgtgtgtgt

SEQ ID NO: 31152 - DNA, 20 bp, synthetic construct
  misc_feature 1..20: note = chemically synthesized
  source 1..20: mol_type = other DNA
tattgtttgtgtgtgtgtga

SEQ ID NO: 31153 - DNA, 20 bp, synthetic construct
  misc_feature 1..20: note = chemically synthesized
  source 1..20: mol_type = other DNA
ttgtttgtgtgtgtgtgaga

SEQ ID NO: 31154 - DNA, 20 bp, synthetic construct
  misc_feature 1..20: note = chemically synthesized
  source 1..20: mol_type = other DNA
gtttgtgtgtgtgtgagaga

SEQ ID NO: 31155 - DNA, 20 bp, synthetic construct
  misc_feature 1..20: note = chemically synthesized
  source 1..20: mol_type = other DNA
ttgtgtgtgtgtgagagaga

SEQ ID NO: 31156 - DNA, 20 bp, synthetic construct
  misc_feature 1..20: note = chemically synthesized
  source 1..20: mol_type = other DNA
gtgtgtgtgtgagagagaga

SEQ ID NO: 31157 - DNA, 20 bp, synthetic construct
  misc_feature 1..20: note = chemically synthesized
  source 1..20: mol_type = other DNA
gtgtgtgtgagagagagaga

SEQ ID NO: 31158 - DNA, 20 bp, synthetic construct
  misc_feature 1..20: note = chemically synthesized
  source 1..20: mol_type = other DNA
gtgagagagagagagagaaa

SEQ ID NO: 31159 - DNA, 20 bp, synthetic construct
  misc_feature 1..20: note = chemically synthesized
  source 1..20: mol_type = other DNA
gagagagagagagaaacagc

SEQ ID NO: 31160 - DNA, 20 bp, synthetic construct
  misc_feature 1..20: note = chemically synthesized
  source 1..20: mol_type = other DNA
gagagagagaaacagcgagc

SEQ ID NO: 31161 - DNA, 20 bp, synthetic construct
  misc_feature 1..20: note = chemically synthesized
  source 1..20: mol_type = other DNA
gagaaacagcgagcgagcga

SEQ ID NO: 31162 - DNA, 20 bp, synthetic construct
  misc_feature 1..20: note = chemically synthesized
  source 1..20: mol_type = other DNA
gaaacagcgagcgagcgaca

SEQ ID NO: 31163 - DNA, 20 bp, synthetic construct
  misc_feature 1..20: note = chemically synthesized
  source 1..20: mol_type = other DNA
aacagcgagcgagcgacaga

SEQ ID NO: 31164 - DNA, 20 bp, synthetic construct
  misc_feature 1..20: note = chemically synthesized
  source 1..20: mol_type = other DNA
cagcgagcgagcgacagaga

SEQ ID NO: 31165 - DNA, 20 bp, synthetic construct
  misc_feature 1..20: note = chemically synthesized
  source 1..20: mol_type = other DNA
gcgagcgagcgacagagaga

SEQ ID NO: 31166 - DNA, 20 bp, synthetic construct
  misc_feature 1..20: note = chemically synthesized
  source 1..20: mol_type = other DNA
gagcgagcgacagagagaga

SEQ ID NO: 31167 - DNA, 20 bp, synthetic construct
  misc_feature 1..20: note = chemically synthesized
  source 1..20: mol_type = other DNA
agcgagcgacagagagagag

SEQ ID NO: 31168 - DNA, 20 bp, synthetic construct
  misc_feature 1..20: note = chemically synthesized
  source 1..20: mol_type = other DNA
gagcgacagagagagagagg

SEQ ID NO: 31169 - DNA, 20 bp, synthetic construct
  misc_feature 1..20: note = chemically synthesized
  source 1..20: mol_type = other DNA
agcgacagagagagagaggt

SEQ ID NO: 31170 - DNA, 20 bp, synthetic construct
  misc_feature 1..20: note = chemically synthesized
  source 1..20: mol_type = other DNA
gcgacagagagagagaggtg

SEQ ID NO: 31171 - DNA, 20 bp, synthetic construct
  misc_feature 1..20: note = chemically synthesized
  source 1..20: mol_type = other DNA
acagagagagagaggtgggg

SEQ ID NO: 31172 - DNA, 20 bp, synthetic construct
  misc_feature 1..20: note = chemically synthesized
  source 1..20: mol_type = other DNA
cagagagagagaggtggggt

SEQ ID NO: 31173 - DNA, 20 bp, synthetic construct
  misc_feature 1..20: note = chemically synthesized
  source 1..20: mol_type = other DNA
agagagagagaggtggggtg

SEQ ID NO: 31174 - DNA, 20 bp, synthetic construct
  misc_feature 1..20: note = chemically synthesized
  source 1..20: mol_type = other DNA
gagagagagaggtggggtgg

SEQ ID NO: 31175 - DNA, 20 bp, synthetic construct
  misc_feature 1..20: note = chemically synthesized
  source 1..20: mol_type = other DNA
agagaggtggggtgggggta

SEQ ID NO: 31176 - DNA, 20 bp, synthetic construct
  misc_feature 1..20: note = chemically synthesized
  source 1..20: mol_type = other DNA
gaggtggggtgggggtatgg

SEQ ID NO: 31177 - DNA, 20 bp, synthetic construct
  misc_feature 1..20: note = chemically synthesized
  source 1..20: mol_type = other DNA
aggtggggtgggggtatggt

SEQ ID NO: 31178 - DNA, 20 bp, synthetic construct
  misc_feature 1..20: note = chemically synthesized
  source 1..20: mol_type = other DNA
ggtggggtgggggtatggtg

SEQ ID NO: 31179 - DNA, 20 bp, synthetic construct
  misc_feature 1..20: note = chemically synthesized
  source 1..20: mol_type = other DNA
ggggtgggggtatggtgggg

SEQ ID NO: 31180 - DNA, 20 bp, synthetic construct
  misc_feature 1..20: note = chemically synthesized
  source 1..20: mol_type = other DNA
tgggggtatggtggggtgga

SEQ ID NO: 31181 - DNA, 20 bp, synthetic construct
  misc_feature 1..20: note = chemically synthesized
  source 1..20: mol_type = other DNA
gtatggtggggtggaaagcc

SEQ ID NO: 31182 - DNA, 20 bp, synthetic construct
  misc_feature 1..20: note = chemically synthesized
  source 1..20: mol_type = other DNA
gggtggaaagcctggctttc

SEQ ID NO: 31183 - DNA, 20 bp, synthetic construct
  misc_feature 1..20: note = chemically synthesized
  source 1..20: mol_type = other DNA
ggtggaaagcctggctttca

SEQ ID NO: 31184 - DNA, 20 bp, synthetic construct
  misc_feature 1..20: note = chemically synthesized
  source 1..20: mol_type = other DNA
gtggaaagcctggctttcaa

SEQ ID NO: 31185 - DNA, 20 bp, synthetic construct
  misc_feature 1..20: note = chemically synthesized
  source 1..20: mol_type = other DNA
tggaaagcctggctttcaag

SEQ ID NO: 31186 - DNA, 20 bp, synthetic construct
  misc_feature 1..20: note = chemically synthesized
  source 1..20: mol_type = other DNA
aagcctggctttcaaggggc

SEQ ID NO: 31187 - DNA, 20 bp, synthetic construct
  misc_feature 1..20: note = chemically synthesized
  source 1..20: mol_type = other DNA
ggctttcaaggggccagtat

SEQ ID NO: 31188 - DNA, 20 bp, synthetic construct
  misc_feature 1..20: note = chemically synthesized
  source 1..20: mol_type = other DNA
ggccagtataagttttattt

SEQ ID NO: 31189 - DNA, 20 bp, synthetic construct
  misc_feature 1..20: note = chemically synthesized
  source 1..20: mol_type = other DNA
gccagtataagttttattta

SEQ ID NO: 31190 - DNA, 20 bp, synthetic construct
  misc_feature 1..20: note = chemically synthesized
  source 1..20: mol_type = other DNA
ttatttaaggaacctctatc

SEQ ID NO: 31191 - DNA, 20 bp, synthetic construct
  misc_feature 1..20: note = chemically synthesized
  source 1..20: mol_type = other DNA
ctctatccagaattgatacc

SEQ ID NO: 31192 - DNA, 20 bp, synthetic construct
  misc_feature 1..20: note = chemically synthesized
  source 1..20: mol_type = other DNA
atccagaattgatacctagc

SEQ ID NO: 31193 - DNA, 20 bp, synthetic construct
  misc_feature 1..20: note = chemically synthesized
  source 1..20: mol_type = other DNA
tgatacctagccagcccact

SEQ ID NO: 31194 - DNA, 20 bp, synthetic construct
  misc_feature 1..20: note = chemically synthesized
  source 1..20: mol_type = other DNA
acctagccagcccactgagc

SEQ ID NO: 31195 - DNA, 20 bp, synthetic construct
  misc_feature 1..20: note = chemically synthesized
  source 1..20: mol_type = other DNA
cctagccagcccactgagcc

SEQ ID NO: 31196 - DNA, 20 bp, synthetic construct
  misc_feature 1..20: note = chemically synthesized
  source 1..20: mol_type = other DNA
ccagcccactgagccaggct

SEQ ID NO: 31197 - DNA, 20 bp, synthetic construct
  misc_feature 1..20: note = chemically synthesized
  source 1..20: mol_type = other DNA
ccactgagccaggcttggtg

SEQ ID NO: 31198 - DNA, 20 bp, synthetic construct
  misc_feature 1..20: note = chemically synthesized
  source 1..20: mol_type = other DNA
ctgagccaggcttggtgaag

SEQ ID NO: 31199 - DNA, 20 bp, synthetic construct
  misc_feature 1..20: note = chemically synthesized
  source 1..20: mol_type = other DNA
tgagccaggcttggtgaagt

SEQ ID NO: 31200 - DNA, 20 bp, synthetic construct
  misc_feature 1..20: note = chemically synthesized
  source 1..20: mol_type = other DNA
agccaggcttggtgaagtag

SEQ ID NO: 31201 - DNA, 20 bp, synthetic construct
  misc_feature 1..20: note = chemically synthesized
  source 1..20: mol_type = other DNA
ggtgaagtaggagattcctt

SEQ ID NO: 31202 - DNA, 20 bp, synthetic construct
  misc_feature 1..20: note = chemically synthesized
  source 1..20: mol_type = other DNA
gtgaagtaggagattccttc

SEQ ID NO: 31203 - DNA, 20 bp, synthetic construct
  misc_feature 1..20: note = chemically synthesized
  source 1..20: mol_type = other DNA
gaagtaggagattccttcag

SEQ ID NO: 31204 - DNA, 20 bp, synthetic construct
  misc_feature 1..20: note = chemically synthesized
  source 1..20: mol_type = other DNA
ttcaggagaactgaatcccc

SEQ ID NO: 31205 - DNA, 20 bp, synthetic construct
  misc_feature 1..20: note = chemically synthesized
  source 1..20: mol_type = other DNA
tcaggagaactgaatcccca

SEQ ID NO: 31206 - DNA, 20 bp, synthetic construct
  misc_feature 1..20: note = chemically synthesized
  source 1..20: mol_type = other DNA
caaggtctgtacacatgctg

SEQ ID NO: 31207 - DNA, 20 bp, synthetic construct
  misc_feature 1..20: note = chemically synthesized
  source 1..20: mol_type = other DNA
catgctgtggttttccaatg

SEQ ID NO: 31208 - DNA, 20 bp, synthetic construct
  misc_feature 1..20: note = chemically synthesized
  source 1..20: mol_type = other DNA
tggttttccaatgtagccac

SEQ ID NO: 31209 - DNA, 20 bp, synthetic construct
  misc_feature 1..20: note = chemically synthesized
  source 1..20: mol_type = other DNA
ggttttccaatgtagccacc

SEQ ID NO: 31210 - DNA, 20 bp, synthetic construct
  misc_feature 1..20: note = chemically synthesized
  source 1..20: mol_type = other DNA
gttttccaatgtagccacca

SEQ ID NO: 31211 - DNA, 20 bp, synthetic construct
  misc_feature 1..20: note = chemically synthesized
  source 1..20: mol_type = other DNA
ttttccaatgtagccaccag

SEQ ID NO: 31212 - DNA, 20 bp, synthetic construct
  misc_feature 1..20: note = chemically synthesized
  source 1..20: mol_type = other DNA
tttccaatgtagccaccagg

SEQ ID NO: 31213 - DNA, 20 bp, synthetic construct
  misc_feature 1..20: note = chemically synthesized
  source 1..20: mol_type = other DNA
tccaatgtagccaccagggg

SEQ ID NO: 31214 - DNA, 20 bp, synthetic construct
  misc_feature 1..20: note = chemically synthesized
  source 1..20: mol_type = other DNA
tagccaccagggggagcatt

SEQ ID NO: 31215 - DNA, 20 bp, synthetic construct
  misc_feature 1..20: note = chemically synthesized
  source 1..20: mol_type = other DNA
ccagggggagcattcagccc

SEQ ID NO: 31216 - DNA, 20 bp, synthetic construct
  misc_feature 1..20: note = chemically synthesized
  source 1..20: mol_type = other DNA
cagggggagcattcagccca

SEQ ID NO: 31217 - DNA, 20 bp, synthetic construct
  misc_feature 1..20: note = chemically synthesized
  source 1..20: mol_type = other DNA
gggagcattcagcccaagga

SEQ ID NO: 31218 - DNA, 20 bp, synthetic construct
  misc_feature 1..20: note = chemically synthesized
  source 1..20: mol_type = other DNA
ggagcattcagcccaaggat

SEQ ID NO: 31219 - DNA, 20 bp, synthetic construct
  misc_feature 1..20: note = chemically synthesized
  source 1..20: mol_type = other DNA
ggataggcttaaattctgac

SEQ ID NO: 31220 - DNA, 20 bp, synthetic construct
  misc_feature 1..20: note = chemically synthesized
  source 1..20: mol_type = other DNA
cttaaattctgaccagcacc

SEQ ID NO: 31221 - DNA, 20 bp, synthetic construct
  misc_feature 1..20: note = chemically synthesized
  source 1..20: mol_type = other DNA
ttaaattctgaccagcacca

SEQ ID NO: 31222 - DNA, 20 bp, synthetic construct
  misc_feature 1..20: note = chemically synthesized
  source 1..20: mol_type = other DNA
caccaaggccctactatccc

SEQ ID NO: 31223 - DNA, 20 bp, synthetic construct
  misc_feature 1..20: note = chemically synthesized
  source 1..20: mol_type = other DNA
accaaggccctactatcccc

SEQ ID NO: 31224 - DNA, 20 bp, synthetic construct
  misc_feature 1..20: note = chemically synthesized
  source 1..20: mol_type = other DNA
ccaaggccctactatcccca

SEQ ID NO: 31225 - DNA, 20 bp, synthetic construct
  misc_feature 1..20: note = chemically synthesized
  source 1..20: mol_type = other DNA
ccctactatccccagggcac

SEQ ID NO: 31226 - DNA, 20 bp, synthetic construct
  misc_feature 1..20: note = chemically synthesized
  source 1..20: mol_type = other DNA
ccccagggcacaagaaaatg

SEQ ID NO: 31227 - DNA, 20 bp, synthetic construct
  misc_feature 1..20: note = chemically synthesized
  source 1..20: mol_type = other DNA
agaaaatgtggcttttcttc

SEQ ID NO: 31228 - DNA, 20 bp, synthetic construct
  misc_feature 1..20: note = chemically synthesized
  source 1..20: mol_type = other DNA
tgtcctcaatacccactaca

SEQ ID NO: 31229 - DNA, 20 bp, synthetic construct
  misc_feature 1..20: note = chemically synthesized
  source 1..20: mol_type = other DNA
aatacccactacacagctga

SEQ ID NO: 31230 - DNA, 20 bp, synthetic construct
  misc_feature 1..20: note = chemically synthesized
  source 1..20: mol_type = other DNA
cacagctgaaagctgccaac

SEQ ID NO: 31231 - DNA, 20 bp, synthetic construct
  misc_feature 1..20: note = chemically synthesized
  source 1..20: mol_type = other DNA
aaccagttcattcttccttt

SEQ ID NO: 31232 - DNA, 20 bp, synthetic construct
  misc_feature 1..20: note = chemically synthesized
  source 1..20: mol_type = other DNA
accagttcattcttcctttg

SEQ ID NO: 31233 - DNA, 20 bp, synthetic construct
  misc_feature 1..20: note = chemically synthesized
  source 1..20: mol_type = other DNA
cctctctctcatgcacaaaa

SEQ ID NO: 31234 - DNA, 20 bp, synthetic construct
  misc_feature 1..20: note = chemically synthesized
  source 1..20: mol_type = other DNA
cacataaaaactaaaattga

SEQ ID NO: 31235 - DNA, 20 bp, synthetic construct
  misc_feature 1..20: note = chemically synthesized
  source 1..20: mol_type = other DNA
cataaaaactaaaattgatg

SEQ ID NO: 31236 - DNA, 20 bp, synthetic construct
  misc_feature 1..20: note = chemically synthesized
  source 1..20: mol_type = other DNA
taaaaactaaaattgatgga

SEQ ID NO: 31237 - DNA, 20 bp, synthetic construct
  misc_feature 1..20: note = chemically synthesized
  source 1..20: mol_type = other DNA
aaaactaaaattgatggaga

SEQ ID NO: 31238 - DNA, 20 bp, synthetic construct
  misc_feature 1..20: note = chemically synthesized
  source 1..20: mol_type = other DNA
ctaaaattgatggagagaga

SEQ ID NO: 31239 - DNA, 20 bp, synthetic construct
  misc_feature 1..20: note = chemically synthesized
  source 1..20: mol_type = other DNA
taaaattgatggagagagat

SEQ ID NO: 31240 - DNA, 20 bp, synthetic construct
  misc_feature 1..20: note = chemically synthesized
  source 1..20: mol_type = other DNA
tggagagagataggttttct

SEQ ID NO: 31241 - DNA, 20 bp, synthetic construct
  misc_feature 1..20: note = chemically synthesized
  source 1..20: mol_type = other DNA
ataggttttcttagcttttt

SEQ ID NO: 31242 - DNA, 20 bp, synthetic construct
  misc_feature 1..20: note = chemically synthesized
  source 1..20: mol_type = other DNA
ttagctttttcagattttta

SEQ ID NO: 31243 - DNA, 20 bp, synthetic construct
  misc_feature 1..20: note = chemically synthesized
  source 1..20: mol_type = other DNA
ctttttcagatttttacaga

SEQ ID NO: 31244 - DNA, 20 bp, synthetic construct
  misc_feature 1..20: note = chemically synthesized
  source 1..20: mol_type = other DNA
ctcacacaaatctatgtgtg

SEQ ID NO: 31245 - DNA, 20 bp, synthetic construct
  misc_feature 1..20: note = chemically synthesized
  source 1..20: mol_type = other DNA
aaatctatgtgtgtggcctt

SEQ ID NO: 31246 - DNA, 20 bp, synthetic construct
  misc_feature 1..20: note = chemically synthesized
  source 1..20: mol_type = other DNA
tagtcttaatcatattgacc

SEQ ID NO: 31247 - DNA, 20 bp, synthetic construct
  misc_feature 1..20: note = chemically synthesized
  source 1..20: mol_type = other DNA
ccttaaatccccactctgac

SEQ ID NO: 31248 - DNA, 20 bp, synthetic construct
  misc_feature 1..20: note = chemically synthesized
  source 1..20: mol_type = other DNA
atccccactctgaccagaaa

SEQ ID NO: 31249 - DNA, 20 bp, synthetic construct
  misc_feature 1..20: note = chemically synthesized
  source 1..20: mol_type = other DNA
ctaaataaaatccttactca

SEQ ID NO: 31250 - DNA, 20 bp, synthetic construct
  misc_feature 1..20: note = chemically synthesized
  source 1..20: mol_type = other DNA
taaataaaatccttactcac

SEQ ID NO: 31251 - DNA, 20 bp, synthetic construct
  misc_feature 1..20: note = chemically synthesized
  source 1..20: mol_type = other DNA
aaataaaatccttactcaca

SEQ ID NO: 31252 - DNA, 20 bp, synthetic construct
  misc_feature 1..20: note = chemically synthesized
  source 1..20: mol_type = other DNA
cacagggttctcaatgtctc

SEQ ID NO: 31253 - DNA, 20 bp, synthetic construct
  misc_feature 1..20: note = chemically synthesized
  source 1..20: mol_type = other DNA
caatgtctccagactcacaa

SEQ ID NO: 31254 - DNA, 20 bp, synthetic construct
  misc_feature 1..20: note = chemically synthesized
  source 1..20: mol_type = other DNA
gactcacaacagactctttt

SEQ ID NO: 31255 - DNA, 20 bp, synthetic construct
  misc_feature 1..20: note = chemically synthesized
  source 1..20: mol_type = other DNA
actcacaacagactcttttt

SEQ ID NO: 31256 - DNA, 20 bp, synthetic construct
  misc_feature 1..20: note = chemically synthesized
  source 1..20: mol_type = other DNA
ctttttaggtgtctctgtca

SEQ ID NO: 31257 - DNA, 20 bp, synthetic construct
  misc_feature 1..20: note = chemically synthesized
  source 1..20: mol_type = other DNA
ggtgtctctgtcacagaaaa

SEQ ID NO: 31258 - DNA, 20 bp, synthetic construct
  misc_feature 1..20: note = chemically synthesized
  source 1..20: mol_type = other DNA
ctgtcacagaaaatggccac

SEQ ID NO: 31259 - DNA, 20 bp, synthetic construct
  misc_feature 1..20: note = chemically synthesized
  source 1..20: mol_type = other DNA
tgtcacagaaaatggccaca

SEQ ID NO: 31260 - DNA, 20 bp, synthetic construct
  misc_feature 1..20: note = chemically synthesized
  source 1..20: mol_type = other DNA
ccacaaggtcacctcactct

SEQ ID NO: 31261 - DNA, 20 bp, synthetic construct
  misc_feature 1..20: note = chemically synthesized
  source 1..20: mol_type = other DNA
cacaaggtcacctcactctc

SEQ ID NO: 31262 - DNA, 20 bp, synthetic construct
  misc_feature 1..20: note = chemically synthesized
  source 1..20: mol_type = other DNA
cacctcactctcaggcctgt

SEQ ID NO: 31263 - DNA, 20 bp, synthetic construct
  misc_feature 1..20: note = chemically synthesized
  source 1..20: mol_type = other DNA
actctcaggcctgttagaac

SEQ ID NO: 31264 - DNA, 20 bp, synthetic construct
  misc_feature 1..20: note = chemically synthesized
  source 1..20: mol_type = other DNA
ctgttagaacaagtccttcc

SEQ ID NO: 31265 - DNA, 20 bp, synthetic construct
  misc_feature 1..20: note = chemically synthesized
  source 1..20: mol_type = other DNA
ttagaacaagtccttcccag

SEQ ID NO: 31266 - DNA, 20 bp, synthetic construct
  misc_feature 1..20: note = chemically synthesized
  source 1..20: mol_type = other DNA
cccagaagaactccattttg

SEQ ID NO: 31267 - DNA, 20 bp, synthetic construct
  misc_feature 1..20: note = chemically synthesized
  source 1..20: mol_type = other DNA
agaactccattttgtggtgt

SEQ ID NO: 31268 - DNA, 20 bp, synthetic construct
  misc_feature 1..20: note = chemically synthesized
  source 1..20: mol_type = other DNA
tttgtggtgtgagatcgatg

SEQ ID NO: 31269 - DNA, 20 bp, synthetic construct
  misc_feature 1..20: note = chemically synthesized
  source 1..20: mol_type = other DNA
ttgtggtgtgagatcgatgc

SEQ ID NO: 31270 - DNA, 20 bp, synthetic construct
  misc_feature 1..20: note = chemically synthesized
  source 1..20: mol_type = other DNA
tgagatcgatgcgggtcttt

SEQ ID NO: 31271 - DNA, 20 bp, synthetic construct
  misc_feature 1..20: note = chemically synthesized
  source 1..20: mol_type = other DNA
tcgatgcgggtctttcagac

SEQ ID NO: 31272 - DNA, 20 bp, synthetic construct
  misc_feature 1..20: note = chemically synthesized
  source 1..20: mol_type = other DNA
gatgcgggtctttcagactg

SEQ ID NO: 31273 - DNA, 20 bp, synthetic construct
  misc_feature 1..20: note = chemically synthesized
  source 1..20: mol_type = other DNA
tgcgggtctttcagactgga

SEQ ID NO: 31274 - DNA, 20 bp, synthetic construct
  misc_feature 1..20: note = chemically synthesized
  source 1..20: mol_type = other DNA
tttcagactggagagaccca

SEQ ID NO: 31275 - DNA, 20 bp, synthetic construct
  misc_feature 1..20: note = chemically synthesized
  source 1..20: mol_type = other DNA
cagactggagagacccacag

SEQ ID NO: 31276 - DNA, 20 bp, synthetic construct
  misc_feature 1..20: note = chemically synthesized
  source 1..20: mol_type = other DNA
ctggagagacccacagaagt

SEQ ID NO: 31277 - DNA, 20 bp, synthetic construct
  misc_feature 1..20: note = chemically synthesized
  source 1..20: mol_type = other DNA
tggagagacccacagaagtt

SEQ ID NO: 31278 - DNA, 20 bp, synthetic construct
  misc_feature 1..20: note = chemically synthesized
  source 1..20: mol_type = other DNA
acagaagttaggattgccaa

SEQ ID NO: 31279 - DNA, 20 bp, synthetic construct
  misc_feature 1..20: note = chemically synthesized
  source 1..20: mol_type = other DNA
cagaagttaggattgccaaa

SEQ ID NO: 31280 - DNA, 20 bp, synthetic construct
  misc_feature 1..20: note = chemically synthesized
  source 1..20: mol_type = other DNA
agaagttaggattgccaaaa

SEQ ID NO: 31281 - DNA, 20 bp, synthetic construct
  misc_feature 1..20: note = chemically synthesized
  source 1..20: mol_type = other DNA
ggattgccaaaagggtcttc

SEQ ID NO: 31282 - DNA, 20 bp, synthetic construct
  misc_feature 1..20: note = chemically synthesized
  source 1..20: mol_type = other DNA
gccaaaagggtcttctggac

SEQ ID NO: 31283 - DNA, 20 bp, synthetic construct
  misc_feature 1..20: note = chemically synthesized
  source 1..20: mol_type = other DNA
gggtcttctggactggtcca

SEQ ID NO: 31284 - DNA, 20 bp, synthetic construct
  misc_feature 1..20: note = chemically synthesized
  source 1..20: mol_type = other DNA
tggactggtccacagcccct

SEQ ID NO: 31285 - DNA, 20 bp, synthetic construct
  misc_feature 1..20: note = chemically synthesized
  source 1..20: mol_type = other DNA
tgtccatccccctgcctccc

SEQ ID NO: 31286 - DNA, 20 bp, synthetic construct
  misc_feature 1..20: note = chemically synthesized
  source 1..20: mol_type = other DNA
cacctgcatctgtgtgtgca

SEQ ID NO: 31287 - DNA, 20 bp, synthetic construct
  misc_feature 1..20: note = chemically synthesized
  source 1..20: mol_type = other DNA
cctgcatctgtgtgtgcaca

SEQ ID NO: 31288 - DNA, 20 bp, synthetic construct
  misc_feature 1..20: note = chemically synthesized
  source 1..20: mol_type = other DNA
tgcatctgtgtgtgcacaga

SEQ ID NO: 31289 - DNA, 20 bp, synthetic construct
  misc_feature 1..20: note = chemically synthesized
  source 1..20: mol_type = other DNA
ctgtgtgtgcacagagagtc

SEQ ID NO: 31290 - DNA, 20 bp, synthetic construct
  misc_feature 1..20: note = chemically synthesized
  source 1..20: mol_type = other DNA
tgtgtgcacagagagtctgg

SEQ ID NO: 31291 - DNA, 20 bp, synthetic construct
  misc_feature 1..20: note = chemically synthesized
  source 1..20: mol_type = other DNA
gtgtgcacagagagtctgga

SEQ ID NO: 31292 - DNA, 20 bp, synthetic construct
  misc_feature 1..20: note = chemically synthesized
  source 1..20: mol_type = other DNA
cagagagtctggaaggttta

SEQ ID NO: 31293 - DNA, 20 bp, synthetic construct
  misc_feature 1..20: note = chemically synthesized
  source 1..20: mol_type = other DNA
gagagtctggaaggtttaca

SEQ ID NO: 31294 - DNA, 20 bp, synthetic construct
  misc_feature 1..20: note = chemically synthesized
  source 1..20: mol_type = other DNA
agtctggaaggtttacagag

SEQ ID NO: 31295 - DNA, 20 bp, synthetic construct
  misc_feature 1..20: note = chemically synthesized
  source 1..20: mol_type = other DNA
gaagtctccacatcttccca

SEQ ID NO: 31296 - DNA, 20 bp, synthetic construct
  misc_feature 1..20: note = chemically synthesized
  source 1..20: mol_type = other DNA
tcttcccacagcaactcttt

SEQ ID NO: 31297 - DNA, 20 bp, synthetic construct
  misc_feature 1..20: note = chemically synthesized
  source 1..20: mol_type = other DNA
cgtaacatcctacctctctt

SEQ ID NO: 31298 - DNA, 20 bp, synthetic construct
  misc_feature 1..20: note = chemically synthesized
  source 1..20: mol_type = other DNA
cctctcttcagtcattatga

SEQ ID NO: 31299 - DNA, 20 bp, synthetic construct
  misc_feature 1..20: note = chemically synthesized
  source 1..20: mol_type = other DNA
ctctcttcagtcattatgaa

SEQ ID NO: 31300 - DNA, 20 bp, synthetic construct
  misc_feature 1..20: note = chemically synthesized
  source 1..20: mol_type = other DNA
tctcttcagtcattatgaaa

SEQ ID NO: 31301 - DNA, 20 bp, synthetic construct
  misc_feature 1..20: note = chemically synthesized
  source 1..20: mol_type = other DNA
ttttcattgtgaaaactttt

SEQ ID NO: 31302 - DNA, 20 bp, synthetic construct
  misc_feature 1..20: note = chemically synthesized
  source 1..20: mol_type = other DNA
ttcattgtgaaaacttttca

SEQ ID NO: 31303 - DNA, 20 bp, synthetic construct
  misc_feature 1..20: note = chemically synthesized
  source 1..20: mol_type = other DNA
cattgtgaaaacttttcaga

SEQ ID NO: 31304 - DNA, 20 bp, synthetic construct
  misc_feature 1..20: note = chemically synthesized
  source 1..20: mol_type = other DNA
cttttcagagagaccccttt

SEQ ID NO: 31305 - DNA, 20 bp, synthetic construct
  misc_feature 1..20: note = chemically synthesized
  source 1..20: mol_type = other DNA
ttttcagagagacccctttt

SEQ ID NO: 31306 - DNA, 20 bp, synthetic construct
  misc_feature 1..20: note = chemically synthesized
  source 1..20: mol_type = other DNA
ccatctcttctccccactcc

SEQ ID NO: 31307 - DNA, 20 bp, synthetic construct
  misc_feature 1..20: note = chemically synthesized
  source 1..20: mol_type = other DNA
ctcttctccccactccaagt

SEQ ID NO: 31308 - DNA, 20 bp, synthetic construct
  misc_feature 1..20: note = chemically synthesized
  source 1..20: mol_type = other DNA
tcttctccccactccaagtt

SEQ ID NO: 31309 - DNA, 20 bp, synthetic construct
  misc_feature 1..20: note = chemically synthesized
  source 1..20: mol_type = other DNA
ccccactccaagttgggcta

SEQ ID NO: 31310 - DNA, 20 bp, synthetic construct
  misc_feature 1..20: note = chemically synthesized
  source 1..20: mol_type = other DNA
tccaagttgggctaaagttt

SEQ ID NO: 31311 - DNA, 20 bp, synthetic construct
  misc_feature 1..20: note = chemically synthesized
  source 1..20: mol_type = other DNA
catattttgatttgctataa

SEQ ID NO: 31312 - DNA, 20 bp, synthetic construct
  misc_feature 1..20: note = chemically synthesized
  source 1..20: mol_type = other DNA
tattttgatttgctataaca

SEQ ID NO: 31313 - DNA, 20 bp, synthetic construct
  misc_feature 1..20: note = chemically synthesized
  source 1..20: mol_type = other DNA
tttgctataacagagtacct

SEQ ID NO: 31314 - DNA, 20 bp, synthetic construct
  misc_feature 1..20: note = chemically synthesized
  source 1..20: mol_type = other DNA
tataacagagtacctgagtc

SEQ ID NO: 31315 - DNA, 20 bp, synthetic construct
  misc_feature 1..20: note = chemically synthesized
  source 1..20: mol_type = other DNA
ataacagagtacctgagtct

SEQ ID NO: 31316 - DNA, 20 bp, synthetic construct
  misc_feature 1..20: note = chemically synthesized
  source 1..20: mol_type = other DNA
acagagtacctgagtctggg

SEQ ID NO: 31317 - DNA, 20 bp, synthetic construct
  misc_feature 1..20: note = chemically synthesized
  source 1..20: mol_type = other DNA
tagcttatttttttttttta

SEQ ID NO: 31318 - DNA, 20 bp, synthetic construct
  misc_feature 1..20: note = chemically synthesized
  source 1..20: mol_type = other DNA
tttttttttaaagttttgtt

SEQ ID NO: 31319 - DNA, 20 bp, synthetic construct
  misc_feature 1..20: note = chemically synthesized
  source 1..20: mol_type = other DNA
ttttgtttggttcatgattc

SEQ ID NO: 31320 - DNA, 20 bp, synthetic construct
  misc_feature 1..20: note = chemically synthesized
  source 1..20: mol_type = other DNA
tcatgattctggtgacttaa

SEQ ID NO: 31321 - DNA, 20 bp, synthetic construct
  misc_feature 1..20: note = chemically synthesized
  source 1..20: mol_type = other DNA
ttctggtgacttaaaagtcc

SEQ ID NO: 31322 - DNA, 20 bp, synthetic construct
  misc_feature 1..20: note = chemically synthesized
  source 1..20: mol_type = other DNA
gtgacttaaaagtccaagat

SEQ ID NO: 31323 - DNA, 20 bp, synthetic construct
  misc_feature 1..20: note = chemically synthesized
  source 1..20: mol_type = other DNA
tgacttaaaagtccaagatc

SEQ ID NO: 31324 - DNA, 20 bp, synthetic construct
  misc_feature 1..20: note = chemically synthesized
  source 1..20: mol_type = other DNA
cttaaaagtccaagatcggg

SEQ ID NO: 31325 - DNA, 20 bp, synthetic construct
  misc_feature 1..20: note = chemically synthesized
  source 1..20: mol_type = other DNA
tcgggcggttgcatctgata

SEQ ID NO: 31326 - DNA, 20 bp, synthetic construct
  misc_feature 1..20: note = chemically synthesized
  source 1..20: mol_type = other DNA
cgggcggttgcatctgataa

SEQ ID NO: 31327 - DNA, 20 bp, synthetic construct
  misc_feature 1..20: note = chemically synthesized
  source 1..20: mol_type = other DNA
atctgataaaggtctcatgc

SEQ ID NO: 31328 - DNA, 20 bp, synthetic construct
  misc_feature 1..20: note = chemically synthesized
  source 1..20: mol_type = other DNA
tctcatgctggttccaaaca

SEQ ID NO: 31329 - DNA, 20 bp, synthetic construct
  misc_feature 1..20: note = chemically synthesized
  source 1..20: mol_type = other DNA
catgctggttccaaacatgg

SEQ ID NO: 31330 - DNA, 20 bp, synthetic construct
  misc_feature 1..20: note = chemically synthesized
  source 1..20: mol_type = other DNA
ctggttccaaacatggcaga

SEQ ID NO: 31331 - DNA, 20 bp, synthetic construct
  misc_feature 1..20: note = chemically synthesized
  source 1..20: mol_type = other DNA
gttccaaacatggcagaaag

SEQ ID NO: 31332 - DNA, 20 bp, synthetic construct
  misc_feature 1..20: note = chemically synthesized
  source 1..20: mol_type = other DNA
aacatggcagaaagcagaca

SEQ ID NO: 31333 - DNA, 20 bp, synthetic construct
  misc_feature 1..20: note = chemically synthesized
  source 1..20: mol_type = other DNA
catggcagaaagcagacaaa

SEQ ID NO: 31334 - DNA, 20 bp, synthetic construct
  misc_feature 1..20: note = chemically synthesized
  source 1..20: mol_type = other DNA
gcagaaagcagacaaagagc

SEQ ID NO: 31335 - DNA, 20 bp, synthetic construct
  misc_feature 1..20: note = chemically synthesized
  source 1..20: mol_type = other DNA
gacaaagagcaagtgcatgc

SEQ ID NO: 31336 - DNA, 20 bp, synthetic construct
  misc_feature 1..20: note = chemically synthesized
  source 1..20: mol_type = other DNA
acaaagagcaagtgcatgca

SEQ ID NO: 31337 - DNA, 20 bp, synthetic construct
  misc_feature 1..20: note = chemically synthesized
  source 1..20: mol_type = other DNA
aaagagcaagtgcatgcaag

SEQ ID NO: 31338 - DNA, 20 bp, synthetic construct
  misc_feature 1..20: note = chemically synthesized
  source 1..20: mol_type = other DNA
atgcaaggagatcacatgat

SEQ ID NO: 31339 - DNA, 20 bp, synthetic construct
  misc_feature 1..20: note = chemically synthesized
  source 1..20: mol_type = other DNA
gcaaggagatcacatgatga

SEQ ID NO: 31340 - DNA, 20 bp, synthetic construct
  misc_feature 1..20: note = chemically synthesized
  source 1..20: mol_type = other DNA
aaggagatcacatgatgaga

SEQ ID NO: 31341 - DNA, 20 bp, synthetic construct
  misc_feature 1..20: note = chemically synthesized
  source 1..20: mol_type = other DNA
aggagatcacatgatgagag

SEQ ID NO: 31342 - DNA, 20 bp, synthetic construct
  misc_feature 1..20: note = chemically synthesized
  source 1..20: mol_type = other DNA
cacatgatgagagaggacgc

SEQ ID NO: 31343 - DNA, 20 bp, synthetic construct
  misc_feature 1..20: note = chemically synthesized
  source 1..20: mol_type = other DNA
acatgatgagagaggacgcc

SEQ ID NO: 31344 - DNA, 20 bp, synthetic construct
  misc_feature 1..20: note = chemically synthesized
  source 1..20: mol_type = other DNA
catgatgagagaggacgcca

SEQ ID NO: 31345 - DNA, 20 bp, synthetic construct
  misc_feature 1..20: note = chemically synthesized
  source 1..20: mol_type = other DNA
tgatgagagaggacgccagg

SEQ ID NO: 31346 - DNA, 20 bp, synthetic construct
  misc_feature 1..20: note = chemically synthesized
  source 1..20: mol_type = other DNA
atgagagaggacgccaggga

SEQ ID NO: 31347 - DNA, 20 bp, synthetic construct
  misc_feature 1..20: note = chemically synthesized
  source 1..20: mol_type = other DNA
ggacgccagggagagaaacc

SEQ ID NO: 31348 - DNA, 20 bp, synthetic construct
  misc_feature 1..20: note = chemically synthesized
  source 1..20: mol_type = other DNA
gccagggagagaaacccaga

SEQ ID NO: 31349 - DNA, 20 bp, synthetic construct
  misc_feature 1..20: note = chemically synthesized
  source 1..20: mol_type = other DNA
gggagagaaacccagaaagc

SEQ ID NO: 31350 - DNA, 20 bp, synthetic construct
  misc_feature 1..20: note = chemically synthesized
  source 1..20: mol_type = other DNA
aacccagaaagccagactca

SEQ ID NO: 31351 - DNA, 20 bp, synthetic construct
  misc_feature 1..20: note = chemically synthesized
  source 1..20: mol_type = other DNA
acccagaaagccagactcat

SEQ ID NO: 31352 - DNA, 20 bp, synthetic construct
  misc_feature 1..20: note = chemically synthesized
  source 1..20: mol_type = other DNA
agaaagccagactcatggga

SEQ ID NO: 31353 - DNA, 20 bp, synthetic construct
  misc_feature 1..20: note = chemically synthesized
  source 1..20: mol_type = other DNA
cagactcatgggaaagtatc

SEQ ID NO: 31354 - DNA, 20 bp, synthetic construct
  misc_feature 1..20: note = chemically synthesized
  source 1..20: mol_type = other DNA
ctgtccaccatatgtgaaat

SEQ ID NO: 31355 - DNA, 20 bp, synthetic construct
  misc_feature 1..20: note = chemically synthesized
  source 1..20: mol_type = other DNA
atgtgaaattagaattctaa

SEQ ID NO: 31356 - DNA, 20 bp, synthetic construct
  misc_feature 1..20: note = chemically synthesized
  source 1..20: mol_type = other DNA
tgtgaaattagaattctaaa

SEQ ID NO: 31357 - DNA, 20 bp, synthetic construct
  misc_feature 1..20: note = chemically synthesized
  source 1..20: mol_type = other DNA
ttctaaaaggaaacaaaaaa

SEQ ID NO: 31358 - DNA, 20 bp, synthetic construct
  misc_feature 1..20: note = chemically synthesized
  source 1..20: mol_type = other DNA
aaatggattaaacgtttttt

SEQ ID NO: 31359 - DNA, 20 bp, synthetic construct
  misc_feature 1..20: note = chemically synthesized
  source 1..20: mol_type = other DNA
aatggattaaacgttttttg

SEQ ID NO: 31360 - DNA, 20 bp, synthetic construct
  misc_feature 1..20: note = chemically synthesized
  source 1..20: mol_type = other DNA
tgactgaatgtttcaacatc

SEQ ID NO: 31361 - DNA, 20 bp, synthetic construct
  misc_feature 1..20: note = chemically synthesized
  source 1..20: mol_type = other DNA
aatctattaattcatatctt

SEQ ID NO: 31362 - DNA, 20 bp, synthetic construct
  misc_feature 1..20: note = chemically synthesized
  source 1..20: mol_type = other DNA
tcatatctttagctaacctt

SEQ ID NO: 31363 - DNA, 20 bp, synthetic construct
  misc_feature 1..20: note = chemically synthesized
  source 1..20: mol_type = other DNA
ctaaatgcatatcttacaaa

SEQ ID NO: 31364 - DNA, 20 bp, synthetic construct
  misc_feature 1..20: note = chemically synthesized
  source 1..20: mol_type = other DNA
caaatgtatgccaatcttaa

SEQ ID NO: 31365 - DNA, 20 bp, synthetic construct
  misc_feature 1..20: note = chemically synthesized
  source 1..20: mol_type = other DNA
atgtatgccaatcttaaaag

SEQ ID NO: 31366 - DNA, 20 bp, synthetic construct
  misc_feature 1..20: note = chemically synthesized
  source 1..20: mol_type = other DNA
gccaatcttaaaagcagaca

SEQ ID NO: 31367 - DNA, 20 bp, synthetic construct
  misc_feature 1..20: note = chemically synthesized
  source 1..20: mol_type = other DNA
cttaaaagcagacatagaaa

SEQ ID NO: 31368 - DNA, 20 bp, synthetic construct
  misc_feature 1..20: note = chemically synthesized
  source 1..20: mol_type = other DNA
gaaaaagacacattgcatac

SEQ ID NO: 31369 - DNA, 20 bp, synthetic construct
  misc_feature 1..20: note = chemically synthesized
  source 1..20: mol_type = other DNA
attgcatacaagaaaattat

SEQ ID NO: 31370 - DNA, 20 bp, synthetic construct
  misc_feature 1..20: note = chemically synthesized
  source 1..20: mol_type = other DNA
tgcatacaagaaaattatta

SEQ ID NO: 31371 - DNA, 20 bp, synthetic construct
  misc_feature 1..20: note = chemically synthesized
  source 1..20: mol_type = other DNA
gcatacaagaaaattattag

SEQ ID NO: 31372 - DNA, 20 bp, synthetic construct
  misc_feature 1..20: note = chemically synthesized
  source 1..20: mol_type = other DNA
aaaattattagaggaaacaa

SEQ ID NO: 31373 - DNA, 20 bp, synthetic construct
  misc_feature 1..20: note = chemically synthesized
  source 1..20: mol_type = other DNA
ggaaacctgaaaaaataaac

SEQ ID NO: 31374 - DNA, 20 bp, synthetic construct
  misc_feature 1..20: note = chemically synthesized
  source 1..20: mol_type = other DNA
tattattattattatacttt

SEQ ID NO: 31375 - DNA, 20 bp, synthetic construct
  misc_feature 1..20: note = chemically synthesized
  source 1..20: mol_type = other DNA
tattattatactttaagatt

SEQ ID NO: 31376 - DNA, 20 bp, synthetic construct
  misc_feature 1..20: note = chemically synthesized
  source 1..20: mol_type = other DNA
attattatactttaagattt

SEQ ID NO: 31377 - DNA, 20 bp, synthetic construct
  misc_feature 1..20: note = chemically synthesized
  source 1..20: mol_type = other DNA
ttattatactttaagattta

SEQ ID NO: 31378 - DNA, 20 bp, synthetic construct
  misc_feature 1..20: note = chemically synthesized
  source 1..20: mol_type = other DNA
ggtacatgtgcataatgtgc

SEQ ID NO: 31379 - DNA, 20 bp, synthetic construct
  misc_feature 1..20: note = chemically synthesized
  source 1..20: mol_type = other DNA
catgtgcataatgtgccggt

SEQ ID NO: 31380 - DNA, 20 bp, synthetic construct
  misc_feature 1..20: note = chemically synthesized
  source 1..20: mol_type = other DNA
tatgtatacatgtgccatgt

SEQ ID NO: 31381 - DNA, 20 bp, synthetic construct
  misc_feature 1..20: note = chemically synthesized
  source 1..20: mol_type = other DNA
gcacccattaactcgtaatt

SEQ ID NO: 31382 - DNA, 20 bp, synthetic construct
  misc_feature 1..20: note = chemically synthesized
  source 1..20: mol_type = other DNA
attaactcgtaatttagcat

SEQ ID NO: 31383 - DNA, 20 bp, synthetic construct
  misc_feature 1..20: note = chemically synthesized
  source 1..20: mol_type = other DNA
ttaactcgtaatttagcatt

SEQ ID NO: 31384 - DNA, 20 bp, synthetic construct
  misc_feature 1..20: note = chemically synthesized
  source 1..20: mol_type = other DNA
cctgcacccccaccccacaa

SEQ ID NO: 31385 - DNA, 20 bp, synthetic construct
  misc_feature 1..20: note = chemically synthesized
  source 1..20: mol_type = other DNA
ccccaccccacaacagtccc

SEQ ID NO: 31386 - DNA, 20 bp, synthetic construct
  misc_feature 1..20: note = chemically synthesized
  source 1..20: mol_type = other DNA
ccaccccacaacagtcccca

SEQ ID NO: 31387 - DNA, 20 bp, synthetic construct
  misc_feature 1..20: note = chemically synthesized
  source 1..20: mol_type = other DNA
gtccatgtgttctcattgtt

SEQ ID NO: 31388 - DNA, 20 bp, synthetic construct
  misc_feature 1..20: note = chemically synthesized
  source 1..20: mol_type = other DNA
attgttcagttcccatctat

SEQ ID NO: 31389 - DNA, 20 bp, synthetic construct
  misc_feature 1..20: note = chemically synthesized
  source 1..20: mol_type = other DNA
ttcagttcccatctatgagt

SEQ ID NO: 31390 - DNA, 20 bp, synthetic construct
  misc_feature 1..20: note = chemically synthesized
  source 1..20: mol_type = other DNA
catctatgagtgagaatatg

SEQ ID NO: 31391 - DNA, 20 bp, synthetic construct
  misc_feature 1..20: note = chemically synthesized
  source 1..20: mol_type = other DNA
gagtgagaatatgtggtgtt

SEQ ID NO: 31392 - DNA, 20 bp, synthetic construct
  misc_feature 1..20: note = chemically synthesized
  source 1..20: mol_type = other DNA
ttggttttttgtccttgcga

SEQ ID NO: 31393 - DNA, 20 bp, synthetic construct
  misc_feature 1..20: note = chemically synthesized
  source 1..20: mol_type = other DNA
tgtccttgcgatagtttact

SEQ ID NO: 31394 - DNA, 20 bp, synthetic construct
  misc_feature 1..20: note = chemically synthesized
  source 1..20: mol_type = other DNA
atttcatccatgtccctaca

SEQ ID NO: 31395 - DNA, 20 bp, synthetic construct
  misc_feature 1..20: note = chemically synthesized
  source 1..20: mol_type = other DNA
tttcatccatgtccctacaa

SEQ ID NO: 31396 - DNA, 20 bp, synthetic construct
  misc_feature 1..20: note = chemically synthesized
  source 1..20: mol_type = other DNA
acatgaactcatcattttta

SEQ ID NO: 31397 - DNA, 20 bp, synthetic construct
  misc_feature 1..20: note = chemically synthesized
  source 1..20: mol_type = other DNA
tcatcatttttatggctgca

SEQ ID NO: 31398 - DNA, 20 bp, synthetic construct
  misc_feature 1..20: note = chemically synthesized
  source 1..20: mol_type = other DNA
tatggctgcatagtattcca

SEQ ID NO: 31399 - DNA, 20 bp, synthetic construct
  misc_feature 1..20: note = chemically synthesized
  source 1..20: mol_type = other DNA
tgtgccacattttcttaatc

SEQ ID NO: 31400 - DNA, 20 bp, synthetic construct
  misc_feature 1..20: note = chemically synthesized
  source 1..20: mol_type = other DNA
ttaatccagtctatcattgt

SEQ ID NO: 31401 - DNA, 20 bp, synthetic construct
  misc_feature 1..20: note = chemically synthesized
  source 1..20: mol_type = other DNA
gtctatcattgttggacatt

SEQ ID NO: 31402 - DNA, 20 bp, synthetic construct
  misc_feature 1..20: note = chemically synthesized
  source 1..20: mol_type = other DNA
tctatcattgttggacattt

SEQ ID NO: 31403 - DNA, 20 bp, synthetic construct
  misc_feature 1..20: note = chemically synthesized
  source 1..20: mol_type = other DNA
tcattgttggacatttgggt

SEQ ID NO: 31404 - DNA, 20 bp, synthetic construct
  misc_feature 1..20: note = chemically synthesized
  source 1..20: mol_type = other DNA
tggacatttgggttggttcc

SEQ ID NO: 31405 - DNA, 20 bp, synthetic construct
  misc_feature 1..20: note = chemically synthesized
  source 1..20: mol_type = other DNA
caagtctttgctattgtgaa

SEQ ID NO: 31406 - DNA, 20 bp, synthetic construct
  misc_feature 1..20: note = chemically synthesized
  source 1..20: mol_type = other DNA
tacgtgtgcatgtgtcttta

SEQ ID NO: 31407 - DNA, 20 bp, synthetic construct
  misc_feature 1..20: note = chemically synthesized
  source 1..20: mol_type = other DNA
gtgtgcatgtgtctttatag

SEQ ID NO: 31408 - DNA, 20 bp, synthetic construct
  misc_feature 1..20: note = chemically synthesized
  source 1..20: mol_type = other DNA
cagcatgatttatattcctt

SEQ ID NO: 31409 - DNA, 20 bp, synthetic construct
  misc_feature 1..20: note = chemically synthesized
  source 1..20: mol_type = other DNA
agcatgatttatattccttt

SEQ ID NO: 31410 - DNA, 20 bp, synthetic construct
  misc_feature 1..20: note = chemically synthesized
  source 1..20: mol_type = other DNA
tattcctttgggtatatacc

SEQ ID NO: 31411 - DNA, 20 bp, synthetic construct
  misc_feature 1..20: note = chemically synthesized
  source 1..20: mol_type = other DNA
tttgggtatatacccagtaa

SEQ ID NO: 31412 - DNA, 20 bp, synthetic construct
  misc_feature 1..20: note = chemically synthesized
  source 1..20: mol_type = other DNA
ttgggtatatacccagtaat

SEQ ID NO: 31413 - DNA, 20 bp, synthetic construct
  misc_feature 1..20: note = chemically synthesized
  source 1..20: mol_type = other DNA
gtatatacccagtaatggga

SEQ ID NO: 31414 - DNA, 20 bp, synthetic construct
  misc_feature 1..20: note = chemically synthesized
  source 1..20: mol_type = other DNA
atacccagtaatgggatggc

SEQ ID NO: 31415 - DNA, 20 bp, synthetic construct
  misc_feature 1..20: note = chemically synthesized
  source 1..20: mol_type = other DNA
tacccagtaatgggatggct

SEQ ID NO: 31416 - DNA, 20 bp, synthetic construct
  misc_feature 1..20: note = chemically synthesized
  source 1..20: mol_type = other DNA
aatgggatggctgggtcaaa

SEQ ID NO: 31417 - DNA, 20 bp, synthetic construct
  misc_feature 1..20: note = chemically synthesized
  source 1..20: mol_type = other DNA
gctgggtcaaatggtatttc

SEQ ID NO: 31418 - DNA, 20 bp, synthetic construct
  misc_feature 1..20: note = chemically synthesized
  source 1..20: mol_type = other DNA
tcaaatggtatttctagttc

SEQ ID NO: 31419 - DNA, 20 bp, synthetic construct
  misc_feature 1..20: note = chemically synthesized
  source 1..20: mol_type = other DNA
atttctagttctagatccct

SEQ ID NO: 31420 - DNA, 20 bp, synthetic construct
  misc_feature 1..20: note = chemically synthesized
  source 1..20: mol_type = other DNA
tttctagttctagatccctg

SEQ ID NO: 31421 - DNA, 20 bp, synthetic construct
  misc_feature 1..20: note = chemically synthesized
  source 1..20: mol_type = other DNA
cgccacactgacttccacaa

SEQ ID NO: 31422 - DNA, 20 bp, synthetic construct
  misc_feature 1..20: note = chemically synthesized
  source 1..20: mol_type = other DNA
gacttccacaatggttgaac

SEQ ID NO: 31423 - DNA, 20 bp, synthetic construct
  misc_feature 1..20: note = chemically synthesized
  source 1..20: mol_type = other DNA
acaatggttgaactagttta

SEQ ID NO: 31424 - DNA, 20 bp, synthetic construct
  misc_feature 1..20: note = chemically synthesized
  source 1..20: mol_type = other DNA
aactagtttacagtcccacc

SEQ ID NO: 31425 - DNA, 20 bp, synthetic construct
  misc_feature 1..20: note = chemically synthesized
  source 1..20: mol_type = other DNA
ctagtttacagtcccaccaa

SEQ ID NO: 31426 - DNA, 20 bp, synthetic construct
  misc_feature 1..20: note = chemically synthesized
  source 1..20: mol_type = other DNA
cagtcccaccaagagtgtaa

SEQ ID NO: 31427 - DNA, 20 bp, synthetic construct
  misc_feature 1..20: note = chemically synthesized
  source 1..20: mol_type = other DNA
ctatttctccacatcctctc

SEQ ID NO: 31428 - DNA, 20 bp, synthetic construct
  misc_feature 1..20: note = chemically synthesized
  source 1..20: mol_type = other DNA
ttaatgattgccattctaac

SEQ ID NO: 31429 - DNA, 20 bp, synthetic construct
  misc_feature 1..20: note = chemically synthesized
  source 1..20: mol_type = other DNA
attgccattctaactggtat

SEQ ID NO: 31430 - DNA, 20 bp, synthetic construct
  misc_feature 1..20: note = chemically synthesized
  source 1..20: mol_type = other DNA
ccattctaactggtatgaga

SEQ ID NO: 31431 - DNA, 20 bp, synthetic construct
  misc_feature 1..20: note = chemically synthesized
  source 1..20: mol_type = other DNA
tatgagatggtatctcattg

SEQ ID NO: 31432 - DNA, 20 bp, synthetic construct
  misc_feature 1..20: note = chemically synthesized
  source 1..20: mol_type = other DNA
tttgatttgcatttctctga

SEQ ID NO: 31433 - DNA, 20 bp, synthetic construct
  misc_feature 1..20: note = chemically synthesized
  source 1..20: mol_type = other DNA
atttgcatttctctgatggc

SEQ ID NO: 31434 - DNA, 20 bp, synthetic construct
  misc_feature 1..20: note = chemically synthesized
  source 1..20: mol_type = other DNA
ctctgatggccagtgatgat

SEQ ID NO: 31435 - DNA, 20 bp, synthetic construct
  misc_feature 1..20: note = chemically synthesized
  source 1..20: mol_type = other DNA
gcattttttcatgtgtcttt

SEQ ID NO: 31436 - DNA, 20 bp, synthetic construct
  misc_feature 1..20: note = chemically synthesized
  source 1..20: mol_type = other DNA
ttgcataaatgttttctttt

SEQ ID NO: 31437 - DNA, 20 bp, synthetic construct
  misc_feature 1..20: note = chemically synthesized
  source 1..20: mol_type = other DNA
cataaatgttttcttttgag

SEQ ID NO: 31438 - DNA, 20 bp, synthetic construct
  misc_feature 1..20: note = chemically synthesized
  source 1..20: mol_type = other DNA
atcctttgcccacttgttga

SEQ ID NO: 31439 - DNA, 20 bp, synthetic construct
  misc_feature 1..20: note = chemically synthesized
  source 1..20: mol_type = other DNA
tcctttgcccacttgttgat

SEQ ID NO: 31440 - DNA, 20 bp, synthetic construct
  misc_feature 1..20: note = chemically synthesized
  source 1..20: mol_type = other DNA
cctttgcccacttgttgatg

SEQ ID NO: 31441 - DNA, 20 bp, synthetic construct
  misc_feature 1..20: note = chemically synthesized
  source 1..20: mol_type = other DNA
tttttcttgtaaatttgttt

SEQ ID NO: 31442 - DNA, 20 bp, synthetic construct
  misc_feature 1..20: note = chemically synthesized
  source 1..20: mol_type = other DNA
aaatttgtttgagttcatta

SEQ ID NO: 31443 - DNA, 20 bp, synthetic construct
  misc_feature 1..20: note = chemically synthesized
  source 1..20: mol_type = other DNA
tttgagttcattatagattc

SEQ ID NO: 31444 - DNA, 20 bp, synthetic construct
  misc_feature 1..20: note = chemically synthesized
  source 1..20: mol_type = other DNA
tcattatagattctggatat

SEQ ID NO: 31445 - DNA, 20 bp, synthetic construct
  misc_feature 1..20: note = chemically synthesized
  source 1..20: mol_type = other DNA
tctggatattagccctttgt

SEQ ID NO: 31446 - DNA, 20 bp, synthetic construct
  misc_feature 1..20: note = chemically synthesized
  source 1..20: mol_type = other DNA
atattagccctttgtcagat

SEQ ID NO: 31447 - DNA, 20 bp, synthetic construct
  misc_feature 1..20: note = chemically synthesized
  source 1..20: mol_type = other DNA
ttagccctttgtcagatgag

SEQ ID NO: 31448 - DNA, 20 bp, synthetic construct
  misc_feature 1..20: note = chemically synthesized
  source 1..20: mol_type = other DNA
tagccctttgtcagatgagt

SEQ ID NO: 31449 - DNA, 20 bp, synthetic construct
  misc_feature 1..20: note = chemically synthesized
  source 1..20: mol_type = other DNA
gaaaattttctcccattgtg

SEQ ID NO: 31450 - DNA, 20 bp, synthetic construct
  misc_feature 1..20: note = chemically synthesized
  source 1..20: mol_type = other DNA
aaaattttctcccattgtgt

SEQ ID NO: 31451 - DNA, 20 bp, synthetic construct
  misc_feature 1..20: note = chemically synthesized
  source 1..20: mol_type = other DNA
aggttgcctgttcactctga

SEQ ID NO: 31452 - DNA, 20 bp, synthetic construct
  misc_feature 1..20: note = chemically synthesized
  source 1..20: mol_type = other DNA
ttgcctgttcactctgatgg

SEQ ID NO: 31453 - DNA, 20 bp, synthetic construct
  misc_feature 1..20: note = chemically synthesized
  source 1..20: mol_type = other DNA
cactctgatggtagtttctt

SEQ ID NO: 31454 - DNA, 20 bp, synthetic construct
  misc_feature 1..20: note = chemically synthesized
  source 1..20: mol_type = other DNA
tggtagtttctttagctgtg

SEQ ID NO: 31455 - DNA, 20 bp, synthetic construct
  misc_feature 1..20: note = chemically synthesized
  source 1..20: mol_type = other DNA
tagtttctttagctgtgcag

SEQ ID NO: 31456 - DNA, 20 bp, synthetic construct
  misc_feature 1..20: note = chemically synthesized
  source 1..20: mol_type = other DNA
ttagctgtgcagaagctctt

SEQ ID NO: 31457 - DNA, 20 bp, synthetic construct
  misc_feature 1..20: note = chemically synthesized
  source 1..20: mol_type = other DNA
cagaagctctttagtttcat

SEQ ID NO: 31458 - DNA, 20 bp, synthetic construct
  misc_feature 1..20: note = chemically synthesized
  source 1..20: mol_type = other DNA
ttagtttcattagatcccat

SEQ ID NO: 31459 - DNA, 20 bp, synthetic construct
  misc_feature 1..20: note = chemically synthesized
  source 1..20: mol_type = other DNA
tagatcccattagtgaattt

SEQ ID NO: 31460 - DNA, 20 bp, synthetic construct
  misc_feature 1..20: note = chemically synthesized
  source 1..20: mol_type = other DNA
gcttttgttgccatcgcttt

SEQ ID NO: 31461 - DNA, 20 bp, synthetic construct
  misc_feature 1..20: note = chemically synthesized
  source 1..20: mol_type = other DNA
tgccatcgcttttggtgttt

SEQ ID NO: 31462 - DNA, 20 bp, synthetic construct
  misc_feature 1..20: note = chemically synthesized
  source 1..20: mol_type = other DNA
cttttggtgttttagacatg

SEQ ID NO: 31463 - DNA, 20 bp, synthetic construct
  misc_feature 1..20: note = chemically synthesized
  source 1..20: mol_type = other DNA
gcccatgcctatgtcctgaa

SEQ ID NO: 31464 - DNA, 20 bp, synthetic construct
  misc_feature 1..20: note = chemically synthesized
  source 1..20: mol_type = other DNA
gtaatgcctgcgttttcttc

SEQ ID NO: 31465 - DNA, 20 bp, synthetic construct
  misc_feature 1..20: note = chemically synthesized
  source 1..20: mol_type = other DNA
taatgcctgcgttttcttct

SEQ ID NO: 31466 - DNA, 20 bp, synthetic construct
  misc_feature 1..20: note = chemically synthesized
  source 1..20: mol_type = other DNA
aatgcctgcgttttcttcta

SEQ ID NO: 31467 - DNA, 20 bp, synthetic construct
  misc_feature 1..20: note = chemically synthesized
  source 1..20: mol_type = other DNA
gttttcttctagggttttta

SEQ ID NO: 31468 - DNA, 20 bp, synthetic construct
  misc_feature 1..20: note = chemically synthesized
  source 1..20: mol_type = other DNA
ttctagggtttttatggttt

SEQ ID NO: 31469 - DNA, 20 bp, synthetic construct
  misc_feature 1..20: note = chemically synthesized
  source 1..20: mol_type = other DNA
tctagggtttttatggtttt

SEQ ID NO: 31470 - DNA, 20 bp, synthetic construct
  misc_feature 1..20: note = chemically synthesized
  source 1..20: mol_type = other DNA
tggttttaggtctaatgttt

SEQ ID NO: 31471 - DNA, 20 bp, synthetic construct
  misc_feature 1..20: note = chemically synthesized
  source 1..20: mol_type = other DNA
tcttgaattaatttttgtat

SEQ ID NO: 31472 - DNA, 20 bp, synthetic construct
  misc_feature 1..20: note = chemically synthesized
  source 1..20: mol_type = other DNA
cttgaattaatttttgtata

SEQ ID NO: 31473 - DNA, 20 bp, synthetic construct
  misc_feature 1..20: note = chemically synthesized
  source 1..20: mol_type = other DNA
ttaatttttgtataaggtgt

SEQ ID NO: 31474 - DNA, 20 bp, synthetic construct
  misc_feature 1..20: note = chemically synthesized
  source 1..20: mol_type = other DNA
taatttttgtataaggtgta

SEQ ID NO: 31475 - DNA, 20 bp, synthetic construct
  misc_feature 1..20: note = chemically synthesized
  source 1..20: mol_type = other DNA
tttttgtataaggtgtaagg

SEQ ID NO: 31476 - DNA, 20 bp, synthetic construct
  misc_feature 1..20: note = chemically synthesized
  source 1..20: mol_type = other DNA
ttttgtataaggtgtaagga

SEQ ID NO: 31477 - DNA, 20 bp, synthetic construct
  misc_feature 1..20: note = chemically synthesized
  source 1..20: mol_type = other DNA
tttgtataaggtgtaaggaa

SEQ ID NO: 31478 - DNA, 20 bp, synthetic construct
  misc_feature 1..20: note = chemically synthesized
  source 1..20: mol_type = other DNA
taaggtgtaaggaagggatc

SEQ ID NO: 31479 - DNA, 20 bp, synthetic construct
  misc_feature 1..20: note = chemically synthesized
  source 1..20: mol_type = other DNA
gtaaggaagggatccagttt

SEQ ID NO: 31480 - DNA, 20 bp, synthetic construct
  misc_feature 1..20: note = chemically synthesized
  source 1..20: mol_type = other DNA
cagtttcagcattctacata

SEQ ID NO: 31481 - DNA, 20 bp, synthetic construct
  misc_feature 1..20: note = chemically synthesized
  source 1..20: mol_type = other DNA
ttcagcattctacatatggc

SEQ ID NO: 31482 - DNA, 20 bp, synthetic construct
  misc_feature 1..20: note = chemically synthesized
  source 1..20: mol_type = other DNA
gcattctacatatggctagc

SEQ ID NO: 31483 - DNA, 20 bp, synthetic construct
  misc_feature 1..20: note = chemically synthesized
  source 1..20: mol_type = other DNA
atatggctagccagttctcc

SEQ ID NO: 31484 - DNA, 20 bp, synthetic construct
  misc_feature 1..20: note = chemically synthesized
  source 1..20: mol_type = other DNA
tcccagcaccatttattaaa

SEQ ID NO: 31485 - DNA, 20 bp, synthetic construct
  misc_feature 1..20: note = chemically synthesized
  source 1..20: mol_type = other DNA
cccagcaccatttattaaat

SEQ ID NO: 31486 - DNA, 20 bp, synthetic construct
  misc_feature 1..20: note = chemically synthesized
  source 1..20: mol_type = other DNA
ccagcaccatttattaaata

SEQ ID NO: 31487 - DNA, 20 bp, synthetic construct
  misc_feature 1..20: note = chemically synthesized
  source 1..20: mol_type = other DNA
tccccatttcttgtttttct

SEQ ID NO: 31488 - DNA, 20 bp, synthetic construct
  misc_feature 1..20: note = chemically synthesized
  source 1..20: mol_type = other DNA
ccccatttcttgtttttctc

SEQ ID NO: 31489 - DNA, 20 bp, synthetic construct
  misc_feature 1..20: note = chemically synthesized
  source 1..20: mol_type = other DNA
tgtttttctcaggtttttca

SEQ ID NO: 31490 - DNA, 20 bp, synthetic construct
  misc_feature 1..20: note = chemically synthesized
  source 1..20: mol_type = other DNA
ttctcaggtttttcaaagat

SEQ ID NO: 31491 - DNA, 20 bp, synthetic construct
  misc_feature 1..20: note = chemically synthesized
  source 1..20: mol_type = other DNA
caggtttttcaaagatcaga

SEQ ID NO: 31492 - DNA, 20 bp, synthetic construct
  misc_feature 1..20: note = chemically synthesized
  source 1..20: mol_type = other DNA
tttcaaagatcagatagttg

SEQ ID NO: 31493 - DNA, 20 bp, synthetic construct
  misc_feature 1..20: note = chemically synthesized
  source 1..20: mol_type = other DNA
agatatgcgtcgttatttct

SEQ ID NO: 31494 - DNA, 20 bp, synthetic construct
  misc_feature 1..20: note = chemically synthesized
  source 1..20: mol_type = other DNA
gatatgcgtcgttatttctg

SEQ ID NO: 31495 - DNA, 20 bp, synthetic construct
  misc_feature 1..20: note = chemically synthesized
  source 1..20: mol_type = other DNA
atatgcgtcgttatttctga

SEQ ID NO: 31496 - DNA, 20 bp, synthetic construct
  misc_feature 1..20: note = chemically synthesized
  source 1..20: mol_type = other DNA
attgatctatatctgtgttt

SEQ ID NO: 31497 - DNA, 20 bp, synthetic construct
  misc_feature 1..20: note = chemically synthesized
  source 1..20: mol_type = other DNA
ctatatctgtgttttggtac

SEQ ID NO: 31498 - DNA, 20 bp, synthetic construct
  misc_feature 1..20: note = chemically synthesized
  source 1..20: mol_type = other DNA
gtaccagtaacatgctgttt

SEQ ID NO: 31499 - DNA, 20 bp, synthetic construct
  misc_feature 1..20: note = chemically synthesized
  source 1..20: mol_type = other DNA
acatgctgttttggttactg

SEQ ID NO: 31500 - DNA, 20 bp, synthetic construct
  misc_feature 1..20: note = chemically synthesized
  source 1..20: mol_type = other DNA
ttttggttactgtagccttg

SEQ ID NO: 31501 - DNA, 20 bp, synthetic construct
  misc_feature 1..20: note = chemically synthesized
  source 1..20: mol_type = other DNA
gttactgtagccttgtagta

SEQ ID NO: 31502 - DNA, 20 bp, synthetic construct
  misc_feature 1..20: note = chemically synthesized
  source 1..20: mol_type = other DNA
tagccttgtagtatagtttg

SEQ ID NO: 31503 - DNA, 20 bp, synthetic construct
  misc_feature 1..20: note = chemically synthesized
  source 1..20: mol_type = other DNA
cttgtagtatagtttgaagt

SEQ ID NO: 31504 - DNA, 20 bp, synthetic construct
  misc_feature 1..20: note = chemically synthesized
  source 1..20: mol_type = other DNA
ttgtagtatagtttgaagtg

SEQ ID NO: 31505 - DNA, 20 bp, synthetic construct
  misc_feature 1..20: note = chemically synthesized
  source 1..20: mol_type = other DNA
tagtatagtttgaagtgagg

SEQ ID NO: 31506 - DNA, 20 bp, synthetic construct
  misc_feature 1..20: note = chemically synthesized
  source 1..20: mol_type = other DNA
gtgaggtagcctgatgcctc

SEQ ID NO: 31507 - DNA, 20 bp, synthetic construct
  misc_feature 1..20: note = chemically synthesized
  source 1..20: mol_type = other DNA
tgcctccagctttgttcttt

SEQ ID NO: 31508 - DNA, 20 bp, synthetic construct
  misc_feature 1..20: note = chemically synthesized
  source 1..20: mol_type = other DNA
ccagctttgttcttttggct

SEQ ID NO: 31509 - DNA, 20 bp, synthetic construct
  misc_feature 1..20: note = chemically synthesized
  source 1..20: mol_type = other DNA
cagctttgttcttttggctt

SEQ ID NO: 31510 - DNA, 20 bp, synthetic construct
  misc_feature 1..20: note = chemically synthesized
  source 1..20: mol_type = other DNA
cttttggcttaggattgact

SEQ ID NO: 31511 - DNA, 20 bp, synthetic construct
  misc_feature 1..20: note = chemically synthesized
  source 1..20: mol_type = other DNA
ttaggattgacttggcaatg

SEQ ID NO: 31512 - DNA, 20 bp, synthetic construct
  misc_feature 1..20: note = chemically synthesized
  source 1..20: mol_type = other DNA
taggattgacttggcaatgc

SEQ ID NO: 31513 - DNA, 20 bp, synthetic construct
  misc_feature 1..20: note = chemically synthesized
  source 1..20: mol_type = other DNA
tggcaatgcaggctcttttt

SEQ ID NO: 31514 - DNA, 20 bp, synthetic construct
  misc_feature 1..20: note = chemically synthesized
  source 1..20: mol_type = other DNA
ttggttccatatgaacttta

SEQ ID NO: 31515 - DNA, 20 bp, synthetic construct
  misc_feature 1..20: note = chemically synthesized
  source 1..20: mol_type = other DNA
gtcgtttttccaattctgtg

SEQ ID NO: 31516 - DNA, 20 bp, synthetic construct
  misc_feature 1..20: note = chemically synthesized
  source 1..20: mol_type = other DNA
aattctgtgaagaaaatcat

SEQ ID NO: 31517 - DNA, 20 bp, synthetic construct
  misc_feature 1..20: note = chemically synthesized
  source 1..20: mol_type = other DNA
tctgtgaagaaaatcattgg

SEQ ID NO: 31518 - DNA, 20 bp, synthetic construct
  misc_feature 1..20: note = chemically synthesized
  source 1..20: mol_type = other DNA
gaaaatcattggtagcttga

SEQ ID NO: 31519 - DNA, 20 bp, synthetic construct
  misc_feature 1..20: note = chemically synthesized
  source 1..20: mol_type = other DNA
aaaatcattggtagcttgat

SEQ ID NO: 31520 - DNA, 20 bp, synthetic construct
  misc_feature 1..20: note = chemically synthesized
  source 1..20: mol_type = other DNA
aaatcattggtagcttgatg

SEQ ID NO: 31521 - DNA, 20 bp, synthetic construct
  misc_feature 1..20: note = chemically synthesized
  source 1..20: mol_type = other DNA
cattggtagcttgatgggga

SEQ ID NO: 31522 - DNA, 20 bp, synthetic construct
  misc_feature 1..20: note = chemically synthesized
  source 1..20: mol_type = other DNA
attgaatctataaattacct

SEQ ID NO: 31523 - DNA, 20 bp, synthetic construct
  misc_feature 1..20: note = chemically synthesized
  source 1..20: mol_type = other DNA
ttgaatctataaattacctt

SEQ ID NO: 31524 - DNA, 20 bp, synthetic construct
  misc_feature 1..20: note = chemically synthesized
  source 1..20: mol_type = other DNA
ataaattaccttgggcatta

SEQ ID NO: 31525 - DNA, 20 bp, synthetic construct
  misc_feature 1..20: note = chemically synthesized
  source 1..20: mol_type = other DNA
tattgattcttcctacccat

SEQ ID NO: 31526 - DNA, 20 bp, synthetic construct
  misc_feature 1..20: note = chemically synthesized
  source 1..20: mol_type = other DNA
attcttcctacccataagca

SEQ ID NO: 31527 - DNA, 20 bp, synthetic construct
  misc_feature 1..20: note = chemically synthesized
  source 1..20: mol_type = other DNA
gtatcttcttttatttcatt

SEQ ID NO: 31528 - DNA, 20 bp, synthetic construct
  misc_feature 1..20: note = chemically synthesized
  source 1..20: mol_type = other DNA
tcttcttttatttcattgag

SEQ ID NO: 31529 - DNA, 20 bp, synthetic construct
  misc_feature 1..20: note = chemically synthesized
  source 1..20: mol_type = other DNA
tcttttatttcattgagcag

SEQ ID NO: 31530 - DNA, 20 bp, synthetic construct
  misc_feature 1..20: note = chemically synthesized
  source 1..20: mol_type = other DNA
tttcattgagcagtggtttg

SEQ ID NO: 31531 - DNA, 20 bp, synthetic construct
  misc_feature 1..20: note = chemically synthesized
  source 1..20: mol_type = other DNA
gtggtttgtagttctccttg

SEQ ID NO: 31532 - DNA, 20 bp, synthetic construct
  misc_feature 1..20: note = chemically synthesized
  source 1..20: mol_type = other DNA
ggtttgtagttctccttgaa

SEQ ID NO: 31533 - DNA, 20 bp, synthetic construct
  misc_feature 1..20: note = chemically synthesized
  source 1..20: mol_type = other DNA
gtttgtagttctccttgaag

SEQ ID NO: 31534 - DNA, 20 bp, synthetic construct
  misc_feature 1..20: note = chemically synthesized
  source 1..20: mol_type = other DNA
aggtccttcacatcccttgt

SEQ ID NO: 31535 - DNA, 20 bp, synthetic construct
  misc_feature 1..20: note = chemically synthesized
  source 1..20: mol_type = other DNA
ccttcacatcccttgtaagt

SEQ ID NO: 31536 - DNA, 20 bp, synthetic construct
  misc_feature 1..20: note = chemically synthesized
  source 1..20: mol_type = other DNA
tcccttgtaagttggattcc

SEQ ID NO: 31537 - DNA, 20 bp, synthetic construct
  misc_feature 1..20: note = chemically synthesized
  source 1..20: mol_type = other DNA
cccttgtaagttggattcct

SEQ ID NO: 31538 - DNA, 20 bp, synthetic construct
  misc_feature 1..20: note = chemically synthesized
  source 1..20: mol_type = other DNA
taggtattttattctctttg

SEQ ID NO: 31539 - DNA, 20 bp, synthetic construct
  misc_feature 1..20: note = chemically synthesized
  source 1..20: mol_type = other DNA
ctctttgaagcaattgtgaa

SEQ ID NO: 31540 - DNA, 20 bp, synthetic construct
  misc_feature 1..20: note = chemically synthesized
  source 1..20: mol_type = other DNA
tctttgaagcaattgtgaat

SEQ ID NO: 31541 - DNA, 20 bp, synthetic construct
  misc_feature 1..20: note = chemically synthesized
  source 1..20: mol_type = other DNA
tttgaagcaattgtgaatgg

SEQ ID NO: 31542 - DNA, 20 bp, synthetic construct
  misc_feature 1..20: note = chemically synthesized
  source 1..20: mol_type = other DNA
atgggagttccctcatgatt

SEQ ID NO: 31543 - DNA, 20 bp, synthetic construct
  misc_feature 1..20: note = chemically synthesized
  source 1..20: mol_type = other DNA
gctctctgtttgtctgttat

SEQ ID NO: 31544 - DNA, 20 bp, synthetic construct
  misc_feature 1..20: note = chemically synthesized
  source 1..20: mol_type = other DNA
tttgtctgttattggtgtat

SEQ ID NO: 31545 - DNA, 20 bp, synthetic construct
  misc_feature 1..20: note = chemically synthesized
  source 1..20: mol_type = other DNA
tgcttgtgatttttgcacat

SEQ ID NO: 31546 - DNA, 20 bp, synthetic construct
  misc_feature 1..20: note = chemically synthesized
  source 1..20: mol_type = other DNA
gcacattggttttgtatcct

SEQ ID NO: 31547 - DNA, 20 bp, synthetic construct
  misc_feature 1..20: note = chemically synthesized
  source 1..20: mol_type = other DNA
cacattggttttgtatcctg

SEQ ID NO: 31548 - DNA, 20 bp, synthetic construct
  misc_feature 1..20: note = chemically synthesized
  source 1..20: mol_type = other DNA
tgtatcctgaggctttgctg

SEQ ID NO: 31549 - DNA, 20 bp, synthetic construct
  misc_feature 1..20: note = chemically synthesized
  source 1..20: mol_type = other DNA
gctttgctgaagttgcttat

SEQ ID NO: 31550 - DNA, 20 bp, synthetic construct
  misc_feature 1..20: note = chemically synthesized
  source 1..20: mol_type = other DNA
ctgaagttgcttatcagctt

SEQ ID NO: 31551 - DNA, 20 bp, synthetic construct
  misc_feature 1..20: note = chemically synthesized
  source 1..20: mol_type = other DNA
tgaagttgcttatcagctta

SEQ ID NO: 31552 - DNA, 20 bp, synthetic construct
  misc_feature 1..20: note = chemically synthesized
  source 1..20: mol_type = other DNA
aagttgcttatcagcttaag

SEQ ID NO: 31553 - DNA, 20 bp, synthetic construct
  misc_feature 1..20: note = chemically synthesized
  source 1..20: mol_type = other DNA
ttatcagcttaaggagattt

SEQ ID NO: 31554 - DNA, 20 bp, synthetic construct
  misc_feature 1..20: note = chemically synthesized
  source 1..20: mol_type = other DNA
tatcagcttaaggagatttt

SEQ ID NO: 31555 - DNA, 20 bp, synthetic construct
  misc_feature 1..20: note = chemically synthesized
  source 1..20: mol_type = other DNA
gcttaaggagattttgggct

SEQ ID NO: 31556 - DNA, 20 bp, synthetic construct
  misc_feature 1..20: note = chemically synthesized
  source 1..20: mol_type = other DNA
aggagattttgggctgagac

SEQ ID NO: 31557 - DNA, 20 bp, synthetic construct
  misc_feature 1..20: note = chemically synthesized
  source 1..20: mol_type = other DNA
ggagattttgggctgagaca

SEQ ID NO: 31558 - DNA, 20 bp, synthetic construct
  misc_feature 1..20: note = chemically synthesized
  source 1..20: mol_type = other DNA
gagattttgggctgagacaa

SEQ ID NO: 31559 - DNA, 20 bp, synthetic construct
  misc_feature 1..20: note = chemically synthesized
  source 1..20: mol_type = other DNA
agattttgggctgagacaag

SEQ ID NO: 31560 - DNA, 20 bp, synthetic construct
  misc_feature 1..20: note = chemically synthesized
  source 1..20: mol_type = other DNA
gattttgggctgagacaagg

SEQ ID NO: 31561 - DNA, 20 bp, synthetic construct
  misc_feature 1..20: note = chemically synthesized
  source 1..20: mol_type = other DNA
gctgagacaagggggttttc

SEQ ID NO: 31562 - DNA, 20 bp, synthetic construct
  misc_feature 1..20: note = chemically synthesized
  source 1..20: mol_type = other DNA
acaatcatgtcgtctgcaaa

SEQ ID NO: 31563 - DNA, 20 bp, synthetic construct
  misc_feature 1..20: note = chemically synthesized
  source 1..20: mol_type = other DNA
caatcatgtcgtctgcaaac

SEQ ID NO: 31564 - DNA, 20 bp, synthetic construct
  misc_feature 1..20: note = chemically synthesized
  source 1..20: mol_type = other DNA
aatcatgtcgtctgcaaaca

SEQ ID NO: 31565 - DNA, 20 bp, synthetic construct
  misc_feature 1..20: note = chemically synthesized
  source 1..20: mol_type = other DNA
tgtcttctgcctaattgccc

SEQ ID NO: 31566 - DNA, 20 bp, synthetic construct
  misc_feature 1..20: note = chemically synthesized
  source 1..20: mol_type = other DNA
ttctgcctaattgccctggc

SEQ ID NO: 31567 - DNA, 20 bp, synthetic construct
  misc_feature 1..20: note = chemically synthesized
  source 1..20: mol_type = other DNA
acttccaacactatgttgaa

SEQ ID NO: 31568 - DNA, 20 bp, synthetic construct
  misc_feature 1..20: note = chemically synthesized
  source 1..20: mol_type = other DNA
cttccaacactatgttgaat

SEQ ID NO: 31569 - DNA, 20 bp, synthetic construct
  misc_feature 1..20: note = chemically synthesized
  source 1..20: mol_type = other DNA
tccaacactatgttgaatag

SEQ ID NO: 31570 - DNA, 20 bp, synthetic construct
  misc_feature 1..20: note = chemically synthesized
  source 1..20: mol_type = other DNA
aacactatgttgaataggag

SEQ ID NO: 31571 - DNA, 20 bp, synthetic construct
  misc_feature 1..20: note = chemically synthesized
  source 1..20: mol_type = other DNA
ctatgttgaataggagtagt

SEQ ID NO: 31572 - DNA, 20 bp, synthetic construct
  misc_feature 1..20: note = chemically synthesized
  source 1..20: mol_type = other DNA
atgttgaataggagtagtga

SEQ ID NO: 31573 - DNA, 20 bp, synthetic construct
  misc_feature 1..20: note = chemically synthesized
  source 1..20: mol_type = other DNA
gttgaataggagtagtgaga

SEQ ID NO: 31574 - DNA, 20 bp, synthetic construct
  misc_feature 1..20: note = chemically synthesized
  source 1..20: mol_type = other DNA
ttgaataggagtagtgagag

SEQ ID NO: 31575 - DNA, 20 bp, synthetic construct
  misc_feature 1..20: note = chemically synthesized
  source 1..20: mol_type = other DNA
tgaataggagtagtgagaga

SEQ ID NO: 31576 - DNA, 20 bp, synthetic construct
  misc_feature 1..20: note = chemically synthesized
  source 1..20: mol_type = other DNA
agggcatccctgtcttgtgc

SEQ ID NO: 31577 - DNA, 20 bp, synthetic construct
  misc_feature 1..20: note = chemically synthesized
  source 1..20: mol_type = other DNA
ctgtcttgtgccagtttaca

SEQ ID NO: 31578 - DNA, 20 bp, synthetic construct
  misc_feature 1..20: note = chemically synthesized
  source 1..20: mol_type = other DNA
tgtcttgtgccagtttacaa

SEQ ID NO: 31579 - DNA, 20 bp, synthetic construct
  misc_feature 1..20: note = chemically synthesized
  source 1..20: mol_type = other DNA
gtcttgtgccagtttacaaa

SEQ ID NO: 31580 - DNA, 20 bp, synthetic construct
  misc_feature 1..20: note = chemically synthesized
  source 1..20: mol_type = other DNA
gtttacaaagggaatgcttc

SEQ ID NO: 31581 - DNA, 20 bp, synthetic construct
  misc_feature 1..20: note = chemically synthesized
  source 1..20: mol_type = other DNA
gcttccagtttttgcccatt

SEQ ID NO: 31582 - DNA, 20 bp, synthetic construct
  misc_feature 1..20: note = chemically synthesized
  source 1..20: mol_type = other DNA
ttgcccattcagtatgatat

SEQ ID NO: 31583 - DNA, 20 bp, synthetic construct
  misc_feature 1..20: note = chemically synthesized
  source 1..20: mol_type = other DNA
attcagtatgatattggctg

SEQ ID NO: 31584 - DNA, 20 bp, synthetic construct
  misc_feature 1..20: note = chemically synthesized
  source 1..20: mol_type = other DNA
ttcagtatgatattggctgt

SEQ ID NO: 31585 - DNA, 20 bp, synthetic construct
  misc_feature 1..20: note = chemically synthesized
  source 1..20: mol_type = other DNA
tattggctgtgggtttgtca

SEQ ID NO: 31586 - DNA, 20 bp, synthetic construct
  misc_feature 1..20: note = chemically synthesized
  source 1..20: mol_type = other DNA
ggctgtgggtttgtcataga

SEQ ID NO: 31587 - DNA, 20 bp, synthetic construct
  misc_feature 1..20: note = chemically synthesized
  source 1..20: mol_type = other DNA
tagatagctcttattatttt

SEQ ID NO: 31588 - DNA, 20 bp, synthetic construct
  misc_feature 1..20: note = chemically synthesized
  source 1..20: mol_type = other DNA
atcaatacctaatttattga

SEQ ID NO: 31589 - DNA, 20 bp, synthetic construct
  misc_feature 1..20: note = chemically synthesized
  source 1..20: mol_type = other DNA
cctaatttattgaaagtttt

SEQ ID NO: 31590 - DNA, 20 bp, synthetic construct
  misc_feature 1..20: note = chemically synthesized
  source 1..20: mol_type = other DNA
tattgaaagtttttagcatg

SEQ ID NO: 31591 - DNA, 20 bp, synthetic construct
  misc_feature 1..20: note = chemically synthesized
  source 1..20: mol_type = other DNA
attgaaagtttttagcatga

SEQ ID NO: 31592 - DNA, 20 bp, synthetic construct
  misc_feature 1..20: note = chemically synthesized
  source 1..20: mol_type = other DNA
ttgaaagtttttagcatgaa

SEQ ID NO: 31593 - DNA, 20 bp, synthetic construct
  misc_feature 1..20: note = chemically synthesized
  source 1..20: mol_type = other DNA
agggttgttgaattttgtca

SEQ ID NO: 31594 - DNA, 20 bp, synthetic construct
  misc_feature 1..20: note = chemically synthesized
  source 1..20: mol_type = other DNA
gggttgttgaattttgtcaa

SEQ ID NO: 31595 - DNA, 20 bp, synthetic construct
  misc_feature 1..20: note = chemically synthesized
  source 1..20: mol_type = other DNA
aggccttttctgcatctatt

SEQ ID NO: 31596 - DNA, 20 bp, synthetic construct
  misc_feature 1..20: note = chemically synthesized
  source 1..20: mol_type = other DNA
catctattgagataatcatg

SEQ ID NO: 31597 - DNA, 20 bp, synthetic construct
  misc_feature 1..20: note = chemically synthesized
  source 1..20: mol_type = other DNA
aatcatgtggtttttgtctt

SEQ ID NO: 31598 - DNA, 20 bp, synthetic construct
  misc_feature 1..20: note = chemically synthesized
  source 1..20: mol_type = other DNA
ctttggttctgtttatatgc

SEQ ID NO: 31599 - DNA, 20 bp, synthetic construct
  misc_feature 1..20: note = chemically synthesized
  source 1..20: mol_type = other DNA
ttgatttgcatatattgaac

SEQ ID NO: 31600 - DNA, 20 bp, synthetic construct
  misc_feature 1..20: note = chemically synthesized
  source 1..20: mol_type = other DNA
attgaaccagccttgcatcc

SEQ ID NO: 31601 - DNA, 20 bp, synthetic construct
  misc_feature 1..20: note = chemically synthesized
  source 1..20: mol_type = other DNA
ttgaaccagccttgcatccc

SEQ ID NO: 31602 - DNA, 20 bp, synthetic construct
  misc_feature 1..20: note = chemically synthesized
  source 1..20: mol_type = other DNA
tgaaccagccttgcatccca

SEQ ID NO: 31603 - DNA, 20 bp, synthetic construct
  misc_feature 1..20: note = chemically synthesized
  source 1..20: mol_type = other DNA
agccttgcatcccagggatg

SEQ ID NO: 31604 - DNA, 20 bp, synthetic construct
  misc_feature 1..20: note = chemically synthesized
  source 1..20: mol_type = other DNA
tgaagtccacttgatcatcg

SEQ ID NO: 31605 - DNA, 20 bp, synthetic construct
  misc_feature 1..20: note = chemically synthesized
  source 1..20: mol_type = other DNA
tccacttgatcatcgtggat

SEQ ID NO: 31606 - DNA, 20 bp, synthetic construct
  misc_feature 1..20: note = chemically synthesized
  source 1..20: mol_type = other DNA
taagctttttgatgtgctgc

SEQ ID NO: 31607 - DNA, 20 bp, synthetic construct
  misc_feature 1..20: note = chemically synthesized
  source 1..20: mol_type = other DNA
ttttgatgtgctgctggatt

SEQ ID NO: 31608 - DNA, 20 bp, synthetic construct
  misc_feature 1..20: note = chemically synthesized
  source 1..20: mol_type = other DNA
tgctgctggattcggtttgc

SEQ ID NO: 31609 - DNA, 20 bp, synthetic construct
  misc_feature 1..20: note = chemically synthesized
  source 1..20: mol_type = other DNA
cggtttgccagtattttatt

SEQ ID NO: 31610 - DNA, 20 bp, synthetic construct
  misc_feature 1..20: note = chemically synthesized
  source 1..20: mol_type = other DNA
ggtttgccagtattttattg

SEQ ID NO: 31611 - DNA, 20 bp, synthetic construct
  misc_feature 1..20: note = chemically synthesized
  source 1..20: mol_type = other DNA
atttttgcatcgatgttcat

SEQ ID NO: 31612 - DNA, 20 bp, synthetic construct
  misc_feature 1..20: note = chemically synthesized
  source 1..20: mol_type = other DNA
tttttgcatcgatgttcatc

SEQ ID NO: 31613 - DNA, 20 bp, synthetic construct
  misc_feature 1..20: note = chemically synthesized
  source 1..20: mol_type = other DNA
ttttgcatcgatgttcatca

SEQ ID NO: 31614 - DNA, 20 bp, synthetic construct
  misc_feature 1..20: note = chemically synthesized
  source 1..20: mol_type = other DNA
tcatctaaaattctcttttt

SEQ ID NO: 31615 - DNA, 20 bp, synthetic construct
  misc_feature 1..20: note = chemically synthesized
  source 1..20: mol_type = other DNA
tttttggttgtgtctctttc

SEQ ID NO: 31616 - DNA, 20 bp, synthetic construct
  misc_feature 1..20: note = chemically synthesized
  source 1..20: mol_type = other DNA
gttgtgtctctttctggctt

SEQ ID NO: 31617 - DNA, 20 bp, synthetic construct
  misc_feature 1..20: note = chemically synthesized
  source 1..20: mol_type = other DNA
tctctttctggctttggtat

SEQ ID NO: 31618 - DNA, 20 bp, synthetic construct
  misc_feature 1..20: note = chemically synthesized
  source 1..20: mol_type = other DNA
ctctttctggctttggtatt

SEQ ID NO: 31619 - DNA, 20 bp, synthetic construct
  misc_feature 1..20: note = chemically synthesized
  source 1..20: mol_type = other DNA
ctttggtattaggatgatgc

SEQ ID NO: 31620 - DNA, 20 bp, synthetic construct
  misc_feature 1..20: note = chemically synthesized
  source 1..20: mol_type = other DNA
tgatgctggcctcataaaat

SEQ ID NO: 31621 - DNA, 20 bp, synthetic construct
  misc_feature 1..20: note = chemically synthesized
  source 1..20: mol_type = other DNA
gctggcctcataaaatgagt

SEQ ID NO: 31622 - DNA, 20 bp, synthetic construct
  misc_feature 1..20: note = chemically synthesized
  source 1..20: mol_type = other DNA
ctggcctcataaaatgagtt

SEQ ID NO: 31623 - DNA, 20 bp, synthetic construct
  misc_feature 1..20: note = chemically synthesized
  source 1..20: mol_type = other DNA
tggcctcataaaatgagtta

SEQ ID NO: 31624 - DNA, 20 bp, synthetic construct
  misc_feature 1..20: note = chemically synthesized
  source 1..20: mol_type = other DNA
gcctcataaaatgagttagg

SEQ ID NO: 31625 - DNA, 20 bp, synthetic construct
  misc_feature 1..20: note = chemically synthesized
  source 1..20: mol_type = other DNA
cctcataaaatgagttaggg

SEQ ID NO: 31626 - DNA, 20 bp, synthetic construct
  misc_feature 1..20: note = chemically synthesized
  source 1..20: mol_type = other DNA
ttccttctttttctgttgat

SEQ ID NO: 31627 - DNA, 20 bp, synthetic construct
  misc_feature 1..20: note = chemically synthesized
  source 1..20: mol_type = other DNA
tctttttctgttgattggaa

SEQ ID NO: 31628 - DNA, 20 bp, synthetic construct
  misc_feature 1..20: note = chemically synthesized
  source 1..20: mol_type = other DNA
tctgttgattggaatagttt

SEQ ID NO: 31629 - DNA, 20 bp, synthetic construct
  misc_feature 1..20: note = chemically synthesized
  source 1..20: mol_type = other DNA
gttgattggaatagtttcag

SEQ ID NO: 31630 - DNA, 20 bp, synthetic construct
  misc_feature 1..20: note = chemically synthesized
  source 1..20: mol_type = other DNA
ttgattggaatagtttcaga

SEQ ID NO: 31631 - DNA, 20 bp, synthetic construct
  misc_feature 1..20: note = chemically synthesized
  source 1..20: mol_type = other DNA
tggaatagtttcagaaggaa

SEQ ID NO: 31632 - DNA, 20 bp, synthetic construct
  misc_feature 1..20: note = chemically synthesized
  source 1..20: mol_type = other DNA
attcctccttgtacctctgt

SEQ ID NO: 31633 - DNA, 20 bp, synthetic construct
  misc_feature 1..20: note = chemically synthesized
  source 1..20: mol_type = other DNA
cttgtacctctgttagaatt

SEQ ID NO: 31634 - DNA, 20 bp, synthetic construct
  misc_feature 1..20: note = chemically synthesized
  source 1..20: mol_type = other DNA
aatttggctgtgaatccatc

SEQ ID NO: 31635 - DNA, 20 bp, synthetic construct
  misc_feature 1..20: note = chemically synthesized
  source 1..20: mol_type = other DNA
gctgtgaatccatctggtcc

SEQ ID NO: 31636 - DNA, 20 bp, synthetic construct
  misc_feature 1..20: note = chemically synthesized
  source 1..20: mol_type = other DNA
atctggtcctggactctttt

SEQ ID NO: 31637 - DNA, 20 bp, synthetic construct
  misc_feature 1..20: note = chemically synthesized
  source 1..20: mol_type = other DNA
ggtcctggactctttttggt

SEQ ID NO: 31638 - DNA, 20 bp, synthetic construct
  misc_feature 1..20: note = chemically synthesized
  source 1..20: mol_type = other DNA
ctggactctttttggttggt

SEQ ID NO: 31639 - DNA, 20 bp, synthetic construct
  misc_feature 1..20: note = chemically synthesized
  source 1..20: mol_type = other DNA
attgattattgccacaattt

SEQ ID NO: 31640 - DNA, 20 bp, synthetic construct
  misc_feature 1..20: note = chemically synthesized
  source 1..20: mol_type = other DNA
acaatttcagatcctgttat

SEQ ID NO: 31641 - DNA, 20 bp, synthetic construct
  misc_feature 1..20: note = chemically synthesized
  source 1..20: mol_type = other DNA
gatcctgttattggtctatt

SEQ ID NO: 31642 - DNA, 20 bp, synthetic construct
  misc_feature 1..20: note = chemically synthesized
  source 1..20: mol_type = other DNA
tcctgttattggtctattca

SEQ ID NO: 31643 - DNA, 20 bp, synthetic construct
  misc_feature 1..20: note = chemically synthesized
  source 1..20: mol_type = other DNA
tcagagattcaacttcttcc

SEQ ID NO: 31644 - DNA, 20 bp, synthetic construct
  misc_feature 1..20: note = chemically synthesized
  source 1..20: mol_type = other DNA
gattcaacttcttcctggtt

SEQ ID NO: 31645 - DNA, 20 bp, synthetic construct
  misc_feature 1..20: note = chemically synthesized
  source 1..20: mol_type = other DNA
acttcttcctggtttagtct

SEQ ID NO: 31646 - DNA, 20 bp, synthetic construct
  misc_feature 1..20: note = chemically synthesized
  source 1..20: mol_type = other DNA
cttcttcctggtttagtctt

SEQ ID NO: 31647 - DNA, 20 bp, synthetic construct
  misc_feature 1..20: note = chemically synthesized
  source 1..20: mol_type = other DNA
ttcctggtttagtcttggga

SEQ ID NO: 31648 - DNA, 20 bp, synthetic construct
  misc_feature 1..20: note = chemically synthesized
  source 1..20: mol_type = other DNA
cttgggatagtgtatgtgtc

SEQ ID NO: 31649 - DNA, 20 bp, synthetic construct
  misc_feature 1..20: note = chemically synthesized
  source 1..20: mol_type = other DNA
ttgggatagtgtatgtgtcc

SEQ ID NO: 31650 - DNA, 20 bp, synthetic construct
  misc_feature 1..20: note = chemically synthesized
  source 1..20: mol_type = other DNA
aggaatttatccatttcttc

SEQ ID NO: 31651 - DNA, 20 bp, synthetic construct
  misc_feature 1..20: note = chemically synthesized
  source 1..20: mol_type = other DNA
tccatttcttctagattttc

SEQ ID NO: 31652 - DNA, 20 bp, synthetic construct
  misc_feature 1..20: note = chemically synthesized
  source 1..20: mol_type = other DNA
gattttctagtttatttgcg

SEQ ID NO: 31653 - DNA, 20 bp, synthetic construct
  misc_feature 1..20: note = chemically synthesized
  source 1..20: mol_type = other DNA
ttttctagtttatttgcgta

SEQ ID NO: 31654 - DNA, 20 bp, synthetic construct
  misc_feature 1..20: note = chemically synthesized
  source 1..20: mol_type = other DNA
tttctagtttatttgcgtag

SEQ ID NO: 31655 - DNA, 20 bp, synthetic construct
  misc_feature 1..20: note = chemically synthesized
  source 1..20: mol_type = other DNA
tatttgcgtagaggtgtttg

SEQ ID NO: 31656 - DNA, 20 bp, synthetic construct
  misc_feature 1..20: note = chemically synthesized
  source 1..20: mol_type = other DNA
gtgtttgtagtattctctga

SEQ ID NO: 31657 - DNA, 20 bp, synthetic construct
  misc_feature 1..20: note = chemically synthesized
  source 1..20: mol_type = other DNA
tttgtagtattctctgatgg

SEQ ID NO: 31658 - DNA, 20 bp, synthetic construct
  misc_feature 1..20: note = chemically synthesized
  source 1..20: mol_type = other DNA
gatggcagtttgtatttctg

SEQ ID NO: 31659 - DNA, 20 bp, synthetic construct
  misc_feature 1..20: note = chemically synthesized
  source 1..20: mol_type = other DNA
atggcagtttgtatttctgt

SEQ ID NO: 31660 - DNA, 20 bp, synthetic construct
  misc_feature 1..20: note = chemically synthesized
  source 1..20: mol_type = other DNA
agtttgtatttctgtgggat

SEQ ID NO: 31661 - DNA, 20 bp, synthetic construct
  misc_feature 1..20: note = chemically synthesized
  source 1..20: mol_type = other DNA
ttgtatttctgtgggatcgg

SEQ ID NO: 31662 - DNA, 20 bp, synthetic construct
  misc_feature 1..20: note = chemically synthesized
  source 1..20: mol_type = other DNA
attcttctctcttttcttat

SEQ ID NO: 31663 - DNA, 20 bp, synthetic construct
  misc_feature 1..20: note = chemically synthesized
  source 1..20: mol_type = other DNA
tcttttcttattagtcttgc

SEQ ID NO: 31664 - DNA, 20 bp, synthetic construct
  misc_feature 1..20: note = chemically synthesized
  source 1..20: mol_type = other DNA
tttcttattagtcttgctag

SEQ ID NO: 31665 - DNA, 20 bp, synthetic construct
  misc_feature 1..20: note = chemically synthesized
  source 1..20: mol_type = other DNA
tagtcttgctagcggtctat

SEQ ID NO: 31666 - DNA, 20 bp, synthetic construct
  misc_feature 1..20: note = chemically synthesized
  source 1..20: mol_type = other DNA
tgttgatcctttcaaaaaac

SEQ ID NO: 31667 - DNA, 20 bp, synthetic construct
  misc_feature 1..20: note = chemically synthesized
  source 1..20: mol_type = other DNA
cctttcaaaaaaccagctcc

SEQ ID NO: 31668 - DNA, 20 bp, synthetic construct
  misc_feature 1..20: note = chemically synthesized
  source 1..20: mol_type = other DNA
ccagattcattaattttttg

SEQ ID NO: 31669 - DNA, 20 bp, synthetic construct
  misc_feature 1..20: note = chemically synthesized
  source 1..20: mol_type = other DNA
cagattcattaattttttga

SEQ ID NO: 31670 - DNA, 20 bp, synthetic construct
  misc_feature 1..20: note = chemically synthesized
  source 1..20: mol_type = other DNA
agattcattaattttttgaa

SEQ ID NO: 31671 - DNA, 20 bp, synthetic construct
  misc_feature 1..20: note = chemically synthesized
  source 1..20: mol_type = other DNA
ttttgtgtctctgtttcctt

SEQ ID NO: 31672 - DNA, 20 bp, synthetic construct
  misc_feature 1..20: note = chemically synthesized
  source 1..20: mol_type = other DNA
cttcagttctgctctgattt

SEQ ID NO: 31673 - DNA, 20 bp, synthetic construct
  misc_feature 1..20: note = chemically synthesized
  source 1..20: mol_type = other DNA
agttatttcttgacttctgc

SEQ ID NO: 31674 - DNA, 20 bp, synthetic construct
  misc_feature 1..20: note = chemically synthesized
  source 1..20: mol_type = other DNA
tgtgtttgctcttgcttatc

SEQ ID NO: 31675 - DNA, 20 bp, synthetic construct
  misc_feature 1..20: note = chemically synthesized
  source 1..20: mol_type = other DNA
agttcttttaattgtgatgt

SEQ ID NO: 31676 - DNA, 20 bp, synthetic construct
  misc_feature 1..20: note = chemically synthesized
  source 1..20: mol_type = other DNA
gttcttttaattgtgatgtt

SEQ ID NO: 31677 - DNA, 20 bp, synthetic construct
  misc_feature 1..20: note = chemically synthesized
  source 1..20: mol_type = other DNA
ttcttttaattgtgatgtta

SEQ ID NO: 31678 - DNA, 20 bp, synthetic construct
  misc_feature 1..20: note = chemically synthesized
  source 1..20: mol_type = other DNA
tgatgttagggtgtcaattt

SEQ ID NO: 31679 - DNA, 20 bp, synthetic construct
  misc_feature 1..20: note = chemically synthesized
  source 1..20: mol_type = other DNA
atctttcttgctttctcttg

SEQ ID NO: 31680 - DNA, 20 bp, synthetic construct
  misc_feature 1..20: note = chemically synthesized
  source 1..20: mol_type = other DNA
tctttcttgctttctcttgt

SEQ ID NO: 31681 - DNA, 20 bp, synthetic construct
  misc_feature 1..20: note = chemically synthesized
  source 1..20: mol_type = other DNA
tgctttctcttgtgggcgtt

SEQ ID NO: 31682 - DNA, 20 bp, synthetic construct
  misc_feature 1..20: note = chemically synthesized
  source 1..20: mol_type = other DNA
acactgattcgaatgtgtcc

SEQ ID NO: 31683 - DNA, 20 bp, synthetic construct
  misc_feature 1..20: note = chemically synthesized
  source 1..20: mol_type = other DNA
actgattcgaatgtgtccca

SEQ ID NO: 31684 - DNA, 20 bp, synthetic construct
  misc_feature 1..20: note = chemically synthesized
  source 1..20: mol_type = other DNA
cgaatgtgtcccagagattc

SEQ ID NO: 31685 - DNA, 20 bp, synthetic construct
  misc_feature 1..20: note = chemically synthesized
  source 1..20: mol_type = other DNA
tgttgtgtctttgttctcat

SEQ ID NO: 31686 - DNA, 20 bp, synthetic construct
  misc_feature 1..20: note = chemically synthesized
  source 1..20: mol_type = other DNA
ctttgttctcattggtttca

SEQ ID NO: 31687 - DNA, 20 bp, synthetic construct
  misc_feature 1..20: note = chemically synthesized
  source 1..20: mol_type = other DNA
ccttcatttcgttatgtacc

SEQ ID NO: 31688 - DNA, 20 bp, synthetic construct
  misc_feature 1..20: note = chemically synthesized
  source 1..20: mol_type = other DNA
tcatttcgttatgtacccag

SEQ ID NO: 31689 - DNA, 20 bp, synthetic construct
  misc_feature 1..20: note = chemically synthesized
  source 1..20: mol_type = other DNA
ttatgtacccagtagtcatt

SEQ ID NO: 31690 - DNA, 20 bp, synthetic construct
  misc_feature 1..20: note = chemically synthesized
  source 1..20: mol_type = other DNA
tatgtacccagtagtcattc

SEQ ID NO: 31691 - DNA, 20 bp, synthetic construct
  misc_feature 1..20: note = chemically synthesized
  source 1..20: mol_type = other DNA
tgtacccagtagtcattcag

SEQ ID NO: 31692 - DNA, 20 bp, synthetic construct
  misc_feature 1..20: note = chemically synthesized
  source 1..20: mol_type = other DNA
acccagtagtcattcaggag

SEQ ID NO: 31693 - DNA, 20 bp, synthetic construct
  misc_feature 1..20: note = chemically synthesized
  source 1..20: mol_type = other DNA
cccagtagtcattcaggagc

SEQ ID NO: 31694 - DNA, 20 bp, synthetic construct
  misc_feature 1..20: note = chemically synthesized
  source 1..20: mol_type = other DNA
tcattcaggagcaggttgtt

SEQ ID NO: 31695 - DNA, 20 bp, synthetic construct
  misc_feature 1..20: note = chemically synthesized
  source 1..20: mol_type = other DNA
caggttgttcagtttccatg

SEQ ID NO: 31696 - DNA, 20 bp, synthetic construct
  misc_feature 1..20: note = chemically synthesized
  source 1..20: mol_type = other DNA
tgttcagtttccatgtagtt

SEQ ID NO: 31697 - DNA, 20 bp, synthetic construct
  misc_feature 1..20: note = chemically synthesized
  source 1..20: mol_type = other DNA
tcagtttccatgtagttgag

SEQ ID NO: 31698 - DNA, 20 bp, synthetic construct
  misc_feature 1..20: note = chemically synthesized
  source 1..20: mol_type = other DNA
ccatgtagttgagtggtttt

SEQ ID NO: 31699 - DNA, 20 bp, synthetic construct
  misc_feature 1..20: note = chemically synthesized
  source 1..20: mol_type = other DNA
gtagttgagtggttttgagt

SEQ ID NO: 31700 - DNA, 20 bp, synthetic construct
  misc_feature 1..20: note = chemically synthesized
  source 1..20: mol_type = other DNA
tgagtgagtttcttaatcct

SEQ ID NO: 31701 - DNA, 20 bp, synthetic construct
  misc_feature 1..20: note = chemically synthesized
  source 1..20: mol_type = other DNA
agtttcttaatcctgagttc

SEQ ID NO: 31702 - DNA, 20 bp, synthetic construct
  misc_feature 1..20: note = chemically synthesized
  source 1..20: mol_type = other DNA
gttctagtttgattgcactg

SEQ ID NO: 31703 - DNA, 20 bp, synthetic construct
  misc_feature 1..20: note = chemically synthesized
  source 1..20: mol_type = other DNA
gtttgattgcactgtggtct

SEQ ID NO: 31704 - DNA, 20 bp, synthetic construct
  misc_feature 1..20: note = chemically synthesized
  source 1..20: mol_type = other DNA
ttgattgcactgtggtctga

SEQ ID NO: 31705 - DNA, 20 bp, synthetic construct
  misc_feature 1..20: note = chemically synthesized
  source 1..20: mol_type = other DNA
ttgcactgtggtctgagaga

SEQ ID NO: 31706 - DNA, 20 bp, synthetic construct
  misc_feature 1..20: note = chemically synthesized
  source 1..20: mol_type = other DNA
tctgttcttttatatttgct

SEQ ID NO: 31707 - DNA, 20 bp, synthetic construct
  misc_feature 1..20: note = chemically synthesized
  source 1..20: mol_type = other DNA
ctgttcttttatatttgctg

SEQ ID NO: 31708 - DNA, 20 bp, synthetic construct
  misc_feature 1..20: note = chemically synthesized
  source 1..20: mol_type = other DNA
gttcttttatatttgctgag

SEQ ID NO: 31709 - DNA, 20 bp, synthetic construct
  misc_feature 1..20: note = chemically synthesized
  source 1..20: mol_type = other DNA
tcttttatatttgctgagga

SEQ ID NO: 31710 - DNA, 20 bp, synthetic construct
  misc_feature 1..20: note = chemically synthesized
  source 1..20: mol_type = other DNA
ctgaggagagctttacttcc

SEQ ID NO: 31711 - DNA, 20 bp, synthetic construct
  misc_feature 1..20: note = chemically synthesized
  source 1..20: mol_type = other DNA
gagctttacttccaagtatg

SEQ ID NO: 31712 - DNA, 20 bp, synthetic construct
  misc_feature 1..20: note = chemically synthesized
  source 1..20: mol_type = other DNA
tccaagtatgtggtcaattt

SEQ ID NO: 31713 - DNA, 20 bp, synthetic construct
  misc_feature 1..20: note = chemically synthesized
  source 1..20: mol_type = other DNA
gtatgtggtcaattttggaa

SEQ ID NO: 31714 - DNA, 20 bp, synthetic construct
  misc_feature 1..20: note = chemically synthesized
  source 1..20: mol_type = other DNA
tatgtggtcaattttggaat

SEQ ID NO: 31715 - DNA, 20 bp, synthetic construct
  misc_feature 1..20: note = chemically synthesized
  source 1..20: mol_type = other DNA
attttggaataggtgttgtg

SEQ ID NO: 31716 - DNA, 20 bp, synthetic construct
  misc_feature 1..20: note = chemically synthesized
  source 1..20: mol_type = other DNA
aaatgtatattctgttgatt

SEQ ID NO: 31717 - DNA, 20 bp, synthetic construct
  misc_feature 1..20: note = chemically synthesized
  source 1..20: mol_type = other DNA
aatgtatattctgttgattt

SEQ ID NO: 31718 - DNA, 20 bp, synthetic construct
  misc_feature 1..20: note = chemically synthesized
  source 1..20: mol_type = other DNA
atgtatattctgttgatttg

SEQ ID NO: 31719 - DNA, 20 bp, synthetic construct
  misc_feature 1..20: note = chemically synthesized
  source 1..20: mol_type = other DNA
tatattctgttgatttgggg

SEQ ID NO: 31720 - DNA, 20 bp, synthetic construct
  misc_feature 1..20: note = chemically synthesized
  source 1..20: mol_type = other DNA
tattctgttgatttggggtg

SEQ ID NO: 31721 - DNA, 20 bp, synthetic construct
  misc_feature 1..20: note = chemically synthesized
  source 1..20: mol_type = other DNA
ttctgttgatttggggtgga

SEQ ID NO: 31722 - DNA, 20 bp, synthetic construct
  misc_feature 1..20: note = chemically synthesized
  source 1..20: mol_type = other DNA
atttggggtggagagttctg

SEQ ID NO: 31723 - DNA, 20 bp, synthetic construct
  misc_feature 1..20: note = chemically synthesized
  source 1..20: mol_type = other DNA
agagttctgtagatgtctat

SEQ ID NO: 31724 - DNA, 20 bp, synthetic construct
  misc_feature 1..20: note = chemically synthesized
  source 1..20: mol_type = other DNA
gagttctgtagatgtctatt

SEQ ID NO: 31725 - DNA, 20 bp, synthetic construct
  misc_feature 1..20: note = chemically synthesized
  source 1..20: mol_type = other DNA
agatgtctattaggtctgct

SEQ ID NO: 31726 - DNA, 20 bp, synthetic construct
  misc_feature 1..20: note = chemically synthesized
  source 1..20: mol_type = other DNA
tctattaggtctgcttggtg

SEQ ID NO: 31727 - DNA, 20 bp, synthetic construct
  misc_feature 1..20: note = chemically synthesized
  source 1..20: mol_type = other DNA
tattaggtctgcttggtgca

SEQ ID NO: 31728 - DNA, 20 bp, synthetic construct
  misc_feature 1..20: note = chemically synthesized
  source 1..20: mol_type = other DNA
gcagagctgtgttcaattcc

SEQ ID NO: 31729 - DNA, 20 bp, synthetic construct
  misc_feature 1..20: note = chemically synthesized
  source 1..20: mol_type = other DNA
gttgatctgtctaatgttga

SEQ ID NO: 31730 - DNA, 20 bp, synthetic construct
  misc_feature 1..20: note = chemically synthesized
  source 1..20: mol_type = other DNA
gatctgtctaatgttgacag

SEQ ID NO: 31731 - DNA, 20 bp, synthetic construct
  misc_feature 1..20: note = chemically synthesized
  source 1..20: mol_type = other DNA
atctgtctaatgttgacagt

SEQ ID NO: 31732 - DNA, 20 bp, synthetic construct
  misc_feature 1..20: note = chemically synthesized
  source 1..20: mol_type = other DNA
tctgtctaatgttgacagtg

SEQ ID NO: 31733 - DNA, 20 bp, synthetic construct
  misc_feature 1..20: note = chemically synthesized
  source 1..20: mol_type = other DNA
atgttgacagtggggtatta

SEQ ID NO: 31734 - DNA, 20 bp, synthetic construct
  misc_feature 1..20: note = chemically synthesized
  source 1..20: mol_type = other DNA
attaaagtctcccattatta

SEQ ID NO: 31735 - DNA, 20 bp, synthetic construct
  misc_feature 1..20: note = chemically synthesized
  source 1..20: mol_type = other DNA
agtctcccattattaaagtg

SEQ ID NO: 31736 - DNA, 20 bp, synthetic construct
  misc_feature 1..20: note = chemically synthesized
  source 1..20: mol_type = other DNA
gtctcccattattaaagtgt

SEQ ID NO: 31737 - DNA, 20 bp, synthetic construct
  misc_feature 1..20: note = chemically synthesized
  source 1..20: mol_type = other DNA
ctcccattattaaagtgtgg

SEQ ID NO: 31738 - DNA, 20 bp, synthetic construct
  misc_feature 1..20: note = chemically synthesized
  source 1..20: mol_type = other DNA
ttattaaagtgtgggagtct

SEQ ID NO: 31739 - DNA, 20 bp, synthetic construct
  misc_feature 1..20: note = chemically synthesized
  source 1..20: mol_type = other DNA
tgggagtctaagtctctttg

SEQ ID NO: 31740 - DNA, 20 bp, synthetic construct
  misc_feature 1..20: note = chemically synthesized
  source 1..20: mol_type = other DNA
gggagtctaagtctctttgt

SEQ ID NO: 31741 - DNA, 20 bp, synthetic construct
  misc_feature 1..20: note = chemically synthesized
  source 1..20: mol_type = other DNA
aagtctctttgtaggtctct

SEQ ID NO: 31742 - DNA, 20 bp, synthetic construct
  misc_feature 1..20: note = chemically synthesized
  source 1..20: mol_type = other DNA
agtctctttgtaggtctcta

SEQ ID NO: 31743 - DNA, 20 bp, synthetic construct
  misc_feature 1..20: note = chemically synthesized
  source 1..20: mol_type = other DNA
aaggacttgctttatgaatc

SEQ ID NO: 31744 - DNA, 20 bp, synthetic construct
  misc_feature 1..20: note = chemically synthesized
  source 1..20: mol_type = other DNA
aggacttgctttatgaatct

SEQ ID NO: 31745 - DNA, 20 bp, synthetic construct
  misc_feature 1..20: note = chemically synthesized
  source 1..20: mol_type = other DNA
gaatctgggtgctcctgtat

SEQ ID NO: 31746 - DNA, 20 bp, synthetic construct
  misc_feature 1..20: note = chemically synthesized
  source 1..20: mol_type = other DNA
aatctgggtgctcctgtatt

SEQ ID NO: 31747 - DNA, 20 bp, synthetic construct
  misc_feature 1..20: note = chemically synthesized
  source 1..20: mol_type = other DNA
gtattgggtgcatatatatt

SEQ ID NO: 31748 - DNA, 20 bp, synthetic construct
  misc_feature 1..20: note = chemically synthesized
  source 1..20: mol_type = other DNA
tattgggtgcatatatattt

SEQ ID NO: 31749 - DNA, 20 bp, synthetic construct
  misc_feature 1..20: note = chemically synthesized
  source 1..20: mol_type = other DNA
gggtgcatatatatttagga

SEQ ID NO: 31750 - DNA, 20 bp, synthetic construct
  misc_feature 1..20: note = chemically synthesized
  source 1..20: mol_type = other DNA
gcatatatatttaggatagt

SEQ ID NO: 31751 - DNA, 20 bp, synthetic construct
  misc_feature 1..20: note = chemically synthesized
  source 1..20: mol_type = other DNA
atccctttaccattatgtaa

SEQ ID NO: 31752 - DNA, 20 bp, synthetic construct
  misc_feature 1..20: note = chemically synthesized
  source 1..20: mol_type = other DNA
ttgtctcttttgatctttgt

SEQ ID NO: 31753 - DNA, 20 bp, synthetic construct
  misc_feature 1..20: note = chemically synthesized
  source 1..20: mol_type = other DNA
ttttgatctttgttggttta

SEQ ID NO: 31754 - DNA, 20 bp, synthetic construct
  misc_feature 1..20: note = chemically synthesized
  source 1..20: mol_type = other DNA
tggtttaaagcctgttttat

SEQ ID NO: 31755 - DNA, 20 bp, synthetic construct
  misc_feature 1..20: note = chemically synthesized
  source 1..20: mol_type = other DNA
gtttaaagcctgttttatca

SEQ ID NO: 31756 - DNA, 20 bp, synthetic construct
  misc_feature 1..20: note = chemically synthesized
  source 1..20: mol_type = other DNA
aagcctgttttatcagagac

SEQ ID NO: 31757 - DNA, 20 bp, synthetic construct
  misc_feature 1..20: note = chemically synthesized
  source 1..20: mol_type = other DNA
agcctgttttatcagagact

SEQ ID NO: 31758 - DNA, 20 bp, synthetic construct
  misc_feature 1..20: note = chemically synthesized
  source 1..20: mol_type = other DNA
ttttttgttttccatttgct

SEQ ID NO: 31759 - DNA, 20 bp, synthetic construct
  misc_feature 1..20: note = chemically synthesized
  source 1..20: mol_type = other DNA
tttgttttccatttgcttgg

SEQ ID NO: 31760 - DNA, 20 bp, synthetic construct
  misc_feature 1..20: note = chemically synthesized
  source 1..20: mol_type = other DNA
ttcctccatccttttatttt

SEQ ID NO: 31761 - DNA, 20 bp, synthetic construct
  misc_feature 1..20: note = chemically synthesized
  source 1..20: mol_type = other DNA
ctatgtgtgtgtgtgcacat

SEQ ID NO: 31762 - DNA, 20 bp, synthetic construct
  misc_feature 1..20: note = chemically synthesized
  source 1..20: mol_type = other DNA
gtgtgtgtgtgcacatgaga

SEQ ID NO: 31763 - DNA, 20 bp, synthetic construct
  misc_feature 1..20: note = chemically synthesized
  source 1..20: mol_type = other DNA
tgtgtgtgtgcacatgagat

SEQ ID NO: 31764 - DNA, 20 bp, synthetic construct
  misc_feature 1..20: note = chemically synthesized
  source 1..20: mol_type = other DNA
acactctttatccaatttgc

SEQ ID NO: 31765 - DNA, 20 bp, synthetic construct
  misc_feature 1..20: note = chemically synthesized
  source 1..20: mol_type = other DNA
gccagtctgtgtctttcaat

SEQ ID NO: 31766 - DNA, 20 bp, synthetic construct
  misc_feature 1..20: note = chemically synthesized
  source 1..20: mol_type = other DNA
cagtctgtgtctttcaattg

SEQ ID NO: 31767 - DNA, 20 bp, synthetic construct
  misc_feature 1..20: note = chemically synthesized
  source 1..20: mol_type = other DNA
tgtctttcaattggagcact

SEQ ID NO: 31768 - DNA, 20 bp, synthetic construct
  misc_feature 1..20: note = chemically synthesized
  source 1..20: mol_type = other DNA
acttagtccatttacattta

SEQ ID NO: 31769 - DNA, 20 bp, synthetic construct
  misc_feature 1..20: note = chemically synthesized
  source 1..20: mol_type = other DNA
atttgatcctgtcattatga

SEQ ID NO: 31770 - DNA, 20 bp, synthetic construct
  misc_feature 1..20: note = chemically synthesized
  source 1..20: mol_type = other DNA
gatcctgtcattatgatagc

SEQ ID NO: 31771 - DNA, 20 bp, synthetic construct
  misc_feature 1..20: note = chemically synthesized
  source 1..20: mol_type = other DNA
tagctggttattttgctcgt

SEQ ID NO: 31772 - DNA, 20 bp, synthetic construct
  misc_feature 1..20: note = chemically synthesized
  source 1..20: mol_type = other DNA
attttgctcgttagttgatg

SEQ ID NO: 31773 - DNA, 20 bp, synthetic construct
  misc_feature 1..20: note = chemically synthesized
  source 1..20: mol_type = other DNA
tagttgatgcagtttcttcc

SEQ ID NO: 31774 - DNA, 20 bp, synthetic construct
  misc_feature 1..20: note = chemically synthesized
  source 1..20: mol_type = other DNA
cagtttcttcctagtcttga

SEQ ID NO: 31775 - DNA, 20 bp, synthetic construct
  misc_feature 1..20: note = chemically synthesized
  source 1..20: mol_type = other DNA
tcttgatggtcttcacattt

SEQ ID NO: 31776 - DNA, 20 bp, synthetic construct
  misc_feature 1..20: note = chemically synthesized
  source 1..20: mol_type = other DNA
cacattttggcctgattttg

SEQ ID NO: 31777 - DNA, 20 bp, synthetic construct
  misc_feature 1..20: note = chemically synthesized
  source 1..20: mol_type = other DNA
attttggcctgattttgcag

SEQ ID NO: 31778 - DNA, 20 bp, synthetic construct
  misc_feature 1..20: note = chemically synthesized
  source 1..20: mol_type = other DNA
tggcctgattttgcagtggc

SEQ ID NO: 31779 - DNA, 20 bp, synthetic construct
  misc_feature 1..20: note = chemically synthesized
  source 1..20: mol_type = other DNA
gattttgcagtggctggtac

SEQ ID NO: 31780 - DNA, 20 bp, synthetic construct
  misc_feature 1..20: note = chemically synthesized
  source 1..20: mol_type = other DNA
cggttgtgcctttccatgtt

SEQ ID NO: 31781 - DNA, 20 bp, synthetic construct
  misc_feature 1..20: note = chemically synthesized
  source 1..20: mol_type = other DNA
tccatgtttagtgcttcctt

SEQ ID NO: 31782 - DNA, 20 bp, synthetic construct
  misc_feature 1..20: note = chemically synthesized
  source 1..20: mol_type = other DNA
ccatgtttagtgcttccttc

SEQ ID NO: 31783 - DNA, 20 bp, synthetic construct
  misc_feature 1..20: note = chemically synthesized
  source 1..20: mol_type = other DNA
atgtttagtgcttccttcag

SEQ ID NO: 31784 - DNA, 20 bp, synthetic construct
  misc_feature 1..20: note = chemically synthesized
  source 1..20: mol_type = other DNA
gcttccttcaggagctcttt

SEQ ID NO: 31785 - DNA, 20 bp, synthetic construct
  misc_feature 1..20: note = chemically synthesized
  source 1..20: mol_type = other DNA
cttccttcaggagctctttt

SEQ ID NO: 31786 - DNA, 20 bp, synthetic construct
  misc_feature 1..20: note = chemically synthesized
  source 1..20: mol_type = other DNA
cttcaggagctcttttaggt

SEQ ID NO: 31787 - DNA, 20 bp, synthetic construct
  misc_feature 1..20: note = chemically synthesized
  source 1..20: mol_type = other DNA
ttcaggagctcttttaggtc

SEQ ID NO: 31788 - DNA, 20 bp, synthetic construct
  misc_feature 1..20: note = chemically synthesized
  source 1..20: mol_type = other DNA
gagctcttttaggtcaggcc

SEQ ID NO: 31789 - DNA, 20 bp, synthetic construct
  misc_feature 1..20: note = chemically synthesized
  source 1..20: mol_type = other DNA
ctggtgatgacaaaatctct

SEQ ID NO: 31790 - DNA, 20 bp, synthetic construct
  misc_feature 1..20: note = chemically synthesized
  source 1..20: mol_type = other DNA
tcagcatttgcttgtctgta

SEQ ID NO: 31791 - DNA, 20 bp, synthetic construct
  misc_feature 1..20: note = chemically synthesized
  source 1..20: mol_type = other DNA
ttatttctccttcacttatg

SEQ ID NO: 31792 - DNA, 20 bp, synthetic construct
  misc_feature 1..20: note = chemically synthesized
  source 1..20: mol_type = other DNA
tctccttcacttatgaagct

SEQ ID NO: 31793 - DNA, 20 bp, synthetic construct
  misc_feature 1..20: note = chemically synthesized
  source 1..20: mol_type = other DNA
ttcacttatgaagcttagtt

SEQ ID NO: 31794 - DNA, 20 bp, synthetic construct
  misc_feature 1..20: note = chemically synthesized
  source 1..20: mol_type = other DNA
cttatgaagcttagtttggc

SEQ ID NO: 31795 - DNA, 20 bp, synthetic construct
  misc_feature 1..20: note = chemically synthesized
  source 1..20: mol_type = other DNA
tgttgaaaattctttccttt

SEQ ID NO: 31796 - DNA, 20 bp, synthetic construct
  misc_feature 1..20: note = chemically synthesized
  source 1..20: mol_type = other DNA
gttgaaaattctttccttta

SEQ ID NO: 31797 - DNA, 20 bp, synthetic construct
  misc_feature 1..20: note = chemically synthesized
  source 1..20: mol_type = other DNA
cctttaaggatgttgaatat

SEQ ID NO: 31798 - DNA, 20 bp, synthetic construct
  misc_feature 1..20: note = chemically synthesized
  source 1..20: mol_type = other DNA
tattggcccccactctcttc

SEQ ID NO: 31799 - DNA, 20 bp, synthetic construct
  misc_feature 1..20: note = chemically synthesized
  source 1..20: mol_type = other DNA
ccccactctcttctggcttg

SEQ ID NO: 31800 - DNA, 20 bp, synthetic construct
  misc_feature 1..20: note = chemically synthesized
  source 1..20: mol_type = other DNA
ccactctcttctggcttgta

SEQ ID NO: 31801 - DNA, 20 bp, synthetic construct
  misc_feature 1..20: note = chemically synthesized
  source 1..20: mol_type = other DNA
tggcttgtagagtttctgcc

SEQ ID NO: 31802 - DNA, 20 bp, synthetic construct
  misc_feature 1..20: note = chemically synthesized
  source 1..20: mol_type = other DNA
gcttgtagagtttctgccaa

SEQ ID NO: 31803 - DNA, 20 bp, synthetic construct
  misc_feature 1..20: note = chemically synthesized
  source 1..20: mol_type = other DNA
ttgtagagtttctgccaaga

SEQ ID NO: 31804 - DNA, 20 bp, synthetic construct
  misc_feature 1..20: note = chemically synthesized
  source 1..20: mol_type = other DNA
tctgccaagagagctgctgt

SEQ ID NO: 31805 - DNA, 20 bp, synthetic construct
  misc_feature 1..20: note = chemically synthesized
  source 1..20: mol_type = other DNA
gagagctgctgttagtctga

SEQ ID NO: 31806 - DNA, 20 bp, synthetic construct
  misc_feature 1..20: note = chemically synthesized
  source 1..20: mol_type = other DNA
agagctgctgttagtctgat

SEQ ID NO: 31807 - DNA, 20 bp, synthetic construct
  misc_feature 1..20: note = chemically synthesized
  source 1..20: mol_type = other DNA
gtctgatgggcttccctttg

SEQ ID NO: 31808 - DNA, 20 bp, synthetic construct
  misc_feature 1..20: note = chemically synthesized
  source 1..20: mol_type = other DNA
tctgatgggcttccctttgt

SEQ ID NO: 31809 - DNA, 20 bp, synthetic construct
  misc_feature 1..20: note = chemically synthesized
  source 1..20: mol_type = other DNA
ggtaacccgacctttctctc

SEQ ID NO: 31810 - DNA, 20 bp, synthetic construct
  misc_feature 1..20: note = chemically synthesized
  source 1..20: mol_type = other DNA
tttttccttcatttcaactt

SEQ ID NO: 31811 - DNA, 20 bp, synthetic construct
  misc_feature 1..20: note = chemically synthesized
  source 1..20: mol_type = other DNA
aatctgacaattatgtgtct

SEQ ID NO: 31812 - DNA, 20 bp, synthetic construct
  misc_feature 1..20: note = chemically synthesized
  source 1..20: mol_type = other DNA
tctgacaattatgtgtcttg

SEQ ID NO: 31813 - DNA, 20 bp, synthetic construct
  misc_feature 1..20: note = chemically synthesized
  source 1..20: mol_type = other DNA
gtcttggagttgctcttctc

SEQ ID NO: 31814 - DNA, 20 bp, synthetic construct
  misc_feature 1..20: note = chemically synthesized
  source 1..20: mol_type = other DNA
tcttggagttgctcttctcg

SEQ ID NO: 31815 - DNA, 20 bp, synthetic construct
  misc_feature 1..20: note = chemically synthesized
  source 1..20: mol_type = other DNA
ttggagttgctcttctcgag

SEQ ID NO: 31816 - DNA, 20 bp, synthetic construct
  misc_feature 1..20: note = chemically synthesized
  source 1..20: mol_type = other DNA
cttctcgaggagtatgtttg

SEQ ID NO: 31817 - DNA, 20 bp, synthetic construct
  misc_feature 1..20: note = chemically synthesized
  source 1..20: mol_type = other DNA
tatttcctgaatctgaatgt

SEQ ID NO: 31818 - DNA, 20 bp, synthetic construct
  misc_feature 1..20: note = chemically synthesized
  source 1..20: mol_type = other DNA
tgaatgttggcctgccttgc

SEQ ID NO: 31819 - DNA, 20 bp, synthetic construct
  misc_feature 1..20: note = chemically synthesized
  source 1..20: mol_type = other DNA
gttggcctgccttgctagat

SEQ ID NO: 31820 - DNA, 20 bp, synthetic construct
  misc_feature 1..20: note = chemically synthesized
  source 1..20: mol_type = other DNA
ttggcctgccttgctagatt

SEQ ID NO: 31821 - DNA, 20 bp, synthetic construct
  misc_feature 1..20: note = chemically synthesized
  source 1..20: mol_type = other DNA
tggcctgccttgctagattg

SEQ ID NO: 31822 - DNA, 20 bp, synthetic construct
  misc_feature 1..20: note = chemically synthesized
  source 1..20: mol_type = other DNA
cctgccttgctagattgggg

SEQ ID NO: 31823 - DNA, 20 bp, synthetic construct
  misc_feature 1..20: note = chemically synthesized
  source 1..20: mol_type = other DNA
ctagattggggaagttctcc

SEQ ID NO: 31824 - DNA, 20 bp, synthetic construct
  misc_feature 1..20: note = chemically synthesized
  source 1..20: mol_type = other DNA
ttctcctggataatatcctg

SEQ ID NO: 31825 - DNA, 20 bp, synthetic construct
  misc_feature 1..20: note = chemically synthesized
  source 1..20: mol_type = other DNA
ctcctggataatatcctgca

SEQ ID NO: 31826 - DNA, 20 bp, synthetic construct
  misc_feature 1..20: note = chemically synthesized
  source 1..20: mol_type = other DNA
ctgcagagtgttttccaact

SEQ ID NO: 31827 - DNA, 20 bp, synthetic construct
  misc_feature 1..20: note = chemically synthesized
  source 1..20: mol_type = other DNA
tcgattctccccgtcacttt

SEQ ID NO: 31828 - DNA, 20 bp, synthetic construct
  misc_feature 1..20: note = chemically synthesized
  source 1..20: mol_type = other DNA
cgattctccccgtcactttc

SEQ ID NO: 31829 - DNA, 20 bp, synthetic construct
  misc_feature 1..20: note = chemically synthesized
  source 1..20: mol_type = other DNA
tcactttcaggtacaccaat

SEQ ID NO: 31830 - DNA, 20 bp, synthetic construct
  misc_feature 1..20: note = chemically synthesized
  source 1..20: mol_type = other DNA
tcaggtacaccaatcagacc

SEQ ID NO: 31831 - DNA, 20 bp, synthetic construct
  misc_feature 1..20: note = chemically synthesized
  source 1..20: mol_type = other DNA
ctagatttgatcttttcaca

SEQ ID NO: 31832 - DNA, 20 bp, synthetic construct
  misc_feature 1..20: note = chemically synthesized
  source 1..20: mol_type = other DNA
tcacatagtcccatatttct

SEQ ID NO: 31833 - DNA, 20 bp, synthetic construct
  misc_feature 1..20: note = chemically synthesized
  source 1..20: mol_type = other DNA
acatagtcccatatttcttg

SEQ ID NO: 31834 - DNA, 20 bp, synthetic construct
  misc_feature 1..20: note = chemically synthesized
  source 1..20: mol_type = other DNA
catagtcccatatttcttgg

SEQ ID NO: 31835 - DNA, 20 bp, synthetic construct
  misc_feature 1..20: note = chemically synthesized
  source 1..20: mol_type = other DNA
atcactgataccctttcttc

SEQ ID NO: 31836 - DNA, 20 bp, synthetic construct
  misc_feature 1..20: note = chemically synthesized
  source 1..20: mol_type = other DNA
tttcttccagttgatcgcat

SEQ ID NO: 31837 - DNA, 20 bp, synthetic construct
  misc_feature 1..20: note = chemically synthesized
  source 1..20: mol_type = other DNA
agttgatcgcatcagctcct

SEQ ID NO: 31838 - DNA, 20 bp, synthetic construct
  misc_feature 1..20: note = chemically synthesized
  source 1..20: mol_type = other DNA
gttgatcgcatcagctcctg

SEQ ID NO: 31839 - DNA, 20 bp, synthetic construct
  misc_feature 1..20: note = chemically synthesized
  source 1..20: mol_type = other DNA
ccattcttcacgtcattctc

SEQ ID NO: 31840 - DNA, 20 bp, synthetic construct
  misc_feature 1..20: note = chemically synthesized
  source 1..20: mol_type = other DNA
ttcacgtcattctcgagcct

SEQ ID NO: 31841 - DNA, 20 bp, synthetic construct
  misc_feature 1..20: note = chemically synthesized
  source 1..20: mol_type = other DNA
cattctcgagccttggcttt

SEQ ID NO: 31842 - DNA, 20 bp, synthetic construct
  misc_feature 1..20: note = chemically synthesized
  source 1..20: mol_type = other DNA
gccttggctttcagctccat

SEQ ID NO: 31843 - DNA, 20 bp, synthetic construct
  misc_feature 1..20: note = chemically synthesized
  source 1..20: mol_type = other DNA
tcagctccatcagctccttt

SEQ ID NO: 31844 - DNA, 20 bp, synthetic construct
  misc_feature 1..20: note = chemically synthesized
  source 1..20: mol_type = other DNA
ctttaagcacttctctgtat

SEQ ID NO: 31845 - DNA, 20 bp, synthetic construct
  misc_feature 1..20: note = chemically synthesized
  source 1..20: mol_type = other DNA
cttctctgtattggttattc

SEQ ID NO: 31846 - DNA, 20 bp, synthetic construct
  misc_feature 1..20: note = chemically synthesized
  source 1..20: mol_type = other DNA
ttcatctaaattttttttca

SEQ ID NO: 31847 - DNA, 20 bp, synthetic construct
  misc_feature 1..20: note = chemically synthesized
  source 1..20: mol_type = other DNA
gtttttatcttctttgcctt

SEQ ID NO: 31848 - DNA, 20 bp, synthetic construct
  misc_feature 1..20: note = chemically synthesized
  source 1..20: mol_type = other DNA
ttggtttgaatttcctcctg

SEQ ID NO: 31849 - DNA, 20 bp, synthetic construct
  misc_feature 1..20: note = chemically synthesized
  source 1..20: mol_type = other DNA
ttgaatttcctcctgtagct

SEQ ID NO: 31850 - DNA, 20 bp, synthetic construct
  misc_feature 1..20: note = chemically synthesized
  source 1..20: mol_type = other DNA
gaatttcctcctgtagctcg

SEQ ID NO: 31851 - DNA, 20 bp, synthetic construct
  misc_feature 1..20: note = chemically synthesized
  source 1..20: mol_type = other DNA
tttcctcctgtagctcggag

SEQ ID NO: 31852 - DNA, 20 bp, synthetic construct
  misc_feature 1..20: note = chemically synthesized
  source 1..20: mol_type = other DNA
cggagtagtttcatcgtctg

SEQ ID NO: 31853 - DNA, 20 bp, synthetic construct
  misc_feature 1..20: note = chemically synthesized
  source 1..20: mol_type = other DNA
cgtctgaagtcttcttctct

SEQ ID NO: 31854 - DNA, 20 bp, synthetic construct
  misc_feature 1..20: note = chemically synthesized
  source 1..20: mol_type = other DNA
cttcttctctcagctcgtca

SEQ ID NO: 31855 - DNA, 20 bp, synthetic construct
  misc_feature 1..20: note = chemically synthesized
  source 1..20: mol_type = other DNA
cgtcaaagtcattctccatc

SEQ ID NO: 31856 - DNA, 20 bp, synthetic construct
  misc_feature 1..20: note = chemically synthesized
  source 1..20: mol_type = other DNA
atccagctttgttccgttgc

SEQ ID NO: 31857 - DNA, 20 bp, synthetic construct
  misc_feature 1..20: note = chemically synthesized
  source 1..20: mol_type = other DNA
agctttgttccgttgctggt

SEQ ID NO: 31858 - DNA, 20 bp, synthetic construct
  misc_feature 1..20: note = chemically synthesized
  source 1..20: mol_type = other DNA
gctttgttccgttgctggtg

SEQ ID NO: 31859 - DNA, 20 bp, synthetic construct
  misc_feature 1..20: note = chemically synthesized
  source 1..20: mol_type = other DNA
ggtgaggaactgctttcctt

SEQ ID NO: 31860 - DNA, 20 bp, synthetic construct
  misc_feature 1..20: note = chemically synthesized
  source 1..20: mol_type = other DNA
tgaggaactgctttcctttg

SEQ ID NO: 31861 - DNA, 20 bp, synthetic construct
  misc_feature 1..20: note = chemically synthesized
  source 1..20: mol_type = other DNA
gaggaactgctttcctttgg

SEQ ID NO: 31862 - DNA, 20 bp, synthetic construct
  misc_feature 1..20: note = chemically synthesized
  source 1..20: mol_type = other DNA
ggaactgctttcctttggag

SEQ ID NO: 31863 - DNA, 20 bp, synthetic construct
  misc_feature 1..20: note = chemically synthesized
  source 1..20: mol_type = other DNA
gaactgctttcctttggagg

SEQ ID NO: 31864 - DNA, 20 bp, synthetic construct
  misc_feature 1..20: note = chemically synthesized
  source 1..20: mol_type = other DNA
tgctttcctttggaggagga

SEQ ID NO: 31865 - DNA, 20 bp, synthetic construct
  misc_feature 1..20: note = chemically synthesized
  source 1..20: mol_type = other DNA
gctttcctttggaggaggaa

SEQ ID NO: 31866 - DNA, 20 bp, synthetic construct
  misc_feature 1..20: note = chemically synthesized
  source 1..20: mol_type = other DNA
aggaaaggtgctctgctttt

SEQ ID NO: 31867 - DNA, 20 bp, synthetic construct
  misc_feature 1..20: note = chemically synthesized
  source 1..20: mol_type = other DNA
gaaaggtgctctgcttttta

SEQ ID NO: 31868 - DNA, 20 bp, synthetic construct
  misc_feature 1..20: note = chemically synthesized
  source 1..20: mol_type = other DNA
gctctgctttttagagtttc

SEQ ID NO: 31869 - DNA, 20 bp, synthetic construct
  misc_feature 1..20: note = chemically synthesized
  source 1..20: mol_type = other DNA
ctgttttttccccaactttg

SEQ ID NO: 31870 - DNA, 20 bp, synthetic construct
  misc_feature 1..20: note = chemically synthesized
  source 1..20: mol_type = other DNA
tttgtggttgtatctacttt

SEQ ID NO: 31871 - DNA, 20 bp, synthetic construct
  misc_feature 1..20: note = chemically synthesized
  source 1..20: mol_type = other DNA
ctacttttggtctttgatga

SEQ ID NO: 31872 - DNA, 20 bp, synthetic construct
  misc_feature 1..20: note = chemically synthesized
  source 1..20: mol_type = other DNA
tgatgatagtgatgtaccga

SEQ ID NO: 31873 - DNA, 20 bp, synthetic construct
  misc_feature 1..20: note = chemically synthesized
  source 1..20: mol_type = other DNA
gatgatagtgatgtaccgat

SEQ ID NO: 31874 - DNA, 20 bp, synthetic construct
  misc_feature 1..20: note = chemically synthesized
  source 1..20: mol_type = other DNA
gtgatgtaccgatgggtttt

SEQ ID NO: 31875 - DNA, 20 bp, synthetic construct
  misc_feature 1..20: note = chemically synthesized
  source 1..20: mol_type = other DNA
gtaccgatgggtttttggtg

SEQ ID NO: 31876 - DNA, 20 bp, synthetic construct
  misc_feature 1..20: note = chemically synthesized
  source 1..20: mol_type = other DNA
tggatgtcctttctgtttgt

SEQ ID NO: 31877 - DNA, 20 bp, synthetic construct
  misc_feature 1..20: note = chemically synthesized
  source 1..20: mol_type = other DNA
tttgttagttttccttctaa

SEQ ID NO: 31878 - DNA, 20 bp, synthetic construct
  misc_feature 1..20: note = chemically synthesized
  source 1..20: mol_type = other DNA
ttagttttccttctaacaga

SEQ ID NO: 31879 - DNA, 20 bp, synthetic construct
  misc_feature 1..20: note = chemically synthesized
  source 1..20: mol_type = other DNA
tagttttccttctaacagac

SEQ ID NO: 31880 - DNA, 20 bp, synthetic construct
  misc_feature 1..20: note = chemically synthesized
  source 1..20: mol_type = other DNA
cttctaacagacaggaccct

SEQ ID NO: 31881 - DNA, 20 bp, synthetic construct
  misc_feature 1..20: note = chemically synthesized
  source 1..20: mol_type = other DNA
acagacaggaccctcagctg

SEQ ID NO: 31882 - DNA, 20 bp, synthetic construct
  misc_feature 1..20: note = chemically synthesized
  source 1..20: mol_type = other DNA
cagacaggaccctcagctgc

SEQ ID NO: 31883 - DNA, 20 bp, synthetic construct
  misc_feature 1..20: note = chemically synthesized
  source 1..20: mol_type = other DNA
accctcagctgcaggtctgt

SEQ ID NO: 31884 - DNA, 20 bp, synthetic construct
  misc_feature 1..20: note = chemically synthesized
  source 1..20: mol_type = other DNA
cctcagctgcaggtctgttg

SEQ ID NO: 31885 - DNA, 20 bp, synthetic construct
  misc_feature 1..20: note = chemically synthesized
  source 1..20: mol_type = other DNA
gcaggtctgttggagtttgc

SEQ ID NO: 31886 - DNA, 20 bp, synthetic construct
  misc_feature 1..20: note = chemically synthesized
  source 1..20: mol_type = other DNA
aggtctgttggagtttgcta

SEQ ID NO: 31887 - DNA, 20 bp, synthetic construct
  misc_feature 1..20: note = chemically synthesized
  source 1..20: mol_type = other DNA
ggtctgttggagtttgctag

SEQ ID NO: 31888 - DNA, 20 bp, synthetic construct
  misc_feature 1..20: note = chemically synthesized
  source 1..20: mol_type = other DNA
agtttgctagaggtccactc

SEQ ID NO: 31889 - DNA, 20 bp, synthetic construct
  misc_feature 1..20: note = chemically synthesized
  source 1..20: mol_type = other DNA
cactccagaccctgtttgcc

SEQ ID NO: 31890 - DNA, 20 bp, synthetic construct
  misc_feature 1..20: note = chemically synthesized
  source 1..20: mol_type = other DNA
actccagaccctgtttgcct

SEQ ID NO: 31891 - DNA, 20 bp, synthetic construct
  misc_feature 1..20: note = chemically synthesized
  source 1..20: mol_type = other DNA
gaccctgtttgcctgggtat

SEQ ID NO: 31892 - DNA, 20 bp, synthetic construct
  misc_feature 1..20: note = chemically synthesized
  source 1..20: mol_type = other DNA
cctgtttgcctgggtatcag

SEQ ID NO: 31893 - DNA, 20 bp, synthetic construct
  misc_feature 1..20: note = chemically synthesized
  source 1..20: mol_type = other DNA
gtttgcctgggtatcagcag

SEQ ID NO: 31894 - DNA, 20 bp, synthetic construct
  misc_feature 1..20: note = chemically synthesized
  source 1..20: mol_type = other DNA
ggtatcagcagcggtgtctg

SEQ ID NO: 31895 - DNA, 20 bp, synthetic construct
  misc_feature 1..20: note = chemically synthesized
  source 1..20: mol_type = other DNA
cagcggtgtctgcagaaccg

SEQ ID NO: 31896 - DNA, 20 bp, synthetic construct
  misc_feature 1..20: note = chemically synthesized
  source 1..20: mol_type = other DNA
ctgctgtctgatcgttcctc

SEQ ID NO: 31897 - DNA, 20 bp, synthetic construct
  misc_feature 1..20: note = chemically synthesized
  source 1..20: mol_type = other DNA
ctgtctgatcgttcctctgg

SEQ ID NO: 31898 - DNA, 20 bp, synthetic construct
  misc_feature 1..20: note = chemically synthesized
  source 1..20: mol_type = other DNA
ttcctctggaagttttgtct

SEQ ID NO: 31899 - DNA, 20 bp, synthetic construct
  misc_feature 1..20: note = chemically synthesized
  source 1..20: mol_type = other DNA
cctctggaagttttgtctca

SEQ ID NO: 31900 - DNA, 20 bp, synthetic construct
  misc_feature 1..20: note = chemically synthesized
  source 1..20: mol_type = other DNA
ctctggaagttttgtctcag

SEQ ID NO: 31901 - DNA, 20 bp, synthetic construct
  misc_feature 1..20: note = chemically synthesized
  source 1..20: mol_type = other DNA
ctggaagttttgtctcagag

SEQ ID NO: 31902 - DNA, 20 bp, synthetic construct
  misc_feature 1..20: note = chemically synthesized
  source 1..20: mol_type = other DNA
ttttgtctcagaggagtacc

SEQ ID NO: 31903 - DNA, 20 bp, synthetic construct
  misc_feature 1..20: note = chemically synthesized
  source 1..20: mol_type = other DNA
agaggagtacctggccgtgt

SEQ ID NO: 31904 - DNA, 20 bp, synthetic construct
  misc_feature 1..20: note = chemically synthesized
  source 1..20: mol_type = other DNA
gaggagtacctggccgtgtg

SEQ ID NO: 31905 - DNA, 20 bp, synthetic construct
  misc_feature 1..20: note = chemically synthesized
  source 1..20: mol_type = other DNA
tacctggccgtgtgaggtgt

SEQ ID NO: 31906 - DNA, 20 bp, synthetic construct
  misc_feature 1..20: note = chemically synthesized
  source 1..20: mol_type = other DNA
ggtgtcagtctgcccttact

SEQ ID NO: 31907 - DNA, 20 bp, synthetic construct
  misc_feature 1..20: note = chemically synthesized
  source 1..20: mol_type = other DNA
gtgtcagtctgcccttactt

SEQ ID NO: 31908 - DNA, 20 bp, synthetic construct
  misc_feature 1..20: note = chemically synthesized
  source 1..20: mol_type = other DNA
tgtcagtctgcccttacttg

SEQ ID NO: 31909 - DNA, 20 bp, synthetic construct
  misc_feature 1..20: note = chemically synthesized
  source 1..20: mol_type = other DNA
gtcagtctgcccttacttgg

SEQ ID NO: 31910 - DNA, 20 bp, synthetic construct
  misc_feature 1..20: note = chemically synthesized
  source 1..20: mol_type = other DNA
ccttacttgggggtgcctcc

SEQ ID NO: 31911 - DNA, 20 bp, synthetic construct
  misc_feature 1..20: note = chemically synthesized
  source 1..20: mol_type = other DNA
acttgggggtgcctcccagt

SEQ ID NO: 31912 - DNA, 20 bp, synthetic construct
  misc_feature 1..20: note = chemically synthesized
  source 1..20: mol_type = other DNA
cttgggggtgcctcccagtt

SEQ ID NO: 31913 - DNA, 20 bp, synthetic construct
  misc_feature 1..20: note = chemically synthesized
  source 1..20: mol_type = other DNA
tgcctcccagttaggctgct

SEQ ID NO: 31914 - DNA, 20 bp, synthetic construct
  misc_feature 1..20: note = chemically synthesized
  source 1..20: mol_type = other DNA
gcctcccagttaggctgctc

SEQ ID NO: 31915 - DNA, 20 bp, synthetic construct
  misc_feature 1..20: note = chemically synthesized
  source 1..20: mol_type = other DNA
cctcccagttaggctgctcg

SEQ ID NO: 31916 - DNA, 20 bp, synthetic construct
  misc_feature 1..20: note = chemically synthesized
  source 1..20: mol_type = other DNA
ctcccagttaggctgctcgg

SEQ ID NO: 31917 - DNA, 20 bp, synthetic construct
  misc_feature 1..20: note = chemically synthesized
  source 1..20: mol_type = other DNA
cagttaggctgctcgggggt

SEQ ID NO: 31918 - DNA, 20 bp, synthetic construct
  misc_feature 1..20: note = chemically synthesized
  source 1..20: mol_type = other DNA
agttaggctgctcgggggtc

SEQ ID NO: 31919 - DNA, 20 bp, synthetic construct
  misc_feature 1..20: note = chemically synthesized
  source 1..20: mol_type = other DNA
gttaggctgctcgggggtca

SEQ ID NO: 31920 - DNA, 20 bp, synthetic construct
  misc_feature 1..20: note = chemically synthesized
  source 1..20: mol_type = other DNA
ttaggctgctcgggggtcag

SEQ ID NO: 31921 - DNA, 20 bp, synthetic construct
  misc_feature 1..20: note = chemically synthesized
  source 1..20: mol_type = other DNA
gctgctcgggggtcaggggt

SEQ ID NO: 31922 - DNA, 20 bp, synthetic construct
  misc_feature 1..20: note = chemically synthesized
  source 1..20: mol_type = other DNA
ctgctcgggggtcaggggtc

SEQ ID NO: 31923 - DNA, 20 bp, synthetic construct
  misc_feature 1..20: note = chemically synthesized
  source 1..20: mol_type = other DNA
tgctcgggggtcaggggtca

SEQ ID NO: 31924 - DNA, 20 bp, synthetic construct
  misc_feature 1..20: note = chemically synthesized
  source 1..20: mol_type = other DNA
caggggtcagggacccactt

SEQ ID NO: 31925 - DNA, 20 bp, synthetic construct
  misc_feature 1..20: note = chemically synthesized
  source 1..20: mol_type = other DNA
aggggtcagggacccacttg

SEQ ID NO: 31926 - DNA, 20 bp, synthetic construct
  misc_feature 1..20: note = chemically synthesized
  source 1..20: mol_type = other DNA
gggtcagggacccacttgag

SEQ ID NO: 31927 - DNA, 20 bp, synthetic construct
  misc_feature 1..20: note = chemically synthesized
  source 1..20: mol_type = other DNA
ggtcagggacccacttgagg

SEQ ID NO: 31928 - DNA, 20 bp, synthetic construct
  misc_feature 1..20: note = chemically synthesized
  source 1..20: mol_type = other DNA
cagggacccacttgaggagg

SEQ ID NO: 31929 - DNA, 20 bp, synthetic construct
  misc_feature 1..20: note = chemically synthesized
  source 1..20: mol_type = other DNA
ggaggcagtctgcccgttct

SEQ ID NO: 31930 - DNA, 20 bp, synthetic construct
  misc_feature 1..20: note = chemically synthesized
  source 1..20: mol_type = other DNA
tctgcccgttctcagatctc

SEQ ID NO: 31931 - DNA, 20 bp, synthetic construct
  misc_feature 1..20: note = chemically synthesized
  source 1..20: mol_type = other DNA
tcagatctccagctgtgtgc

SEQ ID NO: 31932 - DNA, 20 bp, synthetic construct
  misc_feature 1..20: note = chemically synthesized
  source 1..20: mol_type = other DNA
cagatctccagctgtgtgct

SEQ ID NO: 31933 - DNA, 20 bp, synthetic construct
  misc_feature 1..20: note = chemically synthesized
  source 1..20: mol_type = other DNA
gatctccagctgtgtgctgg

SEQ ID NO: 31934 - DNA, 20 bp, synthetic construct
  misc_feature 1..20: note = chemically synthesized
  source 1..20: mol_type = other DNA
gagaaccactgctctcctca

SEQ ID NO: 31935 - DNA, 20 bp, synthetic construct
  misc_feature 1..20: note = chemically synthesized
  source 1..20: mol_type = other DNA
actgctctcctcaaagctgt

SEQ ID NO: 31936 - DNA, 20 bp, synthetic construct
  misc_feature 1..20: note = chemically synthesized
  source 1..20: mol_type = other DNA
ctctcctcaaagctgtcaga

SEQ ID NO: 31937 - DNA, 20 bp, synthetic construct
  misc_feature 1..20: note = chemically synthesized
  source 1..20: mol_type = other DNA
tctcctcaaagctgtcagac

SEQ ID NO: 31938 - DNA, 20 bp, synthetic construct
  misc_feature 1..20: note = chemically synthesized
  source 1..20: mol_type = other DNA
ctcctcaaagctgtcagaca

SEQ ID NO: 31939 - DNA, 20 bp, synthetic construct
  misc_feature 1..20: note = chemically synthesized
  source 1..20: mol_type = other DNA
gctgtcagacagggacattt

SEQ ID NO: 31940 - DNA, 20 bp, synthetic construct
  misc_feature 1..20: note = chemically synthesized
  source 1..20: mol_type = other DNA
gacagggacatttaagtctg

SEQ ID NO: 31941 - DNA, 20 bp, synthetic construct
  misc_feature 1..20: note = chemically synthesized
  source 1..20: mol_type = other DNA
cagggacatttaagtctgca

SEQ ID NO: 31942 - DNA, 20 bp, synthetic construct
  misc_feature 1..20: note = chemically synthesized
  source 1..20: mol_type = other DNA
agggacatttaagtctgcag

SEQ ID NO: 31943 - DNA, 20 bp, synthetic construct
  misc_feature 1..20: note = chemically synthesized
  source 1..20: mol_type = other DNA
ttgtctgtgccctgccccca

SEQ ID NO: 31944 - DNA, 20 bp, synthetic construct
  misc_feature 1..20: note = chemically synthesized
  source 1..20: mol_type = other DNA
tgtctgtgccctgcccccaa

SEQ ID NO: 31945 - DNA, 20 bp, synthetic construct
  misc_feature 1..20: note = chemically synthesized
  source 1..20: mol_type = other DNA
ctgtgccctgcccccaaagg

SEQ ID NO: 31946 - DNA, 20 bp, synthetic construct
  misc_feature 1..20: note = chemically synthesized
  source 1..20: mol_type = other DNA
gtgccctgcccccaaaggtg

SEQ ID NO: 31947 - DNA, 20 bp, synthetic construct
  misc_feature 1..20: note = chemically synthesized
  source 1..20: mol_type = other DNA
gcccccaaaggtggagccta

SEQ ID NO: 31948 - DNA, 20 bp, synthetic construct
  misc_feature 1..20: note = chemically synthesized
  source 1..20: mol_type = other DNA
ccccaaaggtggagcctaca

SEQ ID NO: 31949 - DNA, 20 bp, synthetic construct
  misc_feature 1..20: note = chemically synthesized
  source 1..20: mol_type = other DNA
cccaaaggtggagcctacag

SEQ ID NO: 31950 - DNA, 20 bp, synthetic construct
  misc_feature 1..20: note = chemically synthesized
  source 1..20: mol_type = other DNA
aaaggtggagcctacagagg

SEQ ID NO: 31951 - DNA, 20 bp, synthetic construct
  misc_feature 1..20: note = chemically synthesized
  source 1..20: mol_type = other DNA
aaggtggagcctacagaggc

SEQ ID NO: 31952 - DNA, 20 bp, synthetic construct
  misc_feature 1..20: note = chemically synthesized
  source 1..20: mol_type = other DNA
gtggagcctacagaggcagg

SEQ ID NO: 31953 - DNA, 20 bp, synthetic construct
  misc_feature 1..20: note = chemically synthesized
  source 1..20: mol_type = other DNA
tggagcctacagaggcaggc

SEQ ID NO: 31954 - DNA, 20 bp, synthetic construct
  misc_feature 1..20: note = chemically synthesized
  source 1..20: mol_type = other DNA
agaggcaggcaggcctcctt

SEQ ID NO: 31955 - DNA, 20 bp, synthetic construct
  misc_feature 1..20: note = chemically synthesized
  source 1..20: mol_type = other DNA
aggcaggcctccttgagctg

SEQ ID NO: 31956 - DNA, 20 bp, synthetic construct
  misc_feature 1..20: note = chemically synthesized
  source 1..20: mol_type = other DNA
caggcctccttgagctgtgg

SEQ ID NO: 31957 - DNA, 20 bp, synthetic construct
  misc_feature 1..20: note = chemically synthesized
  source 1..20: mol_type = other DNA
aggcctccttgagctgtggt

SEQ ID NO: 31958 - DNA, 20 bp, synthetic construct
  misc_feature 1..20: note = chemically synthesized
  source 1..20: mol_type = other DNA
ggcctccttgagctgtggtg

SEQ ID NO: 31959 - DNA, 20 bp, synthetic construct
  misc_feature 1..20: note = chemically synthesized
  source 1..20: mol_type = other DNA
gagctgtggtggggtccacc

SEQ ID NO: 31960 - DNA, 20 bp, synthetic construct
  misc_feature 1..20: note = chemically synthesized
  source 1..20: mol_type = other DNA
tggtggggtccacccagttt

SEQ ID NO: 31961 - DNA, 20 bp, synthetic construct
  misc_feature 1..20: note = chemically synthesized
  source 1..20: mol_type = other DNA
tccacccagtttgagcttcc

SEQ ID NO: 31962 - DNA, 20 bp, synthetic construct
  misc_feature 1..20: note = chemically synthesized
  source 1..20: mol_type = other DNA
cctggctgctttgtttacct

SEQ ID NO: 31963 - DNA, 20 bp, synthetic construct
  misc_feature 1..20: note = chemically synthesized
  source 1..20: mol_type = other DNA
gctgctttgtttacctaagc

SEQ ID NO: 31964 - DNA, 20 bp, synthetic construct
  misc_feature 1..20: note = chemically synthesized
  source 1..20: mol_type = other DNA
tttgtttacctaagcaagcc

SEQ ID NO: 31965 - DNA, 20 bp, synthetic construct
  misc_feature 1..20: note = chemically synthesized
  source 1..20: mol_type = other DNA
ttgtttacctaagcaagcct

SEQ ID NO: 31966 - DNA, 20 bp, synthetic construct
  misc_feature 1..20: note = chemically synthesized
  source 1..20: mol_type = other DNA
acctaagcaagcctgggcaa

SEQ ID NO: 31967 - DNA, 20 bp, synthetic construct
  misc_feature 1..20: note = chemically synthesized
  source 1..20: mol_type = other DNA
taagcaagcctgggcaatgg

SEQ ID NO: 31968 - DNA, 20 bp, synthetic construct
  misc_feature 1..20: note = chemically synthesized
  source 1..20: mol_type = other DNA
aatggcggctgcccctcccc

SEQ ID NO: 31969 - DNA, 20 bp, synthetic construct
  misc_feature 1..20: note = chemically synthesized
  source 1..20: mol_type = other DNA
ccagcctcgctgccaccttg

SEQ ID NO: 31970 - DNA, 20 bp, synthetic construct
  misc_feature 1..20: note = chemically synthesized
  source 1..20: mol_type = other DNA
gccaccttgcagtttgatct

SEQ ID NO: 31971 - DNA, 20 bp, synthetic construct
  misc_feature 1..20: note = chemically synthesized
  source 1..20: mol_type = other DNA
ttgatctcagactgctgtgc

SEQ ID NO: 31972 - DNA, 20 bp, synthetic construct
  misc_feature 1..20: note = chemically synthesized
  source 1..20: mol_type = other DNA
cagactgctgtgctagcaat

SEQ ID NO: 31973 - DNA, 20 bp, synthetic construct
  misc_feature 1..20: note = chemically synthesized
  source 1..20: mol_type = other DNA
agactgctgtgctagcaatc

SEQ ID NO: 31974 - DNA, 20 bp, synthetic construct
  misc_feature 1..20: note = chemically synthesized
  source 1..20: mol_type = other DNA
gactgctgtgctagcaatca

SEQ ID NO: 31975 - DNA, 20 bp, synthetic construct
  misc_feature 1..20: note = chemically synthesized
  source 1..20: mol_type = other DNA
ctgctgtgctagcaatcagg

SEQ ID NO: 31976 - DNA, 20 bp, synthetic construct
  misc_feature 1..20: note = chemically synthesized
  source 1..20: mol_type = other DNA
tagcaatcagggagactccg

SEQ ID NO: 31977 - DNA, 20 bp, synthetic construct
  misc_feature 1..20: note = chemically synthesized
  source 1..20: mol_type = other DNA
agcaatcagggagactccgt

SEQ ID NO: 31978 - DNA, 20 bp, synthetic construct
  misc_feature 1..20: note = chemically synthesized
  source 1..20: mol_type = other DNA
tcagggagactccgtgggcg

SEQ ID NO: 31979 - DNA, 20 bp, synthetic construct
  misc_feature 1..20: note = chemically synthesized
  source 1..20: mol_type = other DNA
cagggagactccgtgggcgt

SEQ ID NO: 31980 - DNA, 20 bp, synthetic construct
  misc_feature 1..20: note = chemically synthesized
  source 1..20: mol_type = other DNA
ctccgtgggcgtaggaccct

SEQ ID NO: 31981 - DNA, 20 bp, synthetic construct
  misc_feature 1..20: note = chemically synthesized
  source 1..20: mol_type = other DNA
ccgtgggcgtaggaccctcg

SEQ ID NO: 31982 - DNA, 20 bp, synthetic construct
  misc_feature 1..20: note = chemically synthesized
  source 1..20: mol_type = other DNA
aggaccctcggagccatgtg

SEQ ID NO: 31983 - DNA, 20 bp, synthetic construct
  misc_feature 1..20: note = chemically synthesized
  source 1..20: mol_type = other DNA
ggaccctcggagccatgtgc

SEQ ID NO: 31984 - DNA, 20 bp, synthetic construct
  misc_feature 1..20: note = chemically synthesized
  source 1..20: mol_type = other DNA
atgtgcaggatataatctcc

SEQ ID NO: 31985 - DNA, 20 bp, synthetic construct
  misc_feature 1..20: note = chemically synthesized
  source 1..20: mol_type = other DNA
ctcctggtgcgccatttcct

SEQ ID NO: 31986 - DNA, 20 bp, synthetic construct
  misc_feature 1..20: note = chemically synthesized
  source 1..20: mol_type = other DNA
gcgccatttcctaagcctgt

SEQ ID NO: 31987 - DNA, 20 bp, synthetic construct
  misc_feature 1..20: note = chemically synthesized
  source 1..20: mol_type = other DNA
atttcctaagcctgtcagaa

SEQ ID NO: 31988 - DNA, 20 bp, synthetic construct
  misc_feature 1..20: note = chemically synthesized
  source 1..20: mol_type = other DNA
ctaagcctgtcagaaaagca

SEQ ID NO: 31989 - DNA, 20 bp, synthetic construct
  misc_feature 1..20: note = chemically synthesized
  source 1..20: mol_type = other DNA
tgtcagaaaagcacagtatt

SEQ ID NO: 31990 - DNA, 20 bp, synthetic construct
  misc_feature 1..20: note = chemically synthesized
  source 1..20: mol_type = other DNA
gtcagaaaagcacagtattc

SEQ ID NO: 31991 - DNA, 20 bp, synthetic construct
  misc_feature 1..20: note = chemically synthesized
  source 1..20: mol_type = other DNA
agaaaagcacagtattcggg

SEQ ID NO: 31992 - DNA, 20 bp, synthetic construct
  misc_feature 1..20: note = chemically synthesized
  source 1..20: mol_type = other DNA
gaaaagcacagtattcgggt

SEQ ID NO: 31993 - DNA, 20 bp, synthetic construct
  misc_feature 1..20: note = chemically synthesized
  source 1..20: mol_type = other DNA
aaagcacagtattcgggtgg

SEQ ID NO: 31994 - DNA, 20 bp, synthetic construct
  misc_feature 1..20: note = chemically synthesized
  source 1..20: mol_type = other DNA
gcacagtattcgggtgggag

SEQ ID NO: 31995 - DNA, 20 bp, synthetic construct
  misc_feature 1..20: note = chemically synthesized
  source 1..20: mol_type = other DNA
gtgggagtggcccaattttc

SEQ ID NO: 31996 - DNA, 20 bp, synthetic construct
  misc_feature 1..20: note = chemically synthesized
  source 1..20: mol_type = other DNA
tgggagtggcccaattttcc

SEQ ID NO: 31997 - DNA, 20 bp, synthetic construct
  misc_feature 1..20: note = chemically synthesized
  source 1..20: mol_type = other DNA
atgtcacccctttccttgac

SEQ ID NO: 31998 - DNA, 20 bp, synthetic construct
  misc_feature 1..20: note = chemically synthesized
  source 1..20: mol_type = other DNA
tgtcacccctttccttgacc

SEQ ID NO: 31999 - DNA, 20 bp, synthetic construct
  misc_feature 1..20: note = chemically synthesized
  source 1..20: mol_type = other DNA
acccctttccttgaccagga

SEQ ID NO: 32000 - DNA, 20 bp, synthetic construct
  misc_feature 1..20: note = chemically synthesized
  source 1..20: mol_type = other DNA
cccctttccttgaccaggaa

SEQ ID NO: 32001 - DNA, 20 bp, synthetic construct
  misc_feature 1..20: note = chemically synthesized
  source 1..20: mol_type = other DNA
ccctttccttgaccaggaaa

SEQ ID NO: 32002 - DNA, 20 bp, synthetic construct
  misc_feature 1..20: note = chemically synthesized
  source 1..20: mol_type = other DNA
catgaccccttgtgcttccc

SEQ ID NO: 32003 - DNA, 20 bp, synthetic construct
  misc_feature 1..20: note = chemically synthesized
  source 1..20: mol_type = other DNA
accccttgtgcttcccaagt

SEQ ID NO: 32004 - DNA, 20 bp, synthetic construct
  misc_feature 1..20: note = chemically synthesized
  source 1..20: mol_type = other DNA
ccccttgtgcttcccaagtg

SEQ ID NO: 32005 - DNA, 20 bp, synthetic construct
  misc_feature 1..20: note = chemically synthesized
  source 1..20: mol_type = other DNA
ggcaatgcctcaccctgctt

SEQ ID NO: 32006 - DNA, 20 bp, synthetic construct
  misc_feature 1..20: note = chemically synthesized
  source 1..20: mol_type = other DNA
atgcctcaccctgcttcggc

SEQ ID NO: 32007 - DNA, 20 bp, synthetic construct
  misc_feature 1..20: note = chemically synthesized
  source 1..20: mol_type = other DNA
accctgcttcggctggtgca

SEQ ID NO: 32008 - DNA, 20 bp, synthetic construct
  misc_feature 1..20: note = chemically synthesized
  source 1..20: mol_type = other DNA
actgacctgtgcccactgtc

SEQ ID NO: 32009 - DNA, 20 bp, synthetic construct
  misc_feature 1..20: note = chemically synthesized
  source 1..20: mol_type = other DNA
gcccactgtctggcactccc

SEQ ID NO: 32010 - DNA, 20 bp, synthetic construct
  misc_feature 1..20: note = chemically synthesized
  source 1..20: mol_type = other DNA
actgtctggcactccctagc

SEQ ID NO: 32011 - DNA, 20 bp, synthetic construct
  misc_feature 1..20: note = chemically synthesized
  source 1..20: mol_type = other DNA
gcgagatgaaccccatacct

SEQ ID NO: 32012 - DNA, 20 bp, synthetic construct
  misc_feature 1..20: note = chemically synthesized
  source 1..20: mol_type = other DNA
gatgaaccccatacctcaga

SEQ ID NO: 32013 - DNA, 20 bp, synthetic construct
  misc_feature 1..20: note = chemically synthesized
  source 1..20: mol_type = other DNA
ccatacctcagatggaaatg

SEQ ID NO: 32014 - DNA, 20 bp, synthetic construct
  misc_feature 1..20: note = chemically synthesized
  source 1..20: mol_type = other DNA
gtcttctgtgttgttcacgc

SEQ ID NO: 32015 - DNA, 20 bp, synthetic construct
  misc_feature 1..20: note = chemically synthesized
  source 1..20: mol_type = other DNA
tcttctgtgttgttcacgct

SEQ ID NO: 32016 - DNA, 20 bp, synthetic construct
  misc_feature 1..20: note = chemically synthesized
  source 1..20: mol_type = other DNA
ttctgtgttgttcacgctgg

SEQ ID NO: 32017 - DNA, 20 bp, synthetic construct
  misc_feature 1..20: note = chemically synthesized
  source 1..20: mol_type = other DNA
gttgttcacgctgggagctg

SEQ ID NO: 32018 - DNA, 20 bp, synthetic construct
  misc_feature 1..20: note = chemically synthesized
  source 1..20: mol_type = other DNA
tcacgctgggagctgtagac

SEQ ID NO: 32019 - DNA, 20 bp, synthetic construct
  misc_feature 1..20: note = chemically synthesized
  source 1..20: mol_type = other DNA
acgctgggagctgtagacca

SEQ ID NO: 32020 - DNA, 20 bp, synthetic construct
  misc_feature 1..20: note = chemically synthesized
  source 1..20: mol_type = other DNA
agaccagagctgttcctatt

SEQ ID NO: 32021 - DNA, 20 bp, synthetic construct
  misc_feature 1..20: note = chemically synthesized
  source 1..20: mol_type = other DNA
ctgttcctatttggccatct

SEQ ID NO: 32022 - DNA, 20 bp, synthetic construct
  misc_feature 1..20: note = chemically synthesized
  source 1..20: mol_type = other DNA
ggccatcttggctcaaaaac

SEQ ID NO: 32023 - DNA, 20 bp, synthetic construct
  misc_feature 1..20: note = chemically synthesized
  source 1..20: mol_type = other DNA
aactggaactttatttgtga

SEQ ID NO: 32024 - DNA, 20 bp, synthetic construct
  misc_feature 1..20: note = chemically synthesized
  source 1..20: mol_type = other DNA
aaagaaaaaatcgatcaata

SEQ ID NO: 32025 - DNA, 20 bp, synthetic construct
  misc_feature 1..20: note = chemically synthesized
  source 1..20: mol_type = other DNA
aatcgatcaatatagacttc

SEQ ID NO: 32026 - DNA, 20 bp, synthetic construct
  misc_feature 1..20: note = chemically synthesized
  source 1..20: mol_type = other DNA
gtgaaaattttcttcaaatc

SEQ ID NO: 32027 - DNA, 20 bp, synthetic construct
  misc_feature 1..20: note = chemically synthesized
  source 1..20: mol_type = other DNA
acaatatctaaaaaattgcc

SEQ ID NO: 32028 - DNA, 20 bp, synthetic construct
  misc_feature 1..20: note = chemically synthesized
  source 1..20: mol_type = other DNA
aaattgccgagactgatatc

SEQ ID NO: 32029 - DNA, 20 bp, synthetic construct
  misc_feature 1..20: note = chemically synthesized
  source 1..20: mol_type = other DNA
ttgccgagactgatatcaag

SEQ ID NO: 32030 - DNA, 20 bp, synthetic construct
  misc_feature 1..20: note = chemically synthesized
  source 1..20: mol_type = other DNA
tatctctatacatgttcttc

SEQ ID NO: 32031 - DNA, 20 bp, synthetic construct
  misc_feature 1..20: note = chemically synthesized
  source 1..20: mol_type = other DNA
atctctatacatgttcttcc

SEQ ID NO: 32032 - DNA, 20 bp, synthetic construct
  misc_feature 1..20: note = chemically synthesized
  source 1..20: mol_type = other DNA
ctctatacatgttcttccag

SEQ ID NO: 32033 - DNA, 20 bp, synthetic construct
  misc_feature 1..20: note = chemically synthesized
  source 1..20: mol_type = other DNA
ttccaggagttttgtgattt

SEQ ID NO: 32034 - DNA, 20 bp, synthetic construct
  misc_feature 1..20: note = chemically synthesized
  source 1..20: mol_type = other DNA
tccaggagttttgtgatttc

SEQ ID NO: 32035 - DNA, 20 bp, synthetic construct
  misc_feature 1..20: note = chemically synthesized
  source 1..20: mol_type = other DNA
ttatgtctttaatctatttt

SEQ ID NO: 32036 - DNA, 20 bp, synthetic construct
  misc_feature 1..20: note = chemically synthesized
  source 1..20: mol_type = other DNA
atctattttgagttgactta

SEQ ID NO: 32037 - DNA, 20 bp, synthetic construct
  misc_feature 1..20: note = chemically synthesized
  source 1..20: mol_type = other DNA
tttgagttgacttatggctt

SEQ ID NO: 32038 - DNA, 20 bp, synthetic construct
  misc_feature 1..20: note = chemically synthesized
  source 1..20: mol_type = other DNA
ttgagttgacttatggctta

SEQ ID NO: 32039 - DNA, 20 bp, synthetic construct
  misc_feature 1..20: note = chemically synthesized
  source 1..20: mol_type = other DNA
ttgacttatggcttaaggta

SEQ ID NO: 32040 - DNA, 20 bp, synthetic construct
  misc_feature 1..20: note = chemically synthesized
  source 1..20: mol_type = other DNA
tgacttatggcttaaggtaa

SEQ ID NO: 32041 - DNA, 20 bp, synthetic construct
  misc_feature 1..20: note = chemically synthesized
  source 1..20: mol_type = other DNA
caattttattcttttgcatt

SEQ ID NO: 32042 - DNA, 20 bp, synthetic construct
  misc_feature 1..20: note = chemically synthesized
  source 1..20: mol_type = other DNA
ttcttttgcatttggatatc

SEQ ID NO: 32043 - DNA, 20 bp, synthetic construct
  misc_feature 1..20: note = chemically synthesized
  source 1..20: mol_type = other DNA
ttttcccaacactatttgtt

SEQ ID NO: 32044 - DNA, 20 bp, synthetic construct
  misc_feature 1..20: note = chemically synthesized
  source 1..20: mol_type = other DNA
tttcccaacactatttgttg

SEQ ID NO: 32045 - DNA, 20 bp, synthetic construct
  misc_feature 1..20: note = chemically synthesized
  source 1..20: mol_type = other DNA
tcccaacactatttgttgag

SEQ ID NO: 32046 - DNA, 20 bp, synthetic construct
  misc_feature 1..20: note = chemically synthesized
  source 1..20: mol_type = other DNA
ctatccttcccctattgtgt

SEQ ID NO: 32047 - DNA, 20 bp, synthetic construct
  misc_feature 1..20: note = chemically synthesized
  source 1..20: mol_type = other DNA
tccttcccctattgtgttgg

SEQ ID NO: 32048 - DNA, 20 bp, synthetic construct
  misc_feature 1..20: note = chemically synthesized
  source 1..20: mol_type = other DNA
attgtgttggtggccttgtt

SEQ ID NO: 32049 - DNA, 20 bp, synthetic construct
  misc_feature 1..20: note = chemically synthesized
  source 1..20: mol_type = other DNA
gtggccttgttgagaattac

SEQ ID NO: 32050 - DNA, 20 bp, synthetic construct
  misc_feature 1..20: note = chemically synthesized
  source 1..20: mol_type = other DNA
tatatacgtaaatttatttc

SEQ ID NO: 32051 - DNA, 20 bp, synthetic construct
  misc_feature 1..20: note = chemically synthesized
  source 1..20: mol_type = other DNA
atatacgtaaatttatttct

SEQ ID NO: 32052 - DNA, 20 bp, synthetic construct
  misc_feature 1..20: note = chemically synthesized
  source 1..20: mol_type = other DNA
gctctttattctgttcaatt

SEQ ID NO: 32053 - DNA, 20 bp, synthetic construct
  misc_feature 1..20: note = chemically synthesized
  source 1..20: mol_type = other DNA
ctatgtgtctatttatgtga

SEQ ID NO: 32054 - DNA, 20 bp, synthetic construct
  misc_feature 1..20: note = chemically synthesized
  source 1..20: mol_type = other DNA
gtgatagtaccatacttttt

SEQ ID NO: 32055 - DNA, 20 bp, synthetic construct
  misc_feature 1..20: note = chemically synthesized
  source 1..20: mol_type = other DNA
ccatacttttttggttacta

SEQ ID NO: 32056 - DNA, 20 bp, synthetic construct
  misc_feature 1..20: note = chemically synthesized
  source 1..20: mol_type = other DNA
tttgtaatataatttgaaat

SEQ ID NO: 32057 - DNA, 20 bp, synthetic construct
  misc_feature 1..20: note = chemically synthesized
  source 1..20: mol_type = other DNA
tcagaacgtgtgctgccatc

SEQ ID NO: 32058 - DNA, 20 bp, synthetic construct
  misc_feature 1..20: note = chemically synthesized
  source 1..20: mol_type = other DNA
aacgtgtgctgccatcaagt

SEQ ID NO: 32059 - DNA, 20 bp, synthetic construct
  misc_feature 1..20: note = chemically synthesized
  source 1..20: mol_type = other DNA
caagttggtttttctttctc

SEQ ID NO: 32060 - DNA, 20 bp, synthetic construct
  misc_feature 1..20: note = chemically synthesized
  source 1..20: mol_type = other DNA
tttctttctcaagattgttt

SEQ ID NO: 32061 - DNA, 20 bp, synthetic construct
  misc_feature 1..20: note = chemically synthesized
  source 1..20: mol_type = other DNA
tcaagattgttttggccatt

SEQ ID NO: 32062 - DNA, 20 bp, synthetic construct
  misc_feature 1..20: note = chemically synthesized
  source 1..20: mol_type = other DNA
caagattgttttggccattt

SEQ ID NO: 32063 - DNA, 20 bp, synthetic construct
  misc_feature 1..20: note = chemically synthesized
  source 1..20: mol_type = other DNA
aagattgttttggccatttg

SEQ ID NO: 32064 - DNA, 20 bp, synthetic construct
  misc_feature 1..20: note = chemically synthesized
  source 1..20: mol_type = other DNA
agattgttttggccatttgg

SEQ ID NO: 32065 - DNA, 20 bp, synthetic construct
  misc_feature 1..20: note = chemically synthesized
  source 1..20: mol_type = other DNA
ggccatttgggggtgttctg

SEQ ID NO: 32066 - DNA, 20 bp, synthetic construct
  misc_feature 1..20: note = chemically synthesized
  source 1..20: mol_type = other DNA
ttgttttctgtaaaatgtgc

SEQ ID NO: 32067 - DNA, 20 bp, synthetic construct
  misc_feature 1..20: note = chemically synthesized
  source 1..20: mol_type = other DNA
gttttctgtaaaatgtgcca

SEQ ID NO: 32068 - DNA, 20 bp, synthetic construct
  misc_feature 1..20: note = chemically synthesized
  source 1..20: mol_type = other DNA
ctgtaaaatgtgccagagct

SEQ ID NO: 32069 - DNA, 20 bp, synthetic construct
  misc_feature 1..20: note = chemically synthesized
  source 1..20: mol_type = other DNA
tgtaaaatgtgccagagctc

SEQ ID NO: 32070 - DNA, 20 bp, synthetic construct
  misc_feature 1..20: note = chemically synthesized
  source 1..20: mol_type = other DNA
tgccagagctcaggtaacaa

SEQ ID NO: 32071 - DNA, 20 bp, synthetic construct
  misc_feature 1..20: note = chemically synthesized
  source 1..20: mol_type = other DNA
taacaaaagcaaaaataaac

SEQ ID NO: 32072 - DNA, 20 bp, synthetic construct
  misc_feature 1..20: note = chemically synthesized
  source 1..20: mol_type = other DNA
caaaagcaaaaataaacaag

SEQ ID NO: 32073 - DNA, 20 bp, synthetic construct
  misc_feature 1..20: note = chemically synthesized
  source 1..20: mol_type = other DNA
aaagcaaaaataaacaagtg

SEQ ID NO: 32074 - DNA, 20 bp, synthetic construct
  misc_feature 1..20: note = chemically synthesized
  source 1..20: mol_type = other DNA
caaactaaatattttctgca

SEQ ID NO: 32075 - DNA, 20 bp, synthetic construct
  misc_feature 1..20: note = chemically synthesized
  source 1..20: mol_type = other DNA
taaatattttctgcacagca

SEQ ID NO: 32076 - DNA, 20 bp, synthetic construct
  misc_feature 1..20: note = chemically synthesized
  source 1..20: mol_type = other DNA
gcaaagaaaacaatcatcaa

SEQ ID NO: 32077 - DNA, 20 bp, synthetic construct
  misc_feature 1..20: note = chemically synthesized
  source 1..20: mol_type = other DNA
caaagaaaacaatcatcaaa

SEQ ID NO: 32078 - DNA, 20 bp, synthetic construct
  misc_feature 1..20: note = chemically synthesized
  source 1..20: mol_type = other DNA
aaaacaatcatcaaaaggaa

SEQ ID NO: 32079 - DNA, 20 bp, synthetic construct
  misc_feature 1..20: note = chemically synthesized
  source 1..20: mol_type = other DNA
aatcatcaaaaggaacagtt

SEQ ID NO: 32080 - DNA, 20 bp, synthetic construct
  misc_feature 1..20: note = chemically synthesized
  source 1..20: mol_type = other DNA
atcatcaaaaggaacagttt

SEQ ID NO: 32081 - DNA, 20 bp, synthetic construct
  misc_feature 1..20: note = chemically synthesized
  source 1..20: mol_type = other DNA
catcaaaaggaacagtttgg

SEQ ID NO: 32082 - DNA, 20 bp, synthetic construct
  misc_feature 1..20: note = chemically synthesized
  source 1..20: mol_type = other DNA
agtttgggagaaaatattta

SEQ ID NO: 32083 - DNA, 20 bp, synthetic construct
  misc_feature 1..20: note = chemically synthesized
  source 1..20: mol_type = other DNA
acagatcatatatctgatac

SEQ ID NO: 32084 - DNA, 20 bp, synthetic construct
  misc_feature 1..20: note = chemically synthesized
  source 1..20: mol_type = other DNA
gtctaatacccaaaatatat

SEQ ID NO: 32085 - DNA, 20 bp, synthetic construct
  misc_feature 1..20: note = chemically synthesized
  source 1..20: mol_type = other DNA
tctaatacccaaaatatata

SEQ ID NO: 32086 - DNA, 20 bp, synthetic construct
  misc_feature 1..20: note = chemically synthesized
  source 1..20: mol_type = other DNA
ctaaatatgaaaaaatataa

SEQ ID NO: 32087 - DNA, 20 bp, synthetic construct
  misc_feature 1..20: note = chemically synthesized
  source 1..20: mol_type = other DNA
aaaaaatataatagtaacct

SEQ ID NO: 32088 - DNA, 20 bp, synthetic construct
  misc_feature 1..20: note = chemically synthesized
  source 1..20: mol_type = other DNA
aatagtaacctaagtaaaaa

SEQ ID NO: 32089 - DNA, 20 bp, synthetic construct
  misc_feature 1..20: note = chemically synthesized
  source 1..20: mol_type = other DNA
atagtaacctaagtaaaaat

SEQ ID NO: 32090 - DNA, 20 bp, synthetic construct
  misc_feature 1..20: note = chemically synthesized
  source 1..20: mol_type = other DNA
aacctaagtaaaaatgggca

SEQ ID NO: 32091 - DNA, 20 bp, synthetic construct
  misc_feature 1..20: note = chemically synthesized
  source 1..20: mol_type = other DNA
acctaagtaaaaatgggcaa

SEQ ID NO: 32092 - DNA, 20 bp, synthetic construct
  misc_feature 1..20: note = chemically synthesized
  source 1..20: mol_type = other DNA
tctgaatatacatttctctg

SEQ ID NO: 32093 - DNA, 20 bp, synthetic construct
  misc_feature 1..20: note = chemically synthesized
  source 1..20: mol_type = other DNA
tttctctgaagacatgcaaa

SEQ ID NO: 32094 - DNA, 20 bp, synthetic construct
  misc_feature 1..20: note = chemically synthesized
  source 1..20: mol_type = other DNA
tctgaagacatgcaaatggt

SEQ ID NO: 32095 - DNA, 20 bp, synthetic construct
  misc_feature 1..20: note = chemically synthesized
  source 1..20: mol_type = other DNA
gaagacatgcaaatggtcag

SEQ ID NO: 32096 - DNA, 20 bp, synthetic construct
  misc_feature 1..20: note = chemically synthesized
  source 1..20: mol_type = other DNA
aagacatgcaaatggtcagc

SEQ ID NO: 32097 - DNA, 20 bp, synthetic construct
  misc_feature 1..20: note = chemically synthesized
  source 1..20: mol_type = other DNA
atggtcagcaggcatatgaa

SEQ ID NO: 32098 - DNA, 20 bp, synthetic construct
  misc_feature 1..20: note = chemically synthesized
  source 1..20: mol_type = other DNA
tggtcagcaggcatatgaaa

SEQ ID NO: 32099 - DNA, 20 bp, synthetic construct
  misc_feature 1..20: note = chemically synthesized
  source 1..20: mol_type = other DNA
tgcactacatcaccaatcat

SEQ ID NO: 32100 - DNA, 20 bp, synthetic construct
  misc_feature 1..20: note = chemically synthesized
  source 1..20: mol_type = other DNA
gcactacatcaccaatcatc

SEQ ID NO: 32101 - DNA, 20 bp, synthetic construct
  misc_feature 1..20: note = chemically synthesized
  source 1..20: mol_type = other DNA
aaaatgcaaatcaaaaccac

SEQ ID NO: 32102 - DNA, 20 bp, synthetic construct
  misc_feature 1..20: note = chemically synthesized
  source 1..20: mol_type = other DNA
aagtatcactcacacctgtt

SEQ ID NO: 32103 - DNA, 20 bp, synthetic construct
  misc_feature 1..20: note = chemically synthesized
  source 1..20: mol_type = other DNA
atcactcacacctgttgaga

SEQ ID NO: 32104 - DNA, 20 bp, synthetic construct
  misc_feature 1..20: note = chemically synthesized
  source 1..20: mol_type = other DNA
tgagatggctattatcaaaa

SEQ ID NO: 32105 - DNA, 20 bp, synthetic construct
  misc_feature 1..20: note = chemically synthesized
  source 1..20: mol_type = other DNA
tggctattatcaaaaaagac

SEQ ID NO: 32106 - DNA, 20 bp, synthetic construct
  misc_feature 1..20: note = chemically synthesized
  source 1..20: mol_type = other DNA
gctattatcaaaaaagacaa

SEQ ID NO: 32107 - DNA, 20 bp, synthetic construct
  misc_feature 1..20: note = chemically synthesized
  source 1..20: mol_type = other DNA
ttatcaaaaaagacaagaga

SEQ ID NO: 32108 - DNA, 20 bp, synthetic construct
  misc_feature 1..20: note = chemically synthesized
  source 1..20: mol_type = other DNA
tatcaaaaaagacaagagat

SEQ ID NO: 32109 - DNA, 20 bp, synthetic construct
  misc_feature 1..20: note = chemically synthesized
  source 1..20: mol_type = other DNA
atcaaaaaagacaagagata

SEQ ID NO: 32110 - DNA, 20 bp, synthetic construct
  misc_feature 1..20: note = chemically synthesized
  source 1..20: mol_type = other DNA
tcaaaaaagacaagagatag

SEQ ID NO: 32111 - DNA, 20 bp, synthetic construct
  misc_feature 1..20: note = chemically synthesized
  source 1..20: mol_type = other DNA
aaaagacaagagataggggt

SEQ ID NO: 32112 - DNA, 20 bp, synthetic construct
  misc_feature 1..20: note = chemically synthesized
  source 1..20: mol_type = other DNA
aagacaagagataggggttg

SEQ ID NO: 32113 - DNA, 20 bp, synthetic construct
  misc_feature 1..20: note = chemically synthesized
  source 1..20: mol_type = other DNA
gacaagagataggggttgga

SEQ ID NO: 32114 - DNA, 20 bp, synthetic construct
  misc_feature 1..20: note = chemically synthesized
  source 1..20: mol_type = other DNA
acaagagataggggttggag

SEQ ID NO: 32115 - DNA, 20 bp, synthetic construct
  misc_feature 1..20: note = chemically synthesized
  source 1..20: mol_type = other DNA
gataggggttggagaggctg

SEQ ID NO: 32116 - DNA, 20 bp, synthetic construct
  misc_feature 1..20: note = chemically synthesized
  source 1..20: mol_type = other DNA
taggggttggagaggctgtg

SEQ ID NO: 32117 - DNA, 20 bp, synthetic construct
  misc_feature 1..20: note = chemically synthesized
  source 1..20: mol_type = other DNA
ggttggagaggctgtggaga

SEQ ID NO: 32118 - DNA, 20 bp, synthetic construct
  misc_feature 1..20: note = chemically synthesized
  source 1..20: mol_type = other DNA
gttggagaggctgtggagaa

SEQ ID NO: 32119 - DNA, 20 bp, synthetic construct
  misc_feature 1..20: note = chemically synthesized
  source 1..20: mol_type = other DNA
tggagaggctgtggagaaag

SEQ ID NO: 32120 - DNA, 20 bp, synthetic construct
  misc_feature 1..20: note = chemically synthesized
  source 1..20: mol_type = other DNA
gaaaggagaactcttgtgca

SEQ ID NO: 32121 - DNA, 20 bp, synthetic construct
  misc_feature 1..20: note = chemically synthesized
  source 1..20: mol_type = other DNA
ggagaactcttgtgcatagc

SEQ ID NO: 32122 - DNA, 20 bp, synthetic construct
  misc_feature 1..20: note = chemically synthesized
  source 1..20: mol_type = other DNA
gaactcttgtgcatagctgg

SEQ ID NO: 32123 - DNA, 20 bp, synthetic construct
  misc_feature 1..20: note = chemically synthesized
  source 1..20: mol_type = other DNA
aactcttgtgcatagctggt

SEQ ID NO: 32124 - DNA, 20 bp, synthetic construct
  misc_feature 1..20: note = chemically synthesized
  source 1..20: mol_type = other DNA
tgcatagctggtgggaatgt

SEQ ID NO: 32125 - DNA, 20 bp, synthetic construct
  misc_feature 1..20: note = chemically synthesized
  source 1..20: mol_type = other DNA
ggtgggaatgtaagttaaca

SEQ ID NO: 32126 - DNA, 20 bp, synthetic construct
  misc_feature 1..20: note = chemically synthesized
  source 1..20: mol_type = other DNA
gtaagttaacatagccatta

SEQ ID NO: 32127 - DNA, 20 bp, synthetic construct
  misc_feature 1..20: note = chemically synthesized
  source 1..20: mol_type = other DNA
tagccattatagaaaacgta

SEQ ID NO: 32128 - DNA, 20 bp, synthetic construct
  misc_feature 1..20: note = chemically synthesized
  source 1..20: mol_type = other DNA
ccattatagaaaacgtatgg

SEQ ID NO: 32129 - DNA, 20 bp, synthetic construct
  misc_feature 1..20: note = chemically synthesized
  source 1..20: mol_type = other DNA
gtttctcaaacaactaaaaa

SEQ ID NO: 32130 - DNA, 20 bp, synthetic construct
  misc_feature 1..20: note = chemically synthesized
  source 1..20: mol_type = other DNA
ttctcaaacaactaaaaata

SEQ ID NO: 32131 - DNA, 20 bp, synthetic construct
  misc_feature 1..20: note = chemically synthesized
  source 1..20: mol_type = other DNA
aatagagttattgtatgatg

SEQ ID NO: 32132 - DNA, 20 bp, synthetic construct
  misc_feature 1..20: note = chemically synthesized
  source 1..20: mol_type = other DNA
taaataaaatccgcattttc

SEQ ID NO: 32133 - DNA, 20 bp, synthetic construct
  misc_feature 1..20: note = chemically synthesized
  source 1..20: mol_type = other DNA
aataaaatccgcattttcta

SEQ ID NO: 32134 - DNA, 20 bp, synthetic construct
  misc_feature 1..20: note = chemically synthesized
  source 1..20: mol_type = other DNA
ctgcactctcatgttaattg

SEQ ID NO: 32135 - DNA, 20 bp, synthetic construct
  misc_feature 1..20: note = chemically synthesized
  source 1..20: mol_type = other DNA
aattgcagcattattcacaa

SEQ ID NO: 32136 - DNA, 20 bp, synthetic construct
  misc_feature 1..20: note = chemically synthesized
  source 1..20: mol_type = other DNA
cagcattattcacaatagcc

SEQ ID NO: 32137 - DNA, 20 bp, synthetic construct
  misc_feature 1..20: note = chemically synthesized
  source 1..20: mol_type = other DNA
tattcacaatagccaagaca

SEQ ID NO: 32138 - DNA, 20 bp, synthetic construct
  misc_feature 1..20: note = chemically synthesized
  source 1..20: mol_type = other DNA
ccaagacatggaaacaatct

SEQ ID NO: 32139 - DNA, 20 bp, synthetic construct
  misc_feature 1..20: note = chemically synthesized
  source 1..20: mol_type = other DNA
agacatggaaacaatctaag

SEQ ID NO: 32140 - DNA, 20 bp, synthetic construct
  misc_feature 1..20: note = chemically synthesized
  source 1..20: mol_type = other DNA
atctaagtggtatctatata

SEQ ID NO: 32141 - DNA, 20 bp, synthetic construct
  misc_feature 1..20: note = chemically synthesized
  source 1..20: mol_type = other DNA
ggtatctatatatagatgaa

SEQ ID NO: 32142 - DNA, 20 bp, synthetic construct
  misc_feature 1..20: note = chemically synthesized
  source 1..20: mol_type = other DNA
tatatatagatgaacagata

SEQ ID NO: 32143 - DNA, 20 bp, synthetic construct
  misc_feature 1..20: note = chemically synthesized
  source 1..20: mol_type = other DNA
aacagataaagacattgtga

SEQ ID NO: 32144 - DNA, 20 bp, synthetic construct
  misc_feature 1..20: note = chemically synthesized
  source 1..20: mol_type = other DNA
acagataaagacattgtgac

SEQ ID NO: 32145 - DNA, 20 bp, synthetic construct
  misc_feature 1..20: note = chemically synthesized
  source 1..20: mol_type = other DNA
tatgatatcacaatattatt

SEQ ID NO: 32146 - DNA, 20 bp, synthetic construct
  misc_feature 1..20: note = chemically synthesized
  source 1..20: mol_type = other DNA
aatattattcagccttaaaa

SEQ ID NO: 32147 - DNA, 20 bp, synthetic construct
  misc_feature 1..20: note = chemically synthesized
  source 1..20: mol_type = other DNA
atattattcagccttaaaaa

SEQ ID NO: 32148 - DNA, 20 bp, synthetic construct
  misc_feature 1..20: note = chemically synthesized
  source 1..20: mol_type = other DNA
attattcagccttaaaaaag

SEQ ID NO: 32149 - DNA, 20 bp, synthetic construct
  misc_feature 1..20: note = chemically synthesized
  source 1..20: mol_type = other DNA
ttcagccttaaaaaaggaga

SEQ ID NO: 32150 - DNA, 20 bp, synthetic construct
  misc_feature 1..20: note = chemically synthesized
  source 1..20: mol_type = other DNA
tcagccttaaaaaaggagat

SEQ ID NO: 32151 - DNA, 20 bp, synthetic construct
  misc_feature 1..20: note = chemically synthesized
  source 1..20: mol_type = other DNA
cagccttaaaaaaggagatg

SEQ ID NO: 32152 - DNA, 20 bp, synthetic construct
  misc_feature 1..20: note = chemically synthesized
  source 1..20: mol_type = other DNA
agccttaaaaaaggagatgg

SEQ ID NO: 32153 - DNA, 20 bp, synthetic construct
  misc_feature 1..20: note = chemically synthesized
  source 1..20: mol_type = other DNA
gccttaaaaaaggagatggg

SEQ ID NO: 32154 - DNA, 20 bp, synthetic construct
  misc_feature 1..20: note = chemically synthesized
  source 1..20: mol_type = other DNA
atggggggaatgtataaacc

SEQ ID NO: 32155 - DNA, 20 bp, synthetic construct
  misc_feature 1..20: note = chemically synthesized
  source 1..20: mol_type = other DNA
ggggggaatgtataaaccta

SEQ ID NO: 32156 - DNA, 20 bp, synthetic construct
  misc_feature 1..20: note = chemically synthesized
  source 1..20: mol_type = other DNA
aacctagagtacattttgct

SEQ ID NO: 32157 - DNA, 20 bp, synthetic construct
  misc_feature 1..20: note = chemically synthesized
  source 1..20: mol_type = other DNA
ttttgctaagtgaaataaac

SEQ ID NO: 32158 - DNA, 20 bp, synthetic construct
  misc_feature 1..20: note = chemically synthesized
  source 1..20: mol_type = other DNA
taagtgaaataaaccagaca

SEQ ID NO: 32159 - DNA, 20 bp, synthetic construct
  misc_feature 1..20: note = chemically synthesized
  source 1..20: mol_type = other DNA
accagacacagaaacaaata

SEQ ID NO: 32160 - DNA, 20 bp, synthetic construct
  misc_feature 1..20: note = chemically synthesized
  source 1..20: mol_type = other DNA
ccagacacagaaacaaataa

SEQ ID NO: 32161 - DNA, 20 bp, synthetic construct
  misc_feature 1..20: note = chemically synthesized
  source 1..20: mol_type = other DNA
ggcatgatattacttatatg

SEQ ID NO: 32162 - DNA, 20 bp, synthetic construct
  misc_feature 1..20: note = chemically synthesized
  source 1..20: mol_type = other DNA
acttatatgtggaatctcaa

SEQ ID NO: 32163 - DNA, 20 bp, synthetic construct
  misc_feature 1..20: note = chemically synthesized
  source 1..20: mol_type = other DNA
tggaatctcaaaagaaaaat

SEQ ID NO: 32164 - DNA, 20 bp, synthetic construct
  misc_feature 1..20: note = chemically synthesized
  source 1..20: mol_type = other DNA
ggaatctcaaaagaaaaata

SEQ ID NO: 32165 - DNA, 20 bp, synthetic construct
  misc_feature 1..20: note = chemically synthesized
  source 1..20: mol_type = other DNA
gaaaaataaggtcaaatgca

SEQ ID NO: 32166 - DNA, 20 bp, synthetic construct
  misc_feature 1..20: note = chemically synthesized
  source 1..20: mol_type = other DNA
taaggtcaaatgcatagaaa

SEQ ID NO: 32167 - DNA, 20 bp, synthetic construct
  misc_feature 1..20: note = chemically synthesized
  source 1..20: mol_type = other DNA
atgcatagaaacagtgtaaa

SEQ ID NO: 32168 - DNA, 20 bp, synthetic construct
  misc_feature 1..20: note = chemically synthesized
  source 1..20: mol_type = other DNA
tgcatagaaacagtgtaaaa

SEQ ID NO: 32169 - DNA, 20 bp, synthetic construct
  misc_feature 1..20: note = chemically synthesized
  source 1..20: mol_type = other DNA
gcatagaaacagtgtaaaaa

SEQ ID NO: 32170 - DNA, 20 bp, synthetic construct
  misc_feature 1..20: note = chemically synthesized
  source 1..20: mol_type = other DNA
catagaaacagtgtaaaaag

SEQ ID NO: 32171 - DNA, 20 bp, synthetic construct
  misc_feature 1..20: note = chemically synthesized
  source 1..20: mol_type = other DNA
agaaacagtgtaaaaagggg

SEQ ID NO: 32172 - DNA, 20 bp, synthetic construct
  misc_feature 1..20: note = chemically synthesized
  source 1..20: mol_type = other DNA
acagtgtaaaaaggggaaga

SEQ ID NO: 32173 - DNA, 20 bp, synthetic construct
  misc_feature 1..20: note = chemically synthesized
  source 1..20: mol_type = other DNA
tgtaaaaaggggaagaaaga

SEQ ID NO: 32174 - DNA, 20 bp, synthetic construct
  misc_feature 1..20: note = chemically synthesized
  source 1..20: mol_type = other DNA
taaaaaggggaagaaagaaa

SEQ ID NO: 32175 - DNA, 20 bp, synthetic construct
  misc_feature 1..20: note = chemically synthesized
  source 1..20: mol_type = other DNA
gggaagaaagaaagagaaaa

SEQ ID NO: 32176 - DNA, 20 bp, synthetic construct
  misc_feature 1..20: note = chemically synthesized
  source 1..20: mol_type = other DNA
ggaagaaagaaagagaaaat

SEQ ID NO: 32177 - DNA, 20 bp, synthetic construct
  misc_feature 1..20: note = chemically synthesized
  source 1..20: mol_type = other DNA
gaagaaagaaagagaaaata

SEQ ID NO: 32178 - DNA, 20 bp, synthetic construct
  misc_feature 1..20: note = chemically synthesized
  source 1..20: mol_type = other DNA
agaaagaaagagaaaatagg

SEQ ID NO: 32179 - DNA, 20 bp, synthetic construct
  misc_feature 1..20: note = chemically synthesized
  source 1..20: mol_type = other DNA
aagaaagagaaaatagggag

SEQ ID NO: 32180 - DNA, 20 bp, synthetic construct
  misc_feature 1..20: note = chemically synthesized
  source 1..20: mol_type = other DNA
aaagagaaaatagggagaag

SEQ ID NO: 32181 - DNA, 20 bp, synthetic construct
  misc_feature 1..20: note = chemically synthesized
  source 1..20: mol_type = other DNA
aagagaaaatagggagaagt

SEQ ID NO: 32182 - DNA, 20 bp, synthetic construct
  misc_feature 1..20: note = chemically synthesized
  source 1..20: mol_type = other DNA
aaatagggagaagtaggtca

SEQ ID NO: 32183 - DNA, 20 bp, synthetic construct
  misc_feature 1..20: note = chemically synthesized
  source 1..20: mol_type = other DNA
aatagggagaagtaggtcaa

SEQ ID NO: 32184 - DNA, 20 bp, synthetic construct
  misc_feature 1..20: note = chemically synthesized
  source 1..20: mol_type = other DNA
ggtcaaaggttataaacttg

SEQ ID NO: 32185 - DNA, 20 bp, synthetic construct
  misc_feature 1..20: note = chemically synthesized
  source 1..20: mol_type = other DNA
gttataaacttgcagctgta

SEQ ID NO: 32186 - DNA, 20 bp, synthetic construct
  misc_feature 1..20: note = chemically synthesized
  source 1..20: mol_type = other DNA
ttataaacttgcagctgtat

SEQ ID NO: 32187 - DNA, 20 bp, synthetic construct
  misc_feature 1..20: note = chemically synthesized
  source 1..20: mol_type = other DNA
tgcagctgtataggataaat

SEQ ID NO: 32188 - DNA, 20 bp, synthetic construct
  misc_feature 1..20: note = chemically synthesized
  source 1..20: mol_type = other DNA
ctgtataggataaataagtt

SEQ ID NO: 32189 - DNA, 20 bp, synthetic construct
  misc_feature 1..20: note = chemically synthesized
  source 1..20: mol_type = other DNA
gtataggataaataagttta

SEQ ID NO: 32190 - DNA, 20 bp, synthetic construct
  misc_feature 1..20: note = chemically synthesized
  source 1..20: mol_type = other DNA
gataaataagtttagagatc

SEQ ID NO: 32191 - DNA, 20 bp, synthetic construct
  misc_feature 1..20: note = chemically synthesized
  source 1..20: mol_type = other DNA
aagtttagagatctagtgta

SEQ ID NO: 32192 - DNA, 20 bp, synthetic construct
  misc_feature 1..20: note = chemically synthesized
  source 1..20: mol_type = other DNA
gagatctagtgtatggcatg

SEQ ID NO: 32193 - DNA, 20 bp, synthetic construct
  misc_feature 1..20: note = chemically synthesized
  source 1..20: mol_type = other DNA
aaactaaacatttgttatga

SEQ ID NO: 32194 - DNA, 20 bp, synthetic construct
  misc_feature 1..20: note = chemically synthesized
  source 1..20: mol_type = other DNA
ctaaacatttgttatgacag

SEQ ID NO: 32195 - DNA, 20 bp, synthetic construct
  misc_feature 1..20: note = chemically synthesized
  source 1..20: mol_type = other DNA
tttgttatgacagtagatgt

SEQ ID NO: 32196 - DNA, 20 bp, synthetic construct
  misc_feature 1..20: note = chemically synthesized
  source 1..20: mol_type = other DNA
atgttagatgcccttacaca

SEQ ID NO: 32197 - DNA, 20 bp, synthetic construct
  misc_feature 1..20: note = chemically synthesized
  source 1..20: mol_type = other DNA
gatgcccttacacaaagaaa

SEQ ID NO: 32198 - DNA, 20 bp, synthetic construct
  misc_feature 1..20: note = chemically synthesized
  source 1..20: mol_type = other DNA
cttacacaaagaaaaagcaa

SEQ ID NO: 32199 - DNA, 20 bp, synthetic construct
  misc_feature 1..20: note = chemically synthesized
  source 1..20: mol_type = other DNA
ttacacaaagaaaaagcaaa

SEQ ID NO: 32200 - DNA, 20 bp, synthetic construct
  misc_feature 1..20: note = chemically synthesized
  source 1..20: mol_type = other DNA
gaaaaagcaaaaggtatcta

SEQ ID NO: 32201 - DNA, 20 bp, synthetic construct
  misc_feature 1..20: note = chemically synthesized
  source 1..20: mol_type = other DNA
aaagcaaaaggtatctatgg

SEQ ID NO: 32202 - DNA, 20 bp, synthetic construct
  misc_feature 1..20: note = chemically synthesized
  source 1..20: mol_type = other DNA
aagcaaaaggtatctatgga

SEQ ID NO: 32203 - DNA, 20 bp, synthetic construct
  misc_feature 1..20: note = chemically synthesized
  source 1..20: mol_type = other DNA
tatggaaggtgttgtattga

SEQ ID NO: 32204 - DNA, 20 bp, synthetic construct
  misc_feature 1..20: note = chemically synthesized
  source 1..20: mol_type = other DNA
gaaggtgttgtattgatgga

SEQ ID NO: 32205 - DNA, 20 bp, synthetic construct
  misc_feature 1..20: note = chemically synthesized
  source 1..20: mol_type = other DNA
aaggtgttgtattgatggat

SEQ ID NO: 32206 - DNA, 20 bp, synthetic construct
  misc_feature 1..20: note = chemically synthesized
  source 1..20: mol_type = other DNA
taggttaatttgcttgattg

SEQ ID NO: 32207 - DNA, 20 bp, synthetic construct
  misc_feature 1..20: note = chemically synthesized
  source 1..20: mol_type = other DNA
atatcctatattttttgaac

SEQ ID NO: 32208 - DNA, 20 bp, synthetic construct
  misc_feature 1..20: note = chemically synthesized
  source 1..20: mol_type = other DNA
ttgaacaagcttacttgttt

SEQ ID NO: 32209 - DNA, 20 bp, synthetic construct
  misc_feature 1..20: note = chemically synthesized
  source 1..20: mol_type = other DNA
tttcagataaaatattttaa

SEQ ID NO: 32210 - DNA, 20 bp, synthetic construct
  misc_feature 1..20: note = chemically synthesized
  source 1..20: mol_type = other DNA
attttaaaagcttttatctg

SEQ ID NO: 32211 - DNA, 20 bp, synthetic construct
  misc_feature 1..20: note = chemically synthesized
  source 1..20: mol_type = other DNA
taaaagcttttatctgaagc

SEQ ID NO: 32212 - DNA, 20 bp, synthetic construct
  misc_feature 1..20: note = chemically synthesized
  source 1..20: mol_type = other DNA
atttctgtttcctaattgtt

SEQ ID NO: 32213 - DNA, 20 bp, synthetic construct
  misc_feature 1..20: note = chemically synthesized
  source 1..20: mol_type = other DNA
tttctgtttcctaattgttt

SEQ ID NO: 32214 - DNA, 20 bp, synthetic construct
  misc_feature 1..20: note = chemically synthesized
  source 1..20: mol_type = other DNA
ttctgtttcctaattgttta

SEQ ID NO: 32215 - DNA, 20 bp, synthetic construct
  misc_feature 1..20: note = chemically synthesized
  source 1..20: mol_type = other DNA
ttaaaacttatgtaaccctt

SEQ ID NO: 32216 - DNA, 20 bp, synthetic construct
  misc_feature 1..20: note = chemically synthesized
  source 1..20: mol_type = other DNA
tgtaaccctttggatataat

SEQ ID NO: 32217 - DNA, 20 bp, synthetic construct
  misc_feature 1..20: note = chemically synthesized
  source 1..20: mol_type = other DNA
tttttctctatttttaatat

SEQ ID NO: 32218 - DNA, 20 bp, synthetic construct
  misc_feature 1..20: note = chemically synthesized
  source 1..20: mol_type = other DNA
tttttaatatcagtactctt

SEQ ID NO: 32219 - DNA, 20 bp, synthetic construct
  misc_feature 1..20: note = chemically synthesized
  source 1..20: mol_type = other DNA
atatcagtactctttagata

SEQ ID NO: 32220 - DNA, 20 bp, synthetic construct
  misc_feature 1..20: note = chemically synthesized
  source 1..20: mol_type = other DNA
atacagctatcactgtctct

SEQ ID NO: 32221 - DNA, 20 bp, synthetic construct
  misc_feature 1..20: note = chemically synthesized
  source 1..20: mol_type = other DNA
tacagctatcactgtctctc

SEQ ID NO: 32222 - DNA, 20 bp, synthetic construct
  misc_feature 1..20: note = chemically synthesized
  source 1..20: mol_type = other DNA
acagctatcactgtctctca

SEQ ID NO: 32223 - DNA, 20 bp, synthetic construct
  misc_feature 1..20: note = chemically synthesized
  source 1..20: mol_type = other DNA
tctcagggtacctctgcctc

SEQ ID NO: 32224 - DNA, 20 bp, synthetic construct
  misc_feature 1..20: note = chemically synthesized
  source 1..20: mol_type = other DNA
atgttgaaattttatatctc

SEQ ID NO: 32225 - DNA, 20 bp, synthetic construct
  misc_feature 1..20: note = chemically synthesized
  source 1..20: mol_type = other DNA
tatatctccggcctacaact

SEQ ID NO: 32226 - DNA, 20 bp, synthetic construct
  misc_feature 1..20: note = chemically synthesized
  source 1..20: mol_type = other DNA
atatctccggcctacaactc

SEQ ID NO: 32227 - DNA, 20 bp, synthetic construct
  misc_feature 1..20: note = chemically synthesized
  source 1..20: mol_type = other DNA
tatctccggcctacaactca

SEQ ID NO: 32228 - DNA, 20 bp, synthetic construct
  misc_feature 1..20: note = chemically synthesized
  source 1..20: mol_type = other DNA
gcctacaactcagggtttta

SEQ ID NO: 32229 - DNA, 20 bp, synthetic construct
  misc_feature 1..20: note = chemically synthesized
  source 1..20: mol_type = other DNA
tgtctctattaaatgtttat

SEQ ID NO: 32230 - DNA, 20 bp, synthetic construct
  misc_feature 1..20: note = chemically synthesized
  source 1..20: mol_type = other DNA
tattaaatgtttatgagcca

SEQ ID NO: 32231 - DNA, 20 bp, synthetic construct
  misc_feature 1..20: note = chemically synthesized
  source 1..20: mol_type = other DNA
ttaaatgtttatgagccaca

SEQ ID NO: 32232 - DNA, 20 bp, synthetic construct
  misc_feature 1..20: note = chemically synthesized
  source 1..20: mol_type = other DNA
gtttatgagccacagagaat

SEQ ID NO: 32233 - DNA, 20 bp, synthetic construct
  misc_feature 1..20: note = chemically synthesized
  source 1..20: mol_type = other DNA
ttttttgaacttctgtgttt

SEQ ID NO: 32234 - DNA, 20 bp, synthetic construct
  misc_feature 1..20: note = chemically synthesized
  source 1..20: mol_type = other DNA
aaaaaattaacctaatgtga

SEQ ID NO: 32235 - DNA, 20 bp, synthetic construct
  misc_feature 1..20: note = chemically synthesized
  source 1..20: mol_type = other DNA
taacctaatgtgaaagaccc

SEQ ID NO: 32236 - DNA, 20 bp, synthetic construct
  misc_feature 1..20: note = chemically synthesized
  source 1..20: mol_type = other DNA
aatgtgaaagaccctagatc

SEQ ID NO: 32237 - DNA, 20 bp, synthetic construct
  misc_feature 1..20: note = chemically synthesized
  source 1..20: mol_type = other DNA
atgtgaaagaccctagatcc

SEQ ID NO: 32238 - DNA, 20 bp, synthetic construct
  misc_feature 1..20: note = chemically synthesized
  source 1..20: mol_type = other DNA
tgtgaaagaccctagatccg

SEQ ID NO: 32239 - DNA, 20 bp, synthetic construct
  misc_feature 1..20: note = chemically synthesized
  source 1..20: mol_type = other DNA
aaagaccctagatccgggga

SEQ ID NO: 32240 - DNA, 20 bp, synthetic construct
  misc_feature 1..20: note = chemically synthesized
  source 1..20: mol_type = other DNA
aagaccctagatccggggaa

SEQ ID NO: 32241 - DNA, 20 bp, synthetic construct
  misc_feature 1..20: note = chemically synthesized
  source 1..20: mol_type = other DNA
atccggggaaaggtgctgtg

SEQ ID NO: 32242 - DNA, 20 bp, synthetic construct
  misc_feature 1..20: note = chemically synthesized
  source 1..20: mol_type = other DNA
gggaaaggtgctgtgtggct

SEQ ID NO: 32243 - DNA, 20 bp, synthetic construct
  misc_feature 1..20: note = chemically synthesized
  source 1..20: mol_type = other DNA
gaaaggtgctgtgtggctta

SEQ ID NO: 32244 - DNA, 20 bp, synthetic construct
  misc_feature 1..20: note = chemically synthesized
  source 1..20: mol_type = other DNA
gtggcttagagtataaacat

SEQ ID NO: 32245 - DNA, 20 bp, synthetic construct
  misc_feature 1..20: note = chemically synthesized
  source 1..20: mol_type = other DNA
ataaacatcagaatgtgcta

SEQ ID NO: 32246 - DNA, 20 bp, synthetic construct
  misc_feature 1..20: note = chemically synthesized
  source 1..20: mol_type = other DNA
agaatgtgctatggactttc

SEQ ID NO: 32247 - DNA, 20 bp, synthetic construct
  misc_feature 1..20: note = chemically synthesized
  source 1..20: mol_type = other DNA
atggactttctagaatattt

SEQ ID NO: 32248 - DNA, 20 bp, synthetic construct
  misc_feature 1..20: note = chemically synthesized
  source 1..20: mol_type = other DNA
tcagtgcccttgtatatcct

SEQ ID NO: 32249 - DNA, 20 bp, synthetic construct
  misc_feature 1..20: note = chemically synthesized
  source 1..20: mol_type = other DNA
ttgtatatcctcagaatgtg

SEQ ID NO: 32250 - DNA, 20 bp, synthetic construct
  misc_feature 1..20: note = chemically synthesized
  source 1..20: mol_type = other DNA
gtatatcctcagaatgtgtg

SEQ ID NO: 32251 - DNA, 20 bp, synthetic construct
  misc_feature 1..20: note = chemically synthesized
  source 1..20: mol_type = other DNA
atatcctcagaatgtgtgga

SEQ ID NO: 32252 - DNA, 20 bp, synthetic construct
  misc_feature 1..20: note = chemically synthesized
  source 1..20: mol_type = other DNA
tggagagtaattccaaaaca

SEQ ID NO: 32253 - DNA, 20 bp, synthetic construct
  misc_feature 1..20: note = chemically synthesized
  source 1..20: mol_type = other DNA
agcccttacttcaatatcca

SEQ ID NO: 32254 - DNA, 20 bp, synthetic construct
  misc_feature 1..20: note = chemically synthesized
  source 1..20: mol_type = other DNA
ccttacttcaatatccatgg

SEQ ID NO: 32255 - DNA, 20 bp, synthetic construct
  misc_feature 1..20: note = chemically synthesized
  source 1..20: mol_type = other DNA
tcaatatccatggtggtcca

SEQ ID NO: 32256 - DNA, 20 bp, synthetic construct
  misc_feature 1..20: note = chemically synthesized
  source 1..20: mol_type = other DNA
tatccatggtggtccatagc

SEQ ID NO: 32257 - DNA, 20 bp, synthetic construct
  misc_feature 1..20: note = chemically synthesized
  source 1..20: mol_type = other DNA
atccatggtggtccatagct

SEQ ID NO: 32258 - DNA, 20 bp, synthetic construct
  misc_feature 1..20: note = chemically synthesized
  source 1..20: mol_type = other DNA
tccatggtggtccatagcta

SEQ ID NO: 32259 - DNA, 20 bp, synthetic construct
  misc_feature 1..20: note = chemically synthesized
  source 1..20: mol_type = other DNA
tggtggtccatagctagggc

SEQ ID NO: 32260 - DNA, 20 bp, synthetic construct
  misc_feature 1..20: note = chemically synthesized
  source 1..20: mol_type = other DNA
tggtccatagctagggctag

SEQ ID NO: 32261 - DNA, 20 bp, synthetic construct
  misc_feature 1..20: note = chemically synthesized
  source 1..20: mol_type = other DNA
tccatagctagggctagcag

SEQ ID NO: 32262 - DNA, 20 bp, synthetic construct
  misc_feature 1..20: note = chemically synthesized
  source 1..20: mol_type = other DNA
ccatagctagggctagcaga

SEQ ID NO: 32263 - DNA, 20 bp, synthetic construct
  misc_feature 1..20: note = chemically synthesized
  source 1..20: mol_type = other DNA
tagctagggctagcagaagg

SEQ ID NO: 32264 - DNA, 20 bp, synthetic construct
  misc_feature 1..20: note = chemically synthesized
  source 1..20: mol_type = other DNA
agctagggctagcagaagga

SEQ ID NO: 32265 - DNA, 20 bp, synthetic construct
  misc_feature 1..20: note = chemically synthesized
  source 1..20: mol_type = other DNA
gctagggctagcagaaggaa

SEQ ID NO: 32266 - DNA, 20 bp, synthetic construct
  misc_feature 1..20: note = chemically synthesized
  source 1..20: mol_type = other DNA
tcactcaaattatctgctct

SEQ ID NO: 32267 - DNA, 20 bp, synthetic construct
  misc_feature 1..20: note = chemically synthesized
  source 1..20: mol_type = other DNA
ttatctgctcttggaaaaac

SEQ ID NO: 32268 - DNA, 20 bp, synthetic construct
  misc_feature 1..20: note = chemically synthesized
  source 1..20: mol_type = other DNA
cttggaaaaaccagtccctt

SEQ ID NO: 32269 - DNA, 20 bp, synthetic construct
  misc_feature 1..20: note = chemically synthesized
  source 1..20: mol_type = other DNA
ttggaaaaaccagtcccttt

SEQ ID NO: 32270 - DNA, 20 bp, synthetic construct
  misc_feature 1..20: note = chemically synthesized
  source 1..20: mol_type = other DNA
gaaaaaccagtccctttggg

SEQ ID NO: 32271 - DNA, 20 bp, synthetic construct
  misc_feature 1..20: note = chemically synthesized
  source 1..20: mol_type = other DNA
gggtagccccaatcatgtgt

SEQ ID NO: 32272 - DNA, 20 bp, synthetic construct
  misc_feature 1..20: note = chemically synthesized
  source 1..20: mol_type = other DNA
atgtgtaagtctttttcctg

SEQ ID NO: 32273 - DNA, 20 bp, synthetic construct
  misc_feature 1..20: note = chemically synthesized
  source 1..20: mol_type = other DNA
tttcctgaagtatgatcata

SEQ ID NO: 32274 - DNA, 20 bp, synthetic construct
  misc_feature 1..20: note = chemically synthesized
  source 1..20: mol_type = other DNA
cttctgtctgctcattgaac

SEQ ID NO: 32275 - DNA, 20 bp, synthetic construct
  misc_feature 1..20: note = chemically synthesized
  source 1..20: mol_type = other DNA
tctgtctgctcattgaacca

SEQ ID NO: 32276 - DNA, 20 bp, synthetic construct
  misc_feature 1..20: note = chemically synthesized
  source 1..20: mol_type = other DNA
tgctcattgaaccagagctc

SEQ ID NO: 32277 - DNA, 20 bp, synthetic construct
  misc_feature 1..20: note = chemically synthesized
  source 1..20: mol_type = other DNA
gctcattgaaccagagctcc

SEQ ID NO: 32278 - DNA, 20 bp, synthetic construct
  misc_feature 1..20: note = chemically synthesized
  source 1..20: mol_type = other DNA
ctccaggaccaataccacta

SEQ ID NO: 32279 - DNA, 20 bp, synthetic construct
  misc_feature 1..20: note = chemically synthesized
  source 1..20: mol_type = other DNA
tcttttgcctctacaactct

SEQ ID NO: 32280 - DNA, 20 bp, synthetic construct
  misc_feature 1..20: note = chemically synthesized
  source 1..20: mol_type = other DNA
cttttgcctctacaactctc

SEQ ID NO: 32281 - DNA, 20 bp, synthetic construct
  misc_feature 1..20: note = chemically synthesized
  source 1..20: mol_type = other DNA
cctctacaactctcaggtca

SEQ ID NO: 32282 - DNA, 20 bp, synthetic construct
  misc_feature 1..20: note = chemically synthesized
  source 1..20: mol_type = other DNA
gctgaaatattacctcctct

SEQ ID NO: 32283 - DNA, 20 bp, synthetic construct
  misc_feature 1..20: note = chemically synthesized
  source 1..20: mol_type = other DNA
agaacccgcatttgtcacac

SEQ ID NO: 32284 - DNA, 20 bp, synthetic construct
  misc_feature 1..20: note = chemically synthesized
  source 1..20: mol_type = other DNA
caaattttttctttctttca

SEQ ID NO: 32285 - DNA, 20 bp, synthetic construct
  misc_feature 1..20: note = chemically synthesized
  source 1..20: mol_type = other DNA
attttttctttctttcatag

SEQ ID NO: 32286 - DNA, 20 bp, synthetic construct
  misc_feature 1..20: note = chemically synthesized
  source 1..20: mol_type = other DNA
ttctttcatagcagctatat

SEQ ID NO: 32287 - DNA, 20 bp, synthetic construct
  misc_feature 1..20: note = chemically synthesized
  source 1..20: mol_type = other DNA
tctttcatagcagctatatg

SEQ ID NO: 32288 - DNA, 20 bp, synthetic construct
  misc_feature 1..20: note = chemically synthesized
  source 1..20: mol_type = other DNA
tttcctttccgttaaaatac

SEQ ID NO: 32289 - DNA, 20 bp, synthetic construct
  misc_feature 1..20: note = chemically synthesized
  source 1..20: mol_type = other DNA
ccgttaaaatacaagcttca

SEQ ID NO: 32290 - DNA, 20 bp, synthetic construct
  misc_feature 1..20: note = chemically synthesized
  source 1..20: mol_type = other DNA
cgttaaaatacaagcttcat

SEQ ID NO: 32291 - DNA, 20 bp, synthetic construct
  misc_feature 1..20: note = chemically synthesized
  source 1..20: mol_type = other DNA
aaatacaagcttcataggaa

SEQ ID NO: 32292 - DNA, 20 bp, synthetic construct
  misc_feature 1..20: note = chemically synthesized
  source 1..20: mol_type = other DNA
atacaagcttcataggaaca

SEQ ID NO: 32293 - DNA, 20 bp, synthetic construct
  misc_feature 1..20: note = chemically synthesized
  source 1..20: mol_type = other DNA
caccaatgtatttttgtacc

SEQ ID NO: 32294 - DNA, 20 bp, synthetic construct
  misc_feature 1..20: note = chemically synthesized
  source 1..20: mol_type = other DNA
caatgtatttttgtacccag

SEQ ID NO: 32295 - DNA, 20 bp, synthetic construct
  misc_feature 1..20: note = chemically synthesized
  source 1..20: mol_type = other DNA
gtacccagtagttgctaaaa

SEQ ID NO: 32296 - DNA, 20 bp, synthetic construct
  misc_feature 1..20: note = chemically synthesized
  source 1..20: mol_type = other DNA
acccagtagttgctaaaata

SEQ ID NO: 32297 - DNA, 20 bp, synthetic construct
  misc_feature 1..20: note = chemically synthesized
  source 1..20: mol_type = other DNA
cagtagttgctaaaatagag

SEQ ID NO: 32298 - DNA, 20 bp, synthetic construct
  misc_feature 1..20: note = chemically synthesized
  source 1..20: mol_type = other DNA
aaaatagagaagcctctcat

SEQ ID NO: 32299 - DNA, 20 bp, synthetic construct
  misc_feature 1..20: note = chemically synthesized
  source 1..20: mol_type = other DNA
gcttgttaaataaatgtatt

SEQ ID NO: 32300 - DNA, 20 bp, synthetic construct
  misc_feature 1..20: note = chemically synthesized
  source 1..20: mol_type = other DNA
ctattattcatttctaaaca

SEQ ID NO: 32301 - DNA, 20 bp, synthetic construct
  misc_feature 1..20: note = chemically synthesized
  source 1..20: mol_type = other DNA
tattcatttctaaacacaga

SEQ ID NO: 32302 - DNA, 20 bp, synthetic construct
  misc_feature 1..20: note = chemically synthesized
  source 1..20: mol_type = other DNA
ttcatttctaaacacagaaa

SEQ ID NO: 32303 - DNA, 20 bp, synthetic construct
  misc_feature 1..20: note = chemically synthesized
  source 1..20: mol_type = other DNA
tttctaaacacagaaagagt

SEQ ID NO: 32304 - DNA, 20 bp, synthetic construct
  misc_feature 1..20: note = chemically synthesized
  source 1..20: mol_type = other DNA
taaacacagaaagagtgaga

SEQ ID NO: 32305 - DNA, 20 bp, synthetic construct
  misc_feature 1..20: note = chemically synthesized
  source 1..20: mol_type = other DNA
aaacacagaaagagtgagaa

SEQ ID NO: 32306 - DNA, 20 bp, synthetic construct
  misc_feature 1..20: note = chemically synthesized
  source 1..20: mol_type = other DNA
aacacagaaagagtgagaaa

SEQ ID NO: 32307 - DNA, 20 bp, synthetic construct
  misc_feature 1..20: note = chemically synthesized
  source 1..20: mol_type = other DNA
cacagaaagagtgagaaagg

SEQ ID NO: 32308 - DNA, 20 bp, synthetic construct
  misc_feature 1..20: note = chemically synthesized
  source 1..20: mol_type = other DNA
gaaagagtgagaaagggaga

SEQ ID NO: 32309 - DNA, 20 bp, synthetic construct
  misc_feature 1..20: note = chemically synthesized
  source 1..20: mol_type = other DNA
gagtgagaaagggagaaaga

SEQ ID NO: 32310 - DNA, 20 bp, synthetic construct
  misc_feature 1..20: note = chemically synthesized
  source 1..20: mol_type = other DNA
gagaaagggagaaagacaga

SEQ ID NO: 32311 - DNA, 20 bp, synthetic construct
  misc_feature 1..20: note = chemically synthesized
  source 1..20: mol_type = other DNA
aagggagaaagacagaaagt

SEQ ID NO: 32312 - DNA, 20 bp, synthetic construct
  misc_feature 1..20: note = chemically synthesized
  source 1..20: mol_type = other DNA
aagacagaaagtaagaatga

SEQ ID NO: 32313 - DNA, 20 bp, synthetic construct
  misc_feature 1..20: note = chemically synthesized
  source 1..20: mol_type = other DNA
cagaaagtaagaatgaaaga

SEQ ID NO: 32314 - DNA, 20 bp, synthetic construct
  misc_feature 1..20: note = chemically synthesized
  source 1..20: mol_type = other DNA
gaaagtaagaatgaaagaaa

SEQ ID NO: 32315 - DNA, 20 bp, synthetic construct
  misc_feature 1..20: note = chemically synthesized
  source 1..20: mol_type = other DNA
aagtaagaatgaaagaaaga

SEQ ID NO: 32316 - DNA, 20 bp, synthetic construct
  misc_feature 1..20: note = chemically synthesized
  source 1..20: mol_type = other DNA
aagaatgaaagaaagagagt

SEQ ID NO: 32317 - DNA, 20 bp, synthetic construct
  misc_feature 1..20: note = chemically synthesized
  source 1..20: mol_type = other DNA
gaaagaaagagagtgagata

SEQ ID NO: 32318 - DNA, 20 bp, synthetic construct
  misc_feature 1..20: note = chemically synthesized
  source 1..20: mol_type = other DNA
aaagagagtgagataaagaa

SEQ ID NO: 32319 - DNA, 20 bp, synthetic construct
  misc_feature 1..20: note = chemically synthesized
  source 1..20: mol_type = other DNA
gataaagaatagatattttc

SEQ ID NO: 32320 - DNA, 20 bp, synthetic construct
  misc_feature 1..20: note = chemically synthesized
  source 1..20: mol_type = other DNA
ttaaattattgccctcaaat

SEQ ID NO: 32321 - DNA, 20 bp, synthetic construct
  misc_feature 1..20: note = chemically synthesized
  source 1..20: mol_type = other DNA
attattgccctcaaattgga

SEQ ID NO: 32322 - DNA, 20 bp, synthetic construct
  misc_feature 1..20: note = chemically synthesized
  source 1..20: mol_type = other DNA
tattgccctcaaattggaca

SEQ ID NO: 32323 - DNA, 20 bp, synthetic construct
  misc_feature 1..20: note = chemically synthesized
  source 1..20: mol_type = other DNA
taccaacaaatgatcctctg

SEQ ID NO: 32324 - DNA, 20 bp, synthetic construct
  misc_feature 1..20: note = chemically synthesized
  source 1..20: mol_type = other DNA
attgctctgacctgacaacc

SEQ ID NO: 32325 - DNA, 20 bp, synthetic construct
  misc_feature 1..20: note = chemically synthesized
  source 1..20: mol_type = other DNA
acctgacaacccagctattt

SEQ ID NO: 32326 - DNA, 20 bp, synthetic construct
  misc_feature 1..20: note = chemically synthesized
  source 1..20: mol_type = other DNA
acaacccagctattttagtt

SEQ ID NO: 32327 - DNA, 20 bp, synthetic construct
  misc_feature 1..20: note = chemically synthesized
  source 1..20: mol_type = other DNA
ctattttagtttagtctttg

SEQ ID NO: 32328 - DNA, 20 bp, synthetic construct
  misc_feature 1..20: note = chemically synthesized
  source 1..20: mol_type = other DNA
atgcctatctcactttgctg

SEQ ID NO: 32329 - DNA, 20 bp, synthetic construct
  misc_feature 1..20: note = chemically synthesized
  source 1..20: mol_type = other DNA
tgctgtagcatttccaatcc

SEQ ID NO: 32330 - DNA, 20 bp, synthetic construct
  misc_feature 1..20: note = chemically synthesized
  source 1..20: mol_type = other DNA
gtagcatttccaatcctgga

SEQ ID NO: 32331 - DNA, 20 bp, synthetic construct
  misc_feature 1..20: note = chemically synthesized
  source 1..20: mol_type = other DNA
catttccaatcctggacagt

SEQ ID NO: 32332 - DNA, 20 bp, synthetic construct
  misc_feature 1..20: note = chemically synthesized
  source 1..20: mol_type = other DNA
atcctggacagtcagcataa

SEQ ID NO: 32333 - DNA, 20 bp, synthetic construct
  misc_feature 1..20: note = chemically synthesized
  source 1..20: mol_type = other DNA
gtcacttatttaatatttca

SEQ ID NO: 32334 - DNA, 20 bp, synthetic construct
  misc_feature 1..20: note = chemically synthesized
  source 1..20: mol_type = other DNA
aacattcaaaccttcaactt

SEQ ID NO: 32335 - DNA, 20 bp, synthetic construct
  misc_feature 1..20: note = chemically synthesized
  source 1..20: mol_type = other DNA
acattcaaaccttcaacttt

SEQ ID NO: 32336 - DNA, 20 bp, synthetic construct
  misc_feature 1..20: note = chemically synthesized
  source 1..20: mol_type = other DNA
aactttaggatttactataa

SEQ ID NO: 32337 - DNA, 20 bp, synthetic construct
  misc_feature 1..20: note = chemically synthesized
  source 1..20: mol_type = other DNA
ataaatacattgatgattat

SEQ ID NO: 32338 - DNA, 20 bp, synthetic construct
  misc_feature 1..20: note = chemically synthesized
  source 1..20: mol_type = other DNA
attatttttaaattacaact

SEQ ID NO: 32339 - DNA, 20 bp, synthetic construct
  misc_feature 1..20: note = chemically synthesized
  source 1..20: mol_type = other DNA
atttttaaattacaacttgg

SEQ ID NO: 32340 - DNA, 20 bp, synthetic construct
  misc_feature 1..20: note = chemically synthesized
  source 1..20: mol_type = other DNA
aattacaacttggtagcctc

SEQ ID NO: 32341 - DNA, 20 bp, synthetic construct
  misc_feature 1..20: note = chemically synthesized
  source 1..20: mol_type = other DNA
attttctatatgcatttcta

SEQ ID NO: 32342 - DNA, 20 bp, synthetic construct
  misc_feature 1..20: note = chemically synthesized
  source 1..20: mol_type = other DNA
ttctatatgcatttctatag

SEQ ID NO: 32343 - DNA, 20 bp, synthetic construct
  misc_feature 1..20: note = chemically synthesized
  source 1..20: mol_type = other DNA
tatatgcatttctatagaag

SEQ ID NO: 32344 - DNA, 20 bp, synthetic construct
  misc_feature 1..20: note = chemically synthesized
  source 1..20: mol_type = other DNA
gcacatgctgtacaaaccat

SEQ ID NO: 32345 - DNA, 20 bp, synthetic construct
  misc_feature 1..20: note = chemically synthesized
  source 1..20: mol_type = other DNA
atgctgtacaaaccataaga

SEQ ID NO: 32346 - DNA, 20 bp, synthetic construct
  misc_feature 1..20: note = chemically synthesized
  source 1..20: mol_type = other DNA
ctgtacaaaccataagatgg

SEQ ID NO: 32347 - DNA, 20 bp, synthetic construct
  misc_feature 1..20: note = chemically synthesized
  source 1..20: mol_type = other DNA
tgtacaaaccataagatggc

SEQ ID NO: 32348 - DNA, 20 bp, synthetic construct
  misc_feature 1..20: note = chemically synthesized
  source 1..20: mol_type = other DNA
tacaaaccataagatggcag

SEQ ID NO: 32349 - DNA, 20 bp, synthetic construct
  misc_feature 1..20: note = chemically synthesized
  source 1..20: mol_type = other DNA
caaaccataagatggcagga

SEQ ID NO: 32350 - DNA, 20 bp, synthetic construct
  misc_feature 1..20: note = chemically synthesized
  source 1..20: mol_type = other DNA
aaaccataagatggcaggag

SEQ ID NO: 32351 - DNA, 20 bp, synthetic construct
  misc_feature 1..20: note = chemically synthesized
  source 1..20: mol_type = other DNA
aagatggcaggagaggtttg

SEQ ID NO: 32352 - DNA, 20 bp, synthetic construct
  misc_feature 1..20: note = chemically synthesized
  source 1..20: mol_type = other DNA
ttgtggaacactgactctcc

SEQ ID NO: 32353 - DNA, 20 bp, synthetic construct
  misc_feature 1..20: note = chemically synthesized
  source 1..20: mol_type = other DNA
tgtggaacactgactctcct

SEQ ID NO: 32354 - DNA, 20 bp, synthetic construct
  misc_feature 1..20: note = chemically synthesized
  source 1..20: mol_type = other DNA
gtggaacactgactctcctg

SEQ ID NO: 32355 - DNA, 20 bp, synthetic construct
  misc_feature 1..20: note = chemically synthesized
  source 1..20: mol_type = other DNA
ctgactctcctggggccatg

SEQ ID NO: 32356 - DNA, 20 bp, synthetic construct
  misc_feature 1..20: note = chemically synthesized
  source 1..20: mol_type = other DNA
gactctcctggggccatgca

SEQ ID NO: 32357 - DNA, 20 bp, synthetic construct
  misc_feature 1..20: note = chemically synthesized
  source 1..20: mol_type = other DNA
actctcctggggccatgcag

SEQ ID NO: 32358 - DNA, 20 bp, synthetic construct
  misc_feature 1..20: note = chemically synthesized
  source 1..20: mol_type = other DNA
ctctcctggggccatgcaga

SEQ ID NO: 32359 - DNA, 20 bp, synthetic construct
  misc_feature 1..20: note = chemically synthesized
  source 1..20: mol_type = other DNA
ctcctggggccatgcagagg

SEQ ID NO: 32360 - DNA, 20 bp, synthetic construct
  misc_feature 1..20: note = chemically synthesized
  source 1..20: mol_type = other DNA
tcctggggccatgcagaggg

SEQ ID NO: 32361 - DNA, 20 bp, synthetic construct
  misc_feature 1..20: note = chemically synthesized
  source 1..20: mol_type = other DNA
gccatgcagagggaggtttg

SEQ ID NO: 32362 - DNA, 20 bp, synthetic construct
  misc_feature 1..20: note = chemically synthesized
  source 1..20: mol_type = other DNA
gtttgaagatcttgttgata

SEQ ID NO: 32363 - DNA, 20 bp, synthetic construct
  misc_feature 1..20: note = chemically synthesized
  source 1..20: mol_type = other DNA
cttgttgatacagattgaca

SEQ ID NO: 32364 - DNA, 20 bp, synthetic construct
  misc_feature 1..20: note = chemically synthesized
  source 1..20: mol_type = other DNA
cagattgacacagaatacca

SEQ ID NO: 32365 - DNA, 20 bp, synthetic construct
  misc_feature 1..20: note = chemically synthesized
  source 1..20: mol_type = other DNA
tttccccactgcctttcctt

SEQ ID NO: 32366 - DNA, 20 bp, synthetic construct
  misc_feature 1..20: note = chemically synthesized
  source 1..20: mol_type = other DNA
tttccttgagtaaaaatcct

SEQ ID NO: 32367 - DNA, 20 bp, synthetic construct
  misc_feature 1..20: note = chemically synthesized
  source 1..20: mol_type = other DNA
tccctttctttctatgttga

SEQ ID NO: 32368 - DNA, 20 bp, synthetic construct
  misc_feature 1..20: note = chemically synthesized
  source 1..20: mol_type = other DNA
atgttgatagcaaaaccaat

SEQ ID NO: 32369 - DNA, 20 bp, synthetic construct
  misc_feature 1..20: note = chemically synthesized
  source 1..20: mol_type = other DNA
tgttgatagcaaaaccaatg

SEQ ID NO: 32370 - DNA, 20 bp, synthetic construct
  misc_feature 1..20: note = chemically synthesized
  source 1..20: mol_type = other DNA
taacaactgttgacttattt

SEQ ID NO: 32371 - DNA, 20 bp, synthetic construct
  misc_feature 1..20: note = chemically synthesized
  source 1..20: mol_type = other DNA
tgttgacttattttggattt

SEQ ID NO: 32372 - DNA, 20 bp, synthetic construct
  misc_feature 1..20: note = chemically synthesized
  source 1..20: mol_type = other DNA
ttcactgtaacacaaaaatg

SEQ ID NO: 32373 - DNA, 20 bp, synthetic construct
  misc_feature 1..20: note = chemically synthesized
  source 1..20: mol_type = other DNA
tgtaacacaaaaatgcagac

SEQ ID NO: 32374 - DNA, 20 bp, synthetic construct
  misc_feature 1..20: note = chemically synthesized
  source 1..20: mol_type = other DNA
aacacaaaaatgcagacaag

SEQ ID NO: 32375 - DNA, 20 bp, synthetic construct
  misc_feature 1..20: note = chemically synthesized
  source 1..20: mol_type = other DNA
cagacaagcagcactgattt

SEQ ID NO: 32376 - DNA, 20 bp, synthetic construct
  misc_feature 1..20: note = chemically synthesized
  source 1..20: mol_type = other DNA
aagcagcactgattttagtg

SEQ ID NO: 32377 - DNA, 20 bp, synthetic construct
  misc_feature 1..20: note = chemically synthesized
  source 1..20: mol_type = other DNA
ctgattttagtgtggcatca

SEQ ID NO: 32378 - DNA, 20 bp, synthetic construct
  misc_feature 1..20: note = chemically synthesized
  source 1..20: mol_type = other DNA
gtgtggcatcatggaaataa

SEQ ID NO: 32379 - DNA, 20 bp, synthetic construct
  misc_feature 1..20: note = chemically synthesized
  source 1..20: mol_type = other DNA
ggaaataacagtgctacaca

SEQ ID NO: 32380 - DNA, 20 bp, synthetic construct
  misc_feature 1..20: note = chemically synthesized
  source 1..20: mol_type = other DNA
ctacacatagcccttgctac

SEQ ID NO: 32381 - DNA, 20 bp, synthetic construct
  misc_feature 1..20: note = chemically synthesized
  source 1..20: mol_type = other DNA
tagcccttgctaccagccaa

SEQ ID NO: 32382 - DNA, 20 bp, synthetic construct
  misc_feature 1..20: note = chemically synthesized
  source 1..20: mol_type = other DNA
agcccttgctaccagccaat

SEQ ID NO: 32383 - DNA, 20 bp, synthetic construct
  misc_feature 1..20: note = chemically synthesized
  source 1..20: mol_type = other DNA
gccaataggactatttattt

SEQ ID NO: 32384 - DNA, 20 bp, synthetic construct
  misc_feature 1..20: note = chemically synthesized
  source 1..20: mol_type = other DNA
tatatgtatatataaatgtg

SEQ ID NO: 32385 - DNA, 20 bp, synthetic construct
  misc_feature 1..20: note = chemically synthesized
  source 1..20: mol_type = other DNA
gtatatataaatgtgtagaa

SEQ ID NO: 32386 - DNA, 20 bp, synthetic construct
  misc_feature 1..20: note = chemically synthesized
  source 1..20: mol_type = other DNA
ataaatgtgtagaaaagttg

SEQ ID NO: 32387 - DNA, 20 bp, synthetic construct
  misc_feature 1..20: note = chemically synthesized
  source 1..20: mol_type = other DNA
aaatgtgtagaaaagttgca

SEQ ID NO: 32388 - DNA, 20 bp, synthetic construct
  misc_feature 1..20: note = chemically synthesized
  source 1..20: mol_type = other DNA
aaaagttgcagagaaatgta

SEQ ID NO: 32389 - DNA, 20 bp, synthetic construct
  misc_feature 1..20: note = chemically synthesized
  source 1..20: mol_type = other DNA
agttgcagagaaatgtatgg

SEQ ID NO: 32390 - DNA, 20 bp, synthetic construct
  misc_feature 1..20: note = chemically synthesized
  source 1..20: mol_type = other DNA
gaaatgtatggcagattata

SEQ ID NO: 32391 - DNA, 20 bp, synthetic construct
  misc_feature 1..20: note = chemically synthesized
  source 1..20: mol_type = other DNA
aaatgtatggcagattataa

SEQ ID NO: 32392 - DNA, 20 bp, synthetic construct
  misc_feature 1..20: note = chemically synthesized
  source 1..20: mol_type = other DNA
aatgtatggcagattataaa

SEQ ID NO: 32393 - DNA, 20 bp, synthetic construct
  misc_feature 1..20: note = chemically synthesized
  source 1..20: mol_type = other DNA
ttataaagggaaattatctc

SEQ ID NO: 32394 - DNA, 20 bp, synthetic construct
  misc_feature 1..20: note = chemically synthesized
  source 1..20: mol_type = other DNA
tataaagggaaattatctcc

SEQ ID NO: 32395 - DNA, 20 bp, synthetic construct
  misc_feature 1..20: note = chemically synthesized
  source 1..20: mol_type = other DNA
ataaagggaaattatctcca

SEQ ID NO: 32396 - DNA, 20 bp, synthetic construct
  misc_feature 1..20: note = chemically synthesized
  source 1..20: mol_type = other DNA
aaagggaaattatctccagg

SEQ ID NO: 32397 - DNA, 20 bp, synthetic construct
  misc_feature 1..20: note = chemically synthesized
  source 1..20: mol_type = other DNA
aagggaaattatctccaggg

SEQ ID NO: 32398 - DNA, 20 bp, synthetic construct
  misc_feature 1..20: note = chemically synthesized
  source 1..20: mol_type = other DNA
gaaattatctccagggagga

SEQ ID NO: 32399 - DNA, 20 bp, synthetic construct
  misc_feature 1..20: note = chemically synthesized
  source 1..20: mol_type = other DNA
ttatctccagggaggataga

SEQ ID NO: 32400 - DNA, 20 bp, synthetic construct
  misc_feature 1..20: note = chemically synthesized
  source 1..20: mol_type = other DNA
tatctccagggaggatagaa

SEQ ID NO: 32401 - DNA, 20 bp, synthetic construct
  misc_feature 1..20: note = chemically synthesized
  source 1..20: mol_type = other DNA
tccagggaggatagaaaggt

SEQ ID NO: 32402 - DNA, 20 bp, synthetic construct
  misc_feature 1..20: note = chemically synthesized
  source 1..20: mol_type = other DNA
ccagggaggatagaaaggta

SEQ ID NO: 32403 - DNA, 20 bp, synthetic construct
  misc_feature 1..20: note = chemically synthesized
  source 1..20: mol_type = other DNA
ggatagaaaggtaaggataa

SEQ ID NO: 32404 - DNA, 20 bp, synthetic construct
  misc_feature 1..20: note = chemically synthesized
  source 1..20: mol_type = other DNA
gatagaaaggtaaggataaa

SEQ ID NO: 32405 - DNA, 20 bp, synthetic construct
  misc_feature 1..20: note = chemically synthesized
  source 1..20: mol_type = other DNA
tactttatatttaatataca

SEQ ID NO: 32406 - DNA, 20 bp, synthetic construct
  misc_feature 1..20: note = chemically synthesized
  source 1..20: mol_type = other DNA
ctttatatttaatatacatg

SEQ ID NO: 32407 - DNA, 20 bp, synthetic construct
  misc_feature 1..20: note = chemically synthesized
  source 1..20: mol_type = other DNA
taattttttaaattatatca

SEQ ID NO: 32408 - DNA, 20 bp, synthetic construct
  misc_feature 1..20: note = chemically synthesized
  source 1..20: mol_type = other DNA
aattatatcatagacatatt

SEQ ID NO: 32409 - DNA, 20 bp, synthetic construct
  misc_feature 1..20: note = chemically synthesized
  source 1..20: mol_type = other DNA
attatatcatagacatattt

SEQ ID NO: 32410 - DNA, 20 bp, synthetic construct
  misc_feature 1..20: note = chemically synthesized
  source 1..20: mol_type = other DNA
tatcatagacatatttagga

SEQ ID NO: 32411 - DNA, 20 bp, synthetic construct
  misc_feature 1..20: note = chemically synthesized
  source 1..20: mol_type = other DNA
gacatatttaggatagtgaa

SEQ ID NO: 32412 - DNA, 20 bp, synthetic construct
  misc_feature 1..20: note = chemically synthesized
  source 1..20: mol_type = other DNA
ttaaaaatacaactacttac

SEQ ID NO: 32413 - DNA, 20 bp, synthetic construct
  misc_feature 1..20: note = chemically synthesized
  source 1..20: mol_type = other DNA
ttttaaatgtctcaaattat

SEQ ID NO: 32414 - DNA, 20 bp, synthetic construct
  misc_feature 1..20: note = chemically synthesized
  source 1..20: mol_type = other DNA
atcagattttattttttatc

SEQ ID NO: 32415 - DNA, 20 bp, synthetic construct
  misc_feature 1..20: note = chemically synthesized
  source 1..20: mol_type = other DNA
atccagaaaaaatatataaa

SEQ ID NO: 32416 - DNA, 20 bp, synthetic construct
  misc_feature 1..20: note = chemically synthesized
  source 1..20: mol_type = other DNA
tatataaaaagtctgtttca

SEQ ID NO: 32417 - DNA, 20 bp, synthetic construct
  misc_feature 1..20: note = chemically synthesized
  source 1..20: mol_type = other DNA
tataaaaagtctgtttcata

SEQ ID NO: 32418 - DNA, 20 bp, synthetic construct
  misc_feature 1..20: note = chemically synthesized
  source 1..20: mol_type = other DNA
ctgtttcatagagttttact

SEQ ID NO: 32419 - DNA, 20 bp, synthetic construct
  misc_feature 1..20: note = chemically synthesized
  source 1..20: mol_type = other DNA
tgtttcatagagttttactg

SEQ ID NO: 32420 - DNA, 20 bp, synthetic construct
  misc_feature 1..20: note = chemically synthesized
  source 1..20: mol_type = other DNA
agagttttactgaggtataa

SEQ ID NO: 32421 - DNA, 20 bp, synthetic construct
  misc_feature 1..20: note = chemically synthesized
  source 1..20: mol_type = other DNA
aatagatgtaattctcctaa

SEQ ID NO: 32422 - DNA, 20 bp, synthetic construct
  misc_feature 1..20: note = chemically synthesized
  source 1..20: mol_type = other DNA
aaagtgttatattttgcaaa

SEQ ID NO: 32423 - DNA, 20 bp, synthetic construct
  misc_feature 1..20: note = chemically synthesized
  source 1..20: mol_type = other DNA
gtgttatattttgcaaatag

SEQ ID NO: 32424 - DNA, 20 bp, synthetic construct
  misc_feature 1..20: note = chemically synthesized
  source 1..20: mol_type = other DNA
tgctaaaatattattgttaa

SEQ ID NO: 32425 - DNA, 20 bp, synthetic construct
  misc_feature 1..20: note = chemically synthesized
  source 1..20: mol_type = other DNA
gttaatagtattccactaac

SEQ ID NO: 32426 - DNA, 20 bp, synthetic construct
  misc_feature 1..20: note = chemically synthesized
  source 1..20: mol_type = other DNA
aactttaattaatatttgtt

SEQ ID NO: 32427 - DNA, 20 bp, synthetic construct
  misc_feature 1..20: note = chemically synthesized
  source 1..20: mol_type = other DNA
tttctactaccccacacaca

SEQ ID NO: 32428 - DNA, 20 bp, synthetic construct
  misc_feature 1..20: note = chemically synthesized
  source 1..20: mol_type = other DNA
ttctactaccccacacacat

SEQ ID NO: 32429 - DNA, 20 bp, synthetic construct
  misc_feature 1..20: note = chemically synthesized
  source 1..20: mol_type = other DNA
catatcttcttctatcatgt

SEQ ID NO: 32430 - DNA, 20 bp, synthetic construct
  misc_feature 1..20: note = chemically synthesized
  source 1..20: mol_type = other DNA
tctatcatgttggcctcatt

SEQ ID NO: 32431 - DNA, 20 bp, synthetic construct
  misc_feature 1..20: note = chemically synthesized
  source 1..20: mol_type = other DNA
catgttggcctcattcagta

SEQ ID NO: 32432 - DNA, 20 bp, synthetic construct
  misc_feature 1..20: note = chemically synthesized
  source 1..20: mol_type = other DNA
ggcctcattcagtacagtac

SEQ ID NO: 32433 - DNA, 20 bp, synthetic construct
  misc_feature 1..20: note = chemically synthesized
  source 1..20: mol_type = other DNA
tcagtacagtactagaaaat

SEQ ID NO: 32434 - DNA, 20 bp, synthetic construct
  misc_feature 1..20: note = chemically synthesized
  source 1..20: mol_type = other DNA
gtacagtactagaaaatcag

SEQ ID NO: 32435 - DNA, 20 bp, synthetic construct
  misc_feature 1..20: note = chemically synthesized
  source 1..20: mol_type = other DNA
tacagtactagaaaatcagt

SEQ ID NO: 32436 - DNA, 20 bp, synthetic construct
  misc_feature 1..20: note = chemically synthesized
  source 1..20: mol_type = other DNA
acagtactagaaaatcagta

SEQ ID NO: 32437 - DNA, 20 bp, synthetic construct
  misc_feature 1..20: note = chemically synthesized
  source 1..20: mol_type = other DNA
ctagaaaatcagtagggact

SEQ ID NO: 32438 - DNA, 20 bp, synthetic construct
  misc_feature 1..20: note = chemically synthesized
  source 1..20: mol_type = other DNA
tagaaaatcagtagggactc

SEQ ID NO: 32439 - DNA, 20 bp, synthetic construct
  misc_feature 1..20: note = chemically synthesized
  source 1..20: mol_type = other DNA
actcaggttatatgtgtgaa

SEQ ID NO: 32440 - DNA, 20 bp, synthetic construct
  misc_feature 1..20: note = chemically synthesized
  source 1..20: mol_type = other DNA
tgaatgaatgcctattttta

SEQ ID NO: 32441 - DNA, 20 bp, synthetic construct
  misc_feature 1..20: note = chemically synthesized
  source 1..20: mol_type = other DNA
cctttctgtatgtctaacct

SEQ ID NO: 32442 - DNA, 20 bp, synthetic construct
  misc_feature 1..20: note = chemically synthesized
  source 1..20: mol_type = other DNA
gtatgtctaaccttagattc

SEQ ID NO: 32443 - DNA, 20 bp, synthetic construct
  misc_feature 1..20: note = chemically synthesized
  source 1..20: mol_type = other DNA
ctaaccttagattctagtca

SEQ ID NO: 32444 - DNA, 20 bp, synthetic construct
  misc_feature 1..20: note = chemically synthesized
  source 1..20: mol_type = other DNA
tagtcatggccatatgtctc

SEQ ID NO: 32445 - DNA, 20 bp, synthetic construct
  misc_feature 1..20: note = chemically synthesized
  source 1..20: mol_type = other DNA
agtcatggccatatgtctct

SEQ ID NO: 32446 - DNA, 20 bp, synthetic construct
  misc_feature 1..20: note = chemically synthesized
  source 1..20: mol_type = other DNA
catggccatatgtctctagg

SEQ ID NO: 32447 - DNA, 20 bp, synthetic construct
  misc_feature 1..20: note = chemically synthesized
  source 1..20: mol_type = other DNA
gtggcccaaccaccctatca

SEQ ID NO: 32448 - DNA, 20 bp, synthetic construct
  misc_feature 1..20: note = chemically synthesized
  source 1..20: mol_type = other DNA
ctatcacagattctgcttca

SEQ ID NO: 32449 - DNA, 20 bp, synthetic construct
  misc_feature 1..20: note = chemically synthesized
  source 1..20: mol_type = other DNA
tatcacagattctgcttcaa

SEQ ID NO: 32450 - DNA, 20 bp, synthetic construct
  misc_feature 1..20: note = chemically synthesized
  source 1..20: mol_type = other DNA
tgcttcaaaggcactcatct

SEQ ID NO: 32451 - DNA, 20 bp, synthetic construct
  misc_feature 1..20: note = chemically synthesized
  source 1..20: mol_type = other DNA
catcttggtgaatgaatatc

SEQ ID NO: 32452 - DNA, 20 bp, synthetic construct
  misc_feature 1..20: note = chemically synthesized
  source 1..20: mol_type = other DNA
ggtgaatgaatatctagtcc

SEQ ID NO: 32453 - DNA, 20 bp, synthetic construct
  misc_feature 1..20: note = chemically synthesized
  source 1..20: mol_type = other DNA
gaatgaatatctagtcccag

SEQ ID NO: 32454 - DNA, 20 bp, synthetic construct
  misc_feature 1..20: note = chemically synthesized
  source 1..20: mol_type = other DNA
aatgaatatctagtcccaga

SEQ ID NO: 32455 - DNA, 20 bp, synthetic construct
  misc_feature 1..20: note = chemically synthesized
  source 1..20: mol_type = other DNA
tgaatatctagtcccagaag

SEQ ID NO: 32456 - DNA, 20 bp, synthetic construct
  misc_feature 1..20: note = chemically synthesized
  source 1..20: mol_type = other DNA
gaatatctagtcccagaagg

SEQ ID NO: 32457 - DNA, 20 bp, synthetic construct
  misc_feature 1..20: note = chemically synthesized
  source 1..20: mol_type = other DNA
aaaactatcttgtccacatc

SEQ ID NO: 32458 - DNA, 20 bp, synthetic construct
  misc_feature 1..20: note = chemically synthesized
  source 1..20: mol_type = other DNA
ctatcttgtccacatctagt

SEQ ID NO: 32459 - DNA, 20 bp, synthetic construct
  misc_feature 1..20: note = chemically synthesized
  source 1..20: mol_type = other DNA
tagttggctgacacacaatt

SEQ ID NO: 32460 - DNA, 20 bp, synthetic construct
  misc_feature 1..20: note = chemically synthesized
  source 1..20: mol_type = other DNA
agttggctgacacacaattt

SEQ ID NO: 32461 - DNA, 20 bp, synthetic construct
  misc_feature 1..20: note = chemically synthesized
  source 1..20: mol_type = other DNA
gacacacaatttaggcttct

SEQ ID NO: 32462 - DNA, 20 bp, synthetic construct
  misc_feature 1..20: note = chemically synthesized
  source 1..20: mol_type = other DNA
acacacaatttaggcttctt

SEQ ID NO: 32463 - DNA, 20 bp, synthetic construct
  misc_feature 1..20: note = chemically synthesized
  source 1..20: mol_type = other DNA
ttaggcttcttgggtgtaat

SEQ ID NO: 32464 - DNA, 20 bp, synthetic construct
  misc_feature 1..20: note = chemically synthesized
  source 1..20: mol_type = other DNA
ttgggtgtaatcagatctgt

SEQ ID NO: 32465 - DNA, 20 bp, synthetic construct
  misc_feature 1..20: note = chemically synthesized
  source 1..20: mol_type = other DNA
tcagatctgtaagcatgatc

SEQ ID NO: 32466 - DNA, 20 bp, synthetic construct
  misc_feature 1..20: note = chemically synthesized
  source 1..20: mol_type = other DNA
atctgtaagcatgatccgga

SEQ ID NO: 32467 - DNA, 20 bp, synthetic construct
  misc_feature 1..20: note = chemically synthesized
  source 1..20: mol_type = other DNA
aagcatgatccggaaagaaa

SEQ ID NO: 32468 - DNA, 20 bp, synthetic construct
  misc_feature 1..20: note = chemically synthesized
  source 1..20: mol_type = other DNA
ggaaagaaaaagttcctgaa

SEQ ID NO: 32469 - DNA, 20 bp, synthetic construct
  misc_feature 1..20: note = chemically synthesized
  source 1..20: mol_type = other DNA
aaagaaaaagttcctgaaca

SEQ ID NO: 32470 - DNA, 20 bp, synthetic construct
  misc_feature 1..20: note = chemically synthesized
  source 1..20: mol_type = other DNA
aagaaaaagttcctgaacag

SEQ ID NO: 32471 - DNA, 20 bp, synthetic construct
  misc_feature 1..20: note = chemically synthesized
  source 1..20: mol_type = other DNA
acagaggcttccaacatcct

SEQ ID NO: 32472 - DNA, 20 bp, synthetic construct
  misc_feature 1..20: note = chemically synthesized
  source 1..20: mol_type = other DNA
gaggcttccaacatcctcag

SEQ ID NO: 32473 - DNA, 20 bp, synthetic construct
  misc_feature 1..20: note = chemically synthesized
  source 1..20: mol_type = other DNA
aggcttccaacatcctcaga

SEQ ID NO: 32474 - DNA, 20 bp, synthetic construct
  misc_feature 1..20: note = chemically synthesized
  source 1..20: mol_type = other DNA
aaacctctcttaatccacat

SEQ ID NO: 32475 - DNA, 20 bp, synthetic construct
  misc_feature 1..20: note = chemically synthesized
  source 1..20: mol_type = other DNA
tctcttaatccacataagaa

SEQ ID NO: 32476 - DNA, 20 bp, synthetic construct
  misc_feature 1..20: note = chemically synthesized
  source 1..20: mol_type = other DNA
aattccaacatcttgctcct

SEQ ID NO: 32477 - DNA, 20 bp, synthetic construct
  misc_feature 1..20: note = chemically synthesized
  source 1..20: mol_type = other DNA
ctcctaagaacactttgccc

SEQ ID NO: 32478 - DNA, 20 bp, synthetic construct
  misc_feature 1..20: note = chemically synthesized
  source 1..20: mol_type = other DNA
tcctaagaacactttgccct

SEQ ID NO: 32479 - DNA, 20 bp, synthetic construct
  misc_feature 1..20: note = chemically synthesized
  source 1..20: mol_type = other DNA
cctaagaacactttgccctg

SEQ ID NO: 32480 - DNA, 20 bp, synthetic construct
  misc_feature 1..20: note = chemically synthesized
  source 1..20: mol_type = other DNA
ctaagaacactttgccctgg

SEQ ID NO: 32481 - DNA, 20 bp, synthetic construct
  misc_feature 1..20: note = chemically synthesized
  source 1..20: mol_type = other DNA
actttgccctgggggaaaaa

SEQ ID NO: 32482 - DNA, 20 bp, synthetic construct
  misc_feature 1..20: note = chemically synthesized
  source 1..20: mol_type = other DNA
gccctgggggaaaaaaagaa

SEQ ID NO: 32483 - DNA, 20 bp, synthetic construct
  misc_feature 1..20: note = chemically synthesized
  source 1..20: mol_type = other DNA
aaaaaaagaaaagccatcgt

SEQ ID NO: 32484 - DNA, 20 bp, synthetic construct
  misc_feature 1..20: note = chemically synthesized
  source 1..20: mol_type = other DNA
gaaaagccatcgtaagcttt

SEQ ID NO: 32485 - DNA, 20 bp, synthetic construct
  misc_feature 1..20: note = chemically synthesized
  source 1..20: mol_type = other DNA
aagccatcgtaagctttcag

SEQ ID NO: 32486 - DNA, 20 bp, synthetic construct
  misc_feature 1..20: note = chemically synthesized
  source 1..20: mol_type = other DNA
agccatcgtaagctttcaga

SEQ ID NO: 32487 - DNA, 20 bp, synthetic construct
  misc_feature 1..20: note = chemically synthesized
  source 1..20: mol_type = other DNA
gctttcagaaggcctatgct

SEQ ID NO: 32488 - DNA, 20 bp, synthetic construct
  misc_feature 1..20: note = chemically synthesized
  source 1..20: mol_type = other DNA
ctttcagaaggcctatgctg

SEQ ID NO: 32489 - DNA, 20 bp, synthetic construct
  misc_feature 1..20: note = chemically synthesized
  source 1..20: mol_type = other DNA
tgctgaggttttgcttcctt

SEQ ID NO: 32490 - DNA, 20 bp, synthetic construct
  misc_feature 1..20: note = chemically synthesized
  source 1..20: mol_type = other DNA
ttttgcttccttcagtttta

SEQ ID NO: 32491 - DNA, 20 bp, synthetic construct
  misc_feature 1..20: note = chemically synthesized
  source 1..20: mol_type = other DNA
gttttaaagcataatatttt

SEQ ID NO: 32492 - DNA, 20 bp, synthetic construct
  misc_feature 1..20: note = chemically synthesized
  source 1..20: mol_type = other DNA
attttgagtaactcaatgtt

SEQ ID NO: 32493 - DNA, 20 bp, synthetic construct
  misc_feature 1..20: note = chemically synthesized
  source 1..20: mol_type = other DNA
acctcaaattttgctcttga

SEQ ID NO: 32494 - DNA, 20 bp, synthetic construct
  misc_feature 1..20: note = chemically synthesized
  source 1..20: mol_type = other DNA
tactatgctctgctttctca

SEQ ID NO: 32495 - DNA, 20 bp, synthetic construct
  misc_feature 1..20: note = chemically synthesized
  source 1..20: mol_type = other DNA
actatgctctgctttctcac

SEQ ID NO: 32496 - DNA, 20 bp, synthetic construct
  misc_feature 1..20: note = chemically synthesized
  source 1..20: mol_type = other DNA
ctttctcacaggatgcatgt

SEQ ID NO: 32497 - DNA, 20 bp, synthetic construct
  misc_feature 1..20: note = chemically synthesized
  source 1..20: mol_type = other DNA
gcatgtgagaataaaacaca

SEQ ID NO: 32498 - DNA, 20 bp, synthetic construct
  misc_feature 1..20: note = chemically synthesized
  source 1..20: mol_type = other DNA
aaaacacaaagtctttatgt

SEQ ID NO: 32499 - DNA, 20 bp, synthetic construct
  misc_feature 1..20: note = chemically synthesized
  source 1..20: mol_type = other DNA
agaatatcttgtgtaacttc

SEQ ID NO: 32500 - DNA, 20 bp, synthetic construct
  misc_feature 1..20: note = chemically synthesized
  source 1..20: mol_type = other DNA
acttcaagtattacgattgt

SEQ ID NO: 32501 - DNA, 20 bp, synthetic construct
  misc_feature 1..20: note = chemically synthesized
  source 1..20: mol_type = other DNA
ttcaagtattacgattgtga

SEQ ID NO: 32502 - DNA, 20 bp, synthetic construct
  misc_feature 1..20: note = chemically synthesized
  source 1..20: mol_type = other DNA
caagtattacgattgtgaga

SEQ ID NO: 32503 - DNA, 20 bp, synthetic construct
  misc_feature 1..20: note = chemically synthesized
  source 1..20: mol_type = other DNA
gattgtgagagagcttttta

SEQ ID NO: 32504 - DNA, 20 bp, synthetic construct
  misc_feature 1..20: note = chemically synthesized
  source 1..20: mol_type = other DNA
attgtgagagagctttttaa

SEQ ID NO: 32505 - DNA, 20 bp, synthetic construct
  misc_feature 1..20: note = chemically synthesized
  source 1..20: mol_type = other DNA
aaggtttttattttctttgt

SEQ ID NO: 32506 - DNA, 20 bp, synthetic construct
  misc_feature 1..20: note = chemically synthesized
  source 1..20: mol_type = other DNA
ggtttttattttctttgtca

SEQ ID NO: 32507 - DNA, 20 bp, synthetic construct
  misc_feature 1..20: note = chemically synthesized
  source 1..20: mol_type = other DNA
tttattttctttgtcagagc

SEQ ID NO: 32508 - DNA, 20 bp, synthetic construct
  misc_feature 1..20: note = chemically synthesized
  source 1..20: mol_type = other DNA
ttttctttgtcagagctaga

SEQ ID NO: 32509 - DNA, 20 bp, synthetic construct
  misc_feature 1..20: note = chemically synthesized
  source 1..20: mol_type = other DNA
ttctttgtcagagctagaca

SEQ ID NO: 32510 - DNA, 20 bp, synthetic construct
  misc_feature 1..20: note = chemically synthesized
  source 1..20: mol_type = other DNA
agctagacagagtatcttct

SEQ ID NO: 32511 - DNA, 20 bp, synthetic construct
  misc_feature 1..20: note = chemically synthesized
  source 1..20: mol_type = other DNA
cagagtatcttctcagccca

SEQ ID NO: 32512 - DNA, 20 bp, synthetic construct
  misc_feature 1..20: note = chemically synthesized
  source 1..20: mol_type = other DNA
agagtatcttctcagcccaa

SEQ ID NO: 32513 - DNA, 20 bp, synthetic construct
  misc_feature 1..20: note = chemically synthesized
  source 1..20: mol_type = other DNA
aaaattttcaatgatgatta

SEQ ID NO: 32514 - DNA, 20 bp, synthetic construct
  misc_feature 1..20: note = chemically synthesized
  source 1..20: mol_type = other DNA
aatgatgattatagtaataa

SEQ ID NO: 32515 - DNA, 20 bp, synthetic construct
  misc_feature 1..20: note = chemically synthesized
  source 1..20: mol_type = other DNA
gatttctataatacttacaa

SEQ ID NO: 32516 - DNA, 20 bp, synthetic construct
  misc_feature 1..20: note = chemically synthesized
  source 1..20: mol_type = other DNA
ctataatacttacaatggac

SEQ ID NO: 32517 - DNA, 20 bp, synthetic construct
  misc_feature 1..20: note = chemically synthesized
  source 1..20: mol_type = other DNA
tataatacttacaatggacc

SEQ ID NO: 32518 - DNA, 20 bp, synthetic construct
  misc_feature 1..20: note = chemically synthesized
  source 1..20: mol_type = other DNA
ccaggcactattgaacacgt

SEQ ID NO: 32519 - DNA, 20 bp, synthetic construct
  misc_feature 1..20: note = chemically synthesized
  source 1..20: mol_type = other DNA
attaaaataattcaaccatg

SEQ ID NO: 32520 - DNA, 20 bp, synthetic construct
  misc_feature 1..20: note = chemically synthesized
  source 1..20: mol_type = other DNA
ttaaaataattcaaccatgt

SEQ ID NO: 32521 - DNA, 20 bp, synthetic construct
  misc_feature 1..20: note = chemically synthesized
  source 1..20: mol_type = other DNA
ttcaaccatgtgggtactat

SEQ ID NO: 32522 - DNA, 20 bp, synthetic construct
  misc_feature 1..20: note = chemically synthesized
  source 1..20: mol_type = other DNA
actattggtatccccactta

SEQ ID NO: 32523 - DNA, 20 bp, synthetic construct
  misc_feature 1..20: note = chemically synthesized
  source 1..20: mol_type = other DNA
tggtatccccacttaaagat

SEQ ID NO: 32524 - DNA, 20 bp, synthetic construct
  misc_feature 1..20: note = chemically synthesized
  source 1..20: mol_type = other DNA
tatccccacttaaagatgag

SEQ ID NO: 32525 - DNA, 20 bp, synthetic construct
  misc_feature 1..20: note = chemically synthesized
  source 1..20: mol_type = other DNA
aagatgagtggaccaaaaca

SEQ ID NO: 32526 - DNA, 20 bp, synthetic construct
  misc_feature 1..20: note = chemically synthesized
  source 1..20: mol_type = other DNA
tgagtggaccaaaacacaga

SEQ ID NO: 32527 - DNA, 20 bp, synthetic construct
  misc_feature 1..20: note = chemically synthesized
  source 1..20: mol_type = other DNA
aaagataaattgctttgcta

SEQ ID NO: 32528 - DNA, 20 bp, synthetic construct
  misc_feature 1..20: note = chemically synthesized
  source 1..20: mol_type = other DNA
aagataaattgctttgctat

SEQ ID NO: 32529 - DNA, 20 bp, synthetic construct
  misc_feature 1..20: note = chemically synthesized
  source 1..20: mol_type = other DNA
agataaattgctttgctata

SEQ ID NO: 32530 - DNA, 20 bp, synthetic construct
  misc_feature 1..20: note = chemically synthesized
  source 1..20: mol_type = other DNA
ttgctttgctatagggtacg

SEQ ID NO: 32531 - DNA, 20 bp, synthetic construct
  misc_feature 1..20: note = chemically synthesized
  source 1..20: mol_type = other DNA
ctatagggtacgcagccaat

SEQ ID NO: 32532 - DNA, 20 bp, synthetic construct
  misc_feature 1..20: note = chemically synthesized
  source 1..20: mol_type = other DNA
tagggtacgcagccaataag

SEQ ID NO: 32533 - DNA, 20 bp, synthetic construct
  misc_feature 1..20: note = chemically synthesized
  source 1..20: mol_type = other DNA
ggtacgcagccaataagtgg

SEQ ID NO: 32534 - DNA, 20 bp, synthetic construct
  misc_feature 1..20: note = chemically synthesized
  source 1..20: mol_type = other DNA
gtacgcagccaataagtgga

SEQ ID NO: 32535 - DNA, 20 bp, synthetic construct
  misc_feature 1..20: note = chemically synthesized
  source 1..20: mol_type = other DNA
cgcagccaataagtggaagg

SEQ ID NO: 32536 - DNA, 20 bp, synthetic construct
  misc_feature 1..20: note = chemically synthesized
  source 1..20: mol_type = other DNA
gcagccaataagtggaaggt

SEQ ID NO: 32537 - DNA, 20 bp, synthetic construct
  misc_feature 1..20: note = chemically synthesized
  source 1..20: mol_type = other DNA
aattcccaaaactactgcat

SEQ ID NO: 32538 - DNA, 20 bp, synthetic construct
  misc_feature 1..20: note = chemically synthesized
  source 1..20: mol_type = other DNA
ctactgcataagactgtatg

SEQ ID NO: 32539 - DNA, 20 bp, synthetic construct
  misc_feature 1..20: note = chemically synthesized
  source 1..20: mol_type = other DNA
ctgcataagactgtatgaag

SEQ ID NO: 32540 - DNA, 20 bp, synthetic construct
  misc_feature 1..20: note = chemically synthesized
  source 1..20: mol_type = other DNA
tatgaagaagcatgaaacaa

SEQ ID NO: 32541 - DNA, 20 bp, synthetic construct
  misc_feature 1..20: note = chemically synthesized
  source 1..20: mol_type = other DNA
atgaagaagcatgaaacaat

SEQ ID NO: 32542 - DNA, 20 bp, synthetic construct
  misc_feature 1..20: note = chemically synthesized
  source 1..20: mol_type = other DNA
agcatgaaacaataggtttc

SEQ ID NO: 32543 - DNA, 20 bp, synthetic construct
  misc_feature 1..20: note = chemically synthesized
  source 1..20: mol_type = other DNA
atgaaacaataggtttcaag

SEQ ID NO: 32544 - DNA, 20 bp, synthetic construct
  misc_feature 1..20: note = chemically synthesized
  source 1..20: mol_type = other DNA
aataggtttcaagaagccta

SEQ ID NO: 32545 - DNA, 20 bp, synthetic construct
  misc_feature 1..20: note = chemically synthesized
  source 1..20: mol_type = other DNA
gaagcctacagaacacttaa

SEQ ID NO: 32546 - DNA, 20 bp, synthetic construct
  misc_feature 1..20: note = chemically synthesized
  source 1..20: mol_type = other DNA
aagcctacagaacacttaac

SEQ ID NO: 32547 - DNA, 20 bp, synthetic construct
  misc_feature 1..20: note = chemically synthesized
  source 1..20: mol_type = other DNA
cttaacaggatttttcatgc

SEQ ID NO: 32548 - DNA, 20 bp, synthetic construct
  misc_feature 1..20: note = chemically synthesized
  source 1..20: mol_type = other DNA
ggatttttcatgctggttca

SEQ ID NO: 32549 - DNA, 20 bp, synthetic construct
  misc_feature 1..20: note = chemically synthesized
  source 1..20: mol_type = other DNA
tttcatgctggttcatagtt

SEQ ID NO: 32550 - DNA, 20 bp, synthetic construct
  misc_feature 1..20: note = chemically synthesized
  source 1..20: mol_type = other DNA
ctggttcatagttaagttat

SEQ ID NO: 32551 - DNA, 20 bp, synthetic construct
  misc_feature 1..20: note = chemically synthesized
  source 1..20: mol_type = other DNA
catagttaagttattggttg

SEQ ID NO: 32552 - DNA, 20 bp, synthetic construct
  misc_feature 1..20: note = chemically synthesized
  source 1..20: mol_type = other DNA
gaagatgcaacaaatctgaa

SEQ ID NO: 32553 - DNA, 20 bp, synthetic construct
  misc_feature 1..20: note = chemically synthesized
  source 1..20: mol_type = other DNA
gatgcaacaaatctgaatgg

SEQ ID NO: 32554 - DNA, 20 bp, synthetic construct
  misc_feature 1..20: note = chemically synthesized
  source 1..20: mol_type = other DNA
tgcaacaaatctgaatggca

SEQ ID NO: 32555 - DNA, 20 bp, synthetic construct
  misc_feature 1..20: note = chemically synthesized
  source 1..20: mol_type = other DNA
gcaacaaatctgaatggcag

SEQ ID NO: 32556 - DNA, 20 bp, synthetic construct
  misc_feature 1..20: note = chemically synthesized
  source 1..20: mol_type = other DNA
gaatggcagaggaaaaaaca

SEQ ID NO: 32557 - DNA, 20 bp, synthetic construct
  misc_feature 1..20: note = chemically synthesized
  source 1..20: mol_type = other DNA
ggcagaggaaaaaacaaaga

SEQ ID NO: 32558 - DNA, 20 bp, synthetic construct
  misc_feature 1..20: note = chemically synthesized
  source 1..20: mol_type = other DNA
cagaggaaaaaacaaagaaa

SEQ ID NO: 32559 - DNA, 20 bp, synthetic construct
  misc_feature 1..20: note = chemically synthesized
  source 1..20: mol_type = other DNA
gaggaaaaaacaaagaaaga

SEQ ID NO: 32560 - DNA, 20 bp, synthetic construct
  misc_feature 1..20: note = chemically synthesized
  source 1..20: mol_type = other DNA
aaacaaagaaagagagttct

SEQ ID NO: 32561 - DNA, 20 bp, synthetic construct
  misc_feature 1..20: note = chemically synthesized
  source 1..20: mol_type = other DNA
aaagaaagagagttctgagt

SEQ ID NO: 32562 - DNA, 20 bp, synthetic construct
  misc_feature 1..20: note = chemically synthesized
  source 1..20: mol_type = other DNA
aagagagttctgagtgagcc

SEQ ID NO: 32563 - DNA, 20 bp, synthetic construct
  misc_feature 1..20: note = chemically synthesized
  source 1..20: mol_type = other DNA
agagagttctgagtgagcct

SEQ ID NO: 32564 - DNA, 20 bp, synthetic construct
  misc_feature 1..20: note = chemically synthesized
  source 1..20: mol_type = other DNA
tgagtgagcctgggtctcca

SEQ ID NO: 32565 - DNA, 20 bp, synthetic construct
  misc_feature 1..20: note = chemically synthesized
  source 1..20: mol_type = other DNA
gagtgagcctgggtctccat

SEQ ID NO: 32566 - DNA, 20 bp, synthetic construct
  misc_feature 1..20: note = chemically synthesized
  source 1..20: mol_type = other DNA
gtgagcctgggtctccatag

SEQ ID NO: 32567 - DNA, 20 bp, synthetic construct
  misc_feature 1..20: note = chemically synthesized
  source 1..20: mol_type = other DNA
cctgggtctccataggagca

SEQ ID NO: 32568 - DNA, 20 bp, synthetic construct
  misc_feature 1..20: note = chemically synthesized
  source 1..20: mol_type = other DNA
ctccataggagcaaagaacc

SEQ ID NO: 32569 - DNA, 20 bp, synthetic construct
  misc_feature 1..20: note = chemically synthesized
  source 1..20: mol_type = other DNA
taggagcaaagaaccaagtg

SEQ ID NO: 32570 - DNA, 20 bp, synthetic construct
  misc_feature 1..20: note = chemically synthesized
  source 1..20: mol_type = other DNA
gcaaagaaccaagtgaagct

SEQ ID NO: 32571 - DNA, 20 bp, synthetic construct
  misc_feature 1..20: note = chemically synthesized
  source 1..20: mol_type = other DNA
caaagaaccaagtgaagctt

SEQ ID NO: 32572 - DNA, 20 bp, synthetic construct
  misc_feature 1..20: note = chemically synthesized
  source 1..20: mol_type = other DNA
gaaccaagtgaagcttgggt

SEQ ID NO: 32573 - DNA, 20 bp, synthetic construct
  misc_feature 1..20: note = chemically synthesized
  source 1..20: mol_type = other DNA
agtgaagcttgggttagttg

SEQ ID NO: 32574 - DNA, 20 bp, synthetic construct
  misc_feature 1..20: note = chemically synthesized
  source 1..20: mol_type = other DNA
gtgaagcttgggttagttgt

SEQ ID NO: 32575 - DNA, 20 bp, synthetic construct
  misc_feature 1..20: note = chemically synthesized
  source 1..20: mol_type = other DNA
tgaagcttgggttagttgtg

SEQ ID NO: 32576 - DNA, 20 bp, synthetic construct
  misc_feature 1..20: note = chemically synthesized
  source 1..20: mol_type = other DNA
ttgggttagttgtggggtgt

SEQ ID NO: 32577 - DNA, 20 bp, synthetic construct
  misc_feature 1..20: note = chemically synthesized
  source 1..20: mol_type = other DNA
tgtggggtgtaagatataat

SEQ ID NO: 32578 - DNA, 20 bp, synthetic construct
  misc_feature 1..20: note = chemically synthesized
  source 1..20: mol_type = other DNA
ggggtgtaagatataattag

SEQ ID NO: 32579 - DNA, 20 bp, synthetic construct
  misc_feature 1..20: note = chemically synthesized
  source 1..20: mol_type = other DNA
ggtgtaagatataattagaa

SEQ ID NO: 32580 - DNA, 20 bp, synthetic construct
  misc_feature 1..20: note = chemically synthesized
  source 1..20: mol_type = other DNA
gtaagatataattagaagag

SEQ ID NO: 32581 - DNA, 20 bp, synthetic construct
  misc_feature 1..20: note = chemically synthesized
  source 1..20: mol_type = other DNA
agatataattagaagagaag

SEQ ID NO: 32582 - DNA, 20 bp, synthetic construct
  misc_feature 1..20: note = chemically synthesized
  source 1..20: mol_type = other DNA
gaagagaagtagctctactc

SEQ ID NO: 32583 - DNA, 20 bp, synthetic construct
  misc_feature 1..20: note = chemically synthesized
  source 1..20: mol_type = other DNA
gagaagtagctctactctgg

SEQ ID NO: 32584 - DNA, 20 bp, synthetic construct
  misc_feature 1..20: note = chemically synthesized
  source 1..20: mol_type = other DNA
aagtagctctactctggtag

SEQ ID NO: 32585 - DNA, 20 bp, synthetic construct
  misc_feature 1..20: note = chemically synthesized
  source 1..20: mol_type = other DNA
ctggtagaagtgaaactttg

SEQ ID NO: 32586 - DNA, 20 bp, synthetic construct
  misc_feature 1..20: note = chemically synthesized
  source 1..20: mol_type = other DNA
ctgattcctcacaaactgct

SEQ ID NO: 32587 - DNA, 20 bp, synthetic construct
  misc_feature 1..20: note = chemically synthesized
  source 1..20: mol_type = other DNA
ttcctcacaaactgctgagt

SEQ ID NO: 32588 - DNA, 20 bp, synthetic construct
  misc_feature 1..20: note = chemically synthesized
  source 1..20: mol_type = other DNA
tcctcacaaactgctgagta

SEQ ID NO: 32589 - DNA, 20 bp, synthetic construct
  misc_feature 1..20: note = chemically synthesized
  source 1..20: mol_type = other DNA
cacaaactgctgagtaagga

SEQ ID NO: 32590 - DNA, 20 bp, synthetic construct
  misc_feature 1..20: note = chemically synthesized
  source 1..20: mol_type = other DNA
acaaactgctgagtaaggat

SEQ ID NO: 32591 - DNA, 20 bp, synthetic construct
  misc_feature 1..20: note = chemically synthesized
  source 1..20: mol_type = other DNA
agtaaggataggaaaatgca

SEQ ID NO: 32592 - DNA, 20 bp, synthetic construct
  misc_feature 1..20: note = chemically synthesized
  source 1..20: mol_type = other DNA
gataggaaaatgcatagcct

SEQ ID NO: 32593 - DNA, 20 bp, synthetic construct
  misc_feature 1..20: note = chemically synthesized
  source 1..20: mol_type = other DNA
gaaaatgcatagccttggtc

SEQ ID NO: 32594 - DNA, 20 bp, synthetic construct
  misc_feature 1..20: note = chemically synthesized
  source 1..20: mol_type = other DNA
catagccttggtcaagattt

SEQ ID NO: 32595 - DNA, 20 bp, synthetic construct
  misc_feature 1..20: note = chemically synthesized
  source 1..20: mol_type = other DNA
cttggtcaagatttaagcat

SEQ ID NO: 32596 - DNA, 20 bp, synthetic construct
  misc_feature 1..20: note = chemically synthesized
  source 1..20: mol_type = other DNA
ttggtcaagatttaagcatg

SEQ ID NO: 32597 - DNA, 20 bp, synthetic construct
  misc_feature 1..20: note = chemically synthesized
  source 1..20: mol_type = other DNA
taagcatgaggacataaaaa

SEQ ID NO: 32598 - DNA, 20 bp, synthetic construct
  misc_feature 1..20: note = chemically synthesized
  source 1..20: mol_type = other DNA
tgaggacataaaaatagata

SEQ ID NO: 32599 - DNA, 20 bp, synthetic construct
  misc_feature 1..20: note = chemically synthesized
  source 1..20: mol_type = other DNA
gaggacataaaaatagatat

SEQ ID NO: 32600 - DNA, 20 bp, synthetic construct
  misc_feature 1..20: note = chemically synthesized
  source 1..20: mol_type = other DNA
gacataaaaatagatatagg

SEQ ID NO: 32601 - DNA, 20 bp, synthetic construct
  misc_feature 1..20: note = chemically synthesized
  source 1..20: mol_type = other DNA
taaaaatagatataggcaga

SEQ ID NO: 32602 - DNA, 20 bp, synthetic construct
  misc_feature 1..20: note = chemically synthesized
  source 1..20: mol_type = other DNA
tagatataggcagaaagcac

SEQ ID NO: 32603 - DNA, 20 bp, synthetic construct
  misc_feature 1..20: note = chemically synthesized
  source 1..20: mol_type = other DNA
tttgaatgcatatattgtgc

SEQ ID NO: 32604 - DNA, 20 bp, synthetic construct
  misc_feature 1..20: note = chemically synthesized
  source 1..20: mol_type = other DNA
ttgtgcaagtgcctctattc

SEQ ID NO: 32605 - DNA, 20 bp, synthetic construct
  misc_feature 1..20: note = chemically synthesized
  source 1..20: mol_type = other DNA
tgtgcaagtgcctctattct

SEQ ID NO: 32606 - DNA, 20 bp, synthetic construct
  misc_feature 1..20: note = chemically synthesized
  source 1..20: mol_type = other DNA
agtgcctctattctgggtgc

SEQ ID NO: 32607 - DNA, 20 bp, synthetic construct
  misc_feature 1..20: note = chemically synthesized
  source 1..20: mol_type = other DNA
tattctgggtgctagcatac

SEQ ID NO: 32608 - DNA, 20 bp, synthetic construct
  misc_feature 1..20: note = chemically synthesized
  source 1..20: mol_type = other DNA
aacatttttgttccttttgt

SEQ ID NO: 32609 - DNA, 20 bp, synthetic construct
  misc_feature 1..20: note = chemically synthesized
  source 1..20: mol_type = other DNA
catttttgttccttttgtca

SEQ ID NO: 32610 - DNA, 20 bp, synthetic construct
  misc_feature 1..20: note = chemically synthesized
  source 1..20: mol_type = other DNA
atttttgttccttttgtcag

SEQ ID NO: 32611 - DNA, 20 bp, synthetic construct
  misc_feature 1..20: note = chemically synthesized
  source 1..20: mol_type = other DNA
tttgtcagaggcatttgaac

SEQ ID NO: 32612 - DNA, 20 bp, synthetic construct
  misc_feature 1..20: note = chemically synthesized
  source 1..20: mol_type = other DNA
tgtcagaggcatttgaacca

SEQ ID NO: 32613 - DNA, 20 bp, synthetic construct
  misc_feature 1..20: note = chemically synthesized
  source 1..20: mol_type = other DNA
cagagcaactccatcttaaa

SEQ ID NO: 32614 - DNA, 20 bp, synthetic construct
  misc_feature 1..20: note = chemically synthesized
  source 1..20: mol_type = other DNA
agagcaactccatcttaaat

SEQ ID NO: 32615 - DNA, 20 bp, synthetic construct
  misc_feature 1..20: note = chemically synthesized
  source 1..20: mol_type = other DNA
agcaactccatcttaaatag

SEQ ID NO: 32616 - DNA, 20 bp, synthetic construct
  misc_feature 1..20: note = chemically synthesized
  source 1..20: mol_type = other DNA
actccatcttaaataggagc

SEQ ID NO: 32617 - DNA, 20 bp, synthetic construct
  misc_feature 1..20: note = chemically synthesized
  source 1..20: mol_type = other DNA
ctccatcttaaataggagct

SEQ ID NO: 32618 - DNA, 20 bp, synthetic construct
  misc_feature 1..20: note = chemically synthesized
  source 1..20: mol_type = other DNA
aaataggagctgggtacaat

SEQ ID NO: 32619 - DNA, 20 bp, synthetic construct
  misc_feature 1..20: note = chemically synthesized
  source 1..20: mol_type = other DNA
aataggagctgggtacaata

SEQ ID NO: 32620 - DNA, 20 bp, synthetic construct
  misc_feature 1..20: note = chemically synthesized
  source 1..20: mol_type = other DNA
gagctgggtacaataaggct

SEQ ID NO: 32621 - DNA, 20 bp, synthetic construct
  misc_feature 1..20: note = chemically synthesized
  source 1..20: mol_type = other DNA
acaataaggctgagacctac

SEQ ID NO: 32622 - DNA, 20 bp, synthetic construct
  misc_feature 1..20: note = chemically synthesized
  source 1..20: mol_type = other DNA
caataaggctgagacctact

SEQ ID NO: 32623 - DNA, 20 bp, synthetic construct
  misc_feature 1..20: note = chemically synthesized
  source 1..20: mol_type = other DNA
gacctactgggctgtattcc

SEQ ID NO: 32624 - DNA, 20 bp, synthetic construct
  misc_feature 1..20: note = chemically synthesized
  source 1..20: mol_type = other DNA
tactgggctgtattcccaga

SEQ ID NO: 32625 - DNA, 20 bp, synthetic construct
  misc_feature 1..20: note = chemically synthesized
  source 1..20: mol_type = other DNA
gggctgtattcccagaaagt

SEQ ID NO: 32626 - DNA, 20 bp, synthetic construct
  misc_feature 1..20: note = chemically synthesized
  source 1..20: mol_type = other DNA
ggctgtattcccagaaagtt

SEQ ID NO: 32627 - DNA, 20 bp, synthetic construct
  misc_feature 1..20: note = chemically synthesized
  source 1..20: mol_type = other DNA
cccagaaagttaggcattct

SEQ ID NO: 32628 - DNA, 20 bp, synthetic construct
  misc_feature 1..20: note = chemically synthesized
  source 1..20: mol_type = other DNA
aagttaggcattctcagtca

SEQ ID NO: 32629 - DNA, 20 bp, synthetic construct
  misc_feature 1..20: note = chemically synthesized
  source 1..20: mol_type = other DNA
agttaggcattctcagtcac

SEQ ID NO: 32630 - DNA, 20 bp, synthetic construct
  misc_feature 1..20: note = chemically synthesized
  source 1..20: mol_type = other DNA
ggcattctcagtcacaggat

SEQ ID NO: 32631 - DNA, 20 bp, synthetic construct
  misc_feature 1..20: note = chemically synthesized
  source 1..20: mol_type = other DNA
tctcagtcacaggatgagat

SEQ ID NO: 32632 - DNA, 20 bp, synthetic construct
  misc_feature 1..20: note = chemically synthesized
  source 1..20: mol_type = other DNA
tcagtcacaggatgagataa

SEQ ID NO: 32633 - DNA, 20 bp, synthetic construct
  misc_feature 1..20: note = chemically synthesized
  source 1..20: mol_type = other DNA
cagtcacaggatgagataag

SEQ ID NO: 32634 - DNA, 20 bp, synthetic construct
  misc_feature 1..20: note = chemically synthesized
  source 1..20: mol_type = other DNA
cacaggatgagataagaggt

SEQ ID NO: 32635 - DNA, 20 bp, synthetic construct
  misc_feature 1..20: note = chemically synthesized
  source 1..20: mol_type = other DNA
atgagataagaggttggcac

SEQ ID NO: 32636 - DNA, 20 bp, synthetic construct
  misc_feature 1..20: note = chemically synthesized
  source 1..20: mol_type = other DNA
taagaggttggcacaagata

SEQ ID NO: 32637 - DNA, 20 bp, synthetic construct
  misc_feature 1..20: note = chemically synthesized
  source 1..20: mol_type = other DNA
aagaggttggcacaagatac

SEQ ID NO: 32638 - DNA, 20 bp, synthetic construct
  misc_feature 1..20: note = chemically synthesized
  source 1..20: mol_type = other DNA
ggcacaagatacaggtcata

SEQ ID NO: 32639 - DNA, 20 bp, synthetic construct
  misc_feature 1..20: note = chemically synthesized
  source 1..20: mol_type = other DNA
taaagaccttgctgaaaaaa

SEQ ID NO: 32640 - DNA, 20 bp, synthetic construct
  misc_feature 1..20: note = chemically synthesized
  source 1..20: mol_type = other DNA
cttgctgaaaaaacagtttg

SEQ ID NO: 32641 - DNA, 20 bp, synthetic construct
  misc_feature 1..20: note = chemically synthesized
  source 1..20: mol_type = other DNA
tgaaaaaacagtttgcagta

SEQ ID NO: 32642 - DNA, 20 bp, synthetic construct
  misc_feature 1..20: note = chemically synthesized
  source 1..20: mol_type = other DNA
aaaaacagtttgcagtaaag

SEQ ID NO: 32643 - DNA, 20 bp, synthetic construct
  misc_feature 1..20: note = chemically synthesized
  source 1..20: mol_type = other DNA
acagtttgcagtaaagaagc

SEQ ID NO: 32644 - DNA, 20 bp, synthetic construct
  misc_feature 1..20: note = chemically synthesized
  source 1..20: mol_type = other DNA
tggctgaaacccaccaaacc

SEQ ID NO: 32645 - DNA, 20 bp, synthetic construct
  misc_feature 1..20: note = chemically synthesized
  source 1..20: mol_type = other DNA
caccaaaccaagattgtgat

SEQ ID NO: 32646 - DNA, 20 bp, synthetic construct
  misc_feature 1..20: note = chemically synthesized
  source 1..20: mol_type = other DNA
ccaaaccaagattgtgatga

SEQ ID NO: 32647 - DNA, 20 bp, synthetic construct
  misc_feature 1..20: note = chemically synthesized
  source 1..20: mol_type = other DNA
attgtgatgagagtgacctc

SEQ ID NO: 32648 - DNA, 20 bp, synthetic construct
  misc_feature 1..20: note = chemically synthesized
  source 1..20: mol_type = other DNA
gtgatgagagtgacctctgg

SEQ ID NO: 32649 - DNA, 20 bp, synthetic construct
  misc_feature 1..20: note = chemically synthesized
  source 1..20: mol_type = other DNA
cctcactgctactctcccac

SEQ ID NO: 32650 - DNA, 20 bp, synthetic construct
  misc_feature 1..20: note = chemically synthesized
  source 1..20: mol_type = other DNA
ccaccagcactatgactgtt

SEQ ID NO: 32651 - DNA, 20 bp, synthetic construct
  misc_feature 1..20: note = chemically synthesized
  source 1..20: mol_type = other DNA
atgactgtttagaaatgcca

SEQ ID NO: 32652 - DNA, 20 bp, synthetic construct
  misc_feature 1..20: note = chemically synthesized
  source 1..20: mol_type = other DNA
tagaaatgccatggcaacat

SEQ ID NO: 32653 - DNA, 20 bp, synthetic construct
  misc_feature 1..20: note = chemically synthesized
  source 1..20: mol_type = other DNA
agaaatgccatggcaacatc

SEQ ID NO: 32654 - DNA, 20 bp, synthetic construct
  misc_feature 1..20: note = chemically synthesized
  source 1..20: mol_type = other DNA
aatgccatggcaacatcagg

SEQ ID NO: 32655 - DNA, 20 bp, synthetic construct
  misc_feature 1..20: note = chemically synthesized
  source 1..20: mol_type = other DNA
caacatcaggaagttacgct

SEQ ID NO: 32656 - DNA, 20 bp, synthetic construct
  misc_feature 1..20: note = chemically synthesized
  source 1..20: mol_type = other DNA
catcaggaagttacgctaag

SEQ ID NO: 32657 - DNA, 20 bp, synthetic construct
  misc_feature 1..20: note = chemically synthesized
  source 1..20: mol_type = other DNA
gttacgctaagcggtctgaa

SEQ ID NO: 32658 - DNA, 20 bp, synthetic construct
  misc_feature 1..20: note = chemically synthesized
  source 1..20: mol_type = other DNA
ttacgctaagcggtctgaaa

SEQ ID NO: 32659 - DNA, 20 bp, synthetic construct
  misc_feature 1..20: note = chemically synthesized
  source 1..20: mol_type = other DNA
tacgctaagcggtctgaaaa

SEQ ID NO: 32660 - DNA, 20 bp, synthetic construct
  misc_feature 1..20: note = chemically synthesized
  source 1..20: mol_type = other DNA
acgctaagcggtctgaaaag

SEQ ID NO: 32661 - DNA, 20 bp, synthetic construct
  misc_feature 1..20: note = chemically synthesized
  source 1..20: mol_type = other DNA
gctaagcggtctgaaaaggg

SEQ ID NO: 32662 - DNA, 20 bp, synthetic construct
  misc_feature 1..20: note = chemically synthesized
  source 1..20: mol_type = other DNA
ctaagcggtctgaaaagggg

SEQ ID NO: 32663 - DNA, 20 bp, synthetic construct
  misc_feature 1..20: note = chemically synthesized
  source 1..20: mol_type = other DNA
tgaataatccaccccttgtt

SEQ ID NO: 32664 - DNA, 20 bp, synthetic construct
  misc_feature 1..20: note = chemically synthesized
  source 1..20: mol_type = other DNA
tcaataaataaccataaaaa

SEQ ID NO: 32665 - DNA, 20 bp, synthetic construct
  misc_feature 1..20: note = chemically synthesized
  source 1..20: mol_type = other DNA
caataaataaccataaaaat

SEQ ID NO: 32666 - DNA, 20 bp, synthetic construct
  misc_feature 1..20: note = chemically synthesized
  source 1..20: mol_type = other DNA
taaccataaaaatgggcaac

SEQ ID NO: 32667 - DNA, 20 bp, synthetic construct
  misc_feature 1..20: note = chemically synthesized
  source 1..20: mol_type = other DNA
ccataaaaatgggcaaccag

SEQ ID NO: 32668 - DNA, 20 bp, synthetic construct
  misc_feature 1..20: note = chemically synthesized
  source 1..20: mol_type = other DNA
aatgggcaaccagcagtcct

SEQ ID NO: 32669 - DNA, 20 bp, synthetic construct
  misc_feature 1..20: note = chemically synthesized
  source 1..20: mol_type = other DNA
atgggcaaccagcagtcctc

SEQ ID NO: 32670 - DNA, 20 bp, synthetic construct
  misc_feature 1..20: note = chemically synthesized
  source 1..20: mol_type = other DNA
cctcaggactgttctgccta

SEQ ID NO: 32671 - DNA, 20 bp, synthetic construct
  misc_feature 1..20: note = chemically synthesized
  source 1..20: mol_type = other DNA
ctcaggactgttctgcctat

SEQ ID NO: 32672 - DNA, 20 bp, synthetic construct
  misc_feature 1..20: note = chemically synthesized
  source 1..20: mol_type = other DNA
tcaggactgttctgcctata

SEQ ID NO: 32673 - DNA, 20 bp, synthetic construct
  misc_feature 1..20: note = chemically synthesized
  source 1..20: mol_type = other DNA
ggactgttctgcctataggg

SEQ ID NO: 32674 - DNA, 20 bp, synthetic construct
  misc_feature 1..20: note = chemically synthesized
  source 1..20: mol_type = other DNA
cttgctttcacttttctgta

SEQ ID NO: 32675 - DNA, 20 bp, synthetic construct
  misc_feature 1..20: note = chemically synthesized
  source 1..20: mol_type = other DNA
atttgccccaaattctttct

SEQ ID NO: 32676 - DNA, 20 bp, synthetic construct
  misc_feature 1..20: note = chemically synthesized
  source 1..20: mol_type = other DNA
tttgccccaaattctttctt

SEQ ID NO: 32677 - DNA, 20 bp, synthetic construct
  misc_feature 1..20: note = chemically synthesized
  source 1..20: mol_type = other DNA
ctttcttgggcacgaaatcc

SEQ ID NO: 32678 - DNA, 20 bp, synthetic construct
  misc_feature 1..20: note = chemically synthesized
  source 1..20: mol_type = other DNA
gaaatccaagaaccctctct

SEQ ID NO: 32679 - DNA, 20 bp, synthetic construct
  misc_feature 1..20: note = chemically synthesized
  source 1..20: mol_type = other DNA
aaatccaagaaccctctctt

SEQ ID NO: 32680 - DNA, 20 bp, synthetic construct
  misc_feature 1..20: note = chemically synthesized
  source 1..20: mol_type = other DNA
aatccaagaaccctctctta

SEQ ID NO: 32681 - DNA, 20 bp, synthetic construct
  misc_feature 1..20: note = chemically synthesized
  source 1..20: mol_type = other DNA
aagaaccctctcttagggtc

SEQ ID NO: 32682 - DNA, 20 bp, synthetic construct
  misc_feature 1..20: note = chemically synthesized
  source 1..20: mol_type = other DNA
tctggattgtgactcctttc

SEQ ID NO: 32683 - DNA, 20 bp, synthetic construct
  misc_feature 1..20: note = chemically synthesized
  source 1..20: mol_type = other DNA
ctttcaaaatgattttattc

SEQ ID NO: 32684 - DNA, 20 bp, synthetic construct
  misc_feature 1..20: note = chemically synthesized
  source 1..20: mol_type = other DNA
aactaaaactctgtgtcact

SEQ ID NO: 32685 - DNA, 20 bp, synthetic construct
  misc_feature 1..20: note = chemically synthesized
  source 1..20: mol_type = other DNA
taaaactctgtgtcactaag

SEQ ID NO: 32686 - DNA, 20 bp, synthetic construct
  misc_feature 1..20: note = chemically synthesized
  source 1..20: mol_type = other DNA
gtgtcactaagtggctttgc

SEQ ID NO: 32687 - DNA, 20 bp, synthetic construct
  misc_feature 1..20: note = chemically synthesized
  source 1..20: mol_type = other DNA
tgtcactaagtggctttgca

SEQ ID NO: 32688 - DNA, 20 bp, synthetic construct
  misc_feature 1..20: note = chemically synthesized
  source 1..20: mol_type = other DNA
cactaagtggctttgcaagg

SEQ ID NO: 32689 - DNA, 20 bp, synthetic construct
  misc_feature 1..20: note = chemically synthesized
  source 1..20: mol_type = other DNA
caaggtggcatgtgtatgtg

SEQ ID NO: 32690 - DNA, 20 bp, synthetic construct
  misc_feature 1..20: note = chemically synthesized
  source 1..20: mol_type = other DNA
ggtggcatgtgtatgtgtgg

SEQ ID NO: 32691 - DNA, 20 bp, synthetic construct
  misc_feature 1..20: note = chemically synthesized
  source 1..20: mol_type = other DNA
tggcatgtgtatgtgtggca

SEQ ID NO: 32692 - DNA, 20 bp, synthetic construct
  misc_feature 1..20: note = chemically synthesized
  source 1..20: mol_type = other DNA
tggcagagcttctcttcctt

SEQ ID NO: 32693 - DNA, 20 bp, synthetic construct
  misc_feature 1..20: note = chemically synthesized
  source 1..20: mol_type = other DNA
tccttcagaaccacattcct

SEQ ID NO: 32694 - DNA, 20 bp, synthetic construct
  misc_feature 1..20: note = chemically synthesized
  source 1..20: mol_type = other DNA
gaaccacattcctgagactt

SEQ ID NO: 32695 - DNA, 20 bp, synthetic construct
  misc_feature 1..20: note = chemically synthesized
  source 1..20: mol_type = other DNA
accacattcctgagacttga

SEQ ID NO: 32696 - DNA, 20 bp, synthetic construct
  misc_feature 1..20: note = chemically synthesized
  source 1..20: mol_type = other DNA
gagacttgagagaatgtctt

SEQ ID NO: 32697 - DNA, 20 bp, synthetic construct
  misc_feature 1..20: note = chemically synthesized
  source 1..20: mol_type = other DNA
atgtctttggtctctgctgc

SEQ ID NO: 32698 - DNA, 20 bp, synthetic construct
  misc_feature 1..20: note = chemically synthesized
  source 1..20: mol_type = other DNA
gtctttggtctctgctgcta

SEQ ID NO: 32699 - DNA, 20 bp, synthetic construct
  misc_feature 1..20: note = chemically synthesized
  source 1..20: mol_type = other DNA
gctgctagagaattttatcc

SEQ ID NO: 32700 - DNA, 20 bp, synthetic construct
  misc_feature 1..20: note = chemically synthesized
  source 1..20: mol_type = other DNA
gagaattttatcctggttca

SEQ ID NO: 32701 - DNA, 20 bp, synthetic construct
  misc_feature 1..20: note = chemically synthesized
  source 1..20: mol_type = other DNA
ttatcctggttcatggactg

SEQ ID NO: 32702 - DNA, 20 bp, synthetic construct
  misc_feature 1..20: note = chemically synthesized
  source 1..20: mol_type = other DNA
tcctggttcatggactgcag

SEQ ID NO: 32703 - DNA, 20 bp, synthetic construct
  misc_feature 1..20: note = chemically synthesized
  source 1..20: mol_type = other DNA
cctggttcatggactgcagc

SEQ ID NO: 32704 - DNA, 20 bp, synthetic construct
  misc_feature 1..20: note = chemically synthesized
  source 1..20: mol_type = other DNA
tggttcatggactgcagcgg

SEQ ID NO: 32705 - DNA, 20 bp, synthetic construct
  misc_feature 1..20: note = chemically synthesized
  source 1..20: mol_type = other DNA
ggttcatggactgcagcggg

SEQ ID NO: 32706 - DNA, 20 bp, synthetic construct
  misc_feature 1..20: note = chemically synthesized
  source 1..20: mol_type = other DNA
tcatggactgcagcgggagg

SEQ ID NO: 32707 - DNA, 20 bp, synthetic construct
  misc_feature 1..20: note = chemically synthesized
  source 1..20: mol_type = other DNA
tggactgcagcgggaggtgg

SEQ ID NO: 32708 - DNA, 20 bp, synthetic construct
  misc_feature 1..20: note = chemically synthesized
  source 1..20: mol_type = other DNA
gtggaagcattttcaaactt

SEQ ID NO: 32709 - DNA, 20 bp, synthetic construct
  misc_feature 1..20: note = chemically synthesized
  source 1..20: mol_type = other DNA
tggaagcattttcaaacttt

SEQ ID NO: 32710 - DNA, 20 bp, synthetic construct
  misc_feature 1..20: note = chemically synthesized
  source 1..20: mol_type = other DNA
gaagcattttcaaactttgg

SEQ ID NO: 32711 - DNA, 20 bp, synthetic construct
  misc_feature 1..20: note = chemically synthesized
  source 1..20: mol_type = other DNA
aagcattttcaaactttggg

SEQ ID NO: 32712 - DNA, 20 bp, synthetic construct
  misc_feature 1..20: note = chemically synthesized
  source 1..20: mol_type = other DNA
agcattttcaaactttggga

SEQ ID NO: 32713 - DNA, 20 bp, synthetic construct
  misc_feature 1..20: note = chemically synthesized
  source 1..20: mol_type = other DNA
gcattttcaaactttgggag

SEQ ID NO: 32714 - DNA, 20 bp, synthetic construct
  misc_feature 1..20: note = chemically synthesized
  source 1..20: mol_type = other DNA
aaactttgggaggggaatgt

SEQ ID NO: 32715 - DNA, 20 bp, synthetic construct
  misc_feature 1..20: note = chemically synthesized
  source 1..20: mol_type = other DNA
aactttgggaggggaatgtt

SEQ ID NO: 32716 - DNA, 20 bp, synthetic construct
  misc_feature 1..20: note = chemically synthesized
  source 1..20: mol_type = other DNA
ctttgggaggggaatgttag

SEQ ID NO: 32717 - DNA, 20 bp, synthetic construct
  misc_feature 1..20: note = chemically synthesized
  source 1..20: mol_type = other DNA
ggggaatgttaggagaccat

SEQ ID NO: 32718 - DNA, 20 bp, synthetic construct
  misc_feature 1..20: note = chemically synthesized
  source 1..20: mol_type = other DNA
gggaatgttaggagaccatt

SEQ ID NO: 32719 - DNA, 20 bp, synthetic construct
  misc_feature 1..20: note = chemically synthesized
  source 1..20: mol_type = other DNA
agaccattaggcatgtgctc

SEQ ID NO: 32720 - DNA, 20 bp, synthetic construct
  misc_feature 1..20: note = chemically synthesized
  source 1..20: mol_type = other DNA
accattaggcatgtgctcaa

SEQ ID NO: 32721 - DNA, 20 bp, synthetic construct
  misc_feature 1..20: note = chemically synthesized
  source 1..20: mol_type = other DNA
tgtgctcaagagatgacacc

SEQ ID NO: 32722 - DNA, 20 bp, synthetic construct
  misc_feature 1..20: note = chemically synthesized
  source 1..20: mol_type = other DNA
tcaagagatgacaccaagtc

SEQ ID NO: 32723 - DNA, 20 bp, synthetic construct
  misc_feature 1..20: note = chemically synthesized
  source 1..20: mol_type = other DNA
caagagatgacaccaagtcc

SEQ ID NO: 32724 - DNA, 20 bp, synthetic construct
  misc_feature 1..20: note = chemically synthesized
  source 1..20: mol_type = other DNA
gagatgacaccaagtccagg

SEQ ID NO: 32725 - DNA, 20 bp, synthetic construct
  misc_feature 1..20: note = chemically synthesized
  source 1..20: mol_type = other DNA
agatgacaccaagtccaggc

SEQ ID NO: 32726 - DNA, 20 bp, synthetic construct
  misc_feature 1..20: note = chemically synthesized
  source 1..20: mol_type = other DNA
gatgacaccaagtccaggca

SEQ ID NO: 32727 - DNA, 20 bp, synthetic construct
  misc_feature 1..20: note = chemically synthesized
  source 1..20: mol_type = other DNA
gtgcctgttgtctcatgaat

SEQ ID NO: 32728 - DNA, 20 bp, synthetic construct
  misc_feature 1..20: note = chemically synthesized
  source 1..20: mol_type = other DNA
ctgttgtctcatgaatcaga

SEQ ID NO: 32729 - DNA, 20 bp, synthetic construct
  misc_feature 1..20: note = chemically synthesized
  source 1..20: mol_type = other DNA
cacccctgcctaaaccttcc

SEQ ID NO: 32730 - DNA, 20 bp, synthetic construct
  misc_feature 1..20: note = chemically synthesized
  source 1..20: mol_type = other DNA
cttcccagtcctgcattgca

SEQ ID NO: 32731 - DNA, 20 bp, synthetic construct
  misc_feature 1..20: note = chemically synthesized
  source 1..20: mol_type = other DNA
tcccagtcctgcattgcaca

SEQ ID NO: 32732 - DNA, 20 bp, synthetic construct
  misc_feature 1..20: note = chemically synthesized
  source 1..20: mol_type = other DNA
attgcacagagacccgtgct

SEQ ID NO: 32733 - DNA, 20 bp, synthetic construct
  misc_feature 1..20: note = chemically synthesized
  source 1..20: mol_type = other DNA
ttgcacagagacccgtgctt

SEQ ID NO: 32734 - DNA, 20 bp, synthetic construct
  misc_feature 1..20: note = chemically synthesized
  source 1..20: mol_type = other DNA
cagagacccgtgcttgggat

SEQ ID NO: 32735 - DNA, 20 bp, synthetic construct
  misc_feature 1..20: note = chemically synthesized
  source 1..20: mol_type = other DNA
cccgtgcttgggattggaat

SEQ ID NO: 32736 - DNA, 20 bp, synthetic construct
  misc_feature 1..20: note = chemically synthesized
  source 1..20: mol_type = other DNA
aaattttaatttttattcta

SEQ ID NO: 32737 - DNA, 20 bp, synthetic construct
  misc_feature 1..20: note = chemically synthesized
  source 1..20: mol_type = other DNA
ttctaaagactttgaatctc

SEQ ID NO: 32738 - DNA, 20 bp, synthetic construct
  misc_feature 1..20: note = chemically synthesized
  source 1..20: mol_type = other DNA
ctcatcttgcttttgccttc

SEQ ID NO: 32739 - DNA, 20 bp, synthetic construct
  misc_feature 1..20: note = chemically synthesized
  source 1..20: mol_type = other DNA
tcatcttgcttttgccttcc

SEQ ID NO: 32740 - DNA, 20 bp, synthetic construct
  misc_feature 1..20: note = chemically synthesized
  source 1..20: mol_type = other DNA
gcttttgccttccaggctgc

SEQ ID NO: 32741 - DNA, 20 bp, synthetic construct
  misc_feature 1..20: note = chemically synthesized
  source 1..20: mol_type = other DNA
ttttgccttccaggctgctg

SEQ ID NO: 32742 - DNA, 20 bp, synthetic construct
  misc_feature 1..20: note = chemically synthesized
  source 1..20: mol_type = other DNA
tccaggctgctggagtgcaa

SEQ ID NO: 32743 - DNA, 20 bp, synthetic construct
  misc_feature 1..20: note = chemically synthesized
  source 1..20: mol_type = other DNA
ggagtgcaatggcgcgatct

SEQ ID NO: 32744 - DNA, 20 bp, synthetic construct
  misc_feature 1..20: note = chemically synthesized
  source 1..20: mol_type = other DNA
tcactgcaacctccgcctcc

SEQ ID NO: 32745 - DNA, 20 bp, synthetic construct
  misc_feature 1..20: note = chemically synthesized
  source 1..20: mol_type = other DNA
cactgcaacctccgcctccc

SEQ ID NO: 32746 - DNA, 20 bp, synthetic construct
  misc_feature 1..20: note = chemically synthesized
  source 1..20: mol_type = other DNA
aacctccgcctcccaggttc

SEQ ID NO: 32747 - DNA, 20 bp, synthetic construct
  misc_feature 1..20: note = chemically synthesized
  source 1..20: mol_type = other DNA
ttcaagcgattctcctacct

SEQ ID NO: 32748 - DNA, 20 bp, synthetic construct
  misc_feature 1..20: note = chemically synthesized
  source 1..20: mol_type = other DNA
tcctacctcagcctcctgtg

SEQ ID NO: 32749 - DNA, 20 bp, synthetic construct
  misc_feature 1..20: note = chemically synthesized
  source 1..20: mol_type = other DNA
ctcctgtgtagctgcaatta

SEQ ID NO: 32750 - DNA, 20 bp, synthetic construct
  misc_feature 1..20: note = chemically synthesized
  source 1..20: mol_type = other DNA
tcctgtgtagctgcaattac

SEQ ID NO: 32751 - DNA, 20 bp, synthetic construct
  misc_feature 1..20: note = chemically synthesized
  source 1..20: mol_type = other DNA
caattacaggcatctgccac

SEQ ID NO: 32752 - DNA, 20 bp, synthetic construct
  misc_feature 1..20: note = chemically synthesized
  source 1..20: mol_type = other DNA
aattacaggcatctgccacc

SEQ ID NO: 32753 - DNA, 20 bp, synthetic construct
  misc_feature 1..20: note = chemically synthesized
  source 1..20: mol_type = other DNA
taatttttttgtatttttat

SEQ ID NO: 32754 - DNA, 20 bp, synthetic construct
  misc_feature 1..20: note = chemically synthesized
  source 1..20: mol_type = other DNA
atttttttgtatttttatta

SEQ ID NO: 32755 - DNA, 20 bp, synthetic construct
  misc_feature 1..20: note = chemically synthesized
  source 1..20: mol_type = other DNA
ttttgtatttttattagaga

SEQ ID NO: 32756 - DNA, 20 bp, synthetic construct
  misc_feature 1..20: note = chemically synthesized
  source 1..20: mol_type = other DNA
tttgtatttttattagagac

SEQ ID NO: 32757 - DNA, 20 bp, synthetic construct
  misc_feature 1..20: note = chemically synthesized
  source 1..20: mol_type = other DNA
ttgtatttttattagagaca

SEQ ID NO: 32758 - DNA, 20 bp, synthetic construct
  misc_feature 1..20: note = chemically synthesized
  source 1..20: mol_type = other DNA
gagacagggtttcaccatgt

SEQ ID NO: 32759 - DNA, 20 bp, synthetic construct
  misc_feature 1..20: note = chemically synthesized
  source 1..20: mol_type = other DNA
cagggtttcaccatgttggt

SEQ ID NO: 32760 - DNA, 20 bp, synthetic construct
  misc_feature 1..20: note = chemically synthesized
  source 1..20: mol_type = other DNA
agggtttcaccatgttggtc

SEQ ID NO: 32761 - DNA, 20 bp, synthetic construct
  misc_feature 1..20: note = chemically synthesized
  source 1..20: mol_type = other DNA
tttcaccatgttggtcaggc

SEQ ID NO: 32762 - DNA, 20 bp, synthetic construct
  misc_feature 1..20: note = chemically synthesized
  source 1..20: mol_type = other DNA
tggtctcgaactcttgccct

SEQ ID NO: 32763 - DNA, 20 bp, synthetic construct
  misc_feature 1..20: note = chemically synthesized
  source 1..20: mol_type = other DNA
ggtctcgaactcttgccctc

SEQ ID NO: 32764 - DNA, 20 bp, synthetic construct
  misc_feature 1..20: note = chemically synthesized
  source 1..20: mol_type = other DNA
ctcaggtgatcctcctgcct

SEQ ID NO: 32765 - DNA, 20 bp, synthetic construct
  misc_feature 1..20: note = chemically synthesized
  source 1..20: mol_type = other DNA
cctcctgcctcagccaccca

SEQ ID NO: 32766 - DNA, 20 bp, synthetic construct
  misc_feature 1..20: note = chemically synthesized
  source 1..20: mol_type = other DNA
gcctcagccacccaaagtgc

SEQ ID NO: 32767 - DNA, 20 bp, synthetic construct
  misc_feature 1..20: note = chemically synthesized
  source 1..20: mol_type = other DNA
cctcagccacccaaagtgct

SEQ ID NO: 32768 - DNA, 20 bp, synthetic construct
  misc_feature 1..20: note = chemically synthesized
  source 1..20: mol_type = other DNA
cacccaaagtgctgggatta

SEQ ID NO: 32769 - DNA, 20 bp, synthetic construct
  misc_feature 1..20: note = chemically synthesized
  source 1..20: mol_type = other DNA
acccaaagtgctgggattac

SEQ ID NO: 32770 - DNA, 20 bp, synthetic construct
  misc_feature 1..20: note = chemically synthesized
  source 1..20: mol_type = other DNA
agtgctgggattacaggcat

SEQ ID NO: 32771 - DNA, 20 bp, synthetic construct
  misc_feature 1..20: note = chemically synthesized
  source 1..20: mol_type = other DNA
acaggcatgagtctgtaatg

SEQ ID NO: 32772 - DNA, 20 bp, synthetic construct
  misc_feature 1..20: note = chemically synthesized
  source 1..20: mol_type = other DNA
taatgtagccttttctttaa

SEQ ID NO: 32773 - DNA, 20 bp, synthetic construct
  misc_feature 1..20: note = chemically synthesized
  source 1..20: mol_type = other DNA
aatgtagccttttctttaac

SEQ ID NO: 32774 - DNA, 20 bp, synthetic construct
  misc_feature 1..20: note = chemically synthesized
  source 1..20: mol_type = other DNA
tttctttaacaggctaccca

SEQ ID NO: 32775 - DNA, 20 bp, synthetic construct
  misc_feature 1..20: note = chemically synthesized
  source 1..20: mol_type = other DNA
tctttaacaggctacccaca

SEQ ID NO: 32776 - DNA, 20 bp, synthetic construct
  misc_feature 1..20: note = chemically synthesized
  source 1..20: mol_type = other DNA
ctttaacaggctacccacag

SEQ ID NO: 32777 - DNA, 20 bp, synthetic construct
  misc_feature 1..20: note = chemically synthesized
  source 1..20: mol_type = other DNA
ccacagaggaaccttccctt

SEQ ID NO: 32778 - DNA, 20 bp, synthetic construct
  misc_feature 1..20: note = chemically synthesized
  source 1..20: mol_type = other DNA
ccttcccttgagctcctttt

SEQ ID NO: 32779 - DNA, 20 bp, synthetic construct
  misc_feature 1..20: note = chemically synthesized
  source 1..20: mol_type = other DNA
gattcttccttctgtttctc

SEQ ID NO: 32780 - DNA, 20 bp, synthetic construct
  misc_feature 1..20: note = chemically synthesized
  source 1..20: mol_type = other DNA
tcatccttaacttcctactt

SEQ ID NO: 32781 - DNA, 20 bp, synthetic construct
  misc_feature 1..20: note = chemically synthesized
  source 1..20: mol_type = other DNA
catccttaacttcctactta

SEQ ID NO: 32782 - DNA, 20 bp, synthetic construct
  misc_feature 1..20: note = chemically synthesized
  source 1..20: mol_type = other DNA
ctgtttcttattttgcccac

SEQ ID NO: 32783 - DNA, 20 bp, synthetic construct
  misc_feature 1..20: note = chemically synthesized
  source 1..20: mol_type = other DNA
tgtttcttattttgcccact

SEQ ID NO: 32784 - DNA, 20 bp, synthetic construct
  misc_feature 1..20: note = chemically synthesized
  source 1..20: mol_type = other DNA
tgcccactgggttcacctct

SEQ ID NO: 32785 - DNA, 20 bp, synthetic construct
  misc_feature 1..20: note = chemically synthesized
  source 1..20: mol_type = other DNA
acctctaagtcacacacaac

SEQ ID NO: 32786 - DNA, 20 bp, synthetic construct
  misc_feature 1..20: note = chemically synthesized
  source 1..20: mol_type = other DNA
taagtcacacacaactggac

SEQ ID NO: 32787 - DNA, 20 bp, synthetic construct
  misc_feature 1..20: note = chemically synthesized
  source 1..20: mol_type = other DNA
tcacacacaactggacaagt

SEQ ID NO: 32788 - DNA, 20 bp, synthetic construct
  misc_feature 1..20: note = chemically synthesized
  source 1..20: mol_type = other DNA
ggacaagtaagcatacccct

SEQ ID NO: 32789 - DNA, 20 bp, synthetic construct
  misc_feature 1..20: note = chemically synthesized
  source 1..20: mol_type = other DNA
ctcagcaactcttccattaa

SEQ ID NO: 32790 - DNA, 20 bp, synthetic construct
  misc_feature 1..20: note = chemically synthesized
  source 1..20: mol_type = other DNA
ccccaaacatgctgattacc

SEQ ID NO: 32791 - DNA, 20 bp, synthetic construct
  misc_feature 1..20: note = chemically synthesized
  source 1..20: mol_type = other DNA
ctgattacctggctgctcca

SEQ ID NO: 32792 - DNA, 20 bp, synthetic construct
  misc_feature 1..20: note = chemically synthesized
  source 1..20: mol_type = other DNA
tgattacctggctgctccat

SEQ ID NO: 32793 - DNA, 20 bp, synthetic construct
  misc_feature 1..20: note = chemically synthesized
  source 1..20: mol_type = other DNA
gattacctggctgctccata

SEQ ID NO: 32794 - DNA, 20 bp, synthetic construct
  misc_feature 1..20: note = chemically synthesized
  source 1..20: mol_type = other DNA
tacctggctgctccataggg

SEQ ID NO: 32795 - DNA, 20 bp, synthetic construct
  misc_feature 1..20: note = chemically synthesized
  source 1..20: mol_type = other DNA
tggctgctccatagggtggt

SEQ ID NO: 32796 - DNA, 20 bp, synthetic construct
  misc_feature 1..20: note = chemically synthesized
  source 1..20: mol_type = other DNA
tgctccatagggtggttggt

SEQ ID NO: 32797 - DNA, 20 bp, synthetic construct
  misc_feature 1..20: note = chemically synthesized
  source 1..20: mol_type = other DNA
tagggtggttggttggtctt

SEQ ID NO: 32798 - DNA, 20 bp, synthetic construct
  misc_feature 1..20: note = chemically synthesized
  source 1..20: mol_type = other DNA
gttggtcttaagtctcccac

SEQ ID NO: 32799 - DNA, 20 bp, synthetic construct
  misc_feature 1..20: note = chemically synthesized
  source 1..20: mol_type = other DNA
gtcttaagtctcccactagc

SEQ ID NO: 32800 - DNA, 20 bp, synthetic construct
  misc_feature 1..20: note = chemically synthesized
  source 1..20: mol_type = other DNA
gtctcccactagccagcacc

SEQ ID NO: 32801 - DNA, 20 bp, synthetic construct
  misc_feature 1..20: note = chemically synthesized
  source 1..20: mol_type = other DNA
tcccactagccagcacctag

SEQ ID NO: 32802 - DNA, 20 bp, synthetic construct
  misc_feature 1..20: note = chemically synthesized
  source 1..20: mol_type = other DNA
gccagcacctagcagttctt

SEQ ID NO: 32803 - DNA, 20 bp, synthetic construct
  misc_feature 1..20: note = chemically synthesized
  source 1..20: mol_type = other DNA
tagcagttcttcagtttgtg

SEQ ID NO: 32804 - DNA, 20 bp, synthetic construct
  misc_feature 1..20: note = chemically synthesized
  source 1..20: mol_type = other DNA
tcttcagtttgtgtggttct

SEQ ID NO: 32805 - DNA, 20 bp, synthetic construct
  misc_feature 1..20: note = chemically synthesized
  source 1..20: mol_type = other DNA
gtttgtgtggttctcagtgc

SEQ ID NO: 32806 - DNA, 20 bp, synthetic construct
  misc_feature 1..20: note = chemically synthesized
  source 1..20: mol_type = other DNA
tcagtgctggtgatcatgct

SEQ ID NO: 32807 - DNA, 20 bp, synthetic construct
  misc_feature 1..20: note = chemically synthesized
  source 1..20: mol_type = other DNA
ctgcccccttcatgcctctc

SEQ ID NO: 32808 - DNA, 20 bp, synthetic construct
  misc_feature 1..20: note = chemically synthesized
  source 1..20: mol_type = other DNA
ccccttcatgcctctctggt

SEQ ID NO: 32809 - DNA, 20 bp, synthetic construct
  misc_feature 1..20: note = chemically synthesized
  source 1..20: mol_type = other DNA
ttcatgcctctctggtcagt

SEQ ID NO: 32810 - DNA, 20 bp, synthetic construct
  misc_feature 1..20: note = chemically synthesized
  source 1..20: mol_type = other DNA
ctctggtcagtcagaccctt

SEQ ID NO: 32811 - DNA, 20 bp, synthetic construct
  misc_feature 1..20: note = chemically synthesized
  source 1..20: mol_type = other DNA
agtcagacccttcagaaccc

SEQ ID NO: 32812 - DNA, 20 bp, synthetic construct
  misc_feature 1..20: note = chemically synthesized
  source 1..20: mol_type = other DNA
tcagacccttcagaacccaa

SEQ ID NO: 32813 - DNA, 20 bp, synthetic construct
  misc_feature 1..20: note = chemically synthesized
  source 1..20: mol_type = other DNA
cagacccttcagaacccaag

SEQ ID NO: 32814 - DNA, 20 bp, synthetic construct
  misc_feature 1..20: note = chemically synthesized
  source 1..20: mol_type = other DNA
cccttcagaacccaagaggt

SEQ ID NO: 32815 - DNA, 20 bp, synthetic construct
  misc_feature 1..20: note = chemically synthesized
  source 1..20: mol_type = other DNA
ttcagaacccaagaggtaag

SEQ ID NO: 32816 - DNA, 20 bp, synthetic construct
  misc_feature 1..20: note = chemically synthesized
  source 1..20: mol_type = other DNA
cagaacccaagaggtaagca

SEQ ID NO: 32817 - DNA, 20 bp, synthetic construct
  misc_feature 1..20: note = chemically synthesized
  source 1..20: mol_type = other DNA
gaggtaagcagagttcctct

SEQ ID NO: 32818 - DNA, 20 bp, synthetic construct
  misc_feature 1..20: note = chemically synthesized
  source 1..20: mol_type = other DNA
aagcagagttcctctaagaa

SEQ ID NO: 32819 - DNA, 20 bp, synthetic construct
  misc_feature 1..20: note = chemically synthesized
  source 1..20: mol_type = other DNA
agagttcctctaagaatggt

SEQ ID NO: 32820 - DNA, 20 bp, synthetic construct
  misc_feature 1..20: note = chemically synthesized
  source 1..20: mol_type = other DNA
ttaaacttcatcctgtcatc

SEQ ID NO: 32821 - DNA, 20 bp, synthetic construct
  misc_feature 1..20: note = chemically synthesized
  source 1..20: mol_type = other DNA
acttcatcctgtcatcaagc

SEQ ID NO: 32822 - DNA, 20 bp, synthetic construct
  misc_feature 1..20: note = chemically synthesized
  source 1..20: mol_type = other DNA
tcatcaagccagcacatact

SEQ ID NO: 32823 - DNA, 20 bp, synthetic construct
  misc_feature 1..20: note = chemically synthesized
  source 1..20: mol_type = other DNA
actaagcatctataatgtgc

SEQ ID NO: 32824 - DNA, 20 bp, synthetic construct
  misc_feature 1..20: note = chemically synthesized
  source 1..20: mol_type = other DNA
ctataatgtgctagacaatg

SEQ ID NO: 32825 - DNA, 20 bp, synthetic construct
  misc_feature 1..20: note = chemically synthesized
  source 1..20: mol_type = other DNA
tataatgtgctagacaatgt

SEQ ID NO: 32826 - DNA, 20 bp, synthetic construct
  misc_feature 1..20: note = chemically synthesized
  source 1..20: mol_type = other DNA
gtgctagacaatgtgggtaa

SEQ ID NO: 32827 - DNA, 20 bp, synthetic construct
  misc_feature 1..20: note = chemically synthesized
  source 1..20: mol_type = other DNA
gctagacaatgtgggtaatg

SEQ ID NO: 32828 - DNA, 20 bp, synthetic construct
  misc_feature 1..20: note = chemically synthesized
  source 1..20: mol_type = other DNA
ctagacaatgtgggtaatgg

SEQ ID NO: 32829 - DNA, 20 bp, synthetic construct
  misc_feature 1..20: note = chemically synthesized
  source 1..20: mol_type = other DNA
tgggtaatggaggtgatgcc

SEQ ID NO: 32830 - DNA, 20 bp, synthetic construct
  misc_feature 1..20: note = chemically synthesized
  source 1..20: mol_type = other DNA
attataatatctgccctcaa

SEQ ID NO: 32831 - DNA, 20 bp, synthetic construct
  misc_feature 1..20: note = chemically synthesized
  source 1..20: mol_type = other DNA
atctattttttaaataatta

SEQ ID NO: 32832 - DNA, 20 bp, synthetic construct
  misc_feature 1..20: note = chemically synthesized
  source 1..20: mol_type = other DNA
tctattttttaaataattac

SEQ ID NO: 32833 - DNA, 20 bp, synthetic construct
  misc_feature 1..20: note = chemically synthesized
  source 1..20: mol_type = other DNA
acaggacaatttaaatgtat

SEQ ID NO: 32834 - DNA, 20 bp, synthetic construct
  misc_feature 1..20: note = chemically synthesized
  source 1..20: mol_type = other DNA
acaatttaaatgtatcagtt

SEQ ID NO: 32835 - DNA, 20 bp, synthetic construct
  misc_feature 1..20: note = chemically synthesized
  source 1..20: mol_type = other DNA
caatttaaatgtatcagttt

SEQ ID NO: 32836 - DNA, 20 bp, synthetic construct
  misc_feature 1..20: note = chemically synthesized
  source 1..20: mol_type = other DNA
cagtttgggttgaataaaat

SEQ ID NO: 32837 - DNA, 20 bp, synthetic construct
  misc_feature 1..20: note = chemically synthesized
  source 1..20: mol_type = other DNA
agtttgggttgaataaaatc

SEQ ID NO: 32838 - DNA, 20 bp, synthetic construct
  misc_feature 1..20: note = chemically synthesized
  source 1..20: mol_type = other DNA
gtttgggttgaataaaatca

SEQ ID NO: 32839 - DNA, 20 bp, synthetic construct
  misc_feature 1..20: note = chemically synthesized
  source 1..20: mol_type = other DNA
aaatcagggatgtttctcat

SEQ ID NO: 32840 - DNA, 20 bp, synthetic construct
  misc_feature 1..20: note = chemically synthesized
  source 1..20: mol_type = other DNA
aatcagggatgtttctcatt

SEQ ID NO: 32841 - DNA, 20 bp, synthetic construct
  misc_feature 1..20: note = chemically synthesized
  source 1..20: mol_type = other DNA
atcagggatgtttctcatta

SEQ ID NO: 32842 - DNA, 20 bp, synthetic construct
  misc_feature 1..20: note = chemically synthesized
  source 1..20: mol_type = other DNA
cattagggcctcaacacatt

SEQ ID NO: 32843 - DNA, 20 bp, synthetic construct
  misc_feature 1..20: note = chemically synthesized
  source 1..20: mol_type = other DNA
ttagggcctcaacacatttg

SEQ ID NO: 32844 - DNA, 20 bp, synthetic construct
  misc_feature 1..20: note = chemically synthesized
  source 1..20: mol_type = other DNA
tagggcctcaacacatttgg

SEQ ID NO: 32845 - DNA, 20 bp, synthetic construct
  misc_feature 1..20: note = chemically synthesized
  source 1..20: mol_type = other DNA
aacacatttggaggtgtgtt

SEQ ID NO: 32846 - DNA, 20 bp, synthetic construct
  misc_feature 1..20: note = chemically synthesized
  source 1..20: mol_type = other DNA
catttggaggtgtgttaaga

SEQ ID NO: 32847 - DNA, 20 bp, synthetic construct
  misc_feature 1..20: note = chemically synthesized
  source 1..20: mol_type = other DNA
ttggaggtgtgttaagacag

SEQ ID NO: 32848 - DNA, 20 bp, synthetic construct
  misc_feature 1..20: note = chemically synthesized
  source 1..20: mol_type = other DNA
aggtgtgttaagacagtagt

SEQ ID NO: 32849 - DNA, 20 bp, synthetic construct
  misc_feature 1..20: note = chemically synthesized
  source 1..20: mol_type = other DNA
acagtagtcagattcacacc

SEQ ID NO: 32850 - DNA, 20 bp, synthetic construct
  misc_feature 1..20: note = chemically synthesized
  source 1..20: mol_type = other DNA
agtagtcagattcacaccaa

SEQ ID NO: 32851 - DNA, 20 bp, synthetic construct
  misc_feature 1..20: note = chemically synthesized
  source 1..20: mol_type = other DNA
tcacaccaagagccctgtca

SEQ ID NO: 32852 - DNA, 20 bp, synthetic construct
  misc_feature 1..20: note = chemically synthesized
  source 1..20: mol_type = other DNA
atgctttgtgaaaaaacttc

SEQ ID NO: 32853 - DNA, 20 bp, synthetic construct
  misc_feature 1..20: note = chemically synthesized
  source 1..20: mol_type = other DNA
tgctttgtgaaaaaacttcg

SEQ ID NO: 32854 - DNA, 20 bp, synthetic construct
  misc_feature 1..20: note = chemically synthesized
  source 1..20: mol_type = other DNA
tttgtgaaaaaacttcgagg

SEQ ID NO: 32855 - DNA, 20 bp, synthetic construct
  misc_feature 1..20: note = chemically synthesized
  source 1..20: mol_type = other DNA
gaaaaaacttcgaggtagta

SEQ ID NO: 32856 - DNA, 20 bp, synthetic construct
  misc_feature 1..20: note = chemically synthesized
  source 1..20: mol_type = other DNA
gccatatcctatcctgtgca

SEQ ID NO: 32857 - DNA, 20 bp, synthetic construct
  misc_feature 1..20: note = chemically synthesized
  source 1..20: mol_type = other DNA
tatcctatcctgtgcataga

SEQ ID NO: 32858 - DNA, 20 bp, synthetic construct
  misc_feature 1..20: note = chemically synthesized
  source 1..20: mol_type = other DNA
atcctatcctgtgcatagac

SEQ ID NO: 32859 - DNA, 20 bp, synthetic construct
  misc_feature 1..20: note = chemically synthesized
  source 1..20: mol_type = other DNA
cctgtgcatagacaggaaaa

SEQ ID NO: 32860 - DNA, 20 bp, synthetic construct
  misc_feature 1..20: note = chemically synthesized
  source 1..20: mol_type = other DNA
acaggaaaatggttgctgac

SEQ ID NO: 32861 - DNA, 20 bp, synthetic construct
  misc_feature 1..20: note = chemically synthesized
  source 1..20: mol_type = other DNA
ggaaaatggttgctgactgg

SEQ ID NO: 32862 - DNA, 20 bp, synthetic construct
  misc_feature 1..20: note = chemically synthesized
  source 1..20: mol_type = other DNA
atggttgctgactggcagac

SEQ ID NO: 32863 - DNA, 20 bp, synthetic construct
  misc_feature 1..20: note = chemically synthesized
  source 1..20: mol_type = other DNA
gctgactggcagaccagaat

SEQ ID NO: 32864 - DNA, 20 bp, synthetic construct
  misc_feature 1..20: note = chemically synthesized
  source 1..20: mol_type = other DNA
ctgactggcagaccagaatt

SEQ ID NO: 32865 - DNA, 20 bp, synthetic construct
  misc_feature 1..20: note = chemically synthesized
  source 1..20: mol_type = other DNA
catctaaatgcatctctcca

SEQ ID NO: 32866 - DNA, 20 bp, synthetic construct
  misc_feature 1..20: note = chemically synthesized
  source 1..20: mol_type = other DNA
tctctccacagcgatttcta

SEQ ID NO: 32867 - DNA, 20 bp, synthetic construct
  misc_feature 1..20: note = chemically synthesized
  source 1..20: mol_type = other DNA
cttgtctctcatcccatatt

SEQ ID NO: 32868 - DNA, 20 bp, synthetic construct
  misc_feature 1..20: note = chemically synthesized
  source 1..20: mol_type = other DNA
ttggttacttgttgccatgc

SEQ ID NO: 32869 - DNA, 20 bp, synthetic construct
  misc_feature 1..20: note = chemically synthesized
  source 1..20: mol_type = other DNA
tggttacttgttgccatgcc

SEQ ID NO: 32870 - DNA, 20 bp, synthetic construct
  misc_feature 1..20: note = chemically synthesized
  source 1..20: mol_type = other DNA
acttgttgccatgccgggac

SEQ ID NO: 32871 - DNA, 20 bp, synthetic construct
  misc_feature 1..20: note = chemically synthesized
  source 1..20: mol_type = other DNA
tgccgggaccagccatgcat

SEQ ID NO: 32872 - DNA, 20 bp, synthetic construct
  misc_feature 1..20: note = chemically synthesized
  source 1..20: mol_type = other DNA
gccatgcattggtttgcctt

SEQ ID NO: 32873 - DNA, 20 bp, synthetic construct
  misc_feature 1..20: note = chemically synthesized
  source 1..20: mol_type = other DNA
cattggtttgcctttggcat

SEQ ID NO: 32874 - DNA, 20 bp, synthetic construct
  misc_feature 1..20: note = chemically synthesized
  source 1..20: mol_type = other DNA
ctctatacccatgttttcca

SEQ ID NO: 32875 - DNA, 20 bp, synthetic construct
  misc_feature 1..20: note = chemically synthesized
  source 1..20: mol_type = other DNA
atacccatgttttccacagc

SEQ ID NO: 32876 - DNA, 20 bp, synthetic construct
  misc_feature 1..20: note = chemically synthesized
  source 1..20: mol_type = other DNA
tttccacagctggcaaacac

SEQ ID NO: 32877 - DNA, 20 bp, synthetic construct
  misc_feature 1..20: note = chemically synthesized
  source 1..20: mol_type = other DNA
ccacagctggcaaacaccag

SEQ ID NO: 32878 - DNA, 20 bp, synthetic construct
  misc_feature 1..20: note = chemically synthesized
  source 1..20: mol_type = other DNA
aataacactgttctcaccac

SEQ ID NO: 32879 - DNA, 20 bp, synthetic construct
  misc_feature 1..20: note = chemically synthesized
  source 1..20: mol_type = other DNA
gttctcaccaccagcccttc

SEQ ID NO: 32880 - DNA, 20 bp, synthetic construct
  misc_feature 1..20: note = chemically synthesized
  source 1..20: mol_type = other DNA
caccagcccttctggttcac

SEQ ID NO: 32881 - DNA, 20 bp, synthetic construct
  misc_feature 1..20: note = chemically synthesized
  source 1..20: mol_type = other DNA
tggttcactagatgtttcca

SEQ ID NO: 32882 - DNA, 20 bp, synthetic construct
  misc_feature 1..20: note = chemically synthesized
  source 1..20: mol_type = other DNA
gttcactagatgtttccatg

SEQ ID NO: 32883 - DNA, 20 bp, synthetic construct
  misc_feature 1..20: note = chemically synthesized
  source 1..20: mol_type = other DNA
tccatggagtcctgatataa

SEQ ID NO: 32884 - DNA, 20 bp, synthetic construct
  misc_feature 1..20: note = chemically synthesized
  source 1..20: mol_type = other DNA
tagacaacttattttaaaca

SEQ ID NO: 32885 - DNA, 20 bp, synthetic construct
  misc_feature 1..20: note = chemically synthesized
  source 1..20: mol_type = other DNA
cttattttaaacacagttgc

SEQ ID NO: 32886 - DNA, 20 bp, synthetic construct
  misc_feature 1..20: note = chemically synthesized
  source 1..20: mol_type = other DNA
ccctacactctaaatgtcta

SEQ ID NO: 32887 - DNA, 20 bp, synthetic construct
  misc_feature 1..20: note = chemically synthesized
  source 1..20: mol_type = other DNA
taaatgtctacagaactcac

SEQ ID NO: 32888 - DNA, 20 bp, synthetic construct
  misc_feature 1..20: note = chemically synthesized
  source 1..20: mol_type = other DNA
tctacagaactcaccagaca

SEQ ID NO: 32889 - DNA, 20 bp, synthetic construct
  misc_feature 1..20: note = chemically synthesized
  source 1..20: mol_type = other DNA
acagaactcaccagacaaag

SEQ ID NO: 32890 - DNA, 20 bp, synthetic construct
  misc_feature 1..20: note = chemically synthesized
  source 1..20: mol_type = other DNA
actcaccagacaaagaagaa

SEQ ID NO: 32891 - DNA, 20 bp, synthetic construct
  misc_feature 1..20: note = chemically synthesized
  source 1..20: mol_type = other DNA
gacaaagaagaaaagttatt

SEQ ID NO: 32892 - DNA, 20 bp, synthetic construct
  misc_feature 1..20: note = chemically synthesized
  source 1..20: mol_type = other DNA
aaagaagaaaagttatttag

SEQ ID NO: 32893 - DNA, 20 bp, synthetic construct
  misc_feature 1..20: note = chemically synthesized
  source 1..20: mol_type = other DNA
agttatttagcagttgtgat

SEQ ID NO: 32894 - DNA, 20 bp, synthetic construct
  misc_feature 1..20: note = chemically synthesized
  source 1..20: mol_type = other DNA
ataagctaccacttgaattc

SEQ ID NO: 32895 - DNA, 20 bp, synthetic construct
  misc_feature 1..20: note = chemically synthesized
  source 1..20: mol_type = other DNA
taagctaccacttgaattca

SEQ ID NO: 32896 - DNA, 20 bp, synthetic construct
  misc_feature 1..20: note = chemically synthesized
  source 1..20: mol_type = other DNA
cttgaattcaaggttattac

SEQ ID NO: 32897 - DNA, 20 bp, synthetic construct
  misc_feature 1..20: note = chemically synthesized
  source 1..20: mol_type = other DNA
agcatgattattgacacatt

SEQ ID NO: 32898 - DNA, 20 bp, synthetic construct
  misc_feature 1..20: note = chemically synthesized
  source 1..20: mol_type = other DNA
ttgacacatttggttttatt

SEQ ID NO: 32899 - DNA, 20 bp, synthetic construct
  misc_feature 1..20: note = chemically synthesized
  source 1..20: mol_type = other DNA
tgagtgtcccttatttgccc

SEQ ID NO: 32900 - DNA, 20 bp, synthetic construct
  misc_feature 1..20: note = chemically synthesized
  source 1..20: mol_type = other DNA
ccaagattcattgctgtgac

SEQ ID NO: 32901 - DNA, 20 bp, synthetic construct
  misc_feature 1..20: note = chemically synthesized
  source 1..20: mol_type = other DNA
attgctgtgacaagaatgac

SEQ ID NO: 32902 - DNA, 20 bp, synthetic construct
  misc_feature 1..20: note = chemically synthesized
  source 1..20: mol_type = other DNA
gctgtgacaagaatgacaag

SEQ ID NO: 32903 - DNA, 20 bp, synthetic construct
  misc_feature 1..20: note = chemically synthesized
  source 1..20: mol_type = other DNA
gtgacaagaatgacaagaag

SEQ ID NO: 32904 - DNA, 20 bp, synthetic construct
  misc_feature 1..20: note = chemically synthesized
  source 1..20: mol_type = other DNA
acaagaatgacaagaagaag

SEQ ID NO: 32905 - DNA, 20 bp, synthetic construct
  misc_feature 1..20: note = chemically synthesized
  source 1..20: mol_type = other DNA
acaagaagaagcagttactt

SEQ ID NO: 32906 - DNA, 20 bp, synthetic construct
  misc_feature 1..20: note = chemically synthesized
  source 1..20: mol_type = other DNA
ttacttgagaaatccccttg

SEQ ID NO: 32907 - DNA, 20 bp, synthetic construct
  misc_feature 1..20: note = chemically synthesized
  source 1..20: mol_type = other DNA
ttctccttgtgtatccacca

SEQ ID NO: 32908 - DNA, 20 bp, synthetic construct
  misc_feature 1..20: note = chemically synthesized
  source 1..20: mol_type = other DNA
tccttgtgtatccaccatag

SEQ ID NO: 32909 - DNA, 20 bp, synthetic construct
  misc_feature 1..20: note = chemically synthesized
  source 1..20: mol_type = other DNA
tttaataaaactatattaaa

SEQ ID NO: 32910 - DNA, 20 bp, synthetic construct
  misc_feature 1..20: note = chemically synthesized
  source 1..20: mol_type = other DNA
attaaatggaaattcaccaa

SEQ ID NO: 32911 - DNA, 20 bp, synthetic construct
  misc_feature 1..20: note = chemically synthesized
  source 1..20: mol_type = other DNA
gaaattcaccaatagaaact

SEQ ID NO: 32912 - DNA, 20 bp, synthetic construct
  misc_feature 1..20: note = chemically synthesized
  source 1..20: mol_type = other DNA
aaattcaccaatagaaactt

SEQ ID NO: 32913 - DNA, 20 bp, synthetic construct
  misc_feature 1..20: note = chemically synthesized
  source 1..20: mol_type = other DNA
tcaccaatagaaacttagga

SEQ ID NO: 32914 - DNA, 20 bp, synthetic construct
  misc_feature 1..20: note = chemically synthesized
  source 1..20: mol_type = other DNA
caccaatagaaacttaggaa

SEQ ID NO: 32915 - DNA, 20 bp, synthetic construct
  misc_feature 1..20: note = chemically synthesized
  source 1..20: mol_type = other DNA
gaaacttaggaaaggtaaca

SEQ ID NO: 32916 - DNA, 20 bp, synthetic construct
  misc_feature 1..20: note = chemically synthesized
  source 1..20: mol_type = other DNA
gaaaggtaacaaagtcctgt

SEQ ID NO: 32917 - DNA, 20 bp, synthetic construct
  misc_feature 1..20: note = chemically synthesized
  source 1..20: mol_type = other DNA
aaaggtaacaaagtcctgtg

SEQ ID NO: 32918 - DNA, 20 bp, synthetic construct
  misc_feature 1..20: note = chemically synthesized
  source 1..20: mol_type = other DNA
gtaacaaagtcctgtgaggt

SEQ ID NO: 32919 - DNA, 20 bp, synthetic construct
  misc_feature 1..20: note = chemically synthesized
  source 1..20: mol_type = other DNA
aagtcctgtgaggttggctt

SEQ ID NO: 32920 - DNA, 20 bp, synthetic construct
  misc_feature 1..20: note = chemically synthesized
  source 1..20: mol_type = other DNA
gaggttggcttcagcatatc

SEQ ID NO: 32921 - DNA, 20 bp, synthetic construct
  misc_feature 1..20: note = chemically synthesized
  source 1..20: mol_type = other DNA
gcatatccagaacacatgct

SEQ ID NO: 32922 - DNA, 20 bp, synthetic construct
  misc_feature 1..20: note = chemically synthesized
  source 1..20: mol_type = other DNA
catatccagaacacatgctc

SEQ ID NO: 32923 - DNA, 20 bp, synthetic construct
  misc_feature 1..20: note = chemically synthesized
  source 1..20: mol_type = other DNA
atccagaacacatgctcagg

SEQ ID NO: 32924 - DNA, 20 bp, synthetic construct
  misc_feature 1..20: note = chemically synthesized
  source 1..20: mol_type = other DNA
tccagaacacatgctcagga

SEQ ID NO: 32925 - DNA, 20 bp, synthetic construct
  misc_feature 1..20: note = chemically synthesized
  source 1..20: mol_type = other DNA
agaacacatgctcaggaagg

SEQ ID NO: 32926 - DNA, 20 bp, synthetic construct
  misc_feature 1..20: note = chemically synthesized
  source 1..20: mol_type = other DNA
aacacatgctcaggaaggaa

SEQ ID NO: 32927 - DNA, 20 bp, synthetic construct
  misc_feature 1..20: note = chemically synthesized
  source 1..20: mol_type = other DNA
acacatgctcaggaaggaag

SEQ ID NO: 32928 - DNA, 20 bp, synthetic construct
  misc_feature 1..20: note = chemically synthesized
  source 1..20: mol_type = other DNA
cacatgctcaggaaggaaga

SEQ ID NO: 32929 - DNA, 20 bp, synthetic construct
  misc_feature 1..20: note = chemically synthesized
  source 1..20: mol_type = other DNA
atgctcaggaaggaagaggg

SEQ ID NO: 32930 - DNA, 20 bp, synthetic construct
  misc_feature 1..20: note = chemically synthesized
  source 1..20: mol_type = other DNA
tgctcaggaaggaagagggt

SEQ ID NO: 32931 - DNA, 20 bp, synthetic construct
  misc_feature 1..20: note = chemically synthesized
  source 1..20: mol_type = other DNA
gctcaggaaggaagagggtg

SEQ ID NO: 32932 - DNA, 20 bp, synthetic construct
  misc_feature 1..20: note = chemically synthesized
  source 1..20: mol_type = other DNA
ctcaggaaggaagagggtgg

SEQ ID NO: 32933 - DNA, 20 bp, synthetic construct
  misc_feature 1..20: note = chemically synthesized
  source 1..20: mol_type = other DNA
tcaggaaggaagagggtggg

SEQ ID NO: 32934 - DNA, 20 bp, synthetic construct
  misc_feature 1..20: note = chemically synthesized
  source 1..20: mol_type = other DNA
ggtggggggaccctgtaaac

SEQ ID NO: 32935 - DNA, 20 bp, synthetic construct
  misc_feature 1..20: note = chemically synthesized
  source 1..20: mol_type = other DNA
gtggggggaccctgtaaaca

SEQ ID NO: 32936 - DNA, 20 bp, synthetic construct
  misc_feature 1..20: note = chemically synthesized
  source 1..20: mol_type = other DNA
tggggggaccctgtaaacaa

SEQ ID NO: 32937 - DNA, 20 bp, synthetic construct
  misc_feature 1..20: note = chemically synthesized
  source 1..20: mol_type = other DNA
gactttgatcattcactttg

SEQ ID NO: 32938 - DNA, 20 bp, synthetic construct
  misc_feature 1..20: note = chemically synthesized
  source 1..20: mol_type = other DNA
ctttgatcattcactttgaa

SEQ ID NO: 32939 - DNA, 20 bp, synthetic construct
  misc_feature 1..20: note = chemically synthesized
  source 1..20: mol_type = other DNA
aagagtcttctgtcatatgc

SEQ ID NO: 32940 - DNA, 20 bp, synthetic construct
  misc_feature 1..20: note = chemically synthesized
  source 1..20: mol_type = other DNA
gtcttctgtcatatgctgga

SEQ ID NO: 32941 - DNA, 20 bp, synthetic construct
  misc_feature 1..20: note = chemically synthesized
  source 1..20: mol_type = other DNA
tcttctgtcatatgctggat

SEQ ID NO: 32942 - DNA, 20 bp, synthetic construct
  misc_feature 1..20: note = chemically synthesized
  source 1..20: mol_type = other DNA
tcatatgctggatgggcaaa

SEQ ID NO: 32943 - DNA, 20 bp, synthetic construct
  misc_feature 1..20: note = chemically synthesized
  source 1..20: mol_type = other DNA
tgctggatgggcaaacagct

SEQ ID NO: 32944 - DNA, 20 bp, synthetic construct
  misc_feature 1..20: note = chemically synthesized
  source 1..20: mol_type = other DNA
ctggatgggcaaacagctta

SEQ ID NO: 32945 - DNA, 20 bp, synthetic construct
  misc_feature 1..20: note = chemically synthesized
  source 1..20: mol_type = other DNA
tggatgggcaaacagcttag

SEQ ID NO: 32946 - DNA, 20 bp, synthetic construct
  misc_feature 1..20: note = chemically synthesized
  source 1..20: mol_type = other DNA
ggatgggcaaacagcttaga

SEQ ID NO: 32947 - DNA, 20 bp, synthetic construct
  misc_feature 1..20: note = chemically synthesized
  source 1..20: mol_type = other DNA
aacagcttagagggctgcct

SEQ ID NO: 32948 - DNA, 20 bp, synthetic construct
  misc_feature 1..20: note = chemically synthesized
  source 1..20: mol_type = other DNA
cagcttagagggctgcctta

SEQ ID NO: 32949 - DNA, 20 bp, synthetic construct
  misc_feature 1..20: note = chemically synthesized
  source 1..20: mol_type = other DNA
tgccttagagtgcacaaaat

SEQ ID NO: 32950 - DNA, 20 bp, synthetic construct
  misc_feature 1..20: note = chemically synthesized
  source 1..20: mol_type = other DNA
ccttagagtgcacaaaatca

SEQ ID NO: 32951 - DNA, 20 bp, synthetic construct
  misc_feature 1..20: note = chemically synthesized
  source 1..20: mol_type = other DNA
tgcacaaaatcagagatatt

SEQ ID NO: 32952 - DNA, 20 bp, synthetic construct
  misc_feature 1..20: note = chemically synthesized
  source 1..20: mol_type = other DNA
cacaaaatcagagatattca

SEQ ID NO: 32953 - DNA, 20 bp, synthetic construct
  misc_feature 1..20: note = chemically synthesized
  source 1..20: mol_type = other DNA
agatattcagagatgcacat

SEQ ID NO: 32954 - DNA, 20 bp, synthetic construct
  misc_feature 1..20: note = chemically synthesized
  source 1..20: mol_type = other DNA
gatattcagagatgcacatg

SEQ ID NO: 32955 - DNA, 20 bp, synthetic construct
  misc_feature 1..20: note = chemically synthesized
  source 1..20: mol_type = other DNA
ttcagagatgcacatgagga

SEQ ID NO: 32956 - DNA, 20 bp, synthetic construct
  misc_feature 1..20: note = chemically synthesized
  source 1..20: mol_type = other DNA
cagagatgcacatgaggatg

SEQ ID NO: 32957 - DNA, 20 bp, synthetic construct
  misc_feature 1..20: note = chemically synthesized
  source 1..20: mol_type = other DNA
gatgcacatgaggatggagt

SEQ ID NO: 32958 - DNA, 20 bp, synthetic construct
  misc_feature 1..20: note = chemically synthesized
  source 1..20: mol_type = other DNA
gcacatgaggatggagtgag

SEQ ID NO: 32959 - DNA, 20 bp, synthetic construct
  misc_feature 1..20: note = chemically synthesized
  source 1..20: mol_type = other DNA
acatgaggatggagtgagaa

SEQ ID NO: 32960 - DNA, 20 bp, synthetic construct
  misc_feature 1..20: note = chemically synthesized
  source 1..20: mol_type = other DNA
catgaggatggagtgagaag

SEQ ID NO: 32961 - DNA, 20 bp, synthetic construct
  misc_feature 1..20: note = chemically synthesized
  source 1..20: mol_type = other DNA
gaggatggagtgagaagagg

SEQ ID NO: 32962 - DNA, 20 bp, synthetic construct
  misc_feature 1..20: note = chemically synthesized
  source 1..20: mol_type = other DNA
ggatggagtgagaagaggaa

SEQ ID NO: 32963 - DNA, 20 bp, synthetic construct
  misc_feature 1..20: note = chemically synthesized
  source 1..20: mol_type = other DNA
atggagtgagaagaggaaga

SEQ ID NO: 32964 - DNA, 20 bp, synthetic construct
  misc_feature 1..20: note = chemically synthesized
  source 1..20: mol_type = other DNA
ggagtgagaagaggaagaga

SEQ ID NO: 32965 - DNA, 20 bp, synthetic construct
  misc_feature 1..20: note = chemically synthesized
  source 1..20: mol_type = other DNA
acataaatacctctcacgct

SEQ ID NO: 32966 - DNA, 20 bp, synthetic construct
  misc_feature 1..20: note = chemically synthesized
  source 1..20: mol_type = other DNA
gtttattttttcatttaata

SEQ ID NO: 32967 - DNA, 20 bp, synthetic construct
  misc_feature 1..20: note = chemically synthesized
  source 1..20: mol_type = other DNA
tttaatacagaatatttttt

SEQ ID NO: 32968 - DNA, 20 bp, synthetic construct
  misc_feature 1..20: note = chemically synthesized
  source 1..20: mol_type = other DNA
ttaagctcctactctcttca

SEQ ID NO: 32969 - DNA, 20 bp, synthetic construct
  misc_feature 1..20: note = chemically synthesized
  source 1..20: mol_type = other DNA
tcttcaaagcactgtgctta

SEQ ID NO: 32970 - DNA, 20 bp, synthetic construct
  misc_feature 1..20: note = chemically synthesized
  source 1..20: mol_type = other DNA
caaagcactgtgcttaaagc

SEQ ID NO: 32971 - DNA, 20 bp, synthetic construct
  misc_feature 1..20: note = chemically synthesized
  source 1..20: mol_type = other DNA
ctgtgcttaaagctggcatg

SEQ ID NO: 32972 - DNA, 20 bp, synthetic construct
  misc_feature 1..20: note = chemically synthesized
  source 1..20: mol_type = other DNA
ctggcatgtagttgaattta

SEQ ID NO: 32973 - DNA, 20 bp, synthetic construct
  misc_feature 1..20: note = chemically synthesized
  source 1..20: mol_type = other DNA
atgtagttgaatttatagtc

SEQ ID NO: 32974 - DNA, 20 bp, synthetic construct
  misc_feature 1..20: note = chemically synthesized
  source 1..20: mol_type = other DNA
agttgaatttatagtccagc

SEQ ID NO: 32975 - DNA, 20 bp, synthetic construct
  misc_feature 1..20: note = chemically synthesized
  source 1..20: mol_type = other DNA
gttgaatttatagtccagca

SEQ ID NO: 32976 - DNA, 20 bp, synthetic construct
  misc_feature 1..20: note = chemically synthesized
  source 1..20: mol_type = other DNA
tgaatttatagtccagcaag

SEQ ID NO: 32977 - DNA, 20 bp, synthetic construct
  misc_feature 1..20: note = chemically synthesized
  source 1..20: mol_type = other DNA
cagcaaggagactgaccatt

SEQ ID NO: 32978 - DNA, 20 bp, synthetic construct
  misc_feature 1..20: note = chemically synthesized
  source 1..20: mol_type = other DNA
accattgagaattacaaata

SEQ ID NO: 32979 - DNA, 20 bp, synthetic construct
  misc_feature 1..20: note = chemically synthesized
  source 1..20: mol_type = other DNA
attgagaattacaaatatgg

SEQ ID NO: 32980 - DNA, 20 bp, synthetic construct
  misc_feature 1..20: note = chemically synthesized
  source 1..20: mol_type = other DNA
ttgagaattacaaatatggc

SEQ ID NO: 32981 - DNA, 20 bp, synthetic construct
  misc_feature 1..20: note = chemically synthesized
  source 1..20: mol_type = other DNA
atatggcaggaatttctaaa

SEQ ID NO: 32982 - DNA, 20 bp, synthetic construct
  misc_feature 1..20: note = chemically synthesized
  source 1..20: mol_type = other DNA
ggcaggaatttctaaacaga

SEQ ID NO: 32983 - DNA, 20 bp, synthetic construct
  misc_feature 1..20: note = chemically synthesized
  source 1..20: mol_type = other DNA
tttctaaacagaaagatgtg

SEQ ID NO: 32984 - DNA, 20 bp, synthetic construct
  misc_feature 1..20: note = chemically synthesized
  source 1..20: mol_type = other DNA
gcagctctcatatcctgtca

SEQ ID NO: 32985 - DNA, 20 bp, synthetic construct
  misc_feature 1..20: note = chemically synthesized
  source 1..20: mol_type = other DNA
cacagaaatgacacatcaca

SEQ ID NO: 32986 - DNA, 20 bp, synthetic construct
  misc_feature 1..20: note = chemically synthesized
  source 1..20: mol_type = other DNA
atagctcctaaactgcatca

SEQ ID NO: 32987 - DNA, 20 bp, synthetic construct
  misc_feature 1..20: note = chemically synthesized
  source 1..20: mol_type = other DNA
tgacctcctgtttctgcatt

SEQ ID NO: 32988 - DNA, 20 bp, synthetic construct
  misc_feature 1..20: note = chemically synthesized
  source 1..20: mol_type = other DNA
catatcaccccaaattccaa

SEQ ID NO: 32989 - DNA, 20 bp, synthetic construct
  misc_feature 1..20: note = chemically synthesized
  source 1..20: mol_type = other DNA
caaattccaatggttttgtg

SEQ ID NO: 32990 - DNA, 20 bp, synthetic construct
  misc_feature 1..20: note = chemically synthesized
  source 1..20: mol_type = other DNA
tccaatggttttgtgaagtc

SEQ ID NO: 32991 - DNA, 20 bp, synthetic construct
  misc_feature 1..20: note = chemically synthesized
  source 1..20: mol_type = other DNA
tggttttgtgaagtcaagat

SEQ ID NO: 32992 - DNA, 20 bp, synthetic construct
  misc_feature 1..20: note = chemically synthesized
  source 1..20: mol_type = other DNA
ttttgtgaagtcaagattgg

SEQ ID NO: 32993 - DNA, 20 bp, synthetic construct
  misc_feature 1..20: note = chemically synthesized
  source 1..20: mol_type = other DNA
tgaagtcaagattggtggtc

SEQ ID NO: 32994 - DNA, 20 bp, synthetic construct
  misc_feature 1..20: note = chemically synthesized
  source 1..20: mol_type = other DNA
gaagtcaagattggtggtca

SEQ ID NO: 32995 - DNA, 20 bp, synthetic construct
  misc_feature 1..20: note = chemically synthesized
  source 1..20: mol_type = other DNA
caagattggtggtcaaggtc

SEQ ID NO: 32996 - DNA, 20 bp, synthetic construct
  misc_feature 1..20: note = chemically synthesized
  source 1..20: mol_type = other DNA
aagattggtggtcaaggtcg

SEQ ID NO: 32997 - DNA, 20 bp, synthetic construct
  misc_feature 1..20: note = chemically synthesized
  source 1..20: mol_type = other DNA
agattggtggtcaaggtcga

SEQ ID NO: 32998 - DNA, 20 bp, synthetic construct
  misc_feature 1..20: note = chemically synthesized
  source 1..20: mol_type = other DNA
tggtggtcaaggtcgaggga

SEQ ID NO: 32999 - DNA, 20 bp, synthetic construct
  misc_feature 1..20: note = chemically synthesized
  source 1..20: mol_type = other DNA
caaggtcgagggaaagtgca

SEQ ID NO: 33000 - DNA, 20 bp, synthetic construct
  misc_feature 1..20: note = chemically synthesized
  source 1..20: mol_type = other DNA
agggaaagtgcacagatcaa

SEQ ID NO: 33001 - DNA, 20 bp, synthetic construct
  misc_feature 1..20: note = chemically synthesized
  source 1..20: mol_type = other DNA
aactatgtcaaactttgtca

SEQ ID NO: 33002 - DNA, 20 bp, synthetic construct
  misc_feature 1..20: note = chemically synthesized
  source 1..20: mol_type = other DNA
atgtcaaactttgtcatagc

SEQ ID NO: 33003 - DNA, 20 bp, synthetic construct
  misc_feature 1..20: note = chemically synthesized
  source 1..20: mol_type = other DNA
aaactttgtcatagctagat

SEQ ID NO: 33004 - DNA, 20 bp, synthetic construct
  misc_feature 1..20: note = chemically synthesized
  source 1..20: mol_type = other DNA
agatgagctttttgaactta

SEQ ID NO: 33005 - DNA, 20 bp, synthetic construct
  misc_feature 1..20: note = chemically synthesized
  source 1..20: mol_type = other DNA
acttaaagtttgtcaaaatt

SEQ ID NO: 33006 - DNA, 20 bp, synthetic construct
  misc_feature 1..20: note = chemically synthesized
  source 1..20: mol_type = other DNA
cttaaagtttgtcaaaattt

SEQ ID NO: 33007 - DNA, 20 bp, synthetic construct
  misc_feature 1..20: note = chemically synthesized
  source 1..20: mol_type = other DNA
ttaggaaaatattttgccct

SEQ ID NO: 33008 - DNA, 20 bp, synthetic construct
  misc_feature 1..20: note = chemically synthesized
  source 1..20: mol_type = other DNA
taggaaaatattttgccctt

SEQ ID NO: 33009 - DNA, 20 bp, synthetic construct
  misc_feature 1..20: note = chemically synthesized
  source 1..20: mol_type = other DNA
gaaaatattttgcccttagg

SEQ ID NO: 33010 - DNA, 20 bp, synthetic construct
  misc_feature 1..20: note = chemically synthesized
  source 1..20: mol_type = other DNA
tgaaaattttactctttctt

SEQ ID NO: 33011 - DNA, 20 bp, synthetic construct
  misc_feature 1..20: note = chemically synthesized
  source 1..20: mol_type = other DNA
tttactctttctttagtgtt

SEQ ID NO: 33012 - DNA, 20 bp, synthetic construct
  misc_feature 1..20: note = chemically synthesized
  source 1..20: mol_type = other DNA
aatcgaccttattgcaacca

SEQ ID NO: 33013 - DNA, 20 bp, synthetic construct
  misc_feature 1..20: note = chemically synthesized
  source 1..20: mol_type = other DNA
tcgaccttattgcaaccatg

SEQ ID NO: 33014 - DNA, 20 bp, synthetic construct
  misc_feature 1..20: note = chemically synthesized
  source 1..20: mol_type = other DNA
ttattgcaaccatggagaat

SEQ ID NO: 33015 - DNA, 20 bp, synthetic construct
  misc_feature 1..20: note = chemically synthesized
  source 1..20: mol_type = other DNA
tgcaaccatggagaatgaga

SEQ ID NO: 33016 - DNA, 20 bp, synthetic construct
  misc_feature 1..20: note = chemically synthesized
  source 1..20: mol_type = other DNA
atggagaatgagatagtacc

SEQ ID NO: 33017 - DNA, 20 bp, synthetic construct
  misc_feature 1..20: note = chemically synthesized
  source 1..20: mol_type = other DNA
gaatgagatagtacctggct

SEQ ID NO: 33018 - DNA, 20 bp, synthetic construct
  misc_feature 1..20: note = chemically synthesized
  source 1..20: mol_type = other DNA
atgagatagtacctggctca

SEQ ID NO: 33019 - DNA, 20 bp, synthetic construct
  misc_feature 1..20: note = chemically synthesized
  source 1..20: mol_type = other DNA
tgagatagtacctggctcag

SEQ ID NO: 33020 - DNA, 20 bp, synthetic construct
  misc_feature 1..20: note = chemically synthesized
  source 1..20: mol_type = other DNA
ggtccacatcacataatatg

SEQ ID NO: 33021 - DNA, 20 bp, synthetic construct
  misc_feature 1..20: note = chemically synthesized
  source 1..20: mol_type = other DNA
gtccacatcacataatatgt

SEQ ID NO: 33022 - DNA, 20 bp, synthetic construct
  misc_feature 1..20: note = chemically synthesized
  source 1..20: mol_type = other DNA
tctatcactacactgttgtg

SEQ ID NO: 33023 - DNA, 20 bp, synthetic construct
  misc_feature 1..20: note = chemically synthesized
  source 1..20: mol_type = other DNA
tgttgtgaagccctgttctc

SEQ ID NO: 33024 - DNA, 20 bp, synthetic construct
  misc_feature 1..20: note = chemically synthesized
  source 1..20: mol_type = other DNA
tgaagccctgttctccagcc

SEQ ID NO: 33025 - DNA, 20 bp, synthetic construct
  misc_feature 1..20: note = chemically synthesized
  source 1..20: mol_type = other DNA
gaagccctgttctccagccc

SEQ ID NO: 33026 - DNA, 20 bp, synthetic construct
  misc_feature 1..20: note = chemically synthesized
  source 1..20: mol_type = other DNA
cattcttccattcctaacac

SEQ ID NO: 33027 - DNA, 20 bp, synthetic construct
  misc_feature 1..20: note = chemically synthesized
  source 1..20: mol_type = other DNA
cacaagcttctcctccttta

SEQ ID NO: 33028 - DNA, 20 bp, synthetic construct
  misc_feature 1..20: note = chemically synthesized
  source 1..20: mol_type = other DNA
cttctcctcctttacagaaa

SEQ ID NO: 33029 - DNA, 20 bp, synthetic construct
  misc_feature 1..20: note = chemically synthesized
  source 1..20: mol_type = other DNA
ttctcctcctttacagaaat

SEQ ID NO: 33030 - DNA, 20 bp, synthetic construct
  misc_feature 1..20: note = chemically synthesized
  source 1..20: mol_type = other DNA
tcctttacagaaatgggtct

SEQ ID NO: 33031 - DNA, 20 bp, synthetic construct
  misc_feature 1..20: note = chemically synthesized
  source 1..20: mol_type = other DNA
tatacctgccatgtcatgct

SEQ ID NO: 33032 - DNA, 20 bp, synthetic construct
  misc_feature 1..20: note = chemically synthesized
  source 1..20: mol_type = other DNA
acctgccatgtcatgctgag

SEQ ID NO: 33033 - DNA, 20 bp, synthetic construct
  misc_feature 1..20: note = chemically synthesized
  source 1..20: mol_type = other DNA
cctgccatgtcatgctgagt

SEQ ID NO: 33034 - DNA, 20 bp, synthetic construct
  misc_feature 1..20: note = chemically synthesized
  source 1..20: mol_type = other DNA
ctgccatgtcatgctgagtg

SEQ ID NO: 33035 - DNA, 20 bp, synthetic construct
  misc_feature 1..20: note = chemically synthesized
  source 1..20: mol_type = other DNA
tgccatgtcatgctgagtgg

SEQ ID NO: 33036 - DNA, 20 bp, synthetic construct
  misc_feature 1..20: note = chemically synthesized
  source 1..20: mol_type = other DNA
atgtcatgctgagtgggggc

SEQ ID NO: 33037 - DNA, 20 bp, synthetic construct
  misc_feature 1..20: note = chemically synthesized
  source 1..20: mol_type = other DNA
tgtcatgctgagtgggggct

SEQ ID NO: 33038 - DNA, 20 bp, synthetic construct
  misc_feature 1..20: note = chemically synthesized
  source 1..20: mol_type = other DNA
gtcatgctgagtgggggctg

SEQ ID NO: 33039 - DNA, 20 bp, synthetic construct
  misc_feature 1..20: note = chemically synthesized
  source 1..20: mol_type = other DNA
agtgggggctggggtttgca

SEQ ID NO: 33040 - DNA, 20 bp, synthetic construct
  misc_feature 1..20: note = chemically synthesized
  source 1..20: mol_type = other DNA
tgggggctggggtttgcaaa

SEQ ID NO: 33041 - DNA, 20 bp, synthetic construct
  misc_feature 1..20: note = chemically synthesized
  source 1..20: mol_type = other DNA
ggggctggggtttgcaaaga

SEQ ID NO: 33042 - DNA, 20 bp, synthetic construct
  misc_feature 1..20: note = chemically synthesized
  source 1..20: mol_type = other DNA
gctggggtttgcaaagagag

SEQ ID NO: 33043 - DNA, 20 bp, synthetic construct
  misc_feature 1..20: note = chemically synthesized
  source 1..20: mol_type = other DNA
gggtttgcaaagagagaaga

SEQ ID NO: 33044 - DNA, 20 bp, synthetic construct
  misc_feature 1..20: note = chemically synthesized
  source 1..20: mol_type = other DNA
ttgcaaagagagaagacagc

SEQ ID NO: 33045 - DNA, 20 bp, synthetic construct
  misc_feature 1..20: note = chemically synthesized
  source 1..20: mol_type = other DNA
tgcaaagagagaagacagct

SEQ ID NO: 33046 - DNA, 20 bp, synthetic construct
  misc_feature 1..20: note = chemically synthesized
  source 1..20: mol_type = other DNA
gcaaagagagaagacagcta

SEQ ID NO: 33047 - DNA, 20 bp, synthetic construct
  misc_feature 1..20: note = chemically synthesized
  source 1..20: mol_type = other DNA
gctagggaacataattgcta

SEQ ID NO: 33048 - DNA, 20 bp, synthetic construct
  misc_feature 1..20: note = chemically synthesized
  source 1..20: mol_type = other DNA
tttctattgtacactaaata

SEQ ID NO: 33049 - DNA, 20 bp, synthetic construct
  misc_feature 1..20: note = chemically synthesized
  source 1..20: mol_type = other DNA
attgtacactaaatatagtc

SEQ ID NO: 33050 - DNA, 20 bp, synthetic construct
  misc_feature 1..20: note = chemically synthesized
  source 1..20: mol_type = other DNA
tagtctggatgtattgcata

SEQ ID NO: 33051 - DNA, 20 bp, synthetic construct
  misc_feature 1..20: note = chemically synthesized
  source 1..20: mol_type = other DNA
gatgtattgcatatggtccc

SEQ ID NO: 33052 - DNA, 20 bp, synthetic construct
  misc_feature 1..20: note = chemically synthesized
  source 1..20: mol_type = other DNA
atatggtccctagtttttaa

SEQ ID NO: 33053 - DNA, 20 bp, synthetic construct
  misc_feature 1..20: note = chemically synthesized
  source 1..20: mol_type = other DNA
actttcccgctttccaataa

SEQ ID NO: 33054 - DNA, 20 bp, synthetic construct
  misc_feature 1..20: note = chemically synthesized
  source 1..20: mol_type = other DNA
gctttccaataacagaatga

SEQ ID NO: 33055 - DNA, 20 bp, synthetic construct
  misc_feature 1..20: note = chemically synthesized
  source 1..20: mol_type = other DNA
tccaataacagaatgatgga

SEQ ID NO: 33056 - DNA, 20 bp, synthetic construct
  misc_feature 1..20: note = chemically synthesized
  source 1..20: mol_type = other DNA
aatgatggaaagaccttcac

SEQ ID NO: 33057 - DNA, 20 bp, synthetic construct
  misc_feature 1..20: note = chemically synthesized
  source 1..20: mol_type = other DNA
accttcacaagtccaaacac

SEQ ID NO: 33058 - DNA, 20 bp, synthetic construct
  misc_feature 1..20: note = chemically synthesized
  source 1..20: mol_type = other DNA
caagtccaaacacaagcaaa

SEQ ID NO: 33059 - DNA, 20 bp, synthetic construct
  misc_feature 1..20: note = chemically synthesized
  source 1..20: mol_type = other DNA
aacacaagcaaatggccaaa

SEQ ID NO: 33060 - DNA, 20 bp, synthetic construct
  misc_feature 1..20: note = chemically synthesized
  source 1..20: mol_type = other DNA
acaagcaaatggccaaatgg

SEQ ID NO: 33061 - DNA, 20 bp, synthetic construct
  misc_feature 1..20: note = chemically synthesized
  source 1..20: mol_type = other DNA
aagcaaatggccaaatggca

SEQ ID NO: 33062 - DNA, 20 bp, synthetic construct
  misc_feature 1..20: note = chemically synthesized
  source 1..20: mol_type = other DNA
gttctttttctgtgtcacat

SEQ ID NO: 33063 - DNA, 20 bp, synthetic construct
  misc_feature 1..20: note = chemically synthesized
  source 1..20: mol_type = other DNA
ttctgtgtcacataagattc

SEQ ID NO: 33064 - DNA, 20 bp, synthetic construct
  misc_feature 1..20: note = chemically synthesized
  source 1..20: mol_type = other DNA
gattccagacaatataatct

SEQ ID NO: 33065 - DNA, 20 bp, synthetic construct
  misc_feature 1..20: note = chemically synthesized
  source 1..20: mol_type = other DNA
tccagacaatataatcttag

SEQ ID NO: 33066 - DNA, 20 bp, synthetic construct
  misc_feature 1..20: note = chemically synthesized
  source 1..20: mol_type = other DNA
ataatcttagtagtatctat

SEQ ID NO: 33067 - DNA, 20 bp, synthetic construct
  misc_feature 1..20: note = chemically synthesized
  source 1..20: mol_type = other DNA
tgcattcacactcaaaaact

SEQ ID NO: 33068 - DNA, 20 bp, synthetic construct
  misc_feature 1..20: note = chemically synthesized
  source 1..20: mol_type = other DNA
aaaaacttggtatctgtgct

SEQ ID NO: 33069 - DNA, 20 bp, synthetic construct
  misc_feature 1..20: note = chemically synthesized
  source 1..20: mol_type = other DNA
atctgtgcttggtttaataa

SEQ ID NO: 33070 - DNA, 20 bp, synthetic construct
  misc_feature 1..20: note = chemically synthesized
  source 1..20: mol_type = other DNA
tgtgcttggtttaataaaag

SEQ ID NO: 33071 - DNA, 20 bp, synthetic construct
  misc_feature 1..20: note = chemically synthesized
  source 1..20: mol_type = other DNA
cttggtttaataaaagtagt

SEQ ID NO: 33072 - DNA, 20 bp, synthetic construct
  misc_feature 1..20: note = chemically synthesized
  source 1..20: mol_type = other DNA
aaagtagtgagtgtacctca

SEQ ID NO: 33073 - DNA, 20 bp, synthetic construct
  misc_feature 1..20: note = chemically synthesized
  source 1..20: mol_type = other DNA
agtagtgagtgtacctcatg

SEQ ID NO: 33074 - DNA, 20 bp, synthetic construct
  misc_feature 1..20: note = chemically synthesized
  source 1..20: mol_type = other DNA
tgagtgtacctcatggagct

SEQ ID NO: 33075 - DNA, 20 bp, synthetic construct
  misc_feature 1..20: note = chemically synthesized
  source 1..20: mol_type = other DNA
gtgtacctcatggagctgag

SEQ ID NO: 33076 - DNA, 20 bp, synthetic construct
  misc_feature 1..20: note = chemically synthesized
  source 1..20: mol_type = other DNA
tacctcatggagctgagtgg

SEQ ID NO: 33077 - DNA, 20 bp, synthetic construct
  misc_feature 1..20: note = chemically synthesized
  source 1..20: mol_type = other DNA
tgtgtttatgattgtgtgtg

SEQ ID NO: 33078 - DNA, 20 bp, synthetic construct
  misc_feature 1..20: note = chemically synthesized
  source 1..20: mol_type = other DNA
tgtgtgtggcgcttttgtgt

SEQ ID NO: 33079 - DNA, 20 bp, synthetic construct
  misc_feature 1..20: note = chemically synthesized
  source 1..20: mol_type = other DNA
tgtgtggcgcttttgtgtga

SEQ ID NO: 33080 - DNA, 20 bp, synthetic construct
  misc_feature 1..20: note = chemically synthesized
  source 1..20: mol_type = other DNA
tgtggcgcttttgtgtgaga

SEQ ID NO: 33081 - DNA, 20 bp, synthetic construct
  misc_feature 1..20: note = chemically synthesized
  source 1..20: mol_type = other DNA
tggcgcttttgtgtgagaga

SEQ ID NO: 33082 - DNA, 20 bp, synthetic construct
  misc_feature 1..20: note = chemically synthesized
  source 1..20: mol_type = other DNA
gcgcttttgtgtgagagaga

SEQ ID NO: 33083 - DNA, 20 bp, synthetic construct
  misc_feature 1..20: note = chemically synthesized
  source 1..20: mol_type = other DNA
agtgtgtgtgtatgtgtgtc

SEQ ID NO: 33084 - DNA, 20 bp, synthetic construct
  misc_feature 1..20: note = chemically synthesized
  source 1..20: mol_type = other DNA
tgtgtgtgtatgtgtgtcaa

SEQ ID NO: 33085 - DNA, 20 bp, synthetic construct
  misc_feature 1..20: note = chemically synthesized
  source 1..20: mol_type = other DNA
gtgtgtgtatgtgtgtcaag

SEQ ID NO: 33086 - DNA, 20 bp, synthetic construct
  misc_feature 1..20: note = chemically synthesized
  source 1..20: mol_type = other DNA
tgtatgtgtgtcaagaggtt

SEQ ID NO: 33087 - DNA, 20 bp, synthetic construct
  misc_feature 1..20: note = chemically synthesized
  source 1..20: mol_type = other DNA
gtatgtgtgtcaagaggtta

SEQ ID NO: 33088 - DNA, 20 bp, synthetic construct
  misc_feature 1..20: note = chemically synthesized
  source 1..20: mol_type = other DNA
tatgtgtgtcaagaggttaa

SEQ ID NO: 33089 - DNA, 20 bp, synthetic construct
  misc_feature 1..20: note = chemically synthesized
  source 1..20: mol_type = other DNA
gtcaagaggttaagggctta

SEQ ID NO: 33090 - DNA, 20 bp, synthetic construct
  misc_feature 1..20: note = chemically synthesized
  source 1..20: mol_type = other DNA
tcaagaggttaagggcttaa

SEQ ID NO: 33091 - DNA, 20 bp, synthetic construct
  misc_feature 1..20: note = chemically synthesized
  source 1..20: mol_type = other DNA
ggcttaaaggaacaattaat

SEQ ID NO: 33092 - DNA, 20 bp, synthetic construct
  misc_feature 1..20: note = chemically synthesized
  source 1..20: mol_type = other DNA
aggaacaattaattggtgat

SEQ ID NO: 33093 - DNA, 20 bp, synthetic construct
  misc_feature 1..20: note = chemically synthesized
  source 1..20: mol_type = other DNA
ggaacaattaattggtgatt

SEQ ID NO: 33094 - DNA, 20 bp, synthetic construct
  misc_feature 1..20: note = chemically synthesized
  source 1..20: mol_type = other DNA
ggatcatgtactcaacacca

SEQ ID NO: 33095 - DNA, 20 bp, synthetic construct
  misc_feature 1..20: note = chemically synthesized
  source 1..20: mol_type = other DNA
gtactcaacaccatagcttg

SEQ ID NO: 33096 - DNA, 20 bp, synthetic construct
  misc_feature 1..20: note = chemically synthesized
  source 1..20: mol_type = other DNA
aacgatgtctgtccactcac

SEQ ID NO: 33097 - DNA, 20 bp, synthetic construct
  misc_feature 1..20: note = chemically synthesized
  source 1..20: mol_type = other DNA
gtgtgtgtgtgtgtgtgtgt

SEQ ID NO: 33098 - DNA, 20 bp, synthetic construct
  misc_feature 1..20: note = chemically synthesized
  source 1..20: mol_type = other DNA
tgtgtgtgtgtgtgtgtgtg

SEQ ID NO: 33099 - DNA, 20 bp, synthetic construct
  misc_feature 1..20: note = chemically synthesized
  source 1..20: mol_type = other DNA
gtgtgtgtgtgtgtgtgtga

SEQ ID NO: 33100 - DNA, 20 bp, synthetic construct
  misc_feature 1..20: note = chemically synthesized
  source 1..20: mol_type = other DNA
tgtgtgtgtgtgtgtgtgag

SEQ ID NO: 33101 - DNA, 20 bp, synthetic construct
  misc_feature 1..20: note = chemically synthesized
  source 1..20: mol_type = other DNA
tgtgtgtgtgtgtgaggggt

SEQ ID NO: 33102 - DNA, 20 bp, synthetic construct
  misc_feature 1..20: note = chemically synthesized
  source 1..20: mol_type = other DNA
gtgtgtgtgtgtgaggggtt

SEQ ID NO: 33103 - DNA, 20 bp, synthetic construct
  misc_feature 1..20: note = chemically synthesized
  source 1..20: mol_type = other DNA
gtgaggggttgggttcgttg

SEQ ID NO: 33104 - DNA, 20 bp, synthetic construct
  misc_feature 1..20: note = chemically synthesized
  source 1..20: mol_type = other DNA
tgaggggttgggttcgttgt

SEQ ID NO: 33105 - DNA, 20 bp, synthetic construct
  misc_feature 1..20: note = chemically synthesized
  source 1..20: mol_type = other DNA
gaggggttgggttcgttgtg

SEQ ID NO: 33106 - DNA, 20 bp, synthetic construct
  misc_feature 1..20: note = chemically synthesized
  source 1..20: mol_type = other DNA
ttcgttgtggggaaacactt

SEQ ID NO: 33107 - DNA, 20 bp, synthetic construct
  misc_feature 1..20: note = chemically synthesized
  source 1..20: mol_type = other DNA
ttgatgaaaaatgatttctc

SEQ ID NO: 33108 - DNA, 20 bp, synthetic construct
  misc_feature 1..20: note = chemically synthesized
  source 1..20: mol_type = other DNA
cattctgttcgtaaaacttt

SEQ ID NO: 33109 - DNA, 20 bp, synthetic construct
  misc_feature 1..20: note = chemically synthesized
  source 1..20: mol_type = other DNA
tcgtaaaactttgagttttg

SEQ ID NO: 33110 - DNA, 20 bp, synthetic construct
  misc_feature 1..20: note = chemically synthesized
  source 1..20: mol_type = other DNA
ctttgagttttgaagacact

SEQ ID NO: 33111 - DNA, 20 bp, synthetic construct
  misc_feature 1..20: note = chemically synthesized
  source 1..20: mol_type = other DNA
tttgagttttgaagacactc

SEQ ID NO: 33112 - DNA, 20 bp, synthetic construct
  misc_feature 1..20: note = chemically synthesized
  source 1..20: mol_type = other DNA
ttgagttttgaagacactca

SEQ ID NO: 33113 - DNA, 20 bp, synthetic construct
  misc_feature 1..20: note = chemically synthesized
  source 1..20: mol_type = other DNA
cagggtctctttcttccctt

SEQ ID NO: 33114 - DNA, 20 bp, synthetic construct
  misc_feature 1..20: note = chemically synthesized
  source 1..20: mol_type = other DNA
ttcccttaagctttctctca

SEQ ID NO: 33115 - DNA, 20 bp, synthetic construct
  misc_feature 1..20: note = chemically synthesized
  source 1..20: mol_type = other DNA
cccttaagctttctctcatg

SEQ ID NO: 33116 - DNA, 20 bp, synthetic construct
  misc_feature 1..20: note = chemically synthesized
  source 1..20: mol_type = other DNA
ccttaagctttctctcatgg

SEQ ID NO: 33117 - DNA, 20 bp, synthetic construct
  misc_feature 1..20: note = chemically synthesized
  source 1..20: mol_type = other DNA
tctcatggaggaatgccact

SEQ ID NO: 33118 - DNA, 20 bp, synthetic construct
  misc_feature 1..20: note = chemically synthesized
  source 1..20: mol_type = other DNA
atgccactcagacatctact

SEQ ID NO: 33119 - DNA, 20 bp, synthetic construct
  misc_feature 1..20: note = chemically synthesized
  source 1..20: mol_type = other DNA
ttacaacacttgcatttcct

SEQ ID NO: 33120 - DNA, 20 bp, synthetic construct
  misc_feature 1..20: note = chemically synthesized
  source 1..20: mol_type = other DNA
tacaacacttgcatttcctt

SEQ ID NO: 33121 - DNA, 20 bp, synthetic construct
  misc_feature 1..20: note = chemically synthesized
  source 1..20: mol_type = other DNA
catacatctgcatttattat

SEQ ID NO: 33122 - DNA, 20 bp, synthetic construct
  misc_feature 1..20: note = chemically synthesized
  source 1..20: mol_type = other DNA
tctgcatttattataagcaa

SEQ ID NO: 33123 - DNA, 20 bp, synthetic construct
  misc_feature 1..20: note = chemically synthesized
  source 1..20: mol_type = other DNA
ctgcatttattataagcaac

SEQ ID NO: 33124 - DNA, 20 bp, synthetic construct
  misc_feature 1..20: note = chemically synthesized
  source 1..20: mol_type = other DNA
catttattataagcaacagg

SEQ ID NO: 33125 - DNA, 20 bp, synthetic construct
  misc_feature 1..20: note = chemically synthesized
  source 1..20: mol_type = other DNA
atttattataagcaacaggc

SEQ ID NO: 33126 - DNA, 20 bp, synthetic construct
  misc_feature 1..20: note = chemically synthesized
  source 1..20: mol_type = other DNA
agcaacaggcgggacacttc

SEQ ID NO: 33127 - DNA, 20 bp, synthetic construct
  misc_feature 1..20: note = chemically synthesized
  source 1..20: mol_type = other DNA
aggcgggacacttccagcaa

SEQ ID NO: 33128 - DNA, 20 bp, synthetic construct
  misc_feature 1..20: note = chemically synthesized
  source 1..20: mol_type = other DNA
gggacacttccagcaataga

SEQ ID NO: 33129 - DNA, 20 bp, synthetic construct
  misc_feature 1..20: note = chemically synthesized
  source 1..20: mol_type = other DNA
aaagaaaacttaatttacaa

SEQ ID NO: 33130 - DNA, 20 bp, synthetic construct
  misc_feature 1..20: note = chemically synthesized
  source 1..20: mol_type = other DNA
gaaaacttaatttacaaaag

SEQ ID NO: 33131 - DNA, 20 bp, synthetic construct
  misc_feature 1..20: note = chemically synthesized
  source 1..20: mol_type = other DNA
aaaacttaatttacaaaagc

SEQ ID NO: 33132 - DNA, 20 bp, synthetic construct
  misc_feature 1..20: note = chemically synthesized
  source 1..20: mol_type = other DNA
aaacttaatttacaaaagca

SEQ ID NO: 33133 - DNA, 20 bp, synthetic construct
  misc_feature 1..20: note = chemically synthesized
  source 1..20: mol_type = other DNA
aatttacaaaagcagggatt

SEQ ID NO: 33134 - DNA, 20 bp, synthetic construct
  misc_feature 1..20: note = chemically synthesized
  source 1..20: mol_type = other DNA
acaaaagcagggattcagtg

SEQ ID NO: 33135 - DNA, 20 bp, synthetic construct
  misc_feature 1..20: note = chemically synthesized
  source 1..20: mol_type = other DNA
agggattcagtgaagccacc

SEQ ID NO: 33136 - DNA, 20 bp, synthetic construct
  misc_feature 1..20: note = chemically synthesized
  source 1..20: mol_type = other DNA
agccacctggttgttactct

SEQ ID NO: 33137 - DNA, 20 bp, synthetic construct
  misc_feature 1..20: note = chemically synthesized
  source 1..20: mol_type = other DNA
gccacctggttgttactctt

SEQ ID NO: 33138 - DNA, 20 bp, synthetic construct
  misc_feature 1..20: note = chemically synthesized
  source 1..20: mol_type = other DNA
tactcttgggcactcacatg

SEQ ID NO: 33139 - DNA, 20 bp, synthetic construct
  misc_feature 1..20: note = chemically synthesized
  source 1..20: mol_type = other DNA
ctcacatgtagatgccaacc

SEQ ID NO: 33140 - DNA, 20 bp, synthetic construct
  misc_feature 1..20: note = chemically synthesized
  source 1..20: mol_type = other DNA
cacatgtagatgccaaccca

SEQ ID NO: 33141 - DNA, 20 bp, synthetic construct
  misc_feature 1..20: note = chemically synthesized
  source 1..20: mol_type = other DNA
tagatgccaacccagagcat

SEQ ID NO: 33142 - DNA, 20 bp, synthetic construct
  misc_feature 1..20: note = chemically synthesized
  source 1..20: mol_type = other DNA
agatgccaacccagagcatc

SEQ ID NO: 33143 - DNA, 20 bp, synthetic construct
  misc_feature 1..20: note = chemically synthesized
  source 1..20: mol_type = other DNA
tgccaacccagagcatcagg

SEQ ID NO: 33144 - DNA, 20 bp, synthetic construct
  misc_feature 1..20: note = chemically synthesized
  source 1..20: mol_type = other DNA
ccaacccagagcatcaggaa

SEQ ID NO: 33145 - DNA, 20 bp, synthetic construct
  misc_feature 1..20: note = chemically synthesized
  source 1..20: mol_type = other DNA
caacccagagcatcaggaag

SEQ ID NO: 33146 - DNA, 20 bp, synthetic construct
  misc_feature 1..20: note = chemically synthesized
  source 1..20: mol_type = other DNA
gcatcaggaagaggacttca

SEQ ID NO: 33147 - DNA, 20 bp, synthetic construct
  misc_feature 1..20: note = chemically synthesized
  source 1..20: mol_type = other DNA
agaggacttcaaagcccatg

SEQ ID NO: 33148 - DNA, 20 bp, synthetic construct
  misc_feature 1..20: note = chemically synthesized
  source 1..20: mol_type = other DNA
aggacttcaaagcccatgaa

SEQ ID NO: 33149 - DNA, 20 bp, synthetic construct
  misc_feature 1..20: note = chemically synthesized
  source 1..20: mol_type = other DNA
cttcaaagcccatgaagagt

SEQ ID NO: 33150 - DNA, 20 bp, synthetic construct
  misc_feature 1..20: note = chemically synthesized
  source 1..20: mol_type = other DNA
ttcaaagcccatgaagagtg

SEQ ID NO: 33151 - DNA, 20 bp, synthetic construct
  misc_feature 1..20: note = chemically synthesized
  source 1..20: mol_type = other DNA
ccatgaagagtgaggccacc

SEQ ID NO: 33152 - DNA, 20 bp, synthetic construct
  misc_feature 1..20: note = chemically synthesized
  source 1..20: mol_type = other DNA
catgaagagtgaggccacca

SEQ ID NO: 33153 - DNA, 20 bp, synthetic construct
  misc_feature 1..20: note = chemically synthesized
  source 1..20: mol_type = other DNA
tgaagagtgaggccaccaag

SEQ ID NO: 33154 - DNA, 20 bp, synthetic construct
  misc_feature 1..20: note = chemically synthesized
  source 1..20: mol_type = other DNA
caccaaggagatactcttta

SEQ ID NO: 33155 - DNA, 20 bp, synthetic construct
  misc_feature 1..20: note = chemically synthesized
  source 1..20: mol_type = other DNA
atactctttatagatatcac

SEQ ID NO: 33156 - DNA, 20 bp, synthetic construct
  misc_feature 1..20: note = chemically synthesized
  source 1..20: mol_type = other DNA
atagatatcacaagtgtact

SEQ ID NO: 33157 - DNA, 20 bp, synthetic construct
  misc_feature 1..20: note = chemically synthesized
  source 1..20: mol_type = other DNA
gatatcacaagtgtacttgg

SEQ ID NO: 33158 - DNA, 20 bp, synthetic construct
  misc_feature 1..20: note = chemically synthesized
  source 1..20: mol_type = other DNA
tatcacaagtgtacttggta

SEQ ID NO: 33159 - DNA, 20 bp, synthetic construct
  misc_feature 1..20: note = chemically synthesized
  source 1..20: mol_type = other DNA
atcacaagtgtacttggtag

SEQ ID NO: 33160 - DNA, 20 bp, synthetic construct
  misc_feature 1..20: note = chemically synthesized
  source 1..20: mol_type = other DNA
tagaggtgacctcgtaaaca

SEQ ID NO: 33161 - DNA, 20 bp, synthetic construct
  misc_feature 1..20: note = chemically synthesized
  source 1..20: mol_type = other DNA
tgacctcgtaaacaaagaac

SEQ ID NO: 33162 - DNA, 20 bp, synthetic construct
  misc_feature 1..20: note = chemically synthesized
  source 1..20: mol_type = other DNA
gacctcgtaaacaaagaacc

SEQ ID NO: 33163 - DNA, 20 bp, synthetic construct
  misc_feature 1..20: note = chemically synthesized
  source 1..20: mol_type = other DNA
ctcgtaaacaaagaaccagg

SEQ ID NO: 33164 - DNA, 20 bp, synthetic construct
  misc_feature 1..20: note = chemically synthesized
  source 1..20: mol_type = other DNA
aaacaaagaaccaggtggtg

SEQ ID NO: 33165 - DNA, 20 bp, synthetic construct
  misc_feature 1..20: note = chemically synthesized
  source 1..20: mol_type = other DNA
ggtggtgaagaacatgtcga

SEQ ID NO: 33166 - DNA, 20 bp, synthetic construct
  misc_feature 1..20: note = chemically synthesized
  source 1..20: mol_type = other DNA
aagaacatgtcgatggccaa

SEQ ID NO: 33167 - DNA, 20 bp, synthetic construct
  misc_feature 1..20: note = chemically synthesized
  source 1..20: mol_type = other DNA
atggccaaaagctctacaat

SEQ ID NO: 33168 - DNA, 20 bp, synthetic construct
  misc_feature 1..20: note = chemically synthesized
  source 1..20: mol_type = other DNA
ccaaaagctctacaatcaga

SEQ ID NO: 33169 - DNA, 20 bp, synthetic construct
  misc_feature 1..20: note = chemically synthesized
  source 1..20: mol_type = other DNA
caaaagctctacaatcagat

SEQ ID NO: 33170 - DNA, 20 bp, synthetic construct
  misc_feature 1..20: note = chemically synthesized
  source 1..20: mol_type = other DNA
aaaagctctacaatcagatg

SEQ ID NO: 33171 - DNA, 20 bp, synthetic construct
  misc_feature 1..20: note = chemically synthesized
  source 1..20: mol_type = other DNA
aaagctctacaatcagatgg

SEQ ID NO: 33172 - DNA, 20 bp, synthetic construct
  misc_feature 1..20: note = chemically synthesized
  source 1..20: mol_type = other DNA
gctctacaatcagatggggg

SEQ ID NO: 33173 - DNA, 20 bp, synthetic construct
  misc_feature 1..20: note = chemically synthesized
  source 1..20: mol_type = other DNA
tacaatcagatgggggaaga

SEQ ID NO: 33174 - DNA, 20 bp, synthetic construct
  misc_feature 1..20: note = chemically synthesized
  source 1..20: mol_type = other DNA
atcagatgggggaagacagc

SEQ ID NO: 33175 - DNA, 20 bp, synthetic construct
  misc_feature 1..20: note = chemically synthesized
  source 1..20: mol_type = other DNA
tcagatgggggaagacagct

SEQ ID NO: 33176 - DNA, 20 bp, synthetic construct
  misc_feature 1..20: note = chemically synthesized
  source 1..20: mol_type = other DNA
gggaagacagctgggttgac

SEQ ID NO: 33177 - DNA, 20 bp, synthetic construct
  misc_feature 1..20: note = chemically synthesized
  source 1..20: mol_type = other DNA
ggaagacagctgggttgacc

SEQ ID NO: 33178 - DNA, 20 bp, synthetic construct
  misc_feature 1..20: note = chemically synthesized
  source 1..20: mol_type = other DNA
cgggctgttgtatctgctca

SEQ ID NO: 33179 - DNA, 20 bp, synthetic construct
  misc_feature 1..20: note = chemically synthesized
  source 1..20: mol_type = other DNA
ttgtatctgctcatggcctt

SEQ ID NO: 33180 - DNA, 20 bp, synthetic construct
  misc_feature 1..20: note = chemically synthesized
  source 1..20: mol_type = other DNA
ccttgagctccattttgccc

SEQ ID NO: 33181 - DNA, 20 bp, synthetic construct
  misc_feature 1..20: note = chemically synthesized
  source 1..20: mol_type = other DNA
tgagctccattttgccccag

SEQ ID NO: 33182 - DNA, 20 bp, synthetic construct
  misc_feature 1..20: note = chemically synthesized
  source 1..20: mol_type = other DNA
gagctccattttgccccagc

SEQ ID NO: 33183 - DNA, 20 bp, synthetic construct
  misc_feature 1..20: note = chemically synthesized
  source 1..20: mol_type = other DNA
ccattttgccccagcaggct

SEQ ID NO: 33184 - DNA, 20 bp, synthetic construct
  misc_feature 1..20: note = chemically synthesized
  source 1..20: mol_type = other DNA
ctaagccaccactctgccac

SEQ ID NO: 33185 - DNA, 20 bp, synthetic construct
  misc_feature 1..20: note = chemically synthesized
  source 1..20: mol_type = other DNA
agccaccactctgccaccag

SEQ ID NO: 33186 - DNA, 20 bp, synthetic construct
  misc_feature 1..20: note = chemically synthesized
  source 1..20: mol_type = other DNA
cttcatctctgctctctgac

SEQ ID NO: 33187 - DNA, 20 bp, synthetic construct
  misc_feature 1..20: note = chemically synthesized
  source 1..20: mol_type = other DNA
ttcatctctgctctctgact

SEQ ID NO: 33188 - DNA, 20 bp, synthetic construct
  misc_feature 1..20: note = chemically synthesized
  source 1..20: mol_type = other DNA
atgttatctattctgattca

SEQ ID NO: 33189 - DNA, 20 bp, synthetic construct
  misc_feature 1..20: note = chemically synthesized
  source 1..20: mol_type = other DNA
ctattctgattcatagtatc

SEQ ID NO: 33190 - DNA, 20 bp, synthetic construct
  misc_feature 1..20: note = chemically synthesized
  source 1..20: mol_type = other DNA
ttctgattcatagtatccag

SEQ ID NO: 33191 - DNA, 20 bp, synthetic construct
  misc_feature 1..20: note = chemically synthesized
  source 1..20: mol_type = other DNA
aatcatcacattctcattat

SEQ ID NO: 33192 - DNA, 20 bp, synthetic construct
  misc_feature 1..20: note = chemically synthesized
  source 1..20: mol_type = other DNA
atcatcacattctcattata

SEQ ID NO: 33193 - DNA, 20 bp, synthetic construct
  misc_feature 1..20: note = chemically synthesized
  source 1..20: mol_type = other DNA
ctaatgttcacaattttcca

SEQ ID NO: 33194 - DNA, 20 bp, synthetic construct
  misc_feature 1..20: note = chemically synthesized
  source 1..20: mol_type = other DNA
ttcacaattttccaaagcca

SEQ ID NO: 33195 - DNA, 20 bp, synthetic construct
  misc_feature 1..20: note = chemically synthesized
  source 1..20: mol_type = other DNA
taaattcctgaccatcttcg

SEQ ID NO: 33196 - DNA, 20 bp, synthetic construct
  misc_feature 1..20: note = chemically synthesized
  source 1..20: mol_type = other DNA
accatcttcgtagttgatta

SEQ ID NO: 33197 - DNA, 20 bp, synthetic construct
  misc_feature 1..20: note = chemically synthesized
  source 1..20: mol_type = other DNA
tagttgattatggctctgaa

SEQ ID NO: 33198 - DNA, 20 bp, synthetic construct
  misc_feature 1..20: note = chemically synthesized
  source 1..20: mol_type = other DNA
tctgaatggctttttgccca

SEQ ID NO: 33199 - DNA, 20 bp, synthetic construct
  misc_feature 1..20: note = chemically synthesized
  source 1..20: mol_type = other DNA
ggctttttgcccaaagcatc

SEQ ID NO: 33200 - DNA, 20 bp, synthetic construct
  misc_feature 1..20: note = chemically synthesized
  source 1..20: mol_type = other DNA
catccagcaccattttcatc

SEQ ID NO: 33201 - DNA, 20 bp, synthetic construct
  misc_feature 1..20: note = chemically synthesized
  source 1..20: mol_type = other DNA
atccagcaccattttcatct

SEQ ID NO: 33202 - DNA, 20 bp, synthetic construct
  misc_feature 1..20: note = chemically synthesized
  source 1..20: mol_type = other DNA
cagcaccattttcatctggg

SEQ ID NO: 33203 - DNA, 20 bp, synthetic construct
  misc_feature 1..20: note = chemically synthesized
  source 1..20: mol_type = other DNA
atctgggtagtttcccctgc

SEQ ID NO: 33204 - DNA, 20 bp, synthetic construct
  misc_feature 1..20: note = chemically synthesized
  source 1..20: mol_type = other DNA
gtttcccctgctggtaaaaa

SEQ ID NO: 33205 - DNA, 20 bp, synthetic construct
  misc_feature 1..20: note = chemically synthesized
  source 1..20: mol_type = other DNA
tatctactcccatcccccga

SEQ ID NO: 33206 - DNA, 20 bp, synthetic construct
  misc_feature 1..20: note = chemically synthesized
  source 1..20: mol_type = other DNA
cccatcccccgacagaaaca

SEQ ID NO: 33207 - DNA, 20 bp, synthetic construct
  misc_feature 1..20: note = chemically synthesized
  source 1..20: mol_type = other DNA
ccatcccccgacagaaacac

SEQ ID NO: 33208 - DNA, 20 bp, synthetic construct
  misc_feature 1..20: note = chemically synthesized
  source 1..20: mol_type = other DNA
atccactatcactctctatc

SEQ ID NO: 33209 - DNA, 20 bp, synthetic construct
  misc_feature 1..20: note = chemically synthesized
  source 1..20: mol_type = other DNA
tccactatcactctctatct

SEQ ID NO: 33210 - DNA, 20 bp, synthetic construct
  misc_feature 1..20: note = chemically synthesized
  source 1..20: mol_type = other DNA
tatcactctctatctgggtg

SEQ ID NO: 33211 - DNA, 20 bp, synthetic construct
  misc_feature 1..20: note = chemically synthesized
  source 1..20: mol_type = other DNA
ctctctatctgggtgtggtt

SEQ ID NO: 33212 - DNA, 20 bp, synthetic construct
  misc_feature 1..20: note = chemically synthesized
  source 1..20: mol_type = other DNA
gttgagatcttcaaaatctg

SEQ ID NO: 33213 - DNA, 20 bp, synthetic construct
  misc_feature 1..20: note = chemically synthesized
  source 1..20: mol_type = other DNA
ttcaaaatctgcagtgctga

SEQ ID NO: 33214 - DNA, 20 bp, synthetic construct
  misc_feature 1..20: note = chemically synthesized
  source 1..20: mol_type = other DNA
aatctgcagtgctgatagct

SEQ ID NO: 33215 - DNA, 20 bp, synthetic construct
  misc_feature 1..20: note = chemically synthesized
  source 1..20: mol_type = other DNA
gcagtgctgatagctcagca

SEQ ID NO: 33216 - DNA, 20 bp, synthetic construct
  misc_feature 1..20: note = chemically synthesized
  source 1..20: mol_type = other DNA
tgatagctcagcatggaatg

SEQ ID NO: 33217 - DNA, 20 bp, synthetic construct
  misc_feature 1..20: note = chemically synthesized
  source 1..20: mol_type = other DNA
atggaatgaagtgaaccaac

SEQ ID NO: 33218 - DNA, 20 bp, synthetic construct
  misc_feature 1..20: note = chemically synthesized
  source 1..20: mol_type = other DNA
caacaagctctctctgactt

SEQ ID NO: 33219 - DNA, 20 bp, synthetic construct
  misc_feature 1..20: note = chemically synthesized
  source 1..20: mol_type = other DNA
tctctctgactttggtttat

SEQ ID NO: 33220 - DNA, 20 bp, synthetic construct
  misc_feature 1..20: note = chemically synthesized
  source 1..20: mol_type = other DNA
ctctctgactttggtttata

SEQ ID NO: 33221 - DNA, 20 bp, synthetic construct
  misc_feature 1..20: note = chemically synthesized
  source 1..20: mol_type = other DNA
gatttgcatacattttctga

SEQ ID NO: 33222 - DNA, 20 bp, synthetic construct
  misc_feature 1..20: note = chemically synthesized
  source 1..20: mol_type = other DNA
atacattttctgatggatac

SEQ ID NO: 33223 - DNA, 20 bp, synthetic construct
  misc_feature 1..20: note = chemically synthesized
  source 1..20: mol_type = other DNA
tacattttctgatggatact

SEQ ID NO: 33224 - DNA, 20 bp, synthetic construct
  misc_feature 1..20: note = chemically synthesized
  source 1..20: mol_type = other DNA
atggatactaggctcatttc

SEQ ID NO: 33225 - DNA, 20 bp, synthetic construct
  misc_feature 1..20: note = chemically synthesized
  source 1..20: mol_type = other DNA
tggatactaggctcatttct

SEQ ID NO: 33226 - DNA, 20 bp, synthetic construct
  misc_feature 1..20: note = chemically synthesized
  source 1..20: mol_type = other DNA
ggctcatttctgggaatatg

SEQ ID NO: 33227 - DNA, 20 bp, synthetic construct
  misc_feature 1..20: note = chemically synthesized
  source 1..20: mol_type = other DNA
tgggaatatgcagcaattta

SEQ ID NO: 33228 - DNA, 20 bp, synthetic construct
  misc_feature 1..20: note = chemically synthesized
  source 1..20: mol_type = other DNA
aagcattgtgcctcatgtca

SEQ ID NO: 33229 - DNA, 20 bp, synthetic construct
  misc_feature 1..20: note = chemically synthesized
  source 1..20: mol_type = other DNA
caatctgacactaatctatt

SEQ ID NO: 33230 - DNA, 20 bp, synthetic construct
  misc_feature 1..20: note = chemically synthesized
  source 1..20: mol_type = other DNA
ctgacactaatctatttggt

SEQ ID NO: 33231 - DNA, 20 bp, synthetic construct
  misc_feature 1..20: note = chemically synthesized
  source 1..20: mol_type = other DNA
tggtaagtttttctttctgt

SEQ ID NO: 33232 - DNA, 20 bp, synthetic construct
  misc_feature 1..20: note = chemically synthesized
  source 1..20: mol_type = other DNA
agtctatacccttgtcatta

SEQ ID NO: 33233 - DNA, 20 bp, synthetic construct
  misc_feature 1..20: note = chemically synthesized
  source 1..20: mol_type = other DNA
cactctaacttcatcttttt

SEQ ID NO: 33234 - DNA, 20 bp, synthetic construct
  misc_feature 1..20: note = chemically synthesized
  source 1..20: mol_type = other DNA
actctaacttcatctttttt

SEQ ID NO: 33235 - DNA, 20 bp, synthetic construct
  misc_feature 1..20: note = chemically synthesized
  source 1..20: mol_type = other DNA
tctaacttcatcttttttgg

SEQ ID NO: 33236 - DNA, 20 bp, synthetic construct
  misc_feature 1..20: note = chemically synthesized
  source 1..20: mol_type = other DNA
acttcatcttttttgggagt

SEQ ID NO: 33237 - DNA, 20 bp, synthetic construct
  misc_feature 1..20: note = chemically synthesized
  source 1..20: mol_type = other DNA
cttttttgggagtaagtact

SEQ ID NO: 33238 - DNA, 20 bp, synthetic construct
  misc_feature 1..20: note = chemically synthesized
  source 1..20: mol_type = other DNA
ttttgggagtaagtacttgg

SEQ ID NO: 33239 - DNA, 20 bp, synthetic construct
  misc_feature 1..20: note = chemically synthesized
  source 1..20: mol_type = other DNA
taagtacttggtagaacaca

SEQ ID NO: 33240 - DNA, 20 bp, synthetic construct
  misc_feature 1..20: note = chemically synthesized
  source 1..20: mol_type = other DNA
agtacttggtagaacacata

SEQ ID NO: 33241 - DNA, 20 bp, synthetic construct
  misc_feature 1..20: note = chemically synthesized
  source 1..20: mol_type = other DNA
gtacttggtagaacacatag

SEQ ID NO: 33242 - DNA, 20 bp, synthetic construct
  misc_feature 1..20: note = chemically synthesized
  source 1..20: mol_type = other DNA
tggtagaacacatagaggca

SEQ ID NO: 33243 - DNA, 20 bp, synthetic construct
  misc_feature 1..20: note = chemically synthesized
  source 1..20: mol_type = other DNA
gtagaacacatagaggcaaa

SEQ ID NO: 33244 - DNA, 20 bp, synthetic construct
  misc_feature 1..20: note = chemically synthesized
  source 1..20: mol_type = other DNA
tagaacacatagaggcaaag

SEQ ID NO: 33245 - DNA, 20 bp, synthetic construct
  misc_feature 1..20: note = chemically synthesized
  source 1..20: mol_type = other DNA
aacacatagaggcaaagagg

SEQ ID NO: 33246 - DNA, 20 bp, synthetic construct
  misc_feature 1..20: note = chemically synthesized
  source 1..20: mol_type = other DNA
catagaggcaaagaggaagc

SEQ ID NO: 33247 - DNA, 20 bp, synthetic construct
  misc_feature 1..20: note = chemically synthesized
  source 1..20: mol_type = other DNA
aaagaggaagctggtttatg

SEQ ID NO: 33248 - DNA, 20 bp, synthetic construct
  misc_feature 1..20: note = chemically synthesized
  source 1..20: mol_type = other DNA
aagctggtttatgcagcccg

SEQ ID NO: 33249 - DNA, 20 bp, synthetic construct
  misc_feature 1..20: note = chemically synthesized
  source 1..20: mol_type = other DNA
gctggtttatgcagcccgaa

SEQ ID NO: 33250 - DNA, 20 bp, synthetic construct
  misc_feature 1..20: note = chemically synthesized
  source 1..20: mol_type = other DNA
tggtttatgcagcccgaaga

SEQ ID NO: 33251 - DNA, 20 bp, synthetic construct
  misc_feature 1..20: note = chemically synthesized
  source 1..20: mol_type = other DNA
gcagcccgaagagagcaaca

SEQ ID NO: 33252 - DNA, 20 bp, synthetic construct
  misc_feature 1..20: note = chemically synthesized
  source 1..20: mol_type = other DNA
cagcccgaagagagcaacaa

SEQ ID NO: 33253 - DNA, 20 bp, synthetic construct
  misc_feature 1..20: note = chemically synthesized
  source 1..20: mol_type = other DNA
gaagagagcaacaaaggaaa

SEQ ID NO: 33254 - DNA, 20 bp, synthetic construct
  misc_feature 1..20: note = chemically synthesized
  source 1..20: mol_type = other DNA
aggaaatagataatccaaac

SEQ ID NO: 33255 - DNA, 20 bp, synthetic construct
  misc_feature 1..20: note = chemically synthesized
  source 1..20: mol_type = other DNA
gaaatagataatccaaacca

SEQ ID NO: 33256 - DNA, 20 bp, synthetic construct
  misc_feature 1..20: note = chemically synthesized
  source 1..20: mol_type = other DNA
agataatccaaaccagagtc

SEQ ID NO: 33257 - DNA, 20 bp, synthetic construct
  misc_feature 1..20: note = chemically synthesized
  source 1..20: mol_type = other DNA
accagagtctggaactacac

SEQ ID NO: 33258 - DNA, 20 bp, synthetic construct
  misc_feature 1..20: note = chemically synthesized
  source 1..20: mol_type = other DNA
cagagtctggaactacacca

SEQ ID NO: 33259 - DNA, 20 bp, synthetic construct
  misc_feature 1..20: note = chemically synthesized
  source 1..20: mol_type = other DNA
gatatcattctgtattcccg

SEQ ID NO: 33260 - DNA, 20 bp, synthetic construct
  misc_feature 1..20: note = chemically synthesized
  source 1..20: mol_type = other DNA
caacttgattttttcctaac

SEQ ID NO: 33261 - DNA, 20 bp, synthetic construct
  misc_feature 1..20: note = chemically synthesized
  source 1..20: mol_type = other DNA
tcctaactagatcactctgc

SEQ ID NO: 33262 - DNA, 20 bp, synthetic construct
  misc_feature 1..20: note = chemically synthesized
  source 1..20: mol_type = other DNA
cctaactagatcactctgct

SEQ ID NO: 33263 - DNA, 20 bp, synthetic construct
  misc_feature 1..20: note = chemically synthesized
  source 1..20: mol_type = other DNA
ctaactagatcactctgcta

SEQ ID NO: 33264 - DNA, 20 bp, synthetic construct
  misc_feature 1..20: note = chemically synthesized
  source 1..20: mol_type = other DNA
cactctgctagggaatgaaa

SEQ ID NO: 33265 - DNA, 20 bp, synthetic construct
  misc_feature 1..20: note = chemically synthesized
  source 1..20: mol_type = other DNA
actctgctagggaatgaaaa

SEQ ID NO: 33266 - DNA, 20 bp, synthetic construct
  misc_feature 1..20: note = chemically synthesized
  source 1..20: mol_type = other DNA
tctgctagggaatgaaaaag

SEQ ID NO: 33267 - DNA, 20 bp, synthetic construct
  misc_feature 1..20: note = chemically synthesized
  source 1..20: mol_type = other DNA
agggaatgaaaaaggagatc

SEQ ID NO: 33268 - DNA, 20 bp, synthetic construct
  misc_feature 1..20: note = chemically synthesized
  source 1..20: mol_type = other DNA
gggaatgaaaaaggagatct

SEQ ID NO: 33269 - DNA, 20 bp, synthetic construct
  misc_feature 1..20: note = chemically synthesized
  source 1..20: mol_type = other DNA
atctaggattttccctcttc

SEQ ID NO: 33270 - DNA, 20 bp, synthetic construct
  misc_feature 1..20: note = chemically synthesized
  source 1..20: mol_type = other DNA
tctaggattttccctcttct

SEQ ID NO: 33271 - DNA, 20 bp, synthetic construct
  misc_feature 1..20: note = chemically synthesized
  source 1..20: mol_type = other DNA
cctcttctaggaatttgcaa

SEQ ID NO: 33272 - DNA, 20 bp, synthetic construct
  misc_feature 1..20: note = chemically synthesized
  source 1..20: mol_type = other DNA
tcttctaggaatttgcaaaa

SEQ ID NO: 33273 - DNA, 20 bp, synthetic construct
  misc_feature 1..20: note = chemically synthesized
  source 1..20: mol_type = other DNA
aatttgcaaaagagattatt

SEQ ID NO: 33274 - DNA, 20 bp, synthetic construct
  misc_feature 1..20: note = chemically synthesized
  source 1..20: mol_type = other DNA
ttgcaaaagagattattcag

SEQ ID NO: 33275 - DNA, 20 bp, synthetic construct
  misc_feature 1..20: note = chemically synthesized
  source 1..20: mol_type = other DNA
aaagagattattcagaagcc

SEQ ID NO: 33276 - DNA, 20 bp, synthetic construct
  misc_feature 1..20: note = chemically synthesized
  source 1..20: mol_type = other DNA
tattcagaagccaagttcta

SEQ ID NO: 33277 - DNA, 20 bp, synthetic construct
  misc_feature 1..20: note = chemically synthesized
  source 1..20: mol_type = other DNA
aagccaagttctaaagattt

SEQ ID NO: 33278 - DNA, 20 bp, synthetic construct
  misc_feature 1..20: note = chemically synthesized
  source 1..20: mol_type = other DNA
agccaagttctaaagatttt

SEQ ID NO: 33279 - DNA, 20 bp, synthetic construct
  misc_feature 1..20: note = chemically synthesized
  source 1..20: mol_type = other DNA
gccaagttctaaagatttta

SEQ ID NO: 33280 - DNA, 20 bp, synthetic construct
  misc_feature 1..20: note = chemically synthesized
  source 1..20: mol_type = other DNA
caagttctaaagattttagg

SEQ ID NO: 33281 - DNA, 20 bp, synthetic construct
  misc_feature 1..20: note = chemically synthesized
  source 1..20: mol_type = other DNA
taaagattttagggagtctt

SEQ ID NO: 33282 - DNA, 20 bp, synthetic construct
  misc_feature 1..20: note = chemically synthesized
  source 1..20: mol_type = other DNA
aaagattttagggagtcttt

SEQ ID NO: 33283 - DNA, 20 bp, synthetic construct
  misc_feature 1..20: note = chemically synthesized
  source 1..20: mol_type = other DNA
ttagggagtctttgggatga

SEQ ID NO: 33284 - DNA, 20 bp, synthetic construct
  misc_feature 1..20: note = chemically synthesized
  source 1..20: mol_type = other DNA
ccctctctgcaatctctgat

SEQ ID NO: 33285 - DNA, 20 bp, synthetic construct
  misc_feature 1..20: note = chemically synthesized
  source 1..20: mol_type = other DNA
gtctactgctcattcctatg

SEQ ID NO: 33286 - DNA, 20 bp, synthetic construct
  misc_feature 1..20: note = chemically synthesized
  source 1..20: mol_type = other DNA
ctactgctcattcctatgcg

SEQ ID NO: 33287 - DNA, 20 bp, synthetic construct
  misc_feature 1..20: note = chemically synthesized
  source 1..20: mol_type = other DNA
tcattcctatgcggagcctc

SEQ ID NO: 33288 - DNA, 20 bp, synthetic construct
  misc_feature 1..20: note = chemically synthesized
  source 1..20: mol_type = other DNA
cattcctatgcggagcctct

SEQ ID NO: 33289 - DNA, 20 bp, synthetic construct
  misc_feature 1..20: note = chemically synthesized
  source 1..20: mol_type = other DNA
ctatgcggagcctctaggcc

SEQ ID NO: 33290 - DNA, 20 bp, synthetic construct
  misc_feature 1..20: note = chemically synthesized
  source 1..20: mol_type = other DNA
gcctctaggccaagacacac

SEQ ID NO: 33291 - DNA, 20 bp, synthetic construct
  misc_feature 1..20: note = chemically synthesized
  source 1..20: mol_type = other DNA
ctctaggccaagacacactg

SEQ ID NO: 33292 - DNA, 20 bp, synthetic construct
  misc_feature 1..20: note = chemically synthesized
  source 1..20: mol_type = other DNA
ttctttaccgacctgttcat

SEQ ID NO: 33293 - DNA, 20 bp, synthetic construct
  misc_feature 1..20: note = chemically synthesized
  source 1..20: mol_type = other DNA
aagtctgttcattgttgcca

SEQ ID NO: 33294 - DNA, 20 bp, synthetic construct
  misc_feature 1..20: note = chemically synthesized
  source 1..20: mol_type = other DNA
agatgtgactatgaacccct

SEQ ID NO: 33295 - DNA, 20 bp, synthetic construct
  misc_feature 1..20: note = chemically synthesized
  source 1..20: mol_type = other DNA
tgactatgaacccctaagcc

SEQ ID NO: 33296 - DNA, 20 bp, synthetic construct
  misc_feature 1..20: note = chemically synthesized
  source 1..20: mol_type = other DNA
atgaacccctaagcctggtc

SEQ ID NO: 33297 - DNA, 20 bp, synthetic construct
  misc_feature 1..20: note = chemically synthesized
  source 1..20: mol_type = other DNA
cctaagcctggtcaagatat

SEQ ID NO: 33298 - DNA, 20 bp, synthetic construct
  misc_feature 1..20: note = chemically synthesized
  source 1..20: mol_type = other DNA
tggatccaacaccaactttt

SEQ ID NO: 33299 - DNA, 20 bp, synthetic construct
  misc_feature 1..20: note = chemically synthesized
  source 1..20: mol_type = other DNA
ccaactttttagactatact

SEQ ID NO: 33300 - DNA, 20 bp, synthetic construct
  misc_feature 1..20: note = chemically synthesized
  source 1..20: mol_type = other DNA
actttttagactatactcag

SEQ ID NO: 33301 - DNA, 20 bp, synthetic construct
  misc_feature 1..20: note = chemically synthesized
  source 1..20: mol_type = other DNA
ttagactatactcagaagcc

SEQ ID NO: 33302 - DNA, 20 bp, synthetic construct
  misc_feature 1..20: note = chemically synthesized
  source 1..20: mol_type = other DNA
tactcagaagccaagctgca

SEQ ID NO: 33303 - DNA, 20 bp, synthetic construct
  misc_feature 1..20: note = chemically synthesized
  source 1..20: mol_type = other DNA
agccaagctgcaaagaaaat

SEQ ID NO: 33304 - DNA, 20 bp, synthetic construct
  misc_feature 1..20: note = chemically synthesized
  source 1..20: mol_type = other DNA
gctgcaaagaaaattagttt

SEQ ID NO: 33305 - DNA, 20 bp, synthetic construct
  misc_feature 1..20: note = chemically synthesized
  source 1..20: mol_type = other DNA
gtttcagaaactcctcccta

SEQ ID NO: 33306 - DNA, 20 bp, synthetic construct
  misc_feature 1..20: note = chemically synthesized
  source 1..20: mol_type = other DNA
tccctccttctttattctcc

SEQ ID NO: 33307 - DNA, 20 bp, synthetic construct
  misc_feature 1..20: note = chemically synthesized
  source 1..20: mol_type = other DNA
cttctttattctcccagcct

SEQ ID NO: 33308 - DNA, 20 bp, synthetic construct
  misc_feature 1..20: note = chemically synthesized
  source 1..20: mol_type = other DNA
ttctttattctcccagcctg

SEQ ID NO: 33309 - DNA, 20 bp, synthetic construct
  misc_feature 1..20: note = chemically synthesized
  source 1..20: mol_type = other DNA
tctttattctcccagcctga

SEQ ID NO: 33310 - DNA, 20 bp, synthetic construct
  misc_feature 1..20: note = chemically synthesized
  source 1..20: mol_type = other DNA
ttctcccagcctgagggatt

SEQ ID NO: 33311 - DNA, 20 bp, synthetic construct
  misc_feature 1..20: note = chemically synthesized
  source 1..20: mol_type = other DNA
gcctgagggatttagaactt

SEQ ID NO: 33312 - DNA, 20 bp, synthetic construct
  misc_feature 1..20: note = chemically synthesized
  source 1..20: mol_type = other DNA
agggatttagaactttggaa

SEQ ID NO: 33313 - DNA, 20 bp, synthetic construct
  misc_feature 1..20: note = chemically synthesized
  source 1..20: mol_type = other DNA
gggatttagaactttggaac

SEQ ID NO: 33314 - DNA, 20 bp, synthetic construct
  misc_feature 1..20: note = chemically synthesized
  source 1..20: mol_type = other DNA
gatttagaactttggaacag

SEQ ID NO: 33315 - DNA, 20 bp, synthetic construct
  misc_feature 1..20: note = chemically synthesized
  source 1..20: mol_type = other DNA
actttggaacaggagtcgct

SEQ ID NO: 33316 - DNA, 20 bp, synthetic construct
  misc_feature 1..20: note = chemically synthesized
  source 1..20: mol_type = other DNA
ctttggaacaggagtcgcta

SEQ ID NO: 33317 - DNA, 20 bp, synthetic construct
  misc_feature 1..20: note = chemically synthesized
  source 1..20: mol_type = other DNA
ctaaggtttcttcctgcatc

SEQ ID NO: 33318 - DNA, 20 bp, synthetic construct
  misc_feature 1..20: note = chemically synthesized
  source 1..20: mol_type = other DNA
taaggtttcttcctgcatct

SEQ ID NO: 33319 - DNA, 20 bp, synthetic construct
  misc_feature 1..20: note = chemically synthesized
  source 1..20: mol_type = other DNA
gtttcttcctgcatctaggt

SEQ ID NO: 33320 - DNA, 20 bp, synthetic construct
  misc_feature 1..20: note = chemically synthesized
  source 1..20: mol_type = other DNA
tttcttcctgcatctaggtt

SEQ ID NO: 33321 - DNA, 20 bp, synthetic construct
  misc_feature 1..20: note = chemically synthesized
  source 1..20: mol_type = other DNA
ttcttcctgcatctaggtta

SEQ ID NO: 33322 - DNA, 20 bp, synthetic construct
  misc_feature 1..20: note = chemically synthesized
  source 1..20: mol_type = other DNA
ctgcatctaggttagggaat

SEQ ID NO: 33323 - DNA, 20 bp, synthetic construct
  misc_feature 1..20: note = chemically synthesized
  source 1..20: mol_type = other DNA
tagggaattagccacatctc

SEQ ID NO: 33324 - DNA, 20 bp, synthetic construct
  misc_feature 1..20: note = chemically synthesized
  source 1..20: mol_type = other DNA
ttagccacatctccagaaat

SEQ ID NO: 33325 - DNA, 20 bp, synthetic construct
  misc_feature 1..20: note = chemically synthesized
  source 1..20: mol_type = other DNA
ccagaaataagatttatttt

SEQ ID NO: 33326 - DNA, 20 bp, synthetic construct
  misc_feature 1..20: note = chemically synthesized
  source 1..20: mol_type = other DNA
gatttattttaagcatcaca

SEQ ID NO: 33327 - DNA, 20 bp, synthetic construct
  misc_feature 1..20: note = chemically synthesized
  source 1..20: mol_type = other DNA
atttattttaagcatcacat

SEQ ID NO: 33328 - DNA, 20 bp, synthetic construct
  misc_feature 1..20: note = chemically synthesized
  source 1..20: mol_type = other DNA
tttattttaagcatcacata

SEQ ID NO: 33329 - DNA, 20 bp, synthetic construct
  misc_feature 1..20: note = chemically synthesized
  source 1..20: mol_type = other DNA
ttattttaagcatcacatag

SEQ ID NO: 33330 - DNA, 20 bp, synthetic construct
  misc_feature 1..20: note = chemically synthesized
  source 1..20: mol_type = other DNA
ttttaagcatcacatagggg

SEQ ID NO: 33331 - DNA, 20 bp, synthetic construct
  misc_feature 1..20: note = chemically synthesized
  source 1..20: mol_type = other DNA
agcatcacataggggtagaa

SEQ ID NO: 33332 - DNA, 20 bp, synthetic construct
  misc_feature 1..20: note = chemically synthesized
  source 1..20: mol_type = other DNA
taggggtagaaaagaaaatg

SEQ ID NO: 33333 - DNA, 20 bp, synthetic construct
  misc_feature 1..20: note = chemically synthesized
  source 1..20: mol_type = other DNA
aggggtagaaaagaaaatgt

SEQ ID NO: 33334 - DNA, 20 bp, synthetic construct
  misc_feature 1..20: note = chemically synthesized
  source 1..20: mol_type = other DNA
ggggtagaaaagaaaatgta

SEQ ID NO: 33335 - DNA, 20 bp, synthetic construct
  misc_feature 1..20: note = chemically synthesized
  source 1..20: mol_type = other DNA
ggtagaaaagaaaatgtagg

SEQ ID NO: 33336 - DNA, 20 bp, synthetic construct
  misc_feature 1..20: note = chemically synthesized
  source 1..20: mol_type = other DNA
gtagaaaagaaaatgtaggg

SEQ ID NO: 33337 - DNA, 20 bp, synthetic construct
  misc_feature 1..20: note = chemically synthesized
  source 1..20: mol_type = other DNA
aaaagaaaatgtagggagga

SEQ ID NO: 33338 - DNA, 20 bp, synthetic construct
  misc_feature 1..20: note = chemically synthesized
  source 1..20: mol_type = other DNA
tagggaggatggcctttttg

SEQ ID NO: 33339 - DNA, 20 bp, synthetic construct
  misc_feature 1..20: note = chemically synthesized
  source 1..20: mol_type = other DNA
ggaggatggcctttttgcag

SEQ ID NO: 33340 - DNA, 20 bp, synthetic construct
  misc_feature 1..20: note = chemically synthesized
  source 1..20: mol_type = other DNA
ttcttttattattatacttt

SEQ ID NO: 33341 - DNA, 20 bp, synthetic construct
  misc_feature 1..20: note = chemically synthesized
  source 1..20: mol_type = other DNA
tattattatactttaagttt

SEQ ID NO: 33342 - DNA, 20 bp, synthetic construct
  misc_feature 1..20: note = chemically synthesized
  source 1..20: mol_type = other DNA
attattatactttaagtttt

SEQ ID NO: 33343 - DNA, 20 bp, synthetic construct
  misc_feature 1..20: note = chemically synthesized
  source 1..20: mol_type = other DNA
ttattatactttaagtttta

SEQ ID NO: 33344 - DNA, 20 bp, synthetic construct
  misc_feature 1..20: note = chemically synthesized
  source 1..20: mol_type = other DNA
gggtacatttgcacaacgtg

SEQ ID NO: 33345 - DNA, 20 bp, synthetic construct
  misc_feature 1..20: note = chemically synthesized
  source 1..20: mol_type = other DNA
ggtacatttgcacaacgtgc

SEQ ID NO: 33346 - DNA, 20 bp, synthetic construct
  misc_feature 1..20: note = chemically synthesized
  source 1..20: mol_type = other DNA
tatgtatacatgtgccatgt

SEQ ID NO: 33347 - DNA, 20 bp, synthetic construct
  misc_feature 1..20: note = chemically synthesized
  source 1..20: mol_type = other DNA
gcacccattaactcgtcact

SEQ ID NO: 33348 - DNA, 20 bp, synthetic construct
  misc_feature 1..20: note = chemically synthesized
  source 1..20: mol_type = other DNA
attaactcgtcacttagcat

SEQ ID NO: 33349 - DNA, 20 bp, synthetic construct
  misc_feature 1..20: note = chemically synthesized
  source 1..20: mol_type = other DNA
ttaactcgtcacttagcatt

SEQ ID NO: 33350 - DNA, 20 bp, synthetic construct
  misc_feature 1..20: note = chemically synthesized
  source 1..20: mol_type = other DNA
ccccgacccccaccccactg

SEQ ID NO: 33351 - DNA, 20 bp, synthetic construct
  misc_feature 1..20: note = chemically synthesized
  source 1..20: mol_type = other DNA
cccgacccccaccccactgc

SEQ ID NO: 33352 - DNA, 20 bp, synthetic construct
  misc_feature 1..20: note = chemically synthesized
  source 1..20: mol_type = other DNA
ccccaccccactgcaggccc

SEQ ID NO: 33353 - DNA, 20 bp, synthetic construct
  misc_feature 1..20: note = chemically synthesized
  source 1..20: mol_type = other DNA
attgttcaattcccacctat

SEQ ID NO: 33354 - DNA, 20 bp, synthetic construct
  misc_feature 1..20: note = chemically synthesized
  source 1..20: mol_type = other DNA
ttcaattcccacctatgagt

SEQ ID NO: 33355 - DNA, 20 bp, synthetic construct
  misc_feature 1..20: note = chemically synthesized
  source 1..20: mol_type = other DNA
cacctatgagtgagaacatg

SEQ ID NO: 33356 - DNA, 20 bp, synthetic construct
  misc_feature 1..20: note = chemically synthesized
  source 1..20: mol_type = other DNA
gagtgagaacatgcagtgtt

SEQ ID NO: 33357 - DNA, 20 bp, synthetic construct
  misc_feature 1..20: note = chemically synthesized
  source 1..20: mol_type = other DNA
tttggtttttgtccttgcga

SEQ ID NO: 33358 - DNA, 20 bp, synthetic construct
  misc_feature 1..20: note = chemically synthesized
  source 1..20: mol_type = other DNA
tgtccttgcgatagtttgct

SEQ ID NO: 33359 - DNA, 20 bp, synthetic construct
  misc_feature 1..20: note = chemically synthesized
  source 1..20: mol_type = other DNA
cgatagtttgctgagaatga

SEQ ID NO: 33360 - DNA, 20 bp, synthetic construct
  misc_feature 1..20: note = chemically synthesized
  source 1..20: mol_type = other DNA
ttgctgagaatgatggtttc

SEQ ID NO: 33361 - DNA, 20 bp, synthetic construct
  misc_feature 1..20: note = chemically synthesized
  source 1..20: mol_type = other DNA
gcttcatccatgtccctaca

SEQ ID NO: 33362 - DNA, 20 bp, synthetic construct
  misc_feature 1..20: note = chemically synthesized
  source 1..20: mol_type = other DNA
cttcatccatgtccctacaa

SEQ ID NO: 33363 - DNA, 20 bp, synthetic construct
  misc_feature 1..20: note = chemically synthesized
  source 1..20: mol_type = other DNA
catgaactcttcatttttta

SEQ ID NO: 33364 - DNA, 20 bp, synthetic construct
  misc_feature 1..20: note = chemically synthesized
  source 1..20: mol_type = other DNA
cttcattttttatggctgca

SEQ ID NO: 33365 - DNA, 20 bp, synthetic construct
  misc_feature 1..20: note = chemically synthesized
  source 1..20: mol_type = other DNA
tatggctgcatagtattcca

SEQ ID NO: 33366 - DNA, 20 bp, synthetic construct
  misc_feature 1..20: note = chemically synthesized
  source 1..20: mol_type = other DNA
tgtgccacgttttcttaatc

SEQ ID NO: 33367 - DNA, 20 bp, synthetic construct
  misc_feature 1..20: note = chemically synthesized
  source 1..20: mol_type = other DNA
ttaatccagtctatcattgt

SEQ ID NO: 33368 - DNA, 20 bp, synthetic construct
  misc_feature 1..20: note = chemically synthesized
  source 1..20: mol_type = other DNA
gtctatcattgttggacatt

SEQ ID NO: 33369 - DNA, 20 bp, synthetic construct
  misc_feature 1..20: note = chemically synthesized
  source 1..20: mol_type = other DNA
tctatcattgttggacattt

SEQ ID NO: 33370 - DNA, 20 bp, synthetic construct
  misc_feature 1..20: note = chemically synthesized
  source 1..20: mol_type = other DNA
tcattgttggacatttgggt

SEQ ID NO: 33371 - DNA, 20 bp, synthetic construct
  misc_feature 1..20: note = chemically synthesized
  source 1..20: mol_type = other DNA
tggacatttgggttggttcc

SEQ ID NO: 33372 - DNA, 20 bp, synthetic construct
  misc_feature 1..20: note = chemically synthesized
  source 1..20: mol_type = other DNA
caagtctttgctattgtgaa

SEQ ID NO: 33373 - DNA, 20 bp, synthetic construct
  misc_feature 1..20: note = chemically synthesized
  source 1..20: mol_type = other DNA
tacatgtgcatgtgtcttta

SEQ ID NO: 33374 - DNA, 20 bp, synthetic construct
  misc_feature 1..20: note = chemically synthesized
  source 1..20: mol_type = other DNA
atgtgcatgtgtctttatag

SEQ ID NO: 33375 - DNA, 20 bp, synthetic construct
  misc_feature 1..20: note = chemically synthesized
  source 1..20: mol_type = other DNA
agcatgatttataatccttt

SEQ ID NO: 33376 - DNA, 20 bp, synthetic construct
  misc_feature 1..20: note = chemically synthesized
  source 1..20: mol_type = other DNA
taatcctttgagtatgtacc

SEQ ID NO: 33377 - DNA, 20 bp, synthetic construct
  misc_feature 1..20: note = chemically synthesized
  source 1..20: mol_type = other DNA
tttgagtatgtacccagtaa

SEQ ID NO: 33378 - DNA, 20 bp, synthetic construct
  misc_feature 1..20: note = chemically synthesized
  source 1..20: mol_type = other DNA
ttgagtatgtacccagtaat

SEQ ID NO: 33379 - DNA, 20 bp, synthetic construct
  misc_feature 1..20: note = chemically synthesized
  source 1..20: mol_type = other DNA
gtatgtacccagtaatggga

SEQ ID NO: 33380 - DNA, 20 bp, synthetic construct
  misc_feature 1..20: note = chemically synthesized
  source 1..20: mol_type = other DNA
gtacccagtaatgggatggc

SEQ ID NO: 33381 - DNA, 20 bp, synthetic construct
  misc_feature 1..20: note = chemically synthesized
  source 1..20: mol_type = other DNA
tacccagtaatgggatggct

SEQ ID NO: 33382 - DNA, 20 bp, synthetic construct
  misc_feature 1..20: note = chemically synthesized
  source 1..20: mol_type = other DNA
aatgggatggctgggtcaaa

SEQ ID NO: 33383 - DNA, 20 bp, synthetic construct
  misc_feature 1..20: note = chemically synthesized
  source 1..20: mol_type = other DNA
gctgggtcaaatggtatttc

SEQ ID NO: 33384 - DNA, 20 bp, synthetic construct
  misc_feature 1..20: note = chemically synthesized
  source 1..20: mol_type = other DNA
tcaaatggtatttctagttc

SEQ ID NO: 33385 - DNA, 20 bp, synthetic construct
  misc_feature 1..20: note = chemically synthesized
  source 1..20: mol_type = other DNA
atttctagttctagatccct

SEQ ID NO: 33386 - DNA, 20 bp, synthetic construct
  misc_feature 1..20: note = chemically synthesized
  source 1..20: mol_type = other DNA
tttctagttctagatccctg

SEQ ID NO: 33387 - DNA, 20 bp, synthetic construct
  misc_feature 1..20: note = chemically synthesized
  source 1..20: mol_type = other DNA
cgccacactgacttccacaa

SEQ ID NO: 33388 - DNA, 20 bp, synthetic construct
  misc_feature 1..20: note = chemically synthesized
  source 1..20: mol_type = other DNA
gacttccacaatggttgaac

SEQ ID NO: 33389 - DNA, 20 bp, synthetic construct
  misc_feature 1..20: note = chemically synthesized
  source 1..20: mol_type = other DNA
acaatggttgaactagttta

SEQ ID NO: 33390 - DNA, 20 bp, synthetic construct
  misc_feature 1..20: note = chemically synthesized
  source 1..20: mol_type = other DNA
ctagtttacagtctcaccaa

SEQ ID NO: 33391 - DNA, 20 bp, synthetic construct
  misc_feature 1..20: note = chemically synthesized
  source 1..20: mol_type = other DNA
cagtctcaccaacagtgtaa

SEQ ID NO: 33392 - DNA, 20 bp, synthetic construct
  misc_feature 1..20: note = chemically synthesized
  source 1..20: mol_type = other DNA
ctacttcttcacatcctctc

SEQ ID NO: 33393 - DNA, 20 bp, synthetic construct
  misc_feature 1..20: note = chemically synthesized
  source 1..20: mol_type = other DNA
ttaatgatcgccattctaac

SEQ ID NO: 33394 - DNA, 20 bp, synthetic construct
  misc_feature 1..20: note = chemically synthesized
  source 1..20: mol_type = other DNA
atcgccattctaactggtgt

SEQ ID NO: 33395 - DNA, 20 bp, synthetic construct
  misc_feature 1..20: note = chemically synthesized
  source 1..20: mol_type = other DNA
ccattctaactggtgtgaga

SEQ ID NO: 33396 - DNA, 20 bp, synthetic construct
  misc_feature 1..20: note = chemically synthesized
  source 1..20: mol_type = other DNA
tgtgagatggtatctcactg

SEQ ID NO: 33397 - DNA, 20 bp, synthetic construct
  misc_feature 1..20: note = chemically synthesized
  source 1..20: mol_type = other DNA
tttgatttgtatttctctga

SEQ ID NO: 33398 - DNA, 20 bp, synthetic construct
  misc_feature 1..20: note = chemically synthesized
  source 1..20: mol_type = other DNA
atttgtatttctctgatggc

SEQ ID NO: 33399 - DNA, 20 bp, synthetic construct
  misc_feature 1..20: note = chemically synthesized
  source 1..20: mol_type = other DNA
ctctgatggccagtgatgat

SEQ ID NO: 33400 - DNA, 20 bp, synthetic construct
  misc_feature 1..20: note = chemically synthesized
  source 1..20: mol_type = other DNA
ctgcataaatgtcttctttt

SEQ ID NO: 33401 - DNA, 20 bp, synthetic construct
  misc_feature 1..20: note = chemically synthesized
  source 1..20: mol_type = other DNA
cataaatgtcttcttttgag

SEQ ID NO: 33402 - DNA, 20 bp, synthetic construct
  misc_feature 1..20: note = chemically synthesized
  source 1..20: mol_type = other DNA
atcctttgcccactttttga

SEQ ID NO: 33403 - DNA, 20 bp, synthetic construct
  misc_feature 1..20: note = chemically synthesized
  source 1..20: mol_type = other DNA
tcctttgcccactttttgat

SEQ ID NO: 33404 - DNA, 20 bp, synthetic construct
  misc_feature 1..20: note = chemically synthesized
  source 1..20: mol_type = other DNA
cctttgcccactttttgatg

SEQ ID NO: 33405 - DNA, 20 bp, synthetic construct
  misc_feature 1..20: note = chemically synthesized
  source 1..20: mol_type = other DNA
tttttcttgtaaatttgttt

SEQ ID NO: 33406 - DNA, 20 bp, synthetic construct
  misc_feature 1..20: note = chemically synthesized
  source 1..20: mol_type = other DNA
aaatttgtttgagttcatca

SEQ ID NO: 33407 - DNA, 20 bp, synthetic construct
  misc_feature 1..20: note = chemically synthesized
  source 1..20: mol_type = other DNA
tttgagttcatcatagattc

SEQ ID NO: 33408 - DNA, 20 bp, synthetic construct
  misc_feature 1..20: note = chemically synthesized
  source 1..20: mol_type = other DNA
tcatcatagattctggatat

SEQ ID NO: 33409 - DNA, 20 bp, synthetic construct
  misc_feature 1..20: note = chemically synthesized
  source 1..20: mol_type = other DNA
tctggatattagccctttgt

SEQ ID NO: 33410 - DNA, 20 bp, synthetic construct
  misc_feature 1..20: note = chemically synthesized
  source 1..20: mol_type = other DNA
atattagccctttgtcggat

SEQ ID NO: 33411 - DNA, 20 bp, synthetic construct
  misc_feature 1..20: note = chemically synthesized
  source 1..20: mol_type = other DNA
ttagccctttgtcggatgag

SEQ ID NO: 33412 - DNA, 20 bp, synthetic construct
  misc_feature 1..20: note = chemically synthesized
  source 1..20: mol_type = other DNA
atgttgcctgttcactctga

SEQ ID NO: 33413 - DNA, 20 bp, synthetic construct
  misc_feature 1..20: note = chemically synthesized
  source 1..20: mol_type = other DNA
ttgcctgttcactctgatgg

SEQ ID NO: 33414 - DNA, 20 bp, synthetic construct
  misc_feature 1..20: note = chemically synthesized
  source 1..20: mol_type = other DNA
tggtagtttcttttgctgtg

SEQ ID NO: 33415 - DNA, 20 bp, synthetic construct
  misc_feature 1..20: note = chemically synthesized
  source 1..20: mol_type = other DNA
tagtttcttttgctgtgcag

SEQ ID NO: 33416 - DNA, 20 bp, synthetic construct
  misc_feature 1..20: note = chemically synthesized
  source 1..20: mol_type = other DNA
tttgctgtgcagaagctctt

SEQ ID NO: 33417 - DNA, 20 bp, synthetic construct
  misc_feature 1..20: note = chemically synthesized
  source 1..20: mol_type = other DNA
cagaagctctttagtttaat

SEQ ID NO: 33418 - DNA, 20 bp, synthetic construct
  misc_feature 1..20: note = chemically synthesized
  source 1..20: mol_type = other DNA
tagatcccatttgtccattt

SEQ ID NO: 33419 - DNA, 20 bp, synthetic construct
  misc_feature 1..20: note = chemically synthesized
  source 1..20: mol_type = other DNA
gcttttgttgccattgcttt

SEQ ID NO: 33420 - DNA, 20 bp, synthetic construct
  misc_feature 1..20: note = chemically synthesized
  source 1..20: mol_type = other DNA
tgccattgcttttggtgttt

SEQ ID NO: 33421 - DNA, 20 bp, synthetic construct
  misc_feature 1..20: note = chemically synthesized
  source 1..20: mol_type = other DNA
cttttggtgttttagacatg

SEQ ID NO: 33422 - DNA, 20 bp, synthetic construct
  misc_feature 1..20: note = chemically synthesized
  source 1..20: mol_type = other DNA
gcccatgcctatgtcctgaa

SEQ ID NO: 33423 - DNA, 20 bp, synthetic construct
  misc_feature 1..20: note = chemically synthesized
  source 1..20: mol_type = other DNA
atgtcctgaatggtattgcc

SEQ ID NO: 33424 - DNA, 20 bp, synthetic construct
  misc_feature 1..20: note = chemically synthesized
  source 1..20: mol_type = other DNA
tgtcctgaatggtattgcct

SEQ ID NO: 33425 - DNA, 20 bp, synthetic construct
  misc_feature 1..20: note = chemically synthesized
  source 1..20: mol_type = other DNA
gtattgcctaggttttcttc

SEQ ID NO: 33426 - DNA, 20 bp, synthetic construct
  misc_feature 1..20: note = chemically synthesized
  source 1..20: mol_type = other DNA
attgcctaggttttcttcca

SEQ ID NO: 33427 - DNA, 20 bp, synthetic construct
  misc_feature 1..20: note = chemically synthesized
  source 1..20: mol_type = other DNA
gttttcttccagagttttta

SEQ ID NO: 33428 - DNA, 20 bp, synthetic construct
  misc_feature 1..20: note = chemically synthesized
  source 1..20: mol_type = other DNA
tccagagtttttatggtttt

SEQ ID NO: 33429 - DNA, 20 bp, synthetic construct
  misc_feature 1..20: note = chemically synthesized
  source 1..20: mol_type = other DNA
tggttttcagtctaacattt

SEQ ID NO: 33430 - DNA, 20 bp, synthetic construct
  misc_feature 1..20: note = chemically synthesized
  source 1..20: mol_type = other DNA
tcttgaattaatttttgtat

SEQ ID NO: 33431 - DNA, 20 bp, synthetic construct
  misc_feature 1..20: note = chemically synthesized
  source 1..20: mol_type = other DNA
cttgaattaatttttgtata

SEQ ID NO: 33432 - DNA, 20 bp, synthetic construct
  misc_feature 1..20: note = chemically synthesized
  source 1..20: mol_type = other DNA
ttaatttttgtataaggtgt

SEQ ID NO: 33433 - DNA, 20 bp, synthetic construct
  misc_feature 1..20: note = chemically synthesized
  source 1..20: mol_type = other DNA
tttttgtataaggtgtaaga

SEQ ID NO: 33434 - DNA, 20 bp, synthetic construct
  misc_feature 1..20: note = chemically synthesized
  source 1..20: mol_type = other DNA
ttttgtataaggtgtaagaa

SEQ ID NO: 33435 - DNA, 20 bp, synthetic construct
  misc_feature 1..20: note = chemically synthesized
  source 1..20: mol_type = other DNA
tttgtataaggtgtaagaaa

SEQ ID NO: 33436 - DNA, 20 bp, synthetic construct
  misc_feature 1..20: note = chemically synthesized
  source 1..20: mol_type = other DNA
taaggtgtaagaaagggatc

SEQ ID NO: 33437 - DNA, 20 bp, synthetic construct
  misc_feature 1..20: note = chemically synthesized
  source 1..20: mol_type = other DNA
gtaagaaagggatccagttt

SEQ ID NO: 33438 - DNA, 20 bp, synthetic construct
  misc_feature 1..20: note = chemically synthesized
  source 1..20: mol_type = other DNA
cagtttcagctttctgcgta

SEQ ID NO: 33439 - DNA, 20 bp, synthetic construct
  misc_feature 1..20: note = chemically synthesized
  source 1..20: mol_type = other DNA
ttcagctttctgcgtatggt

SEQ ID NO: 33440 - DNA, 20 bp, synthetic construct
  misc_feature 1..20: note = chemically synthesized
  source 1..20: mol_type = other DNA
gctttctgcgtatggttagc

SEQ ID NO: 33441 - DNA, 20 bp, synthetic construct
  misc_feature 1..20: note = chemically synthesized
  source 1..20: mol_type = other DNA
gtatggttagccagttttcc

SEQ ID NO: 33442 - DNA, 20 bp, synthetic construct
  misc_feature 1..20: note = chemically synthesized
  source 1..20: mol_type = other DNA
tcccagcaccatttattaaa

SEQ ID NO: 33443 - DNA, 20 bp, synthetic construct
  misc_feature 1..20: note = chemically synthesized
  source 1..20: mol_type = other DNA
cccagcaccatttattaaat

SEQ ID NO: 33444 - DNA, 20 bp, synthetic construct
  misc_feature 1..20: note = chemically synthesized
  source 1..20: mol_type = other DNA
ccagcaccatttattaaata

SEQ ID NO: 33445 - DNA, 20 bp, synthetic construct
  misc_feature 1..20: note = chemically synthesized
  source 1..20: mol_type = other DNA
tccccatttgttttttttgt

SEQ ID NO: 33446 - DNA, 20 bp, synthetic construct
  misc_feature 1..20: note = chemically synthesized
  source 1..20: mol_type = other DNA
ccccatttgttttttttgtc

SEQ ID NO: 33447 - DNA, 20 bp, synthetic construct
  misc_feature 1..20: note = chemically synthesized
  source 1..20: mol_type = other DNA
tttttttgtcaggtttgtca

SEQ ID NO: 33448 - DNA, 20 bp, synthetic construct
  misc_feature 1..20: note = chemically synthesized
  source 1..20: mol_type = other DNA
ttgtcaggtttgtcaaagat

SEQ ID NO: 33449 - DNA, 20 bp, synthetic construct
  misc_feature 1..20: note = chemically synthesized
  source 1..20: mol_type = other DNA
caggtttgtcaaagatcaga

SEQ ID NO: 33450 - DNA, 20 bp, synthetic construct
  misc_feature 1..20: note = chemically synthesized
  source 1..20: mol_type = other DNA
tgtcaaagatcagatggttg

SEQ ID NO: 33451 - DNA, 20 bp, synthetic construct
  misc_feature 1..20: note = chemically synthesized
  source 1..20: mol_type = other DNA
atcagatggttgtagacatg

SEQ ID NO: 33452 - DNA, 20 bp, synthetic construct
  misc_feature 1..20: note = chemically synthesized
  source 1..20: mol_type = other DNA
agacatgcggcattatttct

SEQ ID NO: 33453 - DNA, 20 bp, synthetic construct
  misc_feature 1..20: note = chemically synthesized
  source 1..20: mol_type = other DNA
gacatgcggcattatttctg

SEQ ID NO: 33454 - DNA, 20 bp, synthetic construct
  misc_feature 1..20: note = chemically synthesized
  source 1..20: mol_type = other DNA
aggcctctgttctgttccat

SEQ ID NO: 33455 - DNA, 20 bp, synthetic construct
  misc_feature 1..20: note = chemically synthesized
  source 1..20: mol_type = other DNA
attggtctatatctctgttt

SEQ ID NO: 33456 - DNA, 20 bp, synthetic construct
  misc_feature 1..20: note = chemically synthesized
  source 1..20: mol_type = other DNA
ctatatctctgttttggtac

SEQ ID NO: 33457 - DNA, 20 bp, synthetic construct
  misc_feature 1..20: note = chemically synthesized
  source 1..20: mol_type = other DNA
gtaccagtaccatgctgttt

SEQ ID NO: 33458 - DNA, 20 bp, synthetic construct
  misc_feature 1..20: note = chemically synthesized
  source 1..20: mol_type = other DNA
ccatgctgttttggttactg

SEQ ID NO: 33459 - DNA, 20 bp, synthetic construct
  misc_feature 1..20: note = chemically synthesized
  source 1..20: mol_type = other DNA
ttttggttactgtagccttg

SEQ ID NO: 33460 - DNA, 20 bp, synthetic construct
  misc_feature 1..20: note = chemically synthesized
  source 1..20: mol_type = other DNA
gttactgtagccttgtagta

SEQ ID NO: 33461 - DNA, 20 bp, synthetic construct
  misc_feature 1..20: note = chemically synthesized
  source 1..20: mol_type = other DNA
tagccttgtagtatagtttg

SEQ ID NO: 33462 - DNA, 20 bp, synthetic construct
  misc_feature 1..20: note = chemically synthesized
  source 1..20: mol_type = other DNA
cttgtagtatagtttgaagt

SEQ ID NO: 33463 - DNA, 20 bp, synthetic construct
  misc_feature 1..20: note = chemically synthesized
  source 1..20: mol_type = other DNA
ttgtagtatagtttgaagtc

SEQ ID NO: 33464 - DNA, 20 bp, synthetic construct
  misc_feature 1..20: note = chemically synthesized
  source 1..20: mol_type = other DNA
tagtatagtttgaagtcagg

SEQ ID NO: 33465 - DNA, 20 bp, synthetic construct
  misc_feature 1..20: note = chemically synthesized
  source 1..20: mol_type = other DNA
gtcaggtagcgtgatgcctc

SEQ ID NO: 33466 - DNA, 20 bp, synthetic construct
  misc_feature 1..20: note = chemically synthesized
  source 1..20: mol_type = other DNA
tgcctccagctttgttcttt

SEQ ID NO: 33467 - DNA, 20 bp, synthetic construct
  misc_feature 1..20: note = chemically synthesized
  source 1..20: mol_type = other DNA
ccagctttgttcttttggct

SEQ ID NO: 33468 - DNA, 20 bp, synthetic construct
  misc_feature 1..20: note = chemically synthesized
  source 1..20: mol_type = other DNA
cagctttgttcttttggctt

SEQ ID NO: 33469 - DNA, 20 bp, synthetic construct
  misc_feature 1..20: note = chemically synthesized
  source 1..20: mol_type = other DNA
ttgttcttttggcttaggat

SEQ ID NO: 33470 - DNA, 20 bp, synthetic construct
  misc_feature 1..20: note = chemically synthesized
  source 1..20: mol_type = other DNA
ttaggattggcatgtcaatg

SEQ ID NO: 33471 - DNA, 20 bp, synthetic construct
  misc_feature 1..20: note = chemically synthesized
  source 1..20: mol_type = other DNA
taggattggcatgtcaatgt

SEQ ID NO: 33472 - DNA, 20 bp, synthetic construct
  misc_feature 1..20: note = chemically synthesized
  source 1..20: mol_type = other DNA
tgtcaatgtgggctcttttt

SEQ ID NO: 33473 - DNA, 20 bp, synthetic construct
  misc_feature 1..20: note = chemically synthesized
  source 1..20: mol_type = other DNA
ttggttccatatgaacttta

SEQ ID NO: 33474 - DNA, 20 bp, synthetic construct
  misc_feature 1..20: note = chemically synthesized
  source 1..20: mol_type = other DNA
gttccatatgaactttaaag

SEQ ID NO: 33475 - DNA, 20 bp, synthetic construct
  misc_feature 1..20: note = chemically synthesized
  source 1..20: mol_type = other DNA
tagttttttccaattctgtg

SEQ ID NO: 33476 - DNA, 20 bp, synthetic construct
  misc_feature 1..20: note = chemically synthesized
  source 1..20: mol_type = other DNA
tttttccaattctgtgaaga

SEQ ID NO: 33477 - DNA, 20 bp, synthetic construct
  misc_feature 1..20: note = chemically synthesized
  source 1..20: mol_type = other DNA
aattctgtgaagaaagtcat

SEQ ID NO: 33478 - DNA, 20 bp, synthetic construct
  misc_feature 1..20: note = chemically synthesized
  source 1..20: mol_type = other DNA
tctgtgaagaaagtcattgg

SEQ ID NO: 33479 - DNA, 20 bp, synthetic construct
  misc_feature 1..20: note = chemically synthesized
  source 1..20: mol_type = other DNA
gaaagtcattggtagcttga

SEQ ID NO: 33480 - DNA, 20 bp, synthetic construct
  misc_feature 1..20: note = chemically synthesized
  source 1..20: mol_type = other DNA
aaagtcattggtagcttgat

SEQ ID NO: 33481 - DNA, 20 bp, synthetic construct
  misc_feature 1..20: note = chemically synthesized
  source 1..20: mol_type = other DNA
aagtcattggtagcttgatg

SEQ ID NO: 33482 - DNA, 20 bp, synthetic construct
  misc_feature 1..20: note = chemically synthesized
  source 1..20: mol_type = other DNA
cattggtagcttgatgggga

SEQ ID NO: 33483 - DNA, 20 bp, synthetic construct
  misc_feature 1..20: note = chemically synthesized
  source 1..20: mol_type = other DNA
attgaatctataaattacct

SEQ ID NO: 33484 - DNA, 20 bp, synthetic construct
  misc_feature 1..20: note = chemically synthesized
  source 1..20: mol_type = other DNA
ttgaatctataaattacctt

SEQ ID NO: 33485 - DNA, 20 bp, synthetic construct
  misc_feature 1..20: note = chemically synthesized
  source 1..20: mol_type = other DNA
ataaattaccttgggctgta

SEQ ID NO: 33486 - DNA, 20 bp, synthetic construct
  misc_feature 1..20: note = chemically synthesized
  source 1..20: mol_type = other DNA
tattgattcttcctacccat

SEQ ID NO: 33487 - DNA, 20 bp, synthetic construct
  misc_feature 1..20: note = chemically synthesized
  source 1..20: mol_type = other DNA
attcttcctacccatgagca

SEQ ID NO: 33488 - DNA, 20 bp, synthetic construct
  misc_feature 1..20: note = chemically synthesized
  source 1..20: mol_type = other DNA
gtatcttcttttatttcatt

SEQ ID NO: 33489 - DNA, 20 bp, synthetic construct
  misc_feature 1..20: note = chemically synthesized
  source 1..20: mol_type = other DNA
tcttcttttatttcattcag

SEQ ID NO: 33490 - DNA, 20 bp, synthetic construct
  misc_feature 1..20: note = chemically synthesized
  source 1..20: mol_type = other DNA
tcttttatttcattcagcag

SEQ ID NO: 33491 - DNA, 20 bp, synthetic construct
  misc_feature 1..20: note = chemically synthesized
  source 1..20: mol_type = other DNA
tttcattcagcagtggtttg

SEQ ID NO: 33492 - DNA, 20 bp, synthetic construct
  misc_feature 1..20: note = chemically synthesized
  source 1..20: mol_type = other DNA
gtggtttgtagttctccttg

SEQ ID NO: 33493 - DNA, 20 bp, synthetic construct
  misc_feature 1..20: note = chemically synthesized
  source 1..20: mol_type = other DNA
ggtttgtagttctccttgaa

SEQ ID NO: 33494 - DNA, 20 bp, synthetic construct
  misc_feature 1..20: note = chemically synthesized
  source 1..20: mol_type = other DNA
gtttgtagttctccttgaag

SEQ ID NO: 33495 - DNA, 20 bp, synthetic construct
  misc_feature 1..20: note = chemically synthesized
  source 1..20: mol_type = other DNA
aggtccttcacctctcttgt

SEQ ID NO: 33496 - DNA, 20 bp, synthetic construct
  misc_feature 1..20: note = chemically synthesized
  source 1..20: mol_type = other DNA
ccttcacctctcttgtaagt

SEQ ID NO: 33497 - DNA, 20 bp, synthetic construct
  misc_feature 1..20: note = chemically synthesized
  source 1..20: mol_type = other DNA
tctcttgtaagttggattcc

SEQ ID NO: 33498 - DNA, 20 bp, synthetic construct
  misc_feature 1..20: note = chemically synthesized
  source 1..20: mol_type = other DNA
ctcttgtaagttggattcct

SEQ ID NO: 33499 - DNA, 20 bp, synthetic construct
  misc_feature 1..20: note = chemically synthesized
  source 1..20: mol_type = other DNA
taggtattttattctctttg

SEQ ID NO: 33500 - DNA, 20 bp, synthetic construct
  misc_feature 1..20: note = chemically synthesized
  source 1..20: mol_type = other DNA
ctctttgaagcaattgtgaa

SEQ ID NO: 33501 - DNA, 20 bp, synthetic construct
  misc_feature 1..20: note = chemically synthesized
  source 1..20: mol_type = other DNA
tctttgaagcaattgtgaat

SEQ ID NO: 33502 - DNA, 20 bp, synthetic construct
  misc_feature 1..20: note = chemically synthesized
  source 1..20: mol_type = other DNA
tttgaagcaattgtgaatgg

SEQ ID NO: 33503 - DNA, 20 bp, synthetic construct
  misc_feature 1..20: note = chemically synthesized
  source 1..20: mol_type = other DNA
atgggagttccctcatgatt

SEQ ID NO: 33504 - DNA, 20 bp, synthetic construct
  misc_feature 1..20: note = chemically synthesized
  source 1..20: mol_type = other DNA
gctctctgtttgtctgttat

SEQ ID NO: 33505 - DNA, 20 bp, synthetic construct
  misc_feature 1..20: note = chemically synthesized
  source 1..20: mol_type = other DNA
tttgtctgttattggtgtat

SEQ ID NO: 33506 - DNA, 20 bp, synthetic construct
  misc_feature 1..20: note = chemically synthesized
  source 1..20: mol_type = other DNA
gcacattgattttgtatcct

SEQ ID NO: 33507 - DNA, 20 bp, synthetic construct
  misc_feature 1..20: note = chemically synthesized
  source 1..20: mol_type = other DNA
tgtatcctgagactttgctg

SEQ ID NO: 33508 - DNA, 20 bp, synthetic construct
  misc_feature 1..20: note = chemically synthesized
  source 1..20: mol_type = other DNA
actttgctgaagttgcctat

SEQ ID NO: 33509 - DNA, 20 bp, synthetic construct
  misc_feature 1..20: note = chemically synthesized
  source 1..20: mol_type = other DNA
ctgaagttgcctatcagttt

SEQ ID NO: 33510 - DNA, 20 bp, synthetic construct
  misc_feature 1..20: note = chemically synthesized
  source 1..20: mol_type = other DNA
tgaagttgcctatcagttta

SEQ ID NO: 33511 - DNA, 20 bp, synthetic construct
  misc_feature 1..20: note = chemically synthesized
  source 1..20: mol_type = other DNA
ctatcagtttaaggacattt

SEQ ID NO: 33512 - DNA, 20 bp, synthetic construct
  misc_feature 1..20: note = chemically synthesized
  source 1..20: mol_type = other DNA
tatcagtttaaggacatttt

SEQ ID NO: 33513 - DNA, 20 bp, synthetic construct
  misc_feature 1..20: note = chemically synthesized
  source 1..20: mol_type = other DNA
gtttaaggacattttgggct

SEQ ID NO: 33514 - DNA, 20 bp, synthetic construct
  misc_feature 1..20: note = chemically synthesized
  source 1..20: mol_type = other DNA
aaggacattttgggctgaga

SEQ ID NO: 33515 - DNA, 20 bp, synthetic construct
  misc_feature 1..20: note = chemically synthesized
  source 1..20: mol_type = other DNA
gacattttgggctgagacag

SEQ ID NO: 33516 - DNA, 20 bp, synthetic construct
  misc_feature 1..20: note = chemically synthesized
  source 1..20: mol_type = other DNA
acattttgggctgagacagt

SEQ ID NO: 33517 - DNA, 20 bp, synthetic construct
  misc_feature 1..20: note = chemically synthesized
  source 1..20: mol_type = other DNA
cattttgggctgagacagtg

SEQ ID NO: 33518 - DNA, 20 bp, synthetic construct
  misc_feature 1..20: note = chemically synthesized
  source 1..20: mol_type = other DNA
gctgagacagtggggttttc

SEQ ID NO: 33519 - DNA, 20 bp, synthetic construct
  misc_feature 1..20: note = chemically synthesized
  source 1..20: mol_type = other DNA
acaatcgtgtcatctgcaaa

SEQ ID NO: 33520 - DNA, 20 bp, synthetic construct
  misc_feature 1..20: note = chemically synthesized
  source 1..20: mol_type = other DNA
caatcgtgtcatctgcaaac

SEQ ID NO: 33521 - DNA, 20 bp, synthetic construct
  misc_feature 1..20: note = chemically synthesized
  source 1..20: mol_type = other DNA
aatcgtgtcatctgcaaaca

SEQ ID NO: 33522 - DNA, 20 bp, synthetic construct
  misc_feature 1..20: note = chemically synthesized
  source 1..20: mol_type = other DNA
cttctcctgcctaattgccc

SEQ ID NO: 33523 - DNA, 20 bp, synthetic construct
  misc_feature 1..20: note = chemically synthesized
  source 1..20: mol_type = other DNA
tcctgcctaattgccctggc

SEQ ID NO: 33524 - DNA, 20 bp, synthetic construct
  misc_feature 1..20: note = chemically synthesized
  source 1..20: mol_type = other DNA
aattccaacactatgttgaa

SEQ ID NO: 33525 - DNA, 20 bp, synthetic construct
  misc_feature 1..20: note = chemically synthesized
  source 1..20: mol_type = other DNA
attccaacactatgttgaat

SEQ ID NO: 33526 - DNA, 20 bp, synthetic construct
  misc_feature 1..20: note = chemically synthesized
  source 1..20: mol_type = other DNA
tccaacactatgttgaatag

SEQ ID NO: 33527 - DNA, 20 bp, synthetic construct
  misc_feature 1..20: note = chemically synthesized
  source 1..20: mol_type = other DNA
aacactatgttgaataggag

SEQ ID NO: 33528 - DNA, 20 bp, synthetic construct
  misc_feature 1..20: note = chemically synthesized
  source 1..20: mol_type = other DNA
ctatgttgaataggagtagt

SEQ ID NO: 33529 - DNA, 20 bp, synthetic construct
  misc_feature 1..20: note = chemically synthesized
  source 1..20: mol_type = other DNA
atgttgaataggagtagtga

SEQ ID NO: 33530 - DNA, 20 bp, synthetic construct
  misc_feature 1..20: note = chemically synthesized
  source 1..20: mol_type = other DNA
gttgaataggagtagtgaga

SEQ ID NO: 33531 - DNA, 20 bp, synthetic construct
  misc_feature 1..20: note = chemically synthesized
  source 1..20: mol_type = other DNA
ttgaataggagtagtgagag

SEQ ID NO: 33532 - DNA, 20 bp, synthetic construct
  misc_feature 1..20: note = chemically synthesized
  source 1..20: mol_type = other DNA
tgaataggagtagtgagaga

SEQ ID NO: 33533 - DNA, 20 bp, synthetic construct
  misc_feature 1..20: note = chemically synthesized
  source 1..20: mol_type = other DNA
agggcatccctgtcttgtgc

SEQ ID NO: 33534 - DNA, 20 bp, synthetic construct
  misc_feature 1..20: note = chemically synthesized
  source 1..20: mol_type = other DNA
ctgtcttgtgccagttttca

SEQ ID NO: 33535 - DNA, 20 bp, synthetic construct
  misc_feature 1..20: note = chemically synthesized
  source 1..20: mol_type = other DNA
tgtcttgtgccagttttcaa

SEQ ID NO: 33536 - DNA, 20 bp, synthetic construct
  misc_feature 1..20: note = chemically synthesized
  source 1..20: mol_type = other DNA
gtcttgtgccagttttcaaa

SEQ ID NO: 33537 - DNA, 20 bp, synthetic construct
  misc_feature 1..20: note = chemically synthesized
  source 1..20: mol_type = other DNA
gttttcaaagggaatgcttc

SEQ ID NO: 33538 - DNA, 20 bp, synthetic construct
  misc_feature 1..20: note = chemically synthesized
  source 1..20: mol_type = other DNA
gcttccagtttttgtccatt

SEQ ID NO: 33539 - DNA, 20 bp, synthetic construct
  misc_feature 1..20: note = chemically synthesized
  source 1..20: mol_type = other DNA
ttgtccattcagtatgatat

SEQ ID NO: 33540 - DNA, 20 bp, synthetic construct
  misc_feature 1..20: note = chemically synthesized
  source 1..20: mol_type = other DNA
attcagtatgatattggctg

SEQ ID NO: 33541 - DNA, 20 bp, synthetic construct
  misc_feature 1..20: note = chemically synthesized
  source 1..20: mol_type = other DNA
ttcagtatgatattggctgt

SEQ ID NO: 33542 - DNA, 20 bp, synthetic construct
  misc_feature 1..20: note = chemically synthesized
  source 1..20: mol_type = other DNA
tattggctgtgggtttgtca

SEQ ID NO: 33543 - DNA, 20 bp, synthetic construct
  misc_feature 1..20: note = chemically synthesized
  source 1..20: mol_type = other DNA
ggctgtgggtttgtcataga

SEQ ID NO: 33544 - DNA, 20 bp, synthetic construct
  misc_feature 1..20: note = chemically synthesized
  source 1..20: mol_type = other DNA
tagatggctcttattatttt

SEQ ID NO: 33545 - DNA, 20 bp, synthetic construct
  misc_feature 1..20: note = chemically synthesized
  source 1..20: mol_type = other DNA
ccatcaatacctaatttatt

SEQ ID NO: 33546 - DNA, 20 bp, synthetic construct
  misc_feature 1..20: note = chemically synthesized
  source 1..20: mol_type = other DNA
atcaatacctaatttattga

SEQ ID NO: 33547 - DNA, 20 bp, synthetic construct
  misc_feature 1..20: note = chemically synthesized
  source 1..20: mol_type = other DNA
cctaatttattgagagtttt

SEQ ID NO: 33548 - DNA, 20 bp, synthetic construct
  misc_feature 1..20: note = chemically synthesized
  source 1..20: mol_type = other DNA
tattgagagtttttagcatg

SEQ ID NO: 33549 - DNA, 20 bp, synthetic construct
  misc_feature 1..20: note = chemically synthesized
  source 1..20: mol_type = other DNA
attgagagtttttagcatga

SEQ ID NO: 33550 - DNA, 20 bp, synthetic construct
  misc_feature 1..20: note = chemically synthesized
  source 1..20: mol_type = other DNA
ttgagagtttttagcatgaa

SEQ ID NO: 33551 - DNA, 20 bp, synthetic construct
  misc_feature 1..20: note = chemically synthesized
  source 1..20: mol_type = other DNA
agggttgttgaattttgtca

SEQ ID NO: 33552 - DNA, 20 bp, synthetic construct
  misc_feature 1..20: note = chemically synthesized
  source 1..20: mol_type = other DNA
gggttgttgaattttgtcaa

SEQ ID NO: 33553 - DNA, 20 bp, synthetic construct
  misc_feature 1..20: note = chemically synthesized
  source 1..20: mol_type = other DNA
aggccttttctgcatctatt

SEQ ID NO: 33554 - DNA, 20 bp, synthetic construct
  misc_feature 1..20: note = chemically synthesized
  source 1..20: mol_type = other DNA
catctattgagataatcatg

SEQ ID NO: 33555 - DNA, 20 bp, synthetic construct
  misc_feature 1..20: note = chemically synthesized
  source 1..20: mol_type = other DNA
aatcatgtggtttttgtctt

SEQ ID NO: 33556 - DNA, 20 bp, synthetic construct
  misc_feature 1..20: note = chemically synthesized
  source 1..20: mol_type = other DNA
ctttggttctgtttatatgc

SEQ ID NO: 33557 - DNA, 20 bp, synthetic construct
  misc_feature 1..20: note = chemically synthesized
  source 1..20: mol_type = other DNA
ttgatttgcatatgttgaac

SEQ ID NO: 33558 - DNA, 20 bp, synthetic construct
  misc_feature 1..20: note = chemically synthesized
  source 1..20: mol_type = other DNA
gttgaaccagccttgcatcc

SEQ ID NO: 33559 - DNA, 20 bp, synthetic construct
  misc_feature 1..20: note = chemically synthesized
  source 1..20: mol_type = other DNA
ttgaaccagccttgcatccc

SEQ ID NO: 33560 - DNA, 20 bp, synthetic construct
  misc_feature 1..20: note = chemically synthesized
  source 1..20: mol_type = other DNA
tgaaccagccttgcatccca

SEQ ID NO: 33561 - DNA, 20 bp, synthetic construct
  misc_feature 1..20: note = chemically synthesized
  source 1..20: mol_type = other DNA
agccttgcatcccagggatg

SEQ ID NO: 33562 - DNA, 20 bp, synthetic construct
  misc_feature 1..20: note = chemically synthesized
  source 1..20: mol_type = other DNA
ggatgaagcccacttgatca

SEQ ID NO: 33563 - DNA, 20 bp, synthetic construct
  misc_feature 1..20: note = chemically synthesized
  source 1..20: mol_type = other DNA
tgaagcccacttgatcatgg

SEQ ID NO: 33564 - DNA, 20 bp, synthetic construct
  misc_feature 1..20: note = chemically synthesized
  source 1..20: mol_type = other DNA
cccacttgatcatggtggat

SEQ ID NO: 33565 - DNA, 20 bp, synthetic construct
  misc_feature 1..20: note = chemically synthesized
  source 1..20: mol_type = other DNA
gatcatggtggataagcttt

SEQ ID NO: 33566 - DNA, 20 bp, synthetic construct
  misc_feature 1..20: note = chemically synthesized
  source 1..20: mol_type = other DNA
taagcttttggatgtgctgc

SEQ ID NO: 33567 - DNA, 20 bp, synthetic construct
  misc_feature 1..20: note = chemically synthesized
  source 1..20: mol_type = other DNA
tgctgctggatttgctttgc

SEQ ID NO: 33568 - DNA, 20 bp, synthetic construct
  misc_feature 1..20: note = chemically synthesized
  source 1..20: mol_type = other DNA
tgctttgccagtattttatt

SEQ ID NO: 33569 - DNA, 20 bp, synthetic construct
  misc_feature 1..20: note = chemically synthesized
  source 1..20: mol_type = other DNA
gctttgccagtattttattg

SEQ ID NO: 33570 - DNA, 20 bp, synthetic construct
  misc_feature 1..20: note = chemically synthesized
  source 1..20: mol_type = other DNA
ttttttgcatcgatgtccat

SEQ ID NO: 33571 - DNA, 20 bp, synthetic construct
  misc_feature 1..20: note = chemically synthesized
  source 1..20: mol_type = other DNA
tttttgcatcgatgtccatc

SEQ ID NO: 33572 - DNA, 20 bp, synthetic construct
  misc_feature 1..20: note = chemically synthesized
  source 1..20: mol_type = other DNA
ttttgcatcgatgtccatca

SEQ ID NO: 33573 - DNA, 20 bp, synthetic construct
  misc_feature 1..20: note = chemically synthesized
  source 1..20: mol_type = other DNA
tcgatgtccatcagggatat

SEQ ID NO: 33574 - DNA, 20 bp, synthetic construct
  misc_feature 1..20: note = chemically synthesized
  source 1..20: mol_type = other DNA
ttttttgttgtgtctctgcc

SEQ ID NO: 33575 - DNA, 20 bp, synthetic construct
  misc_feature 1..20: note = chemically synthesized
  source 1..20: mol_type = other DNA
gttgtgtctctgcccggctt

SEQ ID NO: 33576 - DNA, 20 bp, synthetic construct
  misc_feature 1..20: note = chemically synthesized
  source 1..20: mol_type = other DNA
tctctgcccggctttggtat

SEQ ID NO: 33577 - DNA, 20 bp, synthetic construct
  misc_feature 1..20: note = chemically synthesized
  source 1..20: mol_type = other DNA
ctctgcccggctttggtatc

SEQ ID NO: 33578 - DNA, 20 bp, synthetic construct
  misc_feature 1..20: note = chemically synthesized
  source 1..20: mol_type = other DNA
ctttggtatcaggatgatgc

SEQ ID NO: 33579 - DNA, 20 bp, synthetic construct
  misc_feature 1..20: note = chemically synthesized
  source 1..20: mol_type = other DNA
tgatgctggcctcataaaat

SEQ ID NO: 33580 - DNA, 20 bp, synthetic construct
  misc_feature 1..20: note = chemically synthesized
  source 1..20: mol_type = other DNA
gctggcctcataaaatgagt

SEQ ID NO: 33581 - DNA, 20 bp, synthetic construct
  misc_feature 1..20: note = chemically synthesized
  source 1..20: mol_type = other DNA
ctggcctcataaaatgagtt

SEQ ID NO: 33582 - DNA, 20 bp, synthetic construct
  misc_feature 1..20: note = chemically synthesized
  source 1..20: mol_type = other DNA
tggcctcataaaatgagtta

SEQ ID NO: 33583 - DNA, 20 bp, synthetic construct
  misc_feature 1..20: note = chemically synthesized
  source 1..20: mol_type = other DNA
gcctcataaaatgagttagg

SEQ ID NO: 33584 - DNA, 20 bp, synthetic construct
  misc_feature 1..20: note = chemically synthesized
  source 1..20: mol_type = other DNA
cctcataaaatgagttaggg

SEQ ID NO: 33585 - DNA, 20 bp, synthetic construct
  misc_feature 1..20: note = chemically synthesized
  source 1..20: mol_type = other DNA
tcttttactattgattcgaa

SEQ ID NO: 33586 - DNA, 20 bp, synthetic construct
  misc_feature 1..20: note = chemically synthesized
  source 1..20: mol_type = other DNA
actattgattcgaatagttt

SEQ ID NO: 33587 - DNA, 20 bp, synthetic construct
  misc_feature 1..20: note = chemically synthesized
  source 1..20: mol_type = other DNA
tattgattcgaatagtttca

SEQ ID NO: 33588 - DNA, 20 bp, synthetic construct
  misc_feature 1..20: note = chemically synthesized
  source 1..20: mol_type = other DNA
attgattcgaatagtttcag

SEQ ID NO: 33589 - DNA, 20 bp, synthetic construct
  misc_feature 1..20: note = chemically synthesized
  source 1..20: mol_type = other DNA
ttgattcgaatagtttcaga

SEQ ID NO: 33590 - DNA, 20 bp, synthetic construct
  misc_feature 1..20: note = chemically synthesized
  source 1..20: mol_type = other DNA
tcgaatagtttcagagggaa

SEQ ID NO: 33591 - DNA, 20 bp, synthetic construct
  misc_feature 1..20: note = chemically synthesized
  source 1..20: mol_type = other DNA
agtttcagagggaatggtac

SEQ ID NO: 33592 - DNA, 20 bp, synthetic construct
  misc_feature 1..20: note = chemically synthesized
  source 1..20: mol_type = other DNA
ccagctcctccttgtacctc

SEQ ID NO: 33593 - DNA, 20 bp, synthetic construct
  misc_feature 1..20: note = chemically synthesized
  source 1..20: mol_type = other DNA
gctcctccttgtacctctgg

SEQ ID NO: 33594 - DNA, 20 bp, synthetic construct
  misc_feature 1..20: note = chemically synthesized
  source 1..20: mol_type = other DNA
cttgtacctctggtagaatt

SEQ ID NO: 33595 - DNA, 20 bp, synthetic construct
  misc_feature 1..20: note = chemically synthesized
  source 1..20: mol_type = other DNA
aatttggctgtgactccatc

SEQ ID NO: 33596 - DNA, 20 bp, synthetic construct
  misc_feature 1..20: note = chemically synthesized
  source 1..20: mol_type = other DNA
gctgtgactccatctggtcc

SEQ ID NO: 33597 - DNA, 20 bp, synthetic construct
  misc_feature 1..20: note = chemically synthesized
  source 1..20: mol_type = other DNA
atctggtcctggactgtttt

SEQ ID NO: 33598 - DNA, 20 bp, synthetic construct
  misc_feature 1..20: note = chemically synthesized
  source 1..20: mol_type = other DNA
ggtcctggactgtttttggt

SEQ ID NO: 33599 - DNA, 20 bp, synthetic construct
  misc_feature 1..20: note = chemically synthesized
  source 1..20: mol_type = other DNA
ctggactgtttttggttggt

SEQ ID NO: 33600 - DNA, 20 bp, synthetic construct
  misc_feature 1..20: note = chemically synthesized
  source 1..20: mol_type = other DNA
attaattattgcctcaattt

SEQ ID NO: 33601 - DNA, 20 bp, synthetic construct
  misc_feature 1..20: note = chemically synthesized
  source 1..20: mol_type = other DNA
tcaatttcagatcctgttat

SEQ ID NO: 33602 - DNA, 20 bp, synthetic construct
  misc_feature 1..20: note = chemically synthesized
  source 1..20: mol_type = other DNA
gatcctgttattggtctatt

SEQ ID NO: 33603 - DNA, 20 bp, synthetic construct
  misc_feature 1..20: note = chemically synthesized
  source 1..20: mol_type = other DNA
tcctgttattggtctattca

SEQ ID NO: 33604 - DNA, 20 bp, synthetic construct
  misc_feature 1..20: note = chemically synthesized
  source 1..20: mol_type = other DNA
tcagagattcaacttcttcc

SEQ ID NO: 33605 - DNA, 20 bp, synthetic construct
  misc_feature 1..20: note = chemically synthesized
  source 1..20: mol_type = other DNA
gattcaacttcttcctggtt

SEQ ID NO: 33606 - DNA, 20 bp, synthetic construct
  misc_feature 1..20: note = chemically synthesized
  source 1..20: mol_type = other DNA
acttcttcctggtttagtct

SEQ ID NO: 33607 - DNA, 20 bp, synthetic construct
  misc_feature 1..20: note = chemically synthesized
  source 1..20: mol_type = other DNA
cttcttcctggtttagtctt

SEQ ID NO: 33608 - DNA, 20 bp, synthetic construct
  misc_feature 1..20: note = chemically synthesized
  source 1..20: mol_type = other DNA
tcttcctggtttagtcttgg

SEQ ID NO: 33609 - DNA, 20 bp, synthetic construct
  misc_feature 1..20: note = chemically synthesized
  source 1..20: mol_type = other DNA
cttcctggtttagtcttggg

SEQ ID NO: 33610 - DNA, 20 bp, synthetic construct
  misc_feature 1..20: note = chemically synthesized
  source 1..20: mol_type = other DNA
ttcctggtttagtcttggga

SEQ ID NO: 33611 - DNA, 20 bp, synthetic construct
  misc_feature 1..20: note = chemically synthesized
  source 1..20: mol_type = other DNA
cttgggagggtgtatgtgtc

SEQ ID NO: 33612 - DNA, 20 bp, synthetic construct
  misc_feature 1..20: note = chemically synthesized
  source 1..20: mol_type = other DNA
ttgggagggtgtatgtgtca

SEQ ID NO: 33613 - DNA, 20 bp, synthetic construct
  misc_feature 1..20: note = chemically synthesized
  source 1..20: mol_type = other DNA
aggaatttatccatttcttc

SEQ ID NO: 33614 - DNA, 20 bp, synthetic construct
  misc_feature 1..20: note = chemically synthesized
  source 1..20: mol_type = other DNA
tccatttcttctagattttc

SEQ ID NO: 33615 - DNA, 20 bp, synthetic construct
  misc_feature 1..20: note = chemically synthesized
  source 1..20: mol_type = other DNA
gattttctagtttatttgtg

SEQ ID NO: 33616 - DNA, 20 bp, synthetic construct
  misc_feature 1..20: note = chemically synthesized
  source 1..20: mol_type = other DNA
ttttctagtttatttgtgta

SEQ ID NO: 33617 - DNA, 20 bp, synthetic construct
  misc_feature 1..20: note = chemically synthesized
  source 1..20: mol_type = other DNA
tttctagtttatttgtgtag

SEQ ID NO: 33618 - DNA, 20 bp, synthetic construct
  misc_feature 1..20: note = chemically synthesized
  source 1..20: mol_type = other DNA
tatttgtgtagaggtgttta

SEQ ID NO: 33619 - DNA, 20 bp, synthetic construct
  misc_feature 1..20: note = chemically synthesized
  source 1..20: mol_type = other DNA
gtgtttatagtattctctga

SEQ ID NO: 33620 - DNA, 20 bp, synthetic construct
  misc_feature 1..20: note = chemically synthesized
  source 1..20: mol_type = other DNA
tttatagtattctctgatgg

SEQ ID NO: 33621 - DNA, 20 bp, synthetic construct
  misc_feature 1..20: note = chemically synthesized
  source 1..20: mol_type = other DNA
gatggtggtttgtatttctg

SEQ ID NO: 33622 - DNA, 20 bp, synthetic construct
  misc_feature 1..20: note = chemically synthesized
  source 1..20: mol_type = other DNA
atggtggtttgtatttctgt

SEQ ID NO: 33623 - DNA, 20 bp, synthetic construct
  misc_feature 1..20: note = chemically synthesized
  source 1..20: mol_type = other DNA
ggtttgtatttctgtgggat

SEQ ID NO: 33624 - DNA, 20 bp, synthetic construct
  misc_feature 1..20: note = chemically synthesized
  source 1..20: mol_type = other DNA
ttgtatttctgtgggatcgg

SEQ ID NO: 33625 - DNA, 20 bp, synthetic construct
  misc_feature 1..20: note = chemically synthesized
  source 1..20: mol_type = other DNA
ttctctcttttcttctttat

SEQ ID NO: 33626 - DNA, 20 bp, synthetic construct
  misc_feature 1..20: note = chemically synthesized
  source 1..20: mol_type = other DNA
ttcttctttattagtcttgc

SEQ ID NO: 33627 - DNA, 20 bp, synthetic construct
  misc_feature 1..20: note = chemically synthesized
  source 1..20: mol_type = other DNA
ttctttattagtcttgctag

SEQ ID NO: 33628 - DNA, 20 bp, synthetic construct
  misc_feature 1..20: note = chemically synthesized
  source 1..20: mol_type = other DNA
tgttgatctttttgaaaaac

SEQ ID NO: 33629 - DNA, 20 bp, synthetic construct
  misc_feature 1..20: note = chemically synthesized
  source 1..20: mol_type = other DNA
ctttttgaaaaaccagcttc

SEQ ID NO: 33630 - DNA, 20 bp, synthetic construct
  misc_feature 1..20: note = chemically synthesized
  source 1..20: mol_type = other DNA
ctggattcattgattttttg

SEQ ID NO: 33631 - DNA, 20 bp, synthetic construct
  misc_feature 1..20: note = chemically synthesized
  source 1..20: mol_type = other DNA
tggattcattgattttttga

SEQ ID NO: 33632 - DNA, 20 bp, synthetic construct
  misc_feature 1..20: note = chemically synthesized
  source 1..20: mol_type = other DNA
ggattcattgattttttgaa

SEQ ID NO: 33633 - DNA, 20 bp, synthetic construct
  misc_feature 1..20: note = chemically synthesized
  source 1..20: mol_type = other DNA
ttttgtgtctctatttcctt

SEQ ID NO: 33634 - DNA, 20 bp, synthetic construct
  misc_feature 1..20: note = chemically synthesized
  source 1..20: mol_type = other DNA
cttcagttctgctctgattt

SEQ ID NO: 33635 - DNA, 20 bp, synthetic construct
  misc_feature 1..20: note = chemically synthesized
  source 1..20: mol_type = other DNA
agttatttcttgccttctgc

SEQ ID NO: 33636 - DNA, 20 bp, synthetic construct
  misc_feature 1..20: note = chemically synthesized
  source 1..20: mol_type = other DNA
tgtgtttgctcttgcttctc

SEQ ID NO: 33637 - DNA, 20 bp, synthetic construct
  misc_feature 1..20: note = chemically synthesized
  source 1..20: mol_type = other DNA
agttcttttaattgtgatgt

SEQ ID NO: 33638 - DNA, 20 bp, synthetic construct
  misc_feature 1..20: note = chemically synthesized
  source 1..20: mol_type = other DNA
gttcttttaattgtgatgtt

SEQ ID NO: 33639 - DNA, 20 bp, synthetic construct
  misc_feature 1..20: note = chemically synthesized
  source 1..20: mol_type = other DNA
ttcttttaattgtgatgtta

SEQ ID NO: 33640 - DNA, 20 bp, synthetic construct
  misc_feature 1..20: note = chemically synthesized
  source 1..20: mol_type = other DNA
tgatgttagggtgtcaattt

SEQ ID NO: 33641 - DNA, 20 bp, synthetic construct
  misc_feature 1..20: note = chemically synthesized
  source 1..20: mol_type = other DNA
atctttcctgctttctcttc

SEQ ID NO: 33642 - DNA, 20 bp, synthetic construct
  misc_feature 1..20: note = chemically synthesized
  source 1..20: mol_type = other DNA
tctttcctgctttctcttct

SEQ ID NO: 33643 - DNA, 20 bp, synthetic construct
  misc_feature 1..20: note = chemically synthesized
  source 1..20: mol_type = other DNA
tgctttctcttctgggcgtt

SEQ ID NO: 33644 - DNA, 20 bp, synthetic construct
  misc_feature 1..20: note = chemically synthesized
  source 1..20: mol_type = other DNA
acactgctttgaatgtgtcc

SEQ ID NO: 33645 - DNA, 20 bp, synthetic construct
  misc_feature 1..20: note = chemically synthesized
  source 1..20: mol_type = other DNA
actgctttgaatgtgtccca

SEQ ID NO: 33646 - DNA, 20 bp, synthetic construct
  misc_feature 1..20: note = chemically synthesized
  source 1..20: mol_type = other DNA
tgaatgtgtcccagagattc

SEQ ID NO: 33647 - DNA, 20 bp, synthetic construct
  misc_feature 1..20: note = chemically synthesized
  source 1..20: mol_type = other DNA
tgttgtgtctttgttctctt

SEQ ID NO: 33648 - DNA, 20 bp, synthetic construct
  misc_feature 1..20: note = chemically synthesized
  source 1..20: mol_type = other DNA
ctttgttctctttggttcca

SEQ ID NO: 33649 - DNA, 20 bp, synthetic construct
  misc_feature 1..20: note = chemically synthesized
  source 1..20: mol_type = other DNA
ccttcattttgttatgaacc

SEQ ID NO: 33650 - DNA, 20 bp, synthetic construct
  misc_feature 1..20: note = chemically synthesized
  source 1..20: mol_type = other DNA
tcattttgttatgaacccag

SEQ ID NO: 33651 - DNA, 20 bp, synthetic construct
  misc_feature 1..20: note = chemically synthesized
  source 1..20: mol_type = other DNA
ttatgaacccagtagtcatt

SEQ ID NO: 33652 - DNA, 20 bp, synthetic construct
  misc_feature 1..20: note = chemically synthesized
  source 1..20: mol_type = other DNA
tatgaacccagtagtcattc

SEQ ID NO: 33653 - DNA, 20 bp, synthetic construct
  misc_feature 1..20: note = chemically synthesized
  source 1..20: mol_type = other DNA
tgaacccagtagtcattcag

SEQ ID NO: 33654 - DNA, 20 bp, synthetic construct
  misc_feature 1..20: note = chemically synthesized
  source 1..20: mol_type = other DNA
tcattcaggagcaatttgtt

SEQ ID NO: 33655 - DNA, 20 bp, synthetic construct
  misc_feature 1..20: note = chemically synthesized
  source 1..20: mol_type = other DNA
caatttgttcggtttccatg

SEQ ID NO: 33656 - DNA, 20 bp, synthetic construct
  misc_feature 1..20: note = chemically synthesized
  source 1..20: mol_type = other DNA
tgttcggtttccatgtagtt

SEQ ID NO: 33657 - DNA, 20 bp, synthetic construct
  misc_feature 1..20: note = chemically synthesized
  source 1..20: mol_type = other DNA
tcggtttccatgtagttgag

SEQ ID NO: 33658 - DNA, 20 bp, synthetic construct
  misc_feature 1..20: note = chemically synthesized
  source 1..20: mol_type = other DNA
ccatgtagttgagcggtttt

SEQ ID NO: 33659 - DNA, 20 bp, synthetic construct
  misc_feature 1..20: note = chemically synthesized
  source 1..20: mol_type = other DNA
gtagttgagcggttttgagt

SEQ ID NO: 33660 - DNA, 20 bp, synthetic construct
  misc_feature 1..20: note = chemically synthesized
  source 1..20: mol_type = other DNA
tgagtgagtttcttaatcct

SEQ ID NO: 33661 - DNA, 20 bp, synthetic construct
  misc_feature 1..20: note = chemically synthesized
  source 1..20: mol_type = other DNA
agtttcttaatcctgagttc

SEQ ID NO: 33662 - DNA, 20 bp, synthetic construct
  misc_feature 1..20: note = chemically synthesized
  source 1..20: mol_type = other DNA
gttctagtttgattgcactg

SEQ ID NO: 33663 - DNA, 20 bp, synthetic construct
  misc_feature 1..20: note = chemically synthesized
  source 1..20: mol_type = other DNA
gtttgattgcactgtggtct

SEQ ID NO: 33664 - DNA, 20 bp, synthetic construct
  misc_feature 1..20: note = chemically synthesized
  source 1..20: mol_type = other DNA
ttgattgcactgtggtctga

SEQ ID NO: 33665 - DNA, 20 bp, synthetic construct
  misc_feature 1..20: note = chemically synthesized
  source 1..20: mol_type = other DNA
ttgcactgtggtctgagaga

SEQ ID NO: 33666 - DNA, 20 bp, synthetic construct
  misc_feature 1..20: note = chemically synthesized
  source 1..20: mol_type = other DNA
tctgttcttttacatttgct

SEQ ID NO: 33667 - DNA, 20 bp, synthetic construct
  misc_feature 1..20: note = chemically synthesized
  source 1..20: mol_type = other DNA
ctgttcttttacatttgctg

SEQ ID NO: 33668 - DNA, 20 bp, synthetic construct
  misc_feature 1..20: note = chemically synthesized
  source 1..20: mol_type = other DNA
gttcttttacatttgctgag

SEQ ID NO: 33669 - DNA, 20 bp, synthetic construct
  misc_feature 1..20: note = chemically synthesized
  source 1..20: mol_type = other DNA
gtgctttacttccaactatg

SEQ ID NO: 33670 - DNA, 20 bp, synthetic construct
  misc_feature 1..20: note = chemically synthesized
  source 1..20: mol_type = other DNA
tccaactatgtggtcaattt

SEQ ID NO: 33671 - DNA, 20 bp, synthetic construct
  misc_feature 1..20: note = chemically synthesized
  source 1..20: mol_type = other DNA
ctatgtggtcaattttggaa

SEQ ID NO: 33672 - DNA, 20 bp, synthetic construct
  misc_feature 1..20: note = chemically synthesized
  source 1..20: mol_type = other DNA
tatgtggtcaattttggaat

SEQ ID NO: 33673 - DNA, 20 bp, synthetic construct
  misc_feature 1..20: note = chemically synthesized
  source 1..20: mol_type = other DNA
ggtcaattttggaataggtg

SEQ ID NO: 33674 - DNA, 20 bp, synthetic construct
  misc_feature 1..20: note = chemically synthesized
  source 1..20: mol_type = other DNA
attttggaataggtgtggtg

SEQ ID NO: 33675 - DNA, 20 bp, synthetic construct
  misc_feature 1..20: note = chemically synthesized
  source 1..20: mol_type = other DNA
aggtgtggtgtggtgctgaa

SEQ ID NO: 33676 - DNA, 20 bp, synthetic construct
  misc_feature 1..20: note = chemically synthesized
  source 1..20: mol_type = other DNA
gaatgtatattctgttgatt

SEQ ID NO: 33677 - DNA, 20 bp, synthetic construct
  misc_feature 1..20: note = chemically synthesized
  source 1..20: mol_type = other DNA
aatgtatattctgttgattt

SEQ ID NO: 33678 - DNA, 20 bp, synthetic construct
  misc_feature 1..20: note = chemically synthesized
  source 1..20: mol_type = other DNA
atgtatattctgttgatttg

SEQ ID NO: 33679 - DNA, 20 bp, synthetic construct
  misc_feature 1..20: note = chemically synthesized
  source 1..20: mol_type = other DNA
tatattctgttgatttgggg

SEQ ID NO: 33680 - DNA, 20 bp, synthetic construct
  misc_feature 1..20: note = chemically synthesized
  source 1..20: mol_type = other DNA
tattctgttgatttggggtg

SEQ ID NO: 33681 - DNA, 20 bp, synthetic construct
  misc_feature 1..20: note = chemically synthesized
  source 1..20: mol_type = other DNA
ttctgttgatttggggtgga

SEQ ID NO: 33682 - DNA, 20 bp, synthetic construct
  misc_feature 1..20: note = chemically synthesized
  source 1..20: mol_type = other DNA
atttggggtggagagttctg

SEQ ID NO: 33683 - DNA, 20 bp, synthetic construct
  misc_feature 1..20: note = chemically synthesized
  source 1..20: mol_type = other DNA
agagttctgtagatgtctat

SEQ ID NO: 33684 - DNA, 20 bp, synthetic construct
  misc_feature 1..20: note = chemically synthesized
  source 1..20: mol_type = other DNA
gagttctgtagatgtctatt

SEQ ID NO: 33685 - DNA, 20 bp, synthetic construct
  misc_feature 1..20: note = chemically synthesized
  source 1..20: mol_type = other DNA
agatgtctattaggtccgct

SEQ ID NO: 33686 - DNA, 20 bp, synthetic construct
  misc_feature 1..20: note = chemically synthesized
  source 1..20: mol_type = other DNA
tctattaggtccgcttggtg

SEQ ID NO: 33687 - DNA, 20 bp, synthetic construct
  misc_feature 1..20: note = chemically synthesized
  source 1..20: mol_type = other DNA
tattaggtccgcttggtgca

SEQ ID NO: 33688 - DNA, 20 bp, synthetic construct
  misc_feature 1..20: note = chemically synthesized
  source 1..20: mol_type = other DNA
ggtccgcttggtgcagagct

SEQ ID NO: 33689 - DNA, 20 bp, synthetic construct
  misc_feature 1..20: note = chemically synthesized
  source 1..20: mol_type = other DNA
gcagagctgagttcaattcc

SEQ ID NO: 33690 - DNA, 20 bp, synthetic construct
  misc_feature 1..20: note = chemically synthesized
  source 1..20: mol_type = other DNA
gttgatctgtctaatgttga

SEQ ID NO: 33691 - DNA, 20 bp, synthetic construct
  misc_feature 1..20: note = chemically synthesized
  source 1..20: mol_type = other DNA
gatctgtctaatgttgacag

SEQ ID NO: 33692 - DNA, 20 bp, synthetic construct
  misc_feature 1..20: note = chemically synthesized
  source 1..20: mol_type = other DNA
atctgtctaatgttgacagt

SEQ ID NO: 33693 - DNA, 20 bp, synthetic construct
  misc_feature 1..20: note = chemically synthesized
  source 1..20: mol_type = other DNA
tctgtctaatgttgacagtg

SEQ ID NO: 33694 - DNA, 20 bp, synthetic construct
  misc_feature 1..20: note = chemically synthesized
  source 1..20: mol_type = other DNA
atgttgacagtggggtgtta

SEQ ID NO: 33695 - DNA, 20 bp, synthetic construct
  misc_feature 1..20: note = chemically synthesized
  source 1..20: mol_type = other DNA
gtctcccattgttattgtgt

SEQ ID NO: 33696 - DNA, 20 bp, synthetic construct
  misc_feature 1..20: note = chemically synthesized
  source 1..20: mol_type = other DNA
ctcccattgttattgtgtga

SEQ ID NO: 33697 - DNA, 20 bp, synthetic construct
  misc_feature 1..20: note = chemically synthesized
  source 1..20: mol_type = other DNA
ttgttattgtgtgagagtct

SEQ ID NO: 33698 - DNA, 20 bp, synthetic construct
  misc_feature 1..20: note = chemically synthesized
  source 1..20: mol_type = other DNA
tgagagtctaagtctctttg

SEQ ID NO: 33699 - DNA, 20 bp, synthetic construct
  misc_feature 1..20: note = chemically synthesized
  source 1..20: mol_type = other DNA
gagagtctaagtctctttgt

SEQ ID NO: 33700 - DNA, 20 bp, synthetic construct
  misc_feature 1..20: note = chemically synthesized
  source 1..20: mol_type = other DNA
aagtctctttgtaggtctct

SEQ ID NO: 33701 - DNA, 20 bp, synthetic construct
  misc_feature 1..20: note = chemically synthesized
  source 1..20: mol_type = other DNA
agtctctttgtaggtctcta

SEQ ID NO: 33702 - DNA, 20 bp, synthetic construct
  misc_feature 1..20: note = chemically synthesized
  source 1..20: mol_type = other DNA
aaggacttgctttatgaacc

SEQ ID NO: 33703 - DNA, 20 bp, synthetic construct
  misc_feature 1..20: note = chemically synthesized
  source 1..20: mol_type = other DNA
aggacttgctttatgaacct

SEQ ID NO: 33704 - DNA, 20 bp, synthetic construct
  misc_feature 1..20: note = chemically synthesized
  source 1..20: mol_type = other DNA
gaacctgggtgttcctgtat

SEQ ID NO: 33705 - DNA, 20 bp, synthetic construct
  misc_feature 1..20: note = chemically synthesized
  source 1..20: mol_type = other DNA
aacctgggtgttcctgtatt

SEQ ID NO: 33706 - DNA, 20 bp, synthetic construct
  misc_feature 1..20: note = chemically synthesized
  source 1..20: mol_type = other DNA
gtattgggtgcatatatgtt

SEQ ID NO: 33707 - DNA, 20 bp, synthetic construct
  misc_feature 1..20: note = chemically synthesized
  source 1..20: mol_type = other DNA
tattgggtgcatatatgttt

SEQ ID NO: 33708 - DNA, 20 bp, synthetic construct
  misc_feature 1..20: note = chemically synthesized
  source 1..20: mol_type = other DNA
gggtgcatatatgtttagga

SEQ ID NO: 33709 - DNA, 20 bp, synthetic construct
  misc_feature 1..20: note = chemically synthesized
  source 1..20: mol_type = other DNA
gcatatatgtttaggatagt

SEQ ID NO: 33710 - DNA, 20 bp, synthetic construct
  misc_feature 1..20: note = chemically synthesized
  source 1..20: mol_type = other DNA
atccctttaccattatgtaa

SEQ ID NO: 33711 - DNA, 20 bp, synthetic construct
  misc_feature 1..20: note = chemically synthesized
  source 1..20: mol_type = other DNA
ttgtctcttttgatctttgt

SEQ ID NO: 33712 - DNA, 20 bp, synthetic construct
  misc_feature 1..20: note = chemically synthesized
  source 1..20: mol_type = other DNA
ttttgatctttgttggttta

SEQ ID NO: 33713 - DNA, 20 bp, synthetic construct
  misc_feature 1..20: note = chemically synthesized
  source 1..20: mol_type = other DNA
tggtttaaagcctgttttat

SEQ ID NO: 33714 - DNA, 20 bp, synthetic construct
  misc_feature 1..20: note = chemically synthesized
  source 1..20: mol_type = other DNA
gtttaaagcctgttttatca

SEQ ID NO: 33715 - DNA, 20 bp, synthetic construct
  misc_feature 1..20: note = chemically synthesized
  source 1..20: mol_type = other DNA
aagcctgttttatcagagat

SEQ ID NO: 33716 - DNA, 20 bp, synthetic construct
  misc_feature 1..20: note = chemically synthesized
  source 1..20: mol_type = other DNA
agcctgttttatcagagatg

SEQ ID NO: 33717 - DNA, 20 bp, synthetic construct
  misc_feature 1..20: note = chemically synthesized
  source 1..20: mol_type = other DNA
ttttttgttttccattttct

SEQ ID NO: 33718 - DNA, 20 bp, synthetic construct
  misc_feature 1..20: note = chemically synthesized
  source 1..20: mol_type = other DNA
tttgttttccattttcttgg

SEQ ID NO: 33719 - DNA, 20 bp, synthetic construct
  misc_feature 1..20: note = chemically synthesized
  source 1..20: mol_type = other DNA
ttcctccatccctttatttt

SEQ ID NO: 33720 - DNA, 20 bp, synthetic construct
  misc_feature 1..20: note = chemically synthesized
  source 1..20: mol_type = other DNA
ctatgtgtgtgtgtgcacat

SEQ ID NO: 33721 - DNA, 20 bp, synthetic construct
  misc_feature 1..20: note = chemically synthesized
  source 1..20: mol_type = other DNA
gtgtgtgtgtgcacatgaga

SEQ ID NO: 33722 - DNA, 20 bp, synthetic construct
  misc_feature 1..20: note = chemically synthesized
  source 1..20: mol_type = other DNA
tgtgtgtgtgcacatgagat

SEQ ID NO: 33723 - DNA, 20 bp, synthetic construct
  misc_feature 1..20: note = chemically synthesized
  source 1..20: mol_type = other DNA
tgagatgggtttcctgaata

SEQ ID NO: 33724 - DNA, 20 bp, synthetic construct
  misc_feature 1..20: note = chemically synthesized
  source 1..20: mol_type = other DNA
tcctgaatacagcacactga

SEQ ID NO: 33725 - DNA, 20 bp, synthetic construct
  misc_feature 1..20: note = chemically synthesized
  source 1..20: mol_type = other DNA
cctgaatacagcacactgat

SEQ ID NO: 33726 - DNA, 20 bp, synthetic construct
  misc_feature 1..20: note = chemically synthesized
  source 1..20: mol_type = other DNA
gcccgtctgtgtctttttac

SEQ ID NO: 33727 - DNA, 20 bp, synthetic construct
  misc_feature 1..20: note = chemically synthesized
  source 1..20: mol_type = other DNA
ccgtctgtgtctttttactg

SEQ ID NO: 33728 - DNA, 20 bp, synthetic construct
  misc_feature 1..20: note = chemically synthesized
  source 1..20: mol_type = other DNA
tgtctttttactggagcatt

SEQ ID NO: 33729 - DNA, 20 bp, synthetic construct
  misc_feature 1..20: note = chemically synthesized
  source 1..20: mol_type = other DNA
gcatttagcccatttacatt

SEQ ID NO: 33730 - DNA, 20 bp, synthetic construct
  misc_feature 1..20: note = chemically synthesized
  source 1..20: mol_type = other DNA
catttagcccatttacatta

SEQ ID NO: 33731 - DNA, 20 bp, synthetic construct
  misc_feature 1..20: note = chemically synthesized
  source 1..20: mol_type = other DNA
tgatcctgtcattatgatgt

SEQ ID NO: 33732 - DNA, 20 bp, synthetic construct
  misc_feature 1..20: note = chemically synthesized
  source 1..20: mol_type = other DNA
cctgtcattatgatgttagc

SEQ ID NO: 33733 - DNA, 20 bp, synthetic construct
  misc_feature 1..20: note = chemically synthesized
  source 1..20: mol_type = other DNA
tagctggttattttgctcat

SEQ ID NO: 33734 - DNA, 20 bp, synthetic construct
  misc_feature 1..20: note = chemically synthesized
  source 1..20: mol_type = other DNA
attttgctcattagttgatg

SEQ ID NO: 33735 - DNA, 20 bp, synthetic construct
  misc_feature 1..20: note = chemically synthesized
  source 1..20: mol_type = other DNA
tagttgatgcagtttcttcc

SEQ ID NO: 33736 - DNA, 20 bp, synthetic construct
  misc_feature 1..20: note = chemically synthesized
  source 1..20: mol_type = other DNA
cagtttcttcctagcctcaa

SEQ ID NO: 33737 - DNA, 20 bp, synthetic construct
  misc_feature 1..20: note = chemically synthesized
  source 1..20: mol_type = other DNA
cctcaatggtctttacaatt

SEQ ID NO: 33738 - DNA, 20 bp, synthetic construct
  misc_feature 1..20: note = chemically synthesized
  source 1..20: mol_type = other DNA
tacaatttggcatgtttttg

SEQ ID NO: 33739 - DNA, 20 bp, synthetic construct
  misc_feature 1..20: note = chemically synthesized
  source 1..20: mol_type = other DNA
aatttggcatgtttttgcag

SEQ ID NO: 33740 - DNA, 20 bp, synthetic construct
  misc_feature 1..20: note = chemically synthesized
  source 1..20: mol_type = other DNA
tggcatgtttttgcagtggc

SEQ ID NO: 33741 - DNA, 20 bp, synthetic construct
  misc_feature 1..20: note = chemically synthesized
  source 1..20: mol_type = other DNA
gtttttgcagtggctggtac

SEQ ID NO: 33742 - DNA, 20 bp, synthetic construct
  misc_feature 1..20: note = chemically synthesized
  source 1..20: mol_type = other DNA
cggttgtgcctttccatatt

SEQ ID NO: 33743 - DNA, 20 bp, synthetic construct
  misc_feature 1..20: note = chemically synthesized
  source 1..20: mol_type = other DNA
tccatatttagtgcttcctt

SEQ ID NO: 33744 - DNA, 20 bp, synthetic construct
  misc_feature 1..20: note = chemically synthesized
  source 1..20: mol_type = other DNA
ccatatttagtgcttccttc

SEQ ID NO: 33745 - DNA, 20 bp, synthetic construct
  misc_feature 1..20: note = chemically synthesized
  source 1..20: mol_type = other DNA
atatttagtgcttccttcag

SEQ ID NO: 33746 - DNA, 20 bp, synthetic construct
  misc_feature 1..20: note = chemically synthesized
  source 1..20: mol_type = other DNA
gcttccttcaggagctcttt

SEQ ID NO: 33747 - DNA, 20 bp, synthetic construct
  misc_feature 1..20: note = chemically synthesized
  source 1..20: mol_type = other DNA
cttccttcaggagctctttt

SEQ ID NO: 33748 - DNA, 20 bp, synthetic construct
  misc_feature 1..20: note = chemically synthesized
  source 1..20: mol_type = other DNA
cttcaggagctcttttaggt

SEQ ID NO: 33749 - DNA, 20 bp, synthetic construct
  misc_feature 1..20: note = chemically synthesized
  source 1..20: mol_type = other DNA
ttcaggagctcttttaggtc

SEQ ID NO: 33750 - DNA, 20 bp, synthetic construct
  misc_feature 1..20: note = chemically synthesized
  source 1..20: mol_type = other DNA
gagctcttttaggtcaggcc

SEQ ID NO: 33751 - DNA, 20 bp, synthetic construct
  misc_feature 1..20: note = chemically synthesized
  source 1..20: mol_type = other DNA
ctggtgatgacaaaatctct

SEQ ID NO: 33752 - DNA, 20 bp, synthetic construct
  misc_feature 1..20: note = chemically synthesized
  source 1..20: mol_type = other DNA
tcagcatttgcttgtctgta

SEQ ID NO: 33753 - DNA, 20 bp, synthetic construct
  misc_feature 1..20: note = chemically synthesized
  source 1..20: mol_type = other DNA
ttatttctccttcacttatg

SEQ ID NO: 33754 - DNA, 20 bp, synthetic construct
  misc_feature 1..20: note = chemically synthesized
  source 1..20: mol_type = other DNA
tctccttcacttatgaagct

SEQ ID NO: 33755 - DNA, 20 bp, synthetic construct
  misc_feature 1..20: note = chemically synthesized
  source 1..20: mol_type = other DNA
ttcacttatgaagcttagtt

SEQ ID NO: 33756 - DNA, 20 bp, synthetic construct
  misc_feature 1..20: note = chemically synthesized
  source 1..20: mol_type = other DNA
cttatgaagcttagtttggc

SEQ ID NO: 33757 - DNA, 20 bp, synthetic construct
  misc_feature 1..20: note = chemically synthesized
  source 1..20: mol_type = other DNA
tgttgaaaattctttccttt

SEQ ID NO: 33758 - DNA, 20 bp, synthetic construct
  misc_feature 1..20: note = chemically synthesized
  source 1..20: mol_type = other DNA
gttgaaaattctttccttta

SEQ ID NO: 33759 - DNA, 20 bp, synthetic construct
  misc_feature 1..20: note = chemically synthesized
  source 1..20: mol_type = other DNA
cctttaaggatgttgaatat

SEQ ID NO: 33760 - DNA, 20 bp, synthetic construct
  misc_feature 1..20: note = chemically synthesized
  source 1..20: mol_type = other DNA
tattggcccccactctcttc

SEQ ID NO: 33761 - DNA, 20 bp, synthetic construct
  misc_feature 1..20: note = chemically synthesized
  source 1..20: mol_type = other DNA
ccccactctcttctggcttg

SEQ ID NO: 33762 - DNA, 20 bp, synthetic construct
  misc_feature 1..20: note = chemically synthesized
  source 1..20: mol_type = other DNA
ccactctcttctggcttgta

SEQ ID NO: 33763 - DNA, 20 bp, synthetic construct
  misc_feature 1..20: note = chemically synthesized
  source 1..20: mol_type = other DNA
tggcttgtagagtttctgct

SEQ ID NO: 33764 - DNA, 20 bp, synthetic construct
  misc_feature 1..20: note = chemically synthesized
  source 1..20: mol_type = other DNA
gcttgtagagtttctgctga

SEQ ID NO: 33765 - DNA, 20 bp, synthetic construct
  misc_feature 1..20: note = chemically synthesized
  source 1..20: mol_type = other DNA
gagatctgctgttattctga

SEQ ID NO: 33766 - DNA, 20 bp, synthetic construct
  misc_feature 1..20: note = chemically synthesized
  source 1..20: mol_type = other DNA
agatctgctgttattctgat

SEQ ID NO: 33767 - DNA, 20 bp, synthetic construct
  misc_feature 1..20: note = chemically synthesized
  source 1..20: mol_type = other DNA
ttctgatgggcttccctttg

SEQ ID NO: 33768 - DNA, 20 bp, synthetic construct
  misc_feature 1..20: note = chemically synthesized
  source 1..20: mol_type = other DNA
tctgatgggcttccctttgt

SEQ ID NO: 33769 - DNA, 20 bp, synthetic construct
  misc_feature 1..20: note = chemically synthesized
  source 1..20: mol_type = other DNA
ggtaacccgacctttctctc

SEQ ID NO: 33770 - DNA, 20 bp, synthetic construct
  misc_feature 1..20: note = chemically synthesized
  source 1..20: mol_type = other DNA
ttttcccttcatttcaactt

SEQ ID NO: 33771 - DNA, 20 bp, synthetic construct
  misc_feature 1..20: note = chemically synthesized
  source 1..20: mol_type = other DNA
tctgacaattatgtgccttg

SEQ ID NO: 33772 - DNA, 20 bp, synthetic construct
  misc_feature 1..20: note = chemically synthesized
  source 1..20: mol_type = other DNA
gccttgtagttgctcttctc

SEQ ID NO: 33773 - DNA, 20 bp, synthetic construct
  misc_feature 1..20: note = chemically synthesized
  source 1..20: mol_type = other DNA
ccttgtagttgctcttctca

SEQ ID NO: 33774 - DNA, 20 bp, synthetic construct
  misc_feature 1..20: note = chemically synthesized
  source 1..20: mol_type = other DNA
ttgtagttgctcttctcaag

SEQ ID NO: 33775 - DNA, 20 bp, synthetic construct
  misc_feature 1..20: note = chemically synthesized
  source 1..20: mol_type = other DNA
cttctcaaggagtatctttg

SEQ ID NO: 33776 - DNA, 20 bp, synthetic construct
  misc_feature 1..20: note = chemically synthesized
  source 1..20: mol_type = other DNA
tgaatgttgacctgccttgc

SEQ ID NO: 33777 - DNA, 20 bp, synthetic construct
  misc_feature 1..20: note = chemically synthesized
  source 1..20: mol_type = other DNA
gttgacctgccttgctagat

SEQ ID NO: 33778 - DNA, 20 bp, synthetic construct
  misc_feature 1..20: note = chemically synthesized
  source 1..20: mol_type = other DNA
ttgacctgccttgctagatt

SEQ ID NO: 33779 - DNA, 20 bp, synthetic construct
  misc_feature 1..20: note = chemically synthesized
  source 1..20: mol_type = other DNA
tgacctgccttgctagattg

SEQ ID NO: 33780 - DNA, 20 bp, synthetic construct
  misc_feature 1..20: note = chemically synthesized
  source 1..20: mol_type = other DNA
cctgccttgctagattgggg

SEQ ID NO: 33781 - DNA, 20 bp, synthetic construct
  misc_feature 1..20: note = chemically synthesized
  source 1..20: mol_type = other DNA
ctagattggggaagttctcc

SEQ ID NO: 33782 - DNA, 20 bp, synthetic construct
  misc_feature 1..20: note = chemically synthesized
  source 1..20: mol_type = other DNA
ttctcctggataatatcctg

SEQ ID NO: 33783 - DNA, 20 bp, synthetic construct
  misc_feature 1..20: note = chemically synthesized
  source 1..20: mol_type = other DNA
ctcctggataatatcctgca

SEQ ID NO: 33784 - DNA, 20 bp, synthetic construct
  misc_feature 1..20: note = chemically synthesized
  source 1..20: mol_type = other DNA
ctgcagagtgttttccaact

SEQ ID NO: 33785 - DNA, 20 bp, synthetic construct
  misc_feature 1..20: note = chemically synthesized
  source 1..20: mol_type = other DNA
tccattctgcccgtcacttt

SEQ ID NO: 33786 - DNA, 20 bp, synthetic construct
  misc_feature 1..20: note = chemically synthesized
  source 1..20: mol_type = other DNA
ccattctgcccgtcactttc

SEQ ID NO: 33787 - DNA, 20 bp, synthetic construct
  misc_feature 1..20: note = chemically synthesized
  source 1..20: mol_type = other DNA
tcactttcaggtacaccaat

SEQ ID NO: 33788 - DNA, 20 bp, synthetic construct
  misc_feature 1..20: note = chemically synthesized
  source 1..20: mol_type = other DNA
tcaggtacaccaatcagata

SEQ ID NO: 33789 - DNA, 20 bp, synthetic construct
  misc_feature 1..20: note = chemically synthesized
  source 1..20: mol_type = other DNA
acaccaatcagatatagatt

SEQ ID NO: 33790 - DNA, 20 bp, synthetic construct
  misc_feature 1..20: note = chemically synthesized
  source 1..20: mol_type = other DNA
atagatttggtcttttcaca

SEQ ID NO: 33791 - DNA, 20 bp, synthetic construct
  misc_feature 1..20: note = chemically synthesized
  source 1..20: mol_type = other DNA
tcacatagtcccatatttct

SEQ ID NO: 33792 - DNA, 20 bp, synthetic construct
  misc_feature 1..20: note = chemically synthesized
  source 1..20: mol_type = other DNA
acatagtcccatatttcttg

SEQ ID NO: 33793 - DNA, 20 bp, synthetic construct
  misc_feature 1..20: note = chemically synthesized
  source 1..20: mol_type = other DNA
catagtcccatatttcttgg

SEQ ID NO: 33794 - DNA, 20 bp, synthetic construct
  misc_feature 1..20: note = chemically synthesized
  source 1..20: mol_type = other DNA
atcactgataccctttcttc

SEQ ID NO: 33795 - DNA, 20 bp, synthetic construct
  misc_feature 1..20: note = chemically synthesized
  source 1..20: mol_type = other DNA
tttcttccagttgatcgaat

SEQ ID NO: 33796 - DNA, 20 bp, synthetic construct
  misc_feature 1..20: note = chemically synthesized
  source 1..20: mol_type = other DNA
agttgatcgaatcagctact

SEQ ID NO: 33797 - DNA, 20 bp, synthetic construct
  misc_feature 1..20: note = chemically synthesized
  source 1..20: mol_type = other DNA
agtcttgtgcattcatcatg

SEQ ID NO: 33798 - DNA, 20 bp, synthetic construct
  misc_feature 1..20: note = chemically synthesized
  source 1..20: mol_type = other DNA
atcatgtagttctcatgcct

SEQ ID NO: 33799 - DNA, 20 bp, synthetic construct
  misc_feature 1..20: note = chemically synthesized
  source 1..20: mol_type = other DNA
agttctcatgccttggtttt

SEQ ID NO: 33800 - DNA, 20 bp, synthetic construct
  misc_feature 1..20: note = chemically synthesized
  source 1..20: mol_type = other DNA
gccttggttttcagctccat

SEQ ID NO: 33801 - DNA, 20 bp, synthetic construct
  misc_feature 1..20: note = chemically synthesized
  source 1..20: mol_type = other DNA
ccttggttttcagctccatc

SEQ ID NO: 33802 - DNA, 20 bp, synthetic construct
  misc_feature 1..20: note = chemically synthesized
  source 1..20: mol_type = other DNA
tcagctccatcaggtccttt

SEQ ID NO: 33803 - DNA, 20 bp, synthetic construct
  misc_feature 1..20: note = chemically synthesized
  source 1..20: mol_type = other DNA
cagctccatcaggtccttta

SEQ ID NO: 33804 - DNA, 20 bp, synthetic construct
  misc_feature 1..20: note = chemically synthesized
  source 1..20: mol_type = other DNA
ctttaaggacttctctgtat

SEQ ID NO: 33805 - DNA, 20 bp, synthetic construct
  misc_feature 1..20: note = chemically synthesized
  source 1..20: mol_type = other DNA
cttctctgtattggttattc

SEQ ID NO: 33806 - DNA, 20 bp, synthetic construct
  misc_feature 1..20: note = chemically synthesized
  source 1..20: mol_type = other DNA
tctgtattggttattctagt

SEQ ID NO: 33807 - DNA, 20 bp, synthetic construct
  misc_feature 1..20: note = chemically synthesized
  source 1..20: mol_type = other DNA
tggttattctagttagccat

SEQ ID NO: 33808 - DNA, 20 bp, synthetic construct
  misc_feature 1..20: note = chemically synthesized
  source 1..20: mol_type = other DNA
cattagtctaatttattttc

SEQ ID NO: 33809 - DNA, 20 bp, synthetic construct
  misc_feature 1..20: note = chemically synthesized
  source 1..20: mol_type = other DNA
attagtctaatttattttca

SEQ ID NO: 33810 - DNA, 20 bp, synthetic construct
  misc_feature 1..20: note = chemically synthesized
  source 1..20: mol_type = other DNA
ggtttttaacttttttgcca

SEQ ID NO: 33811 - DNA, 20 bp, synthetic construct
  misc_feature 1..20: note = chemically synthesized
  source 1..20: mol_type = other DNA
gtttttaacttttttgccat

SEQ ID NO: 33812 - DNA, 20 bp, synthetic construct
  misc_feature 1..20: note = chemically synthesized
  source 1..20: mol_type = other DNA
aacttttttgccatgggttc

SEQ ID NO: 33813 - DNA, 20 bp, synthetic construct
  misc_feature 1..20: note = chemically synthesized
  source 1..20: mol_type = other DNA
tgggttcgagcttcctcctt

SEQ ID NO: 33814 - DNA, 20 bp, synthetic construct
  misc_feature 1..20: note = chemically synthesized
  source 1..20: mol_type = other DNA
tcgagcttcctcctttagct

SEQ ID NO: 33815 - DNA, 20 bp, synthetic construct
  misc_feature 1..20: note = chemically synthesized
  source 1..20: mol_type = other DNA
gagcttcctcctttagctcg

SEQ ID NO: 33816 - DNA, 20 bp, synthetic construct
  misc_feature 1..20: note = chemically synthesized
  source 1..20: mol_type = other DNA
cttcctcctttagctcggag

SEQ ID NO: 33817 - DNA, 20 bp, synthetic construct
  misc_feature 1..20: note = chemically synthesized
  source 1..20: mol_type = other DNA
cggagtagtttgatcgtctg

SEQ ID NO: 33818 - DNA, 20 bp, synthetic construct
  misc_feature 1..20: note = chemically synthesized
  source 1..20: mol_type = other DNA
cttcttctctcaacttgtca

SEQ ID NO: 33819 - DNA, 20 bp, synthetic construct
  misc_feature 1..20: note = chemically synthesized
  source 1..20: mol_type = other DNA
tgtcaaagtcattctctgtc

SEQ ID NO: 33820 - DNA, 20 bp, synthetic construct
  misc_feature 1..20: note = chemically synthesized
  source 1..20: mol_type = other DNA
gtccagctttgtaccgttgc

SEQ ID NO: 33821 - DNA, 20 bp, synthetic construct
  misc_feature 1..20: note = chemically synthesized
  source 1..20: mol_type = other DNA
agctttgtaccgttgctggt

SEQ ID NO: 33822 - DNA, 20 bp, synthetic construct
  misc_feature 1..20: note = chemically synthesized
  source 1..20: mol_type = other DNA
gctttgtaccgttgctggtg

SEQ ID NO: 33823 - DNA, 20 bp, synthetic construct
  misc_feature 1..20: note = chemically synthesized
  source 1..20: mol_type = other DNA
tttgtaccgttgctggtgag

SEQ ID NO: 33824 - DNA, 20 bp, synthetic construct
  misc_feature 1..20: note = chemically synthesized
  source 1..20: mol_type = other DNA
ggtgaggagctgcattcctt

SEQ ID NO: 33825 - DNA, 20 bp, synthetic construct
  misc_feature 1..20: note = chemically synthesized
  source 1..20: mol_type = other DNA
tgaggagctgcattcctttg

SEQ ID NO: 33826 - DNA, 20 bp, synthetic construct
  misc_feature 1..20: note = chemically synthesized
  source 1..20: mol_type = other DNA
gaggagctgcattcctttgg

SEQ ID NO: 33827 - DNA, 20 bp, synthetic construct
  misc_feature 1..20: note = chemically synthesized
  source 1..20: mol_type = other DNA
ggagctgcattcctttggag

SEQ ID NO: 33828 - DNA, 20 bp, synthetic construct
  misc_feature 1..20: note = chemically synthesized
  source 1..20: mol_type = other DNA
gagctgcattcctttggagg

SEQ ID NO: 33829 - DNA, 20 bp, synthetic construct
  misc_feature 1..20: note = chemically synthesized
  source 1..20: mol_type = other DNA
gctgcattcctttggaggag

SEQ ID NO: 33830 - DNA, 20 bp, synthetic construct
  misc_feature 1..20: note = chemically synthesized
  source 1..20: mol_type = other DNA
tgcattcctttggaggagga

SEQ ID NO: 33831 - DNA, 20 bp, synthetic construct
  misc_feature 1..20: note = chemically synthesized
  source 1..20: mol_type = other DNA
gcattcctttggaggaggag

SEQ ID NO: 33832 - DNA, 20 bp, synthetic construct
  misc_feature 1..20: note = chemically synthesized
  source 1..20: mol_type = other DNA
aggagaggcactctgatttt

SEQ ID NO: 33833 - DNA, 20 bp, synthetic construct
  misc_feature 1..20: note = chemically synthesized
  source 1..20: mol_type = other DNA
gagaggcactctgattttta

SEQ ID NO: 33834 - DNA, 20 bp, synthetic construct
  misc_feature 1..20: note = chemically synthesized
  source 1..20: mol_type = other DNA
actctgatttttagagtttc

SEQ ID NO: 33835 - DNA, 20 bp, synthetic construct
  misc_feature 1..20: note = chemically synthesized
  source 1..20: mol_type = other DNA
tctgtttttccccatctttg

SEQ ID NO: 33836 - DNA, 20 bp, synthetic construct
  misc_feature 1..20: note = chemically synthesized
  source 1..20: mol_type = other DNA
tttgtggttttatctacctt

SEQ ID NO: 33837 - DNA, 20 bp, synthetic construct
  misc_feature 1..20: note = chemically synthesized
  source 1..20: mol_type = other DNA
ctacctttggtctttgatga

SEQ ID NO: 33838 - DNA, 20 bp, synthetic construct
  misc_feature 1..20: note = chemically synthesized
  source 1..20: mol_type = other DNA
tctttgatgatggtgacgta

SEQ ID NO: 33839 - DNA, 20 bp, synthetic construct
  misc_feature 1..20: note = chemically synthesized
  source 1..20: mol_type = other DNA
tgatgatggtgacgtacaga

SEQ ID NO: 33840 - DNA, 20 bp, synthetic construct
  misc_feature 1..20: note = chemically synthesized
  source 1..20: mol_type = other DNA
gatgatggtgacgtacagat

SEQ ID NO: 33841 - DNA, 20 bp, synthetic construct
  misc_feature 1..20: note = chemically synthesized
  source 1..20: mol_type = other DNA
gtgacgtacagatgggtttt

SEQ ID NO: 33842 - DNA, 20 bp, synthetic construct
  misc_feature 1..20: note = chemically synthesized
  source 1..20: mol_type = other DNA
gtacagatgggtttttggtg

SEQ ID NO: 33843 - DNA, 20 bp, synthetic construct
  misc_feature 1..20: note = chemically synthesized
  source 1..20: mol_type = other DNA
tggatgtcctttctgtttgt

SEQ ID NO: 33844 - DNA, 20 bp, synthetic construct
  misc_feature 1..20: note = chemically synthesized
  source 1..20: mol_type = other DNA
tttgttagttttccttctaa

SEQ ID NO: 33845 - DNA, 20 bp, synthetic construct
  misc_feature 1..20: note = chemically synthesized
  source 1..20: mol_type = other DNA
ttgttagttttccttctaac

SEQ ID NO: 33846 - DNA, 20 bp, synthetic construct
  misc_feature 1..20: note = chemically synthesized
  source 1..20: mol_type = other DNA
tttccttctaacaggaccct

SEQ ID NO: 33847 - DNA, 20 bp, synthetic construct
  misc_feature 1..20: note = chemically synthesized
  source 1..20: mol_type = other DNA
ctaacaggaccctcagcttg

SEQ ID NO: 33848 - DNA, 20 bp, synthetic construct
  misc_feature 1..20: note = chemically synthesized
  source 1..20: mol_type = other DNA
acaggaccctcagcttgcag

SEQ ID NO: 33849 - DNA, 20 bp, synthetic construct
  misc_feature 1..20: note = chemically synthesized
  source 1..20: mol_type = other DNA
agcttgcagcagatttttaa

SEQ ID NO: 33850 - DNA, 20 bp, synthetic construct
  misc_feature 1..20: note = chemically synthesized
  source 1..20: mol_type = other DNA
cagatttttaaaagaacttc

SEQ ID NO: 33851 - DNA, 20 bp, synthetic construct
  misc_feature 1..20: note = chemically synthesized
  source 1..20: mol_type = other DNA
agatttttaaaagaacttcc

SEQ ID NO: 33852 - DNA, 20 bp, synthetic construct
  misc_feature 1..20: note = chemically synthesized
  source 1..20: mol_type = other DNA
tattgacgcctatgtcacta

SEQ ID NO: 33853 - DNA, 20 bp, synthetic construct
  misc_feature 1..20: note = chemically synthesized
  source 1..20: mol_type = other DNA
attgacgcctatgtcactac

SEQ ID NO: 33854 - DNA, 20 bp, synthetic construct
  misc_feature 1..20: note = chemically synthesized
  source 1..20: mol_type = other DNA
gcctatgtcactacaggaat

SEQ ID NO: 33855 - DNA, 20 bp, synthetic construct
  misc_feature 1..20: note = chemically synthesized
  source 1..20: mol_type = other DNA
ctatgtcactacaggaatca

SEQ ID NO: 33856 - DNA, 20 bp, synthetic construct
  misc_feature 1..20: note = chemically synthesized
  source 1..20: mol_type = other DNA
tgtcactacaggaatcagag

SEQ ID NO: 33857 - DNA, 20 bp, synthetic construct
  misc_feature 1..20: note = chemically synthesized
  source 1..20: mol_type = other DNA
gtcactacaggaatcagagc

SEQ ID NO: 33858 - DNA, 20 bp, synthetic construct
  misc_feature 1..20: note = chemically synthesized
  source 1..20: mol_type = other DNA
tcactacaggaatcagagca

SEQ ID NO: 33859 - DNA, 20 bp, synthetic construct
  misc_feature 1..20: note = chemically synthesized
  source 1..20: mol_type = other DNA
gggcattacattgatccttt

SEQ ID NO: 33860 - DNA, 20 bp, synthetic construct
  misc_feature 1..20: note = chemically synthesized
  source 1..20: mol_type = other DNA
ttttttttttttaattttta

SEQ ID NO: 33861 - DNA, 20 bp, synthetic construct
  misc_feature 1..20: note = chemically synthesized
  source 1..20: mol_type = other DNA
tttttttttttaatttttaa

SEQ ID NO: 33862 - DNA, 20 bp, synthetic construct
  misc_feature 1..20: note = chemically synthesized
  source 1..20: mol_type = other DNA
taatttttaaaggtaattgt

SEQ ID NO: 33863 - DNA, 20 bp, synthetic construct
  misc_feature 1..20: note = chemically synthesized
  source 1..20: mol_type = other DNA
gtaattgttagaaatttccc

SEQ ID NO: 33864 - DNA, 20 bp, synthetic construct
  misc_feature 1..20: note = chemically synthesized
  source 1..20: mol_type = other DNA
taattgttagaaatttccca

SEQ ID NO: 33865 - DNA, 20 bp, synthetic construct
  misc_feature 1..20: note = chemically synthesized
  source 1..20: mol_type = other DNA
cactgaaaacataactttta

SEQ ID NO: 33866 - DNA, 20 bp, synthetic construct
  misc_feature 1..20: note = chemically synthesized
  source 1..20: mol_type = other DNA
taacttttacagatgatttg

SEQ ID NO: 33867 - DNA, 20 bp, synthetic construct
  misc_feature 1..20: note = chemically synthesized
  source 1..20: mol_type = other DNA
ttacagatgatttgtggata

SEQ ID NO: 33868 - DNA, 20 bp, synthetic construct
  misc_feature 1..20: note = chemically synthesized
  source 1..20: mol_type = other DNA
acacatcacctatcttactt

SEQ ID NO: 33869 - DNA, 20 bp, synthetic construct
  misc_feature 1..20: note = chemically synthesized
  source 1..20: mol_type = other DNA
cacatcacctatcttacttt

SEQ ID NO: 33870 - DNA, 20 bp, synthetic construct
  misc_feature 1..20: note = chemically synthesized
  source 1..20: mol_type = other DNA
tcacctatcttactttagga

SEQ ID NO: 33871 - DNA, 20 bp, synthetic construct
  misc_feature 1..20: note = chemically synthesized
  source 1..20: mol_type = other DNA
ttactttaggacagtctgtg

SEQ ID NO: 33872 - DNA, 20 bp, synthetic construct
  misc_feature 1..20: note = chemically synthesized
  source 1..20: mol_type = other DNA
agatgatatttttcctgctg

SEQ ID NO: 33873 - DNA, 20 bp, synthetic construct
  misc_feature 1..20: note = chemically synthesized
  source 1..20: mol_type = other DNA
cctgctgcagttcctttgtc

SEQ ID NO: 33874 - DNA, 20 bp, synthetic construct
  misc_feature 1..20: note = chemically synthesized
  source 1..20: mol_type = other DNA
gttcctttgtcaagtgactt

SEQ ID NO: 33875 - DNA, 20 bp, synthetic construct
  misc_feature 1..20: note = chemically synthesized
  source 1..20: mol_type = other DNA
ctttgtcaagtgactttaga

SEQ ID NO: 33876 - DNA, 20 bp, synthetic construct
  misc_feature 1..20: note = chemically synthesized
  source 1..20: mol_type = other DNA
caagtgactttagacagata

SEQ ID NO: 33877 - DNA, 20 bp, synthetic construct
  misc_feature 1..20: note = chemically synthesized
  source 1..20: mol_type = other DNA
aagtgactttagacagatac

SEQ ID NO: 33878 - DNA, 20 bp, synthetic construct
  misc_feature 1..20: note = chemically synthesized
  source 1..20: mol_type = other DNA
ttagacagatacaggactgc

SEQ ID NO: 33879 - DNA, 20 bp, synthetic construct
  misc_feature 1..20: note = chemically synthesized
  source 1..20: mol_type = other DNA
agacagatacaggactgcaa

SEQ ID NO: 33880 - DNA, 20 bp, synthetic construct
  misc_feature 1..20: note = chemically synthesized
  source 1..20: mol_type = other DNA
acaggactgcaagagtgact

SEQ ID NO: 33881 - DNA, 20 bp, synthetic construct
  misc_feature 1..20: note = chemically synthesized
  source 1..20: mol_type = other DNA
caggactgcaagagtgactc

SEQ ID NO: 33882 - DNA, 20 bp, synthetic construct
  misc_feature 1..20: note = chemically synthesized
  source 1..20: mol_type = other DNA
aagagtgactcaggtcatgc

SEQ ID NO: 33883 - DNA, 20 bp, synthetic construct
  misc_feature 1..20: note = chemically synthesized
  source 1..20: mol_type = other DNA
tgactcaggtcatgctggca

SEQ ID NO: 33884 - DNA, 20 bp, synthetic construct
  misc_feature 1..20: note = chemically synthesized
  source 1..20: mol_type = other DNA
gactcaggtcatgctggcat

SEQ ID NO: 33885 - DNA, 20 bp, synthetic construct
  misc_feature 1..20: note = chemically synthesized
  source 1..20: mol_type = other DNA
ctcaggtcatgctggcatag

SEQ ID NO: 33886 - DNA, 20 bp, synthetic construct
  misc_feature 1..20: note = chemically synthesized
  source 1..20: mol_type = other DNA
aggtcatgctggcataggag

SEQ ID NO: 33887 - DNA, 20 bp, synthetic construct
  misc_feature 1..20: note = chemically synthesized
  source 1..20: mol_type = other DNA
tcatgctggcataggagaag

SEQ ID NO: 33888 - DNA, 20 bp, synthetic construct
  misc_feature 1..20: note = chemically synthesized
  source 1..20: mol_type = other DNA
catgctggcataggagaagc

SEQ ID NO: 33889 - DNA, 20 bp, synthetic construct
  misc_feature 1..20: note = chemically synthesized
  source 1..20: mol_type = other DNA
ggcataggagaagcaggtgc

SEQ ID NO: 33890 - DNA, 20 bp, synthetic construct
  misc_feature 1..20: note = chemically synthesized
  source 1..20: mol_type = other DNA
tgctagtgtttcacttgaac

SEQ ID NO: 33891 - DNA, 20 bp, synthetic construct
  misc_feature 1..20: note = chemically synthesized
  source 1..20: mol_type = other DNA
gtttcacttgaactagttgt

SEQ ID NO: 33892 - DNA, 20 bp, synthetic construct
  misc_feature 1..20: note = chemically synthesized
  source 1..20: mol_type = other DNA
tttcacttgaactagttgtt

SEQ ID NO: 33893 - DNA, 20 bp, synthetic construct
  misc_feature 1..20: note = chemically synthesized
  source 1..20: mol_type = other DNA
acttgaactagttgttgggc

SEQ ID NO: 33894 - DNA, 20 bp, synthetic construct
  misc_feature 1..20: note = chemically synthesized
  source 1..20: mol_type = other DNA
cttgaactagttgttgggct

SEQ ID NO: 33895 - DNA, 20 bp, synthetic construct
  misc_feature 1..20: note = chemically synthesized
  source 1..20: mol_type = other DNA
ttgaactagttgttgggctg

SEQ ID NO: 33896 - DNA, 20 bp, synthetic construct
  misc_feature 1..20: note = chemically synthesized
  source 1..20: mol_type = other DNA
aactagttgttgggctgggg

SEQ ID NO: 33897 - DNA, 20 bp, synthetic construct
  misc_feature 1..20: note = chemically synthesized
  source 1..20: mol_type = other DNA
gttgggctggggtggaatga

SEQ ID NO: 33898 - DNA, 20 bp, synthetic construct
  misc_feature 1..20: note = chemically synthesized
  source 1..20: mol_type = other DNA
ggggtggaatgaaagctccc

SEQ ID NO: 33899 - DNA, 20 bp, synthetic construct
  misc_feature 1..20: note = chemically synthesized
  source 1..20: mol_type = other DNA
gggtggaatgaaagctccct

SEQ ID NO: 33900 - DNA, 20 bp, synthetic construct
  misc_feature 1..20: note = chemically synthesized
  source 1..20: mol_type = other DNA
atgaaagctccctaggccat

SEQ ID NO: 33901 - DNA, 20 bp, synthetic construct
  misc_feature 1..20: note = chemically synthesized
  source 1..20: mol_type = other DNA
tgaaagctccctaggccatg

SEQ ID NO: 33902 - DNA, 20 bp, synthetic construct
  misc_feature 1..20: note = chemically synthesized
  source 1..20: mol_type = other DNA
atgaggacatctttgcaatg

SEQ ID NO: 33903 - DNA, 20 bp, synthetic construct
  misc_feature 1..20: note = chemically synthesized
  source 1..20: mol_type = other DNA
gaggacatctttgcaatgtg

SEQ ID NO: 33904 - DNA, 20 bp, synthetic construct
  misc_feature 1..20: note = chemically synthesized
  source 1..20: mol_type = other DNA
ggacatctttgcaatgtgga

SEQ ID NO: 33905 - DNA, 20 bp, synthetic construct
  misc_feature 1..20: note = chemically synthesized
  source 1..20: mol_type = other DNA
gacatctttgcaatgtggag

SEQ ID NO: 33906 - DNA, 20 bp, synthetic construct
  misc_feature 1..20: note = chemically synthesized
  source 1..20: mol_type = other DNA
aatgtggagaggacccaaat

SEQ ID NO: 33907 - DNA, 20 bp, synthetic construct
  misc_feature 1..20: note = chemically synthesized
  source 1..20: mol_type = other DNA
gtggagaggacccaaatcag

SEQ ID NO: 33908 - DNA, 20 bp, synthetic construct
  misc_feature 1..20: note = chemically synthesized
  source 1..20: mol_type = other DNA
tggagaggacccaaatcagt

SEQ ID NO: 33909 - DNA, 20 bp, synthetic construct
  misc_feature 1..20: note = chemically synthesized
  source 1..20: mol_type = other DNA
gtgttgctctttgaatgttg

SEQ ID NO: 33910 - DNA, 20 bp, synthetic construct
  misc_feature 1..20: note = chemically synthesized
  source 1..20: mol_type = other DNA
tgttgctctttgaatgttga

SEQ ID NO: 33911 - DNA, 20 bp, synthetic construct
  misc_feature 1..20: note = chemically synthesized
  source 1..20: mol_type = other DNA
ttgaatgttgaaggccttgt

SEQ ID NO: 33912 - DNA, 20 bp, synthetic construct
  misc_feature 1..20: note = chemically synthesized
  source 1..20: mol_type = other DNA
tgaaggccttgtcagcatac

SEQ ID NO: 33913 - DNA, 20 bp, synthetic construct
  misc_feature 1..20: note = chemically synthesized
  source 1..20: mol_type = other DNA
ttgtcagcatactggtcacc

SEQ ID NO: 33914 - DNA, 20 bp, synthetic construct
  misc_feature 1..20: note = chemically synthesized
  source 1..20: mol_type = other DNA
acttcatactgtttgtacca

SEQ ID NO: 33915 - DNA, 20 bp, synthetic construct
  misc_feature 1..20: note = chemically synthesized
  source 1..20: mol_type = other DNA
ctgtttgtaccaaagcacca

SEQ ID NO: 33916 - DNA, 20 bp, synthetic construct
  misc_feature 1..20: note = chemically synthesized
  source 1..20: mol_type = other DNA
cacagtttccttatgaaact

SEQ ID NO: 33917 - DNA, 20 bp, synthetic construct
  misc_feature 1..20: note = chemically synthesized
  source 1..20: mol_type = other DNA
tccttatgaaacttagcttc

SEQ ID NO: 33918 - DNA, 20 bp, synthetic construct
  misc_feature 1..20: note = chemically synthesized
  source 1..20: mol_type = other DNA
ccttatgaaacttagcttca

SEQ ID NO: 33919 - DNA, 20 bp, synthetic construct
  misc_feature 1..20: note = chemically synthesized
  source 1..20: mol_type = other DNA
atgaaacttagcttcaaggc

SEQ ID NO: 33920 - DNA, 20 bp, synthetic construct
  misc_feature 1..20: note = chemically synthesized
  source 1..20: mol_type = other DNA
gaaacttagcttcaaggctg

SEQ ID NO: 33921 - DNA, 20 bp, synthetic construct
  misc_feature 1..20: note = chemically synthesized
  source 1..20: mol_type = other DNA
aaggctggagatgtttttga

SEQ ID NO: 33922 - DNA, 20 bp, synthetic construct
  misc_feature 1..20: note = chemically synthesized
  source 1..20: mol_type = other DNA
attcgtcttgactataataa

SEQ ID NO: 33923 - DNA, 20 bp, synthetic construct
  misc_feature 1..20: note = chemically synthesized
  source 1..20: mol_type = other DNA
ataatggtaacttttcttgt

SEQ ID NO: 33924 - DNA, 20 bp, synthetic construct
  misc_feature 1..20: note = chemically synthesized
  source 1..20: mol_type = other DNA
ctgaaattctacttctgcct

SEQ ID NO: 33925 - DNA, 20 bp, synthetic construct
  misc_feature 1..20: note = chemically synthesized
  source 1..20: mol_type = other DNA
aattctacttctgccttaga

SEQ ID NO: 33926 - DNA, 20 bp, synthetic construct
  misc_feature 1..20: note = chemically synthesized
  source 1..20: mol_type = other DNA
ttctacttctgccttagaca

SEQ ID NO: 33927 - DNA, 20 bp, synthetic construct
  misc_feature 1..20: note = chemically synthesized
  source 1..20: mol_type = other DNA
tctacttctgccttagacag

SEQ ID NO: 33928 - DNA, 20 bp, synthetic construct
  misc_feature 1..20: note = chemically synthesized
  source 1..20: mol_type = other DNA
ggctcctatccttcctcctg

SEQ ID NO: 33929 - DNA, 20 bp, synthetic construct
  misc_feature 1..20: note = chemically synthesized
  source 1..20: mol_type = other DNA
cttcctcctgaagctctgtt

SEQ ID NO: 33930 - DNA, 20 bp, synthetic construct
  misc_feature 1..20: note = chemically synthesized
  source 1..20: mol_type = other DNA
tgaagctctgttgagcccga

SEQ ID NO: 33931 - DNA, 20 bp, synthetic construct
  misc_feature 1..20: note = chemically synthesized
  source 1..20: mol_type = other DNA
aagctctgttgagcccgatg

SEQ ID NO: 33932 - DNA, 20 bp, synthetic construct
  misc_feature 1..20: note = chemically synthesized
  source 1..20: mol_type = other DNA
agctctgttgagcccgatgg

SEQ ID NO: 33933 - DNA, 20 bp, synthetic construct
  misc_feature 1..20: note = chemically synthesized
  source 1..20: mol_type = other DNA
tctgttgagcccgatggagg

SEQ ID NO: 33934 - DNA, 20 bp, synthetic construct
  misc_feature 1..20: note = chemically synthesized
  source 1..20: mol_type = other DNA
ctgttgagcccgatggaggt

SEQ ID NO: 33935 - DNA, 20 bp, synthetic construct
  misc_feature 1..20: note = chemically synthesized
  source 1..20: mol_type = other DNA
ttgagcccgatggaggtggg

SEQ ID NO: 33936 - DNA, 20 bp, synthetic construct
  misc_feature 1..20: note = chemically synthesized
  source 1..20: mol_type = other DNA
tgagcccgatggaggtgggc

SEQ ID NO: 33937 - DNA, 20 bp, synthetic construct
  misc_feature 1..20: note = chemically synthesized
  source 1..20: mol_type = other DNA
gaggtgggcaggcactgtca

SEQ ID NO: 33938 - DNA, 20 bp, synthetic construct
  misc_feature 1..20: note = chemically synthesized
  source 1..20: mol_type = other DNA
caggcactgtcatagtccgt

SEQ ID NO: 33939 - DNA, 20 bp, synthetic construct
  misc_feature 1..20: note = chemically synthesized
  source 1..20: mol_type = other DNA
cgtaagcttcctgctgcact

SEQ ID NO: 33940 - DNA, 20 bp, synthetic construct
  misc_feature 1..20: note = chemically synthesized
  source 1..20: mol_type = other DNA
acttggtgatgtgattcttc

SEQ ID NO: 33941 - DNA, 20 bp, synthetic construct
  misc_feature 1..20: note = chemically synthesized
  source 1..20: mol_type = other DNA
ggtgatgtgattcttcaagt

SEQ ID NO: 33942 - DNA, 20 bp, synthetic construct
  misc_feature 1..20: note = chemically synthesized
  source 1..20: mol_type = other DNA
gtgatgtgattcttcaagtc

SEQ ID NO: 33943 - DNA, 20 bp, synthetic construct
  misc_feature 1..20: note = chemically synthesized
  source 1..20: mol_type = other DNA
gattcttcaagtcaggaaat

SEQ ID NO: 33944 - DNA, 20 bp, synthetic construct
  misc_feature 1..20: note = chemically synthesized
  source 1..20: mol_type = other DNA
ttcaagtcaggaaattggtc

SEQ ID NO: 33945 - DNA, 20 bp, synthetic construct
  misc_feature 1..20: note = chemically synthesized
  source 1..20: mol_type = other DNA
tcaagtcaggaaattggtcc

SEQ ID NO: 33946 - DNA, 20 bp, synthetic construct
  misc_feature 1..20: note = chemically synthesized
  source 1..20: mol_type = other DNA
agtcaggaaattggtccagg

SEQ ID NO: 33947 - DNA, 20 bp, synthetic construct
  misc_feature 1..20: note = chemically synthesized
  source 1..20: mol_type = other DNA
aattggtccaggtagttttc

SEQ ID NO: 33948 - DNA, 20 bp, synthetic construct
  misc_feature 1..20: note = chemically synthesized
  source 1..20: mol_type = other DNA
tccaggtagttttccagtgt

SEQ ID NO: 33949 - DNA, 20 bp, synthetic construct
  misc_feature 1..20: note = chemically synthesized
  source 1..20: mol_type = other DNA
ggtagttttccagtgttagc

SEQ ID NO: 33950 - DNA, 20 bp, synthetic construct
  misc_feature 1..20: note = chemically synthesized
  source 1..20: mol_type = other DNA
gtagttttccagtgttagca

SEQ ID NO: 33951 - DNA, 20 bp, synthetic construct
  misc_feature 1..20: note = chemically synthesized
  source 1..20: mol_type = other DNA
gttagcaaggatgcatccat

SEQ ID NO: 33952 - DNA, 20 bp, synthetic construct
  misc_feature 1..20: note = chemically synthesized
  source 1..20: mol_type = other DNA
atgcatccatgagttttttg

SEQ ID NO: 33953 - DNA, 20 bp, synthetic construct
  misc_feature 1..20: note = chemically synthesized
  source 1..20: mol_type = other DNA
gttttttgtggatatcctcc

SEQ ID NO: 33954 - DNA, 20 bp, synthetic construct
  misc_feature 1..20: note = chemically synthesized
  source 1..20: mol_type = other DNA
tttttgtggatatcctccca

SEQ ID NO: 33955 - DNA, 20 bp, synthetic construct
  misc_feature 1..20: note = chemically synthesized
  source 1..20: mol_type = other DNA
cattttcacaccttcctgcc

SEQ ID NO: 33956 - DNA, 20 bp, synthetic construct
  misc_feature 1..20: note = chemically synthesized
  source 1..20: mol_type = other DNA
ccttcctgcccagaccaatc

SEQ ID NO: 33957 - DNA, 20 bp, synthetic construct
  misc_feature 1..20: note = chemically synthesized
  source 1..20: mol_type = other DNA
gcccagaccaatccagcgca

SEQ ID NO: 33958 - DNA, 20 bp, synthetic construct
  misc_feature 1..20: note = chemically synthesized
  source 1..20: mol_type = other DNA
tccagcgcacagacttcaca

SEQ ID NO: 33959 - DNA, 20 bp, synthetic construct
  misc_feature 1..20: note = chemically synthesized
  source 1..20: mol_type = other DNA
acagacttcacacagtgact

SEQ ID NO: 33960 - DNA, 20 bp, synthetic construct
  misc_feature 1..20: note = chemically synthesized
  source 1..20: mol_type = other DNA
cacagtgactcagcttcgtc

SEQ ID NO: 33961 - DNA, 20 bp, synthetic construct
  misc_feature 1..20: note = chemically synthesized
  source 1..20: mol_type = other DNA
acagtgactcagcttcgtca

SEQ ID NO: 33962 - DNA, 20 bp, synthetic construct
  misc_feature 1..20: note = chemically synthesized
  source 1..20: mol_type = other DNA
tgattgcttctaaacatcct

SEQ ID NO: 33963 - DNA, 20 bp, synthetic construct
  misc_feature 1..20: note = chemically synthesized
  source 1..20: mol_type = other DNA
attgcttctaaacatcctca

SEQ ID NO: 33964 - DNA, 20 bp, synthetic construct
  misc_feature 1..20: note = chemically synthesized
  source 1..20: mol_type = other DNA
aaacatcctcagagttctct

SEQ ID NO: 33965 - DNA, 20 bp, synthetic construct
  misc_feature 1..20: note = chemically synthesized
  source 1..20: mol_type = other DNA
aacatcctcagagttctctc

SEQ ID NO: 33966 - DNA, 20 bp, synthetic construct
  misc_feature 1..20: note = chemically synthesized
  source 1..20: mol_type = other DNA
cctcagagttctctcaggtc

SEQ ID NO: 33967 - DNA, 20 bp, synthetic construct
  misc_feature 1..20: note = chemically synthesized
  source 1..20: mol_type = other DNA
ctggtaccctctgcttcttg

SEQ ID NO: 33968 - DNA, 20 bp, synthetic construct
  misc_feature 1..20: note = chemically synthesized
  source 1..20: mol_type = other DNA
cctctgcttcttgtggcttg

SEQ ID NO: 33969 - DNA, 20 bp, synthetic construct
  misc_feature 1..20: note = chemically synthesized
  source 1..20: mol_type = other DNA
cttcttgtggcttgaagttc

SEQ ID NO: 33970 - DNA, 20 bp, synthetic construct
  misc_feature 1..20: note = chemically synthesized
  source 1..20: mol_type = other DNA
aaactgtttgtcttttgtct

SEQ ID NO: 33971 - DNA, 20 bp, synthetic construct
  misc_feature 1..20: note = chemically synthesized
  source 1..20: mol_type = other DNA
ctgtttgtcttttgtctcag

SEQ ID NO: 33972 - DNA, 20 bp, synthetic construct
  misc_feature 1..20: note = chemically synthesized
  source 1..20: mol_type = other DNA
tttgtctcagcagctttccc

SEQ ID NO: 33973 - DNA, 20 bp, synthetic construct
  misc_feature 1..20: note = chemically synthesized
  source 1..20: mol_type = other DNA
cagcagctttccctggcttc

SEQ ID NO: 33974 - DNA, 20 bp, synthetic construct
  misc_feature 1..20: note = chemically synthesized
  source 1..20: mol_type = other DNA
gcagctttccctggcttctg

SEQ ID NO: 33975 - DNA, 20 bp, synthetic construct
  misc_feature 1..20: note = chemically synthesized
  source 1..20: mol_type = other DNA
cagctttccctggcttctgg

SEQ ID NO: 33976 - DNA, 20 bp, synthetic construct
  misc_feature 1..20: note = chemically synthesized
  source 1..20: mol_type = other DNA
tctggaggacgttttcctgt

SEQ ID NO: 33977 - DNA, 20 bp, synthetic construct
  misc_feature 1..20: note = chemically synthesized
  source 1..20: mol_type = other DNA
ggaggacgttttcctgtgag

SEQ ID NO: 33978 - DNA, 20 bp, synthetic construct
  misc_feature 1..20: note = chemically synthesized
  source 1..20: mol_type = other DNA
acgttttcctgtgagtggct

SEQ ID NO: 33979 - DNA, 20 bp, synthetic construct
  misc_feature 1..20: note = chemically synthesized
  source 1..20: mol_type = other DNA
gtgagtggctgagtctcttc

SEQ ID NO: 33980 - DNA, 20 bp, synthetic construct
  misc_feature 1..20: note = chemically synthesized
  source 1..20: mol_type = other DNA
tgagtggctgagtctcttcc

SEQ ID NO: 33981 - DNA, 20 bp, synthetic construct
  misc_feature 1..20: note = chemically synthesized
  source 1..20: mol_type = other DNA
gagtctcttccaggcattct

SEQ ID NO: 33982 - DNA, 20 bp, synthetic construct
  misc_feature 1..20: note = chemically synthesized
  source 1..20: mol_type = other DNA
tcttccaggcattcttggca

SEQ ID NO: 33983 - DNA, 20 bp, synthetic construct
  misc_feature 1..20: note = chemically synthesized
  source 1..20: mol_type = other DNA
caaagatgccctcttgatgt

SEQ ID NO: 33984 - DNA, 20 bp, synthetic construct
  misc_feature 1..20: note = chemically synthesized
  source 1..20: mol_type = other DNA
gatgccctcttgatgttggc

SEQ ID NO: 33985 - DNA, 20 bp, synthetic construct
  misc_feature 1..20: note = chemically synthesized
  source 1..20: mol_type = other DNA
atgccctcttgatgttggcc

SEQ ID NO: 33986 - DNA, 20 bp, synthetic construct
  misc_feature 1..20: note = chemically synthesized
  source 1..20: mol_type = other DNA
tgccctcttgatgttggcca

SEQ ID NO: 33987 - DNA, 20 bp, synthetic construct
  misc_feature 1..20: note = chemically synthesized
  source 1..20: mol_type = other DNA
cttgatgttggccagggctg

SEQ ID NO: 33988 - DNA, 20 bp, synthetic construct
  misc_feature 1..20: note = chemically synthesized
  source 1..20: mol_type = other DNA
ttgatgttggccagggctgc

SEQ ID NO: 33989 - DNA, 20 bp, synthetic construct
  misc_feature 1..20: note = chemically synthesized
  source 1..20: mol_type = other DNA
gttggccagggctgcaggtc

SEQ ID NO: 33990 - DNA, 20 bp, synthetic construct
  misc_feature 1..20: note = chemically synthesized
  source 1..20: mol_type = other DNA
ttggccagggctgcaggtcc

SEQ ID NO: 33991 - DNA, 20 bp, synthetic construct
  misc_feature 1..20: note = chemically synthesized
  source 1..20: mol_type = other DNA
agggctgcaggtccaggacc

SEQ ID NO: 33992 - DNA, 20 bp, synthetic construct
  misc_feature 1..20: note = chemically synthesized
  source 1..20: mol_type = other DNA
gggctgcaggtccaggacct

SEQ ID NO: 33993 - DNA, 20 bp, synthetic construct
  misc_feature 1..20: note = chemically synthesized
  source 1..20: mol_type = other DNA
gctgcaggtccaggacctgg

SEQ ID NO: 33994 - DNA, 20 bp, synthetic construct
  misc_feature 1..20: note = chemically synthesized
  source 1..20: mol_type = other DNA
ctgcaggtccaggacctggg

SEQ ID NO: 33995 - DNA, 20 bp, synthetic construct
  misc_feature 1..20: note = chemically synthesized
  source 1..20: mol_type = other DNA
gcaggtccaggacctgggag

SEQ ID NO: 33996 - DNA, 20 bp, synthetic construct
  misc_feature 1..20: note = chemically synthesized
  source 1..20: mol_type = other DNA
tccaggacctgggaggagct

SEQ ID NO: 33997 - DNA, 20 bp, synthetic construct
  misc_feature 1..20: note = chemically synthesized
  source 1..20: mol_type = other DNA
cctgggaggagctgagcgct

SEQ ID NO: 33998 - DNA, 20 bp, synthetic construct
  misc_feature 1..20: note = chemically synthesized
  source 1..20: mol_type = other DNA
gaggagctgagcgctcagtg

SEQ ID NO: 33999 - DNA, 20 bp, synthetic construct
  misc_feature 1..20: note = chemically synthesized
  source 1..20: mol_type = other DNA
agctgagcgctcagtgtggc

SEQ ID NO: 34000 - DNA, 20 bp, synthetic construct
  misc_feature 1..20: note = chemically synthesized
  source 1..20: mol_type = other DNA
tgagcgctcagtgtggctgg

SEQ ID NO: 34001 - DNA, 20 bp, synthetic construct
  misc_feature 1..20: note = chemically synthesized
  source 1..20: mol_type = other DNA
gctcagtgtggctggtggcg

SEQ ID NO: 34002 - DNA, 20 bp, synthetic construct
  misc_feature 1..20: note = chemically synthesized
  source 1..20: mol_type = other DNA
tcagtgtggctggtggcgtg

SEQ ID NO: 34003 - DNA, 20 bp, synthetic construct
  misc_feature 1..20: note = chemically synthesized
  source 1..20: mol_type = other DNA
cagtgtggctggtggcgtgg

SEQ ID NO: 34004 - DNA, 20 bp, synthetic construct
  misc_feature 1..20: note = chemically synthesized
  source 1..20: mol_type = other DNA
agtgtggctggtggcgtgga

SEQ ID NO: 34005 - DNA, 20 bp, synthetic construct
  misc_feature 1..20: note = chemically synthesized
  source 1..20: mol_type = other DNA
gtgtggctggtggcgtggag

SEQ ID NO: 34006 - DNA, 20 bp, synthetic construct
  misc_feature 1..20: note = chemically synthesized
  source 1..20: mol_type = other DNA
tggctggtggcgtggagggg

SEQ ID NO: 34007 - DNA, 20 bp, synthetic construct
  misc_feature 1..20: note = chemically synthesized
  source 1..20: mol_type = other DNA
ggctggtggcgtggaggggc

SEQ ID NO: 34008 - DNA, 20 bp, synthetic construct
  misc_feature 1..20: note = chemically synthesized
  source 1..20: mol_type = other DNA
ctggtggcgtggaggggcgg

SEQ ID NO: 34009 - DNA, 20 bp, synthetic construct
  misc_feature 1..20: note = chemically synthesized
  source 1..20: mol_type = other DNA
tggtggcgtggaggggcggg

SEQ ID NO: 34010 - DNA, 20 bp, synthetic construct
  misc_feature 1..20: note = chemically synthesized
  source 1..20: mol_type = other DNA
tggcgtggaggggcgggagg

SEQ ID NO: 34011 - DNA, 20 bp, synthetic construct
  misc_feature 1..20: note = chemically synthesized
  source 1..20: mol_type = other DNA
cgtggaggggcgggaggaag

SEQ ID NO: 34012 - DNA, 20 bp, synthetic construct
  misc_feature 1..20: note = chemically synthesized
  source 1..20: mol_type = other DNA
gtggaggggcgggaggaagt

SEQ ID NO: 34013 - DNA, 20 bp, synthetic construct
  misc_feature 1..20: note = chemically synthesized
  source 1..20: mol_type = other DNA
tggaggggcgggaggaagtg

SEQ ID NO: 34014 - DNA, 20 bp, synthetic construct
  misc_feature 1..20: note = chemically synthesized
  source 1..20: mol_type = other DNA
gaggggcgggaggaagtggg

SEQ ID NO: 34015 - DNA, 20 bp, synthetic construct
  misc_feature 1..20: note = chemically synthesized
  source 1..20: mol_type = other DNA
aggggcgggaggaagtgggg

SEQ ID NO: 34016 - DNA, 20 bp, synthetic construct
  misc_feature 1..20: note = chemically synthesized
  source 1..20: mol_type = other DNA
gaggaagtggggaggatcat

SEQ ID NO: 34017 - DNA, 20 bp, synthetic construct
  misc_feature 1..20: note = chemically synthesized
  source 1..20: mol_type = other DNA
aggaagtggggaggatcatg

SEQ ID NO: 34018 - DNA, 20 bp, synthetic construct
  misc_feature 1..20: note = chemically synthesized
  source 1..20: mol_type = other DNA
gaagtggggaggatcatgag

SEQ ID NO: 34019 - DNA, 20 bp, synthetic construct
  misc_feature 1..20: note = chemically synthesized
  source 1..20: mol_type = other DNA
aagtggggaggatcatgagg

SEQ ID NO: 34020 - DNA, 20 bp, synthetic construct
  misc_feature 1..20: note = chemically synthesized
  source 1..20: mol_type = other DNA
agtggggaggatcatgagga

SEQ ID NO: 34021 - DNA, 20 bp, synthetic construct
  misc_feature 1..20: note = chemically synthesized
  source 1..20: mol_type = other DNA
gtggggaggatcatgaggag

SEQ ID NO: 34022 - DNA, 20 bp, synthetic construct
  misc_feature 1..20: note = chemically synthesized
  source 1..20: mol_type = other DNA
ggaggatcatgaggaggggt

SEQ ID NO: 34023 - DNA, 20 bp, synthetic construct
  misc_feature 1..20: note = chemically synthesized
  source 1..20: mol_type = other DNA
gaggatcatgaggaggggtg

SEQ ID NO: 34024 - DNA, 20 bp, synthetic construct
  misc_feature 1..20: note = chemically synthesized
  source 1..20: mol_type = other DNA
cctactgttgatatgttgtt

SEQ ID NO: 34025 - DNA, 20 bp, synthetic construct
  misc_feature 1..20: note = chemically synthesized
  source 1..20: mol_type = other DNA
ctactgttgatatgttgttc

SEQ ID NO: 34026 - DNA, 20 bp, synthetic construct
  misc_feature 1..20: note = chemically synthesized
  source 1..20: mol_type = other DNA
tactgttgatatgttgttca

SEQ ID NO: 34027 - DNA, 20 bp, synthetic construct
  misc_feature 1..20: note = chemically synthesized
  source 1..20: mol_type = other DNA
atatgttgttcagggaccat

SEQ ID NO: 34028 - DNA, 20 bp, synthetic construct
  misc_feature 1..20: note = chemically synthesized
  source 1..20: mol_type = other DNA
tatgttgttcagggaccatc

SEQ ID NO: 34029 - DNA, 20 bp, synthetic construct
  misc_feature 1..20: note = chemically synthesized
  source 1..20: mol_type = other DNA
tgttgttcagggaccatcgg

SEQ ID NO: 34030 - DNA, 20 bp, synthetic construct
  misc_feature 1..20: note = chemically synthesized
  source 1..20: mol_type = other DNA
ttcagggaccatcgggagcc

SEQ ID NO: 34031 - DNA, 20 bp, synthetic construct
  misc_feature 1..20: note = chemically synthesized
  source 1..20: mol_type = other DNA
cagggaccatcgggagccca

SEQ ID NO: 34032 - DNA, 20 bp, synthetic construct
  misc_feature 1..20: note = chemically synthesized
  source 1..20: mol_type = other DNA
cagagctctgctctgtttca

SEQ ID NO: 34033 - DNA, 20 bp, synthetic construct
  misc_feature 1..20: note = chemically synthesized
  source 1..20: mol_type = other DNA
agagctctgctctgtttcac

SEQ ID NO: 34034 - DNA, 20 bp, synthetic construct
  misc_feature 1..20: note = chemically synthesized
  source 1..20: mol_type = other DNA
ctgtttcacgggactccaca

SEQ ID NO: 34035 - DNA, 20 bp, synthetic construct
  misc_feature 1..20: note = chemically synthesized
  source 1..20: mol_type = other DNA
gtttcacgggactccacaaa

SEQ ID NO: 34036 - DNA, 20 bp, synthetic construct
  misc_feature 1..20: note = chemically synthesized
  source 1..20: mol_type = other DNA
gactccacaaagagaactgc

SEQ ID NO: 34037 - DNA, 20 bp, synthetic construct
  misc_feature 1..20: note = chemically synthesized
  source 1..20: mol_type = other DNA
acaaagagaactgcaagtcc

SEQ ID NO: 34038 - DNA, 20 bp, synthetic construct
  misc_feature 1..20: note = chemically synthesized
  source 1..20: mol_type = other DNA
tcccagtctttcacctctct

SEQ ID NO: 34039 - DNA, 20 bp, synthetic construct
  misc_feature 1..20: note = chemically synthesized
  source 1..20: mol_type = other DNA
gtctcttcatcacatctctt

SEQ ID NO: 34040 - DNA, 20 bp, synthetic construct
  misc_feature 1..20: note = chemically synthesized
  source 1..20: mol_type = other DNA
tcatcacatctcttcagtat

SEQ ID NO: 34041 - DNA, 20 bp, synthetic construct
  misc_feature 1..20: note = chemically synthesized
  source 1..20: mol_type = other DNA
catcacatctcttcagtata

SEQ ID NO: 34042 - DNA, 20 bp, synthetic construct
  misc_feature 1..20: note = chemically synthesized
  source 1..20: mol_type = other DNA
cacatctcttcagtataagg

SEQ ID NO: 34043 - DNA, 20 bp, synthetic construct
  misc_feature 1..20: note = chemically synthesized
  source 1..20: mol_type = other DNA
ctcttcagtataaggaagaa

SEQ ID NO: 34044 - DNA, 20 bp, synthetic construct
  misc_feature 1..20: note = chemically synthesized
  source 1..20: mol_type = other DNA
tcagtataaggaagaacaga

SEQ ID NO: 34045 - DNA, 20 bp, synthetic construct
  misc_feature 1..20: note = chemically synthesized
  source 1..20: mol_type = other DNA
cagtataaggaagaacagaa

SEQ ID NO: 34046 - DNA, 20 bp, synthetic construct
  misc_feature 1..20: note = chemically synthesized
  source 1..20: mol_type = other DNA
agtataaggaagaacagaaa

SEQ ID NO: 34047 - DNA, 20 bp, synthetic construct
  misc_feature 1..20: note = chemically synthesized
  source 1..20: mol_type = other DNA
tataaggaagaacagaaagg

SEQ ID NO: 34048 - DNA, 20 bp, synthetic construct
  misc_feature 1..20: note = chemically synthesized
  source 1..20: mol_type = other DNA
ataaggaagaacagaaaggg

SEQ ID NO: 34049 - DNA, 20 bp, synthetic construct
  misc_feature 1..20: note = chemically synthesized
  source 1..20: mol_type = other DNA
aaggaagaacagaaagggag

SEQ ID NO: 34050 - DNA, 20 bp, synthetic construct
  misc_feature 1..20: note = chemically synthesized
  source 1..20: mol_type = other DNA
ggaagaacagaaagggagga

SEQ ID NO: 34051 - DNA, 20 bp, synthetic construct
  misc_feature 1..20: note = chemically synthesized
  source 1..20: mol_type = other DNA
agaaagggaggagagaaact

SEQ ID NO: 34052 - DNA, 20 bp, synthetic construct
  misc_feature 1..20: note = chemically synthesized
  source 1..20: mol_type = other DNA
gaaagggaggagagaaactc

SEQ ID NO: 34053 - DNA, 20 bp, synthetic construct
  misc_feature 1..20: note = chemically synthesized
  source 1..20: mol_type = other DNA
aaagggaggagagaaactca

SEQ ID NO: 34054 - DNA, 20 bp, synthetic construct
  misc_feature 1..20: note = chemically synthesized
  source 1..20: mol_type = other DNA
ggagagaaactcagggttgt

SEQ ID NO: 34055 - DNA, 20 bp, synthetic construct
  misc_feature 1..20: note = chemically synthesized
  source 1..20: mol_type = other DNA
cagtcaaatgtgtccattta

SEQ ID NO: 34056 - DNA, 20 bp, synthetic construct
  misc_feature 1..20: note = chemically synthesized
  source 1..20: mol_type = other DNA
tataaaatgtattgttatcc

SEQ ID NO: 34057 - DNA, 20 bp, synthetic construct
  misc_feature 1..20: note = chemically synthesized
  source 1..20: mol_type = other DNA
tatcctagttatctttatac

SEQ ID NO: 34058 - DNA, 20 bp, synthetic construct
  misc_feature 1..20: note = chemically synthesized
  source 1..20: mol_type = other DNA
atctttatactagcctgcta

SEQ ID NO: 34059 - DNA, 20 bp, synthetic construct
  misc_feature 1..20: note = chemically synthesized
  source 1..20: mol_type = other DNA
tttatactagcctgctatgg

SEQ ID NO: 34060 - DNA, 20 bp, synthetic construct
  misc_feature 1..20: note = chemically synthesized
  source 1..20: mol_type = other DNA
ttatactagcctgctatggc

SEQ ID NO: 34061 - DNA, 20 bp, synthetic construct
  misc_feature 1..20: note = chemically synthesized
  source 1..20: mol_type = other DNA
tagcctgctatggcaggttt

SEQ ID NO: 34062 - DNA, 20 bp, synthetic construct
  misc_feature 1..20: note = chemically synthesized
  source 1..20: mol_type = other DNA
agcctgctatggcaggtttc

SEQ ID NO: 34063 - DNA, 20 bp, synthetic construct
  misc_feature 1..20: note = chemically synthesized
  source 1..20: mol_type = other DNA
atggcaggtttcaggatcac

SEQ ID NO: 34064 - DNA, 20 bp, synthetic construct
  misc_feature 1..20: note = chemically synthesized
  source 1..20: mol_type = other DNA
ggtttcaggatcactggacc

SEQ ID NO: 34065 - DNA, 20 bp, synthetic construct
  misc_feature 1..20: note = chemically synthesized
  source 1..20: mol_type = other DNA
tttcaggatcactggaccta

SEQ ID NO: 34066 - DNA, 20 bp, synthetic construct
  misc_feature 1..20: note = chemically synthesized
  source 1..20: mol_type = other DNA
ttcaggatcactggacctag

SEQ ID NO: 34067 - DNA, 20 bp, synthetic construct
  misc_feature 1..20: note = chemically synthesized
  source 1..20: mol_type = other DNA
tcaggatcactggacctaga

SEQ ID NO: 34068 - DNA, 20 bp, synthetic construct
  misc_feature 1..20: note = chemically synthesized
  source 1..20: mol_type = other DNA
gatcactggacctagagggt

SEQ ID NO: 34069 - DNA, 20 bp, synthetic construct
  misc_feature 1..20: note = chemically synthesized
  source 1..20: mol_type = other DNA
ctggacctagagggtgagtc

SEQ ID NO: 34070 - DNA, 20 bp, synthetic construct
  misc_feature 1..20: note = chemically synthesized
  source 1..20: mol_type = other DNA
acctagagggtgagtcaaga

SEQ ID NO: 34071 - DNA, 20 bp, synthetic construct
  misc_feature 1..20: note = chemically synthesized
  source 1..20: mol_type = other DNA
aagaaagattttctttgatg

SEQ ID NO: 34072 - DNA, 20 bp, synthetic construct
  misc_feature 1..20: note = chemically synthesized
  source 1..20: mol_type = other DNA
agattttctttgatgtggct

SEQ ID NO: 34073 - DNA, 20 bp, synthetic construct
  misc_feature 1..20: note = chemically synthesized
  source 1..20: mol_type = other DNA
ccccctgaattcattcccaa

SEQ ID NO: 34074 - DNA, 20 bp, synthetic construct
  misc_feature 1..20: note = chemically synthesized
  source 1..20: mol_type = other DNA
gaattcattcccaaaagccc

SEQ ID NO: 34075 - DNA, 20 bp, synthetic construct
  misc_feature 1..20: note = chemically synthesized
  source 1..20: mol_type = other DNA
aattcattcccaaaagccca

SEQ ID NO: 34076 - DNA, 20 bp, synthetic construct
  misc_feature 1..20: note = chemically synthesized
  source 1..20: mol_type = other DNA
attcattcccaaaagcccaa

SEQ ID NO: 34077 - DNA, 20 bp, synthetic construct
  misc_feature 1..20: note = chemically synthesized
  source 1..20: mol_type = other DNA
cattcccaaaagcccaaggg

SEQ ID NO: 34078 - DNA, 20 bp, synthetic construct
  misc_feature 1..20: note = chemically synthesized
  source 1..20: mol_type = other DNA
cccaaaagcccaagggaaga

SEQ ID NO: 34079 - DNA, 20 bp, synthetic construct
  misc_feature 1..20: note = chemically synthesized
  source 1..20: mol_type = other DNA
aagcccaagggaagaaagaa

SEQ ID NO: 34080 - DNA, 20 bp, synthetic construct
  misc_feature 1..20: note = chemically synthesized
  source 1..20: mol_type = other DNA
agcccaagggaagaaagaac

SEQ ID NO: 34081 - DNA, 20 bp, synthetic construct
  misc_feature 1..20: note = chemically synthesized
  source 1..20: mol_type = other DNA
agggaagaaagaacaggatt

SEQ ID NO: 34082 - DNA, 20 bp, synthetic construct
  misc_feature 1..20: note = chemically synthesized
  source 1..20: mol_type = other DNA
agtatacattgcccatatct

SEQ ID NO: 34083 - DNA, 20 bp, synthetic construct
  misc_feature 1..20: note = chemically synthesized
  source 1..20: mol_type = other DNA
atacattgcccatatcttgg

SEQ ID NO: 34084 - DNA, 20 bp, synthetic construct
  misc_feature 1..20: note = chemically synthesized
  source 1..20: mol_type = other DNA
ccatatcttggaagacaata

SEQ ID NO: 34085 - DNA, 20 bp, synthetic construct
  misc_feature 1..20: note = chemically synthesized
  source 1..20: mol_type = other DNA
atatcttggaagacaataca

SEQ ID NO: 34086 - DNA, 20 bp, synthetic construct
  misc_feature 1..20: note = chemically synthesized
  source 1..20: mol_type = other DNA
atcttggaagacaatacaga

SEQ ID NO: 34087 - DNA, 20 bp, synthetic construct
  misc_feature 1..20: note = chemically synthesized
  source 1..20: mol_type = other DNA
ttggaagacaatacagagag

SEQ ID NO: 34088 - DNA, 20 bp, synthetic construct
  misc_feature 1..20: note = chemically synthesized
  source 1..20: mol_type = other DNA
gacaatacagagagcagtaa

SEQ ID NO: 34089 - DNA, 20 bp, synthetic construct
  misc_feature 1..20: note = chemically synthesized
  source 1..20: mol_type = other DNA
atacagagagcagtaacaga

SEQ ID NO: 34090 - DNA, 20 bp, synthetic construct
  misc_feature 1..20: note = chemically synthesized
  source 1..20: mol_type = other DNA
cagagagcagtaacagacag

SEQ ID NO: 34091 - DNA, 20 bp, synthetic construct
  misc_feature 1..20: note = chemically synthesized
  source 1..20: mol_type = other DNA
gcagtaacagacagaagaac

SEQ ID NO: 34092 - DNA, 20 bp, synthetic construct
  misc_feature 1..20: note = chemically synthesized
  source 1..20: mol_type = other DNA
gtaacagacagaagaactag

SEQ ID NO: 34093 - DNA, 20 bp, synthetic construct
  misc_feature 1..20: note = chemically synthesized
  source 1..20: mol_type = other DNA
cagaagaactagcagacaca

SEQ ID NO: 34094 - DNA, 20 bp, synthetic construct
  misc_feature 1..20: note = chemically synthesized
  source 1..20: mol_type = other DNA
agaactagcagacacacaga

SEQ ID NO: 34095 - DNA, 20 bp, synthetic construct
  misc_feature 1..20: note = chemically synthesized
  source 1..20: mol_type = other DNA
agcagacacacagaaagaca

SEQ ID NO: 34096 - DNA, 20 bp, synthetic construct
  misc_feature 1..20: note = chemically synthesized
  source 1..20: mol_type = other DNA
gcagacacacagaaagacat

SEQ ID NO: 34097 - DNA, 20 bp, synthetic construct
  misc_feature 1..20: note = chemically synthesized
  source 1..20: mol_type = other DNA
aaattatattttgttaaaaa

SEQ ID NO: 34098 - DNA, 20 bp, synthetic construct
  misc_feature 1..20: note = chemically synthesized
  source 1..20: mol_type = other DNA
ttgttaaaaatggtctatgt

SEQ ID NO: 34099 - DNA, 20 bp, synthetic construct
  misc_feature 1..20: note = chemically synthesized
  source 1..20: mol_type = other DNA
ttaaaaatggtctatgtgag

SEQ ID NO: 34100 - DNA, 20 bp, synthetic construct
  misc_feature 1..20: note = chemically synthesized
  source 1..20: mol_type = other DNA
atgtgagaagttctgtaata

SEQ ID NO: 34101 - DNA, 20 bp, synthetic construct
  misc_feature 1..20: note = chemically synthesized
  source 1..20: mol_type = other DNA
tgagaagttctgtaatacag

SEQ ID NO: 34102 - DNA, 20 bp, synthetic construct
  misc_feature 1..20: note = chemically synthesized
  source 1..20: mol_type = other DNA
gagaagttctgtaatacagt

SEQ ID NO: 34103 - DNA, 20 bp, synthetic construct
  misc_feature 1..20: note = chemically synthesized
  source 1..20: mol_type = other DNA
agaagttctgtaatacagta

SEQ ID NO: 34104 - DNA, 20 bp, synthetic construct
  misc_feature 1..20: note = chemically synthesized
  source 1..20: mol_type = other DNA
tctgtaatacagtagggaat

SEQ ID NO: 34105 - DNA, 20 bp, synthetic construct
  misc_feature 1..20: note = chemically synthesized
  source 1..20: mol_type = other DNA
atgttatatttaccatcctc

SEQ ID NO: 34106 - DNA, 20 bp, synthetic construct
  misc_feature 1..20: note = chemically synthesized
  source 1..20: mol_type = other DNA
atttaccatcctcgagcaca

SEQ ID NO: 34107 - DNA, 20 bp, synthetic construct
  misc_feature 1..20: note = chemically synthesized
  source 1..20: mol_type = other DNA
ccatcctcgagcacacagtc

SEQ ID NO: 34108 - DNA, 20 bp, synthetic construct
  misc_feature 1..20: note = chemically synthesized
  source 1..20: mol_type = other DNA
tcctcgagcacacagtcaag

SEQ ID NO: 34109 - DNA, 20 bp, synthetic construct
  misc_feature 1..20: note = chemically synthesized
  source 1..20: mol_type = other DNA
acacagtcaagaagctacaa

SEQ ID NO: 34110 - DNA, 20 bp, synthetic construct
  misc_feature 1..20: note = chemically synthesized
  source 1..20: mol_type = other DNA
acagtcaagaagctacaaaa

SEQ ID NO: 34111 - DNA, 20 bp, synthetic construct
  misc_feature 1..20: note = chemically synthesized
  source 1..20: mol_type = other DNA
tcaagaagctacaaaagaga

SEQ ID NO: 34112 - DNA, 20 bp, synthetic construct
  misc_feature 1..20: note = chemically synthesized
  source 1..20: mol_type = other DNA
caagaagctacaaaagagaa

SEQ ID NO: 34113 - DNA, 20 bp, synthetic construct
  misc_feature 1..20: note = chemically synthesized
  source 1..20: mol_type = other DNA
agaaaggcaaatttcacaca

SEQ ID NO: 34114 - DNA, 20 bp, synthetic construct
  misc_feature 1..20: note = chemically synthesized
  source 1..20: mol_type = other DNA
ggcaaatttcacacacagcc

SEQ ID NO: 34115 - DNA, 20 bp, synthetic construct
  misc_feature 1..20: note = chemically synthesized
  source 1..20: mol_type = other DNA
atttcacacacagccaagtt

SEQ ID NO: 34116 - DNA, 20 bp, synthetic construct
  misc_feature 1..20: note = chemically synthesized
  source 1..20: mol_type = other DNA
gtaaaacaaacaaaatcttt

SEQ ID NO: 34117 - DNA, 20 bp, synthetic construct
  misc_feature 1..20: note = chemically synthesized
  source 1..20: mol_type = other DNA
acaaaatcttttggtctaat

SEQ ID NO: 34118 - DNA, 20 bp, synthetic construct
  misc_feature 1..20: note = chemically synthesized
  source 1..20: mol_type = other DNA
tcttttggtctaatcagata

SEQ ID NO: 34119 - DNA, 20 bp, synthetic construct
  misc_feature 1..20: note = chemically synthesized
  source 1..20: mol_type = other DNA
atcagataaagatcatttac

SEQ ID NO: 34120 - DNA, 20 bp, synthetic construct
  misc_feature 1..20: note = chemically synthesized
  source 1..20: mol_type = other DNA
ataaagatcatttactagcc

SEQ ID NO: 34121 - DNA, 20 bp, synthetic construct
  misc_feature 1..20: note = chemically synthesized
  source 1..20: mol_type = other DNA
ctagcctggaaactattgtg

SEQ ID NO: 34122 - DNA, 20 bp, synthetic construct
  misc_feature 1..20: note = chemically synthesized
  source 1..20: mol_type = other DNA
tagcctggaaactattgtga

SEQ ID NO: 34123 - DNA, 20 bp, synthetic construct
  misc_feature 1..20: note = chemically synthesized
  source 1..20: mol_type = other DNA
ctgtgttatttatacatccc

SEQ ID NO: 34124 - DNA, 20 bp, synthetic construct
  misc_feature 1..20: note = chemically synthesized
  source 1..20: mol_type = other DNA
atccccacctttctgtgatg

SEQ ID NO: 34125 - DNA, 20 bp, synthetic construct
  misc_feature 1..20: note = chemically synthesized
  source 1..20: mol_type = other DNA
ccccacctttctgtgatgaa

SEQ ID NO: 34126 - DNA, 20 bp, synthetic construct
  misc_feature 1..20: note = chemically synthesized
  source 1..20: mol_type = other DNA
cacctttctgtgatgaagag

SEQ ID NO: 34127 - DNA, 20 bp, synthetic construct
  misc_feature 1..20: note = chemically synthesized
  source 1..20: mol_type = other DNA
acctttctgtgatgaagagt

SEQ ID NO: 34128 - DNA, 20 bp, synthetic construct
  misc_feature 1..20: note = chemically synthesized
  source 1..20: mol_type = other DNA
tttctgtgatgaagagtagg

SEQ ID NO: 34129 - DNA, 20 bp, synthetic construct
  misc_feature 1..20: note = chemically synthesized
  source 1..20: mol_type = other DNA
ttctgtgatgaagagtaggt

SEQ ID NO: 34130 - DNA, 20 bp, synthetic construct
  misc_feature 1..20: note = chemically synthesized
  source 1..20: mol_type = other DNA
tgtgatgaagagtaggtggg

SEQ ID NO: 34131 - DNA, 20 bp, synthetic construct
  misc_feature 1..20: note = chemically synthesized
  source 1..20: mol_type = other DNA
gaagagtaggtgggcagcca

SEQ ID NO: 34132 - DNA, 20 bp, synthetic construct
  misc_feature 1..20: note = chemically synthesized
  source 1..20: mol_type = other DNA
gtgggcagccatagatcact

SEQ ID NO: 34133 - DNA, 20 bp, synthetic construct
  misc_feature 1..20: note = chemically synthesized
  source 1..20: mol_type = other DNA
agccatagatcactgagtgt

SEQ ID NO: 34134 - DNA, 20 bp, synthetic construct
  misc_feature 1..20: note = chemically synthesized
  source 1..20: mol_type = other DNA
atcactgagtgtcagtatga

SEQ ID NO: 34135 - DNA, 20 bp, synthetic construct
  misc_feature 1..20: note = chemically synthesized
  source 1..20: mol_type = other DNA
cactgagtgtcagtatgaca

SEQ ID NO: 34136 - DNA, 20 bp, synthetic construct
  misc_feature 1..20: note = chemically synthesized
  source 1..20: mol_type = other DNA
actgagtgtcagtatgacag

SEQ ID NO: 34137 - DNA, 20 bp, synthetic construct
  misc_feature 1..20: note = chemically synthesized
  source 1..20: mol_type = other DNA
agtgtcagtatgacagaggc

SEQ ID NO: 34138 - DNA, 20 bp, synthetic construct
  misc_feature 1..20: note = chemically synthesized
  source 1..20: mol_type = other DNA
tgtcagtatgacagaggcca

SEQ ID NO: 34139 - DNA, 20 bp, synthetic construct
  misc_feature 1..20: note = chemically synthesized
  source 1..20: mol_type = other DNA
gtatgacagaggccagagat

SEQ ID NO: 34140 - DNA, 20 bp, synthetic construct
  misc_feature 1..20: note = chemically synthesized
  source 1..20: mol_type = other DNA
tatgacagaggccagagatg

SEQ ID NO: 34141 - DNA, 20 bp, synthetic construct
  misc_feature 1..20: note = chemically synthesized
  source 1..20: mol_type = other DNA
atgacagaggccagagatga

SEQ ID NO: 34142 - DNA, 20 bp, synthetic construct
  misc_feature 1..20: note = chemically synthesized
  source 1..20: mol_type = other DNA
tgacagaggccagagatgag

SEQ ID NO: 34143 - DNA, 20 bp, synthetic construct
  misc_feature 1..20: note = chemically synthesized
  source 1..20: mol_type = other DNA
ggccagagatgaggggcatc

SEQ ID NO: 34144 - DNA, 20 bp, synthetic construct
  misc_feature 1..20: note = chemically synthesized
  source 1..20: mol_type = other DNA
atgaggggcatccagctgac

SEQ ID NO: 34145 - DNA, 20 bp, synthetic construct
  misc_feature 1..20: note = chemically synthesized
  source 1..20: mol_type = other DNA
gcatccagctgactggtcac

SEQ ID NO: 34146 - DNA, 20 bp, synthetic construct
  misc_feature 1..20: note = chemically synthesized
  source 1..20: mol_type = other DNA
catccagctgactggtcact

SEQ ID NO: 34147 - DNA, 20 bp, synthetic construct
  misc_feature 1..20: note = chemically synthesized
  source 1..20: mol_type = other DNA
ccagctgactggtcactggg

SEQ ID NO: 34148 - DNA, 20 bp, synthetic construct
  misc_feature 1..20: note = chemically synthesized
  source 1..20: mol_type = other DNA
tcactgggtggccccttgtg

SEQ ID NO: 34149 - DNA, 20 bp, synthetic construct
  misc_feature 1..20: note = chemically synthesized
  source 1..20: mol_type = other DNA
ggtggccccttgtgtagtcc

SEQ ID NO: 34150 - DNA, 20 bp, synthetic construct
  misc_feature 1..20: note = chemically synthesized
  source 1..20: mol_type = other DNA
gcacatcataccctgtattt

SEQ ID NO: 34151 - DNA, 20 bp, synthetic construct
  misc_feature 1..20: note = chemically synthesized
  source 1..20: mol_type = other DNA
ataccctgtattttggtcaa

SEQ ID NO: 34152 - DNA, 20 bp, synthetic construct
  misc_feature 1..20: note = chemically synthesized
  source 1..20: mol_type = other DNA
taatttaaaacttatcattt

SEQ ID NO: 34153 - DNA, 20 bp, synthetic construct
  misc_feature 1..20: note = chemically synthesized
  source 1..20: mol_type = other DNA
aaaacttatcatttgagtca

SEQ ID NO: 34154 - DNA, 20 bp, synthetic construct
  misc_feature 1..20: note = chemically synthesized
  source 1..20: mol_type = other DNA
atcatttgagtcatggatac

SEQ ID NO: 34155 - DNA, 20 bp, synthetic construct
  misc_feature 1..20: note = chemically synthesized
  source 1..20: mol_type = other DNA
atggatactggctcttcacc

SEQ ID NO: 34156 - DNA, 20 bp, synthetic construct
  misc_feature 1..20: note = chemically synthesized
  source 1..20: mol_type = other DNA
actggctcttcacctggcca

SEQ ID NO: 34157 - DNA, 20 bp, synthetic construct
  misc_feature 1..20: note = chemically synthesized
  source 1..20: mol_type = other DNA
ctggctcttcacctggccat

SEQ ID NO: 34158 - DNA, 20 bp, synthetic construct
  misc_feature 1..20: note = chemically synthesized
  source 1..20: mol_type = other DNA
aaaccccctcttctcatgcc

SEQ ID NO: 34159 - DNA, 20 bp, synthetic construct
  misc_feature 1..20: note = chemically synthesized
  source 1..20: mol_type = other DNA
tctcatgcctagactctgaa

SEQ ID NO: 34160 - DNA, 20 bp, synthetic construct
  misc_feature 1..20: note = chemically synthesized
  source 1..20: mol_type = other DNA
tagactctgaaaagaatcaa

SEQ ID NO: 34161 - DNA, 20 bp, synthetic construct
  misc_feature 1..20: note = chemically synthesized
  source 1..20: mol_type = other DNA
tgaaaagaatcaaaagtatt

SEQ ID NO: 34162 - DNA, 20 bp, synthetic construct
  misc_feature 1..20: note = chemically synthesized
  source 1..20: mol_type = other DNA
aaaagaatcaaaagtatttg

SEQ ID NO: 34163 - DNA, 20 bp, synthetic construct
  misc_feature 1..20: note = chemically synthesized
  source 1..20: mol_type = other DNA
gaatcaaaagtatttggagc

SEQ ID NO: 34164 - DNA, 20 bp, synthetic construct
  misc_feature 1..20: note = chemically synthesized
  source 1..20: mol_type = other DNA
aaaagtatttggagccagaa

SEQ ID NO: 34165 - DNA, 20 bp, synthetic construct
  misc_feature 1..20: note = chemically synthesized
  source 1..20: mol_type = other DNA
aaagtatttggagccagaaa

SEQ ID NO: 34166 - DNA, 20 bp, synthetic construct
  misc_feature 1..20: note = chemically synthesized
  source 1..20: mol_type = other DNA
gaaaaggccattttatcttc

SEQ ID NO: 34167 - DNA, 20 bp, synthetic construct
  misc_feature 1..20: note = chemically synthesized
  source 1..20: mol_type = other DNA
ccattttatcttctagttat

SEQ ID NO: 34168 - DNA, 20 bp, synthetic construct
  misc_feature 1..20: note = chemically synthesized
  source 1..20: mol_type = other DNA
ctctgctattttgcacatgc

SEQ ID NO: 34169 - DNA, 20 bp, synthetic construct
  misc_feature 1..20: note = chemically synthesized
  source 1..20: mol_type = other DNA
acatgccagacacccctatc

SEQ ID NO: 34170 - DNA, 20 bp, synthetic construct
  misc_feature 1..20: note = chemically synthesized
  source 1..20: mol_type = other DNA
tctctgatgttcccctaaac

SEQ ID NO: 34171 - DNA, 20 bp, synthetic construct
  misc_feature 1..20: note = chemically synthesized
  source 1..20: mol_type = other DNA
tgaaaatgcatctctctgtt

SEQ ID NO: 34172 - DNA, 20 bp, synthetic construct
  misc_feature 1..20: note = chemically synthesized
  source 1..20: mol_type = other DNA
aaatgcatctctctgttcag

SEQ ID NO: 34173 - DNA, 20 bp, synthetic construct
  misc_feature 1..20: note = chemically synthesized
  source 1..20: mol_type = other DNA
tctctctgttcagtagtaac

SEQ ID NO: 34174 - DNA, 20 bp, synthetic construct
  misc_feature 1..20: note = chemically synthesized
  source 1..20: mol_type = other DNA
agtaactggaattaactatc

SEQ ID NO: 34175 - DNA, 20 bp, synthetic construct
  misc_feature 1..20: note = chemically synthesized
  source 1..20: mol_type = other DNA
ggaattaactatcaagacaa

SEQ ID NO: 34176 - DNA, 20 bp, synthetic construct
  misc_feature 1..20: note = chemically synthesized
  source 1..20: mol_type = other DNA
aagacaatggtcatctgaat

SEQ ID NO: 34177 - DNA, 20 bp, synthetic construct
  misc_feature 1..20: note = chemically synthesized
  source 1..20: mol_type = other DNA
tatttgataaatgttaacca

SEQ ID NO: 34178 - DNA, 20 bp, synthetic construct
  misc_feature 1..20: note = chemically synthesized
  source 1..20: mol_type = other DNA
ttaactgaacacatttctca

SEQ ID NO: 34179 - DNA, 20 bp, synthetic construct
  misc_feature 1..20: note = chemically synthesized
  source 1..20: mol_type = other DNA
aactgaacacatttctcata

SEQ ID NO: 34180 - DNA, 20 bp, synthetic construct
  misc_feature 1..20: note = chemically synthesized
  source 1..20: mol_type = other DNA
tctcatagagatactttccc

SEQ ID NO: 34181 - DNA, 20 bp, synthetic construct
  misc_feature 1..20: note = chemically synthesized
  source 1..20: mol_type = other DNA
tagactcatcattttgaatt

SEQ ID NO: 34182 - DNA, 20 bp, synthetic construct
  misc_feature 1..20: note = chemically synthesized
  source 1..20: mol_type = other DNA
agactcatcattttgaattg

SEQ ID NO: 34183 - DNA, 20 bp, synthetic construct
  misc_feature 1..20: note = chemically synthesized
  source 1..20: mol_type = other DNA
gactcatcattttgaattga

SEQ ID NO: 34184 - DNA, 20 bp, synthetic construct
  misc_feature 1..20: note = chemically synthesized
  source 1..20: mol_type = other DNA
tcattttgaattgagggaaa

SEQ ID NO: 34185 - DNA, 20 bp, synthetic construct
  misc_feature 1..20: note = chemically synthesized
  source 1..20: mol_type = other DNA
gaaatggtttaccctcattg

SEQ ID NO: 34186 - DNA, 20 bp, synthetic construct
  misc_feature 1..20: note = chemically synthesized
  source 1..20: mol_type = other DNA
tggtttaccctcattgaaga

SEQ ID NO: 34187 - DNA, 20 bp, synthetic construct
  misc_feature 1..20: note = chemically synthesized
  source 1..20: mol_type = other DNA
cctcattgaagaaagtaatt

SEQ ID NO: 34188 - DNA, 20 bp, synthetic construct
  misc_feature 1..20: note = chemically synthesized
  source 1..20: mol_type = other DNA
ctcattgaagaaagtaattg

SEQ ID NO: 34189 - DNA, 20 bp, synthetic construct
  misc_feature 1..20: note = chemically synthesized
  source 1..20: mol_type = other DNA
tcattgaagaaagtaattga

SEQ ID NO: 34190 - DNA, 20 bp, synthetic construct
  misc_feature 1..20: note = chemically synthesized
  source 1..20: mol_type = other DNA
aagaaagtaattgagggaaa

SEQ ID NO: 34191 - DNA, 20 bp, synthetic construct
  misc_feature 1..20: note = chemically synthesized
  source 1..20: mol_type = other DNA
gaaatggcttactctcattg

SEQ ID NO: 34192 - DNA, 20 bp, synthetic construct
  misc_feature 1..20: note = chemically synthesized
  source 1..20: mol_type = other DNA
tggcttactctcattgaaga

SEQ ID NO: 34193 - DNA, 20 bp, synthetic construct
  misc_feature 1..20: note = chemically synthesized
  source 1..20: mol_type = other DNA
tttcttcacgtgcaattttc

SEQ ID NO: 34194 - DNA, 20 bp, synthetic construct
  misc_feature 1..20: note = chemically synthesized
  source 1..20: mol_type = other DNA
cacgtgcaattttctagaaa

SEQ ID NO: 34195 - DNA, 20 bp, synthetic construct
  misc_feature 1..20: note = chemically synthesized
  source 1..20: mol_type = other DNA
gtgcaattttctagaaacag

SEQ ID NO: 34196 - DNA, 20 bp, synthetic construct
  misc_feature 1..20: note = chemically synthesized
  source 1..20: mol_type = other DNA
aattttctagaaacagcagc

SEQ ID NO: 34197 - DNA, 20 bp, synthetic construct
  misc_feature 1..20: note = chemically synthesized
  source 1..20: mol_type = other DNA
gcagccagctccatatatgc

SEQ ID NO: 34198 - DNA, 20 bp, synthetic construct
  misc_feature 1..20: note = chemically synthesized
  source 1..20: mol_type = other DNA
agccagctccatatatgcaa

SEQ ID NO: 34199 - DNA, 20 bp, synthetic construct
  misc_feature 1..20: note = chemically synthesized
  source 1..20: mol_type = other DNA
ctccatatatgcaagagaac

SEQ ID NO: 34200 - DNA, 20 bp, synthetic construct
  misc_feature 1..20: note = chemically synthesized
  source 1..20: mol_type = other DNA
gagaactggatgtatgtctg

SEQ ID NO: 34201 - DNA, 20 bp, synthetic construct
  misc_feature 1..20: note = chemically synthesized
  source 1..20: mol_type = other DNA
tgccttattcctatgtataa

SEQ ID NO: 34202 - DNA, 20 bp, synthetic construct
  misc_feature 1..20: note = chemically synthesized
  source 1..20: mol_type = other DNA
gccttattcctatgtataac

SEQ ID NO: 34203 - DNA, 20 bp, synthetic construct
  misc_feature 1..20: note = chemically synthesized
  source 1..20: mol_type = other DNA
ataacaggactaatatatgc

SEQ ID NO: 34204 - DNA, 20 bp, synthetic construct
  misc_feature 1..20: note = chemically synthesized
  source 1..20: mol_type = other DNA
actaatatatgcaagccata

SEQ ID NO: 34205 - DNA, 20 bp, synthetic construct
  misc_feature 1..20: note = chemically synthesized
  source 1..20: mol_type = other DNA
taatatatgcaagccatatg

SEQ ID NO: 34206 - DNA, 20 bp, synthetic construct
  misc_feature 1..20: note = chemically synthesized
  source 1..20: mol_type = other DNA
atatatgcaagccatatgga

SEQ ID NO: 34207 - DNA, 20 bp, synthetic construct
  misc_feature 1..20: note = chemically synthesized
  source 1..20: mol_type = other DNA
gcaagccatatggagagcaa

SEQ ID NO: 34208 - DNA, 20 bp, synthetic construct
  misc_feature 1..20: note = chemically synthesized
  source 1..20: mol_type = other DNA
caagccatatggagagcaat

SEQ ID NO: 34209 - DNA, 20 bp, synthetic construct
  misc_feature 1..20: note = chemically synthesized
  source 1..20: mol_type = other DNA
atgggcattgactgaaatgc

SEQ ID NO: 34210 - DNA, 20 bp, synthetic construct
  misc_feature 1..20: note = chemically synthesized
  source 1..20: mol_type = other DNA
aatgccggtgacccaaatca

SEQ ID NO: 34211 - DNA, 20 bp, synthetic construct
  misc_feature 1..20: note = chemically synthesized
  source 1..20: mol_type = other DNA
gtgacccaaatcatagaccc

SEQ ID NO: 34212 - DNA, 20 bp, synthetic construct
  misc_feature 1..20: note = chemically synthesized
  source 1..20: mol_type = other DNA
ccaagaattatatatataat

SEQ ID NO: 34213 - DNA, 20 bp, synthetic construct
  misc_feature 1..20: note = chemically synthesized
  source 1..20: mol_type = other DNA
ataatatatataaacacaca

SEQ ID NO: 34214 - DNA, 20 bp, synthetic construct
  misc_feature 1..20: note = chemically synthesized
  source 1..20: mol_type = other DNA
tacacacactattatatatt

SEQ ID NO: 34215 - DNA, 20 bp, synthetic construct
  misc_feature 1..20: note = chemically synthesized
  source 1..20: mol_type = other DNA
tatatattaagtatatataa

SEQ ID NO: 34216 - DNA, 20 bp, synthetic construct
  misc_feature 1..20: note = chemically synthesized
  source 1..20: mol_type = other DNA
tatatattaaatatatataa

SEQ ID NO: 34217 - DNA, 20 bp, synthetic construct
  misc_feature 1..20: note = chemically synthesized
  source 1..20: mol_type = other DNA
taaatatatataatagtgta

SEQ ID NO: 34218 - DNA, 20 bp, synthetic construct
  misc_feature 1..20: note = chemically synthesized
  source 1..20: mol_type = other DNA
aaatatatataatagtgtat

SEQ ID NO: 34219 - DNA, 20 bp, synthetic construct
  misc_feature 1..20: note = chemically synthesized
  source 1..20: mol_type = other DNA
gtgtgtatatgtatgtgtgt

SEQ ID NO: 34220 - DNA, 20 bp, synthetic construct
  misc_feature 1..20: note = chemically synthesized
  source 1..20: mol_type = other DNA
taagtatgtatgtatgtgta

SEQ ID NO: 34221 - DNA, 20 bp, synthetic construct
  misc_feature 1..20: note = chemically synthesized
  source 1..20: mol_type = other DNA
tgtatgtatgtgtatggtgc

SEQ ID NO: 34222 - DNA, 20 bp, synthetic construct
  misc_feature 1..20: note = chemically synthesized
  source 1..20: mol_type = other DNA
atgtgtatggtgccagccat

SEQ ID NO: 34223 - DNA, 20 bp, synthetic construct
  misc_feature 1..20: note = chemically synthesized
  source 1..20: mol_type = other DNA
ataagctaatcaaacaatgt

SEQ ID NO: 34224 - DNA, 20 bp, synthetic construct
  misc_feature 1..20: note = chemically synthesized
  source 1..20: mol_type = other DNA
caatgtgagttaaattacct

SEQ ID NO: 34225 - DNA, 20 bp, synthetic construct
  misc_feature 1..20: note = chemically synthesized
  source 1..20: mol_type = other DNA
attacctgagaaaacaatat

SEQ ID NO: 34226 - DNA, 20 bp, synthetic construct
  misc_feature 1..20: note = chemically synthesized
  source 1..20: mol_type = other DNA
ctgagaaaacaatatcagtt

SEQ ID NO: 34227 - DNA, 20 bp, synthetic construct
  misc_feature 1..20: note = chemically synthesized
  source 1..20: mol_type = other DNA
aacaatatcagttgagcact

SEQ ID NO: 34228 - DNA, 20 bp, synthetic construct
  misc_feature 1..20: note = chemically synthesized
  source 1..20: mol_type = other DNA
tgagcactgagatatgtact

SEQ ID NO: 34229 - DNA, 20 bp, synthetic construct
  misc_feature 1..20: note = chemically synthesized
  source 1..20: mol_type = other DNA
tacatatatcttatacaaat

SEQ ID NO: 34230 - DNA, 20 bp, synthetic construct
  misc_feature 1..20: note = chemically synthesized
  source 1..20: mol_type = other DNA
tatcttatacaaatcagcaa

SEQ ID NO: 34231 - DNA, 20 bp, synthetic construct
  misc_feature 1..20: note = chemically synthesized
  source 1..20: mol_type = other DNA
ttatacaaatcagcaataga

SEQ ID NO: 34232 - DNA, 20 bp, synthetic construct
  misc_feature 1..20: note = chemically synthesized
  source 1..20: mol_type = other DNA
tatacaaatcagcaatagac

SEQ ID NO: 34233 - DNA, 20 bp, synthetic construct
  misc_feature 1..20: note = chemically synthesized
  source 1..20: mol_type = other DNA
acaaatcagcaatagacagg

SEQ ID NO: 34234 - DNA, 20 bp, synthetic construct
  misc_feature 1..20: note = chemically synthesized
  source 1..20: mol_type = other DNA
caaatcagcaatagacaggc

SEQ ID NO: 34235 - DNA, 20 bp, synthetic construct
  misc_feature 1..20: note = chemically synthesized
  source 1..20: mol_type = other DNA
aaatcagcaatagacaggca

SEQ ID NO: 34236 - DNA, 20 bp, synthetic construct
  misc_feature 1..20: note = chemically synthesized
  source 1..20: mol_type = other DNA
gcagggtaaaataatgttct

SEQ ID NO: 34237 - DNA, 20 bp, synthetic construct
  misc_feature 1..20: note = chemically synthesized
  source 1..20: mol_type = other DNA
gggtaaaataatgttctaag

SEQ ID NO: 34238 - DNA, 20 bp, synthetic construct
  misc_feature 1..20: note = chemically synthesized
  source 1..20: mol_type = other DNA
taaaataatgttctaagtag

SEQ ID NO: 34239 - DNA, 20 bp, synthetic construct
  misc_feature 1..20: note = chemically synthesized
  source 1..20: mol_type = other DNA
aaataatgttctaagtagca

SEQ ID NO: 34240 - DNA, 20 bp, synthetic construct
  misc_feature 1..20: note = chemically synthesized
  source 1..20: mol_type = other DNA
aataatgttctaagtagcag

SEQ ID NO: 34241 - DNA, 20 bp, synthetic construct
  misc_feature 1..20: note = chemically synthesized
  source 1..20: mol_type = other DNA
ataatgttctaagtagcaga

SEQ ID NO: 34242 - DNA, 20 bp, synthetic construct
  misc_feature 1..20: note = chemically synthesized
  source 1..20: mol_type = other DNA
ctgatttccactgaaatgct

SEQ ID NO: 34243 - DNA, 20 bp, synthetic construct
  misc_feature 1..20: note = chemically synthesized
  source 1..20: mol_type = other DNA
tgatttccactgaaatgctc

SEQ ID NO: 34244 - DNA, 20 bp, synthetic construct
  misc_feature 1..20: note = chemically synthesized
  source 1..20: mol_type = other DNA
gatttccactgaaatgctca

SEQ ID NO: 34245 - DNA, 20 bp, synthetic construct
  misc_feature 1..20: note = chemically synthesized
  source 1..20: mol_type = other DNA
tgaaatgctcagggattgat

SEQ ID NO: 34246 - DNA, 20 bp, synthetic construct
  misc_feature 1..20: note = chemically synthesized
  source 1..20: mol_type = other DNA
ctcattgaaatgactttccc

SEQ ID NO: 34247 - DNA, 20 bp, synthetic construct
  misc_feature 1..20: note = chemically synthesized
  source 1..20: mol_type = other DNA
ctttccctagttacttatgc

SEQ ID NO: 34248 - DNA, 20 bp, synthetic construct
  misc_feature 1..20: note = chemically synthesized
  source 1..20: mol_type = other DNA
ggcaacattgtcatcctgtc

SEQ ID NO: 34249 - DNA, 20 bp, synthetic construct
  misc_feature 1..20: note = chemically synthesized
  source 1..20: mol_type = other DNA
gcaacattgtcatcctgtcc

SEQ ID NO: 34250 - DNA, 20 bp, synthetic construct
  misc_feature 1..20: note = chemically synthesized
  source 1..20: mol_type = other DNA
aggtcccctgaattattcct

SEQ ID NO: 34251 - DNA, 20 bp, synthetic construct
  misc_feature 1..20: note = chemically synthesized
  source 1..20: mol_type = other DNA
gtcccctgaattattcctca

SEQ ID NO: 34252 - DNA, 20 bp, synthetic construct
  misc_feature 1..20: note = chemically synthesized
  source 1..20: mol_type = other DNA
ctgaattattcctcagagac

SEQ ID NO: 34253 - DNA, 20 bp, synthetic construct
  misc_feature 1..20: note = chemically synthesized
  source 1..20: mol_type = other DNA
agtgaaacaatgtcatgctc

SEQ ID NO: 34254 - DNA, 20 bp, synthetic construct
  misc_feature 1..20: note = chemically synthesized
  source 1..20: mol_type = other DNA
tgaaacaatgtcatgctcta

SEQ ID NO: 34255 - DNA, 20 bp, synthetic construct
  misc_feature 1..20: note = chemically synthesized
  source 1..20: mol_type = other DNA
acaatgtcatgctctagagt

SEQ ID NO: 34256 - DNA, 20 bp, synthetic construct
  misc_feature 1..20: note = chemically synthesized
  source 1..20: mol_type = other DNA
caatgtcatgctctagagtg

SEQ ID NO: 34257 - DNA, 20 bp, synthetic construct
  misc_feature 1..20: note = chemically synthesized
  source 1..20: mol_type = other DNA
tgtcatgctctagagtgagg

SEQ ID NO: 34258 - DNA, 20 bp, synthetic construct
  misc_feature 1..20: note = chemically synthesized
  source 1..20: mol_type = other DNA
tcatgctctagagtgaggca

SEQ ID NO: 34259 - DNA, 20 bp, synthetic construct
  misc_feature 1..20: note = chemically synthesized
  source 1..20: mol_type = other DNA
atgctctagagtgaggcaga

SEQ ID NO: 34260 - DNA, 20 bp, synthetic construct
  misc_feature 1..20: note = chemically synthesized
  source 1..20: mol_type = other DNA
tgaggcagagagaataaacg

SEQ ID NO: 34261 - DNA, 20 bp, synthetic construct
  misc_feature 1..20: note = chemically synthesized
  source 1..20: mol_type = other DNA
tatgccactctgaatctgct

SEQ ID NO: 34262 - DNA, 20 bp, synthetic construct
  misc_feature 1..20: note = chemically synthesized
  source 1..20: mol_type = other DNA
tctgcttagttttaatgcta

SEQ ID NO: 34263 - DNA, 20 bp, synthetic construct
  misc_feature 1..20: note = chemically synthesized
  source 1..20: mol_type = other DNA
gttttaatgctatagataaa

SEQ ID NO: 34264 - DNA, 20 bp, synthetic construct
  misc_feature 1..20: note = chemically synthesized
  source 1..20: mol_type = other DNA
ttttaatgctatagataaat

SEQ ID NO: 34265 - DNA, 20 bp, synthetic construct
  misc_feature 1..20: note = chemically synthesized
  source 1..20: mol_type = other DNA
atagataaatgggttcataa

SEQ ID NO: 34266 - DNA, 20 bp, synthetic construct
  misc_feature 1..20: note = chemically synthesized
  source 1..20: mol_type = other DNA
tagataaatgggttcataaa

SEQ ID NO: 34267 - DNA, 20 bp, synthetic construct
  misc_feature 1..20: note = chemically synthesized
  source 1..20: mol_type = other DNA
ataaatgggttcataaaagg

SEQ ID NO: 34268 - DNA, 20 bp, synthetic construct
  misc_feature 1..20: note = chemically synthesized
  source 1..20: mol_type = other DNA
taaatgggttcataaaaggt

SEQ ID NO: 34269 - DNA, 20 bp, synthetic construct
  misc_feature 1..20: note = chemically synthesized
  source 1..20: mol_type = other DNA
gggttcataaaaggtgggaa

SEQ ID NO: 34270 - DNA, 20 bp, synthetic construct
  misc_feature 1..20: note = chemically synthesized
  source 1..20: mol_type = other DNA
ggttcataaaaggtgggaaa

SEQ ID NO: 34271 - DNA, 20 bp, synthetic construct
  misc_feature 1..20: note = chemically synthesized
  source 1..20: mol_type = other DNA
tcataaaaggtgggaaaagg

SEQ ID NO: 34272 - DNA, 20 bp, synthetic construct
  misc_feature 1..20: note = chemically synthesized
  source 1..20: mol_type = other DNA
taaaaggtgggaaaaggaag

SEQ ID NO: 34273 - DNA, 20 bp, synthetic construct
  misc_feature 1..20: note = chemically synthesized
  source 1..20: mol_type = other DNA
gtgggaaaaggaagtggatg

SEQ ID NO: 34274 - DNA, 20 bp, synthetic construct
  misc_feature 1..20: note = chemically synthesized
  source 1..20: mol_type = other DNA
cattgtgatgtgaacgacat

SEQ ID NO: 34275 - DNA, 20 bp, synthetic construct
  misc_feature 1..20: note = chemically synthesized
  source 1..20: mol_type = other DNA
attgtgatgtgaacgacatg

SEQ ID NO: 34276 - DNA, 20 bp, synthetic construct
  misc_feature 1..20: note = chemically synthesized
  source 1..20: mol_type = other DNA
ccaaacctatgaataaatgt

SEQ ID NO: 34277 - DNA, 20 bp, synthetic construct
  misc_feature 1..20: note = chemically synthesized
  source 1..20: mol_type = other DNA
aataaatgtcagacaaacta

SEQ ID NO: 34278 - DNA, 20 bp, synthetic construct
  misc_feature 1..20: note = chemically synthesized
  source 1..20: mol_type = other DNA
tcagacaaactacagtgaca

SEQ ID NO: 34279 - DNA, 20 bp, synthetic construct
  misc_feature 1..20: note = chemically synthesized
  source 1..20: mol_type = other DNA
gacaaactacagtgacatag

SEQ ID NO: 34280 - DNA, 20 bp, synthetic construct
  misc_feature 1..20: note = chemically synthesized
  source 1..20: mol_type = other DNA
actacagtgacatagaagac

SEQ ID NO: 34281 - DNA, 20 bp, synthetic construct
  misc_feature 1..20: note = chemically synthesized
  source 1..20: mol_type = other DNA
ctacagtgacatagaagacc

SEQ ID NO: 34282 - DNA, 20 bp, synthetic construct
  misc_feature 1..20: note = chemically synthesized
  source 1..20: mol_type = other DNA
tgacatagaagaccaggatg

SEQ ID NO: 34283 - DNA, 20 bp, synthetic construct
  misc_feature 1..20: note = chemically synthesized
  source 1..20: mol_type = other DNA
catagaagaccaggatgcag

SEQ ID NO: 34284 - DNA, 20 bp, synthetic construct
  misc_feature 1..20: note = chemically synthesized
  source 1..20: mol_type = other DNA
gaccaggatgcagcagatat

SEQ ID NO: 34285 - DNA, 20 bp, synthetic construct
  misc_feature 1..20: note = chemically synthesized
  source 1..20: mol_type = other DNA
ccaggatgcagcagatatga

SEQ ID NO: 34286 - DNA, 20 bp, synthetic construct
  misc_feature 1..20: note = chemically synthesized
  source 1..20: mol_type = other DNA
atatgagagacacatgtgtt

SEQ ID NO: 34287 - DNA, 20 bp, synthetic construct
  misc_feature 1..20: note = chemically synthesized
  source 1..20: mol_type = other DNA
tatgagagacacatgtgttg

SEQ ID NO: 34288 - DNA, 20 bp, synthetic construct
  misc_feature 1..20: note = chemically synthesized
  source 1..20: mol_type = other DNA
atgagagacacatgtgttga

SEQ ID NO: 34289 - DNA, 20 bp, synthetic construct
  misc_feature 1..20: note = chemically synthesized
  source 1..20: mol_type = other DNA
gacacatgtgttgagggcct

SEQ ID NO: 34290 - DNA, 20 bp, synthetic construct
  misc_feature 1..20: note = chemically synthesized
  source 1..20: mol_type = other DNA
ggccttggccctttctcctc

SEQ ID NO: 34291 - DNA, 20 bp, synthetic construct
  misc_feature 1..20: note = chemically synthesized
  source 1..20: mol_type = other DNA
tccagaaccaatgcccatga

SEQ ID NO: 34292 - DNA, 20 bp, synthetic construct
  misc_feature 1..20: note = chemically synthesized
  source 1..20: mol_type = other DNA
ccaatgcccatgacagtctt

SEQ ID NO: 34293 - DNA, 20 bp, synthetic construct
  misc_feature 1..20: note = chemically synthesized
  source 1..20: mol_type = other DNA
cagtcttgagaatcaaaatg

SEQ ID NO: 34294 - DNA, 20 bp, synthetic construct
  misc_feature 1..20: note = chemically synthesized
  source 1..20: mol_type = other DNA
agtcttgagaatcaaaatgt

SEQ ID NO: 34295 - DNA, 20 bp, synthetic construct
  misc_feature 1..20: note = chemically synthesized
  source 1..20: mol_type = other DNA
tcttgagaatcaaaatgtag

SEQ ID NO: 34296 - DNA, 20 bp, synthetic construct
  misc_feature 1..20: note = chemically synthesized
  source 1..20: mol_type = other DNA
gaatcaaaatgtaggagaaa

SEQ ID NO: 34297 - DNA, 20 bp, synthetic construct
  misc_feature 1..20: note = chemically synthesized
  source 1..20: mol_type = other DNA
atgtaggagaaaaagatgat

SEQ ID NO: 34298 - DNA, 20 bp, synthetic construct
  misc_feature 1..20: note = chemically synthesized
  source 1..20: mol_type = other DNA
aggagaaaaagatgatgaga

SEQ ID NO: 34299 - DNA, 20 bp, synthetic construct
  misc_feature 1..20: note = chemically synthesized
  source 1..20: mol_type = other DNA
agatgatgagaaagtccaac

SEQ ID NO: 34300 - DNA, 20 bp, synthetic construct
  misc_feature 1..20: note = chemically synthesized
  source 1..20: mol_type = other DNA
attgcaaataaaactacaac

SEQ ID NO: 34301 - DNA, 20 bp, synthetic construct
  misc_feature 1..20: note = chemically synthesized
  source 1..20: mol_type = other DNA
caaataaaactacaactgga

SEQ ID NO: 34302 - DNA, 20 bp, synthetic construct
  misc_feature 1..20: note = chemically synthesized
  source 1..20: mol_type = other DNA
aataaaactacaactggata

SEQ ID NO: 34303 - DNA, 20 bp, synthetic construct
  misc_feature 1..20: note = chemically synthesized
  source 1..20: mol_type = other DNA
aaactacaactggatagaga

SEQ ID NO: 34304 - DNA, 20 bp, synthetic construct
  misc_feature 1..20: note = chemically synthesized
  source 1..20: mol_type = other DNA
caactggatagagacggttg

SEQ ID NO: 34305 - DNA, 20 bp, synthetic construct
  misc_feature 1..20: note = chemically synthesized
  source 1..20: mol_type = other DNA
aactggatagagacggttga

SEQ ID NO: 34306 - DNA, 20 bp, synthetic construct
  misc_feature 1..20: note = chemically synthesized
  source 1..20: mol_type = other DNA
gagacggttgaaggtgatgt

SEQ ID NO: 34307 - DNA, 20 bp, synthetic construct
  misc_feature 1..20: note = chemically synthesized
  source 1..20: mol_type = other DNA
ggttgaaggtgatgtcagca

SEQ ID NO: 34308 - DNA, 20 bp, synthetic construct
  misc_feature 1..20: note = chemically synthesized
  source 1..20: mol_type = other DNA
gttgaaggtgatgtcagcac

SEQ ID NO: 34309 - DNA, 20 bp, synthetic construct
  misc_feature 1..20: note = chemically synthesized
  source 1..20: mol_type = other DNA
aaggtgatgtcagcacaggc

SEQ ID NO: 34310 - DNA, 20 bp, synthetic construct
  misc_feature 1..20: note = chemically synthesized
  source 1..20: mol_type = other DNA
aggctagcttgatgacatct

SEQ ID NO: 34311 - DNA, 20 bp, synthetic construct
  misc_feature 1..20: note = chemically synthesized
  source 1..20: mol_type = other DNA
agcttgatgacatcttggtg

SEQ ID NO: 34312 - DNA, 20 bp, synthetic construct
  misc_feature 1..20: note = chemically synthesized
  source 1..20: mol_type = other DNA
tgatgacatcttggtgtaga

SEQ ID NO: 34313 - DNA, 20 bp, synthetic construct
  misc_feature 1..20: note = chemically synthesized
  source 1..20: mol_type = other DNA
gacatcttggtgtagacaga

SEQ ID NO: 34314 - DNA, 20 bp, synthetic construct
  misc_feature 1..20: note = chemically synthesized
  source 1..20: mol_type = other DNA
cttggtgtagacagaaagca

SEQ ID NO: 34315 - DNA, 20 bp, synthetic construct
  misc_feature 1..20: note = chemically synthesized
  source 1..20: mol_type = other DNA
ttggtgtagacagaaagcat

SEQ ID NO: 34316 - DNA, 20 bp, synthetic construct
  misc_feature 1..20: note = chemically synthesized
  source 1..20: mol_type = other DNA
ggtgtagacagaaagcatgg

SEQ ID NO: 34317 - DNA, 20 bp, synthetic construct
  misc_feature 1..20: note = chemically synthesized
  source 1..20: mol_type = other DNA
tgtagacagaaagcatggga

SEQ ID NO: 34318 - DNA, 20 bp, synthetic construct
  misc_feature 1..20: note = chemically synthesized
  source 1..20: mol_type = other DNA
agaaagcatgggagagtaca

SEQ ID NO: 34319 - DNA, 20 bp, synthetic construct
  misc_feature 1..20: note = chemically synthesized
  source 1..20: mol_type = other DNA
gaaagcatgggagagtacat

SEQ ID NO: 34320 - DNA, 20 bp, synthetic construct
  misc_feature 1..20: note = chemically synthesized
  source 1..20: mol_type = other DNA
gggagagtacatgggatcga

SEQ ID NO: 34321 - DNA, 20 bp, synthetic construct
  misc_feature 1..20: note = chemically synthesized
  source 1..20: mol_type = other DNA
agagtacatgggatcgacag

SEQ ID NO: 34322 - DNA, 20 bp, synthetic construct
  misc_feature 1..20: note = chemically synthesized
  source 1..20: mol_type = other DNA
gagtacatgggatcgacagt

SEQ ID NO: 34323 - DNA, 20 bp, synthetic construct
  misc_feature 1..20: note = chemically synthesized
  source 1..20: mol_type = other DNA
agtacatgggatcgacagta

SEQ ID NO: 34324 - DNA, 20 bp, synthetic construct
  misc_feature 1..20: note = chemically synthesized
  source 1..20: mol_type = other DNA
gggatcgacagtagggaaac

SEQ ID NO: 34325 - DNA, 20 bp, synthetic construct
  misc_feature 1..20: note = chemically synthesized
  source 1..20: mol_type = other DNA
cgacagtagggaaaccagtg

SEQ ID NO: 34326 - DNA, 20 bp, synthetic construct
  misc_feature 1..20: note = chemically synthesized
  source 1..20: mol_type = other DNA
gacagtagggaaaccagtgt

SEQ ID NO: 34327 - DNA, 20 bp, synthetic construct
  misc_feature 1..20: note = chemically synthesized
  source 1..20: mol_type = other DNA
cagtgtaggcgaacaactat

SEQ ID NO: 34328 - DNA, 20 bp, synthetic construct
  misc_feature 1..20: note = chemically synthesized
  source 1..20: mol_type = other DNA
gcgaacaactattggcataa

SEQ ID NO: 34329 - DNA, 20 bp, synthetic construct
  misc_feature 1..20: note = chemically synthesized
  source 1..20: mol_type = other DNA
acaactattggcataatgga

SEQ ID NO: 34330 - DNA, 20 bp, synthetic construct
  misc_feature 1..20: note = chemically synthesized
  source 1..20: mol_type = other DNA
tattggcataatggacagac

SEQ ID NO: 34331 - DNA, 20 bp, synthetic construct
  misc_feature 1..20: note = chemically synthesized
  source 1..20: mol_type = other DNA
gcacaccaatcttcattacc

SEQ ID NO: 34332 - DNA, 20 bp, synthetic construct
  misc_feature 1..20: note = chemically synthesized
  source 1..20: mol_type = other DNA
cacaccaatcttcattacct

SEQ ID NO: 34333 - DNA, 20 bp, synthetic construct
  misc_feature 1..20: note = chemically synthesized
  source 1..20: mol_type = other DNA
aatcttcattacctgggtgt

SEQ ID NO: 34334 - DNA, 20 bp, synthetic construct
  misc_feature 1..20: note = chemically synthesized
  source 1..20: mol_type = other DNA
ttcattacctgggtgttggt

SEQ ID NO: 34335 - DNA, 20 bp, synthetic construct
  misc_feature 1..20: note = chemically synthesized
  source 1..20: mol_type = other DNA
tcattacctgggtgttggtc

SEQ ID NO: 34336 - DNA, 20 bp, synthetic construct
  misc_feature 1..20: note = chemically synthesized
  source 1..20: mol_type = other DNA
tacctgggtgttggtcagga

SEQ ID NO: 34337 - DNA, 20 bp, synthetic construct
  misc_feature 1..20: note = chemically synthesized
  source 1..20: mol_type = other DNA
cctgggtgttggtcaggata

SEQ ID NO: 34338 - DNA, 20 bp, synthetic construct
  misc_feature 1..20: note = chemically synthesized
  source 1..20: mol_type = other DNA
ctgggtgttggtcaggatag

SEQ ID NO: 34339 - DNA, 20 bp, synthetic construct
  misc_feature 1..20: note = chemically synthesized
  source 1..20: mol_type = other DNA
tcaggatagaggtatatctt

SEQ ID NO: 34340 - DNA, 20 bp, synthetic construct
  misc_feature 1..20: note = chemically synthesized
  source 1..20: mol_type = other DNA
caggatagaggtatatctta

SEQ ID NO: 34341 - DNA, 20 bp, synthetic construct
  misc_feature 1..20: note = chemically synthesized
  source 1..20: mol_type = other DNA
aggatagaggtatatcttaa

SEQ ID NO: 34342 - DNA, 20 bp, synthetic construct
  misc_feature 1..20: note = chemically synthesized
  source 1..20: mol_type = other DNA
ggatagaggtatatcttaag

SEQ ID NO: 34343 - DNA, 20 bp, synthetic construct
  misc_feature 1..20: note = chemically synthesized
  source 1..20: mol_type = other DNA
aggtatatcttaaggggctg

SEQ ID NO: 34344 - DNA, 20 bp, synthetic construct
  misc_feature 1..20: note = chemically synthesized
  source 1..20: mol_type = other DNA
atatcttaaggggctgcgga

SEQ ID NO: 34345 - DNA, 20 bp, synthetic construct
  misc_feature 1..20: note = chemically synthesized
  source 1..20: mol_type = other DNA
ggctgcggatggtaatgaaa

SEQ ID NO: 34346 - DNA, 20 bp, synthetic construct
  misc_feature 1..20: note = chemically synthesized
  source 1..20: mol_type = other DNA
gatggtaatgaaacagtcat

SEQ ID NO: 34347 - DNA, 20 bp, synthetic construct
  misc_feature 1..20: note = chemically synthesized
  source 1..20: mol_type = other DNA
aatgaaacagtcataagcca

SEQ ID NO: 34348 - DNA, 20 bp, synthetic construct
  misc_feature 1..20: note = chemically synthesized
  source 1..20: mol_type = other DNA
aaacagtcataagccatggc

SEQ ID NO: 34349 - DNA, 20 bp, synthetic construct
  misc_feature 1..20: note = chemically synthesized
  source 1..20: mol_type = other DNA
agtcataagccatggcaagc

SEQ ID NO: 34350 - DNA, 20 bp, synthetic construct
  misc_feature 1..20: note = chemically synthesized
  source 1..20: mol_type = other DNA
caagacacctgactccatga

SEQ ID NO: 34351 - DNA, 20 bp, synthetic construct
  misc_feature 1..20: note = chemically synthesized
  source 1..20: mol_type = other DNA
acacctgactccatgacaga

SEQ ID NO: 34352 - DNA, 20 bp, synthetic construct
  misc_feature 1..20: note = chemically synthesized
  source 1..20: mol_type = other DNA
acctgactccatgacagaaa

SEQ ID NO: 34353 - DNA, 20 bp, synthetic construct
  misc_feature 1..20: note = chemically synthesized
  source 1..20: mol_type = other DNA
actccatgacagaaagagta

SEQ ID NO: 34354 - DNA, 20 bp, synthetic construct
  misc_feature 1..20: note = chemically synthesized
  source 1..20: mol_type = other DNA
cagaaagagtatggataaaa

SEQ ID NO: 34355 - DNA, 20 bp, synthetic construct
  misc_feature 1..20: note = chemically synthesized
  source 1..20: mol_type = other DNA
agaaagagtatggataaaat

SEQ ID NO: 34356 - DNA, 20 bp, synthetic construct
  misc_feature 1..20: note = chemically synthesized
  source 1..20: mol_type = other DNA
agtatggataaaataggcct

SEQ ID NO: 34357 - DNA, 20 bp, synthetic construct
  misc_feature 1..20: note = chemically synthesized
  source 1..20: mol_type = other DNA
tatggataaaataggcctga

SEQ ID NO: 34358 - DNA, 20 bp, synthetic construct
  misc_feature 1..20: note = chemically synthesized
  source 1..20: mol_type = other DNA
ggataaaataggcctgagag

SEQ ID NO: 34359 - DNA, 20 bp, synthetic construct
  misc_feature 1..20: note = chemically synthesized
  source 1..20: mol_type = other DNA
taaaataggcctgagagaag

SEQ ID NO: 34360 - DNA, 20 bp, synthetic construct
  misc_feature 1..20: note = chemically synthesized
  source 1..20: mol_type = other DNA
aaaataggcctgagagaagc

SEQ ID NO: 34361 - DNA, 20 bp, synthetic construct
  misc_feature 1..20: note = chemically synthesized
  source 1..20: mol_type = other DNA
cctgagagaagcaggctcca

SEQ ID NO: 34362 - DNA, 20 bp, synthetic construct
  misc_feature 1..20: note = chemically synthesized
  source 1..20: mol_type = other DNA
atctccctgtgatctaacca

SEQ ID NO: 34363 - DNA, 20 bp, synthetic construct
  misc_feature 1..20: note = chemically synthesized
  source 1..20: mol_type = other DNA
tgatctaaccacagaacacc

SEQ ID NO: 34364 - DNA, 20 bp, synthetic construct
  misc_feature 1..20: note = chemically synthesized
  source 1..20: mol_type = other DNA
ccacagaacacctagcactg

SEQ ID NO: 34365 - DNA, 20 bp, synthetic construct
  misc_feature 1..20: note = chemically synthesized
  source 1..20: mol_type = other DNA
cacagaacacctagcactgt

SEQ ID NO: 34366 - DNA, 20 bp, synthetic construct
  misc_feature 1..20: note = chemically synthesized
  source 1..20: mol_type = other DNA
acctagcactgtgggcattg

SEQ ID NO: 34367 - DNA, 20 bp, synthetic construct
  misc_feature 1..20: note = chemically synthesized
  source 1..20: mol_type = other DNA
attgtggtcaatgtcactcc

SEQ ID NO: 34368 - DNA, 20 bp, synthetic construct
  misc_feature 1..20: note = chemically synthesized
  source 1..20: mol_type = other DNA
ttgtggtcaatgtcactccg

SEQ ID NO: 34369 - DNA, 20 bp, synthetic construct
  misc_feature 1..20: note = chemically synthesized
  source 1..20: mol_type = other DNA
caatgtcactccgaggtctg

SEQ ID NO: 34370 - DNA, 20 bp, synthetic construct
  misc_feature 1..20: note = chemically synthesized
  source 1..20: mol_type = other DNA
gaggtctgtagctgccaaca

SEQ ID NO: 34371 - DNA, 20 bp, synthetic construct
  misc_feature 1..20: note = chemically synthesized
  source 1..20: mol_type = other DNA
ctgtagctgccaacatagct

SEQ ID NO: 34372 - DNA, 20 bp, synthetic construct
  misc_feature 1..20: note = chemically synthesized
  source 1..20: mol_type = other DNA
ctgccaacatagctaagaaa

SEQ ID NO: 34373 - DNA, 20 bp, synthetic construct
  misc_feature 1..20: note = chemically synthesized
  source 1..20: mol_type = other DNA
catagctaagaaatagtaca

SEQ ID NO: 34374 - DNA, 20 bp, synthetic construct
  misc_feature 1..20: note = chemically synthesized
  source 1..20: mol_type = other DNA
atagctaagaaatagtacat

SEQ ID NO: 34375 - DNA, 20 bp, synthetic construct
  misc_feature 1..20: note = chemically synthesized
  source 1..20: mol_type = other DNA
agaaatagtacatgggctca

SEQ ID NO: 34376 - DNA, 20 bp, synthetic construct
  misc_feature 1..20: note = chemically synthesized
  source 1..20: mol_type = other DNA
aaatagtacatgggctcatg

SEQ ID NO: 34377 - DNA, 20 bp, synthetic construct
  misc_feature 1..20: note = chemically synthesized
  source 1..20: mol_type = other DNA
aatagtacatgggctcatgg

SEQ ID NO: 34378 - DNA, 20 bp, synthetic construct
  misc_feature 1..20: note = chemically synthesized
  source 1..20: mol_type = other DNA
aggttatgatcattcctgat

SEQ ID NO: 34379 - DNA, 20 bp, synthetic construct
  misc_feature 1..20: note = chemically synthesized
  source 1..20: mol_type = other DNA
tatgatcattcctgatgaga

SEQ ID NO: 34380 - DNA, 20 bp, synthetic construct
  misc_feature 1..20: note = chemically synthesized
  source 1..20: mol_type = other DNA
tgatcattcctgatgagaaa

SEQ ID NO: 34381 - DNA, 20 bp, synthetic construct
  misc_feature 1..20: note = chemically synthesized
  source 1..20: mol_type = other DNA
tcattcctgatgagaaagag

SEQ ID NO: 34382 - DNA, 20 bp, synthetic construct
  misc_feature 1..20: note = chemically synthesized
  source 1..20: mol_type = other DNA
attcctgatgagaaagagaa

SEQ ID NO: 34383 - DNA, 20 bp, synthetic construct
  misc_feature 1..20: note = chemically synthesized
  source 1..20: mol_type = other DNA
aagagaagagtgccattgcc

SEQ ID NO: 34384 - DNA, 20 bp, synthetic construct
  misc_feature 1..20: note = chemically synthesized
  source 1..20: mol_type = other DNA
agaagagtgccattgccaag

SEQ ID NO: 34385 - DNA, 20 bp, synthetic construct
  misc_feature 1..20: note = chemically synthesized
  source 1..20: mol_type = other DNA
agtgccattgccaagaagta

SEQ ID NO: 34386 - DNA, 20 bp, synthetic construct
  misc_feature 1..20: note = chemically synthesized
  source 1..20: mol_type = other DNA
tgccattgccaagaagtatg

SEQ ID NO: 34387 - DNA, 20 bp, synthetic construct
  misc_feature 1..20: note = chemically synthesized
  source 1..20: mol_type = other DNA
tgccaagaagtatggagatg

SEQ ID NO: 34388 - DNA, 20 bp, synthetic construct
  misc_feature 1..20: note = chemically synthesized
  source 1..20: mol_type = other DNA
gccaagaagtatggagatgt

SEQ ID NO: 34389 - DNA, 20 bp, synthetic construct
  misc_feature 1..20: note = chemically synthesized
  source 1..20: mol_type = other DNA
gagatgtaggctgccaataa

SEQ ID NO: 34390 - DNA, 20 bp, synthetic construct
  misc_feature 1..20: note = chemically synthesized
  source 1..20: mol_type = other DNA
agatgtaggctgccaataat

SEQ ID NO: 34391 - DNA, 20 bp, synthetic construct
  misc_feature 1..20: note = chemically synthesized
  source 1..20: mol_type = other DNA
ccaataatgggatgaatatc

SEQ ID NO: 34392 - DNA, 20 bp, synthetic construct
  misc_feature 1..20: note = chemically synthesized
  source 1..20: mol_type = other DNA
tgatgtgccttctccatgcc

SEQ ID NO: 34393 - DNA, 20 bp, synthetic construct
  misc_feature 1..20: note = chemically synthesized
  source 1..20: mol_type = other DNA
gatgtgccttctccatgcct

SEQ ID NO: 34394 - DNA, 20 bp, synthetic construct
  misc_feature 1..20: note = chemically synthesized
  source 1..20: mol_type = other DNA
gtgccttctccatgcctggg

SEQ ID NO: 34395 - DNA, 20 bp, synthetic construct
  misc_feature 1..20: note = chemically synthesized
  source 1..20: mol_type = other DNA
cttctccatgcctgggaagc

SEQ ID NO: 34396 - DNA, 20 bp, synthetic construct
  misc_feature 1..20: note = chemically synthesized
  source 1..20: mol_type = other DNA
tccatgcctgggaagccagt

SEQ ID NO: 34397 - DNA, 20 bp, synthetic construct
  misc_feature 1..20: note = chemically synthesized
  source 1..20: mol_type = other DNA
tgcctgggaagccagtaagc

SEQ ID NO: 34398 - DNA, 20 bp, synthetic construct
  misc_feature 1..20: note = chemically synthesized
  source 1..20: mol_type = other DNA
ctgggaagccagtaagctgg

SEQ ID NO: 34399 - DNA, 20 bp, synthetic construct
  misc_feature 1..20: note = chemically synthesized
  source 1..20: mol_type = other DNA
tgggaagccagtaagctgga

SEQ ID NO: 34400 - DNA, 20 bp, synthetic construct
  misc_feature 1..20: note = chemically synthesized
  source 1..20: mol_type = other DNA
gaagccagtaagctggaagg

SEQ ID NO: 34401 - DNA, 20 bp, synthetic construct
  misc_feature 1..20: note = chemically synthesized
  source 1..20: mol_type = other DNA
gccagtaagctggaaggtgg

SEQ ID NO: 34402 - DNA, 20 bp, synthetic construct
  misc_feature 1..20: note = chemically synthesized
  source 1..20: mol_type = other DNA
agtaagctggaaggtggaag

SEQ ID NO: 34403 - DNA, 20 bp, synthetic construct
  misc_feature 1..20: note = chemically synthesized
  source 1..20: mol_type = other DNA
aaggtggaagcagacttatt

SEQ ID NO: 34404 - DNA, 20 bp, synthetic construct
  misc_feature 1..20: note = chemically synthesized
  source 1..20: mol_type = other DNA
gacttattgagccccattgc

SEQ ID NO: 34405 - DNA, 20 bp, synthetic construct
  misc_feature 1..20: note = chemically synthesized
  source 1..20: mol_type = other DNA
gccccattgccagctttgca

SEQ ID NO: 34406 - DNA, 20 bp, synthetic construct
  misc_feature 1..20: note = chemically synthesized
  source 1..20: mol_type = other DNA
cccattgccagctttgcaaa

SEQ ID NO: 34407 - DNA, 20 bp, synthetic construct
  misc_feature 1..20: note = chemically synthesized
  source 1..20: mol_type = other DNA
ccattgccagctttgcaaag

SEQ ID NO: 34408 - DNA, 20 bp, synthetic construct
  misc_feature 1..20: note = chemically synthesized
  source 1..20: mol_type = other DNA
aaagaggcaaatatttactc

SEQ ID NO: 34409 - DNA, 20 bp, synthetic construct
  misc_feature 1..20: note = chemically synthesized
  source 1..20: mol_type = other DNA
aagaggcaaatatttactcc

SEQ ID NO: 34410 - DNA, 20 bp, synthetic construct
  misc_feature 1..20: note = chemically synthesized
  source 1..20: mol_type = other DNA
gcaaatatttactccaggta

SEQ ID NO: 34411 - DNA, 20 bp, synthetic construct
  misc_feature 1..20: note = chemically synthesized
  source 1..20: mol_type = other DNA
atttactccaggtaaagcaa

SEQ ID NO: 34412 - DNA, 20 bp, synthetic construct
  misc_feature 1..20: note = chemically synthesized
  source 1..20: mol_type = other DNA
ccaggtaaagcaatagtaat

SEQ ID NO: 34413 - DNA, 20 bp, synthetic construct
  misc_feature 1..20: note = chemically synthesized
  source 1..20: mol_type = other DNA
aatagtaatcagttgtataa

SEQ ID NO: 34414 - DNA, 20 bp, synthetic construct
  misc_feature 1..20: note = chemically synthesized
  source 1..20: mol_type = other DNA
ttgtataaaagttgctcctt

SEQ ID NO: 34415 - DNA, 20 bp, synthetic construct
  misc_feature 1..20: note = chemically synthesized
  source 1..20: mol_type = other DNA
tgagaattctacctgttcat

SEQ ID NO: 34416 - DNA, 20 bp, synthetic construct
  misc_feature 1..20: note = chemically synthesized
  source 1..20: mol_type = other DNA
cctgttcataagatgttcac

SEQ ID NO: 34417 - DNA, 20 bp, synthetic construct
  misc_feature 1..20: note = chemically synthesized
  source 1..20: mol_type = other DNA
tgttcaccagtcctgacttt

SEQ ID NO: 34418 - DNA, 20 bp, synthetic construct
  misc_feature 1..20: note = chemically synthesized
  source 1..20: mol_type = other DNA
ccagtcctgactttcagtga

SEQ ID NO: 34419 - DNA, 20 bp, synthetic construct
  misc_feature 1..20: note = chemically synthesized
  source 1..20: mol_type = other DNA
tcctgactttcagtgacagc

SEQ ID NO: 34420 - DNA, 20 bp, synthetic construct
  misc_feature 1..20: note = chemically synthesized
  source 1..20: mol_type = other DNA
cctgactttcagtgacagca

SEQ ID NO: 34421 - DNA, 20 bp, synthetic construct
  misc_feature 1..20: note = chemically synthesized
  source 1..20: mol_type = other DNA
tgacagcaaggatgataatt

SEQ ID NO: 34422 - DNA, 20 bp, synthetic construct
  misc_feature 1..20: note = chemically synthesized
  source 1..20: mol_type = other DNA
gatgataatttagtcattcc

SEQ ID NO: 34423 - DNA, 20 bp, synthetic construct
  misc_feature 1..20: note = chemically synthesized
  source 1..20: mol_type = other DNA
atgataatttagtcattcct

SEQ ID NO: 34424 - DNA, 20 bp, synthetic construct
  misc_feature 1..20: note = chemically synthesized
  source 1..20: mol_type = other DNA
gataatttagtcattcctgg

SEQ ID NO: 34425 - DNA, 20 bp, synthetic construct
  misc_feature 1..20: note = chemically synthesized
  source 1..20: mol_type = other DNA
tagtcattcctgggagatcc

SEQ ID NO: 34426 - DNA, 20 bp, synthetic construct
  misc_feature 1..20: note = chemically synthesized
  source 1..20: mol_type = other DNA
agtcattcctgggagatcct

SEQ ID NO: 34427 - DNA, 20 bp, synthetic construct
  misc_feature 1..20: note = chemically synthesized
  source 1..20: mol_type = other DNA
ttcctgggagatcctaggta

SEQ ID NO: 34428 - DNA, 20 bp, synthetic construct
  misc_feature 1..20: note = chemically synthesized
  source 1..20: mol_type = other DNA
tcctgggagatcctaggtat

SEQ ID NO: 34429 - DNA, 20 bp, synthetic construct
  misc_feature 1..20: note = chemically synthesized
  source 1..20: mol_type = other DNA
agatcctaggtatgggaaaa

SEQ ID NO: 34430 - DNA, 20 bp, synthetic construct
  misc_feature 1..20: note = chemically synthesized
  source 1..20: mol_type = other DNA
atgggaaaatagaatgtata

SEQ ID NO: 34431 - DNA, 20 bp, synthetic construct
  misc_feature 1..20: note = chemically synthesized
  source 1..20: mol_type = other DNA
ggaaaatagaatgtataaag

SEQ ID NO: 34432 - DNA, 20 bp, synthetic construct
  misc_feature 1..20: note = chemically synthesized
  source 1..20: mol_type = other DNA
tgtataaagaagatattatt

SEQ ID NO: 34433 - DNA, 20 bp, synthetic construct
  misc_feature 1..20: note = chemically synthesized
  source 1..20: mol_type = other DNA
gtataaagaagatattattt

SEQ ID NO: 34434 - DNA, 20 bp, synthetic construct
  misc_feature 1..20: note = chemically synthesized
  source 1..20: mol_type = other DNA
tataaagaagatattattta

SEQ ID NO: 34435 - DNA, 20 bp, synthetic construct
  misc_feature 1..20: note = chemically synthesized
  source 1..20: mol_type = other DNA
atttagggtttactctatgt

SEQ ID NO: 34436 - DNA, 20 bp, synthetic construct
  misc_feature 1..20: note = chemically synthesized
  source 1..20: mol_type = other DNA
tttactctatgtaagattat

SEQ ID NO: 34437 - DNA, 20 bp, synthetic construct
  misc_feature 1..20: note = chemically synthesized
  source 1..20: mol_type = other DNA
aagattattggatactacgt

SEQ ID NO: 34438 - DNA, 20 bp, synthetic construct
  misc_feature 1..20: note = chemically synthesized
  source 1..20: mol_type = other DNA
agattattggatactacgtt

SEQ ID NO: 34439 - DNA, 20 bp, synthetic construct
  misc_feature 1..20: note = chemically synthesized
  source 1..20: mol_type = other DNA
gattattggatactacgttg

SEQ ID NO: 34440 - DNA, 20 bp, synthetic construct
  misc_feature 1..20: note = chemically synthesized
  source 1..20: mol_type = other DNA
tggatactacgttggggata

SEQ ID NO: 34441 - DNA, 20 bp, synthetic construct
  misc_feature 1..20: note = chemically synthesized
  source 1..20: mol_type = other DNA
tggggatacagctattcatg

SEQ ID NO: 34442 - DNA, 20 bp, synthetic construct
  misc_feature 1..20: note = chemically synthesized
  source 1..20: mol_type = other DNA
tcattgtaaatcatataacc

SEQ ID NO: 34443 - DNA, 20 bp, synthetic construct
  misc_feature 1..20: note = chemically synthesized
  source 1..20: mol_type = other DNA
agaaaataaaaacaaaatga

SEQ ID NO: 34444 - DNA, 20 bp, synthetic construct
  misc_feature 1..20: note = chemically synthesized
  source 1..20: mol_type = other DNA
aaataaaaacaaaatgaaag

SEQ ID NO: 34445 - DNA, 20 bp, synthetic construct
  misc_feature 1..20: note = chemically synthesized
  source 1..20: mol_type = other DNA
aagaaatcactatatttgaa

SEQ ID NO: 34446 - DNA, 20 bp, synthetic construct
  misc_feature 1..20: note = chemically synthesized
  source 1..20: mol_type = other DNA
atatttgaatagtgctgtaa

SEQ ID NO: 34447 - DNA, 20 bp, synthetic construct
  misc_feature 1..20: note = chemically synthesized
  source 1..20: mol_type = other DNA
ctgtaatggcctgaaactta

SEQ ID NO: 34448 - DNA, 20 bp, synthetic construct
  misc_feature 1..20: note = chemically synthesized
  source 1..20: mol_type = other DNA
tgtaatggcctgaaacttat

SEQ ID NO: 34449 - DNA, 20 bp, synthetic construct
  misc_feature 1..20: note = chemically synthesized
  source 1..20: mol_type = other DNA
aacttataggtcacttttca

SEQ ID NO: 34450 - DNA, 20 bp, synthetic construct
  misc_feature 1..20: note = chemically synthesized
  source 1..20: mol_type = other DNA
atggtgctcttcatcctgac

SEQ ID NO: 34451 - DNA, 20 bp, synthetic construct
  misc_feature 1..20: note = chemically synthesized
  source 1..20: mol_type = other DNA
gtgctcttcatcctgactgg

SEQ ID NO: 34452 - DNA, 20 bp, synthetic construct
  misc_feature 1..20: note = chemically synthesized
  source 1..20: mol_type = other DNA
catcctgactggtggtatta

SEQ ID NO: 34453 - DNA, 20 bp, synthetic construct
  misc_feature 1..20: note = chemically synthesized
  source 1..20: mol_type = other DNA
atcctgactggtggtattat

SEQ ID NO: 34454 - DNA, 20 bp, synthetic construct
  misc_feature 1..20: note = chemically synthesized
  source 1..20: mol_type = other DNA
tcctgactggtggtattata

SEQ ID NO: 34455 - DNA, 20 bp, synthetic construct
  misc_feature 1..20: note = chemically synthesized
  source 1..20: mol_type = other DNA
tgactggtggtattataggg

SEQ ID NO: 34456 - DNA, 20 bp, synthetic construct
  misc_feature 1..20: note = chemically synthesized
  source 1..20: mol_type = other DNA
ggtattatagggtggatgta

SEQ ID NO: 34457 - DNA, 20 bp, synthetic construct
  misc_feature 1..20: note = chemically synthesized
  source 1..20: mol_type = other DNA
gtattatagggtggatgtaa

SEQ ID NO: 34458 - DNA, 20 bp, synthetic construct
  misc_feature 1..20: note = chemically synthesized
  source 1..20: mol_type = other DNA
gggtggatgtaaaggtttcc

SEQ ID NO: 34459 - DNA, 20 bp, synthetic construct
  misc_feature 1..20: note = chemically synthesized
  source 1..20: mol_type = other DNA
ggtggatgtaaaggtttccc

SEQ ID NO: 34460 - DNA, 20 bp, synthetic construct
  misc_feature 1..20: note = chemically synthesized
  source 1..20: mol_type = other DNA
aaaggtttcccaggctatgt

SEQ ID NO: 34461 - DNA, 20 bp, synthetic construct
  misc_feature 1..20: note = chemically synthesized
  source 1..20: mol_type = other DNA
ccaggctatgtgagacctaa

SEQ ID NO: 34462 - DNA, 20 bp, synthetic construct
  misc_feature 1..20: note = chemically synthesized
  source 1..20: mol_type = other DNA
ctatgtgagacctaaaagat

SEQ ID NO: 34463 - DNA, 20 bp, synthetic construct
  misc_feature 1..20: note = chemically synthesized
  source 1..20: mol_type = other DNA
tgtgagacctaaaagatcag

SEQ ID NO: 34464 - DNA, 20 bp, synthetic construct
  misc_feature 1..20: note = chemically synthesized
  source 1..20: mol_type = other DNA
ctaaaagatcagtagaaaaa

SEQ ID NO: 34465 - DNA, 20 bp, synthetic construct
  misc_feature 1..20: note = chemically synthesized
  source 1..20: mol_type = other DNA
atcagtagaaaaatggttct

SEQ ID NO: 34466 - DNA, 20 bp, synthetic construct
  misc_feature 1..20: note = chemically synthesized
  source 1..20: mol_type = other DNA
aaaatggttctaagcactat

SEQ ID NO: 34467 - DNA, 20 bp, synthetic construct
  misc_feature 1..20: note = chemically synthesized
  source 1..20: mol_type = other DNA
ggttctaagcactattggaa

SEQ ID NO: 34468 - DNA, 20 bp, synthetic construct
  misc_feature 1..20: note = chemically synthesized
  source 1..20: mol_type = other DNA
tctaagcactattggaaaag

SEQ ID NO: 34469 - DNA, 20 bp, synthetic construct
  misc_feature 1..20: note = chemically synthesized
  source 1..20: mol_type = other DNA
ctattggaaaagcagatata

SEQ ID NO: 34470 - DNA, 20 bp, synthetic construct
  misc_feature 1..20: note = chemically synthesized
  source 1..20: mol_type = other DNA
aagcagatataaagattata

SEQ ID NO: 34471 - DNA, 20 bp, synthetic construct
  misc_feature 1..20: note = chemically synthesized
  source 1..20: mol_type = other DNA
atatggaaaaacaaatacac

SEQ ID NO: 34472 - DNA, 20 bp, synthetic construct
  misc_feature 1..20: note = chemically synthesized
  source 1..20: mol_type = other DNA
ggaaaaacaaatacacaagt

SEQ ID NO: 34473 - DNA, 20 bp, synthetic construct
  misc_feature 1..20: note = chemically synthesized
  source 1..20: mol_type = other DNA
tacacaagtaagaaatatat

SEQ ID NO: 34474 - DNA, 20 bp, synthetic construct
  misc_feature 1..20: note = chemically synthesized
  source 1..20: mol_type = other DNA
tatgagcaaatacaataaaa

SEQ ID NO: 34475 - DNA, 20 bp, synthetic construct
  misc_feature 1..20: note = chemically synthesized
  source 1..20: mol_type = other DNA
tacaataaaatagtaaattt

SEQ ID NO: 34476 - DNA, 20 bp, synthetic construct
  misc_feature 1..20: note = chemically synthesized
  source 1..20: mol_type = other DNA
caataaaatagtaaatttca

SEQ ID NO: 34477 - DNA, 20 bp, synthetic construct
  misc_feature 1..20: note = chemically synthesized
  source 1..20: mol_type = other DNA
tgacttttcttcaatattcc

SEQ ID NO: 34478 - DNA, 20 bp, synthetic construct
  misc_feature 1..20: note = chemically synthesized
  source 1..20: mol_type = other DNA
acttttcttcaatattcctg

SEQ ID NO: 34479 - DNA, 20 bp, synthetic construct
  misc_feature 1..20: note = chemically synthesized
  source 1..20: mol_type = other DNA
cttttcttcaatattcctgg

SEQ ID NO: 34480 - DNA, 20 bp, synthetic construct
  misc_feature 1..20: note = chemically synthesized
  source 1..20: mol_type = other DNA
ttttcttcaatattcctgga

SEQ ID NO: 34481 - DNA, 20 bp, synthetic construct
  misc_feature 1..20: note = chemically synthesized
  source 1..20: mol_type = other DNA
gagggaaaattcaattgatg

SEQ ID NO: 34482 - DNA, 20 bp, synthetic construct
  misc_feature 1..20: note = chemically synthesized
  source 1..20: mol_type = other DNA
aaattcaattgatgaagctc

SEQ ID NO: 34483 - DNA, 20 bp, synthetic construct
  misc_feature 1..20: note = chemically synthesized
  source 1..20: mol_type = other DNA
attcaattgatgaagctcca

SEQ ID NO: 34484 - DNA, 20 bp, synthetic construct
  misc_feature 1..20: note = chemically synthesized
  source 1..20: mol_type = other DNA
gatgaagctccagagacttt

SEQ ID NO: 34485 - DNA, 20 bp, synthetic construct
  misc_feature 1..20: note = chemically synthesized
  source 1..20: mol_type = other DNA
atgaagctccagagactttt

SEQ ID NO: 34486 - DNA, 20 bp, synthetic construct
  misc_feature 1..20: note = chemically synthesized
  source 1..20: mol_type = other DNA
aagctccagagacttttggg

SEQ ID NO: 34487 - DNA, 20 bp, synthetic construct
  misc_feature 1..20: note = chemically synthesized
  source 1..20: mol_type = other DNA
tccagagacttttgggtagt

SEQ ID NO: 34488 - DNA, 20 bp, synthetic construct
  misc_feature 1..20: note = chemically synthesized
  source 1..20: mol_type = other DNA
gggtagttagaaaatgacgt

SEQ ID NO: 34489 - DNA, 20 bp, synthetic construct
  misc_feature 1..20: note = chemically synthesized
  source 1..20: mol_type = other DNA
gtagttagaaaatgacgtaa

SEQ ID NO: 34490 - DNA, 20 bp, synthetic construct
  misc_feature 1..20: note = chemically synthesized
  source 1..20: mol_type = other DNA
cttacctgtgtgtgtttcca

SEQ ID NO: 34491 - DNA, 20 bp, synthetic construct
  misc_feature 1..20: note = chemically synthesized
  source 1..20: mol_type = other DNA
gtgtgtgtttccaaagcaca

SEQ ID NO: 34492 - DNA, 20 bp, synthetic construct
  misc_feature 1..20: note = chemically synthesized
  source 1..20: mol_type = other DNA
tccaaagcacatagaactct

SEQ ID NO: 34493 - DNA, 20 bp, synthetic construct
  misc_feature 1..20: note = chemically synthesized
  source 1..20: mol_type = other DNA
acatagaactctaagttgcc

SEQ ID NO: 34494 - DNA, 20 bp, synthetic construct
  misc_feature 1..20: note = chemically synthesized
  source 1..20: mol_type = other DNA
gttgcccagctttataaccc

SEQ ID NO: 34495 - DNA, 20 bp, synthetic construct
  misc_feature 1..20: note = chemically synthesized
  source 1..20: mol_type = other DNA
gttattgatacactgcttca

SEQ ID NO: 34496 - DNA, 20 bp, synthetic construct
  misc_feature 1..20: note = chemically synthesized
  source 1..20: mol_type = other DNA
aattttcataatataaattg

SEQ ID NO: 34497 - DNA, 20 bp, synthetic construct
  misc_feature 1..20: note = chemically synthesized
  source 1..20: mol_type = other DNA
aatataaattgaagaataaa

SEQ ID NO: 34498 - DNA, 20 bp, synthetic construct
  misc_feature 1..20: note = chemically synthesized
  source 1..20: mol_type = other DNA
gaagaataaacagtaaaatg

SEQ ID NO: 34499 - DNA, 20 bp, synthetic construct
  misc_feature 1..20: note = chemically synthesized
  source 1..20: mol_type = other DNA
taaaatgtggatttgatgat

SEQ ID NO: 34500 - DNA, 20 bp, synthetic construct
  misc_feature 1..20: note = chemically synthesized
  source 1..20: mol_type = other DNA
gatttgatgataagcttttg

SEQ ID NO: 34501 - DNA, 20 bp, synthetic construct
  misc_feature 1..20: note = chemically synthesized
  source 1..20: mol_type = other DNA
atttgatgataagcttttga

SEQ ID NO: 34502 - DNA, 20 bp, synthetic construct
  misc_feature 1..20: note = chemically synthesized
  source 1..20: mol_type = other DNA
ttgaaggcactaattgataa

SEQ ID NO: 34503 - DNA, 20 bp, synthetic construct
  misc_feature 1..20: note = chemically synthesized
  source 1..20: mol_type = other DNA
actgttgcatatcacctact

SEQ ID NO: 34504 - DNA, 20 bp, synthetic construct
  misc_feature 1..20: note = chemically synthesized
  source 1..20: mol_type = other DNA
ggtgatgcaaaaataaaaat

SEQ ID NO: 34505 - DNA, 20 bp, synthetic construct
  misc_feature 1..20: note = chemically synthesized
  source 1..20: mol_type = other DNA
aaaaataaaaattggtaatt

SEQ ID NO: 34506 - DNA, 20 bp, synthetic construct
  misc_feature 1..20: note = chemically synthesized
  source 1..20: mol_type = other DNA
aaaataaaaattggtaattt

SEQ ID NO: 34507 - DNA, 20 bp, synthetic construct
  misc_feature 1..20: note = chemically synthesized
  source 1..20: mol_type = other DNA
taaaaattggtaatttaggc

SEQ ID NO: 34508 - DNA, 20 bp, synthetic construct
  misc_feature 1..20: note = chemically synthesized
  source 1..20: mol_type = other DNA
ttggtaatttaggcaagatc

SEQ ID NO: 34509 - DNA, 20 bp, synthetic construct
  misc_feature 1..20: note = chemically synthesized
  source 1..20: mol_type = other DNA
tggtaatttaggcaagatca

SEQ ID NO: 34510 - DNA, 20 bp, synthetic construct
  misc_feature 1..20: note = chemically synthesized
  source 1..20: mol_type = other DNA
gtaatttaggcaagatcaag

SEQ ID NO: 34511 - DNA, 20 bp, synthetic construct
  misc_feature 1..20: note = chemically synthesized
  source 1..20: mol_type = other DNA
gaattttttttttaaaacta

SEQ ID NO: 34512 - DNA, 20 bp, synthetic construct
  misc_feature 1..20: note = chemically synthesized
  source 1..20: mol_type = other DNA
tttaaaactatggaatctga

SEQ ID NO: 34513 - DNA, 20 bp, synthetic construct
  misc_feature 1..20: note = chemically synthesized
  source 1..20: mol_type = other DNA
ttaaaactatggaatctgat

SEQ ID NO: 34514 - DNA, 20 bp, synthetic construct
  misc_feature 1..20: note = chemically synthesized
  source 1..20: mol_type = other DNA
aatctgatgggatttgacaa

SEQ ID NO: 34515 - DNA, 20 bp, synthetic construct
  misc_feature 1..20: note = chemically synthesized
  source 1..20: mol_type = other DNA
tgatgggatttgacaaaagt

SEQ ID NO: 34516 - DNA, 20 bp, synthetic construct
  misc_feature 1..20: note = chemically synthesized
  source 1..20: mol_type = other DNA
tgggatttgacaaaagtgag

SEQ ID NO: 34517 - DNA, 20 bp, synthetic construct
  misc_feature 1..20: note = chemically synthesized
  source 1..20: mol_type = other DNA
gggatttgacaaaagtgaga

SEQ ID NO: 34518 - DNA, 20 bp, synthetic construct
  misc_feature 1..20: note = chemically synthesized
  source 1..20: mol_type = other DNA
gagaaggctctgtgactcat

SEQ ID NO: 34519 - DNA, 20 bp, synthetic construct
  misc_feature 1..20: note = chemically synthesized
  source 1..20: mol_type = other DNA
ctgtgactcattagaattct

SEQ ID NO: 34520 - DNA, 20 bp, synthetic construct
  misc_feature 1..20: note = chemically synthesized
  source 1..20: mol_type = other DNA
tcattagaattctaagattt

SEQ ID NO: 34521 - DNA, 20 bp, synthetic construct
  misc_feature 1..20: note = chemically synthesized
  source 1..20: mol_type = other DNA
tagaattctaagatttcagc

SEQ ID NO: 34522 - DNA, 20 bp, synthetic construct
  misc_feature 1..20: note = chemically synthesized
  source 1..20: mol_type = other DNA
ttctaagatttcagctggtg

SEQ ID NO: 34523 - DNA, 20 bp, synthetic construct
  misc_feature 1..20: note = chemically synthesized
  source 1..20: mol_type = other DNA
tctaagatttcagctggtgc

SEQ ID NO: 34524 - DNA, 20 bp, synthetic construct
  misc_feature 1..20: note = chemically synthesized
  source 1..20: mol_type = other DNA
aagatttcagctggtgcagg

SEQ ID NO: 34525 - DNA, 20 bp, synthetic construct
  misc_feature 1..20: note = chemically synthesized
  source 1..20: mol_type = other DNA
ggtgcaggcagccaacctct

SEQ ID NO: 34526 - DNA, 20 bp, synthetic construct
  misc_feature 1..20: note = chemically synthesized
  source 1..20: mol_type = other DNA
agaatacataaattgtgtgt

SEQ ID NO: 34527 - DNA, 20 bp, synthetic construct
  misc_feature 1..20: note = chemically synthesized
  source 1..20: mol_type = other DNA
atacataaattgtgtgttgg

SEQ ID NO: 34528 - DNA, 20 bp, synthetic construct
  misc_feature 1..20: note = chemically synthesized
  source 1..20: mol_type = other DNA
aaattgtgtgttggtggcat

SEQ ID NO: 34529 - DNA, 20 bp, synthetic construct
  misc_feature 1..20: note = chemically synthesized
  source 1..20: mol_type = other DNA
tgtgtgttggtggcatgagc

SEQ ID NO: 34530 - DNA, 20 bp, synthetic construct
  misc_feature 1..20: note = chemically synthesized
  source 1..20: mol_type = other DNA
tgtgttggtggcatgagcca

SEQ ID NO: 34531 - DNA, 20 bp, synthetic construct
  misc_feature 1..20: note = chemically synthesized
  source 1..20: mol_type = other DNA
gtggcatgagccagagaaaa

SEQ ID NO: 34532 - DNA, 20 bp, synthetic construct
  misc_feature 1..20: note = chemically synthesized
  source 1..20: mol_type = other DNA
tggcatgagccagagaaaat

SEQ ID NO: 34533 - DNA, 20 bp, synthetic construct
  misc_feature 1..20: note = chemically synthesized
  source 1..20: mol_type = other DNA
aataggcccaccttctctta

SEQ ID NO: 34534 - DNA, 20 bp, synthetic construct
  misc_feature 1..20: note = chemically synthesized
  source 1..20: mol_type = other DNA
ggcccaccttctcttatggt

SEQ ID NO: 34535 - DNA, 20 bp, synthetic construct
  misc_feature 1..20: note = chemically synthesized
  source 1..20: mol_type = other DNA
accttctcttatggttggtt

SEQ ID NO: 34536 - DNA, 20 bp, synthetic construct
  misc_feature 1..20: note = chemically synthesized
  source 1..20: mol_type = other DNA
tacatctcatatactattga

SEQ ID NO: 34537 - DNA, 20 bp, synthetic construct
  misc_feature 1..20: note = chemically synthesized
  source 1..20: mol_type = other DNA
catctcatatactattgaaa

SEQ ID NO: 34538 - DNA, 20 bp, synthetic construct
  misc_feature 1..20: note = chemically synthesized
  source 1..20: mol_type = other DNA
taaatttatgcacgatttac

SEQ ID NO: 34539 - DNA, 20 bp, synthetic construct
  misc_feature 1..20: note = chemically synthesized
  source 1..20: mol_type = other DNA
gacctctttctgtccatgaa

SEQ ID NO: 34540 - DNA, 20 bp, synthetic construct
  misc_feature 1..20: note = chemically synthesized
  source 1..20: mol_type = other DNA
tccatgaaaagaatgcatcc

SEQ ID NO: 34541 - DNA, 20 bp, synthetic construct
  misc_feature 1..20: note = chemically synthesized
  source 1..20: mol_type = other DNA
aagaatgcatccaagattac

SEQ ID NO: 34542 - DNA, 20 bp, synthetic construct
  misc_feature 1..20: note = chemically synthesized
  source 1..20: mol_type = other DNA
gattactggactttcatttt

SEQ ID NO: 34543 - DNA, 20 bp, synthetic construct
  misc_feature 1..20: note = chemically synthesized
  source 1..20: mol_type = other DNA
tactggactttcattttcag

SEQ ID NO: 34544 - DNA, 20 bp, synthetic construct
  misc_feature 1..20: note = chemically synthesized
  source 1..20: mol_type = other DNA
attttcagaagaatttgttg

SEQ ID NO: 34545 - DNA, 20 bp, synthetic construct
  misc_feature 1..20: note = chemically synthesized
  source 1..20: mol_type = other DNA
agaagaatttgttgaagttt

SEQ ID NO: 34546 - DNA, 20 bp, synthetic construct
  misc_feature 1..20: note = chemically synthesized
  source 1..20: mol_type = other DNA
ctttctaacaataatgatct

SEQ ID NO: 34547 - DNA, 20 bp, synthetic construct
  misc_feature 1..20: note = chemically synthesized
  source 1..20: mol_type = other DNA
tttctaacaataatgatctt

SEQ ID NO: 34548 - DNA, 20 bp, synthetic construct
  misc_feature 1..20: note = chemically synthesized
  source 1..20: mol_type = other DNA
taacaataatgatcttggga

SEQ ID NO: 34549 - DNA, 20 bp, synthetic construct
  misc_feature 1..20: note = chemically synthesized
  source 1..20: mol_type = other DNA
tgggaaagtaatttaatctt

SEQ ID NO: 34550 - DNA, 20 bp, synthetic construct
  misc_feature 1..20: note = chemically synthesized
  source 1..20: mol_type = other DNA
agtaatttaatcttgagatt

SEQ ID NO: 34551 - DNA, 20 bp, synthetic construct
  misc_feature 1..20: note = chemically synthesized
  source 1..20: mol_type = other DNA
atttggttacataacctgta

SEQ ID NO: 34552 - DNA, 20 bp, synthetic construct
  misc_feature 1..20: note = chemically synthesized
  source 1..20: mol_type = other DNA
acataacctgtaaagactac

SEQ ID NO: 34553 - DNA, 20 bp, synthetic construct
  misc_feature 1..20: note = chemically synthesized
  source 1..20: mol_type = other DNA
actagtgatttctgtcttct

SEQ ID NO: 34554 - DNA, 20 bp, synthetic construct
  misc_feature 1..20: note = chemically synthesized
  source 1..20: mol_type = other DNA
tcagtcattctcttgacaca

SEQ ID NO: 34555 - DNA, 20 bp, synthetic construct
  misc_feature 1..20: note = chemically synthesized
  source 1..20: mol_type = other DNA
tcattctcttgacacaaagt

SEQ ID NO: 34556 - DNA, 20 bp, synthetic construct
  misc_feature 1..20: note = chemically synthesized
  source 1..20: mol_type = other DNA
cattctcttgacacaaagta

SEQ ID NO: 34557 - DNA, 20 bp, synthetic construct
  misc_feature 1..20: note = chemically synthesized
  source 1..20: mol_type = other DNA
attctcttgacacaaagtaa

SEQ ID NO: 34558 - DNA, 20 bp, synthetic construct
  misc_feature 1..20: note = chemically synthesized
  source 1..20: mol_type = other DNA
ttctcttgacacaaagtaag

SEQ ID NO: 34559 - DNA, 20 bp, synthetic construct
  misc_feature 1..20: note = chemically synthesized
  source 1..20: mol_type = other DNA
gtaaggggaaatgttttgta

SEQ ID NO: 34560 - DNA, 20 bp, synthetic construct
  misc_feature 1..20: note = chemically synthesized
  source 1..20: mol_type = other DNA
aaggggaaatgttttgtaaa

SEQ ID NO: 34561 - DNA, 20 bp, synthetic construct
  misc_feature 1..20: note = chemically synthesized
  source 1..20: mol_type = other DNA
gggaaatgttttgtaaagag

SEQ ID NO: 34562 - DNA, 20 bp, synthetic construct
  misc_feature 1..20: note = chemically synthesized
  source 1..20: mol_type = other DNA
ttgtgtttttgttattgttt

SEQ ID NO: 34563 - DNA, 20 bp, synthetic construct
  misc_feature 1..20: note = chemically synthesized
  source 1..20: mol_type = other DNA
gtgtttttgttattgtttca

SEQ ID NO: 34564 - DNA, 20 bp, synthetic construct
  misc_feature 1..20: note = chemically synthesized
  source 1..20: mol_type = other DNA
tttttgttattgtttcagag

SEQ ID NO: 34565 - DNA, 20 bp, synthetic construct
  misc_feature 1..20: note = chemically synthesized
  source 1..20: mol_type = other DNA
gtacctcctttctctttctc

SEQ ID NO: 34566 - DNA, 20 bp, synthetic construct
  misc_feature 1..20: note = chemically synthesized
  source 1..20: mol_type = other DNA
ctcctttctctttctctagt

SEQ ID NO: 34567 - DNA, 20 bp, synthetic construct
  misc_feature 1..20: note = chemically synthesized
  source 1..20: mol_type = other DNA
tttctctagtgagtacatgt

SEQ ID NO: 34568 - DNA, 20 bp, synthetic construct
  misc_feature 1..20: note = chemically synthesized
  source 1..20: mol_type = other DNA
ttctctagtgagtacatgtc

SEQ ID NO: 34569 - DNA, 20 bp, synthetic construct
  misc_feature 1..20: note = chemically synthesized
  source 1..20: mol_type = other DNA
acatgtcaggattattcacc

SEQ ID NO: 34570 - DNA, 20 bp, synthetic construct
  misc_feature 1..20: note = chemically synthesized
  source 1..20: mol_type = other DNA
atgtcaggattattcaccca

SEQ ID NO: 34571 - DNA, 20 bp, synthetic construct
  misc_feature 1..20: note = chemically synthesized
  source 1..20: mol_type = other DNA
tgtcaggattattcacccag

SEQ ID NO: 34572 - DNA, 20 bp, synthetic construct
  misc_feature 1..20: note = chemically synthesized
  source 1..20: mol_type = other DNA
aatgatttcctttttttctg

SEQ ID NO: 34573 - DNA, 20 bp, synthetic construct
  misc_feature 1..20: note = chemically synthesized
  source 1..20: mol_type = other DNA
gatttcctttttttctgtgg

SEQ ID NO: 34574 - DNA, 20 bp, synthetic construct
  misc_feature 1..20: note = chemically synthesized
  source 1..20: mol_type = other DNA
ctttttttctgtggaagcct

SEQ ID NO: 34575 - DNA, 20 bp, synthetic construct
  misc_feature 1..20: note = chemically synthesized
  source 1..20: mol_type = other DNA
tttttttctgtggaagcctt

SEQ ID NO: 34576 - DNA, 20 bp, synthetic construct
  misc_feature 1..20: note = chemically synthesized
  source 1..20: mol_type = other DNA
ttctgtggaagccttgggaa

SEQ ID NO: 34577 - DNA, 20 bp, synthetic construct
  misc_feature 1..20: note = chemically synthesized
  source 1..20: mol_type = other DNA
gaagccttgggaacagatat

SEQ ID NO: 34578 - DNA, 20 bp, synthetic construct
  misc_feature 1..20: note = chemically synthesized
  source 1..20: mol_type = other DNA
gaacagatataagatgatga

SEQ ID NO: 34579 - DNA, 20 bp, synthetic construct
  misc_feature 1..20: note = chemically synthesized
  source 1..20: mol_type = other DNA
aacagatataagatgatgat

SEQ ID NO: 34580 - DNA, 20 bp, synthetic construct
  misc_feature 1..20: note = chemically synthesized
  source 1..20: mol_type = other DNA
acagatataagatgatgatg

SEQ ID NO: 34581 - DNA, 20 bp, synthetic construct
  misc_feature 1..20: note = chemically synthesized
  source 1..20: mol_type = other DNA
taagatgatgatggggtttt

SEQ ID NO: 34582 - DNA, 20 bp, synthetic construct
  misc_feature 1..20: note = chemically synthesized
  source 1..20: mol_type = other DNA
aagatgatgatggggttttt

SEQ ID NO: 34583 - DNA, 20 bp, synthetic construct
  misc_feature 1..20: note = chemically synthesized
  source 1..20: mol_type = other DNA
gatgatgatggggtttttag

SEQ ID NO: 34584 - DNA, 20 bp, synthetic construct
  misc_feature 1..20: note = chemically synthesized
  source 1..20: mol_type = other DNA
cctgtgtttgactttaaata

SEQ ID NO: 34585 - DNA, 20 bp, synthetic construct
  misc_feature 1..20: note = chemically synthesized
  source 1..20: mol_type = other DNA
taaataaagatattaaacta

SEQ ID NO: 34586 - DNA, 20 bp, synthetic construct
  misc_feature 1..20: note = chemically synthesized
  source 1..20: mol_type = other DNA
taaactatagtttctctaat

SEQ ID NO: 34587 - DNA, 20 bp, synthetic construct
  misc_feature 1..20: note = chemically synthesized
  source 1..20: mol_type = other DNA
actatagtttctctaatcag

SEQ ID NO: 34588 - DNA, 20 bp, synthetic construct
  misc_feature 1..20: note = chemically synthesized
  source 1..20: mol_type = other DNA
cagataaaatgtgatatgtc

SEQ ID NO: 34589 - DNA, 20 bp, synthetic construct
  misc_feature 1..20: note = chemically synthesized
  source 1..20: mol_type = other DNA
agataaaatgtgatatgtct

SEQ ID NO: 34590 - DNA, 20 bp, synthetic construct
  misc_feature 1..20: note = chemically synthesized
  source 1..20: mol_type = other DNA
taaaatgtgatatgtctggg

SEQ ID NO: 34591 - DNA, 20 bp, synthetic construct
  misc_feature 1..20: note = chemically synthesized
  source 1..20: mol_type = other DNA
aaaatgtgatatgtctgggt

SEQ ID NO: 34592 - DNA, 20 bp, synthetic construct
  misc_feature 1..20: note = chemically synthesized
  source 1..20: mol_type = other DNA
tgtgatatgtctgggtggga

SEQ ID NO: 34593 - DNA, 20 bp, synthetic construct
  misc_feature 1..20: note = chemically synthesized
  source 1..20: mol_type = other DNA
gtgatatgtctgggtgggaa

SEQ ID NO: 34594 - DNA, 20 bp, synthetic construct
  misc_feature 1..20: note = chemically synthesized
  source 1..20: mol_type = other DNA
tgatatgtctgggtgggaaa

SEQ ID NO: 34595 - DNA, 20 bp, synthetic construct
  misc_feature 1..20: note = chemically synthesized
  source 1..20: mol_type = other DNA
atgtctgggtgggaaaggga

SEQ ID NO: 34596 - DNA, 20 bp, synthetic construct
  misc_feature 1..20: note = chemically synthesized
  source 1..20: mol_type = other DNA
tgtctgggtgggaaagggaa

SEQ ID NO: 34597 - DNA, 20 bp, synthetic construct
  misc_feature 1..20: note = chemically synthesized
  source 1..20: mol_type = other DNA
tctgggtgggaaagggaaag

SEQ ID NO: 34598 - DNA, 20 bp, synthetic construct
  misc_feature 1..20: note = chemically synthesized
  source 1..20: mol_type = other DNA
gtgggaaagggaaaggagaa

SEQ ID NO: 34599 - DNA, 20 bp, synthetic construct
  misc_feature 1..20: note = chemically synthesized
  source 1..20: mol_type = other DNA
ggaaaggagaaaagattgat

SEQ ID NO: 34600 - DNA, 20 bp, synthetic construct
  misc_feature 1..20: note = chemically synthesized
  source 1..20: mol_type = other DNA
aaaagattgatgagccaatg

SEQ ID NO: 34601 - DNA, 20 bp, synthetic construct
  misc_feature 1..20: note = chemically synthesized
  source 1..20: mol_type = other DNA
aaagattgatgagccaatgt

SEQ ID NO: 34602 - DNA, 20 bp, synthetic construct
  misc_feature 1..20: note = chemically synthesized
  source 1..20: mol_type = other DNA
caatgtgggaacttctgaca

SEQ ID NO: 34603 - DNA, 20 bp, synthetic construct
  misc_feature 1..20: note = chemically synthesized
  source 1..20: mol_type = other DNA
ggaacttctgacatagctaa

SEQ ID NO: 34604 - DNA, 20 bp, synthetic construct
  misc_feature 1..20: note = chemically synthesized
  source 1..20: mol_type = other DNA
acatagctaaaagtaacgtt

SEQ ID NO: 34605 - DNA, 20 bp, synthetic construct
  misc_feature 1..20: note = chemically synthesized
  source 1..20: mol_type = other DNA
gctaaaagtaacgttgagcc

SEQ ID NO: 34606 - DNA, 20 bp, synthetic construct
  misc_feature 1..20: note = chemically synthesized
  source 1..20: mol_type = other DNA
ctaaaagtaacgttgagcct

SEQ ID NO: 34607 - DNA, 20 bp, synthetic construct
  misc_feature 1..20: note = chemically synthesized
  source 1..20: mol_type = other DNA
taaaagtaacgttgagcctg

SEQ ID NO: 34608 - DNA, 20 bp, synthetic construct
  misc_feature 1..20: note = chemically synthesized
  source 1..20: mol_type = other DNA
taacgttgagcctggggcat

SEQ ID NO: 34609 - DNA, 20 bp, synthetic construct
  misc_feature 1..20: note = chemically synthesized
  source 1..20: mol_type = other DNA
aacgttgagcctggggcatt

SEQ ID NO: 34610 - DNA, 20 bp, synthetic construct
  misc_feature 1..20: note = chemically synthesized
  source 1..20: mol_type = other DNA
gagcctggggcattgggact

SEQ ID NO: 34611 - DNA, 20 bp, synthetic construct
  misc_feature 1..20: note = chemically synthesized
  source 1..20: mol_type = other DNA
agcctggggcattgggactg

SEQ ID NO: 34612 - DNA, 20 bp, synthetic construct
  misc_feature 1..20: note = chemically synthesized
  source 1..20: mol_type = other DNA
gcctggggcattgggactga

SEQ ID NO: 34613 - DNA, 20 bp, synthetic construct
  misc_feature 1..20: note = chemically synthesized
  source 1..20: mol_type = other DNA
tggggcattgggactgaggg

SEQ ID NO: 34614 - DNA, 20 bp, synthetic construct
  misc_feature 1..20: note = chemically synthesized
  source 1..20: mol_type = other DNA
ggcattgggactgagggaag

SEQ ID NO: 34615 - DNA, 20 bp, synthetic construct
  misc_feature 1..20: note = chemically synthesized
  source 1..20: mol_type = other DNA
cattgggactgagggaagta

SEQ ID NO: 34616 - DNA, 20 bp, synthetic construct
  misc_feature 1..20: note = chemically synthesized
  source 1..20: mol_type = other DNA
attgggactgagggaagtag

SEQ ID NO: 34617 - DNA, 20 bp, synthetic construct
  misc_feature 1..20: note = chemically synthesized
  source 1..20: mol_type = other DNA
ttgggactgagggaagtaga

SEQ ID NO: 34618 - DNA, 20 bp, synthetic construct
  misc_feature 1..20: note = chemically synthesized
  source 1..20: mol_type = other DNA
tgggactgagggaagtagag

SEQ ID NO: 34619 - DNA, 20 bp, synthetic construct
  misc_feature 1..20: note = chemically synthesized
  source 1..20: mol_type = other DNA
actgagggaagtagagggga

SEQ ID NO: 34620 - DNA, 20 bp, synthetic construct
  misc_feature 1..20: note = chemically synthesized
  source 1..20: mol_type = other DNA
aaagcaactctgtcctcaaa

SEQ ID NO: 34621 - DNA, 20 bp, synthetic construct
  misc_feature 1..20: note = chemically synthesized
  source 1..20: mol_type = other DNA
caactctgtcctcaaaaagt

SEQ ID NO: 34622 - DNA, 20 bp, synthetic construct
  misc_feature 1..20: note = chemically synthesized
  source 1..20: mol_type = other DNA
ctgtcctcaaaaagtgagaa

SEQ ID NO: 34623 - DNA, 20 bp, synthetic construct
  misc_feature 1..20: note = chemically synthesized
  source 1..20: mol_type = other DNA
tgtcctcaaaaagtgagaaa

SEQ ID NO: 34624 - DNA, 20 bp, synthetic construct
  misc_feature 1..20: note = chemically synthesized
  source 1..20: mol_type = other DNA
tcctcaaaaagtgagaaaag

SEQ ID NO: 34625 - DNA, 20 bp, synthetic construct
  misc_feature 1..20: note = chemically synthesized
  source 1..20: mol_type = other DNA
cctcaaaaagtgagaaaagg

SEQ ID NO: 34626 - DNA, 20 bp, synthetic construct
  misc_feature 1..20: note = chemically synthesized
  source 1..20: mol_type = other DNA
ttattgctcaatctgcctgc

SEQ ID NO: 34627 - DNA, 20 bp, synthetic construct
  misc_feature 1..20: note = chemically synthesized
  source 1..20: mol_type = other DNA
tgctcaatctgcctgccagt

SEQ ID NO: 34628 - DNA, 20 bp, synthetic construct
  misc_feature 1..20: note = chemically synthesized
  source 1..20: mol_type = other DNA
ctcaatctgcctgccagtga

SEQ ID NO: 34629 - DNA, 20 bp, synthetic construct
  misc_feature 1..20: note = chemically synthesized
  source 1..20: mol_type = other DNA
tcaatctgcctgccagtgag

SEQ ID NO: 34630 - DNA, 20 bp, synthetic construct
  misc_feature 1..20: note = chemically synthesized
  source 1..20: mol_type = other DNA
ctgcctgccagtgagaggtt

SEQ ID NO: 34631 - DNA, 20 bp, synthetic construct
  misc_feature 1..20: note = chemically synthesized
  source 1..20: mol_type = other DNA
tgagaggttcagacaatact

SEQ ID NO: 34632 - DNA, 20 bp, synthetic construct
  misc_feature 1..20: note = chemically synthesized
  source 1..20: mol_type = other DNA
cagacaatactcagcttatg

SEQ ID NO: 34633 - DNA, 20 bp, synthetic construct
  misc_feature 1..20: note = chemically synthesized
  source 1..20: mol_type = other DNA
agacaatactcagcttatgc

SEQ ID NO: 34634 - DNA, 20 bp, synthetic construct
  misc_feature 1..20: note = chemically synthesized
  source 1..20: mol_type = other DNA
actcagcttatgcaggatta

SEQ ID NO: 34635 - DNA, 20 bp, synthetic construct
  misc_feature 1..20: note = chemically synthesized
  source 1..20: mol_type = other DNA
cagcttatgcaggattaaag

SEQ ID NO: 34636 - DNA, 20 bp, synthetic construct
  misc_feature 1..20: note = chemically synthesized
  source 1..20: mol_type = other DNA
cttatgcaggattaaagaag

SEQ ID NO: 34637 - DNA, 20 bp, synthetic construct
  misc_feature 1..20: note = chemically synthesized
  source 1..20: mol_type = other DNA
gcaggattaaagaagcagta

SEQ ID NO: 34638 - DNA, 20 bp, synthetic construct
  misc_feature 1..20: note = chemically synthesized
  source 1..20: mol_type = other DNA
tggcaaataaaaattgtaca

SEQ ID NO: 34639 - DNA, 20 bp, synthetic construct
  misc_feature 1..20: note = chemically synthesized
  source 1..20: mol_type = other DNA
ggcaaataaaaattgtacat

SEQ ID NO: 34640 - DNA, 20 bp, synthetic construct
  misc_feature 1..20: note = chemically synthesized
  source 1..20: mol_type = other DNA
tataacttattgttttatta

SEQ ID NO: 34641 - DNA, 20 bp, synthetic construct
  misc_feature 1..20: note = chemically synthesized
  source 1..20: mol_type = other DNA
ataacttattgttttattat

SEQ ID NO: 34642 - DNA, 20 bp, synthetic construct
  misc_feature 1..20: note = chemically synthesized
  source 1..20: mol_type = other DNA
cataataactttaatttttt

SEQ ID NO: 34643 - DNA, 20 bp, synthetic construct
  misc_feature 1..20: note = chemically synthesized
  source 1..20: mol_type = other DNA
aataactttaatttttttgg

SEQ ID NO: 34644 - DNA, 20 bp, synthetic construct
  misc_feature 1..20: note = chemically synthesized
  source 1..20: mol_type = other DNA
ttttggtagtaaaaatatgt

SEQ ID NO: 34645 - DNA, 20 bp, synthetic construct
  misc_feature 1..20: note = chemically synthesized
  source 1..20: mol_type = other DNA
tttggtagtaaaaatatgtg

SEQ ID NO: 34646 - DNA, 20 bp, synthetic construct
  misc_feature 1..20: note = chemically synthesized
  source 1..20: mol_type = other DNA
atatgtgaggtctgctttct

SEQ ID NO: 34647 - DNA, 20 bp, synthetic construct
  misc_feature 1..20: note = chemically synthesized
  source 1..20: mol_type = other DNA
attttaaatatacctaaata

SEQ ID NO: 34648 - DNA, 20 bp, synthetic construct
  misc_feature 1..20: note = chemically synthesized
  source 1..20: mol_type = other DNA
taaatatacctaaataaagc

SEQ ID NO: 34649 - DNA, 20 bp, synthetic construct
  misc_feature 1..20: note = chemically synthesized
  source 1..20: mol_type = other DNA
aaatatacctaaataaagct

SEQ ID NO: 34650 - DNA, 20 bp, synthetic construct
  misc_feature 1..20: note = chemically synthesized
  source 1..20: mol_type = other DNA
atatacctaaataaagctgg

SEQ ID NO: 34651 - DNA, 20 bp, synthetic construct
  misc_feature 1..20: note = chemically synthesized
  source 1..20: mol_type = other DNA
tatacctaaataaagctggg

SEQ ID NO: 34652 - DNA, 20 bp, synthetic construct
  misc_feature 1..20: note = chemically synthesized
  source 1..20: mol_type = other DNA
atacctaaataaagctggga

SEQ ID NO: 34653 - DNA, 20 bp, synthetic construct
  misc_feature 1..20: note = chemically synthesized
  source 1..20: mol_type = other DNA
taaataaagctgggagggaa

SEQ ID NO: 34654 - DNA, 20 bp, synthetic construct
  misc_feature 1..20: note = chemically synthesized
  source 1..20: mol_type = other DNA
ctgggagggaaaagataata

SEQ ID NO: 34655 - DNA, 20 bp, synthetic construct
  misc_feature 1..20: note = chemically synthesized
  source 1..20: mol_type = other DNA
gataatacagaacattaatc

SEQ ID NO: 34656 - DNA, 20 bp, synthetic construct
  misc_feature 1..20: note = chemically synthesized
  source 1..20: mol_type = other DNA
attgataaattaaaaaaaaa

SEQ ID NO: 34657 - DNA, 20 bp, synthetic construct
  misc_feature 1..20: note = chemically synthesized
  source 1..20: mol_type = other DNA
ttgataaattaaaaaaaaac

SEQ ID NO: 34658 - DNA, 20 bp, synthetic construct
  misc_feature 1..20: note = chemically synthesized
  source 1..20: mol_type = other DNA
gataaattaaaaaaaaacag

SEQ ID NO: 34659 - DNA, 20 bp, synthetic construct
  misc_feature 1..20: note = chemically synthesized
  source 1..20: mol_type = other DNA
aaattaaaaaaaaacaggag

SEQ ID NO: 34660 - DNA, 20 bp, synthetic construct
  misc_feature 1..20: note = chemically synthesized
  source 1..20: mol_type = other DNA
aattaaaaaaaaacaggagt

SEQ ID NO: 34661 - DNA, 20 bp, synthetic construct
  misc_feature 1..20: note = chemically synthesized
  source 1..20: mol_type = other DNA
aaaaacaggagtaggaatac

SEQ ID NO: 34662 - DNA, 20 bp, synthetic construct
  misc_feature 1..20: note = chemically synthesized
  source 1..20: mol_type = other DNA
acaggagtaggaataccaga

SEQ ID NO: 34663 - DNA, 20 bp, synthetic construct
  misc_feature 1..20: note = chemically synthesized
  source 1..20: mol_type = other DNA
caggagtaggaataccagat

SEQ ID NO: 34664 - DNA, 20 bp, synthetic construct
  misc_feature 1..20: note = chemically synthesized
  source 1..20: mol_type = other DNA
aggagtaggaataccagata

SEQ ID NO: 34665 - DNA, 20 bp, synthetic construct
  misc_feature 1..20: note = chemically synthesized
  source 1..20: mol_type = other DNA
aataccagatagggaaaata

SEQ ID NO: 34666 - DNA, 20 bp, synthetic construct
  misc_feature 1..20: note = chemically synthesized
  source 1..20: mol_type = other DNA
cagatagggaaaataaagct

SEQ ID NO: 34667 - DNA, 20 bp, synthetic construct
  misc_feature 1..20: note = chemically synthesized
  source 1..20: mol_type = other DNA
aaagctgagaaacaaatgta

SEQ ID NO: 34668 - DNA, 20 bp, synthetic construct
  misc_feature 1..20: note = chemically synthesized
  source 1..20: mol_type = other DNA
ttgaatttctaccgtgtgtc

SEQ ID NO: 34669 - DNA, 20 bp, synthetic construct
  misc_feature 1..20: note = chemically synthesized
  source 1..20: mol_type = other DNA
ttctaccgtgtgtcaagtat

SEQ ID NO: 34670 - DNA, 20 bp, synthetic construct
  misc_feature 1..20: note = chemically synthesized
  source 1..20: mol_type = other DNA
ccgtgtgtcaagtattggac

SEQ ID NO: 34671 - DNA, 20 bp, synthetic construct
  misc_feature 1..20: note = chemically synthesized
  source 1..20: mol_type = other DNA
cgtgtgtcaagtattggact

SEQ ID NO: 34672 - DNA, 20 bp, synthetic construct
  misc_feature 1..20: note = chemically synthesized
  source 1..20: mol_type = other DNA
gtgtgtcaagtattggactg

SEQ ID NO: 34673 - DNA, 20 bp, synthetic construct
  misc_feature 1..20: note = chemically synthesized
  source 1..20: mol_type = other DNA
attatatacacctcattttt

SEQ ID NO: 34674 - DNA, 20 bp, synthetic construct
  misc_feature 1..20: note = chemically synthesized
  source 1..20: mol_type = other DNA
ttatatacacctcatttttt

SEQ ID NO: 34675 - DNA, 20 bp, synthetic construct
  misc_feature 1..20: note = chemically synthesized
  source 1..20: mol_type = other DNA
tatacacctcattttttggg

SEQ ID NO: 34676 - DNA, 20 bp, synthetic construct
  misc_feature 1..20: note = chemically synthesized
  source 1..20: mol_type = other DNA
tttgggaagaatccttaaaa

SEQ ID NO: 34677 - DNA, 20 bp, synthetic construct
  misc_feature 1..20: note = chemically synthesized
  source 1..20: mol_type = other DNA
ctgttttcatattgaaaact

SEQ ID NO: 34678 - DNA, 20 bp, synthetic construct
  misc_feature 1..20: note = chemically synthesized
  source 1..20: mol_type = other DNA
gtgctttcacttgattcact

SEQ ID NO: 34679 - DNA, 20 bp, synthetic construct
  misc_feature 1..20: note = chemically synthesized
  source 1..20: mol_type = other DNA
gattcactcagttgcttttg

SEQ ID NO: 34680 - DNA, 20 bp, synthetic construct
  misc_feature 1..20: note = chemically synthesized
  source 1..20: mol_type = other DNA
cagttgcttttgtggtatat

SEQ ID NO: 34681 - DNA, 20 bp, synthetic construct
  misc_feature 1..20: note = chemically synthesized
  source 1..20: mol_type = other DNA
tggtatatgagatgatctgt

SEQ ID NO: 34682 - DNA, 20 bp, synthetic construct
  misc_feature 1..20: note = chemically synthesized
  source 1..20: mol_type = other DNA
atgagatgatctgtgagttt

SEQ ID NO: 34683 - DNA, 20 bp, synthetic construct
  misc_feature 1..20: note = chemically synthesized
  source 1..20: mol_type = other DNA
gagatgatctgtgagtttca

SEQ ID NO: 34684 - DNA, 20 bp, synthetic construct
  misc_feature 1..20: note = chemically synthesized
  source 1..20: mol_type = other DNA
agatgatctgtgagtttcag

SEQ ID NO: 34685 - DNA, 20 bp, synthetic construct
  misc_feature 1..20: note = chemically synthesized
  source 1..20: mol_type = other DNA
gatgatctgtgagtttcaga

SEQ ID NO: 34686 - DNA, 20 bp, synthetic construct
  misc_feature 1..20: note = chemically synthesized
  source 1..20: mol_type = other DNA
atgatctgtgagtttcagag

SEQ ID NO: 34687 - DNA, 20 bp, synthetic construct
  misc_feature 1..20: note = chemically synthesized
  source 1..20: mol_type = other DNA
aaacctttgcctcatccctg

SEQ ID NO: 34688 - DNA, 20 bp, synthetic construct
  misc_feature 1..20: note = chemically synthesized
  source 1..20: mol_type = other DNA
tgcagccattcaccctcttc

SEQ ID NO: 34689 - DNA, 20 bp, synthetic construct
  misc_feature 1..20: note = chemically synthesized
  source 1..20: mol_type = other DNA
gcagccattcaccctcttcc

SEQ ID NO: 34690 - DNA, 20 bp, synthetic construct
  misc_feature 1..20: note = chemically synthesized
  source 1..20: mol_type = other DNA
cagccattcaccctcttcca

SEQ ID NO: 34691 - DNA, 20 bp, synthetic construct
  misc_feature 1..20: note = chemically synthesized
  source 1..20: mol_type = other DNA
ctcttccagggtctctgtca

SEQ ID NO: 34692 - DNA, 20 bp, synthetic construct
  misc_feature 1..20: note = chemically synthesized
  source 1..20: mol_type = other DNA
ccagggtctctgtcatagaa

SEQ ID NO: 34693 - DNA, 20 bp, synthetic construct
  misc_feature 1..20: note = chemically synthesized
  source 1..20: mol_type = other DNA
ctctgtcatagaatagactt

SEQ ID NO: 34694 - DNA, 20 bp, synthetic construct
  misc_feature 1..20: note = chemically synthesized
  source 1..20: mol_type = other DNA
agacttgagtttttattaat

SEQ ID NO: 34695 - DNA, 20 bp, synthetic construct
  misc_feature 1..20: note = chemically synthesized
  source 1..20: mol_type = other DNA
taatgagaaactaattctca

SEQ ID NO: 34696 - DNA, 20 bp, synthetic construct
  misc_feature 1..20: note = chemically synthesized
  source 1..20: mol_type = other DNA
aactctgccgcataaactga

SEQ ID NO: 34697 - DNA, 20 bp, synthetic construct
  misc_feature 1..20: note = chemically synthesized
  source 1..20: mol_type = other DNA
cataaactgatggctctatg

SEQ ID NO: 34698 - DNA, 20 bp, synthetic construct
  misc_feature 1..20: note = chemically synthesized
  source 1..20: mol_type = other DNA
atggctctatgcagacacct

SEQ ID NO: 34699 - DNA, 20 bp, synthetic construct
  misc_feature 1..20: note = chemically synthesized
  source 1..20: mol_type = other DNA
gctctatgcagacacctcag

SEQ ID NO: 34700 - DNA, 20 bp, synthetic construct
  misc_feature 1..20: note = chemically synthesized
  source 1..20: mol_type = other DNA
ctctatgcagacacctcagc

SEQ ID NO: 34701 - DNA, 20 bp, synthetic construct
  misc_feature 1..20: note = chemically synthesized
  source 1..20: mol_type = other DNA
ctatgcagacacctcagcag

SEQ ID NO: 34702 - DNA, 20 bp, synthetic construct
  misc_feature 1..20: note = chemically synthesized
  source 1..20: mol_type = other DNA
cacctcagcaggagcccatt

SEQ ID NO: 34703 - DNA, 20 bp, synthetic construct
  misc_feature 1..20: note = chemically synthesized
  source 1..20: mol_type = other DNA
atattctctcaccttccctt

SEQ ID NO: 34704 - DNA, 20 bp, synthetic construct
  misc_feature 1..20: note = chemically synthesized
  source 1..20: mol_type = other DNA
ctgacactcttttctgtctc

SEQ ID NO: 34705 - DNA, 20 bp, synthetic construct
  misc_feature 1..20: note = chemically synthesized
  source 1..20: mol_type = other DNA
tcttttctgtctcaagcact

SEQ ID NO: 34706 - DNA, 20 bp, synthetic construct
  misc_feature 1..20: note = chemically synthesized
  source 1..20: mol_type = other DNA
tttttttacccccttacctt

SEQ ID NO: 34707 - DNA, 20 bp, synthetic construct
  misc_feature 1..20: note = chemically synthesized
  source 1..20: mol_type = other DNA
ggctattatcctttctgtga

SEQ ID NO: 34708 - DNA, 20 bp, synthetic construct
  misc_feature 1..20: note = chemically synthesized
  source 1..20: mol_type = other DNA
tttctgtgatggttaatatt

SEQ ID NO: 34709 - DNA, 20 bp, synthetic construct
  misc_feature 1..20: note = chemically synthesized
  source 1..20: mol_type = other DNA
atattgagtgcaaacttgat

SEQ ID NO: 34710 - DNA, 20 bp, synthetic construct
  misc_feature 1..20: note = chemically synthesized
  source 1..20: mol_type = other DNA
gtgcaaacttgattggattg

SEQ ID NO: 34711 - DNA, 20 bp, synthetic construct
  misc_feature 1..20: note = chemically synthesized
  source 1..20: mol_type = other DNA
tgcaaacttgattggattga

SEQ ID NO: 34712 - DNA, 20 bp, synthetic construct
  misc_feature 1..20: note = chemically synthesized
  source 1..20: mol_type = other DNA
tgattggattgaaggatgca

SEQ ID NO: 34713 - DNA, 20 bp, synthetic construct
  misc_feature 1..20: note = chemically synthesized
  source 1..20: mol_type = other DNA
aggatgcaaagtattgttcc

SEQ ID NO: 34714 - DNA, 20 bp, synthetic construct
  misc_feature 1..20: note = chemically synthesized
  source 1..20: mol_type = other DNA
ggatgcaaagtattgttcct

SEQ ID NO: 34715 - DNA, 20 bp, synthetic construct
  misc_feature 1..20: note = chemically synthesized
  source 1..20: mol_type = other DNA
attgttcctgggtgtgctgt

SEQ ID NO: 34716 - DNA, 20 bp, synthetic construct
  misc_feature 1..20: note = chemically synthesized
  source 1..20: mol_type = other DNA
ttgttcctgggtgtgctgta

SEQ ID NO: 34717 - DNA, 20 bp, synthetic construct
  misc_feature 1..20: note = chemically synthesized
  source 1..20: mol_type = other DNA
tgttcctgggtgtgctgtaa

SEQ ID NO: 34718 - DNA, 20 bp, synthetic construct
  misc_feature 1..20: note = chemically synthesized
  source 1..20: mol_type = other DNA
gtgctgtaagggtgttgcca

SEQ ID NO: 34719 - DNA, 20 bp, synthetic construct
  misc_feature 1..20: note = chemically synthesized
  source 1..20: mol_type = other DNA
tgctgtaagggtgttgccaa

SEQ ID NO: 34720 - DNA, 20 bp, synthetic construct
  misc_feature 1..20: note = chemically synthesized
  source 1..20: mol_type = other DNA
ctgtaagggtgttgccaaag

SEQ ID NO: 34721 - DNA, 20 bp, synthetic construct
  misc_feature 1..20: note = chemically synthesized
  source 1..20: mol_type = other DNA
gccaaaggagattaacattt

SEQ ID NO: 34722 - DNA, 20 bp, synthetic construct
  misc_feature 1..20: note = chemically synthesized
  source 1..20: mol_type = other DNA
aaggagattaacatttgagt

SEQ ID NO: 34723 - DNA, 20 bp, synthetic construct
  misc_feature 1..20: note = chemically synthesized
  source 1..20: mol_type = other DNA
gagattaacatttgagtcag

SEQ ID NO: 34724 - DNA, 20 bp, synthetic construct
  misc_feature 1..20: note = chemically synthesized
  source 1..20: mol_type = other DNA
taacatttgagtcagtagac

SEQ ID NO: 34725 - DNA, 20 bp, synthetic construct
  misc_feature 1..20: note = chemically synthesized
  source 1..20: mol_type = other DNA
aacatttgagtcagtagact

SEQ ID NO: 34726 - DNA, 20 bp, synthetic construct
  misc_feature 1..20: note = chemically synthesized
  source 1..20: mol_type = other DNA
catttgagtcagtagactgg

SEQ ID NO: 34727 - DNA, 20 bp, synthetic construct
  misc_feature 1..20: note = chemically synthesized
  source 1..20: mol_type = other DNA
tttgagtcagtagactggga

SEQ ID NO: 34728 - DNA, 20 bp, synthetic construct
  misc_feature 1..20: note = chemically synthesized
  source 1..20: mol_type = other DNA
ttgagtcagtagactgggag

SEQ ID NO: 34729 - DNA, 20 bp, synthetic construct
  misc_feature 1..20: note = chemically synthesized
  source 1..20: mol_type = other DNA
agtcagtagactgggagagg

SEQ ID NO: 34730 - DNA, 20 bp, synthetic construct
  misc_feature 1..20: note = chemically synthesized
  source 1..20: mol_type = other DNA
agacccacccaccctccgtc

SEQ ID NO: 34731 - DNA, 20 bp, synthetic construct
  misc_feature 1..20: note = chemically synthesized
  source 1..20: mol_type = other DNA
gacccacccaccctccgtct

SEQ ID NO: 34732 - DNA, 20 bp, synthetic construct
  misc_feature 1..20: note = chemically synthesized
  source 1..20: mol_type = other DNA
ccacccaccctccgtctggg

SEQ ID NO: 34733 - DNA, 20 bp, synthetic construct
  misc_feature 1..20: note = chemically synthesized
  source 1..20: mol_type = other DNA
cacccaccctccgtctgggt

SEQ ID NO: 34734 - DNA, 20 bp, synthetic construct
  misc_feature 1..20: note = chemically synthesized
  source 1..20: mol_type = other DNA
ctgggtgggtactatctaat

SEQ ID NO: 34735 - DNA, 20 bp, synthetic construct
  misc_feature 1..20: note = chemically synthesized
  source 1..20: mol_type = other DNA
ggtactatctaatcagctgc

SEQ ID NO: 34736 - DNA, 20 bp, synthetic construct
  misc_feature 1..20: note = chemically synthesized
  source 1..20: mol_type = other DNA
gtactatctaatcagctgcc

SEQ ID NO: 34737 - DNA, 20 bp, synthetic construct
  misc_feature 1..20: note = chemically synthesized
  source 1..20: mol_type = other DNA
tactatctaatcagctgcca

SEQ ID NO: 34738 - DNA, 20 bp, synthetic construct
  misc_feature 1..20: note = chemically synthesized
  source 1..20: mol_type = other DNA
tatctaatcagctgccaggg

SEQ ID NO: 34739 - DNA, 20 bp, synthetic construct
  misc_feature 1..20: note = chemically synthesized
  source 1..20: mol_type = other DNA
taatcagctgccagggcggc

SEQ ID NO: 34740 - DNA, 20 bp, synthetic construct
  misc_feature 1..20: note = chemically synthesized
  source 1..20: mol_type = other DNA
tcagctgccagggcggctag

SEQ ID NO: 34741 - DNA, 20 bp, synthetic construct
  misc_feature 1..20: note = chemically synthesized
  source 1..20: mol_type = other DNA
ctgccagggcggctagaaga

SEQ ID NO: 34742 - DNA, 20 bp, synthetic construct
  misc_feature 1..20: note = chemically synthesized
  source 1..20: mol_type = other DNA
ccagggcggctagaagaaag

SEQ ID NO: 34743 - DNA, 20 bp, synthetic construct
  misc_feature 1..20: note = chemically synthesized
  source 1..20: mol_type = other DNA
cagggcggctagaagaaagc

SEQ ID NO: 34744 - DNA, 20 bp, synthetic construct
  misc_feature 1..20: note = chemically synthesized
  source 1..20: mol_type = other DNA
ggctagaagaaagcaggcaa

SEQ ID NO: 34745 - DNA, 20 bp, synthetic construct
  misc_feature 1..20: note = chemically synthesized
  source 1..20: mol_type = other DNA
tagaagaaagcaggcaaaag

SEQ ID NO: 34746 - DNA, 20 bp, synthetic construct
  misc_feature 1..20: note = chemically synthesized
  source 1..20: mol_type = other DNA
agaaagcaggcaaaagaaga

SEQ ID NO: 34747 - DNA, 20 bp, synthetic construct
  misc_feature 1..20: note = chemically synthesized
  source 1..20: mol_type = other DNA
aagcaggcaaaagaagatgg

SEQ ID NO: 34748 - DNA, 20 bp, synthetic construct
  misc_feature 1..20: note = chemically synthesized
  source 1..20: mol_type = other DNA
gcaggcaaaagaagatggaa

SEQ ID NO: 34749 - DNA, 20 bp, synthetic construct
  misc_feature 1..20: note = chemically synthesized
  source 1..20: mol_type = other DNA
ggcaaaagaagatggaagag

SEQ ID NO: 34750 - DNA, 20 bp, synthetic construct
  misc_feature 1..20: note = chemically synthesized
  source 1..20: mol_type = other DNA
aaaagaagatggaagagtag

SEQ ID NO: 34751 - DNA, 20 bp, synthetic construct
  misc_feature 1..20: note = chemically synthesized
  source 1..20: mol_type = other DNA
ttacacaatataaacctttc

SEQ ID NO: 34752 - DNA, 20 bp, synthetic construct
  misc_feature 1..20: note = chemically synthesized
  source 1..20: mol_type = other DNA
tacacaatataaacctttcc

SEQ ID NO: 34753 - DNA, 20 bp, synthetic construct
  misc_feature 1..20: note = chemically synthesized
  source 1..20: mol_type = other DNA
ataaacctttccaggtgcta

SEQ ID NO: 34754 - DNA, 20 bp, synthetic construct
  misc_feature 1..20: note = chemically synthesized
  source 1..20: mol_type = other DNA
ttccaggtgctaaagtcaca

SEQ ID NO: 34755 - DNA, 20 bp, synthetic construct
  misc_feature 1..20: note = chemically synthesized
  source 1..20: mol_type = other DNA
tccaggtgctaaagtcacac

SEQ ID NO: 34756 - DNA, 20 bp, synthetic construct
  misc_feature 1..20: note = chemically synthesized
  source 1..20: mol_type = other DNA
gtgaatctgtacccctgatc

SEQ ID NO: 34757 - DNA, 20 bp, synthetic construct
  misc_feature 1..20: note = chemically synthesized
  source 1..20: mol_type = other DNA
gaatctgtacccctgatcca

SEQ ID NO: 34758 - DNA, 20 bp, synthetic construct
  misc_feature 1..20: note = chemically synthesized
  source 1..20: mol_type = other DNA
aatctgtacccctgatccag

SEQ ID NO: 34759 - DNA, 20 bp, synthetic construct
  misc_feature 1..20: note = chemically synthesized
  source 1..20: mol_type = other DNA
tccagaggcacacataaccc

SEQ ID NO: 34760 - DNA, 20 bp, synthetic construct
  misc_feature 1..20: note = chemically synthesized
  source 1..20: mol_type = other DNA
acataacccaagctccgtcc

SEQ ID NO: 34761 - DNA, 20 bp, synthetic construct
  misc_feature 1..20: note = chemically synthesized
  source 1..20: mol_type = other DNA
gtccaagcttaattttgaat

SEQ ID NO: 34762 - DNA, 20 bp, synthetic construct
  misc_feature 1..20: note = chemically synthesized
  source 1..20: mol_type = other DNA
ttaattttgaattggtttat

SEQ ID NO: 34763 - DNA, 20 bp, synthetic construct
  misc_feature 1..20: note = chemically synthesized
  source 1..20: mol_type = other DNA
gaattggtttattagtcata

SEQ ID NO: 34764 - DNA, 20 bp, synthetic construct
  misc_feature 1..20: note = chemically synthesized
  source 1..20: mol_type = other DNA
tggtttattagtcatatggt

SEQ ID NO: 34765 - DNA, 20 bp, synthetic construct
  misc_feature 1..20: note = chemically synthesized
  source 1..20: mol_type = other DNA
ttattagtcatatggtcaga

SEQ ID NO: 34766 - DNA, 20 bp, synthetic construct
  misc_feature 1..20: note = chemically synthesized
  source 1..20: mol_type = other DNA
tcagatagtgactttttttc

SEQ ID NO: 34767 - DNA, 20 bp, synthetic construct
  misc_feature 1..20: note = chemically synthesized
  source 1..20: mol_type = other DNA
atagtgactttttttctaga

SEQ ID NO: 34768 - DNA, 20 bp, synthetic construct
  misc_feature 1..20: note = chemically synthesized
  source 1..20: mol_type = other DNA
atttgaacctctgatgatta

SEQ ID NO: 34769 - DNA, 20 bp, synthetic construct
  misc_feature 1..20: note = chemically synthesized
  source 1..20: mol_type = other DNA
ttgaacctctgatgattaca

SEQ ID NO: 34770 - DNA, 20 bp, synthetic construct
  misc_feature 1..20: note = chemically synthesized
  source 1..20: mol_type = other DNA
tgaacctctgatgattacag

SEQ ID NO: 34771 - DNA, 20 bp, synthetic construct
  misc_feature 1..20: note = chemically synthesized
  source 1..20: mol_type = other DNA
ttacagaggtatacctcctc

SEQ ID NO: 34772 - DNA, 20 bp, synthetic construct
  misc_feature 1..20: note = chemically synthesized
  source 1..20: mol_type = other DNA
ggtatacctcctcaagaatt

SEQ ID NO: 34773 - DNA, 20 bp, synthetic construct
  misc_feature 1..20: note = chemically synthesized
  source 1..20: mol_type = other DNA
atacctcctcaagaatttgg

SEQ ID NO: 34774 - DNA, 20 bp, synthetic construct
  misc_feature 1..20: note = chemically synthesized
  source 1..20: mol_type = other DNA
acctcctcaagaatttggaa

SEQ ID NO: 34775 - DNA, 20 bp, synthetic construct
  misc_feature 1..20: note = chemically synthesized
  source 1..20: mol_type = other DNA
ggaagagttgattctatatt

SEQ ID NO: 34776 - DNA, 20 bp, synthetic construct
  misc_feature 1..20: note = chemically synthesized
  source 1..20: mol_type = other DNA
ttctatatttggcacttatc

SEQ ID NO: 34777 - DNA, 20 bp, synthetic construct
  misc_feature 1..20: note = chemically synthesized
  source 1..20: mol_type = other DNA
tggcacttatctggacttct

SEQ ID NO: 34778 - DNA, 20 bp, synthetic construct
  misc_feature 1..20: note = chemically synthesized
  source 1..20: mol_type = other DNA
ggcacttatctggacttcta

SEQ ID NO: 34779 - DNA, 20 bp, synthetic construct
  misc_feature 1..20: note = chemically synthesized
  source 1..20: mol_type = other DNA
tatctggacttctaaggtaa

SEQ ID NO: 34780 - DNA, 20 bp, synthetic construct
  misc_feature 1..20: note = chemically synthesized
  source 1..20: mol_type = other DNA
gacttctaaggtaaaagaca

SEQ ID NO: 34781 - DNA, 20 bp, synthetic construct
  misc_feature 1..20: note = chemically synthesized
  source 1..20: mol_type = other DNA
acttctaaggtaaaagacat

SEQ ID NO: 34782 - DNA, 20 bp, synthetic construct
  misc_feature 1..20: note = chemically synthesized
  source 1..20: mol_type = other DNA
cttctaaggtaaaagacatg

SEQ ID NO: 34783 - DNA, 20 bp, synthetic construct
  misc_feature 1..20: note = chemically synthesized
  source 1..20: mol_type = other DNA
taaggtaaaagacatggggt

SEQ ID NO: 34784 - DNA, 20 bp, synthetic construct
  misc_feature 1..20: note = chemically synthesized
  source 1..20: mol_type = other DNA
aaggtaaaagacatggggtt

SEQ ID NO: 34785 - DNA, 20 bp, synthetic construct
  misc_feature 1..20: note = chemically synthesized
  source 1..20: mol_type = other DNA
aggtaaaagacatggggttg

SEQ ID NO: 34786 - DNA, 20 bp, synthetic construct
  misc_feature 1..20: note = chemically synthesized
  source 1..20: mol_type = other DNA
ggtaaaagacatggggttgg

SEQ ID NO: 34787 - DNA, 20 bp, synthetic construct
  misc_feature 1..20: note = chemically synthesized
  source 1..20: mol_type = other DNA
aaaagacatggggttggggg

SEQ ID NO: 34788 - DNA, 20 bp, synthetic construct
  misc_feature 1..20: note = chemically synthesized
  source 1..20: mol_type = other DNA
aaagacatggggttgggggc

SEQ ID NO: 34789 - DNA, 20 bp, synthetic construct
  misc_feature 1..20: note = chemically synthesized
  source 1..20: mol_type = other DNA
aagacatggggttgggggca

SEQ ID NO: 34790 - DNA, 20 bp, synthetic construct
  misc_feature 1..20: note = chemically synthesized
  source 1..20: mol_type = other DNA
agacatggggttgggggcag

SEQ ID NO: 34791 - DNA, 20 bp, synthetic construct
  misc_feature 1..20: note = chemically synthesized
  source 1..20: mol_type = other DNA
gacatggggttgggggcagg

SEQ ID NO: 34792 - DNA, 20 bp, synthetic construct
  misc_feature 1..20: note = chemically synthesized
  source 1..20: mol_type = other DNA
gttgggggcagggggactct

SEQ ID NO: 34793 - DNA, 20 bp, synthetic construct
  misc_feature 1..20: note = chemically synthesized
  source 1..20: mol_type = other DNA
ttgggggcagggggactctc

SEQ ID NO: 34794 - DNA, 20 bp, synthetic construct
  misc_feature 1..20: note = chemically synthesized
  source 1..20: mol_type = other DNA
tgggggcagggggactctca

SEQ ID NO: 34795 - DNA, 20 bp, synthetic construct
  misc_feature 1..20: note = chemically synthesized
  source 1..20: mol_type = other DNA
ggcagggggactctcagggt

SEQ ID NO: 34796 - DNA, 20 bp, synthetic construct
  misc_feature 1..20: note = chemically synthesized
  source 1..20: mol_type = other DNA
ggggactctcagggttagaa

SEQ ID NO: 34797 - DNA, 20 bp, synthetic construct
  misc_feature 1..20: note = chemically synthesized
  source 1..20: mol_type = other DNA
gactctcagggttagaatgg

SEQ ID NO: 34798 - DNA, 20 bp, synthetic construct
  misc_feature 1..20: note = chemically synthesized
  source 1..20: mol_type = other DNA
ctcagggttagaatggaagc

SEQ ID NO: 34799 - DNA, 20 bp, synthetic construct
  misc_feature 1..20: note = chemically synthesized
  source 1..20: mol_type = other DNA
cagggttagaatggaagcca

SEQ ID NO: 34800 - DNA, 20 bp, synthetic construct
  misc_feature 1..20: note = chemically synthesized
  source 1..20: mol_type = other DNA
gggttagaatggaagccaga

SEQ ID NO: 34801 - DNA, 20 bp, synthetic construct
  misc_feature 1..20: note = chemically synthesized
  source 1..20: mol_type = other DNA
aatggaagccagagagatta

SEQ ID NO: 34802 - DNA, 20 bp, synthetic construct
  misc_feature 1..20: note = chemically synthesized
  source 1..20: mol_type = other DNA
agccagagagattaaagaat

SEQ ID NO: 34803 - DNA, 20 bp, synthetic construct
  misc_feature 1..20: note = chemically synthesized
  source 1..20: mol_type = other DNA
agagagattaaagaatcagt

SEQ ID NO: 34804 - DNA, 20 bp, synthetic construct
  misc_feature 1..20: note = chemically synthesized
  source 1..20: mol_type = other DNA
gagagattaaagaatcagtc

SEQ ID NO: 34805 - DNA, 20 bp, synthetic construct
  misc_feature 1..20: note = chemically synthesized
  source 1..20: mol_type = other DNA
agattaaagaatcagtcagg

SEQ ID NO: 34806 - DNA, 20 bp, synthetic construct
  misc_feature 1..20: note = chemically synthesized
  source 1..20: mol_type = other DNA
attaaagaatcagtcaggtg

SEQ ID NO: 34807 - DNA, 20 bp, synthetic construct
  misc_feature 1..20: note = chemically synthesized
  source 1..20: mol_type = other DNA
taaagaatcagtcaggtgga

SEQ ID NO: 34808 - DNA, 20 bp, synthetic construct
  misc_feature 1..20: note = chemically synthesized
  source 1..20: mol_type = other DNA
caaccccataattcatgcct

SEQ ID NO: 34809 - DNA, 20 bp, synthetic construct
  misc_feature 1..20: note = chemically synthesized
  source 1..20: mol_type = other DNA
ctgagtcaacacccatgctc

SEQ ID NO: 34810 - DNA, 20 bp, synthetic construct
  misc_feature 1..20: note = chemically synthesized
  source 1..20: mol_type = other DNA
cccatgctctggtttgttcg

SEQ ID NO: 34811 - DNA, 20 bp, synthetic construct
  misc_feature 1..20: note = chemically synthesized
  source 1..20: mol_type = other DNA
attgtttgccttatgtgttc

SEQ ID NO: 34812 - DNA, 20 bp, synthetic construct
  misc_feature 1..20: note = chemically synthesized
  source 1..20: mol_type = other DNA
ccttcacttttttatatttg

SEQ ID NO: 34813 - DNA, 20 bp, synthetic construct
  misc_feature 1..20: note = chemically synthesized
  source 1..20: mol_type = other DNA
ttcacttttttatatttgaa

SEQ ID NO: 34814 - DNA, 20 bp, synthetic construct
  misc_feature 1..20: note = chemically synthesized
  source 1..20: mol_type = other DNA
tcacttttttatatttgaag

SEQ ID NO: 34815 - DNA, 20 bp, synthetic construct
  misc_feature 1..20: note = chemically synthesized
  source 1..20: mol_type = other DNA
atttgaagaggtaactctca

SEQ ID NO: 34816 - DNA, 20 bp, synthetic construct
  misc_feature 1..20: note = chemically synthesized
  source 1..20: mol_type = other DNA
aggtaactctcaaagaaacc

SEQ ID NO: 34817 - DNA, 20 bp, synthetic construct
  misc_feature 1..20: note = chemically synthesized
  source 1..20: mol_type = other DNA
ctctcaaagaaaccaagttt

SEQ ID NO: 34818 - DNA, 20 bp, synthetic construct
  misc_feature 1..20: note = chemically synthesized
  source 1..20: mol_type = other DNA
ctcaaagaaaccaagtttta

SEQ ID NO: 34819 - DNA, 20 bp, synthetic construct
  misc_feature 1..20: note = chemically synthesized
  source 1..20: mol_type = other DNA
aaaccaagttttagagatgt

SEQ ID NO: 34820 - DNA, 20 bp, synthetic construct
  misc_feature 1..20: note = chemically synthesized
  source 1..20: mol_type = other DNA
aaccaagttttagagatgtc

SEQ ID NO: 34821 - DNA, 20 bp, synthetic construct
  misc_feature 1..20: note = chemically synthesized
  source 1..20: mol_type = other DNA
accaagttttagagatgtca

SEQ ID NO: 34822 - DNA, 20 bp, synthetic construct
  misc_feature 1..20: note = chemically synthesized
  source 1..20: mol_type = other DNA
caagttttagagatgtcagg

SEQ ID NO: 34823 - DNA, 20 bp, synthetic construct
  misc_feature 1..20: note = chemically synthesized
  source 1..20: mol_type = other DNA
tagagatgtcagggagtctt

SEQ ID NO: 34824 - DNA, 20 bp, synthetic construct
  misc_feature 1..20: note = chemically synthesized
  source 1..20: mol_type = other DNA
agagatgtcagggagtcttt

SEQ ID NO: 34825 - DNA, 20 bp, synthetic construct
  misc_feature 1..20: note = chemically synthesized
  source 1..20: mol_type = other DNA
ctactacatatatctactct

SEQ ID NO: 34826 - DNA, 20 bp, synthetic construct
  misc_feature 1..20: note = chemically synthesized
  source 1..20: mol_type = other DNA
ctacatatatctactcttag

SEQ ID NO: 34827 - DNA, 20 bp, synthetic construct
  misc_feature 1..20: note = chemically synthesized
  source 1..20: mol_type = other DNA
actattacttttctcttgct

SEQ ID NO: 34828 - DNA, 20 bp, synthetic construct
  misc_feature 1..20: note = chemically synthesized
  source 1..20: mol_type = other DNA
cttttctcttgctaagaaat

SEQ ID NO: 34829 - DNA, 20 bp, synthetic construct
  misc_feature 1..20: note = chemically synthesized
  source 1..20: mol_type = other DNA
tctctgttttttttttgcct

SEQ ID NO: 34830 - DNA, 20 bp, synthetic construct
  misc_feature 1..20: note = chemically synthesized
  source 1..20: mol_type = other DNA
tttgccttggttcctgcaat

SEQ ID NO: 34831 - DNA, 20 bp, synthetic construct
  misc_feature 1..20: note = chemically synthesized
  source 1..20: mol_type = other DNA
gttcctgcaatgagatctta

SEQ ID NO: 34832 - DNA, 20 bp, synthetic construct
  misc_feature 1..20: note = chemically synthesized
  source 1..20: mol_type = other DNA
tcctgcaatgagatcttaca

SEQ ID NO: 34833 - DNA, 20 bp, synthetic construct
  misc_feature 1..20: note = chemically synthesized
  source 1..20: mol_type = other DNA
cctgcaatgagatcttacag

SEQ ID NO: 34834 - DNA, 20 bp, synthetic construct
  misc_feature 1..20: note = chemically synthesized
  source 1..20: mol_type = other DNA
tgcaatgagatcttacagag

SEQ ID NO: 34835 - DNA, 20 bp, synthetic construct
  misc_feature 1..20: note = chemically synthesized
  source 1..20: mol_type = other DNA
ctttgttcccttccattctt

SEQ ID NO: 34836 - DNA, 20 bp, synthetic construct
  misc_feature 1..20: note = chemically synthesized
  source 1..20: mol_type = other DNA
ccttccattcttcagttcca

SEQ ID NO: 34837 - DNA, 20 bp, synthetic construct
  misc_feature 1..20: note = chemically synthesized
  source 1..20: mol_type = other DNA
agtcatgtatctcacatctt

SEQ ID NO: 34838 - DNA, 20 bp, synthetic construct
  misc_feature 1..20: note = chemically synthesized
  source 1..20: mol_type = other DNA
tcacatctttagccgtatga

SEQ ID NO: 34839 - DNA, 20 bp, synthetic construct
  misc_feature 1..20: note = chemically synthesized
  source 1..20: mol_type = other DNA
ctttagccgtatgaaagatt

SEQ ID NO: 34840 - DNA, 20 bp, synthetic construct
  misc_feature 1..20: note = chemically synthesized
  source 1..20: mol_type = other DNA
tttagccgtatgaaagattt

SEQ ID NO: 34841 - DNA, 20 bp, synthetic construct
  misc_feature 1..20: note = chemically synthesized
  source 1..20: mol_type = other DNA
agatttgggcatcatctttt

SEQ ID NO: 34842 - DNA, 20 bp, synthetic construct
  misc_feature 1..20: note = chemically synthesized
  source 1..20: mol_type = other DNA
tcttttcagaatctgcacat

SEQ ID NO: 34843 - DNA, 20 bp, synthetic construct
  misc_feature 1..20: note = chemically synthesized
  source 1..20: mol_type = other DNA
tcagaatctgcacatgagcc

SEQ ID NO: 34844 - DNA, 20 bp, synthetic construct
  misc_feature 1..20: note = chemically synthesized
  source 1..20: mol_type = other DNA
aatctgcacatgagcctggc

SEQ ID NO: 34845 - DNA, 20 bp, synthetic construct
  misc_feature 1..20: note = chemically synthesized
  source 1..20: mol_type = other DNA
ctgcacatgagcctggctgg

SEQ ID NO: 34846 - DNA, 20 bp, synthetic construct
  misc_feature 1..20: note = chemically synthesized
  source 1..20: mol_type = other DNA
tgcacatgagcctggctggt

SEQ ID NO: 34847 - DNA, 20 bp, synthetic construct
  misc_feature 1..20: note = chemically synthesized
  source 1..20: mol_type = other DNA
gctggtaggaacatttattt

SEQ ID NO: 34848 - DNA, 20 bp, synthetic construct
  misc_feature 1..20: note = chemically synthesized
  source 1..20: mol_type = other DNA
ggtaggaacatttattttag

SEQ ID NO: 34849 - DNA, 20 bp, synthetic construct
  misc_feature 1..20: note = chemically synthesized
  source 1..20: mol_type = other DNA
ttattttagaagctcctccc

SEQ ID NO: 34850 - DNA, 20 bp, synthetic construct
  misc_feature 1..20: note = chemically synthesized
  source 1..20: mol_type = other DNA
attttagaagctcctcccca

SEQ ID NO: 34851 - DNA, 20 bp, synthetic construct
  misc_feature 1..20: note = chemically synthesized
  source 1..20: mol_type = other DNA
cccagagaccattcctgatt

SEQ ID NO: 34852 - DNA, 20 bp, synthetic construct
  misc_feature 1..20: note = chemically synthesized
  source 1..20: mol_type = other DNA
ttctctattatttgtgccct

SEQ ID NO: 34853 - DNA, 20 bp, synthetic construct
  misc_feature 1..20: note = chemically synthesized
  source 1..20: mol_type = other DNA
tatttgtgccctcagccttg

SEQ ID NO: 34854 - DNA, 20 bp, synthetic construct
  misc_feature 1..20: note = chemically synthesized
  source 1..20: mol_type = other DNA
atttgtgccctcagccttgt

SEQ ID NO: 34855 - DNA, 20 bp, synthetic construct
  misc_feature 1..20: note = chemically synthesized
  source 1..20: mol_type = other DNA
gccctcagccttgtgggtat

SEQ ID NO: 34856 - DNA, 20 bp, synthetic construct
  misc_feature 1..20: note = chemically synthesized
  source 1..20: mol_type = other DNA
ccctcagccttgtgggtatt

SEQ ID NO: 34857 - DNA, 20 bp, synthetic construct
  misc_feature 1..20: note = chemically synthesized
  source 1..20: mol_type = other DNA
tgtgggtattgggctttgaa

SEQ ID NO: 34858 - DNA, 20 bp, synthetic construct
  misc_feature 1..20: note = chemically synthesized
  source 1..20: mol_type = other DNA
ggctttgaacagcacaactc

SEQ ID NO: 34859 - DNA, 20 bp, synthetic construct
  misc_feature 1..20: note = chemically synthesized
  source 1..20: mol_type = other DNA
caagatctctgtctctgtcc

SEQ ID NO: 34860 - DNA, 20 bp, synthetic construct
  misc_feature 1..20: note = chemically synthesized
  source 1..20: mol_type = other DNA
gtctctgtcctggcttttac

SEQ ID NO: 34861 - DNA, 20 bp, synthetic construct
  misc_feature 1..20: note = chemically synthesized
  source 1..20: mol_type = other DNA
ctctgtcctggcttttactg

SEQ ID NO: 34862 - DNA, 20 bp, synthetic construct
  misc_feature 1..20: note = chemically synthesized
  source 1..20: mol_type = other DNA
tctgtcctggcttttactgg

SEQ ID NO: 34863 - DNA, 20 bp, synthetic construct
  misc_feature 1..20: note = chemically synthesized
  source 1..20: mol_type = other DNA
tactggaggttttcctctgt

SEQ ID NO: 34864 - DNA, 20 bp, synthetic construct
  misc_feature 1..20: note = chemically synthesized
  source 1..20: mol_type = other DNA
ctggaggttttcctctgttg

SEQ ID NO: 34865 - DNA, 20 bp, synthetic construct
  misc_feature 1..20: note = chemically synthesized
  source 1..20: mol_type = other DNA
tggaggttttcctctgttgg

SEQ ID NO: 34866 - DNA, 20 bp, synthetic construct
  misc_feature 1..20: note = chemically synthesized
  source 1..20: mol_type = other DNA
tgaatattttgtctacattg

SEQ ID NO: 34867 - DNA, 20 bp, synthetic construct
  misc_feature 1..20: note = chemically synthesized
  source 1..20: mol_type = other DNA
ttttgtctacattgtggctt

SEQ ID NO: 34868 - DNA, 20 bp, synthetic construct
  misc_feature 1..20: note = chemically synthesized
  source 1..20: mol_type = other DNA
tggctcttgctgtgctactt

SEQ ID NO: 34869 - DNA, 20 bp, synthetic construct
  misc_feature 1..20: note = chemically synthesized
  source 1..20: mol_type = other DNA
ttttatctcattgcatttca

SEQ ID NO: 34870 - DNA, 20 bp, synthetic construct
  misc_feature 1..20: note = chemically synthesized
  source 1..20: mol_type = other DNA
atataataattgccatcaca

SEQ ID NO: 34871 - DNA, 20 bp, synthetic construct
  misc_feature 1..20: note = chemically synthesized
  source 1..20: mol_type = other DNA
attgccatcacaaagtgatg

SEQ ID NO: 34872 - DNA, 20 bp, synthetic construct
  misc_feature 1..20: note = chemically synthesized
  source 1..20: mol_type = other DNA
acaaagtgatgtggtgtgct

SEQ ID NO: 34873 - DNA, 20 bp, synthetic construct
  misc_feature 1..20: note = chemically synthesized
  source 1..20: mol_type = other DNA
tgatgtggtgtgcttggctg

SEQ ID NO: 34874 - DNA, 20 bp, synthetic construct
  misc_feature 1..20: note = chemically synthesized
  source 1..20: mol_type = other DNA
tggctgaagcaccatgtgat

SEQ ID NO: 34875 - DNA, 20 bp, synthetic construct
  misc_feature 1..20: note = chemically synthesized
  source 1..20: mol_type = other DNA
agtatgcctgctgcatcccc

SEQ ID NO: 34876 - DNA, 20 bp, synthetic construct
  misc_feature 1..20: note = chemically synthesized
  source 1..20: mol_type = other DNA
gcctgctgcatcccctggaa

SEQ ID NO: 34877 - DNA, 20 bp, synthetic construct
  misc_feature 1..20: note = chemically synthesized
  source 1..20: mol_type = other DNA
ctgctgcatcccctggaaaa

SEQ ID NO: 34878 - DNA, 20 bp, synthetic construct
  misc_feature 1..20: note = chemically synthesized
  source 1..20: mol_type = other DNA
cctggaaaagagaaaacttc

SEQ ID NO: 34879 - DNA, 20 bp, synthetic construct
  misc_feature 1..20: note = chemically synthesized
  source 1..20: mol_type = other DNA
ggaaaagagaaaacttctgg

SEQ ID NO: 34880 - DNA, 20 bp, synthetic construct
  misc_feature 1..20: note = chemically synthesized
  source 1..20: mol_type = other DNA
gaaaagagaaaacttctggt

SEQ ID NO: 34881 - DNA, 20 bp, synthetic construct
  misc_feature 1..20: note = chemically synthesized
  source 1..20: mol_type = other DNA
acttctggtaggctaaactc

SEQ ID NO: 34882 - DNA, 20 bp, synthetic construct
  misc_feature 1..20: note = chemically synthesized
  source 1..20: mol_type = other DNA
tctggtaggctaaactcaag

SEQ ID NO: 34883 - DNA, 20 bp, synthetic construct
  misc_feature 1..20: note = chemically synthesized
  source 1..20: mol_type = other DNA
ctggtaggctaaactcaaga

SEQ ID NO: 34884 - DNA, 20 bp, synthetic construct
  misc_feature 1..20: note = chemically synthesized
  source 1..20: mol_type = other DNA
tggtaggctaaactcaagaa

SEQ ID NO: 34885 - DNA, 20 bp, synthetic construct
  misc_feature 1..20: note = chemically synthesized
  source 1..20: mol_type = other DNA
ggctaaactcaagaagggaa

SEQ ID NO: 34886 - DNA, 20 bp, synthetic construct
  misc_feature 1..20: note = chemically synthesized
  source 1..20: mol_type = other DNA
aaactcaagaagggaatagt

SEQ ID NO: 34887 - DNA, 20 bp, synthetic construct
  misc_feature 1..20: note = chemically synthesized
  source 1..20: mol_type = other DNA
ggaatagttagtgataactg

SEQ ID NO: 34888 - DNA, 20 bp, synthetic construct
  misc_feature 1..20: note = chemically synthesized
  source 1..20: mol_type = other DNA
tgcagaatgtgcgttcacgt

SEQ ID NO: 34889 - DNA, 20 bp, synthetic construct
  misc_feature 1..20: note = chemically synthesized
  source 1..20: mol_type = other DNA
gcagaatgtgcgttcacgtt

SEQ ID NO: 34890 - DNA, 20 bp, synthetic construct
  misc_feature 1..20: note = chemically synthesized
  source 1..20: mol_type = other DNA
tgtgcgttcacgttgggtac

SEQ ID NO: 34891 - DNA, 20 bp, synthetic construct
  misc_feature 1..20: note = chemically synthesized
  source 1..20: mol_type = other DNA
tgcgttcacgttgggtacta

SEQ ID NO: 34892 - DNA, 20 bp, synthetic construct
  misc_feature 1..20: note = chemically synthesized
  source 1..20: mol_type = other DNA
gttcacgttgggtactagag

SEQ ID NO: 34893 - DNA, 20 bp, synthetic construct
  misc_feature 1..20: note = chemically synthesized
  source 1..20: mol_type = other DNA
ttcacgttgggtactagaga

SEQ ID NO: 34894 - DNA, 20 bp, synthetic construct
  misc_feature 1..20: note = chemically synthesized
  source 1..20: mol_type = other DNA
gaattttattatattgactc

SEQ ID NO: 34895 - DNA, 20 bp, synthetic construct
  misc_feature 1..20: note = chemically synthesized
  source 1..20: mol_type = other DNA
tatattgactctagtctatc

SEQ ID NO: 34896 - DNA, 20 bp, synthetic construct
  misc_feature 1..20: note = chemically synthesized
  source 1..20: mol_type = other DNA
ctatctagctctctgctttc

SEQ ID NO: 34897 - DNA, 20 bp, synthetic construct
  misc_feature 1..20: note = chemically synthesized
  source 1..20: mol_type = other DNA
agctttctctgatctaaacc

SEQ ID NO: 34898 - DNA, 20 bp, synthetic construct
  misc_feature 1..20: note = chemically synthesized
  source 1..20: mol_type = other DNA
tttctctgatctaaaccaag

SEQ ID NO: 34899 - DNA, 20 bp, synthetic construct
  misc_feature 1..20: note = chemically synthesized
  source 1..20: mol_type = other DNA
ttctctgatctaaaccaagc

SEQ ID NO: 34900 - DNA, 20 bp, synthetic construct
  misc_feature 1..20: note = chemically synthesized
  source 1..20: mol_type = other DNA
tctaaaccaagcaggaaata

SEQ ID NO: 34901 - DNA, 20 bp, synthetic construct
  misc_feature 1..20: note = chemically synthesized
  source 1..20: mol_type = other DNA
aaaccaagcaggaaatatag

SEQ ID NO: 34902 - DNA, 20 bp, synthetic construct
  misc_feature 1..20: note = chemically synthesized
  source 1..20: mol_type = other DNA
caggaaatatagtagaaatt

SEQ ID NO: 34903 - DNA, 20 bp, synthetic construct
  misc_feature 1..20: note = chemically synthesized
  source 1..20: mol_type = other DNA
aggaaatatagtagaaattc

SEQ ID NO: 34904 - DNA, 20 bp, synthetic construct
  misc_feature 1..20: note = chemically synthesized
  source 1..20: mol_type = other DNA
tagtagaaattcaggttaca

SEQ ID NO: 34905 - DNA, 20 bp, synthetic construct
  misc_feature 1..20: note = chemically synthesized
  source 1..20: mol_type = other DNA
agtagaaattcaggttacat

SEQ ID NO: 34906 - DNA, 20 bp, synthetic construct
  misc_feature 1..20: note = chemically synthesized
  source 1..20: mol_type = other DNA
aaattcaggttacataggcc

SEQ ID NO: 34907 - DNA, 20 bp, synthetic construct
  misc_feature 1..20: note = chemically synthesized
  source 1..20: mol_type = other DNA
ttcaggttacataggccaag

SEQ ID NO: 34908 - DNA, 20 bp, synthetic construct
  misc_feature 1..20: note = chemically synthesized
  source 1..20: mol_type = other DNA
acataggccaagaagatata

SEQ ID NO: 34909 - DNA, 20 bp, synthetic construct
  misc_feature 1..20: note = chemically synthesized
  source 1..20: mol_type = other DNA
cataggccaagaagatatat

SEQ ID NO: 34910 - DNA, 20 bp, synthetic construct
  misc_feature 1..20: note = chemically synthesized
  source 1..20: mol_type = other DNA
agatatataggctttctctt

SEQ ID NO: 34911 - DNA, 20 bp, synthetic construct
  misc_feature 1..20: note = chemically synthesized
  source 1..20: mol_type = other DNA
ggctttctcttgagataaac

SEQ ID NO: 34912 - DNA, 20 bp, synthetic construct
  misc_feature 1..20: note = chemically synthesized
  source 1..20: mol_type = other DNA
gctttctcttgagataaact

SEQ ID NO: 34913 - DNA, 20 bp, synthetic construct
  misc_feature 1..20: note = chemically synthesized
  source 1..20: mol_type = other DNA
tctcttgagataaactggga

SEQ ID NO: 34914 - DNA, 20 bp, synthetic construct
  misc_feature 1..20: note = chemically synthesized
  source 1..20: mol_type = other DNA
tgggaaagatttgactgttg

SEQ ID NO: 34915 - DNA, 20 bp, synthetic construct
  misc_feature 1..20: note = chemically synthesized
  source 1..20: mol_type = other DNA
tttgactgttgaagtaaatg

SEQ ID NO: 34916 - DNA, 20 bp, synthetic construct
  misc_feature 1..20: note = chemically synthesized
  source 1..20: mol_type = other DNA
ttgactgttgaagtaaatgt

SEQ ID NO: 34917 - DNA, 20 bp, synthetic construct
  misc_feature 1..20: note = chemically synthesized
  source 1..20: mol_type = other DNA
tgactgttgaagtaaatgta

SEQ ID NO: 34918 - DNA, 20 bp, synthetic construct
  misc_feature 1..20: note = chemically synthesized
  source 1..20: mol_type = other DNA
gtagggaataaattacctcc

SEQ ID NO: 34919 - DNA, 20 bp, synthetic construct
  misc_feature 1..20: note = chemically synthesized
  source 1..20: mol_type = other DNA
agggaataaattacctccca

SEQ ID NO: 34920 - DNA, 20 bp, synthetic construct
  misc_feature 1..20: note = chemically synthesized
  source 1..20: mol_type = other DNA
gggaataaattacctcccag

SEQ ID NO: 34921 - DNA, 20 bp, synthetic construct
  misc_feature 1..20: note = chemically synthesized
  source 1..20: mol_type = other DNA
ttacctcccagaggtgatac

SEQ ID NO: 34922 - DNA, 20 bp, synthetic construct
  misc_feature 1..20: note = chemically synthesized
  source 1..20: mol_type = other DNA
acctcccagaggtgatacca

SEQ ID NO: 34923 - DNA, 20 bp, synthetic construct
  misc_feature 1..20: note = chemically synthesized
  source 1..20: mol_type = other DNA
gaggtgataccagagtctgc

SEQ ID NO: 34924 - DNA, 20 bp, synthetic construct
  misc_feature 1..20: note = chemically synthesized
  source 1..20: mol_type = other DNA
aggtgataccagagtctgct

SEQ ID NO: 34925 - DNA, 20 bp, synthetic construct
  misc_feature 1..20: note = chemically synthesized
  source 1..20: mol_type = other DNA
ggtgataccagagtctgctg

SEQ ID NO: 34926 - DNA, 20 bp, synthetic construct
  misc_feature 1..20: note = chemically synthesized
  source 1..20: mol_type = other DNA
cagagtctgctggggctatg

SEQ ID NO: 34927 - DNA, 20 bp, synthetic construct
  misc_feature 1..20: note = chemically synthesized
  source 1..20: mol_type = other DNA
gtctgctggggctatgaaga

SEQ ID NO: 34928 - DNA, 20 bp, synthetic construct
  misc_feature 1..20: note = chemically synthesized
  source 1..20: mol_type = other DNA
tctgctggggctatgaagac

SEQ ID NO: 34929 - DNA, 20 bp, synthetic construct
  misc_feature 1..20: note = chemically synthesized
  source 1..20: mol_type = other DNA
tgtctgattccccacacata

SEQ ID NO: 34930 - DNA, 20 bp, synthetic construct
  misc_feature 1..20: note = chemically synthesized
  source 1..20: mol_type = other DNA
gtctgattccccacacataa

SEQ ID NO: 34931 - DNA, 20 bp, synthetic construct
  misc_feature 1..20: note = chemically synthesized
  source 1..20: mol_type = other DNA
cccacacataaaggtcctac

SEQ ID NO: 34932 - DNA, 20 bp, synthetic construct
  misc_feature 1..20: note = chemically synthesized
  source 1..20: mol_type = other DNA
acacataaaggtcctaccag

SEQ ID NO: 34933 - DNA, 20 bp, synthetic construct
  misc_feature 1..20: note = chemically synthesized
  source 1..20: mol_type = other DNA
gtcctaccagtggcttgatt

SEQ ID NO: 34934 - DNA, 20 bp, synthetic construct
  misc_feature 1..20: note = chemically synthesized
  source 1..20: mol_type = other DNA
taccagtggcttgattcagc

SEQ ID NO: 34935 - DNA, 20 bp, synthetic construct
  misc_feature 1..20: note = chemically synthesized
  source 1..20: mol_type = other DNA
gccagtaacttatttgaaaa

SEQ ID NO: 34936 - DNA, 20 bp, synthetic construct
  misc_feature 1..20: note = chemically synthesized
  source 1..20: mol_type = other DNA
gtaacttatttgaaaaaaga

SEQ ID NO: 34937 - DNA, 20 bp, synthetic construct
  misc_feature 1..20: note = chemically synthesized
  source 1..20: mol_type = other DNA
aaaaaagaaagattatttaa

SEQ ID NO: 34938 - DNA, 20 bp, synthetic construct
  misc_feature 1..20: note = chemically synthesized
  source 1..20: mol_type = other DNA
agaaagattatttaaaagct

SEQ ID NO: 34939 - DNA, 20 bp, synthetic construct
  misc_feature 1..20: note = chemically synthesized
  source 1..20: mol_type = other DNA
gaaagattatttaaaagctt

SEQ ID NO: 34940 - DNA, 20 bp, synthetic construct
  misc_feature 1..20: note = chemically synthesized
  source 1..20: mol_type = other DNA
aaagattatttaaaagcttg

SEQ ID NO: 34941 - DNA, 20 bp, synthetic construct
  misc_feature 1..20: note = chemically synthesized
  source 1..20: mol_type = other DNA
aagattatttaaaagcttgg

SEQ ID NO: 34942 - DNA, 20 bp, synthetic construct
  misc_feature 1..20: note = chemically synthesized
  source 1..20: mol_type = other DNA
agattatttaaaagcttggg

SEQ ID NO: 34943 - DNA, 20 bp, synthetic construct
  misc_feature 1..20: note = chemically synthesized
  source 1..20: mol_type = other DNA
aaagcttggggggactaatt

SEQ ID NO: 34944 - DNA, 20 bp, synthetic construct
  misc_feature 1..20: note = chemically synthesized
  source 1..20: mol_type = other DNA
gggggactaattaagtgttc

SEQ ID NO: 34945 - DNA, 20 bp, synthetic construct
  misc_feature 1..20: note = chemically synthesized
  source 1..20: mol_type = other DNA
taagtgttccagctccctct

SEQ ID NO: 34946 - DNA, 20 bp, synthetic construct
  misc_feature 1..20: note = chemically synthesized
  source 1..20: mol_type = other DNA
aagtgttccagctccctcta

SEQ ID NO: 34947 - DNA, 20 bp, synthetic construct
  misc_feature 1..20: note = chemically synthesized
  source 1..20: mol_type = other DNA
gtgttccagctccctctaag

SEQ ID NO: 34948 - DNA, 20 bp, synthetic construct
  misc_feature 1..20: note = chemically synthesized
  source 1..20: mol_type = other DNA
tgttccagctccctctaagg

SEQ ID NO: 34949 - DNA, 20 bp, synthetic construct
  misc_feature 1..20: note = chemically synthesized
  source 1..20: mol_type = other DNA
ttccagctccctctaaggag

SEQ ID NO: 34950 - DNA, 20 bp, synthetic construct
  misc_feature 1..20: note = chemically synthesized
  source 1..20: mol_type = other DNA
cctctaaggaggagttaata

SEQ ID NO: 34951 - DNA, 20 bp, synthetic construct
  misc_feature 1..20: note = chemically synthesized
  source 1..20: mol_type = other DNA
tctaaggaggagttaataca

SEQ ID NO: 34952 - DNA, 20 bp, synthetic construct
  misc_feature 1..20: note = chemically synthesized
  source 1..20: mol_type = other DNA
atacagagtaaatatttctt

SEQ ID NO: 34953 - DNA, 20 bp, synthetic construct
  misc_feature 1..20: note = chemically synthesized
  source 1..20: mol_type = other DNA
gtaaatatttcttaagatcc

SEQ ID NO: 34954 - DNA, 20 bp, synthetic construct
  misc_feature 1..20: note = chemically synthesized
  source 1..20: mol_type = other DNA
atatttcttaagatccaagt

SEQ ID NO: 34955 - DNA, 20 bp, synthetic construct
  misc_feature 1..20: note = chemically synthesized
  source 1..20: mol_type = other DNA
aagatccaagttggctataa

SEQ ID NO: 34956 - DNA, 20 bp, synthetic construct
  misc_feature 1..20: note = chemically synthesized
  source 1..20: mol_type = other DNA
agatccaagttggctataaa

SEQ ID NO: 34957 - DNA, 20 bp, synthetic construct
  misc_feature 1..20: note = chemically synthesized
  source 1..20: mol_type = other DNA
gatccaagttggctataaaa

SEQ ID NO: 34958 - DNA, 20 bp, synthetic construct
  misc_feature 1..20: note = chemically synthesized
  source 1..20: mol_type = other DNA
tccaagttggctataaaagg

SEQ ID NO: 34959 - DNA, 20 bp, synthetic construct
  misc_feature 1..20: note = chemically synthesized
  source 1..20: mol_type = other DNA
ggctataaaagggagacatc

SEQ ID NO: 34960 - DNA, 20 bp, synthetic construct
  misc_feature 1..20: note = chemically synthesized
  source 1..20: mol_type = other DNA
gctataaaagggagacatct

SEQ ID NO: 34961 - DNA, 20 bp, synthetic construct
  misc_feature 1..20: note = chemically synthesized
  source 1..20: mol_type = other DNA
ataaaagggagacatctggg

SEQ ID NO: 34962 - DNA, 20 bp, synthetic construct
  misc_feature 1..20: note = chemically synthesized
  source 1..20: mol_type = other DNA
taaaagggagacatctggga

SEQ ID NO: 34963 - DNA, 20 bp, synthetic construct
  misc_feature 1..20: note = chemically synthesized
  source 1..20: mol_type = other DNA
gctatctttattaataacca

SEQ ID NO: 34964 - DNA, 20 bp, synthetic construct
  misc_feature 1..20: note = chemically synthesized
  source 1..20: mol_type = other DNA
acagtgactgcttctcttca

SEQ ID NO: 34965 - DNA, 20 bp, synthetic construct
  misc_feature 1..20: note = chemically synthesized
  source 1..20: mol_type = other DNA
tgcttctcttcacagatgtt

SEQ ID NO: 34966 - DNA, 20 bp, synthetic construct
  misc_feature 1..20: note = chemically synthesized
  source 1..20: mol_type = other DNA
ttctcttcacagatgttgag

SEQ ID NO: 34967 - DNA, 20 bp, synthetic construct
  misc_feature 1..20: note = chemically synthesized
  source 1..20: mol_type = other DNA
tctcttcacagatgttgaga

SEQ ID NO: 34968 - DNA, 20 bp, synthetic construct
  misc_feature 1..20: note = chemically synthesized
  source 1..20: mol_type = other DNA
gagaaggaacaacatgatct

SEQ ID NO: 34969 - DNA, 20 bp, synthetic construct
  misc_feature 1..20: note = chemically synthesized
  source 1..20: mol_type = other DNA
aacaacatgatctaagtctt

SEQ ID NO: 34970 - DNA, 20 bp, synthetic construct
  misc_feature 1..20: note = chemically synthesized
  source 1..20: mol_type = other DNA
acaacatgatctaagtcttt

SEQ ID NO: 34971 - DNA, 20 bp, synthetic construct
  misc_feature 1..20: note = chemically synthesized
  source 1..20: mol_type = other DNA
catgatctaagtctttaggt

SEQ ID NO: 34972 - DNA, 20 bp, synthetic construct
  misc_feature 1..20: note = chemically synthesized
  source 1..20: mol_type = other DNA
taagtctttaggtaagacac

SEQ ID NO: 34973 - DNA, 20 bp, synthetic construct
  misc_feature 1..20: note = chemically synthesized
  source 1..20: mol_type = other DNA
gctcttcctcaccatcaaac

SEQ ID NO: 34974 - DNA, 20 bp, synthetic construct
  misc_feature 1..20: note = chemically synthesized
  source 1..20: mol_type = other DNA
cctcaccatcaaacaagtta

SEQ ID NO: 34975 - DNA, 20 bp, synthetic construct
  misc_feature 1..20: note = chemically synthesized
  source 1..20: mol_type = other DNA
atcaaacaagttatggtacc

SEQ ID NO: 34976 - DNA, 20 bp, synthetic construct
  misc_feature 1..20: note = chemically synthesized
  source 1..20: mol_type = other DNA
tcaaacaagttatggtacct

SEQ ID NO: 34977 - DNA, 20 bp, synthetic construct
  misc_feature 1..20: note = chemically synthesized
  source 1..20: mol_type = other DNA
aaacaagttatggtacctgg

SEQ ID NO: 34978 - DNA, 20 bp, synthetic construct
  misc_feature 1..20: note = chemically synthesized
  source 1..20: mol_type = other DNA
agttatggtacctgggagta

SEQ ID NO: 34979 - DNA, 20 bp, synthetic construct
  misc_feature 1..20: note = chemically synthesized
  source 1..20: mol_type = other DNA
ggagtatggtgaaatactcc

SEQ ID NO: 34980 - DNA, 20 bp, synthetic construct
  misc_feature 1..20: note = chemically synthesized
  source 1..20: mol_type = other DNA
gaaatactcctagatatata

SEQ ID NO: 34981 - DNA, 20 bp, synthetic construct
  misc_feature 1..20: note = chemically synthesized
  source 1..20: mol_type = other DNA
aatactcctagatatataaa

SEQ ID NO: 34982 - DNA, 20 bp, synthetic construct
  misc_feature 1..20: note = chemically synthesized
  source 1..20: mol_type = other DNA
tagatatataaagagtgtac

SEQ ID NO: 34983 - DNA, 20 bp, synthetic construct
  misc_feature 1..20: note = chemically synthesized
  source 1..20: mol_type = other DNA
agatatataaagagtgtact

SEQ ID NO: 34984 - DNA, 20 bp, synthetic construct
  misc_feature 1..20: note = chemically synthesized
  source 1..20: mol_type = other DNA
atatataaagagtgtactag

SEQ ID NO: 34985 - DNA, 20 bp, synthetic construct
  misc_feature 1..20: note = chemically synthesized
  source 1..20: mol_type = other DNA
gtactaggagactcctctat

SEQ ID NO: 34986 - DNA, 20 bp, synthetic construct
  misc_feature 1..20: note = chemically synthesized
  source 1..20: mol_type = other DNA
agactcctctataagctctc

SEQ ID NO: 34987 - DNA, 20 bp, synthetic construct
  misc_feature 1..20: note = chemically synthesized
  source 1..20: mol_type = other DNA
actcctctataagctctcca

SEQ ID NO: 34988 - DNA, 20 bp, synthetic construct
  misc_feature 1..20: note = chemically synthesized
  source 1..20: mol_type = other DNA
ctctataagctctccagaga

SEQ ID NO: 34989 - DNA, 20 bp, synthetic construct
  misc_feature 1..20: note = chemically synthesized
  source 1..20: mol_type = other DNA
aagctctccagagaaagata

SEQ ID NO: 34990 - DNA, 20 bp, synthetic construct
  misc_feature 1..20: note = chemically synthesized
  source 1..20: mol_type = other DNA
gctctccagagaaagatacg

SEQ ID NO: 34991 - DNA, 20 bp, synthetic construct
  misc_feature 1..20: note = chemically synthesized
  source 1..20: mol_type = other DNA
ctccagagaaagatacggag

SEQ ID NO: 34992 - DNA, 20 bp, synthetic construct
  misc_feature 1..20: note = chemically synthesized
  source 1..20: mol_type = other DNA
cagagaaagatacggagaag

SEQ ID NO: 34993 - DNA, 20 bp, synthetic construct
  misc_feature 1..20: note = chemically synthesized
  source 1..20: mol_type = other DNA
aaagatacggagaagaagtg

SEQ ID NO: 34994 - DNA, 20 bp, synthetic construct
  misc_feature 1..20: note = chemically synthesized
  source 1..20: mol_type = other DNA
aagatacggagaagaagtga

SEQ ID NO: 34995 - DNA, 20 bp, synthetic construct
  misc_feature 1..20: note = chemically synthesized
  source 1..20: mol_type = other DNA
gaagaagtgaaggatctcaa

SEQ ID NO: 34996 - DNA, 20 bp, synthetic construct
  misc_feature 1..20: note = chemically synthesized
  source 1..20: mol_type = other DNA
tgaaggatctcaatagtcca

SEQ ID NO: 34997 - DNA, 20 bp, synthetic construct
  misc_feature 1..20: note = chemically synthesized
  source 1..20: mol_type = other DNA
atctcaatagtccacagctt

SEQ ID NO: 34998 - DNA, 20 bp, synthetic construct
  misc_feature 1..20: note = chemically synthesized
  source 1..20: mol_type = other DNA
cacagctttggatgtgtgca

SEQ ID NO: 34999 - DNA, 20 bp, synthetic construct
  misc_feature 1..20: note = chemically synthesized
  source 1..20: mol_type = other DNA
ttggatgtgtgcacagattt

SEQ ID NO: 35000 - DNA, 20 bp, synthetic construct
  misc_feature 1..20: note = chemically synthesized
  source 1..20: mol_type = other DNA
tgtgcacagatttcagtctg

SEQ ID NO: 35001 - DNA, 20 bp, synthetic construct
  misc_feature 1..20: note = chemically synthesized
  source 1..20: mol_type = other DNA
agatttcagtctgaagttga

SEQ ID NO: 35002 - DNA, 20 bp, synthetic construct
  misc_feature 1..20: note = chemically synthesized
  source 1..20: mol_type = other DNA
tgaagttgatagaacttcaa

SEQ ID NO: 35003 - DNA, 20 bp, synthetic construct
  misc_feature 1..20: note = chemically synthesized
  source 1..20: mol_type = other DNA
agaacttcaaaagcaattcc

SEQ ID NO: 35004 - DNA, 20 bp, synthetic construct
  misc_feature 1..20: note = chemically synthesized
  source 1..20: mol_type = other DNA
gtgctaccaaccaactacct

SEQ ID NO: 35005 - DNA, 20 bp, synthetic construct
  misc_feature 1..20: note = chemically synthesized
  source 1..20: mol_type = other DNA
tacctaagaccttctgtact

SEQ ID NO: 35006 - DNA, 20 bp, synthetic construct
  misc_feature 1..20: note = chemically synthesized
  source 1..20: mol_type = other DNA
atgtcttctttcctttctaa

SEQ ID NO: 35007 - DNA, 20 bp, synthetic construct
  misc_feature 1..20: note = chemically synthesized
  source 1..20: mol_type = other DNA
tttcctttctaaaagatgaa

SEQ ID NO: 35008 - DNA, 20 bp, synthetic construct
  misc_feature 1..20: note = chemically synthesized
  source 1..20: mol_type = other DNA
ttcctttctaaaagatgaac

SEQ ID NO: 35009 - DNA, 20 bp, synthetic construct
  misc_feature 1..20: note = chemically synthesized
  source 1..20: mol_type = other DNA
ctttctaaaagatgaacagg

SEQ ID NO: 35010 - DNA, 20 bp, synthetic construct
  misc_feature 1..20: note = chemically synthesized
  source 1..20: mol_type = other DNA
tttctaaaagatgaacagga

SEQ ID NO: 35011 - DNA, 20 bp, synthetic construct
  misc_feature 1..20: note = chemically synthesized
  source 1..20: mol_type = other DNA
tacattttactttttaaaca

SEQ ID NO: 35012 - DNA, 20 bp, synthetic construct
  misc_feature 1..20: note = chemically synthesized
  source 1..20: mol_type = other DNA
attttactttttaaacaaag

SEQ ID NO: 35013 - DNA, 20 bp, synthetic construct
  misc_feature 1..20: note = chemically synthesized
  source 1..20: mol_type = other DNA
tttactttttaaacaaagca

SEQ ID NO: 35014 - DNA, 20 bp, synthetic construct
  misc_feature 1..20: note = chemically synthesized
  source 1..20: mol_type = other DNA
aacaaagcagagaaaaatta

SEQ ID NO: 35015 - DNA, 20 bp, synthetic construct
  misc_feature 1..20: note = chemically synthesized
  source 1..20: mol_type = other DNA
aaaattatggctgtaaatgt

SEQ ID NO: 35016 - DNA, 20 bp, synthetic construct
  misc_feature 1..20: note = chemically synthesized
  source 1..20: mol_type = other DNA
attatggctgtaaatgttag

SEQ ID NO: 35017 - DNA, 20 bp, synthetic construct
  misc_feature 1..20: note = chemically synthesized
  source 1..20: mol_type = other DNA
tagaagtttatctgattttc

SEQ ID NO: 35018 - DNA, 20 bp, synthetic construct
  misc_feature 1..20: note = chemically synthesized
  source 1..20: mol_type = other DNA
agaagtttatctgattttct

SEQ ID NO: 35019 - DNA, 20 bp, synthetic construct
  misc_feature 1..20: note = chemically synthesized
  source 1..20: mol_type = other DNA
attttctaggtgttccatta

SEQ ID NO: 35020 - DNA, 20 bp, synthetic construct
  misc_feature 1..20: note = chemically synthesized
  source 1..20: mol_type = other DNA
aatcttcttgcttctatcct

SEQ ID NO: 35021 - DNA, 20 bp, synthetic construct
  misc_feature 1..20: note = chemically synthesized
  source 1..20: mol_type = other DNA
ttccctatattttttttcct

SEQ ID NO: 35022 - DNA, 20 bp, synthetic construct
  misc_feature 1..20: note = chemically synthesized
  source 1..20: mol_type = other DNA
tctctcattgtctttcttct

SEQ ID NO: 35023 - DNA, 20 bp, synthetic construct
  misc_feature 1..20: note = chemically synthesized
  source 1..20: mol_type = other DNA
tgtctttcttctcagaaacc

SEQ ID NO: 35024 - DNA, 20 bp, synthetic construct
  misc_feature 1..20: note = chemically synthesized
  source 1..20: mol_type = other DNA
tctttcttctcagaaaccaa

SEQ ID NO: 35025 - DNA, 20 bp, synthetic construct
  misc_feature 1..20: note = chemically synthesized
  source 1..20: mol_type = other DNA
cagaaaccaagagccacgac

SEQ ID NO: 35026 - DNA, 20 bp, synthetic construct
  misc_feature 1..20: note = chemically synthesized
  source 1..20: mol_type = other DNA
accaagagccacgactagct

SEQ ID NO: 35027 - DNA, 20 bp, synthetic construct
  misc_feature 1..20: note = chemically synthesized
  source 1..20: mol_type = other DNA
ccaagagccacgactagctg

SEQ ID NO: 35028 - DNA, 20 bp, synthetic construct
  misc_feature 1..20: note = chemically synthesized
  source 1..20: mol_type = other DNA
ccacgactagctgaggacac

SEQ ID NO: 35029 - DNA, 20 bp, synthetic construct
  misc_feature 1..20: note = chemically synthesized
  source 1..20: mol_type = other DNA
acaagaattttcacaaaaca

SEQ ID NO: 35030 - DNA, 20 bp, synthetic construct
  misc_feature 1..20: note = chemically synthesized
  source 1..20: mol_type = other DNA
agaattttcacaaaacaaag

SEQ ID NO: 35031 - DNA, 20 bp, synthetic construct
  misc_feature 1..20: note = chemically synthesized
  source 1..20: mol_type = other DNA
aattttcacaaaacaaagta

SEQ ID NO: 35032 - DNA, 20 bp, synthetic construct
  misc_feature 1..20: note = chemically synthesized
  source 1..20: mol_type = other DNA
aacaaagtagagtgattcca

SEQ ID NO: 35033 - DNA, 20 bp, synthetic construct
  misc_feature 1..20: note = chemically synthesized
  source 1..20: mol_type = other DNA
gattccatagatcactatta

SEQ ID NO: 35034 - DNA, 20 bp, synthetic construct
  misc_feature 1..20: note = chemically synthesized
  source 1..20: mol_type = other DNA
cactattatagctgcattac

SEQ ID NO: 35035 - DNA, 20 bp, synthetic construct
  misc_feature 1..20: note = chemically synthesized
  source 1..20: mol_type = other DNA
actattatagctgcattacc

SEQ ID NO: 35036 - DNA, 20 bp, synthetic construct
  misc_feature 1..20: note = chemically synthesized
  source 1..20: mol_type = other DNA
cattaccaggtatgtctgca

SEQ ID NO: 35037 - DNA, 20 bp, synthetic construct
  misc_feature 1..20: note = chemically synthesized
  source 1..20: mol_type = other DNA
gtatgtctgcatggaattct

SEQ ID NO: 35038 - DNA, 20 bp, synthetic construct
  misc_feature 1..20: note = chemically synthesized
  source 1..20: mol_type = other DNA
tatgtctgcatggaattctt

SEQ ID NO: 35039 - DNA, 20 bp, synthetic construct
  misc_feature 1..20: note = chemically synthesized
  source 1..20: mol_type = other DNA
ctgcatggaattcttgggaa

SEQ ID NO: 35040 - DNA, 20 bp, synthetic construct
  misc_feature 1..20: note = chemically synthesized
  source 1..20: mol_type = other DNA
gcatggaattcttgggaatg

SEQ ID NO: 35041 - DNA, 20 bp, synthetic construct
  misc_feature 1..20: note = chemically synthesized
  source 1..20: mol_type = other DNA
tggaattcttgggaatggag

SEQ ID NO: 35042 - DNA, 20 bp, synthetic construct
  misc_feature 1..20: note = chemically synthesized
  source 1..20: mol_type = other DNA
ggaattcttgggaatggaga

SEQ ID NO: 35043 - DNA, 20 bp, synthetic construct
  misc_feature 1..20: note = chemically synthesized
  source 1..20: mol_type = other DNA
aattcttgggaatggagaag

SEQ ID NO: 35044 - DNA, 20 bp, synthetic construct
  misc_feature 1..20: note = chemically synthesized
  source 1..20: mol_type = other DNA
attcttgggaatggagaagg

SEQ ID NO: 35045 - DNA, 20 bp, synthetic construct
  misc_feature 1..20: note = chemically synthesized
  source 1..20: mol_type = other DNA
atggagaaggaggaaacttt

SEQ ID NO: 35046 - DNA, 20 bp, synthetic construct
  misc_feature 1..20: note = chemically synthesized
  source 1..20: mol_type = other DNA
aaggaggaaactttaagttg

SEQ ID NO: 35047 - DNA, 20 bp, synthetic construct
  misc_feature 1..20: note = chemically synthesized
  source 1..20: mol_type = other DNA
aggaggaaactttaagttgc

SEQ ID NO: 35048 - DNA, 20 bp, synthetic construct
  misc_feature 1..20: note = chemically synthesized
  source 1..20: mol_type = other DNA
tttaagttgcaggttattat

SEQ ID NO: 35049 - DNA, 20 bp, synthetic construct
  misc_feature 1..20: note = chemically synthesized
  source 1..20: mol_type = other DNA
aaaatacaatcattgcctta

SEQ ID NO: 35050 - DNA, 20 bp, synthetic construct
  misc_feature 1..20: note = chemically synthesized
  source 1..20: mol_type = other DNA
acaatcattgccttacagtt

SEQ ID NO: 35051 - DNA, 20 bp, synthetic construct
  misc_feature 1..20: note = chemically synthesized
  source 1..20: mol_type = other DNA
tcattgccttacagtttggt

SEQ ID NO: 35052 - DNA, 20 bp, synthetic construct
  misc_feature 1..20: note = chemically synthesized
  source 1..20: mol_type = other DNA
agtttggttagctttccctg

SEQ ID NO: 35053 - DNA, 20 bp, synthetic construct
  misc_feature 1..20: note = chemically synthesized
  source 1..20: mol_type = other DNA
tgtgctgcatattctctgat

SEQ ID NO: 35054 - DNA, 20 bp, synthetic construct
  misc_feature 1..20: note = chemically synthesized
  source 1..20: mol_type = other DNA
gctgcatattctctgataag

SEQ ID NO: 35055 - DNA, 20 bp, synthetic construct
  misc_feature 1..20: note = chemically synthesized
  source 1..20: mol_type = other DNA
ctgcatattctctgataaga

SEQ ID NO: 35056 - DNA, 20 bp, synthetic construct
  misc_feature 1..20: note = chemically synthesized
  source 1..20: mol_type = other DNA
ataagaaggaatttttcaca

SEQ ID NO: 35057 - DNA, 20 bp, synthetic construct
  misc_feature 1..20: note = chemically synthesized
  source 1..20: mol_type = other DNA
aaggaatttttcacaaagtt

SEQ ID NO: 35058 - DNA, 20 bp, synthetic construct
  misc_feature 1..20: note = chemically synthesized
  source 1..20: mol_type = other DNA
tttttcacaaagttgagata

SEQ ID NO: 35059 - DNA, 20 bp, synthetic construct
  misc_feature 1..20: note = chemically synthesized
  source 1..20: mol_type = other DNA
acaaagttgagatacagtga

SEQ ID NO: 35060 - DNA, 20 bp, synthetic construct
  misc_feature 1..20: note = chemically synthesized
  source 1..20: mol_type = other DNA
gttgagatacagtgaaagat

SEQ ID NO: 35061 - DNA, 20 bp, synthetic construct
  misc_feature 1..20: note = chemically synthesized
  source 1..20: mol_type = other DNA
ttgagatacagtgaaagatt

SEQ ID NO: 35062 - DNA, 20 bp, synthetic construct
  misc_feature 1..20: note = chemically synthesized
  source 1..20: mol_type = other DNA
tacagtgaaagattaggtta

SEQ ID NO: 35063 - DNA, 20 bp, synthetic construct
  misc_feature 1..20: note = chemically synthesized
  source 1..20: mol_type = other DNA
acagtgaaagattaggttaa

SEQ ID NO: 35064 - DNA, 20 bp, synthetic construct
  misc_feature 1..20: note = chemically synthesized
  source 1..20: mol_type = other DNA
agtgaaagattaggttaaag

SEQ ID NO: 35065 - DNA, 20 bp, synthetic construct
  misc_feature 1..20: note = chemically synthesized
  source 1..20: mol_type = other DNA
ggagattattgctgaaacgt

SEQ ID NO: 35066 - DNA, 20 bp, synthetic construct
  misc_feature 1..20: note = chemically synthesized
  source 1..20: mol_type = other DNA
agattattgctgaaacgtca

SEQ ID NO: 35067 - DNA, 20 bp, synthetic construct
  misc_feature 1..20: note = chemically synthesized
  source 1..20: mol_type = other DNA
ttattgctgaaacgtcagag

SEQ ID NO: 35068 - DNA, 20 bp, synthetic construct
  misc_feature 1..20: note = chemically synthesized
  source 1..20: mol_type = other DNA
tgctgaaacgtcagagaagt

SEQ ID NO: 35069 - DNA, 20 bp, synthetic construct
  misc_feature 1..20: note = chemically synthesized
  source 1..20: mol_type = other DNA
ctgaaacgtcagagaagtaa

SEQ ID NO: 35070 - DNA, 20 bp, synthetic construct
  misc_feature 1..20: note = chemically synthesized
  source 1..20: mol_type = other DNA
cagagaagtaagagtgttga

SEQ ID NO: 35071 - DNA, 20 bp, synthetic construct
  misc_feature 1..20: note = chemically synthesized
  source 1..20: mol_type = other DNA
gagaagtaagagtgttgaca

SEQ ID NO: 35072 - DNA, 20 bp, synthetic construct
  misc_feature 1..20: note = chemically synthesized
  source 1..20: mol_type = other DNA
agagtgttgacagagaaatg

SEQ ID NO: 35073 - DNA, 20 bp, synthetic construct
  misc_feature 1..20: note = chemically synthesized
  source 1..20: mol_type = other DNA
tgacagagaaatgaagtaca

SEQ ID NO: 35074 - DNA, 20 bp, synthetic construct
  misc_feature 1..20: note = chemically synthesized
  source 1..20: mol_type = other DNA
gaaatgaagtacatagaaca

SEQ ID NO: 35075 - DNA, 20 bp, synthetic construct
  misc_feature 1..20: note = chemically synthesized
  source 1..20: mol_type = other DNA
atgaagtacatagaacacag

SEQ ID NO: 35076 - DNA, 20 bp, synthetic construct
  misc_feature 1..20: note = chemically synthesized
  source 1..20: mol_type = other DNA
tgaagtacatagaacacaga

SEQ ID NO: 35077 - DNA, 20 bp, synthetic construct
  misc_feature 1..20: note = chemically synthesized
  source 1..20: mol_type = other DNA
gaagtacatagaacacagaa

SEQ ID NO: 35078 - DNA, 20 bp, synthetic construct
  misc_feature 1..20: note = chemically synthesized
  source 1..20: mol_type = other DNA
aagtacatagaacacagaag

SEQ ID NO: 35079 - DNA, 20 bp, synthetic construct
  misc_feature 1..20: note = chemically synthesized
  source 1..20: mol_type = other DNA
gtacatagaacacagaaggg

SEQ ID NO: 35080 - DNA, 20 bp, synthetic construct
  misc_feature 1..20: note = chemically synthesized
  source 1..20: mol_type = other DNA
tacatagaacacagaagggg

SEQ ID NO: 35081 - DNA, 20 bp, synthetic construct
  misc_feature 1..20: note = chemically synthesized
  source 1..20: mol_type = other DNA
catagaacacagaaggggag

SEQ ID NO: 35082 - DNA, 20 bp, synthetic construct
  misc_feature 1..20: note = chemically synthesized
  source 1..20: mol_type = other DNA
aacacagaaggggaggagct

SEQ ID NO: 35083 - DNA, 20 bp, synthetic construct
  misc_feature 1..20: note = chemically synthesized
  source 1..20: mol_type = other DNA
cagaaggggaggagctaagc

SEQ ID NO: 35084 - DNA, 20 bp, synthetic construct
  misc_feature 1..20: note = chemically synthesized
  source 1..20: mol_type = other DNA
agctggattatctttgcgtc

SEQ ID NO: 35085 - DNA, 20 bp, synthetic construct
  misc_feature 1..20: note = chemically synthesized
  source 1..20: mol_type = other DNA
atctttgcgtctagtaactg

SEQ ID NO: 35086 - DNA, 20 bp, synthetic construct
  misc_feature 1..20: note = chemically synthesized
  source 1..20: mol_type = other DNA
tacatcactcattgtatgtt

SEQ ID NO: 35087 - DNA, 20 bp, synthetic construct
  misc_feature 1..20: note = chemically synthesized
  source 1..20: mol_type = other DNA
atcactcattgtatgttcag

SEQ ID NO: 35088 - DNA, 20 bp, synthetic construct
  misc_feature 1..20: note = chemically synthesized
  source 1..20: mol_type = other DNA
tcactcattgtatgttcagt

SEQ ID NO: 35089 - DNA, 20 bp, synthetic construct
  misc_feature 1..20: note = chemically synthesized
  source 1..20: mol_type = other DNA
gttcagtaggcactgaattc

SEQ ID NO: 35090 - DNA, 20 bp, synthetic construct
  misc_feature 1..20: note = chemically synthesized
  source 1..20: mol_type = other DNA
gaattctggtttatgtctct

SEQ ID NO: 35091 - DNA, 20 bp, synthetic construct
  misc_feature 1..20: note = chemically synthesized
  source 1..20: mol_type = other DNA
tggtttatgtctctcagtcc

SEQ ID NO: 35092 - DNA, 20 bp, synthetic construct
  misc_feature 1..20: note = chemically synthesized
  source 1..20: mol_type = other DNA
ggtttatgtctctcagtcct

SEQ ID NO: 35093 - DNA, 20 bp, synthetic construct
  misc_feature 1..20: note = chemically synthesized
  source 1..20: mol_type = other DNA
tatgtctctcagtcctagga

SEQ ID NO: 35094 - DNA, 20 bp, synthetic construct
  misc_feature 1..20: note = chemically synthesized
  source 1..20: mol_type = other DNA
ctcagtcctaggacagaata

SEQ ID NO: 35095 - DNA, 20 bp, synthetic construct
  misc_feature 1..20: note = chemically synthesized
  source 1..20: mol_type = other DNA
gctgaaaaatgattctttca

SEQ ID NO: 35096 - DNA, 20 bp, synthetic construct
  misc_feature 1..20: note = chemically synthesized
  source 1..20: mol_type = other DNA
aatgattctttcaaagtgct

SEQ ID NO: 35097 - DNA, 20 bp, synthetic construct
  misc_feature 1..20: note = chemically synthesized
  source 1..20: mol_type = other DNA
ctgagttgttgcctcacgcc

SEQ ID NO: 35098 - DNA, 20 bp, synthetic construct
  misc_feature 1..20: note = chemically synthesized
  source 1..20: mol_type = other DNA
ttgcctcacgcccagttgtc

SEQ ID NO: 35099 - DNA, 20 bp, synthetic construct
  misc_feature 1..20: note = chemically synthesized
  source 1..20: mol_type = other DNA
tctcttcactgaaactatta

SEQ ID NO: 35100 - DNA, 20 bp, synthetic construct
  misc_feature 1..20: note = chemically synthesized
  source 1..20: mol_type = other DNA
ttcactgaaactattacagt

SEQ ID NO: 35101 - DNA, 20 bp, synthetic construct
  misc_feature 1..20: note = chemically synthesized
  source 1..20: mol_type = other DNA
acagttagatctcatctcta

SEQ ID NO: 35102 - DNA, 20 bp, synthetic construct
  misc_feature 1..20: note = chemically synthesized
  source 1..20: mol_type = other DNA
cagttagatctcatctctat

SEQ ID NO: 35103 - DNA, 20 bp, synthetic construct
  misc_feature 1..20: note = chemically synthesized
  source 1..20: mol_type = other DNA
ttagatctcatctctatggg

SEQ ID NO: 35104 - DNA, 20 bp, synthetic construct
  misc_feature 1..20: note = chemically synthesized
  source 1..20: mol_type = other DNA
gatctcatctctatgggtgg

SEQ ID NO: 35105 - DNA, 20 bp, synthetic construct
  misc_feature 1..20: note = chemically synthesized
  source 1..20: mol_type = other DNA
atctcatctctatgggtgga

SEQ ID NO: 35106 - DNA, 20 bp, synthetic construct
  misc_feature 1..20: note = chemically synthesized
  source 1..20: mol_type = other DNA
catctctatgggtggaaggt

SEQ ID NO: 35107 - DNA, 20 bp, synthetic construct
  misc_feature 1..20: note = chemically synthesized
  source 1..20: mol_type = other DNA
tctctatgggtggaaggtaa

SEQ ID NO: 35108 - DNA, 20 bp, synthetic construct
  misc_feature 1..20: note = chemically synthesized
  source 1..20: mol_type = other DNA
ctctatgggtggaaggtaag

SEQ ID NO: 35109 - DNA, 20 bp, synthetic construct
  misc_feature 1..20: note = chemically synthesized
  source 1..20: mol_type = other DNA
ggtaagaggatcgtttcctt

SEQ ID NO: 35110 - DNA, 20 bp, synthetic construct
  misc_feature 1..20: note = chemically synthesized
  source 1..20: mol_type = other DNA
aagaggatcgtttcctttgg

SEQ ID NO: 35111 - DNA, 20 bp, synthetic construct
  misc_feature 1..20: note = chemically synthesized
  source 1..20: mol_type = other DNA
gtttcctttggtggcatctt

SEQ ID NO: 35112 - DNA, 20 bp, synthetic construct
  misc_feature 1..20: note = chemically synthesized
  source 1..20: mol_type = other DNA
tttcctttggtggcatcttt

SEQ ID NO: 35113 - DNA, 20 bp, synthetic construct
  misc_feature 1..20: note = chemically synthesized
  source 1..20: mol_type = other DNA
ttcctttggtggcatcttta

SEQ ID NO: 35114 - DNA, 20 bp, synthetic construct
  misc_feature 1..20: note = chemically synthesized
  source 1..20: mol_type = other DNA
ctttggtggcatctttaggg

SEQ ID NO: 35115 - DNA, 20 bp, synthetic construct
  misc_feature 1..20: note = chemically synthesized
  source 1..20: mol_type = other DNA
ggtagtgccttacactgaca

SEQ ID NO: 35116 - DNA, 20 bp, synthetic construct
  misc_feature 1..20: note = chemically synthesized
  source 1..20: mol_type = other DNA
acactgacaaagtaactctg

SEQ ID NO: 35117 - DNA, 20 bp, synthetic construct
  misc_feature 1..20: note = chemically synthesized
  source 1..20: mol_type = other DNA
cactgacaaagtaactctga

SEQ ID NO: 35118 - DNA, 20 bp, synthetic construct
  misc_feature 1..20: note = chemically synthesized
  source 1..20: mol_type = other DNA
actgacaaagtaactctgaa

SEQ ID NO: 35119 - DNA, 20 bp, synthetic construct
  misc_feature 1..20: note = chemically synthesized
  source 1..20: mol_type = other DNA
ctgacaaagtaactctgaag

SEQ ID NO: 35120 - DNA, 20 bp, synthetic construct
  misc_feature 1..20: note = chemically synthesized
  source 1..20: mol_type = other DNA
taactctgaaggggtatatt

SEQ ID NO: 35121 - DNA, 20 bp, synthetic construct
  misc_feature 1..20: note = chemically synthesized
  source 1..20: mol_type = other DNA
atacgaccatctttttaact

SEQ ID NO: 35122 - DNA, 20 bp, synthetic construct
  misc_feature 1..20: note = chemically synthesized
  source 1..20: mol_type = other DNA
tacgaccatctttttaactt

SEQ ID NO: 35123 - DNA, 20 bp, synthetic construct
  misc_feature 1..20: note = chemically synthesized
  source 1..20: mol_type = other DNA
cttaggataaaaacaacttc

SEQ ID NO: 35124 - DNA, 20 bp, synthetic construct
  misc_feature 1..20: note = chemically synthesized
  source 1..20: mol_type = other DNA
aggataaaaacaacttcaag

SEQ ID NO: 35125 - DNA, 20 bp, synthetic construct
  misc_feature 1..20: note = chemically synthesized
  source 1..20: mol_type = other DNA
acaacttcaagaagttgttc

SEQ ID NO: 35126 - DNA, 20 bp, synthetic construct
  misc_feature 1..20: note = chemically synthesized
  source 1..20: mol_type = other DNA
aagttgttctggcatgtgac

SEQ ID NO: 35127 - DNA, 20 bp, synthetic construct
  misc_feature 1..20: note = chemically synthesized
  source 1..20: mol_type = other DNA
tggcatgtgacaagaaaaaa

SEQ ID NO: 35128 - DNA, 20 bp, synthetic construct
  misc_feature 1..20: note = chemically synthesized
  source 1..20: mol_type = other DNA
atgtgacaagaaaaaaaagc

SEQ ID NO: 35129 - DNA, 20 bp, synthetic construct
  misc_feature 1..20: note = chemically synthesized
  source 1..20: mol_type = other DNA
tgtgacaagaaaaaaaagca

SEQ ID NO: 35130 - DNA, 20 bp, synthetic construct
  misc_feature 1..20: note = chemically synthesized
  source 1..20: mol_type = other DNA
gtgacaagaaaaaaaagcaa

SEQ ID NO: 35131 - DNA, 20 bp, synthetic construct
  misc_feature 1..20: note = chemically synthesized
  source 1..20: mol_type = other DNA
gggatgcatttgctctaatt

SEQ ID NO: 35132 - DNA, 20 bp, synthetic construct
  misc_feature 1..20: note = chemically synthesized
  source 1..20: mol_type = other DNA
atgactcttgatttcctcac

SEQ ID NO: 35133 - DNA, 20 bp, synthetic construct
  misc_feature 1..20: note = chemically synthesized
  source 1..20: mol_type = other DNA
aagtgaatatgtatccccct

SEQ ID NO: 35134 - DNA, 20 bp, synthetic construct
  misc_feature 1..20: note = chemically synthesized
  source 1..20: mol_type = other DNA
ccccctcagacttccatttt

SEQ ID NO: 35135 - DNA, 20 bp, synthetic construct
  misc_feature 1..20: note = chemically synthesized
  source 1..20: mol_type = other DNA
agacttccattttgagtaaa

SEQ ID NO: 35136 - DNA, 20 bp, synthetic construct
  misc_feature 1..20: note = chemically synthesized
  source 1..20: mol_type = other DNA
cattctttcatttgttcaaa

SEQ ID NO: 35137 - DNA, 20 bp, synthetic construct
  misc_feature 1..20: note = chemically synthesized
  source 1..20: mol_type = other DNA
catttgttcaaacagaaatc

SEQ ID NO: 35138 - DNA, 20 bp, synthetic construct
  misc_feature 1..20: note = chemically synthesized
  source 1..20: mol_type = other DNA
atttgttcaaacagaaatct

SEQ ID NO: 35139 - DNA, 20 bp, synthetic construct
  misc_feature 1..20: note = chemically synthesized
  source 1..20: mol_type = other DNA
tttgttcaaacagaaatcta

SEQ ID NO: 35140 - DNA, 20 bp, synthetic construct
  misc_feature 1..20: note = chemically synthesized
  source 1..20: mol_type = other DNA
ttgttcaaacagaaatctag

SEQ ID NO: 35141 - DNA, 20 bp, synthetic construct
  misc_feature 1..20: note = chemically synthesized
  source 1..20: mol_type = other DNA
cactcccatttttaatatat

SEQ ID NO: 35142 - DNA, 20 bp, synthetic construct
  misc_feature 1..20: note = chemically synthesized
  source 1..20: mol_type = other DNA
tttaatatatcagcaaatct

SEQ ID NO: 35143 - DNA, 20 bp, synthetic construct
  misc_feature 1..20: note = chemically synthesized
  source 1..20: mol_type = other DNA
aaatgcatctgtctctgttt

SEQ ID NO: 35144 - DNA, 20 bp, synthetic construct
  misc_feature 1..20: note = chemically synthesized
  source 1..20: mol_type = other DNA
catttcccctgcttctctcc

SEQ ID NO: 35145 - DNA, 20 bp, synthetic construct
  misc_feature 1..20: note = chemically synthesized
  source 1..20: mol_type = other DNA
cccctgcttctctcctagtc

SEQ ID NO: 35146 - DNA, 20 bp, synthetic construct
  misc_feature 1..20: note = chemically synthesized
  source 1..20: mol_type = other DNA
ccctgcttctctcctagtca

SEQ ID NO: 35147 - DNA, 20 bp, synthetic construct
  misc_feature 1..20: note = chemically synthesized
  source 1..20: mol_type = other DNA
ggtcaccatgactcttcata

SEQ ID NO: 35148 - DNA, 20 bp, synthetic construct
  misc_feature 1..20: note = chemically synthesized
  source 1..20: mol_type = other DNA
cttcatatggatttttaaaa

SEQ ID NO: 35149 - DNA, 20 bp, synthetic construct
  misc_feature 1..20: note = chemically synthesized
  source 1..20: mol_type = other DNA
ctcttttcttgtctcttgct

SEQ ID NO: 35150 - DNA, 20 bp, synthetic construct
  misc_feature 1..20: note = chemically synthesized
  source 1..20: mol_type = other DNA
cttgcttagtcttcttcaca

SEQ ID NO: 35151 - DNA, 20 bp, synthetic construct
  misc_feature 1..20: note = chemically synthesized
  source 1..20: mol_type = other DNA
gcttagtcttcttcacatag

SEQ ID NO: 35152 - DNA, 20 bp, synthetic construct
  misc_feature 1..20: note = chemically synthesized
  source 1..20: mol_type = other DNA
tcttcttcacatagcagtct

SEQ ID NO: 35153 - DNA, 20 bp, synthetic construct
  misc_feature 1..20: note = chemically synthesized
  source 1..20: mol_type = other DNA
cttcacatagcagtctaagt

SEQ ID NO: 35154 - DNA, 20 bp, synthetic construct
  misc_feature 1..20: note = chemically synthesized
  source 1..20: mol_type = other DNA
agtaatttaaaaatacaaat

SEQ ID NO: 35155 - DNA, 20 bp, synthetic construct
  misc_feature 1..20: note = chemically synthesized
  source 1..20: mol_type = other DNA
attttccattgtgattttca

SEQ ID NO: 35156 - DNA, 20 bp, synthetic construct
  misc_feature 1..20: note = chemically synthesized
  source 1..20: mol_type = other DNA
taatgtctttactacattta

SEQ ID NO: 35157 - DNA, 20 bp, synthetic construct
  misc_feature 1..20: note = chemically synthesized
  source 1..20: mol_type = other DNA
gtctttactacatttatagt

SEQ ID NO: 35158 - DNA, 20 bp, synthetic construct
  misc_feature 1..20: note = chemically synthesized
  source 1..20: mol_type = other DNA
tttactacatttatagtaag

SEQ ID NO: 35159 - DNA, 20 bp, synthetic construct
  misc_feature 1..20: note = chemically synthesized
  source 1..20: mol_type = other DNA
aaaacaaaacaaaaattccg

SEQ ID NO: 35160 - DNA, 20 bp, synthetic construct
  misc_feature 1..20: note = chemically synthesized
  source 1..20: mol_type = other DNA
acaaaacaaaaattccgtgg

SEQ ID NO: 35161 - DNA, 20 bp, synthetic construct
  misc_feature 1..20: note = chemically synthesized
  source 1..20: mol_type = other DNA
aaaattccgtggtggtctgt

SEQ ID NO: 35162 - DNA, 20 bp, synthetic construct
  misc_feature 1..20: note = chemically synthesized
  source 1..20: mol_type = other DNA
aaattccgtggtggtctgta

SEQ ID NO: 35163 - DNA, 20 bp, synthetic construct
  misc_feature 1..20: note = chemically synthesized
  source 1..20: mol_type = other DNA
cctgttttcttatcaaatgc

SEQ ID NO: 35164 - DNA, 20 bp, synthetic construct
  misc_feature 1..20: note = chemically synthesized
  source 1..20: mol_type = other DNA
agtcatgctgattttccctc

SEQ ID NO: 35165 - DNA, 20 bp, synthetic construct
  misc_feature 1..20: note = chemically synthesized
  source 1..20: mol_type = other DNA
tgctgattttccctctggaa

SEQ ID NO: 35166 - DNA, 20 bp, synthetic construct
  misc_feature 1..20: note = chemically synthesized
  source 1..20: mol_type = other DNA
cctctggaacagttttcctc

SEQ ID NO: 35167 - DNA, 20 bp, synthetic construct
  misc_feature 1..20: note = chemically synthesized
  source 1..20: mol_type = other DNA
ctctggaacagttttcctct

SEQ ID NO: 35168 - DNA, 20 bp, synthetic construct
  misc_feature 1..20: note = chemically synthesized
  source 1..20: mol_type = other DNA
ttttcctctaggtctgtata

SEQ ID NO: 35169 - DNA, 20 bp, synthetic construct
  misc_feature 1..20: note = chemically synthesized
  source 1..20: mol_type = other DNA
cctctaggtctgtatacggt

SEQ ID NO: 35170 - DNA, 20 bp, synthetic construct
  misc_feature 1..20: note = chemically synthesized
  source 1..20: mol_type = other DNA
ctctaggtctgtatacggtc

SEQ ID NO: 35171 - DNA, 20 bp, synthetic construct
  misc_feature 1..20: note = chemically synthesized
  source 1..20: mol_type = other DNA
gtcaggttttcttttgtatt

SEQ ID NO: 35172 - DNA, 20 bp, synthetic construct
  misc_feature 1..20: note = chemically synthesized
  source 1..20: mol_type = other DNA
tcaggttttcttttgtattg

SEQ ID NO: 35173 - DNA, 20 bp, synthetic construct
  misc_feature 1..20: note = chemically synthesized
  source 1..20: mol_type = other DNA
tttcttttgtattgaggtct

SEQ ID NO: 35174 - DNA, 20 bp, synthetic construct
  misc_feature 1..20: note = chemically synthesized
  source 1..20: mol_type = other DNA
tattgaggtctcagttcaaa

SEQ ID NO: 35175 - DNA, 20 bp, synthetic construct
  misc_feature 1..20: note = chemically synthesized
  source 1..20: mol_type = other DNA
attgaggtctcagttcaaat

SEQ ID NO: 35176 - DNA, 20 bp, synthetic construct
  misc_feature 1..20: note = chemically synthesized
  source 1..20: mol_type = other DNA
gttcaaatgggacctcctca

SEQ ID NO: 35177 - DNA, 20 bp, synthetic construct
  misc_feature 1..20: note = chemically synthesized
  source 1..20: mol_type = other DNA
ttcaaatgggacctcctcat

SEQ ID NO: 35178 - DNA, 20 bp, synthetic construct
  misc_feature 1..20: note = chemically synthesized
  source 1..20: mol_type = other DNA
atgggacctcctcataggtg

SEQ ID NO: 35179 - DNA, 20 bp, synthetic construct
  misc_feature 1..20: note = chemically synthesized
  source 1..20: mol_type = other DNA
cctcctcataggtgcagttc

SEQ ID NO: 35180 - DNA, 20 bp, synthetic construct
  misc_feature 1..20: note = chemically synthesized
  source 1..20: mol_type = other DNA
ctcctcataggtgcagttct

SEQ ID NO: 35181 - DNA, 20 bp, synthetic construct
  misc_feature 1..20: note = chemically synthesized
  source 1..20: mol_type = other DNA
ccatccaattaatctacatc

SEQ ID NO: 35182 - DNA, 20 bp, synthetic construct
  misc_feature 1..20: note = chemically synthesized
  source 1..20: mol_type = other DNA
tccaattaatctacatcaag

SEQ ID NO: 35183 - DNA, 20 bp, synthetic construct
  misc_feature 1..20: note = chemically synthesized
  source 1..20: mol_type = other DNA
ttatttttcaacttaattta

SEQ ID NO: 35184 - DNA, 20 bp, synthetic construct
  misc_feature 1..20: note = chemically synthesized
  source 1..20: mol_type = other DNA
caacttaatttatggtttat

SEQ ID NO: 35185 - DNA, 20 bp, synthetic construct
  misc_feature 1..20: note = chemically synthesized
  source 1..20: mol_type = other DNA
taatttatggtttataagat

SEQ ID NO: 35186 - DNA, 20 bp, synthetic construct
  misc_feature 1..20: note = chemically synthesized
  source 1..20: mol_type = other DNA
aatttatggtttataagatt

SEQ ID NO: 35187 - DNA, 20 bp, synthetic construct
  misc_feature 1..20: note = chemically synthesized
  source 1..20: mol_type = other DNA
atttatggtttataagatta

SEQ ID NO: 35188 - DNA, 20 bp, synthetic construct
  misc_feature 1..20: note = chemically synthesized
  source 1..20: mol_type = other DNA
gtcttattaccatttaattc

SEQ ID NO: 35189 - DNA, 20 bp, synthetic construct
  misc_feature 1..20: note = chemically synthesized
  source 1..20: mol_type = other DNA
cttattaccatttaattcca

SEQ ID NO: 35190 - DNA, 20 bp, synthetic construct
  misc_feature 1..20: note = chemically synthesized
  source 1..20: mol_type = other DNA
tattaccatttaattccaga

SEQ ID NO: 35191 - DNA, 20 bp, synthetic construct
  misc_feature 1..20: note = chemically synthesized
  source 1..20: mol_type = other DNA
ccagagagctttaaatatca

SEQ ID NO: 35192 - DNA, 20 bp, synthetic construct
  misc_feature 1..20: note = chemically synthesized
  source 1..20: mol_type = other DNA
tgatgcgtgttcacaaatat

SEQ ID NO: 35193 - DNA, 20 bp, synthetic construct
  misc_feature 1..20: note = chemically synthesized
  source 1..20: mol_type = other DNA
gatgcgtgttcacaaatatt

SEQ ID NO: 35194 - DNA, 20 bp, synthetic construct
  misc_feature 1..20: note = chemically synthesized
  source 1..20: mol_type = other DNA
tcacaaatattaggtgaact

SEQ ID NO: 35195 - DNA, 20 bp, synthetic construct
  misc_feature 1..20: note = chemically synthesized
  source 1..20: mol_type = other DNA
gtgaactaagaaatgtttat

SEQ ID NO: 35196 - DNA, 20 bp, synthetic construct
  misc_feature 1..20: note = chemically synthesized
  source 1..20: mol_type = other DNA
aatgtttatcagtcacatgt

SEQ ID NO: 35197 - DNA, 20 bp, synthetic construct
  misc_feature 1..20: note = chemically synthesized
  source 1..20: mol_type = other DNA
tcacatgttagatactttgc

SEQ ID NO: 35198 - DNA, 20 bp, synthetic construct
  misc_feature 1..20: note = chemically synthesized
  source 1..20: mol_type = other DNA
cacatgttagatactttgca

SEQ ID NO: 35199 - DNA, 20 bp, synthetic construct
  misc_feature 1..20: note = chemically synthesized
  source 1..20: mol_type = other DNA
tagatactttgcaaggtgtt

SEQ ID NO: 35200 - DNA, 20 bp, synthetic construct
  misc_feature 1..20: note = chemically synthesized
  source 1..20: mol_type = other DNA
actttgcaaggtgttgagca

SEQ ID NO: 35201 - DNA, 20 bp, synthetic construct
  misc_feature 1..20: note = chemically synthesized
  source 1..20: mol_type = other DNA
taaacaccatgtctatatgc

SEQ ID NO: 35202 - DNA, 20 bp, synthetic construct
  misc_feature 1..20: note = chemically synthesized
  source 1..20: mol_type = other DNA
acaccatgtctatatgcaag

SEQ ID NO: 35203 - DNA, 20 bp, synthetic construct
  misc_feature 1..20: note = chemically synthesized
  source 1..20: mol_type = other DNA
gtctatatgcaagaagcccc

SEQ ID NO: 35204 - DNA, 20 bp, synthetic construct
  misc_feature 1..20: note = chemically synthesized
  source 1..20: mol_type = other DNA
tatgcaagaagcccctagtc

SEQ ID NO: 35205 - DNA, 20 bp, synthetic construct
  misc_feature 1..20: note = chemically synthesized
  source 1..20: mol_type = other DNA
gcaagaagcccctagtctag

SEQ ID NO: 35206 - DNA, 20 bp, synthetic construct
  misc_feature 1..20: note = chemically synthesized
  source 1..20: mol_type = other DNA
agaagcccctagtctagtgg

SEQ ID NO: 35207 - DNA, 20 bp, synthetic construct
  misc_feature 1..20: note = chemically synthesized
  source 1..20: mol_type = other DNA
agcccctagtctagtggcag

SEQ ID NO: 35208 - DNA, 20 bp, synthetic construct
  misc_feature 1..20: note = chemically synthesized
  source 1..20: mol_type = other DNA
gcccctagtctagtggcaga

SEQ ID NO: 35209 - DNA, 20 bp, synthetic construct
  misc_feature 1..20: note = chemically synthesized
  source 1..20: mol_type = other DNA
ggaatattaaaaccttctca

SEQ ID NO: 35210 - DNA, 20 bp, synthetic construct
  misc_feature 1..20: note = chemically synthesized
  source 1..20: mol_type = other DNA
gaatattaaaaccttctcaa

SEQ ID NO: 35211 - DNA, 20 bp, synthetic construct
  misc_feature 1..20: note = chemically synthesized
  source 1..20: mol_type = other DNA
aaggactaatctcttctctt

SEQ ID NO: 35212 - DNA, 20 bp, synthetic construct
  misc_feature 1..20: note = chemically synthesized
  source 1..20: mol_type = other DNA
taatctcttctcttcagtaa

SEQ ID NO: 35213 - DNA, 20 bp, synthetic construct
  misc_feature 1..20: note = chemically synthesized
  source 1..20: mol_type = other DNA
ctcttctcttcagtaaaaga

SEQ ID NO: 35214 - DNA, 20 bp, synthetic construct
  misc_feature 1..20: note = chemically synthesized
  source 1..20: mol_type = other DNA
taaaagacagcaccacgttt

SEQ ID NO: 35215 - DNA, 20 bp, synthetic construct
  misc_feature 1..20: note = chemically synthesized
  source 1..20: mol_type = other DNA
aagacagcaccacgtttaag

SEQ ID NO: 35216 - DNA, 20 bp, synthetic construct
  misc_feature 1..20: note = chemically synthesized
  source 1..20: mol_type = other DNA
agacagcaccacgtttaagc

SEQ ID NO: 35217 - DNA, 20 bp, synthetic construct
  misc_feature 1..20: note = chemically synthesized
  source 1..20: mol_type = other DNA
gacagcaccacgtttaagca

SEQ ID NO: 35218 - DNA, 20 bp, synthetic construct
  misc_feature 1..20: note = chemically synthesized
  source 1..20: mol_type = other DNA
accacgtttaagcagggaaa

SEQ ID NO: 35219 - DNA, 20 bp, synthetic construct
  misc_feature 1..20: note = chemically synthesized
  source 1..20: mol_type = other DNA
gcagggaaatagctctcact

SEQ ID NO: 35220 - DNA, 20 bp, synthetic construct
  misc_feature 1..20: note = chemically synthesized
  source 1..20: mol_type = other DNA
aaatagctctcactcagtat

SEQ ID NO: 35221 - DNA, 20 bp, synthetic construct
  misc_feature 1..20: note = chemically synthesized
  source 1..20: mol_type = other DNA
aatagctctcactcagtatt

SEQ ID NO: 35222 - DNA, 20 bp, synthetic construct
  misc_feature 1..20: note = chemically synthesized
  source 1..20: mol_type = other DNA
atagctctcactcagtattg

SEQ ID NO: 35223 - DNA, 20 bp, synthetic construct
  misc_feature 1..20: note = chemically synthesized
  source 1..20: mol_type = other DNA
agctctcactcagtattggg

SEQ ID NO: 35224 - DNA, 20 bp, synthetic construct
  misc_feature 1..20: note = chemically synthesized
  source 1..20: mol_type = other DNA
tcactcagtattggggagaa

SEQ ID NO: 35225 - DNA, 20 bp, synthetic construct
  misc_feature 1..20: note = chemically synthesized
  source 1..20: mol_type = other DNA
agtattggggagaacagatt

SEQ ID NO: 35226 - DNA, 20 bp, synthetic construct
  misc_feature 1..20: note = chemically synthesized
  source 1..20: mol_type = other DNA
attggggagaacagattcag

SEQ ID NO: 35227 - DNA, 20 bp, synthetic construct
  misc_feature 1..20: note = chemically synthesized
  source 1..20: mol_type = other DNA
agaacagattcagaagccta

SEQ ID NO: 35228 - DNA, 20 bp, synthetic construct
  misc_feature 1..20: note = chemically synthesized
  source 1..20: mol_type = other DNA
cagattcagaagcctatggc

SEQ ID NO: 35229 - DNA, 20 bp, synthetic construct
  misc_feature 1..20: note = chemically synthesized
  source 1..20: mol_type = other DNA
agattcagaagcctatggct

SEQ ID NO: 35230 - DNA, 20 bp, synthetic construct
  misc_feature 1..20: note = chemically synthesized
  source 1..20: mol_type = other DNA
gattcagaagcctatggctg

SEQ ID NO: 35231 - DNA, 20 bp, synthetic construct
  misc_feature 1..20: note = chemically synthesized
  source 1..20: mol_type = other DNA
gaagcctatggctggggata

SEQ ID NO: 35232 - DNA, 20 bp, synthetic construct
  misc_feature 1..20: note = chemically synthesized
  source 1..20: mol_type = other DNA
aagcctatggctggggataa

SEQ ID NO: 35233 - DNA, 20 bp, synthetic construct
  misc_feature 1..20: note = chemically synthesized
  source 1..20: mol_type = other DNA
agcctatggctggggataaa

SEQ ID NO: 35234 - DNA, 20 bp, synthetic construct
  misc_feature 1..20: note = chemically synthesized
  source 1..20: mol_type = other DNA
ctatggctggggataaaggg

SEQ ID NO: 35235 - DNA, 20 bp, synthetic construct
  misc_feature 1..20: note = chemically synthesized
  source 1..20: mol_type = other DNA
tatggctggggataaaggga

SEQ ID NO: 35236 - DNA, 20 bp, synthetic construct
  misc_feature 1..20: note = chemically synthesized
  source 1..20: mol_type = other DNA
ggggataaagggaaggaaac

SEQ ID NO: 35237 - DNA, 20 bp, synthetic construct
  misc_feature 1..20: note = chemically synthesized
  source 1..20: mol_type = other DNA
gggataaagggaaggaaacc

SEQ ID NO: 35238 - DNA, 20 bp, synthetic construct
  misc_feature 1..20: note = chemically synthesized
  source 1..20: mol_type = other DNA
ataaagggaaggaaaccagg

SEQ ID NO: 35239 - DNA, 20 bp, synthetic construct
  misc_feature 1..20: note = chemically synthesized
  source 1..20: mol_type = other DNA
agggaaggaaaccaggaaga

SEQ ID NO: 35240 - DNA, 20 bp, synthetic construct
  misc_feature 1..20: note = chemically synthesized
  source 1..20: mol_type = other DNA
gatggatgtttaaatataaa

SEQ ID NO: 35241 - DNA, 20 bp, synthetic construct
  misc_feature 1..20: note = chemically synthesized
  source 1..20: mol_type = other DNA
tggatgtttaaatataaatg

SEQ ID NO: 35242 - DNA, 20 bp, synthetic construct
  misc_feature 1..20: note = chemically synthesized
  source 1..20: mol_type = other DNA
ataaatggagaacttgaaat

SEQ ID NO: 35243 - DNA, 20 bp, synthetic construct
  misc_feature 1..20: note = chemically synthesized
  source 1..20: mol_type = other DNA
aaatggagaacttgaaatga

SEQ ID NO: 35244 - DNA, 20 bp, synthetic construct
  misc_feature 1..20: note = chemically synthesized
  source 1..20: mol_type = other DNA
atggagaacttgaaatgaga

SEQ ID NO: 35245 - DNA, 20 bp, synthetic construct
  misc_feature 1..20: note = chemically synthesized
  source 1..20: mol_type = other DNA
tggagaacttgaaatgagag

SEQ ID NO: 35246 - DNA, 20 bp, synthetic construct
  misc_feature 1..20: note = chemically synthesized
  source 1..20: mol_type = other DNA
gaacttgaaatgagagaggt

SEQ ID NO: 35247 - DNA, 20 bp, synthetic construct
  misc_feature 1..20: note = chemically synthesized
  source 1..20: mol_type = other DNA
aaatgagagaggtcagattc

SEQ ID NO: 35248 - DNA, 20 bp, synthetic construct
  misc_feature 1..20: note = chemically synthesized
  source 1..20: mol_type = other DNA
aatgagagaggtcagattct

SEQ ID NO: 35249 - DNA, 20 bp, synthetic construct
  misc_feature 1..20: note = chemically synthesized
  source 1..20: mol_type = other DNA
atgagagaggtcagattcta

SEQ ID NO: 35250 - DNA, 20 bp, synthetic construct
  misc_feature 1..20: note = chemically synthesized
  source 1..20: mol_type = other DNA
cagattctagggaattactt

SEQ ID NO: 35251 - DNA, 20 bp, synthetic construct
  misc_feature 1..20: note = chemically synthesized
  source 1..20: mol_type = other DNA
attctagggaattacttcag

SEQ ID NO: 35252 - DNA, 20 bp, synthetic construct
  misc_feature 1..20: note = chemically synthesized
  source 1..20: mol_type = other DNA
ttctagggaattacttcagt

SEQ ID NO: 35253 - DNA, 20 bp, synthetic construct
  misc_feature 1..20: note = chemically synthesized
  source 1..20: mol_type = other DNA
gaattacttcagtaggccta

SEQ ID NO: 35254 - DNA, 20 bp, synthetic construct
  misc_feature 1..20: note = chemically synthesized
  source 1..20: mol_type = other DNA
ctatagaaaaataatttaaa

SEQ ID NO: 35255 - DNA, 20 bp, synthetic construct
  misc_feature 1..20: note = chemically synthesized
  source 1..20: mol_type = other DNA
aaaaataatttaaaaagaaa

SEQ ID NO: 35256 - DNA, 20 bp, synthetic construct
  misc_feature 1..20: note = chemically synthesized
  source 1..20: mol_type = other DNA
aaaagacactacttgtaaat

SEQ ID NO: 35257 - DNA, 20 bp, synthetic construct
  misc_feature 1..20: note = chemically synthesized
  source 1..20: mol_type = other DNA
cactacttgtaaataagaaa

SEQ ID NO: 35258 - DNA, 20 bp, synthetic construct
  misc_feature 1..20: note = chemically synthesized
  source 1..20: mol_type = other DNA
acttgtaaataagaaacagt

SEQ ID NO: 35259 - DNA, 20 bp, synthetic construct
  misc_feature 1..20: note = chemically synthesized
  source 1..20: mol_type = other DNA
acagtaagatgtttaaactg

SEQ ID NO: 35260 - DNA, 20 bp, synthetic construct
  misc_feature 1..20: note = chemically synthesized
  source 1..20: mol_type = other DNA
cagtaagatgtttaaactga

SEQ ID NO: 35261 - DNA, 20 bp, synthetic construct
  misc_feature 1..20: note = chemically synthesized
  source 1..20: mol_type = other DNA
gtaagatgtttaaactgaag

SEQ ID NO: 35262 - DNA, 20 bp, synthetic construct
  misc_feature 1..20: note = chemically synthesized
  source 1..20: mol_type = other DNA
tgaaggagatacactattat

SEQ ID NO: 35263 - DNA, 20 bp, synthetic construct
  misc_feature 1..20: note = chemically synthesized
  source 1..20: mol_type = other DNA
actattataagtgatgtctt

SEQ ID NO: 35264 - DNA, 20 bp, synthetic construct
  misc_feature 1..20: note = chemically synthesized
  source 1..20: mol_type = other DNA
ttataagtgatgtctttggc

SEQ ID NO: 35265 - DNA, 20 bp, synthetic construct
  misc_feature 1..20: note = chemically synthesized
  source 1..20: mol_type = other DNA
gctggcctaatcatttattc

SEQ ID NO: 35266 - DNA, 20 bp, synthetic construct
  misc_feature 1..20: note = chemically synthesized
  source 1..20: mol_type = other DNA
aatcatttattccagcccca

SEQ ID NO: 35267 - DNA, 20 bp, synthetic construct
  misc_feature 1..20: note = chemically synthesized
  source 1..20: mol_type = other DNA
cccaaagtctaacttataat

SEQ ID NO: 35268 - DNA, 20 bp, synthetic construct
  misc_feature 1..20: note = chemically synthesized
  source 1..20: mol_type = other DNA
gtctaacttataattagact

SEQ ID NO: 35269 - DNA, 20 bp, synthetic construct
  misc_feature 1..20: note = chemically synthesized
  source 1..20: mol_type = other DNA
ttagactgagctattgtcac

SEQ ID NO: 35270 - DNA, 20 bp, synthetic construct
  misc_feature 1..20: note = chemically synthesized
  source 1..20: mol_type = other DNA
gactgagctattgtcacaag

SEQ ID NO: 35271 - DNA, 20 bp, synthetic construct
  misc_feature 1..20: note = chemically synthesized
  source 1..20: mol_type = other DNA
gagctattgtcacaagtagt

SEQ ID NO: 35272 - DNA, 20 bp, synthetic construct
  misc_feature 1..20: note = chemically synthesized
  source 1..20: mol_type = other DNA
ctattgtcacaagtagtgag

SEQ ID NO: 35273 - DNA, 20 bp, synthetic construct
  misc_feature 1..20: note = chemically synthesized
  source 1..20: mol_type = other DNA
acaagtagtgagtagtactg

SEQ ID NO: 35274 - DNA, 20 bp, synthetic construct
  misc_feature 1..20: note = chemically synthesized
  source 1..20: mol_type = other DNA
caagtagtgagtagtactga

SEQ ID NO: 35275 - DNA, 20 bp, synthetic construct
  misc_feature 1..20: note = chemically synthesized
  source 1..20: mol_type = other DNA
gtagtactgaaggattctac

SEQ ID NO: 35276 - DNA, 20 bp, synthetic construct
  misc_feature 1..20: note = chemically synthesized
  source 1..20: mol_type = other DNA
agtactgaaggattctacaa

SEQ ID NO: 35277 - DNA, 20 bp, synthetic construct
  misc_feature 1..20: note = chemically synthesized
  source 1..20: mol_type = other DNA
gtactgaaggattctacaag

SEQ ID NO: 35278 - DNA, 20 bp, synthetic construct
  misc_feature 1..20: note = chemically synthesized
  source 1..20: mol_type = other DNA
tactgaaggattctacaaga

SEQ ID NO: 35279 - DNA, 20 bp, synthetic construct
  misc_feature 1..20: note = chemically synthesized
  source 1..20: mol_type = other DNA
gaatgtctgttccccatcac

SEQ ID NO: 35280 - DNA, 20 bp, synthetic construct
  misc_feature 1..20: note = chemically synthesized
  source 1..20: mol_type = other DNA
catcactagtccatgaaatc

SEQ ID NO: 35281 - DNA, 20 bp, synthetic construct
  misc_feature 1..20: note = chemically synthesized
  source 1..20: mol_type = other DNA
tcactagtccatgaaatctg

SEQ ID NO: 35282 - DNA, 20 bp, synthetic construct
  misc_feature 1..20: note = chemically synthesized
  source 1..20: mol_type = other DNA
cactagtccatgaaatctgg

SEQ ID NO: 35283 - DNA, 20 bp, synthetic construct
  misc_feature 1..20: note = chemically synthesized
  source 1..20: mol_type = other DNA
gtccatgaaatctggaggcc

SEQ ID NO: 35284 - DNA, 20 bp, synthetic construct
  misc_feature 1..20: note = chemically synthesized
  source 1..20: mol_type = other DNA
ttctcaatctgactgctcct

SEQ ID NO: 35285 - DNA, 20 bp, synthetic construct
  misc_feature 1..20: note = chemically synthesized
  source 1..20: mol_type = other DNA
atctgactgctccttagcta

SEQ ID NO: 35286 - DNA, 20 bp, synthetic construct
  misc_feature 1..20: note = chemically synthesized
  source 1..20: mol_type = other DNA
tgactgctccttagctacag

SEQ ID NO: 35287 - DNA, 20 bp, synthetic construct
  misc_feature 1..20: note = chemically synthesized
  source 1..20: mol_type = other DNA
ctgctccttagctacagtgg

SEQ ID NO: 35288 - DNA, 20 bp, synthetic construct
  misc_feature 1..20: note = chemically synthesized
  source 1..20: mol_type = other DNA
ctccttagctacagtggtag

SEQ ID NO: 35289 - DNA, 20 bp, synthetic construct
  misc_feature 1..20: note = chemically synthesized
  source 1..20: mol_type = other DNA
cttagctacagtggtagtgg

SEQ ID NO: 35290 - DNA, 20 bp, synthetic construct
  misc_feature 1..20: note = chemically synthesized
  source 1..20: mol_type = other DNA
tagctacagtggtagtggca

SEQ ID NO: 35291 - DNA, 20 bp, synthetic construct
  misc_feature 1..20: note = chemically synthesized
  source 1..20: mol_type = other DNA
cttcccacacttttctttct

SEQ ID NO: 35292 - DNA, 20 bp, synthetic construct
  misc_feature 1..20: note = chemically synthesized
  source 1..20: mol_type = other DNA
ttcccacacttttctttctt

SEQ ID NO: 35293 - DNA, 20 bp, synthetic construct
  misc_feature 1..20: note = chemically synthesized
  source 1..20: mol_type = other DNA
cttttctttcttaggctgtt

SEQ ID NO: 35294 - DNA, 20 bp, synthetic construct
  misc_feature 1..20: note = chemically synthesized
  source 1..20: mol_type = other DNA
ttcttaggctgttgagactt

SEQ ID NO: 35295 - DNA, 20 bp, synthetic construct
  misc_feature 1..20: note = chemically synthesized
  source 1..20: mol_type = other DNA
tgagactttagctgataatt

SEQ ID NO: 35296 - DNA, 20 bp, synthetic construct
  misc_feature 1..20: note = chemically synthesized
  source 1..20: mol_type = other DNA
gagactttagctgataattc

SEQ ID NO: 35297 - DNA, 20 bp, synthetic construct
  misc_feature 1..20: note = chemically synthesized
  source 1..20: mol_type = other DNA
ctttagctgataattcaggt

SEQ ID NO: 35298 - DNA, 20 bp, synthetic construct
  misc_feature 1..20: note = chemically synthesized
  source 1..20: mol_type = other DNA
ttcaggtaagtctttacatg

SEQ ID NO: 35299 - DNA, 20 bp, synthetic construct
  misc_feature 1..20: note = chemically synthesized
  source 1..20: mol_type = other DNA
tcaggtaagtctttacatgc

SEQ ID NO: 35300 - DNA, 20 bp, synthetic construct
  misc_feature 1..20: note = chemically synthesized
  source 1..20: mol_type = other DNA
tctttacatgcaggaaaatg

SEQ ID NO: 35301 - DNA, 20 bp, synthetic construct
  misc_feature 1..20: note = chemically synthesized
  source 1..20: mol_type = other DNA
acatgcaggaaaatgtggat

SEQ ID NO: 35302 - DNA, 20 bp, synthetic construct
  misc_feature 1..20: note = chemically synthesized
  source 1..20: mol_type = other DNA
catgcaggaaaatgtggatt

SEQ ID NO: 35303 - DNA, 20 bp, synthetic construct
  misc_feature 1..20: note = chemically synthesized
  source 1..20: mol_type = other DNA
atgcaggaaaatgtggatta

SEQ ID NO: 35304 - DNA, 20 bp, synthetic construct
  misc_feature 1..20: note = chemically synthesized
  source 1..20: mol_type = other DNA
gattagggatcactactgtg

SEQ ID NO: 35305 - DNA, 20 bp, synthetic construct
  misc_feature 1..20: note = chemically synthesized
  source 1..20: mol_type = other DNA
attagggatcactactgtga

SEQ ID NO: 35306 - DNA, 20 bp, synthetic construct
  misc_feature 1..20: note = chemically synthesized
  source 1..20: mol_type = other DNA
cactactgtgaaggcaatta

SEQ ID NO: 35307 - DNA, 20 bp, synthetic construct
  misc_feature 1..20: note = chemically synthesized
  source 1..20: mol_type = other DNA
actactgtgaaggcaattac

SEQ ID NO: 35308 - DNA, 20 bp, synthetic construct
  misc_feature 1..20: note = chemically synthesized
  source 1..20: mol_type = other DNA
tgtgaaggcaattacaggtt

SEQ ID NO: 35309 - DNA, 20 bp, synthetic construct
  misc_feature 1..20: note = chemically synthesized
  source 1..20: mol_type = other DNA
gtgaaggcaattacaggttt

SEQ ID NO: 35310 - DNA, 20 bp, synthetic construct
  misc_feature 1..20: note = chemically synthesized
  source 1..20: mol_type = other DNA
aaggcaattacaggtttagg

SEQ ID NO: 35311 - DNA, 20 bp, synthetic construct
  misc_feature 1..20: note = chemically synthesized
  source 1..20: mol_type = other DNA
gcaattacaggtttaggtgg

SEQ ID NO: 35312 - DNA, 20 bp, synthetic construct
  misc_feature 1..20: note = chemically synthesized
  source 1..20: mol_type = other DNA
tacaggtttaggtggtagac

SEQ ID NO: 35313 - DNA, 20 bp, synthetic construct
  misc_feature 1..20: note = chemically synthesized
  source 1..20: mol_type = other DNA
gtggtagaccagaaaaaaat

SEQ ID NO: 35314 - DNA, 20 bp, synthetic construct
  misc_feature 1..20: note = chemically synthesized
  source 1..20: mol_type = other DNA
gaccagaaaaaaattagtgt

SEQ ID NO: 35315 - DNA, 20 bp, synthetic construct
  misc_feature 1..20: note = chemically synthesized
  source 1..20: mol_type = other DNA
aaaaattagtgttagctttc

SEQ ID NO: 35316 - DNA, 20 bp, synthetic construct
  misc_feature 1..20: note = chemically synthesized
  source 1..20: mol_type = other DNA
aaatccccttgaatgcccca

SEQ ID NO: 35317 - DNA, 20 bp, synthetic construct
  misc_feature 1..20: note = chemically synthesized
  source 1..20: mol_type = other DNA
cgaattctttaaaatctgca

SEQ ID NO: 35318 - DNA, 20 bp, synthetic construct
  misc_feature 1..20: note = chemically synthesized
  source 1..20: mol_type = other DNA
tctttaaaatctgcatagtt

SEQ ID NO: 35319 - DNA, 20 bp, synthetic construct
  misc_feature 1..20: note = chemically synthesized
  source 1..20: mol_type = other DNA
ctttaaaatctgcatagtta

SEQ ID NO: 35320 - DNA, 20 bp, synthetic construct
  misc_feature 1..20: note = chemically synthesized
  source 1..20: mol_type = other DNA
tttaaaatctgcatagttaa

SEQ ID NO: 35321 - DNA, 20 bp, synthetic construct
  misc_feature 1..20: note = chemically synthesized
  source 1..20: mol_type = other DNA
atctgcatagttaagggtaa

SEQ ID NO: 35322 - DNA, 20 bp, synthetic construct
  misc_feature 1..20: note = chemically synthesized
  source 1..20: mol_type = other DNA
catagttaagggtaacagtt

SEQ ID NO: 35323 - DNA, 20 bp, synthetic construct
  misc_feature 1..20: note = chemically synthesized
  source 1..20: mol_type = other DNA
agttaagggtaacagtttag

SEQ ID NO: 35324 - DNA, 20 bp, synthetic construct
  misc_feature 1..20: note = chemically synthesized
  source 1..20: mol_type = other DNA
gggtaacagtttagaagttg

SEQ ID NO: 35325 - DNA, 20 bp, synthetic construct
  misc_feature 1..20: note = chemically synthesized
  source 1..20: mol_type = other DNA
tttacataattttttttctg

SEQ ID NO: 35326 - DNA, 20 bp, synthetic construct
  misc_feature 1..20: note = chemically synthesized
  source 1..20: mol_type = other DNA
tacataattttttttctgaa

SEQ ID NO: 35327 - DNA, 20 bp, synthetic construct
  misc_feature 1..20: note = chemically synthesized
  source 1..20: mol_type = other DNA
aatgcttaaatgcatataaa

SEQ ID NO: 35328 - DNA, 20 bp, synthetic construct
  misc_feature 1..20: note = chemically synthesized
  source 1..20: mol_type = other DNA
atataaacagttgaaactcc

SEQ ID NO: 35329 - DNA, 20 bp, synthetic construct
  misc_feature 1..20: note = chemically synthesized
  source 1..20: mol_type = other DNA
actccaagaatttgattacg

SEQ ID NO: 35330 - DNA, 20 bp, synthetic construct
  misc_feature 1..20: note = chemically synthesized
  source 1..20: mol_type = other DNA
ctccaagaatttgattacgt

SEQ ID NO: 35331 - DNA, 20 bp, synthetic construct
  misc_feature 1..20: note = chemically synthesized
  source 1..20: mol_type = other DNA
caagaatttgattacgtagg

SEQ ID NO: 35332 - DNA, 20 bp, synthetic construct
  misc_feature 1..20: note = chemically synthesized
  source 1..20: mol_type = other DNA
aagaatttgattacgtaggt

SEQ ID NO: 35333 - DNA, 20 bp, synthetic construct
  misc_feature 1..20: note = chemically synthesized
  source 1..20: mol_type = other DNA
gaatttgattacgtaggtag

SEQ ID NO: 35334 - DNA, 20 bp, synthetic construct
  misc_feature 1..20: note = chemically synthesized
  source 1..20: mol_type = other DNA
ttgattacgtaggtaggaga

SEQ ID NO: 35335 - DNA, 20 bp, synthetic construct
  misc_feature 1..20: note = chemically synthesized
  source 1..20: mol_type = other DNA
cgtaggtaggagatagatcc

SEQ ID NO: 35336 - DNA, 20 bp, synthetic construct
  misc_feature 1..20: note = chemically synthesized
  source 1..20: mol_type = other DNA
gagatagatcctggaatgtg

SEQ ID NO: 35337 - DNA, 20 bp, synthetic construct
  misc_feature 1..20: note = chemically synthesized
  source 1..20: mol_type = other DNA
agatcctggaatgtgcagtt

SEQ ID NO: 35338 - DNA, 20 bp, synthetic construct
  misc_feature 1..20: note = chemically synthesized
  source 1..20: mol_type = other DNA
tgtgcagttaagaatacaaa

SEQ ID NO: 35339 - DNA, 20 bp, synthetic construct
  misc_feature 1..20: note = chemically synthesized
  source 1..20: mol_type = other DNA
gttaagaatacaaatagtat

SEQ ID NO: 35340 - DNA, 20 bp, synthetic construct
  misc_feature 1..20: note = chemically synthesized
  source 1..20: mol_type = other DNA
caaatagtatgagtaaccct

SEQ ID NO: 35341 - DNA, 20 bp, synthetic construct
  misc_feature 1..20: note = chemically synthesized
  source 1..20: mol_type = other DNA
taaccctgagaatgtatttt

SEQ ID NO: 35342 - DNA, 20 bp, synthetic construct
  misc_feature 1..20: note = chemically synthesized
  source 1..20: mol_type = other DNA
attgatgtcattattatctt

SEQ ID NO: 35343 - DNA, 20 bp, synthetic construct
  misc_feature 1..20: note = chemically synthesized
  source 1..20: mol_type = other DNA
ttgatgtcattattatcttt

SEQ ID NO: 35344 - DNA, 20 bp, synthetic construct
  misc_feature 1..20: note = chemically synthesized
  source 1..20: mol_type = other DNA
tatctttaggaaaaaattct

SEQ ID NO: 35345 - DNA, 20 bp, synthetic construct
  misc_feature 1..20: note = chemically synthesized
  source 1..20: mol_type = other DNA
aaaaaattctgagaatgata

SEQ ID NO: 35346 - DNA, 20 bp, synthetic construct
  misc_feature 1..20: note = chemically synthesized
  source 1..20: mol_type = other DNA
ttctgagaatgatatagtcg

SEQ ID NO: 35347 - DNA, 20 bp, synthetic construct
  misc_feature 1..20: note = chemically synthesized
  source 1..20: mol_type = other DNA
atagtcgaagtgataccttg

SEQ ID NO: 35348 - DNA, 20 bp, synthetic construct
  misc_feature 1..20: note = chemically synthesized
  source 1..20: mol_type = other DNA
tagtcgaagtgataccttga

SEQ ID NO: 35349 - DNA, 20 bp, synthetic construct
  misc_feature 1..20: note = chemically synthesized
  source 1..20: mol_type = other DNA
tcgaagtgataccttgaagg

SEQ ID NO: 35350 - DNA, 20 bp, synthetic construct
  misc_feature 1..20: note = chemically synthesized
  source 1..20: mol_type = other DNA
gaaggtagaactgtgcactg

SEQ ID NO: 35351 - DNA, 20 bp, synthetic construct
  misc_feature 1..20: note = chemically synthesized
  source 1..20: mol_type = other DNA
actgtgcactgtggtaataa

SEQ ID NO: 35352 - DNA, 20 bp, synthetic construct
  misc_feature 1..20: note = chemically synthesized
  source 1..20: mol_type = other DNA
cactgtggtaataacagaaa

SEQ ID NO: 35353 - DNA, 20 bp, synthetic construct
  misc_feature 1..20: note = chemically synthesized
  source 1..20: mol_type = other DNA
gtggtaataacagaaacaga

SEQ ID NO: 35354 - DNA, 20 bp, synthetic construct
  misc_feature 1..20: note = chemically synthesized
  source 1..20: mol_type = other DNA
acatttcttctatataaacc

SEQ ID NO: 35355 - DNA, 20 bp, synthetic construct
  misc_feature 1..20: note = chemically synthesized
  source 1..20: mol_type = other DNA
catttcttctatataaaccc

SEQ ID NO: 35356 - DNA, 20 bp, synthetic construct
  misc_feature 1..20: note = chemically synthesized
  source 1..20: mol_type = other DNA
tataaacccaggatgtcgtc

SEQ ID NO: 35357 - DNA, 20 bp, synthetic construct
  misc_feature 1..20: note = chemically synthesized
  source 1..20: mol_type = other DNA
aaacccaggatgtcgtccag

SEQ ID NO: 35358 - DNA, 20 bp, synthetic construct
  misc_feature 1..20: note = chemically synthesized
  source 1..20: mol_type = other DNA
cccaggatgtcgtccagcgg

SEQ ID NO: 35359 - DNA, 20 bp, synthetic construct
  misc_feature 1..20: note = chemically synthesized
  source 1..20: mol_type = other DNA
tcccatcccttcctattgac

SEQ ID NO: 35360 - DNA, 20 bp, synthetic construct
  misc_feature 1..20: note = chemically synthesized
  source 1..20: mol_type = other DNA
cttcctattgactggttttc

SEQ ID NO: 35361 - DNA, 20 bp, synthetic construct
  misc_feature 1..20: note = chemically synthesized
  source 1..20: mol_type = other DNA
ttcctattgactggttttcc

SEQ ID NO: 35362 - DNA, 20 bp, synthetic construct
  misc_feature 1..20: note = chemically synthesized
  source 1..20: mol_type = other DNA
attgactggttttccaggct

SEQ ID NO: 35363 - DNA, 20 bp, synthetic construct
  misc_feature 1..20: note = chemically synthesized
  source 1..20: mol_type = other DNA
tgactggttttccaggcttg

SEQ ID NO: 35364 - DNA, 20 bp, synthetic construct
  misc_feature 1..20: note = chemically synthesized
  source 1..20: mol_type = other DNA
gactggttttccaggcttgg

SEQ ID NO: 35365 - DNA, 20 bp, synthetic construct
  misc_feature 1..20: note = chemically synthesized
  source 1..20: mol_type = other DNA
tggttttccaggcttggagg

SEQ ID NO: 35366 - DNA, 20 bp, synthetic construct
  misc_feature 1..20: note = chemically synthesized
  source 1..20: mol_type = other DNA
gcttggaggaagctcatcac

SEQ ID NO: 35367 - DNA, 20 bp, synthetic construct
  misc_feature 1..20: note = chemically synthesized
  source 1..20: mol_type = other DNA
atgtatatatccatcctttt

SEQ ID NO: 35368 - DNA, 20 bp, synthetic construct
  misc_feature 1..20: note = chemically synthesized
  source 1..20: mol_type = other DNA
atatccatcctttttggcaa

SEQ ID NO: 35369 - DNA, 20 bp, synthetic construct
  misc_feature 1..20: note = chemically synthesized
  source 1..20: mol_type = other DNA
gcaccctccttcttctcatt

SEQ ID NO: 35370 - DNA, 20 bp, synthetic construct
  misc_feature 1..20: note = chemically synthesized
  source 1..20: mol_type = other DNA
caccctccttcttctcatta

SEQ ID NO: 35371 - DNA, 20 bp, synthetic construct
  misc_feature 1..20: note = chemically synthesized
  source 1..20: mol_type = other DNA
cctccttcttctcattaagg

SEQ ID NO: 35372 - DNA, 20 bp, synthetic construct
  misc_feature 1..20: note = chemically synthesized
  source 1..20: mol_type = other DNA
aggaagatcacaatcttcat

SEQ ID NO: 35373 - DNA, 20 bp, synthetic construct
  misc_feature 1..20: note = chemically synthesized
  source 1..20: mol_type = other DNA
tgagcccatgtacttctttc

SEQ ID NO: 35374 - DNA, 20 bp, synthetic construct
  misc_feature 1..20: note = chemically synthesized
  source 1..20: mol_type = other DNA
gtacttctttctggccatgc

SEQ ID NO: 35375 - DNA, 20 bp, synthetic construct
  misc_feature 1..20: note = chemically synthesized
  source 1..20: mol_type = other DNA
tctggccatgctggctgcca

SEQ ID NO: 35376 - DNA, 20 bp, synthetic construct
  misc_feature 1..20: note = chemically synthesized
  source 1..20: mol_type = other DNA
catgctggctgccacagacc

SEQ ID NO: 35377 - DNA, 20 bp, synthetic construct
  misc_feature 1..20: note = chemically synthesized
  source 1..20: mol_type = other DNA
atgctggctgccacagacct

SEQ ID NO: 35378 - DNA, 20 bp, synthetic construct
  misc_feature 1..20: note = chemically synthesized
  source 1..20: mol_type = other DNA
tgctggctgccacagacctg

SEQ ID NO: 35379 - DNA, 20 bp, synthetic construct
  misc_feature 1..20: note = chemically synthesized
  source 1..20: mol_type = other DNA
ggctgccacagacctggggc

SEQ ID NO: 35380 - DNA, 20 bp, synthetic construct
  misc_feature 1..20: note = chemically synthesized
  source 1..20: mol_type = other DNA
ggccctgaccacaatgccca

SEQ ID NO: 35381 - DNA, 20 bp, synthetic construct
  misc_feature 1..20: note = chemically synthesized
  source 1..20: mol_type = other DNA
gaccacaatgcccacggtgc

SEQ ID NO: 35382 - DNA, 20 bp, synthetic construct
  misc_feature 1..20: note = chemically synthesized
  source 1..20: mol_type = other DNA
accacaatgcccacggtgct

SEQ ID NO: 35383 - DNA, 20 bp, synthetic construct
  misc_feature 1..20: note = chemically synthesized
  source 1..20: mol_type = other DNA
cacaatgcccacggtgctgg

SEQ ID NO: 35384 - DNA, 20 bp, synthetic construct
  misc_feature 1..20: note = chemically synthesized
  source 1..20: mol_type = other DNA
ccacggtgctgggagtcctc

SEQ ID NO: 35385 - DNA, 20 bp, synthetic construct
  misc_feature 1..20: note = chemically synthesized
  source 1..20: mol_type = other DNA
ggtgctgggagtcctctggc

SEQ ID NO: 35386 - DNA, 20 bp, synthetic construct
  misc_feature 1..20: note = chemically synthesized
  source 1..20: mol_type = other DNA
ggagtcctctggctggatca

SEQ ID NO: 35387 - DNA, 20 bp, synthetic construct
  misc_feature 1..20: note = chemically synthesized
  source 1..20: mol_type = other DNA
gagtcctctggctggatcac

SEQ ID NO: 35388 - DNA, 20 bp, synthetic construct
  misc_feature 1..20: note = chemically synthesized
  source 1..20: mol_type = other DNA
agtcctctggctggatcaca

SEQ ID NO: 35389 - DNA, 20 bp, synthetic construct
  misc_feature 1..20: note = chemically synthesized
  source 1..20: mol_type = other DNA
tcctctggctggatcacagg

SEQ ID NO: 35390 - DNA, 20 bp, synthetic construct
  misc_feature 1..20: note = chemically synthesized
  source 1..20: mol_type = other DNA
tggctggatcacagggagat

SEQ ID NO: 35391 - DNA, 20 bp, synthetic construct
  misc_feature 1..20: note = chemically synthesized
  source 1..20: mol_type = other DNA
ctggatcacagggagattgg

SEQ ID NO: 35392 - DNA, 20 bp, synthetic construct
  misc_feature 1..20: note = chemically synthesized
  source 1..20: mol_type = other DNA
tcacagggagattggaagtg

SEQ ID NO: 35393 - DNA, 20 bp, synthetic construct
  misc_feature 1..20: note = chemically synthesized
  source 1..20: mol_type = other DNA
gaagtgcggcctgcttttcc

SEQ ID NO: 35394 - DNA, 20 bp, synthetic construct
  misc_feature 1..20: note = chemically synthesized
  source 1..20: mol_type = other DNA
aagtgcggcctgcttttccc

SEQ ID NO: 35395 - DNA, 20 bp, synthetic construct
  misc_feature 1..20: note = chemically synthesized
  source 1..20: mol_type = other DNA
tacactcactttcctttctc

SEQ ID NO: 35396 - DNA, 20 bp, synthetic construct
  misc_feature 1..20: note = chemically synthesized
  source 1..20: mol_type = other DNA
tcactttcctttctcgagtc

SEQ ID NO: 35397 - DNA, 20 bp, synthetic construct
  misc_feature 1..20: note = chemically synthesized
  source 1..20: mol_type = other DNA
gtctggcattctgcttgcca

SEQ ID NO: 35398 - DNA, 20 bp, synthetic construct
  misc_feature 1..20: note = chemically synthesized
  source 1..20: mol_type = other DNA
attgccatctgcaaccctct

SEQ ID NO: 35399 - DNA, 20 bp, synthetic construct
  misc_feature 1..20: note = chemically synthesized
  source 1..20: mol_type = other DNA
ctctgtacttactaatactc

SEQ ID NO: 35400 - DNA, 20 bp, synthetic construct
  misc_feature 1..20: note = chemically synthesized
  source 1..20: mol_type = other DNA
tgtacttactaatactcgag

SEQ ID NO: 35401 - DNA, 20 bp, synthetic construct
  misc_feature 1..20: note = chemically synthesized
  source 1..20: mol_type = other DNA
ttactaatactcgagtagtg

SEQ ID NO: 35402 - DNA, 20 bp, synthetic construct
  misc_feature 1..20: note = chemically synthesized
  source 1..20: mol_type = other DNA
aatactcgagtagtgaagat

SEQ ID NO: 35403 - DNA, 20 bp, synthetic construct
  misc_feature 1..20: note = chemically synthesized
  source 1..20: mol_type = other DNA
atactcgagtagtgaagatt

SEQ ID NO: 35404 - DNA, 20 bp, synthetic construct
  misc_feature 1..20: note = chemically synthesized
  source 1..20: mol_type = other DNA
tcgagtagtgaagattgggc

SEQ ID NO: 35405 - DNA, 20 bp, synthetic construct
  misc_feature 1..20: note = chemically synthesized
  source 1..20: mol_type = other DNA
cgagtagtgaagattgggct

SEQ ID NO: 35406 - DNA, 20 bp, synthetic construct
  misc_feature 1..20: note = chemically synthesized
  source 1..20: mol_type = other DNA
agtagtgaagattgggctgg

SEQ ID NO: 35407 - DNA, 20 bp, synthetic construct
  misc_feature 1..20: note = chemically synthesized
  source 1..20: mol_type = other DNA
attgggctgggagttctgat

SEQ ID NO: 35408 - DNA, 20 bp, synthetic construct
  misc_feature 1..20: note = chemically synthesized
  source 1..20: mol_type = other DNA
ttgggctgggagttctgatg

SEQ ID NO: 35409 - DNA, 20 bp, synthetic construct
  misc_feature 1..20: note = chemically synthesized
  source 1..20: mol_type = other DNA
tgggctgggagttctgatga

SEQ ID NO: 35410 - DNA, 20 bp, synthetic construct
  misc_feature 1..20: note = chemically synthesized
  source 1..20: mol_type = other DNA
gggctgggagttctgatgag

SEQ ID NO: 35411 - DNA, 20 bp, synthetic construct
  misc_feature 1..20: note = chemically synthesized
  source 1..20: mol_type = other DNA
gtatccgttgttcccccaat

SEQ ID NO: 35412 - DNA, 20 bp, synthetic construct
  misc_feature 1..20: note = chemically synthesized
  source 1..20: mol_type = other DNA
tatccgttgttcccccaatc

SEQ ID NO: 35413 - DNA, 20 bp, synthetic construct
  misc_feature 1..20: note = chemically synthesized
  source 1..20: mol_type = other DNA
cacatgcattctgccttcac

SEQ ID NO: 35414 - DNA, 20 bp, synthetic construct
  misc_feature 1..20: note = chemically synthesized
  source 1..20: mol_type = other DNA
acatgcattctgccttcacc

SEQ ID NO: 35415 - DNA, 20 bp, synthetic construct
  misc_feature 1..20: note = chemically synthesized
  source 1..20: mol_type = other DNA
caccttcaaccgactgtacc

SEQ ID NO: 35416 - DNA, 20 bp, synthetic construct
  misc_feature 1..20: note = chemically synthesized
  source 1..20: mol_type = other DNA
actgtacccagctgtgcttg

SEQ ID NO: 35417 - DNA, 20 bp, synthetic construct
  misc_feature 1..20: note = chemically synthesized
  source 1..20: mol_type = other DNA
tgtagtctttatatttgtgc

SEQ ID NO: 35418 - DNA, 20 bp, synthetic construct
  misc_feature 1..20: note = chemically synthesized
  source 1..20: mol_type = other DNA
tctcctatgtgttgatactc

SEQ ID NO: 35419 - DNA, 20 bp, synthetic construct
  misc_feature 1..20: note = chemically synthesized
  source 1..20: mol_type = other DNA
ttgatactcaagactgtcct

SEQ ID NO: 35420 - DNA, 20 bp, synthetic construct
  misc_feature 1..20: note = chemically synthesized
  source 1..20: mol_type = other DNA
actgtcctgagcattgcctc

SEQ ID NO: 35421 - DNA, 20 bp, synthetic construct
  misc_feature 1..20: note = chemically synthesized
  source 1..20: mol_type = other DNA
tgtcctgagcattgcctcca

SEQ ID NO: 35422 - DNA, 20 bp, synthetic construct
  misc_feature 1..20: note = chemically synthesized
  source 1..20: mol_type = other DNA
tcctgagcattgcctccaga

SEQ ID NO: 35423 - DNA, 20 bp, synthetic construct
  misc_feature 1..20: note = chemically synthesized
  source 1..20: mol_type = other DNA
cctgagcattgcctccagag

SEQ ID NO: 35424 - DNA, 20 bp, synthetic construct
  misc_feature 1..20: note = chemically synthesized
  source 1..20: mol_type = other DNA
tgagcattgcctccagagag

SEQ ID NO: 35425 - DNA, 20 bp, synthetic construct
  misc_feature 1..20: note = chemically synthesized
  source 1..20: mol_type = other DNA
agcattgcctccagagagga

SEQ ID NO: 35426 - DNA, 20 bp, synthetic construct
  misc_feature 1..20: note = chemically synthesized
  source 1..20: mol_type = other DNA
gcattgcctccagagaggag

SEQ ID NO: 35427 - DNA, 20 bp, synthetic construct
  misc_feature 1..20: note = chemically synthesized
  source 1..20: mol_type = other DNA
cattgcctccagagaggaga

SEQ ID NO: 35428 - DNA, 20 bp, synthetic construct
  misc_feature 1..20: note = chemically synthesized
  source 1..20: mol_type = other DNA
cctccagagaggagagggcc

SEQ ID NO: 35429 - DNA, 20 bp, synthetic construct
  misc_feature 1..20: note = chemically synthesized
  source 1..20: mol_type = other DNA
ctccagagaggagagggcca

SEQ ID NO: 35430 - DNA, 20 bp, synthetic construct
  misc_feature 1..20: note = chemically synthesized
  source 1..20: mol_type = other DNA
ctcccatatctgctgtgtcc

SEQ ID NO: 35431 - DNA, 20 bp, synthetic construct
  misc_feature 1..20: note = chemically synthesized
  source 1..20: mol_type = other DNA
tgtcctggttttttatgtca

SEQ ID NO: 35432 - DNA, 20 bp, synthetic construct
  misc_feature 1..20: note = chemically synthesized
  source 1..20: mol_type = other DNA
gttttttatgtcacagtgat

SEQ ID NO: 35433 - DNA, 20 bp, synthetic construct
  misc_feature 1..20: note = chemically synthesized
  source 1..20: mol_type = other DNA
ttgtctctgattcatcgttt

SEQ ID NO: 35434 - DNA, 20 bp, synthetic construct
  misc_feature 1..20: note = chemically synthesized
  source 1..20: mol_type = other DNA
ctctgattcatcgttttgga

SEQ ID NO: 35435 - DNA, 20 bp, synthetic construct
  misc_feature 1..20: note = chemically synthesized
  source 1..20: mol_type = other DNA
tgattcatcgttttggaaag

SEQ ID NO: 35436 - DNA, 20 bp, synthetic construct
  misc_feature 1..20: note = chemically synthesized
  source 1..20: mol_type = other DNA
gattcatcgttttggaaagc

SEQ ID NO: 35437 - DNA, 20 bp, synthetic construct
  misc_feature 1..20: note = chemically synthesized
  source 1..20: mol_type = other DNA
catattgttcacctcattat

SEQ ID NO: 35438 - DNA, 20 bp, synthetic construct
  misc_feature 1..20: note = chemically synthesized
  source 1..20: mol_type = other DNA
ctaatgaatcctataacata

SEQ ID NO: 35439 - DNA, 20 bp, synthetic construct
  misc_feature 1..20: note = chemically synthesized
  source 1..20: mol_type = other DNA
atcctataacatatagtgtc

SEQ ID NO: 35440 - DNA, 20 bp, synthetic construct
  misc_feature 1..20: note = chemically synthesized
  source 1..20: mol_type = other DNA
taacatatagtgtcaagacc

SEQ ID NO: 35441 - DNA, 20 bp, synthetic construct
  misc_feature 1..20: note = chemically synthesized
  source 1..20: mol_type = other DNA
catatagtgtcaagaccaag

SEQ ID NO: 35442 - DNA, 20 bp, synthetic construct
  misc_feature 1..20: note = chemically synthesized
  source 1..20: mol_type = other DNA
gtgtcaagaccaagcagatt

SEQ ID NO: 35443 - DNA, 20 bp, synthetic construct
  misc_feature 1..20: note = chemically synthesized
  source 1..20: mol_type = other DNA
cttcacctttttactaccca

SEQ ID NO: 35444 - DNA, 20 bp, synthetic construct
  misc_feature 1..20: note = chemically synthesized
  source 1..20: mol_type = other DNA
ctttttactacccatagaat

SEQ ID NO: 35445 - DNA, 20 bp, synthetic construct
  misc_feature 1..20: note = chemically synthesized
  source 1..20: mol_type = other DNA
aacctgatctccaatcatca

SEQ ID NO: 35446 - DNA, 20 bp, synthetic construct
  misc_feature 1..20: note = chemically synthesized
  source 1..20: mol_type = other DNA
aatcatcacagtcactctca

SEQ ID NO: 35447 - DNA, 20 bp, synthetic construct
  misc_feature 1..20: note = chemically synthesized
  source 1..20: mol_type = other DNA
aatgtaaaaactctaatatt

SEQ ID NO: 35448 - DNA, 20 bp, synthetic construct
  misc_feature 1..20: note = chemically synthesized
  source 1..20: mol_type = other DNA
gtaaaaactctaatatttag

SEQ ID NO: 35449 - DNA, 20 bp, synthetic construct
  misc_feature 1..20: note = chemically synthesized
  source 1..20: mol_type = other DNA
taaaaactctaatatttagc

SEQ ID NO: 35450 - DNA, 20 bp, synthetic construct
  misc_feature 1..20: note = chemically synthesized
  source 1..20: mol_type = other DNA
aaaactctaatatttagcag

SEQ ID NO: 35451 - DNA, 20 bp, synthetic construct
  misc_feature 1..20: note = chemically synthesized
  source 1..20: mol_type = other DNA
aactctaatatttagcagga

SEQ ID NO: 35452 - DNA, 20 bp, synthetic construct
  misc_feature 1..20: note = chemically synthesized
  source 1..20: mol_type = other DNA
taatatttagcaggagagca

SEQ ID NO: 35453 - DNA, 20 bp, synthetic construct
  misc_feature 1..20: note = chemically synthesized
  source 1..20: mol_type = other DNA
tatttagcaggagagcaaag

SEQ ID NO: 35454 - DNA, 20 bp, synthetic construct
  misc_feature 1..20: note = chemically synthesized
  source 1..20: mol_type = other DNA
gagcaaagaagtctcatatc

SEQ ID NO: 35455 - DNA, 20 bp, synthetic construct
  misc_feature 1..20: note = chemically synthesized
  source 1..20: mol_type = other DNA
gcatgcatgctcatatgact

SEQ ID NO: 35456 - DNA, 20 bp, synthetic construct
  misc_feature 1..20: note = chemically synthesized
  source 1..20: mol_type = other DNA
gctcatatgacttggtaaaa

SEQ ID NO: 35457 - DNA, 20 bp, synthetic construct
  misc_feature 1..20: note = chemically synthesized
  source 1..20: mol_type = other DNA
ctcatatgacttggtaaaat

SEQ ID NO: 35458 - DNA, 20 bp, synthetic construct
  misc_feature 1..20: note = chemically synthesized
  source 1..20: mol_type = other DNA
gtaaaataggtgttaaaata

SEQ ID NO: 35459 - DNA, 20 bp, synthetic construct
  misc_feature 1..20: note = chemically synthesized
  source 1..20: mol_type = other DNA
aggtgttaaaatacagcttc

SEQ ID NO: 35460 - DNA, 20 bp, synthetic construct
  misc_feature 1..20: note = chemically synthesized
  source 1..20: mol_type = other DNA
atacagcttcaagtttccct

SEQ ID NO: 35461 - DNA, 20 bp, synthetic construct
  misc_feature 1..20: note = chemically synthesized
  source 1..20: mol_type = other DNA
tacagcttcaagtttcccta

SEQ ID NO: 35462 - DNA, 20 bp, synthetic construct
  misc_feature 1..20: note = chemically synthesized
  source 1..20: mol_type = other DNA
tttccctaaggtatctcttt

SEQ ID NO: 35463 - DNA, 20 bp, synthetic construct
  misc_feature 1..20: note = chemically synthesized
  source 1..20: mol_type = other DNA
tctctttaagcccaactctt

SEQ ID NO: 35464 - DNA, 20 bp, synthetic construct
  misc_feature 1..20: note = chemically synthesized
  source 1..20: mol_type = other DNA
cccaactctttagctaaatg

SEQ ID NO: 35465 - DNA, 20 bp, synthetic construct
  misc_feature 1..20: note = chemically synthesized
  source 1..20: mol_type = other DNA
ttttgttgcattcctgtaaa

SEQ ID NO: 35466 - DNA, 20 bp, synthetic construct
  misc_feature 1..20: note = chemically synthesized
  source 1..20: mol_type = other DNA
tgtaaacggaatatttctct

SEQ ID NO: 35467 - DNA, 20 bp, synthetic construct
  misc_feature 1..20: note = chemically synthesized
  source 1..20: mol_type = other DNA
ttattgtgataacaatacct

SEQ ID NO: 35468 - DNA, 20 bp, synthetic construct
  misc_feature 1..20: note = chemically synthesized
  source 1..20: mol_type = other DNA
tattgtgataacaatacctt

SEQ ID NO: 35469 - DNA, 20 bp, synthetic construct
  misc_feature 1..20: note = chemically synthesized
  source 1..20: mol_type = other DNA
acaataccttaggcatctat

SEQ ID NO: 35470 - DNA, 20 bp, synthetic construct
  misc_feature 1..20: note = chemically synthesized
  source 1..20: mol_type = other DNA
actaacatatgtttatttca

SEQ ID NO: 35471 - DNA, 20 bp, synthetic construct
  misc_feature 1..20: note = chemically synthesized
  source 1..20: mol_type = other DNA
tatgtttatttcatggtata

SEQ ID NO: 35472 - DNA, 20 bp, synthetic construct
  misc_feature 1..20: note = chemically synthesized
  source 1..20: mol_type = other DNA
tttatttcatggtataaagt

SEQ ID NO: 35473 - DNA, 20 bp, synthetic construct
  misc_feature 1..20: note = chemically synthesized
  source 1..20: mol_type = other DNA
atttcatggtataaagttag

SEQ ID NO: 35474 - DNA, 20 bp, synthetic construct
  misc_feature 1..20: note = chemically synthesized
  source 1..20: mol_type = other DNA
catggtataaagttagcaga

SEQ ID NO: 35475 - DNA, 20 bp, synthetic construct
  misc_feature 1..20: note = chemically synthesized
  source 1..20: mol_type = other DNA
atggtataaagttagcagat

SEQ ID NO: 35476 - DNA, 20 bp, synthetic construct
  misc_feature 1..20: note = chemically synthesized
  source 1..20: mol_type = other DNA
ataaagttagcagataggaa

SEQ ID NO: 35477 - DNA, 20 bp, synthetic construct
  misc_feature 1..20: note = chemically synthesized
  source 1..20: mol_type = other DNA
tcataaaaatataaaattat

SEQ ID NO: 35478 - DNA, 20 bp, synthetic construct
  misc_feature 1..20: note = chemically synthesized
  source 1..20: mol_type = other DNA
aaaaatataaaattattagt

SEQ ID NO: 35479 - DNA, 20 bp, synthetic construct
  misc_feature 1..20: note = chemically synthesized
  source 1..20: mol_type = other DNA
ataaaattattagttggttc

SEQ ID NO: 35480 - DNA, 20 bp, synthetic construct
  misc_feature 1..20: note = chemically synthesized
  source 1..20: mol_type = other DNA
attagttggttcgagtgaaa

SEQ ID NO: 35481 - DNA, 20 bp, synthetic construct
  misc_feature 1..20: note = chemically synthesized
  source 1..20: mol_type = other DNA
ttggttcgagtgaaatggaa

SEQ ID NO: 35482 - DNA, 20 bp, synthetic construct
  misc_feature 1..20: note = chemically synthesized
  source 1..20: mol_type = other DNA
ggttcgagtgaaatggaata

SEQ ID NO: 35483 - DNA, 20 bp, synthetic construct
  misc_feature 1..20: note = chemically synthesized
  source 1..20: mol_type = other DNA
gagtgaaatggaatagagtt

SEQ ID NO: 35484 - DNA, 20 bp, synthetic construct
  misc_feature 1..20: note = chemically synthesized
  source 1..20: mol_type = other DNA
aactcttatgaatttctctg

SEQ ID NO: 35485 - DNA, 20 bp, synthetic construct
  misc_feature 1..20: note = chemically synthesized
  source 1..20: mol_type = other DNA
actcttatgaatttctctgc

SEQ ID NO: 35486 - DNA, 20 bp, synthetic construct
  misc_feature 1..20: note = chemically synthesized
  source 1..20: mol_type = other DNA
gcaggtgtccatacaaacaa

SEQ ID NO: 35487 - DNA, 20 bp, synthetic construct
  misc_feature 1..20: note = chemically synthesized
  source 1..20: mol_type = other DNA
caggtgtccatacaaacaat

SEQ ID NO: 35488 - DNA, 20 bp, synthetic construct
  misc_feature 1..20: note = chemically synthesized
  source 1..20: mol_type = other DNA
acaatgggaacctataaatt

SEQ ID NO: 35489 - DNA, 20 bp, synthetic construct
  misc_feature 1..20: note = chemically synthesized
  source 1..20: mol_type = other DNA
acctataaatttggtcactg

SEQ ID NO: 35490 - DNA, 20 bp, synthetic construct
  misc_feature 1..20: note = chemically synthesized
  source 1..20: mol_type = other DNA
taaatttggtcactgaagtc

SEQ ID NO: 35491 - DNA, 20 bp, synthetic construct
  misc_feature 1..20: note = chemically synthesized
  source 1..20: mol_type = other DNA
aaatttggtcactgaagtcc

SEQ ID NO: 35492 - DNA, 20 bp, synthetic construct
  misc_feature 1..20: note = chemically synthesized
  source 1..20: mol_type = other DNA
ccaggaattttcctgcaaaa

SEQ ID NO: 35493 - DNA, 20 bp, synthetic construct
  misc_feature 1..20: note = chemically synthesized
  source 1..20: mol_type = other DNA
agaatataatcttctttgat

SEQ ID NO: 35494 - DNA, 20 bp, synthetic construct
  misc_feature 1..20: note = chemically synthesized
  source 1..20: mol_type = other DNA
ctaattacttatcatctcaa

SEQ ID NO: 35495 - DNA, 20 bp, synthetic construct
  misc_feature 1..20: note = chemically synthesized
  source 1..20: mol_type = other DNA
tacttatcatctcaacagtc

SEQ ID NO: 35496 - DNA, 20 bp, synthetic construct
  misc_feature 1..20: note = chemically synthesized
  source 1..20: mol_type = other DNA
tatcatctcaacagtctagt

SEQ ID NO: 35497 - DNA, 20 bp, synthetic construct
  misc_feature 1..20: note = chemically synthesized
  source 1..20: mol_type = other DNA
taaactcatatttattcccc

SEQ ID NO: 35498 - DNA, 20 bp, synthetic construct
  misc_feature 1..20: note = chemically synthesized
  source 1..20: mol_type = other DNA
aaactcatatttattcccca

SEQ ID NO: 35499 - DNA, 20 bp, synthetic construct
  misc_feature 1..20: note = chemically synthesized
  source 1..20: mol_type = other DNA
ctcatatttattccccaagg

SEQ ID NO: 35500 - DNA, 20 bp, synthetic construct
  misc_feature 1..20: note = chemically synthesized
  source 1..20: mol_type = other DNA
aacttgtaacaaaaaaatgt

SEQ ID NO: 35501 - DNA, 20 bp, synthetic construct
  misc_feature 1..20: note = chemically synthesized
  source 1..20: mol_type = other DNA
ttgtaacaaaaaaatgtgag

SEQ ID NO: 35502 - DNA, 20 bp, synthetic construct
  misc_feature 1..20: note = chemically synthesized
  source 1..20: mol_type = other DNA
gtaacaaaaaaatgtgagaa

SEQ ID NO: 35503 - DNA, 20 bp, synthetic construct
  misc_feature 1..20: note = chemically synthesized
  source 1..20: mol_type = other DNA
taacaaaaaaatgtgagaag

SEQ ID NO: 35504 - DNA, 20 bp, synthetic construct
  misc_feature 1..20: note = chemically synthesized
  source 1..20: mol_type = other DNA
aaatgtgagaagaggaatca

SEQ ID NO: 35505 - DNA, 20 bp, synthetic construct
  misc_feature 1..20: note = chemically synthesized
  source 1..20: mol_type = other DNA
aagaggaatcacggataaat

SEQ ID NO: 35506 - DNA, 20 bp, synthetic construct
  misc_feature 1..20: note = chemically synthesized
  source 1..20: mol_type = other DNA
gaggaatcacggataaatga

SEQ ID NO: 35507 - DNA, 20 bp, synthetic construct
  misc_feature 1..20: note = chemically synthesized
  source 1..20: mol_type = other DNA
aggaatcacggataaatgag

SEQ ID NO: 35508 - DNA, 20 bp, synthetic construct
  misc_feature 1..20: note = chemically synthesized
  source 1..20: mol_type = other DNA
cacggataaatgagaggacg

SEQ ID NO: 35509 - DNA, 20 bp, synthetic construct
  misc_feature 1..20: note = chemically synthesized
  source 1..20: mol_type = other DNA
taaatgagaggacgtagaca

SEQ ID NO: 35510 - DNA, 20 bp, synthetic construct
  misc_feature 1..20: note = chemically synthesized
  source 1..20: mol_type = other DNA
tgagaggacgtagacacagt

SEQ ID NO: 35511 - DNA, 20 bp, synthetic construct
  misc_feature 1..20: note = chemically synthesized
  source 1..20: mol_type = other DNA
tcattcttattctactaccc

SEQ ID NO: 35512 - DNA, 20 bp, synthetic construct
  misc_feature 1..20: note = chemically synthesized
  source 1..20: mol_type = other DNA
tattctactaccctagttgc

SEQ ID NO: 35513 - DNA, 20 bp, synthetic construct
  misc_feature 1..20: note = chemically synthesized
  source 1..20: mol_type = other DNA
tagttgctagctccaatgtt

SEQ ID NO: 35514 - DNA, 20 bp, synthetic construct
  misc_feature 1..20: note = chemically synthesized
  source 1..20: mol_type = other DNA
agttgctagctccaatgttg

SEQ ID NO: 35515 - DNA, 20 bp, synthetic construct
  misc_feature 1..20: note = chemically synthesized
  source 1..20: mol_type = other DNA
tccaatgttgaggccatcct

SEQ ID NO: 35516 - DNA, 20 bp, synthetic construct
  misc_feature 1..20: note = chemically synthesized
  source 1..20: mol_type = other DNA
ccatcctcagatatctacgc

SEQ ID NO: 35517 - DNA, 20 bp, synthetic construct
  misc_feature 1..20: note = chemically synthesized
  source 1..20: mol_type = other DNA
agatatctacgctggctgac

SEQ ID NO: 35518 - DNA, 20 bp, synthetic construct
  misc_feature 1..20: note = chemically synthesized
  source 1..20: mol_type = other DNA
gctggctgactagtccaaat

SEQ ID NO: 35519 - DNA, 20 bp, synthetic construct
  misc_feature 1..20: note = chemically synthesized
  source 1..20: mol_type = other DNA
ggctgactagtccaaattag

SEQ ID NO: 35520 - DNA, 20 bp, synthetic construct
  misc_feature 1..20: note = chemically synthesized
  source 1..20: mol_type = other DNA
tgactagtccaaattagtgg

SEQ ID NO: 35521 - DNA, 20 bp, synthetic construct
  misc_feature 1..20: note = chemically synthesized
  source 1..20: mol_type = other DNA
actagtccaaattagtggaa

SEQ ID NO: 35522 - DNA, 20 bp, synthetic construct
  misc_feature 1..20: note = chemically synthesized
  source 1..20: mol_type = other DNA
gtccaaattagtggaagaga

SEQ ID NO: 35523 - DNA, 20 bp, synthetic construct
  misc_feature 1..20: note = chemically synthesized
  source 1..20: mol_type = other DNA
accctccttttgctatgaaa

SEQ ID NO: 35524 - DNA, 20 bp, synthetic construct
  misc_feature 1..20: note = chemically synthesized
  source 1..20: mol_type = other DNA
ccctccttttgctatgaaaa

SEQ ID NO: 35525 - DNA, 20 bp, synthetic construct
  misc_feature 1..20: note = chemically synthesized
  source 1..20: mol_type = other DNA
tttgctatgaaaaaggtctg

SEQ ID NO: 35526 - DNA, 20 bp, synthetic construct
  misc_feature 1..20: note = chemically synthesized
  source 1..20: mol_type = other DNA
ttgctatgaaaaaggtctga

SEQ ID NO: 35527 - DNA, 20 bp, synthetic construct
  misc_feature 1..20: note = chemically synthesized
  source 1..20: mol_type = other DNA
tctgaaggaacaaaaaaaaa

SEQ ID NO: 35528 - DNA, 20 bp, synthetic construct
  misc_feature 1..20: note = chemically synthesized
  source 1..20: mol_type = other DNA
ctgaaggaacaaaaaaaaat

SEQ ID NO: 35529 - DNA, 20 bp, synthetic construct
  misc_feature 1..20: note = chemically synthesized
  source 1..20: mol_type = other DNA
taggtttctgcatttttttg

SEQ ID NO: 35530 - DNA, 20 bp, synthetic construct
  misc_feature 1..20: note = chemically synthesized
  source 1..20: mol_type = other DNA
acattctgattccatgtaat

SEQ ID NO: 35531 - DNA, 20 bp, synthetic construct
  misc_feature 1..20: note = chemically synthesized
  source 1..20: mol_type = other DNA
taataagtgtaaatttccca

SEQ ID NO: 35532 - DNA, 20 bp, synthetic construct
  misc_feature 1..20: note = chemically synthesized
  source 1..20: mol_type = other DNA
tttgattaaaattgtctgat

SEQ ID NO: 35533 - DNA, 20 bp, synthetic construct
  misc_feature 1..20: note = chemically synthesized
  source 1..20: mol_type = other DNA
attaaaattgtctgatgagt

SEQ ID NO: 35534 - DNA, 20 bp, synthetic construct
  misc_feature 1..20: note = chemically synthesized
  source 1..20: mol_type = other DNA
ttaaaattgtctgatgagtt

SEQ ID NO: 35535 - DNA, 20 bp, synthetic construct
  misc_feature 1..20: note = chemically synthesized
  source 1..20: mol_type = other DNA
aaattgtctgatgagttagg

SEQ ID NO: 35536 - DNA, 20 bp, synthetic construct
  misc_feature 1..20: note = chemically synthesized
  source 1..20: mol_type = other DNA
aattgtctgatgagttagga

SEQ ID NO: 35537 - DNA, 20 bp, synthetic construct
  misc_feature 1..20: note = chemically synthesized
  source 1..20: mol_type = other DNA
attgtctgatgagttaggaa

SEQ ID NO: 35538 - DNA, 20 bp, synthetic construct
  misc_feature 1..20: note = chemically synthesized
  source 1..20: mol_type = other DNA
tcaatttaaaatatcctaaa

SEQ ID NO: 35539 - DNA, 20 bp, synthetic construct
  misc_feature 1..20: note = chemically synthesized
  source 1..20: mol_type = other DNA
aatttaaaatatcctaaaaa

SEQ ID NO: 35540 - DNA, 20 bp, synthetic construct
  misc_feature 1..20: note = chemically synthesized
  source 1..20: mol_type = other DNA
atttaaaatatcctaaaaag

SEQ ID NO: 35541 - DNA, 20 bp, synthetic construct
  misc_feature 1..20: note = chemically synthesized
  source 1..20: mol_type = other DNA
tttaaaatatcctaaaaaga

SEQ ID NO: 35542 - DNA, 20 bp, synthetic construct
  misc_feature 1..20: note = chemically synthesized
  source 1..20: mol_type = other DNA
taaaatatcctaaaaagagg

SEQ ID NO: 35543 - DNA, 20 bp, synthetic construct
  misc_feature 1..20: note = chemically synthesized
  source 1..20: mol_type = other DNA
aaaatatcctaaaaagaggg

SEQ ID NO: 35544 - DNA, 20 bp, synthetic construct
  misc_feature 1..20: note = chemically synthesized
  source 1..20: mol_type = other DNA
tgtcttaattatactttaat

SEQ ID NO: 35545 - DNA, 20 bp, synthetic construct
  misc_feature 1..20: note = chemically synthesized
  source 1..20: mol_type = other DNA
tcttaattatactttaatca

SEQ ID NO: 35546 - DNA, 20 bp, synthetic construct
  misc_feature 1..20: note = chemically synthesized
  source 1..20: mol_type = other DNA
tcagagcaaaaataatactt

SEQ ID NO: 35547 - DNA, 20 bp, synthetic construct
  misc_feature 1..20: note = chemically synthesized
  source 1..20: mol_type = other DNA
agcaaaaataatacttcagt

SEQ ID NO: 35548 - DNA, 20 bp, synthetic construct
  misc_feature 1..20: note = chemically synthesized
  source 1..20: mol_type = other DNA
aaataatacttcagtgagac

SEQ ID NO: 35549 - DNA, 20 bp, synthetic construct
  misc_feature 1..20: note = chemically synthesized
  source 1..20: mol_type = other DNA
ataatacttcagtgagacaa

SEQ ID NO: 35550 - DNA, 20 bp, synthetic construct
  misc_feature 1..20: note = chemically synthesized
  source 1..20: mol_type = other DNA
aatacttcagtgagacaaga

SEQ ID NO: 35551 - DNA, 20 bp, synthetic construct
  misc_feature 1..20: note = chemically synthesized
  source 1..20: mol_type = other DNA
atacttcagtgagacaagag

SEQ ID NO: 35552 - DNA, 20 bp, synthetic construct
  misc_feature 1..20: note = chemically synthesized
  source 1..20: mol_type = other DNA
tacttcagtgagacaagaga

SEQ ID NO: 35553 - DNA, 20 bp, synthetic construct
  misc_feature 1..20: note = chemically synthesized
  source 1..20: mol_type = other DNA
acttcagtgagacaagagag

SEQ ID NO: 35554 - DNA, 20 bp, synthetic construct
  misc_feature 1..20: note = chemically synthesized
  source 1..20: mol_type = other DNA
agacaagagaggggactata

SEQ ID NO: 35555 - DNA, 20 bp, synthetic construct
  misc_feature 1..20: note = chemically synthesized
  source 1..20: mol_type = other DNA
caagagaggggactatatag

SEQ ID NO: 35556 - DNA, 20 bp, synthetic construct
  misc_feature 1..20: note = chemically synthesized
  source 1..20: mol_type = other DNA
gaagatattgtttatgtctt

SEQ ID NO: 35557 - DNA, 20 bp, synthetic construct
  misc_feature 1..20: note = chemically synthesized
  source 1..20: mol_type = other DNA
gttttaccccgatcatttta

SEQ ID NO: 35558 - DNA, 20 bp, synthetic construct
  misc_feature 1..20: note = chemically synthesized
  source 1..20: mol_type = other DNA
aattgtgcacctgtgaatgt

SEQ ID NO: 35559 - DNA, 20 bp, synthetic construct
  misc_feature 1..20: note = chemically synthesized
  source 1..20: mol_type = other DNA
gttcatgtttctgctttctg

SEQ ID NO: 35560 - DNA, 20 bp, synthetic construct
  misc_feature 1..20: note = chemically synthesized
  source 1..20: mol_type = other DNA
ttcatgtttctgctttctgc

SEQ ID NO: 35561 - DNA, 20 bp, synthetic construct
  misc_feature 1..20: note = chemically synthesized
  source 1..20: mol_type = other DNA
gcaggttgttgttctcaact

SEQ ID NO: 35562 - DNA, 20 bp, synthetic construct
  misc_feature 1..20: note = chemically synthesized
  source 1..20: mol_type = other DNA
ggttgttgttctcaactcag

SEQ ID NO: 35563 - DNA, 20 bp, synthetic construct
  misc_feature 1..20: note = chemically synthesized
  source 1..20: mol_type = other DNA
gttgttgttctcaactcagc

SEQ ID NO: 35564 - DNA, 20 bp, synthetic construct
  misc_feature 1..20: note = chemically synthesized
  source 1..20: mol_type = other DNA
tcagcaggaaatgtcttatg

SEQ ID NO: 35565 - DNA, 20 bp, synthetic construct
  misc_feature 1..20: note = chemically synthesized
  source 1..20: mol_type = other DNA
gaaatgtcttatgaagaaaa

SEQ ID NO: 35566 - DNA, 20 bp, synthetic construct
  misc_feature 1..20: note = chemically synthesized
  source 1..20: mol_type = other DNA
agaaaatggcccctgctcct

SEQ ID NO: 35567 - DNA, 20 bp, synthetic construct
  misc_feature 1..20: note = chemically synthesized
  source 1..20: mol_type = other DNA
gaaaatggcccctgctcctt

SEQ ID NO: 35568 - DNA, 20 bp, synthetic construct
  misc_feature 1..20: note = chemically synthesized
  source 1..20: mol_type = other DNA
aatggcccctgctccttagg

SEQ ID NO: 35569 - DNA, 20 bp, synthetic construct
  misc_feature 1..20: note = chemically synthesized
  source 1..20: mol_type = other DNA
ggcccctgctccttaggtag

SEQ ID NO: 35570 - DNA, 20 bp, synthetic construct
  misc_feature 1..20: note = chemically synthesized
  source 1..20: mol_type = other DNA
gcccctgctccttaggtagc

SEQ ID NO: 35571 - DNA, 20 bp, synthetic construct
  misc_feature 1..20: note = chemically synthesized
  source 1..20: mol_type = other DNA
gctccttaggtagcaggcca

SEQ ID NO: 35572 - DNA, 20 bp, synthetic construct
  misc_feature 1..20: note = chemically synthesized
  source 1..20: mol_type = other DNA
ctccttaggtagcaggccat

SEQ ID NO: 35573 - DNA, 20 bp, synthetic construct
  misc_feature 1..20: note = chemically synthesized
  source 1..20: mol_type = other DNA
actgaccctcttgccttctg

SEQ ID NO: 35574 - DNA, 20 bp, synthetic construct
  misc_feature 1..20: note = chemically synthesized
  source 1..20: mol_type = other DNA
ccctcttgccttctgaagct

SEQ ID NO: 35575 - DNA, 20 bp, synthetic construct
  misc_feature 1..20: note = chemically synthesized
  source 1..20: mol_type = other DNA
tgccttctgaagctaagctc

SEQ ID NO: 35576 - DNA, 20 bp, synthetic construct
  misc_feature 1..20: note = chemically synthesized
  source 1..20: mol_type = other DNA
ctgaagctaagctccagctt

SEQ ID NO: 35577 - DNA, 20 bp, synthetic construct
  misc_feature 1..20: note = chemically synthesized
  source 1..20: mol_type = other DNA
ttacttgctccctgtctcct

SEQ ID NO: 35578 - DNA, 20 bp, synthetic construct
  misc_feature 1..20: note = chemically synthesized
  source 1..20: mol_type = other DNA
acttgctccctgtctcctga

SEQ ID NO: 35579 - DNA, 20 bp, synthetic construct
  misc_feature 1..20: note = chemically synthesized
  source 1..20: mol_type = other DNA
acacatttgaatccctatct

SEQ ID NO: 35580 - DNA, 20 bp, synthetic construct
  misc_feature 1..20: note = chemically synthesized
  source 1..20: mol_type = other DNA
cacatttgaatccctatctc

SEQ ID NO: 35581 - DNA, 20 bp, synthetic construct
  misc_feature 1..20: note = chemically synthesized
  source 1..20: mol_type = other DNA
cctatctcaggtattgctca

SEQ ID NO: 35582 - DNA, 20 bp, synthetic construct
  misc_feature 1..20: note = chemically synthesized
  source 1..20: mol_type = other DNA
tatctcaggtattgctcata

SEQ ID NO: 35583 - DNA, 20 bp, synthetic construct
  misc_feature 1..20: note = chemically synthesized
  source 1..20: mol_type = other DNA
tctcaggtattgctcataga

SEQ ID NO: 35584 - DNA, 20 bp, synthetic construct
  misc_feature 1..20: note = chemically synthesized
  source 1..20: mol_type = other DNA
gctcatagagagtccaactt

SEQ ID NO: 35585 - DNA, 20 bp, synthetic construct
  misc_feature 1..20: note = chemically synthesized
  source 1..20: mol_type = other DNA
tatttatattctgtttcatt

SEQ ID NO: 35586 - DNA, 20 bp, synthetic construct
  misc_feature 1..20: note = chemically synthesized
  source 1..20: mol_type = other DNA
tttatattctgtttcattaa

SEQ ID NO: 35587 - DNA, 20 bp, synthetic construct
  misc_feature 1..20: note = chemically synthesized
  source 1..20: mol_type = other DNA
attaagagatgtaattgtga

SEQ ID NO: 35588 - DNA, 20 bp, synthetic construct
  misc_feature 1..20: note = chemically synthesized
  source 1..20: mol_type = other DNA
aactgaacatataaaaaaat

SEQ ID NO: 35589 - DNA, 20 bp, synthetic construct
  misc_feature 1..20: note = chemically synthesized
  source 1..20: mol_type = other DNA
cttgtcacgccatgtcacct

SEQ ID NO: 35590 - DNA, 20 bp, synthetic construct
  misc_feature 1..20: note = chemically synthesized
  source 1..20: mol_type = other DNA
gccatgtcacctgagcaaca

SEQ ID NO: 35591 - DNA, 20 bp, synthetic construct
  misc_feature 1..20: note = chemically synthesized
  source 1..20: mol_type = other DNA
cagtctgaatactaaattgt

SEQ ID NO: 35592 - DNA, 20 bp, synthetic construct
  misc_feature 1..20: note = chemically synthesized
  source 1..20: mol_type = other DNA
gaatactaaattgtgagtgt

SEQ ID NO: 35593 - DNA, 20 bp, synthetic construct
  misc_feature 1..20: note = chemically synthesized
  source 1..20: mol_type = other DNA
gtgtgagtgcatatatgtga

SEQ ID NO: 35594 - DNA, 20 bp, synthetic construct
  misc_feature 1..20: note = chemically synthesized
  source 1..20: mol_type = other DNA
tgagtgcatatatgtgatgg

SEQ ID NO: 35595 - DNA, 20 bp, synthetic construct
  misc_feature 1..20: note = chemically synthesized
  source 1..20: mol_type = other DNA
gagtgcatatatgtgatggt

SEQ ID NO: 35596 - DNA, 20 bp, synthetic construct
  misc_feature 1..20: note = chemically synthesized
  source 1..20: mol_type = other DNA
ttttattcataaaaatattg

SEQ ID NO: 35597 - DNA, 20 bp, synthetic construct
  misc_feature 1..20: note = chemically synthesized
  source 1..20: mol_type = other DNA
tttattcataaaaatattgt

SEQ ID NO: 35598 - DNA, 20 bp, synthetic construct
  misc_feature 1..20: note = chemically synthesized
  source 1..20: mol_type = other DNA
ttattcataaaaatattgtg

SEQ ID NO: 35599 - DNA, 20 bp, synthetic construct
  misc_feature 1..20: note = chemically synthesized
  source 1..20: mol_type = other DNA
ttcataaaaatattgtgggg

SEQ ID NO: 35600 - DNA, 20 bp, synthetic construct
  misc_feature 1..20: note = chemically synthesized
  source 1..20: mol_type = other DNA
tattatcactgttttcttga

SEQ ID NO: 35601 - DNA, 20 bp, synthetic construct
  misc_feature 1..20: note = chemically synthesized
  source 1..20: mol_type = other DNA
attatcactgttttcttgat

SEQ ID NO: 35602 - DNA, 20 bp, synthetic construct
  misc_feature 1..20: note = chemically synthesized
  source 1..20: mol_type = other DNA
ttatcactgttttcttgatg

SEQ ID NO: 35603 - DNA, 20 bp, synthetic construct
  misc_feature 1..20: note = chemically synthesized
  source 1..20: mol_type = other DNA
tggggaaatttaatataaaa

SEQ ID NO: 35604 - DNA, 20 bp, synthetic construct
  misc_feature 1..20: note = chemically synthesized
  source 1..20: mol_type = other DNA
aaaagttaaatattccctcc

SEQ ID NO: 35605 - DNA, 20 bp, synthetic construct
  misc_feature 1..20: note = chemically synthesized
  source 1..20: mol_type = other DNA
aaagttaaatattccctcca

SEQ ID NO: 35606 - DNA, 20 bp, synthetic construct
  misc_feature 1..20: note = chemically synthesized
  source 1..20: mol_type = other DNA
aagttaaatattccctccaa

SEQ ID NO: 35607 - DNA, 20 bp, synthetic construct
  misc_feature 1..20: note = chemically synthesized
  source 1..20: mol_type = other DNA
aagggcataacatttttaat

SEQ ID NO: 35608 - DNA, 20 bp, synthetic construct
  misc_feature 1..20: note = chemically synthesized
  source 1..20: mol_type = other DNA
cataacatttttaattggta

SEQ ID NO: 35609 - DNA, 20 bp, synthetic construct
  misc_feature 1..20: note = chemically synthesized
  source 1..20: mol_type = other DNA
aatttatatcttctaactat

SEQ ID NO: 35610 - DNA, 20 bp, synthetic construct
  misc_feature 1..20: note = chemically synthesized
  source 1..20: mol_type = other DNA
atttatatcttctaactata

SEQ ID NO: 35611 - DNA, 20 bp, synthetic construct
  misc_feature 1..20: note = chemically synthesized
  source 1..20: mol_type = other DNA
atatcttctaactataaggc

SEQ ID NO: 35612 - DNA, 20 bp, synthetic construct
  misc_feature 1..20: note = chemically synthesized
  source 1..20: mol_type = other DNA
aactataaggccagtgtgaa

SEQ ID NO: 35613 - DNA, 20 bp, synthetic construct
  misc_feature 1..20: note = chemically synthesized
  source 1..20: mol_type = other DNA
gtgtgaatggtactccacta

SEQ ID NO: 35614 - DNA, 20 bp, synthetic construct
  misc_feature 1..20: note = chemically synthesized
  source 1..20: mol_type = other DNA
tgaatggtactccactacag

SEQ ID NO: 35615 - DNA, 20 bp, synthetic construct
  misc_feature 1..20: note = chemically synthesized
  source 1..20: mol_type = other DNA
ccactacagtagactatcct

SEQ ID NO: 35616 - DNA, 20 bp, synthetic construct
  misc_feature 1..20: note = chemically synthesized
  source 1..20: mol_type = other DNA
ctacagtagactatccttag

SEQ ID NO: 35617 - DNA, 20 bp, synthetic construct
  misc_feature 1..20: note = chemically synthesized
  source 1..20: mol_type = other DNA
cttgtattccgtcatgcttg

SEQ ID NO: 35618 - DNA, 20 bp, synthetic construct
  misc_feature 1..20: note = chemically synthesized
  source 1..20: mol_type = other DNA
tatctccaaactcctaaccg

SEQ ID NO: 35619 - DNA, 20 bp, synthetic construct
  misc_feature 1..20: note = chemically synthesized
  source 1..20: mol_type = other DNA
ctccaaactcctaaccgcag

SEQ ID NO: 35620 - DNA, 20 bp, synthetic construct
  misc_feature 1..20: note = chemically synthesized
  source 1..20: mol_type = other DNA
caaactcctaaccgcagtag

SEQ ID NO: 35621 - DNA, 20 bp, synthetic construct
  misc_feature 1..20: note = chemically synthesized
  source 1..20: mol_type = other DNA
agtagaagaacttttttaaa

SEQ ID NO: 35622 - DNA, 20 bp, synthetic construct
  misc_feature 1..20: note = chemically synthesized
  source 1..20: mol_type = other DNA
tatgacattgcaaaaaaaaa

SEQ ID NO: 35623 - DNA, 20 bp, synthetic construct
  misc_feature 1..20: note = chemically synthesized
  source 1..20: mol_type = other DNA
tgacattgcaaaaaaaaaaa

SEQ ID NO: 35624 - DNA, 20 bp, synthetic construct
  misc_feature 1..20: note = chemically synthesized
  source 1..20: mol_type = other DNA
aaagagtaatgcttttgttg

SEQ ID NO: 35625 - DNA, 20 bp, synthetic construct
  misc_feature 1..20: note = chemically synthesized
  source 1..20: mol_type = other DNA
aattactaaaatgcaatgct

SEQ ID NO: 35626 - DNA, 20 bp, synthetic construct
  misc_feature 1..20: note = chemically synthesized
  source 1..20: mol_type = other DNA
ttaatgacaatgtttttcat

SEQ ID NO: 35627 - DNA, 20 bp, synthetic construct
  misc_feature 1..20: note = chemically synthesized
  source 1..20: mol_type = other DNA
taatgacaatgtttttcatc

SEQ ID NO: 35628 - DNA, 20 bp, synthetic construct
  misc_feature 1..20: note = chemically synthesized
  source 1..20: mol_type = other DNA
gacaatgtttttcatcaggc

SEQ ID NO: 35629 - DNA, 20 bp, synthetic construct
  misc_feature 1..20: note = chemically synthesized
  source 1..20: mol_type = other DNA
ttcaaactataataaatatt

SEQ ID NO: 35630 - DNA, 20 bp, synthetic construct
  misc_feature 1..20: note = chemically synthesized
  source 1..20: mol_type = other DNA
caaactataataaatattta

SEQ ID NO: 35631 - DNA, 20 bp, synthetic construct
  misc_feature 1..20: note = chemically synthesized
  source 1..20: mol_type = other DNA
taaatatttagagtaaatta

SEQ ID NO: 35632 - DNA, 20 bp, synthetic construct
  misc_feature 1..20: note = chemically synthesized
  source 1..20: mol_type = other DNA
tttagagtaaattatagata

SEQ ID NO: 35633 - DNA, 20 bp, synthetic construct
  misc_feature 1..20: note = chemically synthesized
  source 1..20: mol_type = other DNA
aagaaatgataataaataaa

SEQ ID NO: 35634 - DNA, 20 bp, synthetic construct
  misc_feature 1..20: note = chemically synthesized
  source 1..20: mol_type = other DNA
ctctgattccatgttttcct

SEQ ID NO: 35635 - DNA, 20 bp, synthetic construct
  misc_feature 1..20: note = chemically synthesized
  source 1..20: mol_type = other DNA
ttccatgttttcctgagact

SEQ ID NO: 35636 - DNA, 20 bp, synthetic construct
  misc_feature 1..20: note = chemically synthesized
  source 1..20: mol_type = other DNA
ttttcctgagactcagtgac

SEQ ID NO: 35637 - DNA, 20 bp, synthetic construct
  misc_feature 1..20: note = chemically synthesized
  source 1..20: mol_type = other DNA
tttcctgagactcagtgaca

SEQ ID NO: 35638 - DNA, 20 bp, synthetic construct
  misc_feature 1..20: note = chemically synthesized
  source 1..20: mol_type = other DNA
tcctgagactcagtgacaag

SEQ ID NO: 35639 - DNA, 20 bp, synthetic construct
  misc_feature 1..20: note = chemically synthesized
  source 1..20: mol_type = other DNA
cctgagactcagtgacaagg

SEQ ID NO: 35640 - DNA, 20 bp, synthetic construct
  misc_feature 1..20: note = chemically synthesized
  source 1..20: mol_type = other DNA
agactcagtgacaaggagga

SEQ ID NO: 35641 - DNA, 20 bp, synthetic construct
  misc_feature 1..20: note = chemically synthesized
  source 1..20: mol_type = other DNA
gaatcttttttttgattcca

SEQ ID NO: 35642 - DNA, 20 bp, synthetic construct
  misc_feature 1..20: note = chemically synthesized
  source 1..20: mol_type = other DNA
ttcttgtaatttgttttgtt

SEQ ID NO: 35643 - DNA, 20 bp, synthetic construct
  misc_feature 1..20: note = chemically synthesized
  source 1..20: mol_type = other DNA
gtaatttgttttgttcagcc

SEQ ID NO: 35644 - DNA, 20 bp, synthetic construct
  misc_feature 1..20: note = chemically synthesized
  source 1..20: mol_type = other DNA
tgttttgttcagcctagttt

SEQ ID NO: 35645 - DNA, 20 bp, synthetic construct
  misc_feature 1..20: note = chemically synthesized
  source 1..20: mol_type = other DNA
tgttcagcctagtttcagtt

SEQ ID NO: 35646 - DNA, 20 bp, synthetic construct
  misc_feature 1..20: note = chemically synthesized
  source 1..20: mol_type = other DNA
ttgagtttcacttataacca

SEQ ID NO: 35647 - DNA, 20 bp, synthetic construct
  misc_feature 1..20: note = chemically synthesized
  source 1..20: mol_type = other DNA
tgagtttcacttataaccaa

SEQ ID NO: 35648 - DNA, 20 bp, synthetic construct
  misc_feature 1..20: note = chemically synthesized
  source 1..20: mol_type = other DNA
tattaataattatatcatct

SEQ ID NO: 35649 - DNA, 20 bp, synthetic construct
  misc_feature 1..20: note = chemically synthesized
  source 1..20: mol_type = other DNA
taattatatcatctcagtta

SEQ ID NO: 35650 - DNA, 20 bp, synthetic construct
  misc_feature 1..20: note = chemically synthesized
  source 1..20: mol_type = other DNA
ctctaactaatatttaaaac

SEQ ID NO: 35651 - DNA, 20 bp, synthetic construct
  misc_feature 1..20: note = chemically synthesized
  source 1..20: mol_type = other DNA
ttaaaactggaaaatactgt

SEQ ID NO: 35652 - DNA, 20 bp, synthetic construct
  misc_feature 1..20: note = chemically synthesized
  source 1..20: mol_type = other DNA
taaaactggaaaatactgtt

SEQ ID NO: 35653 - DNA, 20 bp, synthetic construct
  misc_feature 1..20: note = chemically synthesized
  source 1..20: mol_type = other DNA
aactggaaaatactgttagg

SEQ ID NO: 35654 - DNA, 20 bp, synthetic construct
  misc_feature 1..20: note = chemically synthesized
  source 1..20: mol_type = other DNA
tggaaaatactgttaggtag

SEQ ID NO: 35655 - DNA, 20 bp, synthetic construct
  misc_feature 1..20: note = chemically synthesized
  source 1..20: mol_type = other DNA
gaaaatactgttaggtagaa

SEQ ID NO: 35656 - DNA, 20 bp, synthetic construct
  misc_feature 1..20: note = chemically synthesized
  source 1..20: mol_type = other DNA
ctgcctctttttctaaaata

SEQ ID NO: 35657 - DNA, 20 bp, synthetic construct
  misc_feature 1..20: note = chemically synthesized
  source 1..20: mol_type = other DNA
tgcctctttttctaaaatac

SEQ ID NO: 35658 - DNA, 20 bp, synthetic construct
  misc_feature 1..20: note = chemically synthesized
  source 1..20: mol_type = other DNA
tttttctaaaatacaggaaa

SEQ ID NO: 35659 - DNA, 20 bp, synthetic construct
  misc_feature 1..20: note = chemically synthesized
  source 1..20: mol_type = other DNA
caggaaatggaacctaaaaa

SEQ ID NO: 35660 - DNA, 20 bp, synthetic construct
  misc_feature 1..20: note = chemically synthesized
  source 1..20: mol_type = other DNA
gaaatggaacctaaaaatgg

SEQ ID NO: 35661 - DNA, 20 bp, synthetic construct
  misc_feature 1..20: note = chemically synthesized
  source 1..20: mol_type = other DNA
aaatggaacctaaaaatggc

SEQ ID NO: 35662 - DNA, 20 bp, synthetic construct
  misc_feature 1..20: note = chemically synthesized
  source 1..20: mol_type = other DNA
ggaacctaaaaatggcagga

SEQ ID NO: 35663 - DNA, 20 bp, synthetic construct
  misc_feature 1..20: note = chemically synthesized
  source 1..20: mol_type = other DNA
tggcaggaaagttgaccatt

SEQ ID NO: 35664 - DNA, 20 bp, synthetic construct
  misc_feature 1..20: note = chemically synthesized
  source 1..20: mol_type = other DNA
catttggtgaatgatttatg

SEQ ID NO: 35665 - DNA, 20 bp, synthetic construct
  misc_feature 1..20: note = chemically synthesized
  source 1..20: mol_type = other DNA
tgaagttatttcccttgttt

SEQ ID NO: 35666 - DNA, 20 bp, synthetic construct
  misc_feature 1..20: note = chemically synthesized
  source 1..20: mol_type = other DNA
agttatttcccttgtttaag

SEQ ID NO: 35667 - DNA, 20 bp, synthetic construct
  misc_feature 1..20: note = chemically synthesized
  source 1..20: mol_type = other DNA
gaagttcatttctgacttga

SEQ ID NO: 35668 - DNA, 20 bp, synthetic construct
  misc_feature 1..20: note = chemically synthesized
  source 1..20: mol_type = other DNA
ttcatttctgacttgaaagt

SEQ ID NO: 35669 - DNA, 20 bp, synthetic construct
  misc_feature 1..20: note = chemically synthesized
  source 1..20: mol_type = other DNA
agtgtgaaactaaattcact

SEQ ID NO: 35670 - DNA, 20 bp, synthetic construct
  misc_feature 1..20: note = chemically synthesized
  source 1..20: mol_type = other DNA
gtgaaactaaattcactgag

SEQ ID NO: 35671 - DNA, 20 bp, synthetic construct
  misc_feature 1..20: note = chemically synthesized
  source 1..20: mol_type = other DNA
aattcactgagaagatgctg

SEQ ID NO: 35672 - DNA, 20 bp, synthetic construct
  misc_feature 1..20: note = chemically synthesized
  source 1..20: mol_type = other DNA
attcactgagaagatgctgt

SEQ ID NO: 35673 - DNA, 20 bp, synthetic construct
  misc_feature 1..20: note = chemically synthesized
  source 1..20: mol_type = other DNA
aagatgctgtaggatgaata

SEQ ID NO: 35674 - DNA, 20 bp, synthetic construct
  misc_feature 1..20: note = chemically synthesized
  source 1..20: mol_type = other DNA
ctgtaggatgaatacagaca

SEQ ID NO: 35675 - DNA, 20 bp, synthetic construct
  misc_feature 1..20: note = chemically synthesized
  source 1..20: mol_type = other DNA
tgtaggatgaatacagacac

SEQ ID NO: 35676 - DNA, 20 bp, synthetic construct
  misc_feature 1..20: note = chemically synthesized
  source 1..20: mol_type = other DNA
tgaatacagacacaggacat

SEQ ID NO: 35677 - DNA, 20 bp, synthetic construct
  misc_feature 1..20: note = chemically synthesized
  source 1..20: mol_type = other DNA
aatacagacacaggacatcg

SEQ ID NO: 35678 - DNA, 20 bp, synthetic construct
  misc_feature 1..20: note = chemically synthesized
  source 1..20: mol_type = other DNA
atacagacacaggacatcgg

SEQ ID NO: 35679 - DNA, 20 bp, synthetic construct
  misc_feature 1..20: note = chemically synthesized
  source 1..20: mol_type = other DNA
cagacacaggacatcggagg

SEQ ID NO: 35680 - DNA, 20 bp, synthetic construct
  misc_feature 1..20: note = chemically synthesized
  source 1..20: mol_type = other DNA
agacacaggacatcggaggt

SEQ ID NO: 35681 - DNA, 20 bp, synthetic construct
  misc_feature 1..20: note = chemically synthesized
  source 1..20: mol_type = other DNA
gacacaggacatcggaggtg

SEQ ID NO: 35682 - DNA, 20 bp, synthetic construct
  misc_feature 1..20: note = chemically synthesized
  source 1..20: mol_type = other DNA
acacaggacatcggaggtgg

SEQ ID NO: 35683 - DNA, 20 bp, synthetic construct
  misc_feature 1..20: note = chemically synthesized
  source 1..20: mol_type = other DNA
cacaggacatcggaggtggg

SEQ ID NO: 35684 - DNA, 20 bp, synthetic construct
  misc_feature 1..20: note = chemically synthesized
  source 1..20: mol_type = other DNA
aggacatcggaggtgggggg

SEQ ID NO: 35685 - DNA, 20 bp, synthetic construct
  misc_feature 1..20: note = chemically synthesized
  source 1..20: mol_type = other DNA
ctaaataattatctcaaact

SEQ ID NO: 35686 - DNA, 20 bp, synthetic construct
  misc_feature 1..20: note = chemically synthesized
  source 1..20: mol_type = other DNA
ttatctcaaacttagttata

SEQ ID NO: 35687 - DNA, 20 bp, synthetic construct
  misc_feature 1..20: note = chemically synthesized
  source 1..20: mol_type = other DNA
tctcaaacttagttatacag

SEQ ID NO: 35688 - DNA, 20 bp, synthetic construct
  misc_feature 1..20: note = chemically synthesized
  source 1..20: mol_type = other DNA
ctcaaacttagttatacaga

SEQ ID NO: 35689 - DNA, 20 bp, synthetic construct
  misc_feature 1..20: note = chemically synthesized
  source 1..20: mol_type = other DNA
tagttatacagaaggctaca

SEQ ID NO: 35690 - DNA, 20 bp, synthetic construct
  misc_feature 1..20: note = chemically synthesized
  source 1..20: mol_type = other DNA
ttatacagaaggctacatgg

SEQ ID NO: 35691 - DNA, 20 bp, synthetic construct
  misc_feature 1..20: note = chemically synthesized
  source 1..20: mol_type = other DNA
ctacatggtggaaatccact

SEQ ID NO: 35692 - DNA, 20 bp, synthetic construct
  misc_feature 1..20: note = chemically synthesized
  source 1..20: mol_type = other DNA
tgtaacaatcaacataaaca

SEQ ID NO: 35693 - DNA, 20 bp, synthetic construct
  misc_feature 1..20: note = chemically synthesized
  source 1..20: mol_type = other DNA
tcaacataaacacagtatgt

SEQ ID NO: 35694 - DNA, 20 bp, synthetic construct
  misc_feature 1..20: note = chemically synthesized
  source 1..20: mol_type = other DNA
gttagtattatcataaaatt

SEQ ID NO: 35695 - DNA, 20 bp, synthetic construct
  misc_feature 1..20: note = chemically synthesized
  source 1..20: mol_type = other DNA
aactttctgtgatctcctac

SEQ ID NO: 35696 - DNA, 20 bp, synthetic construct
  misc_feature 1..20: note = chemically synthesized
  source 1..20: mol_type = other DNA
atctcctacaagtcttcctg

SEQ ID NO: 35697 - DNA, 20 bp, synthetic construct
  misc_feature 1..20: note = chemically synthesized
  source 1..20: mol_type = other DNA
ggtaaaatgctatgtactat

SEQ ID NO: 35698 - DNA, 20 bp, synthetic construct
  misc_feature 1..20: note = chemically synthesized
  source 1..20: mol_type = other DNA
aaaatgctatgtactattag

SEQ ID NO: 35699 - DNA, 20 bp, synthetic construct
  misc_feature 1..20: note = chemically synthesized
  source 1..20: mol_type = other DNA
ctatgtactattagaagcct

SEQ ID NO: 35700 - DNA, 20 bp, synthetic construct
  misc_feature 1..20: note = chemically synthesized
  source 1..20: mol_type = other DNA
gaagccttagcaaattaata

SEQ ID NO: 35701 - DNA, 20 bp, synthetic construct
  misc_feature 1..20: note = chemically synthesized
  source 1..20: mol_type = other DNA
aagccttagcaaattaatac

SEQ ID NO: 35702 - DNA, 20 bp, synthetic construct
  misc_feature 1..20: note = chemically synthesized
  source 1..20: mol_type = other DNA
ttagcaaattaatacaggaa

SEQ ID NO: 35703 - DNA, 20 bp, synthetic construct
  misc_feature 1..20: note = chemically synthesized
  source 1..20: mol_type = other DNA
taccacgtgttctcacttat

SEQ ID NO: 35704 - DNA, 20 bp, synthetic construct
  misc_feature 1..20: note = chemically synthesized
  source 1..20: mol_type = other DNA
cacgtgttctcacttatgag

SEQ ID NO: 35705 - DNA, 20 bp, synthetic construct
  misc_feature 1..20: note = chemically synthesized
  source 1..20: mol_type = other DNA
acgtgttctcacttatgagt

SEQ ID NO: 35706 - DNA, 20 bp, synthetic construct
  misc_feature 1..20: note = chemically synthesized
  source 1..20: mol_type = other DNA
gtgttctcacttatgagtgg

SEQ ID NO: 35707 - DNA, 20 bp, synthetic construct
  misc_feature 1..20: note = chemically synthesized
  source 1..20: mol_type = other DNA
atgagtgggagctaaatgat

SEQ ID NO: 35708 - DNA, 20 bp, synthetic construct
  misc_feature 1..20: note = chemically synthesized
  source 1..20: mol_type = other DNA
agctaaatgatgagaacaca

SEQ ID NO: 35709 - DNA, 20 bp, synthetic construct
  misc_feature 1..20: note = chemically synthesized
  source 1..20: mol_type = other DNA
gatgagaacacatggacaca

SEQ ID NO: 35710 - DNA, 20 bp, synthetic construct
  misc_feature 1..20: note = chemically synthesized
  source 1..20: mol_type = other DNA
tgagaacacatggacacatg

SEQ ID NO: 35711 - DNA, 20 bp, synthetic construct
  misc_feature 1..20: note = chemically synthesized
  source 1..20: mol_type = other DNA
gagaacacatggacacatgg

SEQ ID NO: 35712 - DNA, 20 bp, synthetic construct
  misc_feature 1..20: note = chemically synthesized
  source 1..20: mol_type = other DNA
agaacacatggacacatgga

SEQ ID NO: 35713 - DNA, 20 bp, synthetic construct
  misc_feature 1..20: note = chemically synthesized
  source 1..20: mol_type = other DNA
gaacacatggacacatggag

SEQ ID NO: 35714 - DNA, 20 bp, synthetic construct
  misc_feature 1..20: note = chemically synthesized
  source 1..20: mol_type = other DNA
tggaggggaacatcacacac

SEQ ID NO: 35715 - DNA, 20 bp, synthetic construct
  misc_feature 1..20: note = chemically synthesized
  source 1..20: mol_type = other DNA
ggaggggaacatcacacact

SEQ ID NO: 35716 - DNA, 20 bp, synthetic construct
  misc_feature 1..20: note = chemically synthesized
  source 1..20: mol_type = other DNA
gaggggaacatcacacactg

SEQ ID NO: 35717 - DNA, 20 bp, synthetic construct
  misc_feature 1..20: note = chemically synthesized
  source 1..20: mol_type = other DNA
catcacacactggggcctat

SEQ ID NO: 35718 - DNA, 20 bp, synthetic construct
  misc_feature 1..20: note = chemically synthesized
  source 1..20: mol_type = other DNA
tcacacactggggcctattg

SEQ ID NO: 35719 - DNA, 20 bp, synthetic construct
  misc_feature 1..20: note = chemically synthesized
  source 1..20: mol_type = other DNA
cacacactggggcctattgg

SEQ ID NO: 35720 - DNA, 20 bp, synthetic construct
  misc_feature 1..20: note = chemically synthesized
  source 1..20: mol_type = other DNA
cactggggcctattggagga

SEQ ID NO: 35721 - DNA, 20 bp, synthetic construct
  misc_feature 1..20: note = chemically synthesized
  source 1..20: mol_type = other DNA
ctggggcctattggaggatg

SEQ ID NO: 35722 - DNA, 20 bp, synthetic construct
  misc_feature 1..20: note = chemically synthesized
  source 1..20: mol_type = other DNA
tggggcctattggaggatgg

SEQ ID NO: 35723 - DNA, 20 bp, synthetic construct
  misc_feature 1..20: note = chemically synthesized
  source 1..20: mol_type = other DNA
ggggcctattggaggatgga

SEQ ID NO: 35724 - DNA, 20 bp, synthetic construct
  misc_feature 1..20: note = chemically synthesized
  source 1..20: mol_type = other DNA
tattggaggatggagggtga

SEQ ID NO: 35725 - DNA, 20 bp, synthetic construct
  misc_feature 1..20: note = chemically synthesized
  source 1..20: mol_type = other DNA
attggaggatggagggtgaa

SEQ ID NO: 35726 - DNA, 20 bp, synthetic construct
  misc_feature 1..20: note = chemically synthesized
  source 1..20: mol_type = other DNA
tggaggatggagggtgaaag

SEQ ID NO: 35727 - DNA, 20 bp, synthetic construct
  misc_feature 1..20: note = chemically synthesized
  source 1..20: mol_type = other DNA
ggaggatggagggtgaaagg

SEQ ID NO: 35728 - DNA, 20 bp, synthetic construct
  misc_feature 1..20: note = chemically synthesized
  source 1..20: mol_type = other DNA
gaggatggagggtgaaagga

SEQ ID NO: 35729 - DNA, 20 bp, synthetic construct
  misc_feature 1..20: note = chemically synthesized
  source 1..20: mol_type = other DNA
ggatggagggtgaaaggagg

SEQ ID NO: 35730 - DNA, 20 bp, synthetic construct
  misc_feature 1..20: note = chemically synthesized
  source 1..20: mol_type = other DNA
atggagggtgaaaggaggga

SEQ ID NO: 35731 - DNA, 20 bp, synthetic construct
  misc_feature 1..20: note = chemically synthesized
  source 1..20: mol_type = other DNA
tggagggtgaaaggagggag

SEQ ID NO: 35732 - DNA, 20 bp, synthetic construct
  misc_feature 1..20: note = chemically synthesized
  source 1..20: mol_type = other DNA
ggtgaaaggagggagaggat

SEQ ID NO: 35733 - DNA, 20 bp, synthetic construct
  misc_feature 1..20: note = chemically synthesized
  source 1..20: mol_type = other DNA
gtgaaaggagggagaggatc

SEQ ID NO: 35734 - DNA, 20 bp, synthetic construct
  misc_feature 1..20: note = chemically synthesized
  source 1..20: mol_type = other DNA
aggagggagaggatcaggaa

SEQ ID NO: 35735 - DNA, 20 bp, synthetic construct
  misc_feature 1..20: note = chemically synthesized
  source 1..20: mol_type = other DNA
aggatcaggaaaagtaacaa

SEQ ID NO: 35736 - DNA, 20 bp, synthetic construct
  misc_feature 1..20: note = chemically synthesized
  source 1..20: mol_type = other DNA
ggatcaggaaaagtaacaaa

SEQ ID NO: 35737 - DNA, 20 bp, synthetic construct
  misc_feature 1..20: note = chemically synthesized
  source 1..20: mol_type = other DNA
gatcaggaaaagtaacaaaa

SEQ ID NO: 35738 - DNA, 20 bp, synthetic construct
  misc_feature 1..20: note = chemically synthesized
  source 1..20: mol_type = other DNA
gaaaagtaacaaaagggtac

SEQ ID NO: 35739 - DNA, 20 bp, synthetic construct
  misc_feature 1..20: note = chemically synthesized
  source 1..20: mol_type = other DNA
aaaagtaacaaaagggtact

SEQ ID NO: 35740 - DNA, 20 bp, synthetic construct
  misc_feature 1..20: note = chemically synthesized
  source 1..20: mol_type = other DNA
gggtactaggcttaatacct

SEQ ID NO: 35741 - DNA, 20 bp, synthetic construct
  misc_feature 1..20: note = chemically synthesized
  source 1..20: mol_type = other DNA
actaggcttaatacctgagt

SEQ ID NO: 35742 - DNA, 20 bp, synthetic construct
  misc_feature 1..20: note = chemically synthesized
  source 1..20: mol_type = other DNA
acaacaaaccctcgtgacac

SEQ ID NO: 35743 - DNA, 20 bp, synthetic construct
  misc_feature 1..20: note = chemically synthesized
  source 1..20: mol_type = other DNA
acacaagtttaaatatgtaa

SEQ ID NO: 35744 - DNA, 20 bp, synthetic construct
  misc_feature 1..20: note = chemically synthesized
  source 1..20: mol_type = other DNA
tactcctgaacctaaaataa

SEQ ID NO: 35745 - DNA, 20 bp, synthetic construct
  misc_feature 1..20: note = chemically synthesized
  source 1..20: mol_type = other DNA
cctgaacctaaaataaaagt

SEQ ID NO: 35746 - DNA, 20 bp, synthetic construct
  misc_feature 1..20: note = chemically synthesized
  source 1..20: mol_type = other DNA
aacctaaaataaaagttagt

SEQ ID NO: 35747 - DNA, 20 bp, synthetic construct
  misc_feature 1..20: note = chemically synthesized
  source 1..20: mol_type = other DNA
acctaaaataaaagttagtt

SEQ ID NO: 35748 - DNA, 20 bp, synthetic construct
  misc_feature 1..20: note = chemically synthesized
  source 1..20: mol_type = other DNA
aaataaaagttagttaggaa

SEQ ID NO: 35749 - DNA, 20 bp, synthetic construct
  misc_feature 1..20: note = chemically synthesized
  source 1..20: mol_type = other DNA
taaaagttagttaggaaaag

SEQ ID NO: 35750 - DNA, 20 bp, synthetic construct
  misc_feature 1..20: note = chemically synthesized
  source 1..20: mol_type = other DNA
ctatttataacactatctcc

SEQ ID NO: 35751 - DNA, 20 bp, synthetic construct
  misc_feature 1..20: note = chemically synthesized
  source 1..20: mol_type = other DNA
tatttataacactatctcct

SEQ ID NO: 35752 - DNA, 20 bp, synthetic construct
  misc_feature 1..20: note = chemically synthesized
  source 1..20: mol_type = other DNA
gcacatgaatttgtattcat

SEQ ID NO: 35753 - DNA, 20 bp, synthetic construct
  misc_feature 1..20: note = chemically synthesized
  source 1..20: mol_type = other DNA
catgaatttgtattcataag

SEQ ID NO: 35754 - DNA, 20 bp, synthetic construct
  misc_feature 1..20: note = chemically synthesized
  source 1..20: mol_type = other DNA
tgaatttgtattcataagaa

SEQ ID NO: 35755 - DNA, 20 bp, synthetic construct
  misc_feature 1..20: note = chemically synthesized
  source 1..20: mol_type = other DNA
atttgtattcataagaagag

SEQ ID NO: 35756 - DNA, 20 bp, synthetic construct
  misc_feature 1..20: note = chemically synthesized
  source 1..20: mol_type = other DNA
ttcataagaagagtagaatt

SEQ ID NO: 35757 - DNA, 20 bp, synthetic construct
  misc_feature 1..20: note = chemically synthesized
  source 1..20: mol_type = other DNA
cataagaagagtagaattca

SEQ ID NO: 35758 - DNA, 20 bp, synthetic construct
  misc_feature 1..20: note = chemically synthesized
  source 1..20: mol_type = other DNA
aagaagagtagaattcagag

SEQ ID NO: 35759 - DNA, 20 bp, synthetic construct
  misc_feature 1..20: note = chemically synthesized
  source 1..20: mol_type = other DNA
gagtagaattcagagtggtc

SEQ ID NO: 35760 - DNA, 20 bp, synthetic construct
  misc_feature 1..20: note = chemically synthesized
  source 1..20: mol_type = other DNA
tagaattcagagtggtccag

SEQ ID NO: 35761 - DNA, 20 bp, synthetic construct
  misc_feature 1..20: note = chemically synthesized
  source 1..20: mol_type = other DNA
ggtccagtggactaacaaac

SEQ ID NO: 35762 - DNA, 20 bp, synthetic construct
  misc_feature 1..20: note = chemically synthesized
  source 1..20: mol_type = other DNA
actggtgaaccaccttctta

SEQ ID NO: 35763 - DNA, 20 bp, synthetic construct
  misc_feature 1..20: note = chemically synthesized
  source 1..20: mol_type = other DNA
ggtgaaccaccttcttacag

SEQ ID NO: 35764 - DNA, 20 bp, synthetic construct
  misc_feature 1..20: note = chemically synthesized
  source 1..20: mol_type = other DNA
gtgaaccaccttcttacagc

SEQ ID NO: 35765 - DNA, 20 bp, synthetic construct
  misc_feature 1..20: note = chemically synthesized
  source 1..20: mol_type = other DNA
ccaccttcttacagcaggtg

SEQ ID NO: 35766 - DNA, 20 bp, synthetic construct
  misc_feature 1..20: note = chemically synthesized
  source 1..20: mol_type = other DNA
agcaggtgaagcctgtaatt

SEQ ID NO: 35767 - DNA, 20 bp, synthetic construct
  misc_feature 1..20: note = chemically synthesized
  source 1..20: mol_type = other DNA
aattcagcttttcatcattc

SEQ ID NO: 35768 - DNA, 20 bp, synthetic construct
  misc_feature 1..20: note = chemically synthesized
  source 1..20: mol_type = other DNA
ttttcatcattcaagactga

SEQ ID NO: 35769 - DNA, 20 bp, synthetic construct
  misc_feature 1..20: note = chemically synthesized
  source 1..20: mol_type = other DNA
tcatcattcaagactgaaag

SEQ ID NO: 35770 - DNA, 20 bp, synthetic construct
  misc_feature 1..20: note = chemically synthesized
  source 1..20: mol_type = other DNA
aaagaagaatataacttata

SEQ ID NO: 35771 - DNA, 20 bp, synthetic construct
  misc_feature 1..20: note = chemically synthesized
  source 1..20: mol_type = other DNA
agaagaatataacttatata

SEQ ID NO: 35772 - DNA, 20 bp, synthetic construct
  misc_feature 1..20: note = chemically synthesized
  source 1..20: mol_type = other DNA
agaatataacttatatagag

SEQ ID NO: 35773 - DNA, 20 bp, synthetic construct
  misc_feature 1..20: note = chemically synthesized
  source 1..20: mol_type = other DNA
gaatataacttatatagaga

SEQ ID NO: 35774 - DNA, 20 bp, synthetic construct
  misc_feature 1..20: note = chemically synthesized
  source 1..20: mol_type = other DNA
tatatagagaaggacctcat

SEQ ID NO: 35775 - DNA, 20 bp, synthetic construct
  misc_feature 1..20: note = chemically synthesized
  source 1..20: mol_type = other DNA
atatagagaaggacctcatg

SEQ ID NO: 35776 - DNA, 20 bp, synthetic construct
  misc_feature 1..20: note = chemically synthesized
  source 1..20: mol_type = other DNA
ctcatgaggaataaatttca

SEQ ID NO: 35777 - DNA, 20 bp, synthetic construct
  misc_feature 1..20: note = chemically synthesized
  source 1..20: mol_type = other DNA
taaatttcatggtgcctatt

SEQ ID NO: 35778 - DNA, 20 bp, synthetic construct
  misc_feature 1..20: note = chemically synthesized
  source 1..20: mol_type = other DNA
tggtgcctattaagataaat

SEQ ID NO: 35779 - DNA, 20 bp, synthetic construct
  misc_feature 1..20: note = chemically synthesized
  source 1..20: mol_type = other DNA
taagataaataagtaccatg

SEQ ID NO: 35780 - DNA, 20 bp, synthetic construct
  misc_feature 1..20: note = chemically synthesized
  source 1..20: mol_type = other DNA
aaataagtaccatgtagtta

SEQ ID NO: 35781 - DNA, 20 bp, synthetic construct
  misc_feature 1..20: note = chemically synthesized
  source 1..20: mol_type = other DNA
aataagtaccatgtagttat

SEQ ID NO: 35782 - DNA, 20 bp, synthetic construct
  misc_feature 1..20: note = chemically synthesized
  source 1..20: mol_type = other DNA
catgtagttatgggaaatct

SEQ ID NO: 35783 - DNA, 20 bp, synthetic construct
  misc_feature 1..20: note = chemically synthesized
  source 1..20: mol_type = other DNA
atgtagttatgggaaatcta

SEQ ID NO: 35784 - DNA, 20 bp, synthetic construct
  misc_feature 1..20: note = chemically synthesized
  source 1..20: mol_type = other DNA
atgggaaatctaaggtgtaa

SEQ ID NO: 35785 - DNA, 20 bp, synthetic construct
  misc_feature 1..20: note = chemically synthesized
  source 1..20: mol_type = other DNA
aaaagaatatacattaaaaa

SEQ ID NO: 35786 - DNA, 20 bp, synthetic construct
  misc_feature 1..20: note = chemically synthesized
  source 1..20: mol_type = other DNA
caaataataatatacttgtg

SEQ ID NO: 35787 - DNA, 20 bp, synthetic construct
  misc_feature 1..20: note = chemically synthesized
  source 1..20: mol_type = other DNA
aataatatacttgtgtagta

SEQ ID NO: 35788 - DNA, 20 bp, synthetic construct
  misc_feature 1..20: note = chemically synthesized
  source 1..20: mol_type = other DNA
ataatatacttgtgtagtat

SEQ ID NO: 35789 - DNA, 20 bp, synthetic construct
  misc_feature 1..20: note = chemically synthesized
  source 1..20: mol_type = other DNA
acttgtgtagtatgggcttg

SEQ ID NO: 35790 - DNA, 20 bp, synthetic construct
  misc_feature 1..20: note = chemically synthesized
  source 1..20: mol_type = other DNA
cttgtgtagtatgggcttga

SEQ ID NO: 35791 - DNA, 20 bp, synthetic construct
  misc_feature 1..20: note = chemically synthesized
  source 1..20: mol_type = other DNA
ttgtgtagtatgggcttgaa

SEQ ID NO: 35792 - DNA, 20 bp, synthetic construct
  misc_feature 1..20: note = chemically synthesized
  source 1..20: mol_type = other DNA
ttgaagggataacataccat

SEQ ID NO: 35793 - DNA, 20 bp, synthetic construct
  misc_feature 1..20: note = chemically synthesized
  source 1..20: mol_type = other DNA
accataagaatatttaattt

SEQ ID NO: 35794 - DNA, 20 bp, synthetic construct
  misc_feature 1..20: note = chemically synthesized
  source 1..20: mol_type = other DNA
taagaatatttaatttgagt

SEQ ID NO: 35795 - DNA, 20 bp, synthetic construct
  misc_feature 1..20: note = chemically synthesized
  source 1..20: mol_type = other DNA
aagaatatttaatttgagtc

SEQ ID NO: 35796 - DNA, 20 bp, synthetic construct
  misc_feature 1..20: note = chemically synthesized
  source 1..20: mol_type = other DNA
taatttgagtcaggaaatga

SEQ ID NO: 35797 - DNA, 20 bp, synthetic construct
  misc_feature 1..20: note = chemically synthesized
  source 1..20: mol_type = other DNA
aatttgagtcaggaaatgaa

SEQ ID NO: 35798 - DNA, 20 bp, synthetic construct
  misc_feature 1..20: note = chemically synthesized
  source 1..20: mol_type = other DNA
gagtcaggaaatgaaaggct

SEQ ID NO: 35799 - DNA, 20 bp, synthetic construct
  misc_feature 1..20: note = chemically synthesized
  source 1..20: mol_type = other DNA
aggctaagtgtgcatttctg

SEQ ID NO: 35800 - DNA, 20 bp, synthetic construct
  misc_feature 1..20: note = chemically synthesized
  source 1..20: mol_type = other DNA
agtgtgcatttctgtagact

SEQ ID NO: 35801 - DNA, 20 bp, synthetic construct
  misc_feature 1..20: note = chemically synthesized
  source 1..20: mol_type = other DNA
tctgtagactaagccaatct

SEQ ID NO: 35802 - DNA, 20 bp, synthetic construct
  misc_feature 1..20: note = chemically synthesized
  source 1..20: mol_type = other DNA
agccaatcttagaaatgatt

SEQ ID NO: 35803 - DNA, 20 bp, synthetic construct
  misc_feature 1..20: note = chemically synthesized
  source 1..20: mol_type = other DNA
caatcttagaaatgattaag

SEQ ID NO: 35804 - DNA, 20 bp, synthetic construct
  misc_feature 1..20: note = chemically synthesized
  source 1..20: mol_type = other DNA
tagaaatgattaagaagacg

SEQ ID NO: 35805 - DNA, 20 bp, synthetic construct
  misc_feature 1..20: note = chemically synthesized
  source 1..20: mol_type = other DNA
aaatgattaagaagacgtgg

SEQ ID NO: 35806 - DNA, 20 bp, synthetic construct
  misc_feature 1..20: note = chemically synthesized
  source 1..20: mol_type = other DNA
aagaagacgtggaagaatct

SEQ ID NO: 35807 - DNA, 20 bp, synthetic construct
  misc_feature 1..20: note = chemically synthesized
  source 1..20: mol_type = other DNA
gaagacgtggaagaatctta

SEQ ID NO: 35808 - DNA, 20 bp, synthetic construct
  misc_feature 1..20: note = chemically synthesized
  source 1..20: mol_type = other DNA
acacactgaaaaaatatgta

SEQ ID NO: 35809 - DNA, 20 bp, synthetic construct
  misc_feature 1..20: note = chemically synthesized
  source 1..20: mol_type = other DNA
aaaaatatgtatggtctaat

SEQ ID NO: 35810 - DNA, 20 bp, synthetic construct
  misc_feature 1..20: note = chemically synthesized
  source 1..20: mol_type = other DNA
tgtatggtctaatgagttta

SEQ ID NO: 35811 - DNA, 20 bp, synthetic construct
  misc_feature 1..20: note = chemically synthesized
  source 1..20: mol_type = other DNA
catataaaatgaatttatac

SEQ ID NO: 35812 - DNA, 20 bp, synthetic construct
  misc_feature 1..20: note = chemically synthesized
  source 1..20: mol_type = other DNA
aaaatgaatttatactagat

SEQ ID NO: 35813 - DNA, 20 bp, synthetic construct
  misc_feature 1..20: note = chemically synthesized
  source 1..20: mol_type = other DNA
aaatgaatttatactagata

SEQ ID NO: 35814 - DNA, 20 bp, synthetic construct
  misc_feature 1..20: note = chemically synthesized
  source 1..20: mol_type = other DNA
aatgaatttatactagataa

SEQ ID NO: 35815 - DNA, 20 bp, synthetic construct
  misc_feature 1..20: note = chemically synthesized
  source 1..20: mol_type = other DNA
atgaatttatactagataag

SEQ ID NO: 35816 - DNA, 20 bp, synthetic construct
  misc_feature 1..20: note = chemically synthesized
  source 1..20: mol_type = other DNA
aatttatactagataagggg

SEQ ID NO: 35817 - DNA, 20 bp, synthetic construct
  misc_feature 1..20: note = chemically synthesized
  source 1..20: mol_type = other DNA
tctcattaacaaataattgc

SEQ ID NO: 35818 - DNA, 20 bp, synthetic construct
  misc_feature 1..20: note = chemically synthesized
  source 1..20: mol_type = other DNA
ctcattaacaaataattgct

SEQ ID NO: 35819 - DNA, 20 bp, synthetic construct
  misc_feature 1..20: note = chemically synthesized
  source 1..20: mol_type = other DNA
taattgctgggttccttcac

SEQ ID NO: 35820 - DNA, 20 bp, synthetic construct
  misc_feature 1..20: note = chemically synthesized
  source 1..20: mol_type = other DNA
attgctgggttccttcacca

SEQ ID NO: 35821 - DNA, 20 bp, synthetic construct
  misc_feature 1..20: note = chemically synthesized
  source 1..20: mol_type = other DNA
gggttccttcaccagagatg

SEQ ID NO: 35822 - DNA, 20 bp, synthetic construct
  misc_feature 1..20: note = chemically synthesized
  source 1..20: mol_type = other DNA
accagagatgcagattttta

SEQ ID NO: 35823 - DNA, 20 bp, synthetic construct
  misc_feature 1..20: note = chemically synthesized
  source 1..20: mol_type = other DNA
ccagagatgcagatttttat

SEQ ID NO: 35824 - DNA, 20 bp, synthetic construct
  misc_feature 1..20: note = chemically synthesized
  source 1..20: mol_type = other DNA
cagagatgcagatttttata

SEQ ID NO: 35825 - DNA, 20 bp, synthetic construct
  misc_feature 1..20: note = chemically synthesized
  source 1..20: mol_type = other DNA
gatttttatagggtaaatga

SEQ ID NO: 35826 - DNA, 20 bp, synthetic construct
  misc_feature 1..20: note = chemically synthesized
  source 1..20: mol_type = other DNA
atttttatagggtaaatgaa

SEQ ID NO: 35827 - DNA, 20 bp, synthetic construct
  misc_feature 1..20: note = chemically synthesized
  source 1..20: mol_type = other DNA
aatgaaaggtgatatattta

SEQ ID NO: 35828 - DNA, 20 bp, synthetic construct
  misc_feature 1..20: note = chemically synthesized
  source 1..20: mol_type = other DNA
atatatttaaagatacttac

SEQ ID NO: 35829 - DNA, 20 bp, synthetic construct
  misc_feature 1..20: note = chemically synthesized
  source 1..20: mol_type = other DNA
agatacttactagattatat

SEQ ID NO: 35830 - DNA, 20 bp, synthetic construct
  misc_feature 1..20: note = chemically synthesized
  source 1..20: mol_type = other DNA
agattatatgagtattaaat

SEQ ID NO: 35831 - DNA, 20 bp, synthetic construct
  misc_feature 1..20: note = chemically synthesized
  source 1..20: mol_type = other DNA
gattatatgagtattaaatt

SEQ ID NO: 35832 - DNA, 20 bp, synthetic construct
  misc_feature 1..20: note = chemically synthesized
  source 1..20: mol_type = other DNA
tatatgagtattaaattggg

SEQ ID NO: 35833 - DNA, 20 bp, synthetic construct
  misc_feature 1..20: note = chemically synthesized
  source 1..20: mol_type = other DNA
tgagtattaaattgggcagc

SEQ ID NO: 35834 - DNA, 20 bp, synthetic construct
  misc_feature 1..20: note = chemically synthesized
  source 1..20: mol_type = other DNA
gagtattaaattgggcagca

SEQ ID NO: 35835 - DNA, 20 bp, synthetic construct
  misc_feature 1..20: note = chemically synthesized
  source 1..20: mol_type = other DNA
aattgggcagcaaggatgat

SEQ ID NO: 35836 - DNA, 20 bp, synthetic construct
  misc_feature 1..20: note = chemically synthesized
  source 1..20: mol_type = other DNA
aaggatgattagaaatgatt

SEQ ID NO: 35837 - DNA, 20 bp, synthetic construct
  misc_feature 1..20: note = chemically synthesized
  source 1..20: mol_type = other DNA
aggatgattagaaatgatta

SEQ ID NO: 35838 - DNA, 20 bp, synthetic construct
  misc_feature 1..20: note = chemically synthesized
  source 1..20: mol_type = other DNA
attagaaatgattaaggacc

SEQ ID NO: 35839 - DNA, 20 bp, synthetic construct
  misc_feature 1..20: note = chemically synthesized
  source 1..20: mol_type = other DNA
tagaaatgattaaggaccca

SEQ ID NO: 35840 - DNA, 20 bp, synthetic construct
  misc_feature 1..20: note = chemically synthesized
  source 1..20: mol_type = other DNA
agaaatgattaaggacccag

SEQ ID NO: 35841 - DNA, 20 bp, synthetic construct
  misc_feature 1..20: note = chemically synthesized
  source 1..20: mol_type = other DNA
gaggtctccatgtccaatta

SEQ ID NO: 35842 - DNA, 20 bp, synthetic construct
  misc_feature 1..20: note = chemically synthesized
  source 1..20: mol_type = other DNA
taaatctgtttttgatttta

SEQ ID NO: 35843 - DNA, 20 bp, synthetic construct
  misc_feature 1..20: note = chemically synthesized
  source 1..20: mol_type = other DNA
gattttatagcctaaatcct

SEQ ID NO: 35844 - DNA, 20 bp, synthetic construct
  misc_feature 1..20: note = chemically synthesized
  source 1..20: mol_type = other DNA
atagcctaaatccttagaca

SEQ ID NO: 35845 - DNA, 20 bp, synthetic construct
  misc_feature 1..20: note = chemically synthesized
  source 1..20: mol_type = other DNA
cattgttattaataaactca

SEQ ID NO: 35846 - DNA, 20 bp, synthetic construct
  misc_feature 1..20: note = chemically synthesized
  source 1..20: mol_type = other DNA
catagacaaaatttatttta

SEQ ID NO: 35847 - DNA, 20 bp, synthetic construct
  misc_feature 1..20: note = chemically synthesized
  source 1..20: mol_type = other DNA
atagacaaaatttattttat

SEQ ID NO: 35848 - DNA, 20 bp, synthetic construct
  misc_feature 1..20: note = chemically synthesized
  source 1..20: mol_type = other DNA
aatttattttatgggaaatt

SEQ ID NO: 35849 - DNA, 20 bp, synthetic construct
  misc_feature 1..20: note = chemically synthesized
  source 1..20: mol_type = other DNA
atttattttatgggaaattt

SEQ ID NO: 35850 - DNA, 20 bp, synthetic construct
  misc_feature 1..20: note = chemically synthesized
  source 1..20: mol_type = other DNA
ttattttatgggaaatttag

SEQ ID NO: 35851 - DNA, 20 bp, synthetic construct
  misc_feature 1..20: note = chemically synthesized
  source 1..20: mol_type = other DNA
aatttaggagtttatgtccc

SEQ ID NO: 35852 - DNA, 20 bp, synthetic construct
  misc_feature 1..20: note = chemically synthesized
  source 1..20: mol_type = other DNA
agtttatgtccctagatttc

SEQ ID NO: 35853 - DNA, 20 bp, synthetic construct
  misc_feature 1..20: note = chemically synthesized
  source 1..20: mol_type = other DNA
agtacatgccaccaaactga

SEQ ID NO: 35854 - DNA, 20 bp, synthetic construct
  misc_feature 1..20: note = chemically synthesized
  source 1..20: mol_type = other DNA
gccaccaaactgacagatga

SEQ ID NO: 35855 - DNA, 20 bp, synthetic construct
  misc_feature 1..20: note = chemically synthesized
  source 1..20: mol_type = other DNA
aactgacagatgacagtgat

SEQ ID NO: 35856 - DNA, 20 bp, synthetic construct
  misc_feature 1..20: note = chemically synthesized
  source 1..20: mol_type = other DNA
gatgacagtgattagtcaca

SEQ ID NO: 35857 - DNA, 20 bp, synthetic construct
  misc_feature 1..20: note = chemically synthesized
  source 1..20: mol_type = other DNA
gtcacaaagtgcctcaaaaa

SEQ ID NO: 35858 - DNA, 20 bp, synthetic construct
  misc_feature 1..20: note = chemically synthesized
  source 1..20: mol_type = other DNA
caaagtgcctcaaaaataga

SEQ ID NO: 35859 - DNA, 20 bp, synthetic construct
  misc_feature 1..20: note = chemically synthesized
  source 1..20: mol_type = other DNA
aaaaatagatggccctatgt

SEQ ID NO: 35860 - DNA, 20 bp, synthetic construct
  misc_feature 1..20: note = chemically synthesized
  source 1..20: mol_type = other DNA
agatggccctatgttagtca

SEQ ID NO: 35861 - DNA, 20 bp, synthetic construct
  misc_feature 1..20: note = chemically synthesized
  source 1..20: mol_type = other DNA
ctatgttagtcatggttctc

SEQ ID NO: 35862 - DNA, 20 bp, synthetic construct
  misc_feature 1..20: note = chemically synthesized
  source 1..20: mol_type = other DNA
gtcatggttctccagaaaaa

SEQ ID NO: 35863 - DNA, 20 bp, synthetic construct
  misc_feature 1..20: note = chemically synthesized
  source 1..20: mol_type = other DNA
ctccagaaaaatagaatcaa

SEQ ID NO: 35864 - DNA, 20 bp, synthetic construct
  misc_feature 1..20: note = chemically synthesized
  source 1..20: mol_type = other DNA
tccagaaaaatagaatcaac

SEQ ID NO: 35865 - DNA, 20 bp, synthetic construct
  misc_feature 1..20: note = chemically synthesized
  source 1..20: mol_type = other DNA
ccaacttcaaattatactac

SEQ ID NO: 35866 - DNA, 20 bp, synthetic construct
  misc_feature 1..20: note = chemically synthesized
  source 1..20: mol_type = other DNA
caacttcaaattatactaca

SEQ ID NO: 35867 - DNA, 20 bp, synthetic construct
  misc_feature 1..20: note = chemically synthesized
  source 1..20: mol_type = other DNA
caaattatactacaaggtga

SEQ ID NO: 35868 - DNA, 20 bp, synthetic construct
  misc_feature 1..20: note = chemically synthesized
  source 1..20: mol_type = other DNA
gtgacagtaactaactgaaa

SEQ ID NO: 35869 - DNA, 20 bp, synthetic construct
  misc_feature 1..20: note = chemically synthesized
  source 1..20: mol_type = other DNA
agtaactaactgaaacagca

SEQ ID NO: 35870 - DNA, 20 bp, synthetic construct
  misc_feature 1..20: note = chemically synthesized
  source 1..20: mol_type = other DNA
agcatggtactgataccaaa

SEQ ID NO: 35871 - DNA, 20 bp, synthetic construct
  misc_feature 1..20: note = chemically synthesized
  source 1..20: mol_type = other DNA
caaacagacacactgactaa

SEQ ID NO: 35872 - DNA, 20 bp, synthetic construct
  misc_feature 1..20: note = chemically synthesized
  source 1..20: mol_type = other DNA
agacacactgactaatggaa

SEQ ID NO: 35873 - DNA, 20 bp, synthetic construct
  misc_feature 1..20: note = chemically synthesized
  source 1..20: mol_type = other DNA
cactgactaatggaacagaa

SEQ ID NO: 35874 - DNA, 20 bp, synthetic construct
  misc_feature 1..20: note = chemically synthesized
  source 1..20: mol_type = other DNA
ctgactaatggaacagaatg

SEQ ID NO: 35875 - DNA, 20 bp, synthetic construct
  misc_feature 1..20: note = chemically synthesized
  source 1..20: mol_type = other DNA
atggaacagaatggagaact

SEQ ID NO: 35876 - DNA, 20 bp, synthetic construct
  misc_feature 1..20: note = chemically synthesized
  source 1..20: mol_type = other DNA
gaacagaatggagaactcag

SEQ ID NO: 35877 - DNA, 20 bp, synthetic construct
  misc_feature 1..20: note = chemically synthesized
  source 1..20: mol_type = other DNA
agaatggagaactcagaagt

SEQ ID NO: 35878 - DNA, 20 bp, synthetic construct
  misc_feature 1..20: note = chemically synthesized
  source 1..20: mol_type = other DNA
aatctgatcttcaacaaacc

SEQ ID NO: 35879 - DNA, 20 bp, synthetic construct
  misc_feature 1..20: note = chemically synthesized
  source 1..20: mol_type = other DNA
tcaacaaacctggtaaaaac

SEQ ID NO: 35880 - DNA, 20 bp, synthetic construct
  misc_feature 1..20: note = chemically synthesized
  source 1..20: mol_type = other DNA
aacctggtaaaaacaagtaa

SEQ ID NO: 35881 - DNA, 20 bp, synthetic construct
  misc_feature 1..20: note = chemically synthesized
  source 1..20: mol_type = other DNA
acctggtaaaaacaagtaat

SEQ ID NO: 35882 - DNA, 20 bp, synthetic construct
  misc_feature 1..20: note = chemically synthesized
  source 1..20: mol_type = other DNA
cctggtaaaaacaagtaatg

SEQ ID NO: 35883 - DNA, 20 bp, synthetic construct
  misc_feature 1..20: note = chemically synthesized
  source 1..20: mol_type = other DNA
ggtaaaaacaagtaatgggg

SEQ ID NO: 35884 - DNA, 20 bp, synthetic construct
  misc_feature 1..20: note = chemically synthesized
  source 1..20: mol_type = other DNA
gtaaaaacaagtaatgggga

SEQ ID NO: 35885 - DNA, 20 bp, synthetic construct
  misc_feature 1..20: note = chemically synthesized
  source 1..20: mol_type = other DNA
taaaaacaagtaatggggaa

SEQ ID NO: 35886 - DNA, 20 bp, synthetic construct
  misc_feature 1..20: note = chemically synthesized
  source 1..20: mol_type = other DNA
ccctattttataaattgtgc

SEQ ID NO: 35887 - DNA, 20 bp, synthetic construct
  misc_feature 1..20: note = chemically synthesized
  source 1..20: mol_type = other DNA
cctattttataaattgtgct

SEQ ID NO: 35888 - DNA, 20 bp, synthetic construct
  misc_feature 1..20: note = chemically synthesized
  source 1..20: mol_type = other DNA
tattttataaattgtgctgg

SEQ ID NO: 35889 - DNA, 20 bp, synthetic construct
  misc_feature 1..20: note = chemically synthesized
  source 1..20: mol_type = other DNA
ataaattgtgctgggagaac

SEQ ID NO: 35890 - DNA, 20 bp, synthetic construct
  misc_feature 1..20: note = chemically synthesized
  source 1..20: mol_type = other DNA
attgtgctgggagaactggc

SEQ ID NO: 35891 - DNA, 20 bp, synthetic construct
  misc_feature 1..20: note = chemically synthesized
  source 1..20: mol_type = other DNA
gagaactggctagccatatg

SEQ ID NO: 35892 - DNA, 20 bp, synthetic construct
  misc_feature 1..20: note = chemically synthesized
  source 1..20: mol_type = other DNA
catatgcagaaaattgaaac

SEQ ID NO: 35893 - DNA, 20 bp, synthetic construct
  misc_feature 1..20: note = chemically synthesized
  source 1..20: mol_type = other DNA
tcttatacataaattaactc

SEQ ID NO: 35894 - DNA, 20 bp, synthetic construct
  misc_feature 1..20: note = chemically synthesized
  source 1..20: mol_type = other DNA
aattaactcaagatgcatta

SEQ ID NO: 35895 - DNA, 20 bp, synthetic construct
  misc_feature 1..20: note = chemically synthesized
  source 1..20: mol_type = other DNA
tcaagatgcattaaagactt

SEQ ID NO: 35896 - DNA, 20 bp, synthetic construct
  misc_feature 1..20: note = chemically synthesized
  source 1..20: mol_type = other DNA
acccaaaactataaaaactt

SEQ ID NO: 35897 - DNA, 20 bp, synthetic construct
  misc_feature 1..20: note = chemically synthesized
  source 1..20: mol_type = other DNA
caaaactataaaaactttag

SEQ ID NO: 35898 - DNA, 20 bp, synthetic construct
  misc_feature 1..20: note = chemically synthesized
  source 1..20: mol_type = other DNA
aaaaactttagaagaaaacc

SEQ ID NO: 35899 - DNA, 20 bp, synthetic construct
  misc_feature 1..20: note = chemically synthesized
  source 1..20: mol_type = other DNA
aaaactttagaagaaaacct

SEQ ID NO: 35900 - DNA, 20 bp, synthetic construct
  misc_feature 1..20: note = chemically synthesized
  source 1..20: mol_type = other DNA
aaacctaggcaataccattc

SEQ ID NO: 35901 - DNA, 20 bp, synthetic construct
  misc_feature 1..20: note = chemically synthesized
  source 1..20: mol_type = other DNA
aggcaataccattccggaca

SEQ ID NO: 35902 - DNA, 20 bp, synthetic construct
  misc_feature 1..20: note = chemically synthesized
  source 1..20: mol_type = other DNA
taccattccggacatagaca

SEQ ID NO: 35903 - DNA, 20 bp, synthetic construct
  misc_feature 1..20: note = chemically synthesized
  source 1..20: mol_type = other DNA
accattccggacatagacac

SEQ ID NO: 35904 - DNA, 20 bp, synthetic construct
  misc_feature 1..20: note = chemically synthesized
  source 1..20: mol_type = other DNA
tccggacatagacacaggca

SEQ ID NO: 35905 - DNA, 20 bp, synthetic construct
  misc_feature 1..20: note = chemically synthesized
  source 1..20: mol_type = other DNA
gtcaaaaacaattgcaacaa

SEQ ID NO: 35906 - DNA, 20 bp, synthetic construct
  misc_feature 1..20: note = chemically synthesized
  source 1..20: mol_type = other DNA
aaaagcaaacactgtcaaat

SEQ ID NO: 35907 - DNA, 20 bp, synthetic construct
  misc_feature 1..20: note = chemically synthesized
  source 1..20: mol_type = other DNA
aatgagatctaattaaacta

SEQ ID NO: 35908 - DNA, 20 bp, synthetic construct
  misc_feature 1..20: note = chemically synthesized
  source 1..20: mol_type = other DNA
tgagatctaattaaactaaa

SEQ ID NO: 35909 - DNA, 20 bp, synthetic construct
  misc_feature 1..20: note = chemically synthesized
  source 1..20: mol_type = other DNA
tctaattaaactaaagagat

SEQ ID NO: 35910 - DNA, 20 bp, synthetic construct
  misc_feature 1..20: note = chemically synthesized
  source 1..20: mol_type = other DNA
ctaattaaactaaagagatc

SEQ ID NO: 35911 - DNA, 20 bp, synthetic construct
  misc_feature 1..20: note = chemically synthesized
  source 1..20: mol_type = other DNA
taaactaaagagatcgggca

SEQ ID NO: 35912 - DNA, 20 bp, synthetic construct
  misc_feature 1..20: note = chemically synthesized
  source 1..20: mol_type = other DNA
actaaagagatcgggcatgg

SEQ ID NO: 35913 - DNA, 20 bp, synthetic construct
  misc_feature 1..20: note = chemically synthesized
  source 1..20: mol_type = other DNA
gtggctcacgcctgtaatcc

SEQ ID NO: 35914 - DNA, 20 bp, synthetic construct
  misc_feature 1..20: note = chemically synthesized
  source 1..20: mol_type = other DNA
cgcctgtaatcccagcactt

SEQ ID NO: 35915 - DNA, 20 bp, synthetic construct
  misc_feature 1..20: note = chemically synthesized
  source 1..20: mol_type = other DNA
gcctgtaatcccagcacttt

SEQ ID NO: 35916 - DNA, 20 bp, synthetic construct
  misc_feature 1..20: note = chemically synthesized
  source 1..20: mol_type = other DNA
ctgtaatcccagcactttgg

SEQ ID NO: 35917 - DNA, 20 bp, synthetic construct
  misc_feature 1..20: note = chemically synthesized
  source 1..20: mol_type = other DNA
tgtaatcccagcactttggg

SEQ ID NO: 35918 - DNA, 20 bp, synthetic construct
  misc_feature 1..20: note = chemically synthesized
  source 1..20: mol_type = other DNA
tcccagcactttgggaggcc

SEQ ID NO: 35919 - DNA, 20 bp, synthetic construct
  misc_feature 1..20: note = chemically synthesized
  source 1..20: mol_type = other DNA
cccagcactttgggaggcca

SEQ ID NO: 35920 - DNA, 20 bp, synthetic construct
  misc_feature 1..20: note = chemically synthesized
  source 1..20: mol_type = other DNA
agcactttgggaggccaagg

SEQ ID NO: 35921 - DNA, 20 bp, synthetic construct
  misc_feature 1..20: note = chemically synthesized
  source 1..20: mol_type = other DNA
gcactttgggaggccaaggt

SEQ ID NO: 35922 - DNA, 20 bp, synthetic construct
  misc_feature 1..20: note = chemically synthesized
  source 1..20: mol_type = other DNA
ctttgggaggccaaggtggg

SEQ ID NO: 35923 - DNA, 20 bp, synthetic construct
  misc_feature 1..20: note = chemically synthesized
  source 1..20: mol_type = other DNA
ccaaggtgggtggatcactt

SEQ ID NO: 35924 - DNA, 20 bp, synthetic construct
  misc_feature 1..20: note = chemically synthesized
  source 1..20: mol_type = other DNA
caaggtgggtggatcacttg

SEQ ID NO: 35925 - DNA, 20 bp, synthetic construct
  misc_feature 1..20: note = chemically synthesized
  source 1..20: mol_type = other DNA
ggtgggtggatcacttgagg

SEQ ID NO: 35926 - DNA, 20 bp, synthetic construct
  misc_feature 1..20: note = chemically synthesized
  source 1..20: mol_type = other DNA
gtgggtggatcacttgaggt

SEQ ID NO: 35927 - DNA, 20 bp, synthetic construct
  misc_feature 1..20: note = chemically synthesized
  source 1..20: mol_type = other DNA
tgggtggatcacttgaggtg

SEQ ID NO: 35928 - DNA, 20 bp, synthetic construct
  misc_feature 1..20: note = chemically synthesized
  source 1..20: mol_type = other DNA
ggtggatcacttgaggtggg

SEQ ID NO: 35929 - DNA, 20 bp, synthetic construct
  misc_feature 1..20: note = chemically synthesized
  source 1..20: mol_type = other DNA
tcacttgaggtggggagtat

SEQ ID NO: 35930 - DNA, 20 bp, synthetic construct
  misc_feature 1..20: note = chemically synthesized
  source 1..20: mol_type = other DNA
acttgaggtggggagtataa

SEQ ID NO: 35931 - DNA, 20 bp, synthetic construct
  misc_feature 1..20: note = chemically synthesized
  source 1..20: mol_type = other DNA
tgaggtggggagtataagag

SEQ ID NO: 35932 - DNA, 20 bp, synthetic construct
  misc_feature 1..20: note = chemically synthesized
  source 1..20: mol_type = other DNA
tggggagtataagagcagcc

SEQ ID NO: 35933 - DNA, 20 bp, synthetic construct
  misc_feature 1..20: note = chemically synthesized
  source 1..20: mol_type = other DNA
taagagcagcctggccaaca

SEQ ID NO: 35934 - DNA, 20 bp, synthetic construct
  misc_feature 1..20: note = chemically synthesized
  source 1..20: mol_type = other DNA
taaaaatacaaaaaatgtgc

SEQ ID NO: 35935 - DNA, 20 bp, synthetic construct
  misc_feature 1..20: note = chemically synthesized
  source 1..20: mol_type = other DNA
aaaaatacaaaaaatgtgct

SEQ ID NO: 35936 - DNA, 20 bp, synthetic construct
  misc_feature 1..20: note = chemically synthesized
  source 1..20: mol_type = other DNA
tacaaaaaatgtgctgggta

SEQ ID NO: 35937 - DNA, 20 bp, synthetic construct
  misc_feature 1..20: note = chemically synthesized
  source 1..20: mol_type = other DNA
aaaaaatgtgctgggtatgg

SEQ ID NO: 35938 - DNA, 20 bp, synthetic construct
  misc_feature 1..20: note = chemically synthesized
  source 1..20: mol_type = other DNA
gtggtgcgtacctgtaatct

SEQ ID NO: 35939 - DNA, 20 bp, synthetic construct
  misc_feature 1..20: note = chemically synthesized
  source 1..20: mol_type = other DNA
tacctgtaatctcagctact

SEQ ID NO: 35940 - DNA, 20 bp, synthetic construct
  misc_feature 1..20: note = chemically synthesized
  source 1..20: mol_type = other DNA
acctgtaatctcagctactc

SEQ ID NO: 35941 - DNA, 20 bp, synthetic construct
  misc_feature 1..20: note = chemically synthesized
  source 1..20: mol_type = other DNA
ctgtaatctcagctactcag

SEQ ID NO: 35942 - DNA, 20 bp, synthetic construct
  misc_feature 1..20: note = chemically synthesized
  source 1..20: mol_type = other DNA
tgtaatctcagctactcagg

SEQ ID NO: 35943 - DNA, 20 bp, synthetic construct
  misc_feature 1..20: note = chemically synthesized
  source 1..20: mol_type = other DNA
tctcagctactcaggaggct

SEQ ID NO: 35944 - DNA, 20 bp, synthetic construct
  misc_feature 1..20: note = chemically synthesized
  source 1..20: mol_type = other DNA
ctcagctactcaggaggctg

SEQ ID NO: 35945 - DNA, 20 bp, synthetic construct
  misc_feature 1..20: note = chemically synthesized
  source 1..20: mol_type = other DNA
agctactcaggaggctgagg

SEQ ID NO: 35946 - DNA, 20 bp, synthetic construct
  misc_feature 1..20: note = chemically synthesized
  source 1..20: mol_type = other DNA
gctactcaggaggctgaggc

SEQ ID NO: 35947 - DNA, 20 bp, synthetic construct
  misc_feature 1..20: note = chemically synthesized
  source 1..20: mol_type = other DNA
tactcaggaggctgaggcag

SEQ ID NO: 35948 - DNA, 20 bp, synthetic construct
  misc_feature 1..20: note = chemically synthesized
  source 1..20: mol_type = other DNA
gcaggagaattgcttgaacc

SEQ ID NO: 35949 - DNA, 20 bp, synthetic construct
  misc_feature 1..20: note = chemically synthesized
  source 1..20: mol_type = other DNA
caggagaattgcttgaaccc

SEQ ID NO: 35950 - DNA, 20 bp, synthetic construct
  misc_feature 1..20: note = chemically synthesized
  source 1..20: mol_type = other DNA
ggagaattgcttgaacccag

SEQ ID NO: 35951 - DNA, 20 bp, synthetic construct
  misc_feature 1..20: note = chemically synthesized
  source 1..20: mol_type = other DNA
gagaattgcttgaacccagg

SEQ ID NO: 35952 - DNA, 20 bp, synthetic construct
  misc_feature 1..20: note = chemically synthesized
  source 1..20: mol_type = other DNA
aattgcttgaacccaggagg

SEQ ID NO: 35953 - DNA, 20 bp, synthetic construct
  misc_feature 1..20: note = chemically synthesized
  source 1..20: mol_type = other DNA
ttgcttgaacccaggaggca

SEQ ID NO: 35954 - DNA, 20 bp, synthetic construct
  misc_feature 1..20: note = chemically synthesized
  source 1..20: mol_type = other DNA
tgcttgaacccaggaggcag

SEQ ID NO: 35955 - DNA, 20 bp, synthetic construct
  misc_feature 1..20: note = chemically synthesized
  source 1..20: mol_type = other DNA
aacccaggaggcagaggttg

SEQ ID NO: 35956 - DNA, 20 bp, synthetic construct
  misc_feature 1..20: note = chemically synthesized
  source 1..20: mol_type = other DNA
caggaggcagaggttgcagt

SEQ ID NO: 35957 - DNA, 20 bp, synthetic construct
  misc_feature 1..20: note = chemically synthesized
  source 1..20: mol_type = other DNA
ggcagaggttgcagtgagct

SEQ ID NO: 35958 - DNA, 20 bp, synthetic construct
  misc_feature 1..20: note = chemically synthesized
  source 1..20: mol_type = other DNA
gagatcgcaccactgcactc

SEQ ID NO: 35959 - DNA, 20 bp, synthetic construct
  misc_feature 1..20: note = chemically synthesized
  source 1..20: mol_type = other DNA
cgcaccactgcactctagca

SEQ ID NO: 35960 - DNA, 20 bp, synthetic construct
  misc_feature 1..20: note = chemically synthesized
  source 1..20: mol_type = other DNA
gcaccactgcactctagcat

SEQ ID NO: 35961 - DNA, 20 bp, synthetic construct
  misc_feature 1..20: note = chemically synthesized
  source 1..20: mol_type = other DNA
ctgcactctagcatgggtga

SEQ ID NO: 35962 - DNA, 20 bp, synthetic construct
  misc_feature 1..20: note = chemically synthesized
  source 1..20: mol_type = other DNA
gcactctagcatgggtgaaa

SEQ ID NO: 35963 - DNA, 20 bp, synthetic construct
  misc_feature 1..20: note = chemically synthesized
  source 1..20: mol_type = other DNA
tctagcatgggtgaaagagt

SEQ ID NO: 35964 - DNA, 20 bp, synthetic construct
  misc_feature 1..20: note = chemically synthesized
  source 1..20: mol_type = other DNA
tgagacttcatctcaaaata

SEQ ID NO: 35965 - DNA, 20 bp, synthetic construct
  misc_feature 1..20: note = chemically synthesized
  source 1..20: mol_type = other DNA
aagaaaaatacaattaaata

SEQ ID NO: 35966 - DNA, 20 bp, synthetic construct
  misc_feature 1..20: note = chemically synthesized
  source 1..20: mol_type = other DNA
gaaaaatacaattaaataca

SEQ ID NO: 35967 - DNA, 20 bp, synthetic construct
  misc_feature 1..20: note = chemically synthesized
  source 1..20: mol_type = other DNA
ttaaatacagagcttctaaa

SEQ ID NO: 35968 - DNA, 20 bp, synthetic construct
  misc_feature 1..20: note = chemically synthesized
  source 1..20: mol_type = other DNA
acagcaaaataaactatcat

SEQ ID NO: 35969 - DNA, 20 bp, synthetic construct
  misc_feature 1..20: note = chemically synthesized
  source 1..20: mol_type = other DNA
agcaaaataaactatcatca

SEQ ID NO: 35970 - DNA, 20 bp, synthetic construct
  misc_feature 1..20: note = chemically synthesized
  source 1..20: mol_type = other DNA
taaactatcatcagagcgaa

SEQ ID NO: 35971 - DNA, 20 bp, synthetic construct
  misc_feature 1..20: note = chemically synthesized
  source 1..20: mol_type = other DNA
aaactatcatcagagcgaac

SEQ ID NO: 35972 - DNA, 20 bp, synthetic construct
  misc_feature 1..20: note = chemically synthesized
  source 1..20: mol_type = other DNA
cagagcgaacaggcaaccta

SEQ ID NO: 35973 - DNA, 20 bp, synthetic construct
  misc_feature 1..20: note = chemically synthesized
  source 1..20: mol_type = other DNA
cgaacaggcaacctacagaa

SEQ ID NO: 35974 - DNA, 20 bp, synthetic construct
  misc_feature 1..20: note = chemically synthesized
  source 1..20: mol_type = other DNA
gaacaggcaacctacagaat

SEQ ID NO: 35975 - DNA, 20 bp, synthetic construct
  misc_feature 1..20: note = chemically synthesized
  source 1..20: mol_type = other DNA
acaggcaacctacagaatgg

SEQ ID NO: 35976 - DNA, 20 bp, synthetic construct
  misc_feature 1..20: note = chemically synthesized
  source 1..20: mol_type = other DNA
tgcaatctacccatctgaca

SEQ ID NO: 35977 - DNA, 20 bp, synthetic construct
  misc_feature 1..20: note = chemically synthesized
  source 1..20: mol_type = other DNA
gcaatctacccatctgacaa

SEQ ID NO: 35978 - DNA, 20 bp, synthetic construct
  misc_feature 1..20: note = chemically synthesized
  source 1..20: mol_type = other DNA
tctgacaaaggtctaatatc

SEQ ID NO: 35979 - DNA, 20 bp, synthetic construct
  misc_feature 1..20: note = chemically synthesized
  source 1..20: mol_type = other DNA
gtctaatatccagaatctat

SEQ ID NO: 35980 - DNA, 20 bp, synthetic construct
  misc_feature 1..20: note = chemically synthesized
  source 1..20: mol_type = other DNA
tctaatatccagaatctatg

SEQ ID NO: 35981 - DNA, 20 bp, synthetic construct
  misc_feature 1..20: note = chemically synthesized
  source 1..20: mol_type = other DNA
tccagaatctatgaggaact

SEQ ID NO: 35982 - DNA, 20 bp, synthetic construct
  misc_feature 1..20: note = chemically synthesized
  source 1..20: mol_type = other DNA
gaacttagacatatttacaa

SEQ ID NO: 35983 - DNA, 20 bp, synthetic construct
  misc_feature 1..20: note = chemically synthesized
  source 1..20: mol_type = other DNA
acacaaacaaccccattaaa

SEQ ID NO: 35984 - DNA, 20 bp, synthetic construct
  misc_feature 1..20: note = chemically synthesized
  source 1..20: mol_type = other DNA
caaacaaccccattaaaaag

SEQ ID NO: 35985 - DNA, 20 bp, synthetic construct
  misc_feature 1..20: note = chemically synthesized
  source 1..20: mol_type = other DNA
aaacaaccccattaaaaagt

SEQ ID NO: 35986 - DNA, 20 bp, synthetic construct
  misc_feature 1..20: note = chemically synthesized
  source 1..20: mol_type = other DNA
accccattaaaaagtgggca

SEQ ID NO: 35987 - DNA, 20 bp, synthetic construct
  misc_feature 1..20: note = chemically synthesized
  source 1..20: mol_type = other DNA
ccccattaaaaagtgggcaa

SEQ ID NO: 35988 - DNA, 20 bp, synthetic construct
  misc_feature 1..20: note = chemically synthesized
  source 1..20: mol_type = other DNA
aagtgggcaaaggacatgaa

SEQ ID NO: 35989 - DNA, 20 bp, synthetic construct
  misc_feature 1..20: note = chemically synthesized
  source 1..20: mol_type = other DNA
catgaacagacacttctcaa

SEQ ID NO: 35990 - DNA, 20 bp, synthetic construct
  misc_feature 1..20: note = chemically synthesized
  source 1..20: mol_type = other DNA
gaacagacacttctcaaaag

SEQ ID NO: 35991 - DNA, 20 bp, synthetic construct
  misc_feature 1..20: note = chemically synthesized
  source 1..20: mol_type = other DNA
ctcaaaagaagacatttatg

SEQ ID NO: 35992 - DNA, 20 bp, synthetic construct
  misc_feature 1..20: note = chemically synthesized
  source 1..20: mol_type = other DNA
aagaagacatttatgtggct

SEQ ID NO: 35993 - DNA, 20 bp, synthetic construct
  misc_feature 1..20: note = chemically synthesized
  source 1..20: mol_type = other DNA
ggctaagaaacatacgaaaa

SEQ ID NO: 35994 - DNA, 20 bp, synthetic construct
  misc_feature 1..20: note = chemically synthesized
  source 1..20: mol_type = other DNA
gtctcaatgtcactgatcat

SEQ ID NO: 35995 - DNA, 20 bp, synthetic construct
  misc_feature 1..20: note = chemically synthesized
  source 1..20: mol_type = other DNA
ctcaatgtcactgatcatta

SEQ ID NO: 35996 - DNA, 20 bp, synthetic construct
  misc_feature 1..20: note = chemically synthesized
  source 1..20: mol_type = other DNA
aatgaaataccatctgacac

SEQ ID NO: 35997 - DNA, 20 bp, synthetic construct
  misc_feature 1..20: note = chemically synthesized
  source 1..20: mol_type = other DNA
aaataccatctgacaccagt

SEQ ID NO: 35998 - DNA, 20 bp, synthetic construct
  misc_feature 1..20: note = chemically synthesized
  source 1..20: mol_type = other DNA
ccatctgacaccagtcagaa

SEQ ID NO: 35999 - DNA, 20 bp, synthetic construct
  misc_feature 1..20: note = chemically synthesized
  source 1..20: mol_type = other DNA
tctgacaccagtcagaatgg

SEQ ID NO: 36000 - DNA, 20 bp, synthetic construct
  misc_feature 1..20: note = chemically synthesized
  source 1..20: mol_type = other DNA
agtcagaatggtggttttta

SEQ ID NO: 36001 - DNA, 20 bp, synthetic construct
  misc_feature 1..20: note = chemically synthesized
  source 1..20: mol_type = other DNA
gaatggtggtttttaaagtc

SEQ ID NO: 36002 - DNA, 20 bp, synthetic construct
  misc_feature 1..20: note = chemically synthesized
  source 1..20: mol_type = other DNA
tttttaaagtcaagaaacaa

SEQ ID NO: 36003 - DNA, 20 bp, synthetic construct
  misc_feature 1..20: note = chemically synthesized
  source 1..20: mol_type = other DNA
agtcaagaaacaacagatgc

SEQ ID NO: 36004 - DNA, 20 bp, synthetic construct
  misc_feature 1..20: note = chemically synthesized
  source 1..20: mol_type = other DNA
aagaaacaacagatgctagc

SEQ ID NO: 36005 - DNA, 20 bp, synthetic construct
  misc_feature 1..20: note = chemically synthesized
  source 1..20: mol_type = other DNA
agaaacaacagatgctagca

SEQ ID NO: 36006 - DNA, 20 bp, synthetic construct
  misc_feature 1..20: note = chemically synthesized
  source 1..20: mol_type = other DNA
aacagatgctagcaaggttg

SEQ ID NO: 36007 - DNA, 20 bp, synthetic construct
  misc_feature 1..20: note = chemically synthesized
  source 1..20: mol_type = other DNA
cagatgctagcaaggttgca

SEQ ID NO: 36008 - DNA, 20 bp, synthetic construct
  misc_feature 1..20: note = chemically synthesized
  source 1..20: mol_type = other DNA
ctagcaaggttgcagagaaa

SEQ ID NO: 36009 - DNA, 20 bp, synthetic construct
  misc_feature 1..20: note = chemically synthesized
  source 1..20: mol_type = other DNA
tagcaaggttgcagagaaat

SEQ ID NO: 36010 - DNA, 20 bp, synthetic construct
  misc_feature 1..20: note = chemically synthesized
  source 1..20: mol_type = other DNA
taggaacacttttacactgt

SEQ ID NO: 36011 - DNA, 20 bp, synthetic construct
  misc_feature 1..20: note = chemically synthesized
  source 1..20: mol_type = other DNA
gaacacttttacactgttgg

SEQ ID NO: 36012 - DNA, 20 bp, synthetic construct
  misc_feature 1..20: note = chemically synthesized
  source 1..20: mol_type = other DNA
aacacttttacactgttggt

SEQ ID NO: 36013 - DNA, 20 bp, synthetic construct
  misc_feature 1..20: note = chemically synthesized
  source 1..20: mol_type = other DNA
gtaaactaattcaaccattg

SEQ ID NO: 36014 - DNA, 20 bp, synthetic construct
  misc_feature 1..20: note = chemically synthesized
  source 1..20: mol_type = other DNA
aactaattcaaccattgtgg

SEQ ID NO: 36015 - DNA, 20 bp, synthetic construct
  misc_feature 1..20: note = chemically synthesized
  source 1..20: mol_type = other DNA
aattcaaccattgtggaaga

SEQ ID NO: 36016 - DNA, 20 bp, synthetic construct
  misc_feature 1..20: note = chemically synthesized
  source 1..20: mol_type = other DNA
aaccattgtggaagacagtg

SEQ ID NO: 36017 - DNA, 20 bp, synthetic construct
  misc_feature 1..20: note = chemically synthesized
  source 1..20: mol_type = other DNA
gacagtgtggcaattcctca

SEQ ID NO: 36018 - DNA, 20 bp, synthetic construct
  misc_feature 1..20: note = chemically synthesized
  source 1..20: mol_type = other DNA
gtggcaattcctcaaagatt

SEQ ID NO: 36019 - DNA, 20 bp, synthetic construct
  misc_feature 1..20: note = chemically synthesized
  source 1..20: mol_type = other DNA
attcctcaaagatttagaac

SEQ ID NO: 36020 - DNA, 20 bp, synthetic construct
  misc_feature 1..20: note = chemically synthesized
  source 1..20: mol_type = other DNA
tgacctcacaatcccattac

SEQ ID NO: 36021 - DNA, 20 bp, synthetic construct
  misc_feature 1..20: note = chemically synthesized
  source 1..20: mol_type = other DNA
gacctcacaatcccattact

SEQ ID NO: 36022 - DNA, 20 bp, synthetic construct
  misc_feature 1..20: note = chemically synthesized
  source 1..20: mol_type = other DNA
cattactgggtatataccta

SEQ ID NO: 36023 - DNA, 20 bp, synthetic construct
  misc_feature 1..20: note = chemically synthesized
  source 1..20: mol_type = other DNA
attactgggtatatacctaa

SEQ ID NO: 36024 - DNA, 20 bp, synthetic construct
  misc_feature 1..20: note = chemically synthesized
  source 1..20: mol_type = other DNA
tactgggtatatacctaaag

SEQ ID NO: 36025 - DNA, 20 bp, synthetic construct
  misc_feature 1..20: note = chemically synthesized
  source 1..20: mol_type = other DNA
gtataaatcattctattact

SEQ ID NO: 36026 - DNA, 20 bp, synthetic construct
  misc_feature 1..20: note = chemically synthesized
  source 1..20: mol_type = other DNA
atgcacatgtatgttcattg

SEQ ID NO: 36027 - DNA, 20 bp, synthetic construct
  misc_feature 1..20: note = chemically synthesized
  source 1..20: mol_type = other DNA
cattgtagcactattcacaa

SEQ ID NO: 36028 - DNA, 20 bp, synthetic construct
  misc_feature 1..20: note = chemically synthesized
  source 1..20: mol_type = other DNA
tagcactattcacaatagca

SEQ ID NO: 36029 - DNA, 20 bp, synthetic construct
  misc_feature 1..20: note = chemically synthesized
  source 1..20: mol_type = other DNA
tattcacaatagcaaagaca

SEQ ID NO: 36030 - DNA, 20 bp, synthetic construct
  misc_feature 1..20: note = chemically synthesized
  source 1..20: mol_type = other DNA
agacatagaatcaacccaaa

SEQ ID NO: 36031 - DNA, 20 bp, synthetic construct
  misc_feature 1..20: note = chemically synthesized
  source 1..20: mol_type = other DNA
acccaaatggccatcaatga

SEQ ID NO: 36032 - DNA, 20 bp, synthetic construct
  misc_feature 1..20: note = chemically synthesized
  source 1..20: mol_type = other DNA
gatagacaatttaaaaaatg

SEQ ID NO: 36033 - DNA, 20 bp, synthetic construct
  misc_feature 1..20: note = chemically synthesized
  source 1..20: mol_type = other DNA
aaatactatctaaccataaa

SEQ ID NO: 36034 - DNA, 20 bp, synthetic construct
  misc_feature 1..20: note = chemically synthesized
  source 1..20: mol_type = other DNA
aatactatctaaccataaaa

SEQ ID NO: 36035 - DNA, 20 bp, synthetic construct
  misc_feature 1..20: note = chemically synthesized
  source 1..20: mol_type = other DNA
atactatctaaccataaaaa

SEQ ID NO: 36036 - DNA, 20 bp, synthetic construct
  misc_feature 1..20: note = chemically synthesized
  source 1..20: mol_type = other DNA
atctaaccataaaaagggat

SEQ ID NO: 36037 - DNA, 20 bp, synthetic construct
  misc_feature 1..20: note = chemically synthesized
  source 1..20: mol_type = other DNA
gatgagatcatgccctttgc

SEQ ID NO: 36038 - DNA, 20 bp, synthetic construct
  misc_feature 1..20: note = chemically synthesized
  source 1..20: mol_type = other DNA
atgagatcatgccctttgct

SEQ ID NO: 36039 - DNA, 20 bp, synthetic construct
  misc_feature 1..20: note = chemically synthesized
  source 1..20: mol_type = other DNA
tcatgccctttgctgggaca

SEQ ID NO: 36040 - DNA, 20 bp, synthetic construct
  misc_feature 1..20: note = chemically synthesized
  source 1..20: mol_type = other DNA
gccctttgctgggacatgga

SEQ ID NO: 36041 - DNA, 20 bp, synthetic construct
  misc_feature 1..20: note = chemically synthesized
  source 1..20: mol_type = other DNA
cctttgctgggacatggatg

SEQ ID NO: 36042 - DNA, 20 bp, synthetic construct
  misc_feature 1..20: note = chemically synthesized
  source 1..20: mol_type = other DNA
tgggacatggatggagccga

SEQ ID NO: 36043 - DNA, 20 bp, synthetic construct
  misc_feature 1..20: note = chemically synthesized
  source 1..20: mol_type = other DNA
gagccgaaagccattatctt

SEQ ID NO: 36044 - DNA, 20 bp, synthetic construct
  misc_feature 1..20: note = chemically synthesized
  source 1..20: mol_type = other DNA
ttatcttcagtaaactaatg

SEQ ID NO: 36045 - DNA, 20 bp, synthetic construct
  misc_feature 1..20: note = chemically synthesized
  source 1..20: mol_type = other DNA
tatcttcagtaaactaatgc

SEQ ID NO: 36046 - DNA, 20 bp, synthetic construct
  misc_feature 1..20: note = chemically synthesized
  source 1..20: mol_type = other DNA
tcagtaaactaatgcaggaa

SEQ ID NO: 36047 - DNA, 20 bp, synthetic construct
  misc_feature 1..20: note = chemically synthesized
  source 1..20: mol_type = other DNA
aaacaccacatgttctcact

SEQ ID NO: 36048 - DNA, 20 bp, synthetic construct
  misc_feature 1..20: note = chemically synthesized
  source 1..20: mol_type = other DNA
caccacatgttctcacttag

SEQ ID NO: 36049 - DNA, 20 bp, synthetic construct
  misc_feature 1..20: note = chemically synthesized
  source 1..20: mol_type = other DNA
cacatgttctcacttagaag

SEQ ID NO: 36050 - DNA, 20 bp, synthetic construct
  misc_feature 1..20: note = chemically synthesized
  source 1..20: mol_type = other DNA
acatgttctcacttagaagt

SEQ ID NO: 36051 - DNA, 20 bp, synthetic construct
  misc_feature 1..20: note = chemically synthesized
  source 1..20: mol_type = other DNA
atgttctcacttagaagtgg

SEQ ID NO: 36052 - DNA, 20 bp, synthetic construct
  misc_feature 1..20: note = chemically synthesized
  source 1..20: mol_type = other DNA
agaagtgggagctgaacaat

SEQ ID NO: 36053 - DNA, 20 bp, synthetic construct
  misc_feature 1..20: note = chemically synthesized
  source 1..20: mol_type = other DNA
gggagctgaacaatgagaat

SEQ ID NO: 36054 - DNA, 20 bp, synthetic construct
  misc_feature 1..20: note = chemically synthesized
  source 1..20: mol_type = other DNA
acaatgagaatgagaacaca

SEQ ID NO: 36055 - DNA, 20 bp, synthetic construct
  misc_feature 1..20: note = chemically synthesized
  source 1..20: mol_type = other DNA
agaatgagaacacatggaaa

SEQ ID NO: 36056 - DNA, 20 bp, synthetic construct
  misc_feature 1..20: note = chemically synthesized
  source 1..20: mol_type = other DNA
tgagaacacatggaaacagt

SEQ ID NO: 36057 - DNA, 20 bp, synthetic construct
  misc_feature 1..20: note = chemically synthesized
  source 1..20: mol_type = other DNA
gagaacacatggaaacagtg

SEQ ID NO: 36058 - DNA, 20 bp, synthetic construct
  misc_feature 1..20: note = chemically synthesized
  source 1..20: mol_type = other DNA
agaacacatggaaacagtga

SEQ ID NO: 36059 - DNA, 20 bp, synthetic construct
  misc_feature 1..20: note = chemically synthesized
  source 1..20: mol_type = other DNA
gaacacatggaaacagtgag

SEQ ID NO: 36060 - DNA, 20 bp, synthetic construct
  misc_feature 1..20: note = chemically synthesized
  source 1..20: mol_type = other DNA
cacatggaaacagtgagggg

SEQ ID NO: 36061 - DNA, 20 bp, synthetic construct
  misc_feature 1..20: note = chemically synthesized
  source 1..20: mol_type = other DNA
gtgaggggaagaacacacac

SEQ ID NO: 36062 - DNA, 20 bp, synthetic construct
  misc_feature 1..20: note = chemically synthesized
  source 1..20: mol_type = other DNA
gaggggaagaacacacactg

SEQ ID NO: 36063 - DNA, 20 bp, synthetic construct
  misc_feature 1..20: note = chemically synthesized
  source 1..20: mol_type = other DNA
gaacacacactggagcctgt

SEQ ID NO: 36064 - DNA, 20 bp, synthetic construct
  misc_feature 1..20: note = chemically synthesized
  source 1..20: mol_type = other DNA
aacacacactggagcctgtc

SEQ ID NO: 36065 - DNA, 20 bp, synthetic construct
  misc_feature 1..20: note = chemically synthesized
  source 1..20: mol_type = other DNA
acacacactggagcctgtca

SEQ ID NO: 36066 - DNA, 20 bp, synthetic construct
  misc_feature 1..20: note = chemically synthesized
  source 1..20: mol_type = other DNA
cactggagcctgtcagggca

SEQ ID NO: 36067 - DNA, 20 bp, synthetic construct
  misc_feature 1..20: note = chemically synthesized
  source 1..20: mol_type = other DNA
actggagcctgtcagggcat

SEQ ID NO: 36068 - DNA, 20 bp, synthetic construct
  misc_feature 1..20: note = chemically synthesized
  source 1..20: mol_type = other DNA
ctggagcctgtcagggcatg

SEQ ID NO: 36069 - DNA, 20 bp, synthetic construct
  misc_feature 1..20: note = chemically synthesized
  source 1..20: mol_type = other DNA
gcctgtcagggcatggggtg

SEQ ID NO: 36070 - DNA, 20 bp, synthetic construct
  misc_feature 1..20: note = chemically synthesized
  source 1..20: mol_type = other DNA
tcagggcatggggtgtggtg

SEQ ID NO: 36071 - DNA, 20 bp, synthetic construct
  misc_feature 1..20: note = chemically synthesized
  source 1..20: mol_type = other DNA
cagggcatggggtgtggtga

SEQ ID NO: 36072 - DNA, 20 bp, synthetic construct
  misc_feature 1..20: note = chemically synthesized
  source 1..20: mol_type = other DNA
agggcatggggtgtggtgaa

SEQ ID NO: 36073 - DNA, 20 bp, synthetic construct
  misc_feature 1..20: note = chemically synthesized
  source 1..20: mol_type = other DNA
gggcatggggtgtggtgaag

SEQ ID NO: 36074 - DNA, 20 bp, synthetic construct
  misc_feature 1..20: note = chemically synthesized
  source 1..20: mol_type = other DNA
gcatggggtgtggtgaaggg

SEQ ID NO: 36075 - DNA, 20 bp, synthetic construct
  misc_feature 1..20: note = chemically synthesized
  source 1..20: mol_type = other DNA
ggtgtggtgaaggggagcat

SEQ ID NO: 36076 - DNA, 20 bp, synthetic construct
  misc_feature 1..20: note = chemically synthesized
  source 1..20: mol_type = other DNA
aaggggagcattagaaaaaa

SEQ ID NO: 36077 - DNA, 20 bp, synthetic construct
  misc_feature 1..20: note = chemically synthesized
  source 1..20: mol_type = other DNA
aaaaaatagctaatgcatgc

SEQ ID NO: 36078 - DNA, 20 bp, synthetic construct
  misc_feature 1..20: note = chemically synthesized
  source 1..20: mol_type = other DNA
aaaaatagctaatgcatgct

SEQ ID NO: 36079 - DNA, 20 bp, synthetic construct
  misc_feature 1..20: note = chemically synthesized
  source 1..20: mol_type = other DNA
tgcatgctgggcttaacacc

SEQ ID NO: 36080 - DNA, 20 bp, synthetic construct
  misc_feature 1..20: note = chemically synthesized
  source 1..20: mol_type = other DNA
gcatgctgggcttaacacct

SEQ ID NO: 36081 - DNA, 20 bp, synthetic construct
  misc_feature 1..20: note = chemically synthesized
  source 1..20: mol_type = other DNA
tgggcttaacacctaggtga

SEQ ID NO: 36082 - DNA, 20 bp, synthetic construct
  misc_feature 1..20: note = chemically synthesized
  source 1..20: mol_type = other DNA
gggcttaacacctaggtgat

SEQ ID NO: 36083 - DNA, 20 bp, synthetic construct
  misc_feature 1..20: note = chemically synthesized
  source 1..20: mol_type = other DNA
acacctaggtgatgggttga

SEQ ID NO: 36084 - DNA, 20 bp, synthetic construct
  misc_feature 1..20: note = chemically synthesized
  source 1..20: mol_type = other DNA
cacctaggtgatgggttgat

SEQ ID NO: 36085 - DNA, 20 bp, synthetic construct
  misc_feature 1..20: note = chemically synthesized
  source 1..20: mol_type = other DNA
aggtgatgggttgataggta

SEQ ID NO: 36086 - DNA, 20 bp, synthetic construct
  misc_feature 1..20: note = chemically synthesized
  source 1..20: mol_type = other DNA
cacatcctgcacatgtacct

SEQ ID NO: 36087 - DNA, 20 bp, synthetic construct
  misc_feature 1..20: note = chemically synthesized
  source 1..20: mol_type = other DNA
attgaatgtacataaaaata

SEQ ID NO: 36088 - DNA, 20 bp, synthetic construct
  misc_feature 1..20: note = chemically synthesized
  source 1..20: mol_type = other DNA
actgcattaaaaaaaaataa

SEQ ID NO: 36089 - DNA, 20 bp, synthetic construct
  misc_feature 1..20: note = chemically synthesized
  source 1..20: mol_type = other DNA
ctgttgcaccaacctaatat

SEQ ID NO: 36090 - DNA, 20 bp, synthetic construct
  misc_feature 1..20: note = chemically synthesized
  source 1..20: mol_type = other DNA
tgttgcaccaacctaatata

SEQ ID NO: 36091 - DNA, 20 bp, synthetic construct
  misc_feature 1..20: note = chemically synthesized
  source 1..20: mol_type = other DNA
accaacctaatataaggaaa

SEQ ID NO: 36092 - DNA, 20 bp, synthetic construct
  misc_feature 1..20: note = chemically synthesized
  source 1..20: mol_type = other DNA
aacctaatataaggaaatag

SEQ ID NO: 36093 - DNA, 20 bp, synthetic construct
  misc_feature 1..20: note = chemically synthesized
  source 1..20: mol_type = other DNA
ggaaatagcagatgtgatta

SEQ ID NO: 36094 - DNA, 20 bp, synthetic construct
  misc_feature 1..20: note = chemically synthesized
  source 1..20: mol_type = other DNA
aaatagcagatgtgattatg

SEQ ID NO: 36095 - DNA, 20 bp, synthetic construct
  misc_feature 1..20: note = chemically synthesized
  source 1..20: mol_type = other DNA
aatagcagatgtgattatgg

SEQ ID NO: 36096 - DNA, 20 bp, synthetic construct
  misc_feature 1..20: note = chemically synthesized
  source 1..20: mol_type = other DNA
agcagatgtgattatggagg

SEQ ID NO: 36097 - DNA, 20 bp, synthetic construct
  misc_feature 1..20: note = chemically synthesized
  source 1..20: mol_type = other DNA
gcagatgtgattatggagga

SEQ ID NO: 36098 - DNA, 20 bp, synthetic construct
  misc_feature 1..20: note = chemically synthesized
  source 1..20: mol_type = other DNA
atgtgattatggaggaaggc

SEQ ID NO: 36099 - DNA, 20 bp, synthetic construct
  misc_feature 1..20: note = chemically synthesized
  source 1..20: mol_type = other DNA
tatggaggaaggcaagtccc

SEQ ID NO: 36100 - DNA, 20 bp, synthetic construct
  misc_feature 1..20: note = chemically synthesized
  source 1..20: mol_type = other DNA
aaggcaagtcccaagatatg

SEQ ID NO: 36101 - DNA, 20 bp, synthetic construct
  misc_feature 1..20: note = chemically synthesized
  source 1..20: mol_type = other DNA
ggcaagtcccaagatatgca

SEQ ID NO: 36102 - DNA, 20 bp, synthetic construct
  misc_feature 1..20: note = chemically synthesized
  source 1..20: mol_type = other DNA
agtcccaagatatgcagagt

SEQ ID NO: 36103 - DNA, 20 bp, synthetic construct
  misc_feature 1..20: note = chemically synthesized
  source 1..20: mol_type = other DNA
gatatgcagagtgagtcatc

SEQ ID NO: 36104 - DNA, 20 bp, synthetic construct
  misc_feature 1..20: note = chemically synthesized
  source 1..20: mol_type = other DNA
agtcatcaagttgaaaactc

SEQ ID NO: 36105 - DNA, 20 bp, synthetic construct
  misc_feature 1..20: note = chemically synthesized
  source 1..20: mol_type = other DNA
tcatcaagttgaaaactcaa

SEQ ID NO: 36106 - DNA, 20 bp, synthetic construct
  misc_feature 1..20: note = chemically synthesized
  source 1..20: mol_type = other DNA
atcaagttgaaaactcaaga

SEQ ID NO: 36107 - DNA, 20 bp, synthetic construct
  misc_feature 1..20: note = chemically synthesized
  source 1..20: mol_type = other DNA
gttgaaaactcaagagagcc

SEQ ID NO: 36108 - DNA, 20 bp, synthetic construct
  misc_feature 1..20: note = chemically synthesized
  source 1..20: mol_type = other DNA
gaaaactcaagagagcctgg

SEQ ID NO: 36109 - DNA, 20 bp, synthetic construct
  misc_feature 1..20: note = chemically synthesized
  source 1..20: mol_type = other DNA
ctcaagagagcctggtagtt

SEQ ID NO: 36110 - DNA, 20 bp, synthetic construct
  misc_feature 1..20: note = chemically synthesized
  source 1..20: mol_type = other DNA
agagcctggtagtttagtcc

SEQ ID NO: 36111 - DNA, 20 bp, synthetic construct
  misc_feature 1..20: note = chemically synthesized
  source 1..20: mol_type = other DNA
tggtagtttagtcccagtcc

SEQ ID NO: 36112 - DNA, 20 bp, synthetic construct
  misc_feature 1..20: note = chemically synthesized
  source 1..20: mol_type = other DNA
ttagtcccagtccaagtctg

SEQ ID NO: 36113 - DNA, 20 bp, synthetic construct
  misc_feature 1..20: note = chemically synthesized
  source 1..20: mol_type = other DNA
tagtcccagtccaagtctga

SEQ ID NO: 36114 - DNA, 20 bp, synthetic construct
  misc_feature 1..20: note = chemically synthesized
  source 1..20: mol_type = other DNA
ccagtccaagtctgaaggcc

SEQ ID NO: 36115 - DNA, 20 bp, synthetic construct
  misc_feature 1..20: note = chemically synthesized
  source 1..20: mol_type = other DNA
cagtccaagtctgaaggcct

SEQ ID NO: 36116 - DNA, 20 bp, synthetic construct
  misc_feature 1..20: note = chemically synthesized
  source 1..20: mol_type = other DNA
aagtctgaaggcctgggaaa

SEQ ID NO: 36117 - DNA, 20 bp, synthetic construct
  misc_feature 1..20: note = chemically synthesized
  source 1..20: mol_type = other DNA
agtctgaaggcctgggaaac

SEQ ID NO: 36118 - DNA, 20 bp, synthetic construct
  misc_feature 1..20: note = chemically synthesized
  source 1..20: mol_type = other DNA
tctgaaggcctgggaaacag

SEQ ID NO: 36119 - DNA, 20 bp, synthetic construct
  misc_feature 1..20: note = chemically synthesized
  source 1..20: mol_type = other DNA
ctgaaggcctgggaaacagg

SEQ ID NO: 36120 - DNA, 20 bp, synthetic construct
  misc_feature 1..20: note = chemically synthesized
  source 1..20: mol_type = other DNA
ctgggaaacaggaggattga

SEQ ID NO: 36121 - DNA, 20 bp, synthetic construct
  misc_feature 1..20: note = chemically synthesized
  source 1..20: mol_type = other DNA
atggtgtacttgcaacccaa

SEQ ID NO: 36122 - DNA, 20 bp, synthetic construct
  misc_feature 1..20: note = chemically synthesized
  source 1..20: mol_type = other DNA
acttgcaacccaaaagccat

SEQ ID NO: 36123 - DNA, 20 bp, synthetic construct
  misc_feature 1..20: note = chemically synthesized
  source 1..20: mol_type = other DNA
cttgcaacccaaaagccatc

SEQ ID NO: 36124 - DNA, 20 bp, synthetic construct
  misc_feature 1..20: note = chemically synthesized
  source 1..20: mol_type = other DNA
acccaaaagccatcaggctt

SEQ ID NO: 36125 - DNA, 20 bp, synthetic construct
  misc_feature 1..20: note = chemically synthesized
  source 1..20: mol_type = other DNA
aagccatcaggcttcagacc

SEQ ID NO: 36126 - DNA, 20 bp, synthetic construct
  misc_feature 1..20: note = chemically synthesized
  source 1..20: mol_type = other DNA
agccatcaggcttcagaccc

SEQ ID NO: 36127 - DNA, 20 bp, synthetic construct
  misc_feature 1..20: note = chemically synthesized
  source 1..20: mol_type = other DNA
catcaggcttcagacccagg

SEQ ID NO: 36128 - DNA, 20 bp, synthetic construct
  misc_feature 1..20: note = chemically synthesized
  source 1..20: mol_type = other DNA
cccaggaagttttgatgttt

SEQ ID NO: 36129 - DNA, 20 bp, synthetic construct
  misc_feature 1..20: note = chemically synthesized
  source 1..20: mol_type = other DNA
tgatgtttcagttcaatcta

SEQ ID NO: 36130 - DNA, 20 bp, synthetic construct
  misc_feature 1..20: note = chemically synthesized
  source 1..20: mol_type = other DNA
gatgtttcagttcaatctaa

SEQ ID NO: 36131 - DNA, 20 bp, synthetic construct
  misc_feature 1..20: note = chemically synthesized
  source 1..20: mol_type = other DNA
gtttcagttcaatctaaagg

SEQ ID NO: 36132 - DNA, 20 bp, synthetic construct
  misc_feature 1..20: note = chemically synthesized
  source 1..20: mol_type = other DNA
tcaatctaaaggcagaaaaa

SEQ ID NO: 36133 - DNA, 20 bp, synthetic construct
  misc_feature 1..20: note = chemically synthesized
  source 1..20: mol_type = other DNA
caatctaaaggcagaaaaaa

SEQ ID NO: 36134 - DNA, 20 bp, synthetic construct
  misc_feature 1..20: note = chemically synthesized
  source 1..20: mol_type = other DNA
taaaggcagaaaaaaaggtc

SEQ ID NO: 36135 - DNA, 20 bp, synthetic construct
  misc_feature 1..20: note = chemically synthesized
  source 1..20: mol_type = other DNA
agaaaaaaaggtctagattc

SEQ ID NO: 36136 - DNA, 20 bp, synthetic construct
  misc_feature 1..20: note = chemically synthesized
  source 1..20: mol_type = other DNA
aaggtctagattccagtttg

SEQ ID NO: 36137 - DNA, 20 bp, synthetic construct
  misc_feature 1..20: note = chemically synthesized
  source 1..20: mol_type = other DNA
aggtctagattccagtttga

SEQ ID NO: 36138 - DNA, 20 bp, synthetic construct
  misc_feature 1..20: note = chemically synthesized
  source 1..20: mol_type = other DNA
ccagtttgaaggccatcaat

SEQ ID NO: 36139 - DNA, 20 bp, synthetic construct
  misc_feature 1..20: note = chemically synthesized
  source 1..20: mol_type = other DNA
cagtttgaaggccatcaata

SEQ ID NO: 36140 - DNA, 20 bp, synthetic construct
  misc_feature 1..20: note = chemically synthesized
  source 1..20: mol_type = other DNA
aggaataattctctctgatt

SEQ ID NO: 36141 - DNA, 20 bp, synthetic construct
  misc_feature 1..20: note = chemically synthesized
  source 1..20: mol_type = other DNA
ggaataattctctctgattt

SEQ ID NO: 36142 - DNA, 20 bp, synthetic construct
  misc_feature 1..20: note = chemically synthesized
  source 1..20: mol_type = other DNA
gaataattctctctgatttg

SEQ ID NO: 36143 - DNA, 20 bp, synthetic construct
  misc_feature 1..20: note = chemically synthesized
  source 1..20: mol_type = other DNA
taattctctctgatttgggg

SEQ ID NO: 36144 - DNA, 20 bp, synthetic construct
  misc_feature 1..20: note = chemically synthesized
  source 1..20: mol_type = other DNA
aattctctctgatttgggga

SEQ ID NO: 36145 - DNA, 20 bp, synthetic construct
  misc_feature 1..20: note = chemically synthesized
  source 1..20: mol_type = other DNA
attctctctgatttggggaa

SEQ ID NO: 36146 - DNA, 20 bp, synthetic construct
  misc_feature 1..20: note = chemically synthesized
  source 1..20: mol_type = other DNA
tctctgatttggggaagggt

SEQ ID NO: 36147 - DNA, 20 bp, synthetic construct
  misc_feature 1..20: note = chemically synthesized
  source 1..20: mol_type = other DNA
gtcagactttttgttctatt

SEQ ID NO: 36148 - DNA, 20 bp, synthetic construct
  misc_feature 1..20: note = chemically synthesized
  source 1..20: mol_type = other DNA
tcagactttttgttctattc

SEQ ID NO: 36149 - DNA, 20 bp, synthetic construct
  misc_feature 1..20: note = chemically synthesized
  source 1..20: mol_type = other DNA
tattcaggttttcaactgat

SEQ ID NO: 36150 - DNA, 20 bp, synthetic construct
  misc_feature 1..20: note = chemically synthesized
  source 1..20: mol_type = other DNA
ttcaggttttcaactgattg

SEQ ID NO: 36151 - DNA, 20 bp, synthetic construct
  misc_feature 1..20: note = chemically synthesized
  source 1..20: mol_type = other DNA
tcaggttttcaactgattgg

SEQ ID NO: 36152 - DNA, 20 bp, synthetic construct
  misc_feature 1..20: note = chemically synthesized
  source 1..20: mol_type = other DNA
ggttttcaactgattggagg

SEQ ID NO: 36153 - DNA, 20 bp, synthetic construct
  misc_feature 1..20: note = chemically synthesized
  source 1..20: mol_type = other DNA
ttggaggaagccgcctgcaa

SEQ ID NO: 36154 - DNA, 20 bp, synthetic construct
  misc_feature 1..20: note = chemically synthesized
  source 1..20: mol_type = other DNA
tggaggaagccgcctgcaat

SEQ ID NO: 36155 - DNA, 20 bp, synthetic construct
  misc_feature 1..20: note = chemically synthesized
  source 1..20: mol_type = other DNA
aggaagccgcctgcaatagg

SEQ ID NO: 36156 - DNA, 20 bp, synthetic construct
  misc_feature 1..20: note = chemically synthesized
  source 1..20: mol_type = other DNA
ggaagccgcctgcaatagga

SEQ ID NO: 36157 - DNA, 20 bp, synthetic construct
  misc_feature 1..20: note = chemically synthesized
  source 1..20: mol_type = other DNA
gaaggaccatctgctctact

SEQ ID NO: 36158 - DNA, 20 bp, synthetic construct
  misc_feature 1..20: note = chemically synthesized
  source 1..20: mol_type = other DNA
aacaccctcacaaaaacatc

SEQ ID NO: 36159 - DNA, 20 bp, synthetic construct
  misc_feature 1..20: note = chemically synthesized
  source 1..20: mol_type = other DNA
aataatgtttgacaaatatt

SEQ ID NO: 36160 - DNA, 20 bp, synthetic construct
  misc_feature 1..20: note = chemically synthesized
  source 1..20: mol_type = other DNA
ataatgtttgacaaatattt

SEQ ID NO: 36161 - DNA, 20 bp, synthetic construct
  misc_feature 1..20: note = chemically synthesized
  source 1..20: mol_type = other DNA
acaaatatttgggcacccca

SEQ ID NO: 36162 - DNA, 20 bp, synthetic construct
  misc_feature 1..20: note = chemically synthesized
  source 1..20: mol_type = other DNA
tatttgggcaccccatggcc

SEQ ID NO: 36163 - DNA, 20 bp, synthetic construct
  misc_feature 1..20: note = chemically synthesized
  source 1..20: mol_type = other DNA
accccatggcccagtcaaat

SEQ ID NO: 36164 - DNA, 20 bp, synthetic construct
  misc_feature 1..20: note = chemically synthesized
  source 1..20: mol_type = other DNA
tggcatataaaattaaccat

SEQ ID NO: 36165 - DNA, 20 bp, synthetic construct
  misc_feature 1..20: note = chemically synthesized
  source 1..20: mol_type = other DNA
gcatataaaattaaccatca

SEQ ID NO: 36166 - DNA, 20 bp, synthetic construct
  misc_feature 1..20: note = chemically synthesized
  source 1..20: mol_type = other DNA
aaattaaccatcagagcctg

SEQ ID NO: 36167 - DNA, 20 bp, synthetic construct
  misc_feature 1..20: note = chemically synthesized
  source 1..20: mol_type = other DNA
attaaccatcagagcctgta

SEQ ID NO: 36168 - DNA, 20 bp, synthetic construct
  misc_feature 1..20: note = chemically synthesized
  source 1..20: mol_type = other DNA
ttaaccatcagagcctgtag

SEQ ID NO: 36169 - DNA, 20 bp, synthetic construct
  misc_feature 1..20: note = chemically synthesized
  source 1..20: mol_type = other DNA
catcagagcctgtagaggat

SEQ ID NO: 36170 - DNA, 20 bp, synthetic construct
  misc_feature 1..20: note = chemically synthesized
  source 1..20: mol_type = other DNA
agcctgtagaggatgagtta

SEQ ID NO: 36171 - DNA, 20 bp, synthetic construct
  misc_feature 1..20: note = chemically synthesized
  source 1..20: mol_type = other DNA
gcctgtagaggatgagttaa

SEQ ID NO: 36172 - DNA, 20 bp, synthetic construct
  misc_feature 1..20: note = chemically synthesized
  source 1..20: mol_type = other DNA
gtagaggatgagttaaagga

SEQ ID NO: 36173 - DNA, 20 bp, synthetic construct
  misc_feature 1..20: note = chemically synthesized
  source 1..20: mol_type = other DNA
gagttaaaggatggaatctt

SEQ ID NO: 36174 - DNA, 20 bp, synthetic construct
  misc_feature 1..20: note = chemically synthesized
  source 1..20: mol_type = other DNA
gttaaaggatggaatcttcg

SEQ ID NO: 36175 - DNA, 20 bp, synthetic construct
  misc_feature 1..20: note = chemically synthesized
  source 1..20: mol_type = other DNA
ggaatcttcggagataattg

SEQ ID NO: 36176 - DNA, 20 bp, synthetic construct
  misc_feature 1..20: note = chemically synthesized
  source 1..20: mol_type = other DNA
tcggagataattgtggaatc

SEQ ID NO: 36177 - DNA, 20 bp, synthetic construct
  misc_feature 1..20: note = chemically synthesized
  source 1..20: mol_type = other DNA
gagataattgtggaatccag

SEQ ID NO: 36178 - DNA, 20 bp, synthetic construct
  misc_feature 1..20: note = chemically synthesized
  source 1..20: mol_type = other DNA
agataattgtggaatccaga

SEQ ID NO: 36179 - DNA, 20 bp, synthetic construct
  misc_feature 1..20: note = chemically synthesized
  source 1..20: mol_type = other DNA
tgtggaatccagaaggctga

SEQ ID NO: 36180 - DNA, 20 bp, synthetic construct
  misc_feature 1..20: note = chemically synthesized
  source 1..20: mol_type = other DNA
tccagaaggctgacagataa

SEQ ID NO: 36181 - DNA, 20 bp, synthetic construct
  misc_feature 1..20: note = chemically synthesized
  source 1..20: mol_type = other DNA
gataatagaatcaaactaca

SEQ ID NO: 36182 - DNA, 20 bp, synthetic construct
  misc_feature 1..20: note = chemically synthesized
  source 1..20: mol_type = other DNA
ctacacagaaaaaaaaaaaa

SEQ ID NO: 36183 - DNA, 20 bp, synthetic construct
  misc_feature 1..20: note = chemically synthesized
  source 1..20: mol_type = other DNA
cacagaaaaaaaaaaaaaag

SEQ ID NO: 36184 - DNA, 20 bp, synthetic construct
  misc_feature 1..20: note = chemically synthesized
  source 1..20: mol_type = other DNA
gaaaaaaaaaaaaaagaagc

SEQ ID NO: 36185 - DNA, 20 bp, synthetic construct
  misc_feature 1..20: note = chemically synthesized
  source 1..20: mol_type = other DNA
aaaaaagaagctggtattgt

SEQ ID NO: 36186 - DNA, 20 bp, synthetic construct
  misc_feature 1..20: note = chemically synthesized
  source 1..20: mol_type = other DNA
agaagctggtattgtcagca

SEQ ID NO: 36187 - DNA, 20 bp, synthetic construct
  misc_feature 1..20: note = chemically synthesized
  source 1..20: mol_type = other DNA
gcacagacttactcaacaaa

SEQ ID NO: 36188 - DNA, 20 bp, synthetic construct
  misc_feature 1..20: note = chemically synthesized
  source 1..20: mol_type = other DNA
tcaacaaacagcaaaaatcc

SEQ ID NO: 36189 - DNA, 20 bp, synthetic construct
  misc_feature 1..20: note = chemically synthesized
  source 1..20: mol_type = other DNA
caacaaacagcaaaaatcct

SEQ ID NO: 36190 - DNA, 20 bp, synthetic construct
  misc_feature 1..20: note = chemically synthesized
  source 1..20: mol_type = other DNA
aaacagcaaaaatcctagga

SEQ ID NO: 36191 - DNA, 20 bp, synthetic construct
  misc_feature 1..20: note = chemically synthesized
  source 1..20: mol_type = other DNA
acagcaaaaatcctaggata

SEQ ID NO: 36192 - DNA, 20 bp, synthetic construct
  misc_feature 1..20: note = chemically synthesized
  source 1..20: mol_type = other DNA
tagagaccttcctgaatcgt

SEQ ID NO: 36193 - DNA, 20 bp, synthetic construct
  misc_feature 1..20: note = chemically synthesized
  source 1..20: mol_type = other DNA
tcctgaatcgttagcgatat

SEQ ID NO: 36194 - DNA, 20 bp, synthetic construct
  misc_feature 1..20: note = chemically synthesized
  source 1..20: mol_type = other DNA
ctatatgccatatgtaatat

SEQ ID NO: 36195 - DNA, 20 bp, synthetic construct
  misc_feature 1..20: note = chemically synthesized
  source 1..20: mol_type = other DNA
tatatgccatatgtaatata

SEQ ID NO: 36196 - DNA, 20 bp, synthetic construct
  misc_feature 1..20: note = chemically synthesized
  source 1..20: mol_type = other DNA
atgccatatgtaatataagg

SEQ ID NO: 36197 - DNA, 20 bp, synthetic construct
  misc_feature 1..20: note = chemically synthesized
  source 1..20: mol_type = other DNA
ccatatgtaatataaggcag

SEQ ID NO: 36198 - DNA, 20 bp, synthetic construct
  misc_feature 1..20: note = chemically synthesized
  source 1..20: mol_type = other DNA
atgtaatataaggcagcagt

SEQ ID NO: 36199 - DNA, 20 bp, synthetic construct
  misc_feature 1..20: note = chemically synthesized
  source 1..20: mol_type = other DNA
tataaggcagcagttagata

SEQ ID NO: 36200 - DNA, 20 bp, synthetic construct
  misc_feature 1..20: note = chemically synthesized
  source 1..20: mol_type = other DNA
ttagatatagactgtgatgc

SEQ ID NO: 36201 - DNA, 20 bp, synthetic construct
  misc_feature 1..20: note = chemically synthesized
  source 1..20: mol_type = other DNA
agatatagactgtgatgcca

SEQ ID NO: 36202 - DNA, 20 bp, synthetic construct
  misc_feature 1..20: note = chemically synthesized
  source 1..20: mol_type = other DNA
tagactgtgatgccagagct

SEQ ID NO: 36203 - DNA, 20 bp, synthetic construct
  misc_feature 1..20: note = chemically synthesized
  source 1..20: mol_type = other DNA
gtgatgccagagctcagacc

SEQ ID NO: 36204 - DNA, 20 bp, synthetic construct
  misc_feature 1..20: note = chemically synthesized
  source 1..20: mol_type = other DNA
gatgccagagctcagaccaa

SEQ ID NO: 36205 - DNA, 20 bp, synthetic construct
  misc_feature 1..20: note = chemically synthesized
  source 1..20: mol_type = other DNA
cagagctcagaccaagagcc

SEQ ID NO: 36206 - DNA, 20 bp, synthetic construct
  misc_feature 1..20: note = chemically synthesized
  source 1..20: mol_type = other DNA
agagctcagaccaagagcca

SEQ ID NO: 36207 - DNA, 20 bp, synthetic construct
  misc_feature 1..20: note = chemically synthesized
  source 1..20: mol_type = other DNA
tcagaccaagagccaaggaa

SEQ ID NO: 36208 - DNA, 20 bp, synthetic construct
  misc_feature 1..20: note = chemically synthesized
  source 1..20: mol_type = other DNA
cagaccaagagccaaggaat

SEQ ID NO: 36209 - DNA, 20 bp, synthetic construct
  misc_feature 1..20: note = chemically synthesized
  source 1..20: mol_type = other DNA
accaagagccaaggaatagg

SEQ ID NO: 36210 - DNA, 20 bp, synthetic construct
  misc_feature 1..20: note = chemically synthesized
  source 1..20: mol_type = other DNA
gagccaaggaataggaagac

SEQ ID NO: 36211 - DNA, 20 bp, synthetic construct
  misc_feature 1..20: note = chemically synthesized
  source 1..20: mol_type = other DNA
aaaaatattttcattttaaa

SEQ ID NO: 36212 - DNA, 20 bp, synthetic construct
  misc_feature 1..20: note = chemically synthesized
  source 1..20: mol_type = other DNA
atattttcattttaaaaagt

SEQ ID NO: 36213 - DNA, 20 bp, synthetic construct
  misc_feature 1..20: note = chemically synthesized
  source 1..20: mol_type = other DNA
tattttcattttaaaaagtt

SEQ ID NO: 36214 - DNA, 20 bp, synthetic construct
  misc_feature 1..20: note = chemically synthesized
  source 1..20: mol_type = other DNA
ttaggtaatttctaataatg

SEQ ID NO: 36215 - DNA, 20 bp, synthetic construct
  misc_feature 1..20: note = chemically synthesized
  source 1..20: mol_type = other DNA
ttctaataatgtggctgcct

SEQ ID NO: 36216 - DNA, 20 bp, synthetic construct
  misc_feature 1..20: note = chemically synthesized
  source 1..20: mol_type = other DNA
tgtggctgcctgagtatttt

SEQ ID NO: 36217 - DNA, 20 bp, synthetic construct
  misc_feature 1..20: note = chemically synthesized
  source 1..20: mol_type = other DNA
ctgcctgagtattttcagca

SEQ ID NO: 36218 - DNA, 20 bp, synthetic construct
  misc_feature 1..20: note = chemically synthesized
  source 1..20: mol_type = other DNA
aaatattgtgttatgtgatt

SEQ ID NO: 36219 - DNA, 20 bp, synthetic construct
  misc_feature 1..20: note = chemically synthesized
  source 1..20: mol_type = other DNA
attgtgttatgtgatttaga

SEQ ID NO: 36220 - DNA, 20 bp, synthetic construct
  misc_feature 1..20: note = chemically synthesized
  source 1..20: mol_type = other DNA
tgtgttatgtgatttagaaa

SEQ ID NO: 36221 - DNA, 20 bp, synthetic construct
  misc_feature 1..20: note = chemically synthesized
  source 1..20: mol_type = other DNA
ttatgtgatttagaaagaga

SEQ ID NO: 36222 - DNA, 20 bp, synthetic construct
  misc_feature 1..20: note = chemically synthesized
  source 1..20: mol_type = other DNA
tatgtgatttagaaagagac

SEQ ID NO: 36223 - DNA, 20 bp, synthetic construct
  misc_feature 1..20: note = chemically synthesized
  source 1..20: mol_type = other DNA
tttagaaagagacaggcact

SEQ ID NO: 36224 - DNA, 20 bp, synthetic construct
  misc_feature 1..20: note = chemically synthesized
  source 1..20: mol_type = other DNA
agaaagagacaggcactcag

SEQ ID NO: 36225 - DNA, 20 bp, synthetic construct
  misc_feature 1..20: note = chemically synthesized
  source 1..20: mol_type = other DNA
actcagcggatgacccttgt

SEQ ID NO: 36226 - DNA, 20 bp, synthetic construct
  misc_feature 1..20: note = chemically synthesized
  source 1..20: mol_type = other DNA
ctcagcggatgacccttgtc

SEQ ID NO: 36227 - DNA, 20 bp, synthetic construct
  misc_feature 1..20: note = chemically synthesized
  source 1..20: mol_type = other DNA
tgtcaggaaacactgcatca

SEQ ID NO: 36228 - DNA, 20 bp, synthetic construct
  misc_feature 1..20: note = chemically synthesized
  source 1..20: mol_type = other DNA
caggaaacactgcatcaaag

SEQ ID NO: 36229 - DNA, 20 bp, synthetic construct
  misc_feature 1..20: note = chemically synthesized
  source 1..20: mol_type = other DNA
aggaaacactgcatcaaaga

SEQ ID NO: 36230 - DNA, 20 bp, synthetic construct
  misc_feature 1..20: note = chemically synthesized
  source 1..20: mol_type = other DNA
atcaaagaaggcttttatta

SEQ ID NO: 36231 - DNA, 20 bp, synthetic construct
  misc_feature 1..20: note = chemically synthesized
  source 1..20: mol_type = other DNA
tcaaagaaggcttttattac

SEQ ID NO: 36232 - DNA, 20 bp, synthetic construct
  misc_feature 1..20: note = chemically synthesized
  source 1..20: mol_type = other DNA
aaagaaggcttttattacag

SEQ ID NO: 36233 - DNA, 20 bp, synthetic construct
  misc_feature 1..20: note = chemically synthesized
  source 1..20: mol_type = other DNA
aaggcttttattacaggaga

SEQ ID NO: 36234 - DNA, 20 bp, synthetic construct
  misc_feature 1..20: note = chemically synthesized
  source 1..20: mol_type = other DNA
ggcttttattacaggagatg

SEQ ID NO: 36235 - DNA, 20 bp, synthetic construct
  misc_feature 1..20: note = chemically synthesized
  source 1..20: mol_type = other DNA
gcttttattacaggagatgg

SEQ ID NO: 36236 - DNA, 20 bp, synthetic construct
  misc_feature 1..20: note = chemically synthesized
  source 1..20: mol_type = other DNA
atggaggtccttcccaatct

SEQ ID NO: 36237 - DNA, 20 bp, synthetic construct
  misc_feature 1..20: note = chemically synthesized
  source 1..20: mol_type = other DNA
tgacatgatactttacttca

SEQ ID NO: 36238 - DNA, 20 bp, synthetic construct
  misc_feature 1..20: note = chemically synthesized
  source 1..20: mol_type = other DNA
gacatgatactttacttcac

SEQ ID NO: 36239 - DNA, 20 bp, synthetic construct
  misc_feature 1..20: note = chemically synthesized
  source 1..20: mol_type = other DNA
actttacttcacaggcaata

SEQ ID NO: 36240 - DNA, 20 bp, synthetic construct
  misc_feature 1..20: note = chemically synthesized
  source 1..20: mol_type = other DNA
ttacttcacaggcaatacag

SEQ ID NO: 36241 - DNA, 20 bp, synthetic construct
  misc_feature 1..20: note = chemically synthesized
  source 1..20: mol_type = other DNA
tacttcacaggcaatacagc

SEQ ID NO: 36242 - DNA, 20 bp, synthetic construct
  misc_feature 1..20: note = chemically synthesized
  source 1..20: mol_type = other DNA
aatacagcaggaaatatgaa

SEQ ID NO: 36243 - DNA, 20 bp, synthetic construct
  misc_feature 1..20: note = chemically synthesized
  source 1..20: mol_type = other DNA
gaaatatgaaaagaatgaac

SEQ ID NO: 36244 - DNA, 20 bp, synthetic construct
  misc_feature 1..20: note = chemically synthesized
  source 1..20: mol_type = other DNA
aaatatgaaaagaatgaaca

SEQ ID NO: 36245 - DNA, 20 bp, synthetic construct
  misc_feature 1..20: note = chemically synthesized
  source 1..20: mol_type = other DNA
gaaaagaatgaacaaggtct

SEQ ID NO: 36246 - DNA, 20 bp, synthetic construct
  misc_feature 1..20: note = chemically synthesized
  source 1..20: mol_type = other DNA
gtcttagaaaatacatgaat

SEQ ID NO: 36247 - DNA, 20 bp, synthetic construct
  misc_feature 1..20: note = chemically synthesized
  source 1..20: mol_type = other DNA
cttagaaaatacatgaatga

SEQ ID NO: 36248 - DNA, 20 bp, synthetic construct
  misc_feature 1..20: note = chemically synthesized
  source 1..20: mol_type = other DNA
atgaatgagagacacatcaa

SEQ ID NO: 36249 - DNA, 20 bp, synthetic construct
  misc_feature 1..20: note = chemically synthesized
  source 1..20: mol_type = other DNA
agacacatcaatggctattt

SEQ ID NO: 36250 - DNA, 20 bp, synthetic construct
  misc_feature 1..20: note = chemically synthesized
  source 1..20: mol_type = other DNA
gacacatcaatggctattta

SEQ ID NO: 36251 - DNA, 20 bp, synthetic construct
  misc_feature 1..20: note = chemically synthesized
  source 1..20: mol_type = other DNA
tcaatggctatttaaggaaa

SEQ ID NO: 36252 - DNA, 20 bp, synthetic construct
  misc_feature 1..20: note = chemically synthesized
  source 1..20: mol_type = other DNA
atggctatttaaggaaatag

SEQ ID NO: 36253 - DNA, 20 bp, synthetic construct
  misc_feature 1..20: note = chemically synthesized
  source 1..20: mol_type = other DNA
taaggaaatagaagatattt

SEQ ID NO: 36254 - DNA, 20 bp, synthetic construct
  misc_feature 1..20: note = chemically synthesized
  source 1..20: mol_type = other DNA
aaggaaatagaagatatttt

SEQ ID NO: 36255 - DNA, 20 bp, synthetic construct
  misc_feature 1..20: note = chemically synthesized
  source 1..20: mol_type = other DNA
gtgccctgcctacttcctcc

SEQ ID NO: 36256 - DNA, 20 bp, synthetic construct
  misc_feature 1..20: note = chemically synthesized
  source 1..20: mol_type = other DNA
tacttcctcccagtgcccct

SEQ ID NO: 36257 - DNA, 20 bp, synthetic construct
  misc_feature 1..20: note = chemically synthesized
  source 1..20: mol_type = other DNA
cctcccagtgcccctaagct

SEQ ID NO: 36258 - DNA, 20 bp, synthetic construct
  misc_feature 1..20: note = chemically synthesized
  source 1..20: mol_type = other DNA
cccctaagcttggtgacttt

SEQ ID NO: 36259 - DNA, 20 bp, synthetic construct
  misc_feature 1..20: note = chemically synthesized
  source 1..20: mol_type = other DNA
agcttggtgactttgagtgt

SEQ ID NO: 36260 - DNA, 20 bp, synthetic construct
  misc_feature 1..20: note = chemically synthesized
  source 1..20: mol_type = other DNA
ctttgagtgttggctgataa

SEQ ID NO: 36261 - DNA, 20 bp, synthetic construct
  misc_feature 1..20: note = chemically synthesized
  source 1..20: mol_type = other DNA
taatagttgttcccattctc

SEQ ID NO: 36262 - DNA, 20 bp, synthetic construct
  misc_feature 1..20: note = chemically synthesized
  source 1..20: mol_type = other DNA
atagttgttcccattctctg

SEQ ID NO: 36263 - DNA, 20 bp, synthetic construct
  misc_feature 1..20: note = chemically synthesized
  source 1..20: mol_type = other DNA
tagttgttcccattctctgg

SEQ ID NO: 36264 - DNA, 20 bp, synthetic construct
  misc_feature 1..20: note = chemically synthesized
  source 1..20: mol_type = other DNA
ggaggcttatcctccaccaa

SEQ ID NO: 36265 - DNA, 20 bp, synthetic construct
  misc_feature 1..20: note = chemically synthesized
  source 1..20: mol_type = other DNA
ccaacagtgtcacttcacat

SEQ ID NO: 36266 - DNA, 20 bp, synthetic construct
  misc_feature 1..20: note = chemically synthesized
  source 1..20: mol_type = other DNA
atgagattttatcccaactc

SEQ ID NO: 36267 - DNA, 20 bp, synthetic construct
  misc_feature 1..20: note = chemically synthesized
  source 1..20: mol_type = other DNA
tgagattttatcccaactct

SEQ ID NO: 36268 - DNA, 20 bp, synthetic construct
  misc_feature 1..20: note = chemically synthesized
  source 1..20: mol_type = other DNA
gagattttatcccaactctg

SEQ ID NO: 36269 - DNA, 20 bp, synthetic construct
  misc_feature 1..20: note = chemically synthesized
  source 1..20: mol_type = other DNA
attttatcccaactctgggg

SEQ ID NO: 36270 - DNA, 20 bp, synthetic construct
  misc_feature 1..20: note = chemically synthesized
  source 1..20: mol_type = other DNA
cccaactctggggcagtctg

SEQ ID NO: 36271 - DNA, 20 bp, synthetic construct
  misc_feature 1..20: note = chemically synthesized
  source 1..20: mol_type = other DNA
ccaactctggggcagtctgc

SEQ ID NO: 36272 - DNA, 20 bp, synthetic construct
  misc_feature 1..20: note = chemically synthesized
  source 1..20: mol_type = other DNA
aattactttatatctgttct

SEQ ID NO: 36273 - DNA, 20 bp, synthetic construct
  misc_feature 1..20: note = chemically synthesized
  source 1..20: mol_type = other DNA
ctttatatctgttctaagat

SEQ ID NO: 36274 - DNA, 20 bp, synthetic construct
  misc_feature 1..20: note = chemically synthesized
  source 1..20: mol_type = other DNA
tctaagataagtgatgtttc

SEQ ID NO: 36275 - DNA, 20 bp, synthetic construct
  misc_feature 1..20: note = chemically synthesized
  source 1..20: mol_type = other DNA
ctaagataagtgatgtttcc

SEQ ID NO: 36276 - DNA, 20 bp, synthetic construct
  misc_feature 1..20: note = chemically synthesized
  source 1..20: mol_type = other DNA
ataagtgatgtttccaggaa

SEQ ID NO: 36277 - DNA, 20 bp, synthetic construct
  misc_feature 1..20: note = chemically synthesized
  source 1..20: mol_type = other DNA
aagtgatgtttccaggaata

SEQ ID NO: 36278 - DNA, 20 bp, synthetic construct
  misc_feature 1..20: note = chemically synthesized
  source 1..20: mol_type = other DNA
caggaatagagtcatattta

SEQ ID NO: 36279 - DNA, 20 bp, synthetic construct
  misc_feature 1..20: note = chemically synthesized
  source 1..20: mol_type = other DNA
aggaatagagtcatatttat

SEQ ID NO: 36280 - DNA, 20 bp, synthetic construct
  misc_feature 1..20: note = chemically synthesized
  source 1..20: mol_type = other DNA
ggaatagagtcatatttatg

SEQ ID NO: 36281 - DNA, 20 bp, synthetic construct
  misc_feature 1..20: note = chemically synthesized
  source 1..20: mol_type = other DNA
atagagtcatatttatgggg

SEQ ID NO: 36282 - DNA, 20 bp, synthetic construct
  misc_feature 1..20: note = chemically synthesized
  source 1..20: mol_type = other DNA
gagtcatatttatggggcag

SEQ ID NO: 36283 - DNA, 20 bp, synthetic construct
  misc_feature 1..20: note = chemically synthesized
  source 1..20: mol_type = other DNA
gcagaagattcgtgtactgc

SEQ ID NO: 36284 - DNA, 20 bp, synthetic construct
  misc_feature 1..20: note = chemically synthesized
  source 1..20: mol_type = other DNA
aagattcgtgtactgccagt

SEQ ID NO: 36285 - DNA, 20 bp, synthetic construct
  misc_feature 1..20: note = chemically synthesized
  source 1..20: mol_type = other DNA
gattcgtgtactgccagtga

SEQ ID NO: 36286 - DNA, 20 bp, synthetic construct
  misc_feature 1..20: note = chemically synthesized
  source 1..20: mol_type = other DNA
attcgtgtactgccagtgag

SEQ ID NO: 36287 - DNA, 20 bp, synthetic construct
  misc_feature 1..20: note = chemically synthesized
  source 1..20: mol_type = other DNA
ttcgtgtactgccagtgaga

SEQ ID NO: 36288 - DNA, 20 bp, synthetic construct
  misc_feature 1..20: note = chemically synthesized
  source 1..20: mol_type = other DNA
caatatacctactaatgaaa

SEQ ID NO: 36289 - DNA, 20 bp, synthetic construct
  misc_feature 1..20: note = chemically synthesized
  source 1..20: mol_type = other DNA
aatatacctactaatgaaat

SEQ ID NO: 36290 - DNA, 20 bp, synthetic construct
  misc_feature 1..20: note = chemically synthesized
  source 1..20: mol_type = other DNA
tatacctactaatgaaatgg

SEQ ID NO: 36291 - DNA, 20 bp, synthetic construct
  misc_feature 1..20: note = chemically synthesized
  source 1..20: mol_type = other DNA
atacctactaatgaaatggg

SEQ ID NO: 36292 - DNA, 20 bp, synthetic construct
  misc_feature 1..20: note = chemically synthesized
  source 1..20: mol_type = other DNA
tacctactaatgaaatggga

SEQ ID NO: 36293 - DNA, 20 bp, synthetic construct
  misc_feature 1..20: note = chemically synthesized
  source 1..20: mol_type = other DNA
ctactaatgaaatgggaggg

SEQ ID NO: 36294 - DNA, 20 bp, synthetic construct
  misc_feature 1..20: note = chemically synthesized
  source 1..20: mol_type = other DNA
agggcagcctgaaattaaat

SEQ ID NO: 36295 - DNA, 20 bp, synthetic construct
  misc_feature 1..20: note = chemically synthesized
  source 1..20: mol_type = other DNA
tgaaattaaatcagttatct

SEQ ID NO: 36296 - DNA, 20 bp, synthetic construct
  misc_feature 1..20: note = chemically synthesized
  source 1..20: mol_type = other DNA
gaaattaaatcagttatctc

SEQ ID NO: 36297 - DNA, 20 bp, synthetic construct
  misc_feature 1..20: note = chemically synthesized
  source 1..20: mol_type = other DNA
aaattaaatcagttatctca

SEQ ID NO: 36298 - DNA, 20 bp, synthetic construct
  misc_feature 1..20: note = chemically synthesized
  source 1..20: mol_type = other DNA
ttactacctcacctcatttt

SEQ ID NO: 36299 - DNA, 20 bp, synthetic construct
  misc_feature 1..20: note = chemically synthesized
  source 1..20: mol_type = other DNA
ctcacctcattttaagttca

SEQ ID NO: 36300 - DNA, 20 bp, synthetic construct
  misc_feature 1..20: note = chemically synthesized
  source 1..20: mol_type = other DNA
ctcattttaagttcaaagca

SEQ ID NO: 36301 - DNA, 20 bp, synthetic construct
  misc_feature 1..20: note = chemically synthesized
  source 1..20: mol_type = other DNA
atggctcccctaaatcaatc

SEQ ID NO: 36302 - DNA, 20 bp, synthetic construct
  misc_feature 1..20: note = chemically synthesized
  source 1..20: mol_type = other DNA
tccagacctaaattttaact

SEQ ID NO: 36303 - DNA, 20 bp, synthetic construct
  misc_feature 1..20: note = chemically synthesized
  source 1..20: mol_type = other DNA
ctaaattttaacttagtaca

SEQ ID NO: 36304 - DNA, 20 bp, synthetic construct
  misc_feature 1..20: note = chemically synthesized
  source 1..20: mol_type = other DNA
aaattttaacttagtacaaa

SEQ ID NO: 36305 - DNA, 20 bp, synthetic construct
  misc_feature 1..20: note = chemically synthesized
  source 1..20: mol_type = other DNA
aattttaacttagtacaaag

SEQ ID NO: 36306 - DNA, 20 bp, synthetic construct
  misc_feature 1..20: note = chemically synthesized
  source 1..20: mol_type = other DNA
aaagaggacacacaaatttt

SEQ ID NO: 36307 - DNA, 20 bp, synthetic construct
  misc_feature 1..20: note = chemically synthesized
  source 1..20: mol_type = other DNA
acacacaaattttcagactt

SEQ ID NO: 36308 - DNA, 20 bp, synthetic construct
  misc_feature 1..20: note = chemically synthesized
  source 1..20: mol_type = other DNA
tttcagacttaagccatttc

SEQ ID NO: 36309 - DNA, 20 bp, synthetic construct
  misc_feature 1..20: note = chemically synthesized
  source 1..20: mol_type = other DNA
tcagacttaagccatttcca

SEQ ID NO: 36310 - DNA, 20 bp, synthetic construct
  misc_feature 1..20: note = chemically synthesized
  source 1..20: mol_type = other DNA
actactattctgcttacatt

SEQ ID NO: 36311 - DNA, 20 bp, synthetic construct
  misc_feature 1..20: note = chemically synthesized
  source 1..20: mol_type = other DNA
ctactattctgcttacattt

SEQ ID NO: 36312 - DNA, 20 bp, synthetic construct
  misc_feature 1..20: note = chemically synthesized
  source 1..20: mol_type = other DNA
ctattctgcttacatttagg

SEQ ID NO: 36313 - DNA, 20 bp, synthetic construct
  misc_feature 1..20: note = chemically synthesized
  source 1..20: mol_type = other DNA
ttacatttaggaagacctat

SEQ ID NO: 36314 - DNA, 20 bp, synthetic construct
  misc_feature 1..20: note = chemically synthesized
  source 1..20: mol_type = other DNA
catttaggaagacctatgag

SEQ ID NO: 36315 - DNA, 20 bp, synthetic construct
  misc_feature 1..20: note = chemically synthesized
  source 1..20: mol_type = other DNA
gaagacctatgagcagaatg

SEQ ID NO: 36316 - DNA, 20 bp, synthetic construct
  misc_feature 1..20: note = chemically synthesized
  source 1..20: mol_type = other DNA
cctatgagcagaatgcagtt

SEQ ID NO: 36317 - DNA, 20 bp, synthetic construct
  misc_feature 1..20: note = chemically synthesized
  source 1..20: mol_type = other DNA
ctatgagcagaatgcagttc

SEQ ID NO: 36318 - DNA, 20 bp, synthetic construct
  misc_feature 1..20: note = chemically synthesized
  source 1..20: mol_type = other DNA
atgagcagaatgcagttcag

SEQ ID NO: 36319 - DNA, 20 bp, synthetic construct
  misc_feature 1..20: note = chemically synthesized
  source 1..20: mol_type = other DNA
tgagcagaatgcagttcagg

SEQ ID NO: 36320 - DNA, 20 bp, synthetic construct
  misc_feature 1..20: note = chemically synthesized
  source 1..20: mol_type = other DNA
acttaactgatgtgaaatgt

SEQ ID NO: 36321 - DNA, 20 bp, synthetic construct
  misc_feature 1..20: note = chemically synthesized
  source 1..20: mol_type = other DNA
cttaactgatgtgaaatgtc

SEQ ID NO: 36322 - DNA, 20 bp, synthetic construct
  misc_feature 1..20: note = chemically synthesized
  source 1..20: mol_type = other DNA
gcaccaaaatgtgaccctca

SEQ ID NO: 36323 - DNA, 20 bp, synthetic construct
  misc_feature 1..20: note = chemically synthesized
  source 1..20: mol_type = other DNA
atactcattttaaaatctca

SEQ ID NO: 36324 - DNA, 20 bp, synthetic construct
  misc_feature 1..20: note = chemically synthesized
  source 1..20: mol_type = other DNA
tcattttaaaatctcatagt

SEQ ID NO: 36325 - DNA, 20 bp, synthetic construct
  misc_feature 1..20: note = chemically synthesized
  source 1..20: mol_type = other DNA
cattttaaaatctcatagtt

SEQ ID NO: 36326 - DNA, 20 bp, synthetic construct
  misc_feature 1..20: note = chemically synthesized
  source 1..20: mol_type = other DNA
taaaatctcatagttgggct

SEQ ID NO: 36327 - DNA, 20 bp, synthetic construct
  misc_feature 1..20: note = chemically synthesized
  source 1..20: mol_type = other DNA
ctcatagttgggctaagttc

SEQ ID NO: 36328 - DNA, 20 bp, synthetic construct
  misc_feature 1..20: note = chemically synthesized
  source 1..20: mol_type = other DNA
tcatagttgggctaagttcc

SEQ ID NO: 36329 - DNA, 20 bp, synthetic construct
  misc_feature 1..20: note = chemically synthesized
  source 1..20: mol_type = other DNA
gctaagttccaggataaatt

SEQ ID NO: 36330 - DNA, 20 bp, synthetic construct
  misc_feature 1..20: note = chemically synthesized
  source 1..20: mol_type = other DNA
ctaagttccaggataaattt

SEQ ID NO: 36331 - DNA, 20 bp, synthetic construct
  misc_feature 1..20: note = chemically synthesized
  source 1..20: mol_type = other DNA
ccaggataaatttaggattt

SEQ ID NO: 36332 - DNA, 20 bp, synthetic construct
  misc_feature 1..20: note = chemically synthesized
  source 1..20: mol_type = other DNA
atttaggatttaagactgat

SEQ ID NO: 36333 - DNA, 20 bp, synthetic construct
  misc_feature 1..20: note = chemically synthesized
  source 1..20: mol_type = other DNA
atttaagactgatgagacaa

SEQ ID NO: 36334 - DNA, 20 bp, synthetic construct
  misc_feature 1..20: note = chemically synthesized
  source 1..20: mol_type = other DNA
gatgagacaatagaaattct

SEQ ID NO: 36335 - DNA, 20 bp, synthetic construct
  misc_feature 1..20: note = chemically synthesized
  source 1..20: mol_type = other DNA
tcagatccttatttctctga

SEQ ID NO: 36336 - DNA, 20 bp, synthetic construct
  misc_feature 1..20: note = chemically synthesized
  source 1..20: mol_type = other DNA
ttatttctctgacagactat

SEQ ID NO: 36337 - DNA, 20 bp, synthetic construct
  misc_feature 1..20: note = chemically synthesized
  source 1..20: mol_type = other DNA
actatgagatgattgtattc

SEQ ID NO: 36338 - DNA, 20 bp, synthetic construct
  misc_feature 1..20: note = chemically synthesized
  source 1..20: mol_type = other DNA
tgtattcaagtacaaattgt

SEQ ID NO: 36339 - DNA, 20 bp, synthetic construct
  misc_feature 1..20: note = chemically synthesized
  source 1..20: mol_type = other DNA
caagtacaaattgtcagaca

SEQ ID NO: 36340 - DNA, 20 bp, synthetic construct
  misc_feature 1..20: note = chemically synthesized
  source 1..20: mol_type = other DNA
tacaaattgtcagacaaagc

SEQ ID NO: 36341 - DNA, 20 bp, synthetic construct
  misc_feature 1..20: note = chemically synthesized
  source 1..20: mol_type = other DNA
acaaattgtcagacaaagcc

SEQ ID NO: 36342 - DNA, 20 bp, synthetic construct
  misc_feature 1..20: note = chemically synthesized
  source 1..20: mol_type = other DNA
caaattgtcagacaaagcca

SEQ ID NO: 36343 - DNA, 20 bp, synthetic construct
  misc_feature 1..20: note = chemically synthesized
  source 1..20: mol_type = other DNA
tcagacaaagccagggatta

SEQ ID NO: 36344 - DNA, 20 bp, synthetic construct
  misc_feature 1..20: note = chemically synthesized
  source 1..20: mol_type = other DNA
tcccctttttaacattacta

SEQ ID NO: 36345 - DNA, 20 bp, synthetic construct
  misc_feature 1..20: note = chemically synthesized
  source 1..20: mol_type = other DNA
cccctttttaacattactac

SEQ ID NO: 36346 - DNA, 20 bp, synthetic construct
  misc_feature 1..20: note = chemically synthesized
  source 1..20: mol_type = other DNA
aaacttgatttatattgctc

SEQ ID NO: 36347 - DNA, 20 bp, synthetic construct
  misc_feature 1..20: note = chemically synthesized
  source 1..20: mol_type = other DNA
cttgatttatattgctccag

SEQ ID NO: 36348 - DNA, 20 bp, synthetic construct
  misc_feature 1..20: note = chemically synthesized
  source 1..20: mol_type = other DNA
gatttatattgctccagaag

SEQ ID NO: 36349 - DNA, 20 bp, synthetic construct
  misc_feature 1..20: note = chemically synthesized
  source 1..20: mol_type = other DNA
gaagcagtaactctgattct

SEQ ID NO: 36350 - DNA, 20 bp, synthetic construct
  misc_feature 1..20: note = chemically synthesized
  source 1..20: mol_type = other DNA
aagcagtaactctgattctt

SEQ ID NO: 36351 - DNA, 20 bp, synthetic construct
  misc_feature 1..20: note = chemically synthesized
  source 1..20: mol_type = other DNA
agtaactctgattcttgggc

SEQ ID NO: 36352 - DNA, 20 bp, synthetic construct
  misc_feature 1..20: note = chemically synthesized
  source 1..20: mol_type = other DNA
attcttgggcaagacttacc

SEQ ID NO: 36353 - DNA, 20 bp, synthetic construct
  misc_feature 1..20: note = chemically synthesized
  source 1..20: mol_type = other DNA
tcttgggcaagacttaccaa

SEQ ID NO: 36354 - DNA, 20 bp, synthetic construct
  misc_feature 1..20: note = chemically synthesized
  source 1..20: mol_type = other DNA
gggcaagacttaccaagaga

SEQ ID NO: 36355 - DNA, 20 bp, synthetic construct
  misc_feature 1..20: note = chemically synthesized
  source 1..20: mol_type = other DNA
cttaccaagagacagaaaac

SEQ ID NO: 36356 - DNA, 20 bp, synthetic construct
  misc_feature 1..20: note = chemically synthesized
  source 1..20: mol_type = other DNA
aaaacaagcttactgtttga

SEQ ID NO: 36357 - DNA, 20 bp, synthetic construct
  misc_feature 1..20: note = chemically synthesized
  source 1..20: mol_type = other DNA
tactgtttgaaagaacttat

SEQ ID NO: 36358 - DNA, 20 bp, synthetic construct
  misc_feature 1..20: note = chemically synthesized
  source 1..20: mol_type = other DNA
tgtttgaaagaacttatcag

SEQ ID NO: 36359 - DNA, 20 bp, synthetic construct
  misc_feature 1..20: note = chemically synthesized
  source 1..20: mol_type = other DNA
tatcagcagcactcatttgt

SEQ ID NO: 36360 - DNA, 20 bp, synthetic construct
  misc_feature 1..20: note = chemically synthesized
  source 1..20: mol_type = other DNA
aaacaatcttatttgaaacc

SEQ ID NO: 36361 - DNA, 20 bp, synthetic construct
  misc_feature 1..20: note = chemically synthesized
  source 1..20: mol_type = other DNA
atcttatttgaaaccaagaa

SEQ ID NO: 36362 - DNA, 20 bp, synthetic construct
  misc_feature 1..20: note = chemically synthesized
  source 1..20: mol_type = other DNA
tttgaaaccaagaaaagatt

SEQ ID NO: 36363 - DNA, 20 bp, synthetic construct
  misc_feature 1..20: note = chemically synthesized
  source 1..20: mol_type = other DNA
accaagaaaagattaagtgt

SEQ ID NO: 36364 - DNA, 20 bp, synthetic construct
  misc_feature 1..20: note = chemically synthesized
  source 1..20: mol_type = other DNA
ccaagaaaagattaagtgtg

SEQ ID NO: 36365 - DNA, 20 bp, synthetic construct
  misc_feature 1..20: note = chemically synthesized
  source 1..20: mol_type = other DNA
caagaaaagattaagtgtga

SEQ ID NO: 36366 - DNA, 20 bp, synthetic construct
  misc_feature 1..20: note = chemically synthesized
  source 1..20: mol_type = other DNA
attaagtgtgagggattatt

SEQ ID NO: 36367 - DNA, 20 bp, synthetic construct
  misc_feature 1..20: note = chemically synthesized
  source 1..20: mol_type = other DNA
gggattattaagctttgtct

SEQ ID NO: 36368 - DNA, 20 bp, synthetic construct
  misc_feature 1..20: note = chemically synthesized
  source 1..20: mol_type = other DNA
tattaagctttgtctaagtt

SEQ ID NO: 36369 - DNA, 20 bp, synthetic construct
  misc_feature 1..20: note = chemically synthesized
  source 1..20: mol_type = other DNA
aagctttgtctaagttgagt

SEQ ID NO: 36370 - DNA, 20 bp, synthetic construct
  misc_feature 1..20: note = chemically synthesized
  source 1..20: mol_type = other DNA
tctaagttgagtgagcttat

SEQ ID NO: 36371 - DNA, 20 bp, synthetic construct
  misc_feature 1..20: note = chemically synthesized
  source 1..20: mol_type = other DNA
ttgagtgagcttattggcta

SEQ ID NO: 36372 - DNA, 20 bp, synthetic construct
  misc_feature 1..20: note = chemically synthesized
  source 1..20: mol_type = other DNA
tgagtgagcttattggctac

SEQ ID NO: 36373 - DNA, 20 bp, synthetic construct
  misc_feature 1..20: note = chemically synthesized
  source 1..20: mol_type = other DNA
gagtgagcttattggctaca

SEQ ID NO: 36374 - DNA, 20 bp, synthetic construct
  misc_feature 1..20: note = chemically synthesized
  source 1..20: mol_type = other DNA
agcttattggctacagggtt

SEQ ID NO: 36375 - DNA, 20 bp, synthetic construct
  misc_feature 1..20: note = chemically synthesized
  source 1..20: mol_type = other DNA
gcttattggctacagggtta

SEQ ID NO: 36376 - DNA, 20 bp, synthetic construct
  misc_feature 1..20: note = chemically synthesized
  source 1..20: mol_type = other DNA
acagggttaaggaataacaa

SEQ ID NO: 36377 - DNA, 20 bp, synthetic construct
  misc_feature 1..20: note = chemically synthesized
  source 1..20: mol_type = other DNA
gggttaaggaataacaaaag

SEQ ID NO: 36378 - DNA, 20 bp, synthetic construct
  misc_feature 1..20: note = chemically synthesized
  source 1..20: mol_type = other DNA
ggttaaggaataacaaaagt

SEQ ID NO: 36379 - DNA, 20 bp, synthetic construct
  misc_feature 1..20: note = chemically synthesized
  source 1..20: mol_type = other DNA
aataacaaaagtaggcttca

SEQ ID NO: 36380 - DNA, 20 bp, synthetic construct
  misc_feature 1..20: note = chemically synthesized
  source 1..20: mol_type = other DNA
cttcacggtatcttcttttt

SEQ ID NO: 36381 - DNA, 20 bp, synthetic construct
  misc_feature 1..20: note = chemically synthesized
  source 1..20: mol_type = other DNA
ttcacggtatcttctttttg

SEQ ID NO: 36382 - DNA, 20 bp, synthetic construct
  misc_feature 1..20: note = chemically synthesized
  source 1..20: mol_type = other DNA
acggtatcttctttttgagg

SEQ ID NO: 36383 - DNA, 20 bp, synthetic construct
  misc_feature 1..20: note = chemically synthesized
  source 1..20: mol_type = other DNA
cggtatcttctttttgaggt

SEQ ID NO: 36384 - DNA, 20 bp, synthetic construct
  misc_feature 1..20: note = chemically synthesized
  source 1..20: mol_type = other DNA
ggtatcttctttttgaggtg

SEQ ID NO: 36385 - DNA, 20 bp, synthetic construct
  misc_feature 1..20: note = chemically synthesized
  source 1..20: mol_type = other DNA
tttgaggtggggaatcatac

SEQ ID NO: 36386 - DNA, 20 bp, synthetic construct
  misc_feature 1..20: note = chemically synthesized
  source 1..20: mol_type = other DNA
ttgaggtggggaatcataca

SEQ ID NO: 36387 - DNA, 20 bp, synthetic construct
  misc_feature 1..20: note = chemically synthesized
  source 1..20: mol_type = other DNA
gtggggaatcatacaaggca

SEQ ID NO: 36388 - DNA, 20 bp, synthetic construct
  misc_feature 1..20: note = chemically synthesized
  source 1..20: mol_type = other DNA
tggggaatcatacaaggcaa

SEQ ID NO: 36389 - DNA, 20 bp, synthetic construct
  misc_feature 1..20: note = chemically synthesized
  source 1..20: mol_type = other DNA
ggaatcatacaaggcaaagg

SEQ ID NO: 36390 - DNA, 20 bp, synthetic construct
  misc_feature 1..20: note = chemically synthesized
  source 1..20: mol_type = other DNA
tcatacaaggcaaaggtagt

SEQ ID NO: 36391 - DNA, 20 bp, synthetic construct
  misc_feature 1..20: note = chemically synthesized
  source 1..20: mol_type = other DNA
acaaggcaaaggtagttaga

SEQ ID NO: 36392 - DNA, 20 bp, synthetic construct
  misc_feature 1..20: note = chemically synthesized
  source 1..20: mol_type = other DNA
atagcatgacttccatgtgc

SEQ ID NO: 36393 - DNA, 20 bp, synthetic construct
  misc_feature 1..20: note = chemically synthesized
  source 1..20: mol_type = other DNA
tgacttccatgtgctggatg

SEQ ID NO: 36394 - DNA, 20 bp, synthetic construct
  misc_feature 1..20: note = chemically synthesized
  source 1..20: mol_type = other DNA
aattctgttttctttttgca

SEQ ID NO: 36395 - DNA, 20 bp, synthetic construct
  misc_feature 1..20: note = chemically synthesized
  source 1..20: mol_type = other DNA
ttctttttgcaaagaaaata

SEQ ID NO: 36396 - DNA, 20 bp, synthetic construct
  misc_feature 1..20: note = chemically synthesized
  source 1..20: mol_type = other DNA
tctttttgcaaagaaaatat

SEQ ID NO: 36397 - DNA, 20 bp, synthetic construct
  misc_feature 1..20: note = chemically synthesized
  source 1..20: mol_type = other DNA
ctttttgcaaagaaaatatg

SEQ ID NO: 36398 - DNA, 20 bp, synthetic construct
  misc_feature 1..20: note = chemically synthesized
  source 1..20: mol_type = other DNA
caaagaaaatatggggcttt

SEQ ID NO: 36399 - DNA, 20 bp, synthetic construct
  misc_feature 1..20: note = chemically synthesized
  source 1..20: mol_type = other DNA
aatatggggctttaagaaca

SEQ ID NO: 36400 - DNA, 20 bp, synthetic construct
  misc_feature 1..20: note = chemically synthesized
  source 1..20: mol_type = other DNA
gggctttaagaacacagttc

SEQ ID NO: 36401 - DNA, 20 bp, synthetic construct
  misc_feature 1..20: note = chemically synthesized
  source 1..20: mol_type = other DNA
gctttaagaacacagttctg

SEQ ID NO: 36402 - DNA, 20 bp, synthetic construct
  misc_feature 1..20: note = chemically synthesized
  source 1..20: mol_type = other DNA
ggagcccacttccttctcca

SEQ ID NO: 36403 - DNA, 20 bp, synthetic construct
  misc_feature 1..20: note = chemically synthesized
  source 1..20: mol_type = other DNA
gagcccacttccttctccaa

SEQ ID NO: 36404 - DNA, 20 bp, synthetic construct
  misc_feature 1..20: note = chemically synthesized
  source 1..20: mol_type = other DNA
gcccacttccttctccaaag

SEQ ID NO: 36405 - DNA, 20 bp, synthetic construct
  misc_feature 1..20: note = chemically synthesized
  source 1..20: mol_type = other DNA
cccacttccttctccaaagg

SEQ ID NO: 36406 - DNA, 20 bp, synthetic construct
  misc_feature 1..20: note = chemically synthesized
  source 1..20: mol_type = other DNA
aggcttgaaaaaaaatatcc

SEQ ID NO: 36407 - DNA, 20 bp, synthetic construct
  misc_feature 1..20: note = chemically synthesized
  source 1..20: mol_type = other DNA
cttgaaaaaaaatatcccag

SEQ ID NO: 36408 - DNA, 20 bp, synthetic construct
  misc_feature 1..20: note = chemically synthesized
  source 1..20: mol_type = other DNA
atcccagtagcctaattatc

SEQ ID NO: 36409 - DNA, 20 bp, synthetic construct
  misc_feature 1..20: note = chemically synthesized
  source 1..20: mol_type = other DNA
tagcctaattatccagcatc

SEQ ID NO: 36410 - DNA, 20 bp, synthetic construct
  misc_feature 1..20: note = chemically synthesized
  source 1..20: mol_type = other DNA
ctaattatccagcatcaaga

SEQ ID NO: 36411 - DNA, 20 bp, synthetic construct
  misc_feature 1..20: note = chemically synthesized
  source 1..20: mol_type = other DNA
tccagcatcaagacagatac

SEQ ID NO: 36412 - DNA, 20 bp, synthetic construct
  misc_feature 1..20: note = chemically synthesized
  source 1..20: mol_type = other DNA
ccagcatcaagacagatact

SEQ ID NO: 36413 - DNA, 20 bp, synthetic construct
  misc_feature 1..20: note = chemically synthesized
  source 1..20: mol_type = other DNA
cagcatcaagacagatactg

SEQ ID NO: 36414 - DNA, 20 bp, synthetic construct
  misc_feature 1..20: note = chemically synthesized
  source 1..20: mol_type = other DNA
acctcacaaattaaccctgt

SEQ ID NO: 36415 - DNA, 20 bp, synthetic construct
  misc_feature 1..20: note = chemically synthesized
  source 1..20: mol_type = other DNA
tcacaaattaaccctgttag

SEQ ID NO: 36416 - DNA, 20 bp, synthetic construct
  misc_feature 1..20: note = chemically synthesized
  source 1..20: mol_type = other DNA
ttaaccctgttagcagtctt

SEQ ID NO: 36417 - DNA, 20 bp, synthetic construct
  misc_feature 1..20: note = chemically synthesized
  source 1..20: mol_type = other DNA
aaccctgttagcagtcttca

SEQ ID NO: 36418 - DNA, 20 bp, synthetic construct
  misc_feature 1..20: note = chemically synthesized
  source 1..20: mol_type = other DNA
atttaaaccaatttctacac

SEQ ID NO: 36419 - DNA, 20 bp, synthetic construct
  misc_feature 1..20: note = chemically synthesized
  source 1..20: mol_type = other DNA
tttaaaccaatttctacacc

SEQ ID NO: 36420 - DNA, 20 bp, synthetic construct
  misc_feature 1..20: note = chemically synthesized
  source 1..20: mol_type = other DNA
ccaatttctacaccaggact

SEQ ID NO: 36421 - DNA, 20 bp, synthetic construct
  misc_feature 1..20: note = chemically synthesized
  source 1..20: mol_type = other DNA
ccccttaatttctgataccc

SEQ ID NO: 36422 - DNA, 20 bp, synthetic construct
  misc_feature 1..20: note = chemically synthesized
  source 1..20: mol_type = other DNA
cccttaatttctgatacccc

SEQ ID NO: 36423 - DNA, 20 bp, synthetic construct
  misc_feature 1..20: note = chemically synthesized
  source 1..20: mol_type = other DNA
taatttctgataccccaggt

SEQ ID NO: 36424 - DNA, 20 bp, synthetic construct
  misc_feature 1..20: note = chemically synthesized
  source 1..20: mol_type = other DNA
aatttctgataccccaggtc

SEQ ID NO: 36425 - DNA, 20 bp, synthetic construct
  misc_feature 1..20: note = chemically synthesized
  source 1..20: mol_type = other DNA
tgataccccaggtcaggctc

SEQ ID NO: 36426 - DNA, 20 bp, synthetic construct
  misc_feature 1..20: note = chemically synthesized
  source 1..20: mol_type = other DNA
aggtcaggctctagtgacta

SEQ ID NO: 36427 - DNA, 20 bp, synthetic construct
  misc_feature 1..20: note = chemically synthesized
  source 1..20: mol_type = other DNA
ggtcaggctctagtgactat

SEQ ID NO: 36428 - DNA, 20 bp, synthetic construct
  misc_feature 1..20: note = chemically synthesized
  source 1..20: mol_type = other DNA
tcaggctctagtgactatgg

SEQ ID NO: 36429 - DNA, 20 bp, synthetic construct
  misc_feature 1..20: note = chemically synthesized
  source 1..20: mol_type = other DNA
ctctagtgactatgggagaa

SEQ ID NO: 36430 - DNA, 20 bp, synthetic construct
  misc_feature 1..20: note = chemically synthesized
  source 1..20: mol_type = other DNA
gactatgggagaatggaatg

SEQ ID NO: 36431 - DNA, 20 bp, synthetic construct
  misc_feature 1..20: note = chemically synthesized
  source 1..20: mol_type = other DNA
actatgggagaatggaatga

SEQ ID NO: 36432 - DNA, 20 bp, synthetic construct
  misc_feature 1..20: note = chemically synthesized
  source 1..20: mol_type = other DNA
agaatggaatgaaggtaatt

SEQ ID NO: 36433 - DNA, 20 bp, synthetic construct
  misc_feature 1..20: note = chemically synthesized
  source 1..20: mol_type = other DNA
aatggaatgaaggtaattga

SEQ ID NO: 36434 - DNA, 20 bp, synthetic construct
  misc_feature 1..20: note = chemically synthesized
  source 1..20: mol_type = other DNA
atggaatgaaggtaattgag

SEQ ID NO: 36435 - DNA, 20 bp, synthetic construct
  misc_feature 1..20: note = chemically synthesized
  source 1..20: mol_type = other DNA
aggtaattgagaggaaaata

SEQ ID NO: 36436 - DNA, 20 bp, synthetic construct
  misc_feature 1..20: note = chemically synthesized
  source 1..20: mol_type = other DNA
aaaataaagactaatcttct

SEQ ID NO: 36437 - DNA, 20 bp, synthetic construct
  misc_feature 1..20: note = chemically synthesized
  source 1..20: mol_type = other DNA
ttggattctcttccaccaca

SEQ ID NO: 36438 - DNA, 20 bp, synthetic construct
  misc_feature 1..20: note = chemically synthesized
  source 1..20: mol_type = other DNA
ttccaccacatagttgttgc

SEQ ID NO: 36439 - DNA, 20 bp, synthetic construct
  misc_feature 1..20: note = chemically synthesized
  source 1..20: mol_type = other DNA
ccaccacatagttgttgcaa

SEQ ID NO: 36440 - DNA, 20 bp, synthetic construct
  misc_feature 1..20: note = chemically synthesized
  source 1..20: mol_type = other DNA
caccacatagttgttgcaag

SEQ ID NO: 36441 - DNA, 20 bp, synthetic construct
  misc_feature 1..20: note = chemically synthesized
  source 1..20: mol_type = other DNA
accacatagttgttgcaaga

SEQ ID NO: 36442 - DNA, 20 bp, synthetic construct
  misc_feature 1..20: note = chemically synthesized
  source 1..20: mol_type = other DNA
agttgttgcaagagggtaaa

SEQ ID NO: 36443 - DNA, 20 bp, synthetic construct
  misc_feature 1..20: note = chemically synthesized
  source 1..20: mol_type = other DNA
ttgttgcaagagggtaaata

SEQ ID NO: 36444 - DNA, 20 bp, synthetic construct
  misc_feature 1..20: note = chemically synthesized
  source 1..20: mol_type = other DNA
gcaagagggtaaatagagaa

SEQ ID NO: 36445 - DNA, 20 bp, synthetic construct
  misc_feature 1..20: note = chemically synthesized
  source 1..20: mol_type = other DNA
aagagggtaaatagagaaaa

SEQ ID NO: 36446 - DNA, 20 bp, synthetic construct
  misc_feature 1..20: note = chemically synthesized
  source 1..20: mol_type = other DNA
agagggtaaatagagaaaag

SEQ ID NO: 36447 - DNA, 20 bp, synthetic construct
  misc_feature 1..20: note = chemically synthesized
  source 1..20: mol_type = other DNA
ggtaaatagagaaaagaggc

SEQ ID NO: 36448 - DNA, 20 bp, synthetic construct
  misc_feature 1..20: note = chemically synthesized
  source 1..20: mol_type = other DNA
aggcaagatatctgtatcta

SEQ ID NO: 36449 - DNA, 20 bp, synthetic construct
  misc_feature 1..20: note = chemically synthesized
  source 1..20: mol_type = other DNA
tctgtatctacagattctgc

SEQ ID NO: 36450 - DNA, 20 bp, synthetic construct
  misc_feature 1..20: note = chemically synthesized
  source 1..20: mol_type = other DNA
ctgtatctacagattctgcc

SEQ ID NO: 36451 - DNA, 20 bp, synthetic construct
  misc_feature 1..20: note = chemically synthesized
  source 1..20: mol_type = other DNA
tgtatcaacctccaacataa

SEQ ID NO: 36452 - DNA, 20 bp, synthetic construct
  misc_feature 1..20: note = chemically synthesized
  source 1..20: mol_type = other DNA
aacataaaagttcaacttcc

SEQ ID NO: 36453 - DNA, 20 bp, synthetic construct
  misc_feature 1..20: note = chemically synthesized
  source 1..20: mol_type = other DNA
tgttaactctgaaataaaaa

SEQ ID NO: 36454 - DNA, 20 bp, synthetic construct
  misc_feature 1..20: note = chemically synthesized
  source 1..20: mol_type = other DNA
taactctgaaataaaaacag

SEQ ID NO: 36455 - DNA, 20 bp, synthetic construct
  misc_feature 1..20: note = chemically synthesized
  source 1..20: mol_type = other DNA
aaaacagtagttttatgtga

SEQ ID NO: 36456 - DNA, 20 bp, synthetic construct
  misc_feature 1..20: note = chemically synthesized
  source 1..20: mol_type = other DNA
aaacagtagttttatgtgat

SEQ ID NO: 36457 - DNA, 20 bp, synthetic construct
  misc_feature 1..20: note = chemically synthesized
  source 1..20: mol_type = other DNA
gggtgcttacatgaataatt

SEQ ID NO: 36458 - DNA, 20 bp, synthetic construct
  misc_feature 1..20: note = chemically synthesized
  source 1..20: mol_type = other DNA
gtgcttacatgaataattaa

SEQ ID NO: 36459 - DNA, 20 bp, synthetic construct
  misc_feature 1..20: note = chemically synthesized
  source 1..20: mol_type = other DNA
catgaataattaagagttct

SEQ ID NO: 36460 - DNA, 20 bp, synthetic construct
  misc_feature 1..20: note = chemically synthesized
  source 1..20: mol_type = other DNA
aagagttctgagttgatatc

SEQ ID NO: 36461 - DNA, 20 bp, synthetic construct
  misc_feature 1..20: note = chemically synthesized
  source 1..20: mol_type = other DNA
agttctgagttgatatctag

SEQ ID NO: 36462 - DNA, 20 bp, synthetic construct
  misc_feature 1..20: note = chemically synthesized
  source 1..20: mol_type = other DNA
tgatatctagaagttcttgt

SEQ ID NO: 36463 - DNA, 20 bp, synthetic construct
  misc_feature 1..20: note = chemically synthesized
  source 1..20: mol_type = other DNA
tctagaagttcttgttagct

SEQ ID NO: 36464 - DNA, 20 bp, synthetic construct
  misc_feature 1..20: note = chemically synthesized
  source 1..20: mol_type = other DNA
cttgttagctcagcgctatt

SEQ ID NO: 36465 - DNA, 20 bp, synthetic construct
  misc_feature 1..20: note = chemically synthesized
  source 1..20: mol_type = other DNA
taagaacacttttcctacaa

SEQ ID NO: 36466 - DNA, 20 bp, synthetic construct
  misc_feature 1..20: note = chemically synthesized
  source 1..20: mol_type = other DNA
cctacaatagaaattttctt

SEQ ID NO: 36467 - DNA, 20 bp, synthetic construct
  misc_feature 1..20: note = chemically synthesized
  source 1..20: mol_type = other DNA
acaatagaaattttctttgg

SEQ ID NO: 36468 - DNA, 20 bp, synthetic construct
  misc_feature 1..20: note = chemically synthesized
  source 1..20: mol_type = other DNA
aatagaaattttctttggaa

SEQ ID NO: 36469 - DNA, 20 bp, synthetic construct
  misc_feature 1..20: note = chemically synthesized
  source 1..20: mol_type = other DNA
atagaaattttctttggaag

SEQ ID NO: 36470 - DNA, 20 bp, synthetic construct
  misc_feature 1..20: note = chemically synthesized
  source 1..20: mol_type = other DNA
gaaattttctttggaagagg

SEQ ID NO: 36471 - DNA, 20 bp, synthetic construct
  misc_feature 1..20: note = chemically synthesized
  source 1..20: mol_type = other DNA
aaattttctttggaagaggc

SEQ ID NO: 36472 - DNA, 20 bp, synthetic construct
  misc_feature 1..20: note = chemically synthesized
  source 1..20: mol_type = other DNA
attttctttggaagaggcag

SEQ ID NO: 36473 - DNA, 20 bp, synthetic construct
  misc_feature 1..20: note = chemically synthesized
  source 1..20: mol_type = other DNA
tttctttggaagaggcagga

SEQ ID NO: 36474 - DNA, 20 bp, synthetic construct
  misc_feature 1..20: note = chemically synthesized
  source 1..20: mol_type = other DNA
ttctttggaagaggcaggag

SEQ ID NO: 36475 - DNA, 20 bp, synthetic construct
  misc_feature 1..20: note = chemically synthesized
  source 1..20: mol_type = other DNA
ttggaagaggcaggagagga

SEQ ID NO: 36476 - DNA, 20 bp, synthetic construct
  misc_feature 1..20: note = chemically synthesized
  source 1..20: mol_type = other DNA
ggaagaggcaggagaggaaa

SEQ ID NO: 36477 - DNA, 20 bp, synthetic construct
  misc_feature 1..20: note = chemically synthesized
  source 1..20: mol_type = other DNA
gagaggaaagagactgactc

SEQ ID NO: 36478 - DNA, 20 bp, synthetic construct
  misc_feature 1..20: note = chemically synthesized
  source 1..20: mol_type = other DNA
agaggaaagagactgactct

SEQ ID NO: 36479 - DNA, 20 bp, synthetic construct
  misc_feature 1..20: note = chemically synthesized
  source 1..20: mol_type = other DNA
aggaaagagactgactctgg

SEQ ID NO: 36480 - DNA, 20 bp, synthetic construct
  misc_feature 1..20: note = chemically synthesized
  source 1..20: mol_type = other DNA
tgactctgggagtgaatgtg

SEQ ID NO: 36481 - DNA, 20 bp, synthetic construct
  misc_feature 1..20: note = chemically synthesized
  source 1..20: mol_type = other DNA
gactctgggagtgaatgtgc

SEQ ID NO: 36482 - DNA, 20 bp, synthetic construct
  misc_feature 1..20: note = chemically synthesized
  source 1..20: mol_type = other DNA
actctgggagtgaatgtgca

SEQ ID NO: 36483 - DNA, 20 bp, synthetic construct
  misc_feature 1..20: note = chemically synthesized
  source 1..20: mol_type = other DNA
ctgggagtgaatgtgcaggg

SEQ ID NO: 36484 - DNA, 20 bp, synthetic construct
  misc_feature 1..20: note = chemically synthesized
  source 1..20: mol_type = other DNA
tgggagtgaatgtgcagggt

SEQ ID NO: 36485 - DNA, 20 bp, synthetic construct
  misc_feature 1..20: note = chemically synthesized
  source 1..20: mol_type = other DNA
gggagtgaatgtgcagggtg

SEQ ID NO: 36486 - DNA, 20 bp, synthetic construct
  misc_feature 1..20: note = chemically synthesized
  source 1..20: mol_type = other DNA
tggggtcaccatgacacctg

SEQ ID NO: 36487 - DNA, 20 bp, synthetic construct
  misc_feature 1..20: note = chemically synthesized
  source 1..20: mol_type = other DNA
ggggtcaccatgacacctgt

SEQ ID NO: 36488 - DNA, 20 bp, synthetic construct
  misc_feature 1..20: note = chemically synthesized
  source 1..20: mol_type = other DNA
ctctcctcctcctcttgatg

SEQ ID NO: 36489 - DNA, 20 bp, synthetic construct
  misc_feature 1..20: note = chemically synthesized
  source 1..20: mol_type = other DNA
ctcctcttgatgcagttctc

SEQ ID NO: 36490 - DNA, 20 bp, synthetic construct
  misc_feature 1..20: note = chemically synthesized
  source 1..20: mol_type = other DNA
tcctcttgatgcagttctct

SEQ ID NO: 36491 - DNA, 20 bp, synthetic construct
  misc_feature 1..20: note = chemically synthesized
  source 1..20: mol_type = other DNA
ttgatgcagttctctaggct

SEQ ID NO: 36492 - DNA, 20 bp, synthetic construct
  misc_feature 1..20: note = chemically synthesized
  source 1..20: mol_type = other DNA
cttcttcctcctctactttg

SEQ ID NO: 36493 - DNA, 20 bp, synthetic construct
  misc_feature 1..20: note = chemically synthesized
  source 1..20: mol_type = other DNA
ctttgtagctcccacatttt

SEQ ID NO: 36494 - DNA, 20 bp, synthetic construct
  misc_feature 1..20: note = chemically synthesized
  source 1..20: mol_type = other DNA
cacattttcagcttatatat

SEQ ID NO: 36495 - DNA, 20 bp, synthetic construct
  misc_feature 1..20: note = chemically synthesized
  source 1..20: mol_type = other DNA
cagcttatatattagccaat

SEQ ID NO: 36496 - DNA, 20 bp, synthetic construct
  misc_feature 1..20: note = chemically synthesized
  source 1..20: mol_type = other DNA
atattagccaattagtatat

SEQ ID NO: 36497 - DNA, 20 bp, synthetic construct
  misc_feature 1..20: note = chemically synthesized
  source 1..20: mol_type = other DNA
agtatattagtaatattttg

SEQ ID NO: 36498 - DNA, 20 bp, synthetic construct
  misc_feature 1..20: note = chemically synthesized
  source 1..20: mol_type = other DNA
tgaagtcactgttcttacct

SEQ ID NO: 36499 - DNA, 20 bp, synthetic construct
  misc_feature 1..20: note = chemically synthesized
  source 1..20: mol_type = other DNA
gtcactgttcttacctaagt

SEQ ID NO: 36500 - DNA, 20 bp, synthetic construct
  misc_feature 1..20: note = chemically synthesized
  source 1..20: mol_type = other DNA
acctaagtcagtttaacaat

SEQ ID NO: 36501 - DNA, 20 bp, synthetic construct
  misc_feature 1..20: note = chemically synthesized
  source 1..20: mol_type = other DNA
cagtttaacaatcagcatac

SEQ ID NO: 36502 - DNA, 20 bp, synthetic construct
  misc_feature 1..20: note = chemically synthesized
  source 1..20: mol_type = other DNA
ttaacaatcagcataccagt

SEQ ID NO: 36503 - DNA, 20 bp, synthetic construct
  misc_feature 1..20: note = chemically synthesized
  source 1..20: mol_type = other DNA
caatcagcataccagtcagt

SEQ ID NO: 36504 - DNA, 20 bp, synthetic construct
  misc_feature 1..20: note = chemically synthesized
  source 1..20: mol_type = other DNA
tgatcaatgtgttaatcata

SEQ ID NO: 36505 - DNA, 20 bp, synthetic construct
  misc_feature 1..20: note = chemically synthesized
  source 1..20: mol_type = other DNA
tcaaactctgtcattgcttc

SEQ ID NO: 36506 - DNA, 20 bp, synthetic construct
  misc_feature 1..20: note = chemically synthesized
  source 1..20: mol_type = other DNA
caaactctgtcattgcttcc

SEQ ID NO: 36507 - DNA, 20 bp, synthetic construct
  misc_feature 1..20: note = chemically synthesized
  source 1..20: mol_type = other DNA
aaactctgtcattgcttcca

SEQ ID NO: 36508 - DNA, 20 bp, synthetic construct
  misc_feature 1..20: note = chemically synthesized
  source 1..20: mol_type = other DNA
gtcattgcttccagggccat

SEQ ID NO: 36509 - DNA, 20 bp, synthetic construct
  misc_feature 1..20: note = chemically synthesized
  source 1..20: mol_type = other DNA
tggtgtgttaatacaacact

SEQ ID NO: 36510 - DNA, 20 bp, synthetic construct
  misc_feature 1..20: note = chemically synthesized
  source 1..20: mol_type = other DNA
tgttaatacaacacttagta

SEQ ID NO: 36511 - DNA, 20 bp, synthetic construct
  misc_feature 1..20: note = chemically synthesized
  source 1..20: mol_type = other DNA
aatacaacacttagtaaagt

SEQ ID NO: 36512 - DNA, 20 bp, synthetic construct
  misc_feature 1..20: note = chemically synthesized
  source 1..20: mol_type = other DNA
cttagtaaagtaagcaatgt

SEQ ID NO: 36513 - DNA, 20 bp, synthetic construct
  misc_feature 1..20: note = chemically synthesized
  source 1..20: mol_type = other DNA
aaagtaagcaatgttagtgt

SEQ ID NO: 36514 - DNA, 20 bp, synthetic construct
  misc_feature 1..20: note = chemically synthesized
  source 1..20: mol_type = other DNA
agtaagcaatgttagtgttg

SEQ ID NO: 36515 - DNA, 20 bp, synthetic construct
  misc_feature 1..20: note = chemically synthesized
  source 1..20: mol_type = other DNA
aagcaatgttagtgttggag

SEQ ID NO: 36516 - DNA, 20 bp, synthetic construct
  misc_feature 1..20: note = chemically synthesized
  source 1..20: mol_type = other DNA
agcaatgttagtgttggagt

SEQ ID NO: 36517 - DNA, 20 bp, synthetic construct
  misc_feature 1..20: note = chemically synthesized
  source 1..20: mol_type = other DNA
caatgttagtgttggagtgg

SEQ ID NO: 36518 - DNA, 20 bp, synthetic construct
  misc_feature 1..20: note = chemically synthesized
  source 1..20: mol_type = other DNA
tgttagtgttggagtgggag

SEQ ID NO: 36519 - DNA, 20 bp, synthetic construct
  misc_feature 1..20: note = chemically synthesized
  source 1..20: mol_type = other DNA
accgtgttttttactacaat

SEQ ID NO: 36520 - DNA, 20 bp, synthetic construct
  misc_feature 1..20: note = chemically synthesized
  source 1..20: mol_type = other DNA
tgttttttactacaatgagt

SEQ ID NO: 36521 - DNA, 20 bp, synthetic construct
  misc_feature 1..20: note = chemically synthesized
  source 1..20: mol_type = other DNA
ttttttactacaatgagtta

SEQ ID NO: 36522 - DNA, 20 bp, synthetic construct
  misc_feature 1..20: note = chemically synthesized
  source 1..20: mol_type = other DNA
ctacaatgagttagagccac

SEQ ID NO: 36523 - DNA, 20 bp, synthetic construct
  misc_feature 1..20: note = chemically synthesized
  source 1..20: mol_type = other DNA
tacaatgagttagagccact

SEQ ID NO: 36524 - DNA, 20 bp, synthetic construct
  misc_feature 1..20: note = chemically synthesized
  source 1..20: mol_type = other DNA
gagttagagccactaggtct

SEQ ID NO: 36525 - DNA, 20 bp, synthetic construct
  misc_feature 1..20: note = chemically synthesized
  source 1..20: mol_type = other DNA
gttagagccactaggtctga

SEQ ID NO: 36526 - DNA, 20 bp, synthetic construct
  misc_feature 1..20: note = chemically synthesized
  source 1..20: mol_type = other DNA
agccactaggtctgagagac

SEQ ID NO: 36527 - DNA, 20 bp, synthetic construct
  misc_feature 1..20: note = chemically synthesized
  source 1..20: mol_type = other DNA
taggtctgagagactagtaa

SEQ ID NO: 36528 - DNA, 20 bp, synthetic construct
  misc_feature 1..20: note = chemically synthesized
  source 1..20: mol_type = other DNA
gactagtaaaagaatgtaaa

SEQ ID NO: 36529 - DNA, 20 bp, synthetic construct
  misc_feature 1..20: note = chemically synthesized
  source 1..20: mol_type = other DNA
aacagtaaaaattttgtgct

SEQ ID NO: 36530 - DNA, 20 bp, synthetic construct
  misc_feature 1..20: note = chemically synthesized
  source 1..20: mol_type = other DNA
ttgtgctaagttttatgcta

SEQ ID NO: 36531 - DNA, 20 bp, synthetic construct
  misc_feature 1..20: note = chemically synthesized
  source 1..20: mol_type = other DNA
ctaagttttatgctaaagtc

SEQ ID NO: 36532 - DNA, 20 bp, synthetic construct
  misc_feature 1..20: note = chemically synthesized
  source 1..20: mol_type = other DNA
taagttttatgctaaagtct

SEQ ID NO: 36533 - DNA, 20 bp, synthetic construct
  misc_feature 1..20: note = chemically synthesized
  source 1..20: mol_type = other DNA
ctaaagtctgggtgatgcaa

SEQ ID NO: 36534 - DNA, 20 bp, synthetic construct
  misc_feature 1..20: note = chemically synthesized
  source 1..20: mol_type = other DNA
aaagtctgggtgatgcaaaa

SEQ ID NO: 36535 - DNA, 20 bp, synthetic construct
  misc_feature 1..20: note = chemically synthesized
  source 1..20: mol_type = other DNA
ggtgatgcaaaagagacatc

SEQ ID NO: 36536 - DNA, 20 bp, synthetic construct
  misc_feature 1..20: note = chemically synthesized
  source 1..20: mol_type = other DNA
gtgatgcaaaagagacatct

SEQ ID NO: 36537 - DNA, 20 bp, synthetic construct
  misc_feature 1..20: note = chemically synthesized
  source 1..20: mol_type = other DNA
tgatgcaaaagagacatctg

SEQ ID NO: 36538 - DNA, 20 bp, synthetic construct
  misc_feature 1..20: note = chemically synthesized
  source 1..20: mol_type = other DNA
caaaagagacatctggggtt

SEQ ID NO: 36539 - DNA, 20 bp, synthetic construct
  misc_feature 1..20: note = chemically synthesized
  source 1..20: mol_type = other DNA
agagacatctggggtttagt

SEQ ID NO: 36540 - DNA, 20 bp, synthetic construct
  misc_feature 1..20: note = chemically synthesized
  source 1..20: mol_type = other DNA
agacatctggggtttagtta

SEQ ID NO: 36541 - DNA, 20 bp, synthetic construct
  misc_feature 1..20: note = chemically synthesized
  source 1..20: mol_type = other DNA
acatctggggtttagttaga

SEQ ID NO: 36542 - DNA, 20 bp, synthetic construct
  misc_feature 1..20: note = chemically synthesized
  source 1..20: mol_type = other DNA
catctggggtttagttagag

SEQ ID NO: 36543 - DNA, 20 bp, synthetic construct
  misc_feature 1..20: note = chemically synthesized
  source 1..20: mol_type = other DNA
atctggggtttagttagaga

SEQ ID NO: 36544 - DNA, 20 bp, synthetic construct
  misc_feature 1..20: note = chemically synthesized
  source 1..20: mol_type = other DNA
ttagttagagagggcaaaat

SEQ ID NO: 36545 - DNA, 20 bp, synthetic construct
  misc_feature 1..20: note = chemically synthesized
  source 1..20: mol_type = other DNA
agttagagagggcaaaataa

SEQ ID NO: 36546 - DNA, 20 bp, synthetic construct
  misc_feature 1..20: note = chemically synthesized
  source 1..20: mol_type = other DNA
gggcaaaataagagacaata

SEQ ID NO: 36547 - DNA, 20 bp, synthetic construct
  misc_feature 1..20: note = chemically synthesized
  source 1..20: mol_type = other DNA
aataagagacaatatagaaa

SEQ ID NO: 36548 - DNA, 20 bp, synthetic construct
  misc_feature 1..20: note = chemically synthesized
  source 1..20: mol_type = other DNA
tatagaaatagatacaacaa

SEQ ID NO: 36549 - DNA, 20 bp, synthetic construct
  misc_feature 1..20: note = chemically synthesized
  source 1..20: mol_type = other DNA
atagaaatagatacaacaaa

SEQ ID NO: 36550 - DNA, 20 bp, synthetic construct
  misc_feature 1..20: note = chemically synthesized
  source 1..20: mol_type = other DNA
tagaaatagatacaacaaaa

SEQ ID NO: 36551 - DNA, 20 bp, synthetic construct
  misc_feature 1..20: note = chemically synthesized
  source 1..20: mol_type = other DNA
tagatacaacaaaagggtga

SEQ ID NO: 36552 - DNA, 20 bp, synthetic construct
  misc_feature 1..20: note = chemically synthesized
  source 1..20: mol_type = other DNA
caacaaaagggtgatggata

SEQ ID NO: 36553 - DNA, 20 bp, synthetic construct
  misc_feature 1..20: note = chemically synthesized
  source 1..20: mol_type = other DNA
aacaaaagggtgatggatat

SEQ ID NO: 36554 - DNA, 20 bp, synthetic construct
  misc_feature 1..20: note = chemically synthesized
  source 1..20: mol_type = other DNA
aaaagggtgatggatatagg

SEQ ID NO: 36555 - DNA, 20 bp, synthetic construct
  misc_feature 1..20: note = chemically synthesized
  source 1..20: mol_type = other DNA
tggatataggaagaacgaca

SEQ ID NO: 36556 - DNA, 20 bp, synthetic construct
  misc_feature 1..20: note = chemically synthesized
  source 1..20: mol_type = other DNA
ggatataggaagaacgacac

SEQ ID NO: 36557 - DNA, 20 bp, synthetic construct
  misc_feature 1..20: note = chemically synthesized
  source 1..20: mol_type = other DNA
agaacgacacaggaaaacaa

SEQ ID NO: 36558 - DNA, 20 bp, synthetic construct
  misc_feature 1..20: note = chemically synthesized
  source 1..20: mol_type = other DNA
gaacgacacaggaaaacaat

SEQ ID NO: 36559 - DNA, 20 bp, synthetic construct
  misc_feature 1..20: note = chemically synthesized
  source 1..20: mol_type = other DNA
gacacaggaaaacaatagga

SEQ ID NO: 36560 - DNA, 20 bp, synthetic construct
  misc_feature 1..20: note = chemically synthesized
  source 1..20: mol_type = other DNA
acacaggaaaacaataggat

SEQ ID NO: 36561 - DNA, 20 bp, synthetic construct
  misc_feature 1..20: note = chemically synthesized
  source 1..20: mol_type = other DNA
cacaggaaaacaataggata

SEQ ID NO: 36562 - DNA, 20 bp, synthetic construct
  misc_feature 1..20: note = chemically synthesized
  source 1..20: mol_type = other DNA
aataggatagggatgacgta

SEQ ID NO: 36563 - DNA, 20 bp, synthetic construct
  misc_feature 1..20: note = chemically synthesized
  source 1..20: mol_type = other DNA
cagctgcaccctatgtacct

SEQ ID NO: 36564 - DNA, 20 bp, synthetic construct
  misc_feature 1..20: note = chemically synthesized
  source 1..20: mol_type = other DNA
ctgcaccctatgtacctgag

SEQ ID NO: 36565 - DNA, 20 bp, synthetic construct
  misc_feature 1..20: note = chemically synthesized
  source 1..20: mol_type = other DNA
accctatgtacctgagcaga

SEQ ID NO: 36566 - DNA, 20 bp, synthetic construct
  misc_feature 1..20: note = chemically synthesized
  source 1..20: mol_type = other DNA
atgtacctgagcagatggtg

SEQ ID NO: 36567 - DNA, 20 bp, synthetic construct
  misc_feature 1..20: note = chemically synthesized
  source 1..20: mol_type = other DNA
gcagatggtgcagaaatgat

SEQ ID NO: 36568 - DNA, 20 bp, synthetic construct
  misc_feature 1..20: note = chemically synthesized
  source 1..20: mol_type = other DNA
cagaaatgatcagtgctgcc

SEQ ID NO: 36569 - DNA, 20 bp, synthetic construct
  misc_feature 1..20: note = chemically synthesized
  source 1..20: mol_type = other DNA
atgatcagtgctgcccagcc

SEQ ID NO: 36570 - DNA, 20 bp, synthetic construct
  misc_feature 1..20: note = chemically synthesized
  source 1..20: mol_type = other DNA
cagtgctgcccagccaagcc

SEQ ID NO: 36571 - DNA, 20 bp, synthetic construct
  misc_feature 1..20: note = chemically synthesized
  source 1..20: mol_type = other DNA
cagccaagcccagcctaaat

SEQ ID NO: 36572 - DNA, 20 bp, synthetic construct
  misc_feature 1..20: note = chemically synthesized
  source 1..20: mol_type = other DNA
aaataagttgaaccatgcat

SEQ ID NO: 36573 - DNA, 20 bp, synthetic construct
  misc_feature 1..20: note = chemically synthesized
  source 1..20: mol_type = other DNA
ataagttgaaccatgcatta

SEQ ID NO: 36574 - DNA, 20 bp, synthetic construct
  misc_feature 1..20: note = chemically synthesized
  source 1..20: mol_type = other DNA
aaataaatgtttaatgttgt

SEQ ID NO: 36575 - DNA, 20 bp, synthetic construct
  misc_feature 1..20: note = chemically synthesized
  source 1..20: mol_type = other DNA
tgtcagccactgatgctata

SEQ ID NO: 36576 - DNA, 20 bp, synthetic construct
  misc_feature 1..20: note = chemically synthesized
  source 1..20: mol_type = other DNA
gtcagccactgatgctatac

SEQ ID NO: 36577 - DNA, 20 bp, synthetic construct
  misc_feature 1..20: note = chemically synthesized
  source 1..20: mol_type = other DNA
tcagccactgatgctataca

SEQ ID NO: 36578 - DNA, 20 bp, synthetic construct
  misc_feature 1..20: note = chemically synthesized
  source 1..20: mol_type = other DNA
atgtgacaattctgtgataa

SEQ ID NO: 36579 - DNA, 20 bp, synthetic construct
  misc_feature 1..20: note = chemically synthesized
  source 1..20: mol_type = other DNA
tacataaaccctgtaaatat

SEQ ID NO: 36580 - DNA, 20 bp, synthetic construct
  misc_feature 1..20: note = chemically synthesized
  source 1..20: mol_type = other DNA
ctgtaaatattagtttatta

SEQ ID NO: 36581 - DNA, 20 bp, synthetic construct
  misc_feature 1..20: note = chemically synthesized
  source 1..20: mol_type = other DNA
tataaactcttaataaaata

SEQ ID NO: 36582 - DNA, 20 bp, synthetic construct
  misc_feature 1..20: note = chemically synthesized
  source 1..20: mol_type = other DNA
tcttaataaaatatggataa

SEQ ID NO: 36583 - DNA, 20 bp, synthetic construct
  misc_feature 1..20: note = chemically synthesized
  source 1..20: mol_type = other DNA
ataatagtaatactttgcat

SEQ ID NO: 36584 - DNA, 20 bp, synthetic construct
  misc_feature 1..20: note = chemically synthesized
  source 1..20: mol_type = other DNA
tacataaattactgcaactt

SEQ ID NO: 36585 - DNA, 20 bp, synthetic construct
  misc_feature 1..20: note = chemically synthesized
  source 1..20: mol_type = other DNA
tgagctgcttcaaacattat

SEQ ID NO: 36586 - DNA, 20 bp, synthetic construct
  misc_feature 1..20: note = chemically synthesized
  source 1..20: mol_type = other DNA
tttattatatcacatttcta

SEQ ID NO: 36587 - DNA, 20 bp, synthetic construct
  misc_feature 1..20: note = chemically synthesized
  source 1..20: mol_type = other DNA
ttattatatcacatttctat

SEQ ID NO: 36588 - DNA, 20 bp, synthetic construct
  misc_feature 1..20: note = chemically synthesized
  source 1..20: mol_type = other DNA
tctataggtctgcactctca

SEQ ID NO: 36589 - DNA, 20 bp, synthetic construct
  misc_feature 1..20: note = chemically synthesized
  source 1..20: mol_type = other DNA
ctataggtctgcactctcat

SEQ ID NO: 36590 - DNA, 20 bp, synthetic construct
  misc_feature 1..20: note = chemically synthesized
  source 1..20: mol_type = other DNA
gcactctcataggcttaact

SEQ ID NO: 36591 - DNA, 20 bp, synthetic construct
  misc_feature 1..20: note = chemically synthesized
  source 1..20: mol_type = other DNA
gcttaactgagttctctgct

SEQ ID NO: 36592 - DNA, 20 bp, synthetic construct
  misc_feature 1..20: note = chemically synthesized
  source 1..20: mol_type = other DNA
cttaactgagttctctgctt

SEQ ID NO: 36593 - DNA, 20 bp, synthetic construct
  misc_feature 1..20: note = chemically synthesized
  source 1..20: mol_type = other DNA
ttaactgagttctctgctta

SEQ ID NO: 36594 - DNA, 20 bp, synthetic construct
  misc_feature 1..20: note = chemically synthesized
  source 1..20: mol_type = other DNA
ttctctgcttagggtatcat

SEQ ID NO: 36595 - DNA, 20 bp, synthetic construct
  misc_feature 1..20: note = chemically synthesized
  source 1..20: mol_type = other DNA
tctctgcttagggtatcata

SEQ ID NO: 36596 - DNA, 20 bp, synthetic construct
  misc_feature 1..20: note = chemically synthesized
  source 1..20: mol_type = other DNA
taaggtcaaattcaaaatat

SEQ ID NO: 36597 - DNA, 20 bp, synthetic construct
  misc_feature 1..20: note = chemically synthesized
  source 1..20: mol_type = other DNA
aaggtcaaattcaaaatatc

SEQ ID NO: 36598 - DNA, 20 bp, synthetic construct
  misc_feature 1..20: note = chemically synthesized
  source 1..20: mol_type = other DNA
ggtcaaattcaaaatatcgg

SEQ ID NO: 36599 - DNA, 20 bp, synthetic construct
  misc_feature 1..20: note = chemically synthesized
  source 1..20: mol_type = other DNA
gtcaaattcaaaatatcggg

SEQ ID NO: 36600 - DNA, 20 bp, synthetic construct
  misc_feature 1..20: note = chemically synthesized
  source 1..20: mol_type = other DNA
tcaaattcaaaatatcggga

SEQ ID NO: 36601 - DNA, 20 bp, synthetic construct
  misc_feature 1..20: note = chemically synthesized
  source 1..20: mol_type = other DNA
attcaaaatatcgggagggc

SEQ ID NO: 36602 - DNA, 20 bp, synthetic construct
  misc_feature 1..20: note = chemically synthesized
  source 1..20: mol_type = other DNA
ttcaaaatatcgggagggct

SEQ ID NO: 36603 - DNA, 20 bp, synthetic construct
  misc_feature 1..20: note = chemically synthesized
  source 1..20: mol_type = other DNA
gagggctgggctcttatcca

SEQ ID NO: 36604 - DNA, 20 bp, synthetic construct
  misc_feature 1..20: note = chemically synthesized
  source 1..20: mol_type = other DNA
agggctgggctcttatccaa

SEQ ID NO: 36605 - DNA, 20 bp, synthetic construct
  misc_feature 1..20: note = chemically synthesized
  source 1..20: mol_type = other DNA
gggctcttatccaaaggctc

SEQ ID NO: 36606 - DNA, 20 bp, synthetic construct
  misc_feature 1..20: note = chemically synthesized
  source 1..20: mol_type = other DNA
ggctcttatccaaaggctct

SEQ ID NO: 36607 - DNA, 20 bp, synthetic construct
  misc_feature 1..20: note = chemically synthesized
  source 1..20: mol_type = other DNA
gctcttatccaaaggctctg

SEQ ID NO: 36608 - DNA, 20 bp, synthetic construct
  misc_feature 1..20: note = chemically synthesized
  source 1..20: mol_type = other DNA
cttatccaaaggctctgggg

SEQ ID NO: 36609 - DNA, 20 bp, synthetic construct
  misc_feature 1..20: note = chemically synthesized
  source 1..20: mol_type = other DNA
aattcgcttccacgttcatt

SEQ ID NO: 36610 - DNA, 20 bp, synthetic construct
  misc_feature 1..20: note = chemically synthesized
  source 1..20: mol_type = other DNA
ttccacgttcattcagattg

SEQ ID NO: 36611 - DNA, 20 bp, synthetic construct
  misc_feature 1..20: note = chemically synthesized
  source 1..20: mol_type = other DNA
acgttcattcagattgtagt

SEQ ID NO: 36612 - DNA, 20 bp, synthetic construct
  misc_feature 1..20: note = chemically synthesized
  source 1..20: mol_type = other DNA
gttcattcagattgtagtca

SEQ ID NO: 36613 - DNA, 20 bp, synthetic construct
  misc_feature 1..20: note = chemically synthesized
  source 1..20: mol_type = other DNA
ttcagattgtagtcagagct

SEQ ID NO: 36614 - DNA, 20 bp, synthetic construct
  misc_feature 1..20: note = chemically synthesized
  source 1..20: mol_type = other DNA
tttttttttttttttttttt

SEQ ID NO: 36615 - DNA, 20 bp, synthetic construct
  misc_feature 1..20: note = chemically synthesized
  source 1..20: mol_type = other DNA
ttttttttttttttttgaga

SEQ ID NO: 36616 - DNA, 20 bp, synthetic construct
  misc_feature 1..20: note = chemically synthesized
  source 1..20: mol_type = other DNA
ttttttttttttttgagatg

SEQ ID NO: 36617 - DNA, 20 bp, synthetic construct
  misc_feature 1..20: note = chemically synthesized
  source 1..20: mol_type = other DNA
tggagtctcgctctgtcacc

SEQ ID NO: 36618 - DNA, 20 bp, synthetic construct
  misc_feature 1..20: note = chemically synthesized
  source 1..20: mol_type = other DNA
tctcgctctgtcacccagcc

SEQ ID NO: 36619 - DNA, 20 bp, synthetic construct
  misc_feature 1..20: note = chemically synthesized
  source 1..20: mol_type = other DNA
tcgctctgtcacccagcctg

SEQ ID NO: 36620 - DNA, 20 bp, synthetic construct
  misc_feature 1..20: note = chemically synthesized
  source 1..20: mol_type = other DNA
ctgtcacccagcctggagtg

SEQ ID NO: 36621 - DNA, 20 bp, synthetic construct
  misc_feature 1..20: note = chemically synthesized
  source 1..20: mol_type = other DNA
tcacccagcctggagtgcag

SEQ ID NO: 36622 - DNA, 20 bp, synthetic construct
  misc_feature 1..20: note = chemically synthesized
  source 1..20: mol_type = other DNA
tccctgcaacctgtgcctcc

SEQ ID NO: 36623 - DNA, 20 bp, synthetic construct
  misc_feature 1..20: note = chemically synthesized
  source 1..20: mol_type = other DNA
ccctgcaacctgtgcctccc

SEQ ID NO: 36624 - DNA, 20 bp, synthetic construct
  misc_feature 1..20: note = chemically synthesized
  source 1..20: mol_type = other DNA
aacctgtgcctcccgggttc

SEQ ID NO: 36625 - DNA, 20 bp, synthetic construct
  misc_feature 1..20: note = chemically synthesized
  source 1..20: mol_type = other DNA
ttcaagcaattctcctgcct

SEQ ID NO: 36626 - DNA, 20 bp, synthetic construct
  misc_feature 1..20: note = chemically synthesized
  source 1..20: mol_type = other DNA
ttctcctgcctcagtttccc

SEQ ID NO: 36627 - DNA, 20 bp, synthetic construct
  misc_feature 1..20: note = chemically synthesized
  source 1..20: mol_type = other DNA
tcctgcctcagtttcccaag

SEQ ID NO: 36628 - DNA, 20 bp, synthetic construct
  misc_feature 1..20: note = chemically synthesized
  source 1..20: mol_type = other DNA
gcctcagtttcccaagtagc

SEQ ID NO: 36629 - DNA, 20 bp, synthetic construct
  misc_feature 1..20: note = chemically synthesized
  source 1..20: mol_type = other DNA
ttcccaagtagctggaacta

SEQ ID NO: 36630 - DNA, 20 bp, synthetic construct
  misc_feature 1..20: note = chemically synthesized
  source 1..20: mol_type = other DNA
tcccaagtagctggaactac

SEQ ID NO: 36631 - DNA, 20 bp, synthetic construct
  misc_feature 1..20: note = chemically synthesized
  source 1..20: mol_type = other DNA
caggcaactgcaaccacacc

SEQ ID NO: 36632 - DNA, 20 bp, synthetic construct
  misc_feature 1..20: note = chemically synthesized
  source 1..20: mol_type = other DNA
tggctaatttttatattttt

SEQ ID NO: 36633 - DNA, 20 bp, synthetic construct
  misc_feature 1..20: note = chemically synthesized
  source 1..20: mol_type = other DNA
ctaatttttatattttttgg

SEQ ID NO: 36634 - DNA, 20 bp, synthetic construct
  misc_feature 1..20: note = chemically synthesized
  source 1..20: mol_type = other DNA
taatttttatattttttggt

SEQ ID NO: 36635 - DNA, 20 bp, synthetic construct
  misc_feature 1..20: note = chemically synthesized
  source 1..20: mol_type = other DNA
aatttttatattttttggta

SEQ ID NO: 36636 - DNA, 20 bp, synthetic construct
  misc_feature 1..20: note = chemically synthesized
  source 1..20: mol_type = other DNA
tttatattttttggtaggga

SEQ ID NO: 36637 - DNA, 20 bp, synthetic construct
  misc_feature 1..20: note = chemically synthesized
  source 1..20: mol_type = other DNA
gggatggaatttcaccatgt

SEQ ID NO: 36638 - DNA, 20 bp, synthetic construct
  misc_feature 1..20: note = chemically synthesized
  source 1..20: mol_type = other DNA
tggaatttcaccatgttggc

SEQ ID NO: 36639 - DNA, 20 bp, synthetic construct
  misc_feature 1..20: note = chemically synthesized
  source 1..20: mol_type = other DNA
ggaatttcaccatgttggcc

SEQ ID NO: 36640 - DNA, 20 bp, synthetic construct
  misc_feature 1..20: note = chemically synthesized
  source 1..20: mol_type = other DNA
tttcaccatgttggccaggc

SEQ ID NO: 36641 - DNA, 20 bp, synthetic construct
  misc_feature 1..20: note = chemically synthesized
  source 1..20: mol_type = other DNA
ccatgttggccaggctggtc

SEQ ID NO: 36642 - DNA, 20 bp, synthetic construct
  misc_feature 1..20: note = chemically synthesized
  source 1..20: mol_type = other DNA
tggtctggaactcctgacct

SEQ ID NO: 36643 - DNA, 20 bp, synthetic construct
  misc_feature 1..20: note = chemically synthesized
  source 1..20: mol_type = other DNA
ggtctggaactcctgacctc

SEQ ID NO: 36644 - DNA, 20 bp, synthetic construct
  misc_feature 1..20: note = chemically synthesized
  source 1..20: mol_type = other DNA
ctcaggtgatccgcccgcct

SEQ ID NO: 36645 - DNA, 20 bp, synthetic construct
  misc_feature 1..20: note = chemically synthesized
  source 1..20: mol_type = other DNA
ccgcccgccttggcctccca

SEQ ID NO: 36646 - DNA, 20 bp, synthetic construct
  misc_feature 1..20: note = chemically synthesized
  source 1..20: mol_type = other DNA
gccttggcctcccaaagtgc

SEQ ID NO: 36647 - DNA, 20 bp, synthetic construct
  misc_feature 1..20: note = chemically synthesized
  source 1..20: mol_type = other DNA
ccttggcctcccaaagtgct

SEQ ID NO: 36648 - DNA, 20 bp, synthetic construct
  misc_feature 1..20: note = chemically synthesized
  source 1..20: mol_type = other DNA
ctcccaaagtgctgggatta

SEQ ID NO: 36649 - DNA, 20 bp, synthetic construct
  misc_feature 1..20: note = chemically synthesized
  source 1..20: mol_type = other DNA
tcccaaagtgctgggattac

SEQ ID NO: 36650 - DNA, 20 bp, synthetic construct
  misc_feature 1..20: note = chemically synthesized
  source 1..20: mol_type = other DNA
ctgggattacaggcttgaat

SEQ ID NO: 36651 - DNA, 20 bp, synthetic construct
  misc_feature 1..20: note = chemically synthesized
  source 1..20: mol_type = other DNA
cttgaatgagccattgcacc

SEQ ID NO: 36652 - DNA, 20 bp, synthetic construct
  misc_feature 1..20: note = chemically synthesized
  source 1..20: mol_type = other DNA
gagccattgcacccggctgt

SEQ ID NO: 36653 - DNA, 20 bp, synthetic construct
  misc_feature 1..20: note = chemically synthesized
  source 1..20: mol_type = other DNA
gccattgcacccggctgtca

SEQ ID NO: 36654 - DNA, 20 bp, synthetic construct
  misc_feature 1..20: note = chemically synthesized
  source 1..20: mol_type = other DNA
tgcacccggctgtcagagtt

SEQ ID NO: 36655 - DNA, 20 bp, synthetic construct
  misc_feature 1..20: note = chemically synthesized
  source 1..20: mol_type = other DNA
tttcctactgctgaactctg

SEQ ID NO: 36656 - DNA, 20 bp, synthetic construct
  misc_feature 1..20: note = chemically synthesized
  source 1..20: mol_type = other DNA
gttttttgtttgtttgtttg

SEQ ID NO: 36657 - DNA, 20 bp, synthetic construct
  misc_feature 1..20: note = chemically synthesized
  source 1..20: mol_type = other DNA
ttttttgtttgtttgtttgc

SEQ ID NO: 36658 - DNA, 20 bp, synthetic construct
  misc_feature 1..20: note = chemically synthesized
  source 1..20: mol_type = other DNA
tttgtttgtttgcaggctgt

SEQ ID NO: 36659 - DNA, 20 bp, synthetic construct
  misc_feature 1..20: note = chemically synthesized
  source 1..20: mol_type = other DNA
tttgtttgcaggctgttagc

SEQ ID NO: 36660 - DNA, 20 bp, synthetic construct
  misc_feature 1..20: note = chemically synthesized
  source 1..20: mol_type = other DNA
ttgtttgcaggctgttagct

SEQ ID NO: 36661 - DNA, 20 bp, synthetic construct
  misc_feature 1..20: note = chemically synthesized
  source 1..20: mol_type = other DNA
taggatgcccgttctgtacc

SEQ ID NO: 36662 - DNA, 20 bp, synthetic construct
  misc_feature 1..20: note = chemically synthesized
  source 1..20: mol_type = other DNA
aggatgcccgttctgtacct

SEQ ID NO: 36663 - DNA, 20 bp, synthetic construct
  misc_feature 1..20: note = chemically synthesized
  source 1..20: mol_type = other DNA
ggatgcccgttctgtaccta

SEQ ID NO: 36664 - DNA, 20 bp, synthetic construct
  misc_feature 1..20: note = chemically synthesized
  source 1..20: mol_type = other DNA
gatgcccgttctgtacctag

SEQ ID NO: 36665 - DNA, 20 bp, synthetic construct
  misc_feature 1..20: note = chemically synthesized
  source 1..20: mol_type = other DNA
gacctccttatatttcaaac

SEQ ID NO: 36666 - DNA, 20 bp, synthetic construct
  misc_feature 1..20: note = chemically synthesized
  source 1..20: mol_type = other DNA
tctcaaattttgaatatgtc

SEQ ID NO: 36667 - DNA, 20 bp, synthetic construct
  misc_feature 1..20: note = chemically synthesized
  source 1..20: mol_type = other DNA
cttcctattctcctactact

SEQ ID NO: 36668 - DNA, 20 bp, synthetic construct
  misc_feature 1..20: note = chemically synthesized
  source 1..20: mol_type = other DNA
cttggtgaaaactctgcttt

SEQ ID NO: 36669 - DNA, 20 bp, synthetic construct
  misc_feature 1..20: note = chemically synthesized
  source 1..20: mol_type = other DNA
ttggtgaaaactctgctttt

SEQ ID NO: 36670 - DNA, 20 bp, synthetic construct
  misc_feature 1..20: note = chemically synthesized
  source 1..20: mol_type = other DNA
tggtgaaaactctgctttta

SEQ ID NO: 36671 - DNA, 20 bp, synthetic construct
  misc_feature 1..20: note = chemically synthesized
  source 1..20: mol_type = other DNA
ggtgaaaactctgcttttag

SEQ ID NO: 36672 - DNA, 20 bp, synthetic construct
  misc_feature 1..20: note = chemically synthesized
  source 1..20: mol_type = other DNA
actctgcttttaggggctca

SEQ ID NO: 36673 - DNA, 20 bp, synthetic construct
  misc_feature 1..20: note = chemically synthesized
  source 1..20: mol_type = other DNA
cttttaggggctcatggaat

SEQ ID NO: 36674 - DNA, 20 bp, synthetic construct
  misc_feature 1..20: note = chemically synthesized
  source 1..20: mol_type = other DNA
aggggctcatggaattagac

SEQ ID NO: 36675 - DNA, 20 bp, synthetic construct
  misc_feature 1..20: note = chemically synthesized
  source 1..20: mol_type = other DNA
ggggctcatggaattagact

SEQ ID NO: 36676 - DNA, 20 bp, synthetic construct
  misc_feature 1..20: note = chemically synthesized
  source 1..20: mol_type = other DNA
gaattagactaggttcccct

SEQ ID NO: 36677 - DNA, 20 bp, synthetic construct
  misc_feature 1..20: note = chemically synthesized
  source 1..20: mol_type = other DNA
tttccttttcaattaactca

SEQ ID NO: 36678 - DNA, 20 bp, synthetic construct
  misc_feature 1..20: note = chemically synthesized
  source 1..20: mol_type = other DNA
ttcaattaactcaaagtcaa

SEQ ID NO: 36679 - DNA, 20 bp, synthetic construct
  misc_feature 1..20: note = chemically synthesized
  source 1..20: mol_type = other DNA
ttaactcaaagtcaatagat

SEQ ID NO: 36680 - DNA, 20 bp, synthetic construct
  misc_feature 1..20: note = chemically synthesized
  source 1..20: mol_type = other DNA
aattacatctgtataacccc

SEQ ID NO: 36681 - DNA, 20 bp, synthetic construct
  misc_feature 1..20: note = chemically synthesized
  source 1..20: mol_type = other DNA
atgatattgtatcatattca

SEQ ID NO: 36682 - DNA, 20 bp, synthetic construct
  misc_feature 1..20: note = chemically synthesized
  source 1..20: mol_type = other DNA
ttgtatcatattcacagtcc

SEQ ID NO: 36683 - DNA, 20 bp, synthetic construct
  misc_feature 1..20: note = chemically synthesized
  source 1..20: mol_type = other DNA
atattcacagtcctagaaat

SEQ ID NO: 36684 - DNA, 20 bp, synthetic construct
  misc_feature 1..20: note = chemically synthesized
  source 1..20: mol_type = other DNA
tattcacagtcctagaaatt

SEQ ID NO: 36685 - DNA, 20 bp, synthetic construct
  misc_feature 1..20: note = chemically synthesized
  source 1..20: mol_type = other DNA
cacagtcctagaaattagga

SEQ ID NO: 36686 - DNA, 20 bp, synthetic construct
  misc_feature 1..20: note = chemically synthesized
  source 1..20: mol_type = other DNA
acagtcctagaaattaggat

SEQ ID NO: 36687 - DNA, 20 bp, synthetic construct
  misc_feature 1..20: note = chemically synthesized
  source 1..20: mol_type = other DNA
aattaggataggaaatcttg

SEQ ID NO: 36688 - DNA, 20 bp, synthetic construct
  misc_feature 1..20: note = chemically synthesized
  source 1..20: mol_type = other DNA
taggataggaaatcttgtgg

SEQ ID NO: 36689 - DNA, 20 bp, synthetic construct
  misc_feature 1..20: note = chemically synthesized
  source 1..20: mol_type = other DNA
ataggaaatcttgtggtaga

SEQ ID NO: 36690 - DNA, 20 bp, synthetic construct
  misc_feature 1..20: note = chemically synthesized
  source 1..20: mol_type = other DNA
taggaaatcttgtggtagaa

SEQ ID NO: 36691 - DNA, 20 bp, synthetic construct
  misc_feature 1..20: note = chemically synthesized
  source 1..20: mol_type = other DNA
ctatcacaccatttaaaaaa

SEQ ID NO: 36692 - DNA, 20 bp, synthetic construct
  misc_feature 1..20: note = chemically synthesized
  source 1..20: mol_type = other DNA
cacaccatttaaaaaatagc

SEQ ID NO: 36693 - DNA, 20 bp, synthetic construct
  misc_feature 1..20: note = chemically synthesized
  source 1..20: mol_type = other DNA
ccatttaaaaaatagctagt

SEQ ID NO: 36694 - DNA, 20 bp, synthetic construct
  misc_feature 1..20: note = chemically synthesized
  source 1..20: mol_type = other DNA
atttaaaaaatagctagtga

SEQ ID NO: 36695 - DNA, 20 bp, synthetic construct
  misc_feature 1..20: note = chemically synthesized
  source 1..20: mol_type = other DNA
ttaaaaaatagctagtgaga

SEQ ID NO: 36696 - DNA, 20 bp, synthetic construct
  misc_feature 1..20: note = chemically synthesized
  source 1..20: mol_type = other DNA
taaaaaatagctagtgagag

SEQ ID NO: 36697 - DNA, 20 bp, synthetic construct
  misc_feature 1..20: note = chemically synthesized
  source 1..20: mol_type = other DNA
aaaaatagctagtgagagag

SEQ ID NO: 36698 - DNA, 20 bp, synthetic construct
  misc_feature 1..20: note = chemically synthesized
  source 1..20: mol_type = other DNA
ttcttttccaatatatgtgt

SEQ ID NO: 36699 - DNA, 20 bp, synthetic construct
  misc_feature 1..20: note = chemically synthesized
  source 1..20: mol_type = other DNA
caatatatgtgttagtttta

SEQ ID NO: 36700 - DNA, 20 bp, synthetic construct
  misc_feature 1..20: note = chemically synthesized
  source 1..20: mol_type = other DNA
ttcttaacatttttttgatg

SEQ ID NO: 36701 - DNA, 20 bp, synthetic construct
  misc_feature 1..20: note = chemically synthesized
  source 1..20: mol_type = other DNA
tgatgaagcacaatgtctga

SEQ ID NO: 36702 - DNA, 20 bp, synthetic construct
  misc_feature 1..20: note = chemically synthesized
  source 1..20: mol_type = other DNA
gatgaagcacaatgtctgaa

SEQ ID NO: 36703 - DNA, 20 bp, synthetic construct
  misc_feature 1..20: note = chemically synthesized
  source 1..20: mol_type = other DNA
atgaagcacaatgtctgaaa

SEQ ID NO: 36704 - DNA, 20 bp, synthetic construct
  misc_feature 1..20: note = chemically synthesized
  source 1..20: mol_type = other DNA
aagcacaatgtctgaaaggg

SEQ ID NO: 36705 - DNA, 20 bp, synthetic construct
  misc_feature 1..20: note = chemically synthesized
  source 1..20: mol_type = other DNA
cacaatgtctgaaagggtgg

SEQ ID NO: 36706 - DNA, 20 bp, synthetic construct
  misc_feature 1..20: note = chemically synthesized
  source 1..20: mol_type = other DNA
atgtctgaaagggtggtaga

SEQ ID NO: 36707 - DNA, 20 bp, synthetic construct
  misc_feature 1..20: note = chemically synthesized
  source 1..20: mol_type = other DNA
tctgaaagggtggtagaaag

SEQ ID NO: 36708 - DNA, 20 bp, synthetic construct
  misc_feature 1..20: note = chemically synthesized
  source 1..20: mol_type = other DNA
aaagggtggtagaaagcagc

SEQ ID NO: 36709 - DNA, 20 bp, synthetic construct
  misc_feature 1..20: note = chemically synthesized
  source 1..20: mol_type = other DNA
agggtggtagaaagcagctg

SEQ ID NO: 36710 - DNA, 20 bp, synthetic construct
  misc_feature 1..20: note = chemically synthesized
  source 1..20: mol_type = other DNA
aagcagctggagtcgaaact

SEQ ID NO: 36711 - DNA, 20 bp, synthetic construct
  misc_feature 1..20: note = chemically synthesized
  source 1..20: mol_type = other DNA
agcagctggagtcgaaactg

SEQ ID NO: 36712 - DNA, 20 bp, synthetic construct
  misc_feature 1..20: note = chemically synthesized
  source 1..20: mol_type = other DNA
tggagtcgaaactgaggatg

SEQ ID NO: 36713 - DNA, 20 bp, synthetic construct
  misc_feature 1..20: note = chemically synthesized
  source 1..20: mol_type = other DNA
aaactgaggatgaagtcgta

SEQ ID NO: 36714 - DNA, 20 bp, synthetic construct
  misc_feature 1..20: note = chemically synthesized
  source 1..20: mol_type = other DNA
gaggatgaagtcgtatagtc

SEQ ID NO: 36715 - DNA, 20 bp, synthetic construct
  misc_feature 1..20: note = chemically synthesized
  source 1..20: mol_type = other DNA
ggatgaagtcgtatagtcta

SEQ ID NO: 36716 - DNA, 20 bp, synthetic construct
  misc_feature 1..20: note = chemically synthesized
  source 1..20: mol_type = other DNA
tagagctgtgctgtccaaaa

SEQ ID NO: 36717 - DNA, 20 bp, synthetic construct
  misc_feature 1..20: note = chemically synthesized
  source 1..20: mol_type = other DNA
agctgtgctgtccaaaacag

SEQ ID NO: 36718 - DNA, 20 bp, synthetic construct
  misc_feature 1..20: note = chemically synthesized
  source 1..20: mol_type = other DNA
ctgtccaaaacagtagcatc

SEQ ID NO: 36719 - DNA, 20 bp, synthetic construct
  misc_feature 1..20: note = chemically synthesized
  source 1..20: mol_type = other DNA
ccaaaacagtagcatctggt

SEQ ID NO: 36720 - DNA, 20 bp, synthetic construct
  misc_feature 1..20: note = chemically synthesized
  source 1..20: mol_type = other DNA
cagtagcatctggttagctt

SEQ ID NO: 36721 - DNA, 20 bp, synthetic construct
  misc_feature 1..20: note = chemically synthesized
  source 1..20: mol_type = other DNA
agcatctggttagcttgagt

SEQ ID NO: 36722 - DNA, 20 bp, synthetic construct
  misc_feature 1..20: note = chemically synthesized
  source 1..20: mol_type = other DNA
cttgagtcagaattttctgt

SEQ ID NO: 36723 - DNA, 20 bp, synthetic construct
  misc_feature 1..20: note = chemically synthesized
  source 1..20: mol_type = other DNA
agtgtaaacactcgattttg

SEQ ID NO: 36724 - DNA, 20 bp, synthetic construct
  misc_feature 1..20: note = chemically synthesized
  source 1..20: mol_type = other DNA
tttgtaccaaaaaaaaatcg

SEQ ID NO: 36725 - DNA, 20 bp, synthetic construct
  misc_feature 1..20: note = chemically synthesized
  source 1..20: mol_type = other DNA
ttgtaccaaaaaaaaatcgt

SEQ ID NO: 36726 - DNA, 20 bp, synthetic construct
  misc_feature 1..20: note = chemically synthesized
  source 1..20: mol_type = other DNA
aaatgataatatttttgata

SEQ ID NO: 36727 - DNA, 20 bp, synthetic construct
  misc_feature 1..20: note = chemically synthesized
  source 1..20: mol_type = other DNA
tgataatatttttgatatag

SEQ ID NO: 36728 - DNA, 20 bp, synthetic construct
  misc_feature 1..20: note = chemically synthesized
  source 1..20: mol_type = other DNA
tttgatatagtagcttaaat

SEQ ID NO: 36729 - DNA, 20 bp, synthetic construct
  misc_feature 1..20: note = chemically synthesized
  source 1..20: mol_type = other DNA
actccttttaatgtgactac

SEQ ID NO: 36730 - DNA, 20 bp, synthetic construct
  misc_feature 1..20: note = chemically synthesized
  source 1..20: mol_type = other DNA
aacatttaacatcacatatt

SEQ ID NO: 36731 - DNA, 20 bp, synthetic construct
  misc_feature 1..20: note = chemically synthesized
  source 1..20: mol_type = other DNA
ctaattatatttccaccaca

SEQ ID NO: 36732 - DNA, 20 bp, synthetic construct
  misc_feature 1..20: note = chemically synthesized
  source 1..20: mol_type = other DNA
atatttccaccacatagtgc

SEQ ID NO: 36733 - DNA, 20 bp, synthetic construct
  misc_feature 1..20: note = chemically synthesized
  source 1..20: mol_type = other DNA
tccaccacatagtgctggtc

SEQ ID NO: 36734 - DNA, 20 bp, synthetic construct
  misc_feature 1..20: note = chemically synthesized
  source 1..20: mol_type = other DNA
caccacatagtgctggtcta

SEQ ID NO: 36735 - DNA, 20 bp, synthetic construct
  misc_feature 1..20: note = chemically synthesized
  source 1..20: mol_type = other DNA
ccacatagtgctggtctaga

SEQ ID NO: 36736 - DNA, 20 bp, synthetic construct
  misc_feature 1..20: note = chemically synthesized
  source 1..20: mol_type = other DNA
tttgtttgtttgtttctcct

SEQ ID NO: 36737 - DNA, 20 bp, synthetic construct
  misc_feature 1..20: note = chemically synthesized
  source 1..20: mol_type = other DNA
ttgtttgtttgtttctcctc

SEQ ID NO: 36738 - DNA, 20 bp, synthetic construct
  misc_feature 1..20: note = chemically synthesized
  source 1..20: mol_type = other DNA
gctgccccttttctcctcac

SEQ ID NO: 36739 - DNA, 20 bp, synthetic construct
  misc_feature 1..20: note = chemically synthesized
  source 1..20: mol_type = other DNA
ttttctcctcactggctttc

SEQ ID NO: 36740 - DNA, 20 bp, synthetic construct
  misc_feature 1..20: note = chemically synthesized
  source 1..20: mol_type = other DNA
tttctcctcactggctttcc

SEQ ID NO: 36741 - DNA, 20 bp, synthetic construct
  misc_feature 1..20: note = chemically synthesized
  source 1..20: mol_type = other DNA
cctcactggctttccaggtc

SEQ ID NO: 36742 - DNA, 20 bp, synthetic construct
  misc_feature 1..20: note = chemically synthesized
  source 1..20: mol_type = other DNA
tcactggctttccaggtctg

SEQ ID NO: 36743 - DNA, 20 bp, synthetic construct
  misc_feature 1..20: note = chemically synthesized
  source 1..20: mol_type = other DNA
actggctttccaggtctgga

SEQ ID NO: 36744 - DNA, 20 bp, synthetic construct
  misc_feature 1..20: note = chemically synthesized
  source 1..20: mol_type = other DNA
gtctggagagatttcatcct

SEQ ID NO: 36745 - DNA, 20 bp, synthetic construct
  misc_feature 1..20: note = chemically synthesized
  source 1..20: mol_type = other DNA
ctggagagatttcatccttg

SEQ ID NO: 36746 - DNA, 20 bp, synthetic construct
  misc_feature 1..20: note = chemically synthesized
  source 1..20: mol_type = other DNA
ctttatcatctatgtctcta

SEQ ID NO: 36747 - DNA, 20 bp, synthetic construct
  misc_feature 1..20: note = chemically synthesized
  source 1..20: mol_type = other DNA
atctatgtctctacagtcct

SEQ ID NO: 36748 - DNA, 20 bp, synthetic construct
  misc_feature 1..20: note = chemically synthesized
  source 1..20: mol_type = other DNA
gtctctacagtccttggcaa

SEQ ID NO: 36749 - DNA, 20 bp, synthetic construct
  misc_feature 1..20: note = chemically synthesized
  source 1..20: mol_type = other DNA
tctacagtccttggcaatgg

SEQ ID NO: 36750 - DNA, 20 bp, synthetic construct
  misc_feature 1..20: note = chemically synthesized
  source 1..20: mol_type = other DNA
ggcagcctcctcctctttat

SEQ ID NO: 36751 - DNA, 20 bp, synthetic construct
  misc_feature 1..20: note = chemically synthesized
  source 1..20: mol_type = other DNA
cagcctcctcctctttatca

SEQ ID NO: 36752 - DNA, 20 bp, synthetic construct
  misc_feature 1..20: note = chemically synthesized
  source 1..20: mol_type = other DNA
cctcctcctctttatcagag

SEQ ID NO: 36753 - DNA, 20 bp, synthetic construct
  misc_feature 1..20: note = chemically synthesized
  source 1..20: mol_type = other DNA
gagaagactgcactcttcat

SEQ ID NO: 36754 - DNA, 20 bp, synthetic construct
  misc_feature 1..20: note = chemically synthesized
  source 1..20: mol_type = other DNA
gtactactctctgactatac

SEQ ID NO: 36755 - DNA, 20 bp, synthetic construct
  misc_feature 1..20: note = chemically synthesized
  source 1..20: mol_type = other DNA
ctactctctgactatactgg

SEQ ID NO: 36756 - DNA, 20 bp, synthetic construct
  misc_feature 1..20: note = chemically synthesized
  source 1..20: mol_type = other DNA
tctgactatactggcagcca

SEQ ID NO: 36757 - DNA, 20 bp, synthetic construct
  misc_feature 1..20: note = chemically synthesized
  source 1..20: mol_type = other DNA
atactggcagccatagacct

SEQ ID NO: 36758 - DNA, 20 bp, synthetic construct
  misc_feature 1..20: note = chemically synthesized
  source 1..20: mol_type = other DNA
acaacaatgtccactgtcct

SEQ ID NO: 36759 - DNA, 20 bp, synthetic construct
  misc_feature 1..20: note = chemically synthesized
  source 1..20: mol_type = other DNA
ccactgtccttggtgttctc

SEQ ID NO: 36760 - DNA, 20 bp, synthetic construct
  misc_feature 1..20: note = chemically synthesized
  source 1..20: mol_type = other DNA
tgtccttggtgttctctggc

SEQ ID NO: 36761 - DNA, 20 bp, synthetic construct
  misc_feature 1..20: note = chemically synthesized
  source 1..20: mol_type = other DNA
ggtgttctctggctagatca

SEQ ID NO: 36762 - DNA, 20 bp, synthetic construct
  misc_feature 1..20: note = chemically synthesized
  source 1..20: mol_type = other DNA
gtgttctctggctagatcac

SEQ ID NO: 36763 - DNA, 20 bp, synthetic construct
  misc_feature 1..20: note = chemically synthesized
  source 1..20: mol_type = other DNA
tggctagatcacaggaaaat

SEQ ID NO: 36764 - DNA, 20 bp, synthetic construct
  misc_feature 1..20: note = chemically synthesized
  source 1..20: mol_type = other DNA
gatcacaggaaaatgagcca

SEQ ID NO: 36765 - DNA, 20 bp, synthetic construct
  misc_feature 1..20: note = chemically synthesized
  source 1..20: mol_type = other DNA
tcacaggaaaatgagccatg

SEQ ID NO: 36766 - DNA, 20 bp, synthetic construct
  misc_feature 1..20: note = chemically synthesized
  source 1..20: mol_type = other DNA
gccatggagcctgcttcctc

SEQ ID NO: 36767 - DNA, 20 bp, synthetic construct
  misc_feature 1..20: note = chemically synthesized
  source 1..20: mol_type = other DNA
ccatggagcctgcttcctcc

SEQ ID NO: 36768 - DNA, 20 bp, synthetic construct
  misc_feature 1..20: note = chemically synthesized
  source 1..20: mol_type = other DNA
aatccactccctctctatcg

SEQ ID NO: 36769 - DNA, 20 bp, synthetic construct
  misc_feature 1..20: note = chemically synthesized
  source 1..20: mol_type = other DNA
tccactccctctctatcgtg

SEQ ID NO: 36770 - DNA, 20 bp, synthetic construct
  misc_feature 1..20: note = chemically synthesized
  source 1..20: mol_type = other DNA
tccctctctatcgtggagtc

SEQ ID NO: 36771 - DNA, 20 bp, synthetic construct
  misc_feature 1..20: note = chemically synthesized
  source 1..20: mol_type = other DNA
cctctctatcgtggagtcca

SEQ ID NO: 36772 - DNA, 20 bp, synthetic construct
  misc_feature 1..20: note = chemically synthesized
  source 1..20: mol_type = other DNA
gtccagagtgttgctcatca

SEQ ID NO: 36773 - DNA, 20 bp, synthetic construct
  misc_feature 1..20: note = chemically synthesized
  source 1..20: mol_type = other DNA
atggcccatgactgttttat

SEQ ID NO: 36774 - DNA, 20 bp, synthetic construct
  misc_feature 1..20: note = chemically synthesized
  source 1..20: mol_type = other DNA
attggcatccataatcccct

SEQ ID NO: 36775 - DNA, 20 bp, synthetic construct
  misc_feature 1..20: note = chemically synthesized
  source 1..20: mol_type = other DNA
cctccattctcaccaatgct

SEQ ID NO: 36776 - DNA, 20 bp, synthetic construct
  misc_feature 1..20: note = chemically synthesized
  source 1..20: mol_type = other DNA
ctccattctcaccaatgcta

SEQ ID NO: 36777 - DNA, 20 bp, synthetic construct
  misc_feature 1..20: note = chemically synthesized
  source 1..20: mol_type = other DNA
cattctcaccaatgctaagg

SEQ ID NO: 36778 - DNA, 20 bp, synthetic construct
  misc_feature 1..20: note = chemically synthesized
  source 1..20: mol_type = other DNA
tcaccaatgctaaggtggtg

SEQ ID NO: 36779 - DNA, 20 bp, synthetic construct
  misc_feature 1..20: note = chemically synthesized
  source 1..20: mol_type = other DNA
caatgctaaggtggtgaaga

SEQ ID NO: 36780 - DNA, 20 bp, synthetic construct
  misc_feature 1..20: note = chemically synthesized
  source 1..20: mol_type = other DNA
taaggtggtgaagatagatc

SEQ ID NO: 36781 - DNA, 20 bp, synthetic construct
  misc_feature 1..20: note = chemically synthesized
  source 1..20: mol_type = other DNA
aaggtggtgaagatagatct

SEQ ID NO: 36782 - DNA, 20 bp, synthetic construct
  misc_feature 1..20: note = chemically synthesized
  source 1..20: mol_type = other DNA
aggtggtgaagatagatctg

SEQ ID NO: 36783 - DNA, 20 bp, synthetic construct
  misc_feature 1..20: note = chemically synthesized
  source 1..20: mol_type = other DNA
ggtggtgaagatagatctgg

SEQ ID NO: 36784 - DNA, 20 bp, synthetic construct
  misc_feature 1..20: note = chemically synthesized
  source 1..20: mol_type = other DNA
atagatctgggggttcaaat

SEQ ID NO: 36785 - DNA, 20 bp, synthetic construct
  misc_feature 1..20: note = chemically synthesized
  source 1..20: mol_type = other DNA
tagatctgggggttcaaatg

SEQ ID NO: 36786 - DNA, 20 bp, synthetic construct
  misc_feature 1..20: note = chemically synthesized
  source 1..20: mol_type = other DNA
agatctgggggttcaaatga

SEQ ID NO: 36787 - DNA, 20 bp, synthetic construct
  misc_feature 1..20: note = chemically synthesized
  source 1..20: mol_type = other DNA
gatctgggggttcaaatgag

SEQ ID NO: 36788 - DNA, 20 bp, synthetic construct
  misc_feature 1..20: note = chemically synthesized
  source 1..20: mol_type = other DNA
cccataatcatcaccctctc

SEQ ID NO: 36789 - DNA, 20 bp, synthetic construct
  misc_feature 1..20: note = chemically synthesized
  source 1..20: mol_type = other DNA
cccatgctttctgcctgcac

SEQ ID NO: 36790 - DNA, 20 bp, synthetic construct
  misc_feature 1..20: note = chemically synthesized
  source 1..20: mol_type = other DNA
tgcaccagatgtgatcaaac

SEQ ID NO: 36791 - DNA, 20 bp, synthetic construct
  misc_feature 1..20: note = chemically synthesized
  source 1..20: mol_type = other DNA
tgtgatcaaactggcctgtg

SEQ ID NO: 36792 - DNA, 20 bp, synthetic construct
  misc_feature 1..20: note = chemically synthesized
  source 1..20: mol_type = other DNA
tgtgcagacatcacctttaa

SEQ ID NO: 36793 - DNA, 20 bp, synthetic construct
  misc_feature 1..20: note = chemically synthesized
  source 1..20: mol_type = other DNA
ctttaatagactttatccta

SEQ ID NO: 36794 - DNA, 20 bp, synthetic construct
  misc_feature 1..20: note = chemically synthesized
  source 1..20: mol_type = other DNA
tagactttatcctatagtcc

SEQ ID NO: 36795 - DNA, 20 bp, synthetic construct
  misc_feature 1..20: note = chemically synthesized
  source 1..20: mol_type = other DNA
atagtcctggtctcatcaac

SEQ ID NO: 36796 - DNA, 20 bp, synthetic construct
  misc_feature 1..20: note = chemically synthesized
  source 1..20: mol_type = other DNA
ggtctcatcaactggtttct

SEQ ID NO: 36797 - DNA, 20 bp, synthetic construct
  misc_feature 1..20: note = chemically synthesized
  source 1..20: mol_type = other DNA
tctcttacattctgatcctt

SEQ ID NO: 36798 - DNA, 20 bp, synthetic construct
  misc_feature 1..20: note = chemically synthesized
  source 1..20: mol_type = other DNA
cttacattctgatccttaag

SEQ ID NO: 36799 - DNA, 20 bp, synthetic construct
  misc_feature 1..20: note = chemically synthesized
  source 1..20: mol_type = other DNA
ttacattctgatccttaaga

SEQ ID NO: 36800 - DNA, 20 bp, synthetic construct
  misc_feature 1..20: note = chemically synthesized
  source 1..20: mol_type = other DNA
tctgatccttaagaaggtca

SEQ ID NO: 36801 - DNA, 20 bp, synthetic construct
  misc_feature 1..20: note = chemically synthesized
  source 1..20: mol_type = other DNA
ctgatccttaagaaggtcat

SEQ ID NO: 36802 - DNA, 20 bp, synthetic construct
  misc_feature 1..20: note = chemically synthesized
  source 1..20: mol_type = other DNA
gaaggtcatgggaattgcct

SEQ ID NO: 36803 - DNA, 20 bp, synthetic construct
  misc_feature 1..20: note = chemically synthesized
  source 1..20: mol_type = other DNA
tcatgggaattgcctcagac

SEQ ID NO: 36804 - DNA, 20 bp, synthetic construct
  misc_feature 1..20: note = chemically synthesized
  source 1..20: mol_type = other DNA
catgggaattgcctcagaca

SEQ ID NO: 36805 - DNA, 20 bp, synthetic construct
  misc_feature 1..20: note = chemically synthesized
  source 1..20: mol_type = other DNA
tgggaattgcctcagacaag

SEQ ID NO: 36806 - DNA, 20 bp, synthetic construct
  misc_feature 1..20: note = chemically synthesized
  source 1..20: mol_type = other DNA
gaattgcctcagacaaggag

SEQ ID NO: 36807 - DNA, 20 bp, synthetic construct
  misc_feature 1..20: note = chemically synthesized
  source 1..20: mol_type = other DNA
cctcagacaaggagcagact

SEQ ID NO: 36808 - DNA, 20 bp, synthetic construct
  misc_feature 1..20: note = chemically synthesized
  source 1..20: mol_type = other DNA
ctcagacaaggagcagacta

SEQ ID NO: 36809 - DNA, 20 bp, synthetic construct
  misc_feature 1..20: note = chemically synthesized
  source 1..20: mol_type = other DNA
aatacttgtatttctcacat

SEQ ID NO: 36810 - DNA, 20 bp, synthetic construct
  misc_feature 1..20: note = chemically synthesized
  source 1..20: mol_type = other DNA
ttctcacattagctgtgttc

SEQ ID NO: 36811 - DNA, 20 bp, synthetic construct
  misc_feature 1..20: note = chemically synthesized
  source 1..20: mol_type = other DNA
ggtttttaatgtcacttgat

SEQ ID NO: 36812 - DNA, 20 bp, synthetic construct
  misc_feature 1..20: note = chemically synthesized
  source 1..20: mol_type = other DNA
gtttttaatgtcacttgatt

SEQ ID NO: 36813 - DNA, 20 bp, synthetic construct
  misc_feature 1..20: note = chemically synthesized
  source 1..20: mol_type = other DNA
tgattgggctaccacccttt

SEQ ID NO: 36814 - DNA, 20 bp, synthetic construct
  misc_feature 1..20: note = chemically synthesized
  source 1..20: mol_type = other DNA
tgcttcatcaaaaaaatgtt

SEQ ID NO: 36815 - DNA, 20 bp, synthetic construct
  misc_feature 1..20: note = chemically synthesized
  source 1..20: mol_type = other DNA
caatgcaaatcaaaaccaca

SEQ ID NO: 36816 - DNA, 20 bp, synthetic construct
  misc_feature 1..20: note = chemically synthesized
  source 1..20: mol_type = other DNA
atgcaaatcaaaaccacaaa

SEQ ID NO: 36817 - DNA, 20 bp, synthetic construct
  misc_feature 1..20: note = chemically synthesized
  source 1..20: mol_type = other DNA
aaagagataccatctcacac

SEQ ID NO: 36818 - DNA, 20 bp, synthetic construct
  misc_feature 1..20: note = chemically synthesized
  source 1..20: mol_type = other DNA
agataccatctcacaccagt

SEQ ID NO: 36819 - DNA, 20 bp, synthetic construct
  misc_feature 1..20: note = chemically synthesized
  source 1..20: mol_type = other DNA
ccatctcacaccagttagaa

SEQ ID NO: 36820 - DNA, 20 bp, synthetic construct
  misc_feature 1..20: note = chemically synthesized
  source 1..20: mol_type = other DNA
ttagaatggcaatcattaaa

SEQ ID NO: 36821 - DNA, 20 bp, synthetic construct
  misc_feature 1..20: note = chemically synthesized
  source 1..20: mol_type = other DNA
aatggcaatcattaaaaagt

SEQ ID NO: 36822 - DNA, 20 bp, synthetic construct
  misc_feature 1..20: note = chemically synthesized
  source 1..20: mol_type = other DNA
atggcaatcattaaaaagtc

SEQ ID NO: 36823 - DNA, 20 bp, synthetic construct
  misc_feature 1..20: note = chemically synthesized
  source 1..20: mol_type = other DNA
tggcaatcattaaaaagtca

SEQ ID NO: 36824 - DNA, 20 bp, synthetic construct
  misc_feature 1..20: note = chemically synthesized
  source 1..20: mol_type = other DNA
attaaaaagtcagggaacaa

SEQ ID NO: 36825 - DNA, 20 bp, synthetic construct
  misc_feature 1..20: note = chemically synthesized
  source 1..20: mol_type = other DNA
ttaaaaagtcagggaacaac

SEQ ID NO: 36826 - DNA, 20 bp, synthetic construct
  misc_feature 1..20: note = chemically synthesized
  source 1..20: mol_type = other DNA
agtcagggaacaacaggtgc

SEQ ID NO: 36827 - DNA, 20 bp, synthetic construct
  misc_feature 1..20: note = chemically synthesized
  source 1..20: mol_type = other DNA
tcagggaacaacaggtgctg

SEQ ID NO: 36828 - DNA, 20 bp, synthetic construct
  misc_feature 1..20: note = chemically synthesized
  source 1..20: mol_type = other DNA
agggaacaacaggtgctgga

SEQ ID NO: 36829 - DNA, 20 bp, synthetic construct
  misc_feature 1..20: note = chemically synthesized
  source 1..20: mol_type = other DNA
gggaacaacaggtgctggag

SEQ ID NO: 36830 - DNA, 20 bp, synthetic construct
  misc_feature 1..20: note = chemically synthesized
  source 1..20: mol_type = other DNA
aacaggtgctggagaggatg

SEQ ID NO: 36831 - DNA, 20 bp, synthetic construct
  misc_feature 1..20: note = chemically synthesized
  source 1..20: mol_type = other DNA
caggtgctggagaggatgtg

SEQ ID NO: 36832 - DNA, 20 bp, synthetic construct
  misc_feature 1..20: note = chemically synthesized
  source 1..20: mol_type = other DNA
ctggagaggatgtggagaaa

SEQ ID NO: 36833 - DNA, 20 bp, synthetic construct
  misc_feature 1..20: note = chemically synthesized
  source 1..20: mol_type = other DNA
tggagaggatgtggagaaat

SEQ ID NO: 36834 - DNA, 20 bp, synthetic construct
  misc_feature 1..20: note = chemically synthesized
  source 1..20: mol_type = other DNA
taggaacacttttacactct

SEQ ID NO: 36835 - DNA, 20 bp, synthetic construct
  misc_feature 1..20: note = chemically synthesized
  source 1..20: mol_type = other DNA
gaacacttttacactcttgg

SEQ ID NO: 36836 - DNA, 20 bp, synthetic construct
  misc_feature 1..20: note = chemically synthesized
  source 1..20: mol_type = other DNA
aacacttttacactcttggt

SEQ ID NO: 36837 - DNA, 20 bp, synthetic construct
  misc_feature 1..20: note = chemically synthesized
  source 1..20: mol_type = other DNA
ctcttggtgggactgtaaac

SEQ ID NO: 36838 - DNA, 20 bp, synthetic construct
  misc_feature 1..20: note = chemically synthesized
  source 1..20: mol_type = other DNA
gtaaactagttcaaccattg

SEQ ID NO: 36839 - DNA, 20 bp, synthetic construct
  misc_feature 1..20: note = chemically synthesized
  source 1..20: mol_type = other DNA
aactagttcaaccattgtgg

SEQ ID NO: 36840 - DNA, 20 bp, synthetic construct
  misc_feature 1..20: note = chemically synthesized
  source 1..20: mol_type = other DNA
agttcaaccattgtggaagt

SEQ ID NO: 36841 - DNA, 20 bp, synthetic construct
  misc_feature 1..20: note = chemically synthesized
  source 1..20: mol_type = other DNA
aaccattgtggaagtcagtg

SEQ ID NO: 36842 - DNA, 20 bp, synthetic construct
  misc_feature 1..20: note = chemically synthesized
  source 1..20: mol_type = other DNA
aagtcagtgtggcgattcct

SEQ ID NO: 36843 - DNA, 20 bp, synthetic construct
  misc_feature 1..20: note = chemically synthesized
  source 1..20: mol_type = other DNA
agtcagtgtggcgattcctc

SEQ ID NO: 36844 - DNA, 20 bp, synthetic construct
  misc_feature 1..20: note = chemically synthesized
  source 1..20: mol_type = other DNA
gtcagtgtggcgattcctca

SEQ ID NO: 36845 - DNA, 20 bp, synthetic construct
  misc_feature 1..20: note = chemically synthesized
  source 1..20: mol_type = other DNA
gtggcgattcctcagggatc

SEQ ID NO: 36846 - DNA, 20 bp, synthetic construct
  misc_feature 1..20: note = chemically synthesized
  source 1..20: mol_type = other DNA
attcctcagggatctagaac

SEQ ID NO: 36847 - DNA, 20 bp, synthetic construct
  misc_feature 1..20: note = chemically synthesized
  source 1..20: mol_type = other DNA
actagaaataccatttgacc

SEQ ID NO: 36848 - DNA, 20 bp, synthetic construct
  misc_feature 1..20: note = chemically synthesized
  source 1..20: mol_type = other DNA
tgacccagccatcccattac

SEQ ID NO: 36849 - DNA, 20 bp, synthetic construct
  misc_feature 1..20: note = chemically synthesized
  source 1..20: mol_type = other DNA
gacccagccatcccattact

SEQ ID NO: 36850 - DNA, 20 bp, synthetic construct
  misc_feature 1..20: note = chemically synthesized
  source 1..20: mol_type = other DNA
attactgggtatatacccaa

SEQ ID NO: 36851 - DNA, 20 bp, synthetic construct
  misc_feature 1..20: note = chemically synthesized
  source 1..20: mol_type = other DNA
ttataaatcatgctgctata

SEQ ID NO: 36852 - DNA, 20 bp, synthetic construct
  misc_feature 1..20: note = chemically synthesized
  source 1..20: mol_type = other DNA
atgcacacgtatgtttactg

SEQ ID NO: 36853 - DNA, 20 bp, synthetic construct
  misc_feature 1..20: note = chemically synthesized
  source 1..20: mol_type = other DNA
tactgtggcactattcacaa

SEQ ID NO: 36854 - DNA, 20 bp, synthetic construct
  misc_feature 1..20: note = chemically synthesized
  source 1..20: mol_type = other DNA
tggcactattcacaatagca

SEQ ID NO: 36855 - DNA, 20 bp, synthetic construct
  misc_feature 1..20: note = chemically synthesized
  source 1..20: mol_type = other DNA
tattcacaatagcaaagact

SEQ ID NO: 36856 - DNA, 20 bp, synthetic construct
  misc_feature 1..20: note = chemically synthesized
  source 1..20: mol_type = other DNA
acccaaatgtccaacaatga

SEQ ID NO: 36857 - DNA, 20 bp, synthetic construct
  misc_feature 1..20: note = chemically synthesized
  source 1..20: mol_type = other DNA
caacaatgatagactgaatt

SEQ ID NO: 36858 - DNA, 20 bp, synthetic construct
  misc_feature 1..20: note = chemically synthesized
  source 1..20: mol_type = other DNA
tagactgaattaagaaaatg

SEQ ID NO: 36859 - DNA, 20 bp, synthetic construct
  misc_feature 1..20: note = chemically synthesized
  source 1..20: mol_type = other DNA
aatgtggcacatatacacca

SEQ ID NO: 36860 - DNA, 20 bp, synthetic construct
  misc_feature 1..20: note = chemically synthesized
  source 1..20: mol_type = other DNA
atacaccatggaatactatg

SEQ ID NO: 36861 - DNA, 20 bp, synthetic construct
  misc_feature 1..20: note = chemically synthesized
  source 1..20: mol_type = other DNA
ctatgcagccataaaaaatg

SEQ ID NO: 36862 - DNA, 20 bp, synthetic construct
  misc_feature 1..20: note = chemically synthesized
  source 1..20: mol_type = other DNA
atgcagccataaaaaatgaa

SEQ ID NO: 36863 - DNA, 20 bp, synthetic construct
  misc_feature 1..20: note = chemically synthesized
  source 1..20: mol_type = other DNA
tgaagagttcatgtcatttg

SEQ ID NO: 36864 - DNA, 20 bp, synthetic construct
  misc_feature 1..20: note = chemically synthesized
  source 1..20: mol_type = other DNA
gaagagttcatgtcatttgt

SEQ ID NO: 36865 - DNA, 20 bp, synthetic construct
  misc_feature 1..20: note = chemically synthesized
  source 1..20: mol_type = other DNA
aagagttcatgtcatttgta

SEQ ID NO: 36866 - DNA, 20 bp, synthetic construct
  misc_feature 1..20: note = chemically synthesized
  source 1..20: mol_type = other DNA
tcatgtcatttgtagggaca

SEQ ID NO: 36867 - DNA, 20 bp, synthetic construct
  misc_feature 1..20: note = chemically synthesized
  source 1..20: mol_type = other DNA
tgtagggacatggatgaaac

SEQ ID NO: 36868 - DNA, 20 bp, synthetic construct
  misc_feature 1..20: note = chemically synthesized
  source 1..20: mol_type = other DNA
aaactggaaaccatcattct

SEQ ID NO: 36869 - DNA, 20 bp, synthetic construct
  misc_feature 1..20: note = chemically synthesized
  source 1..20: mol_type = other DNA
cattctcagcaaactatcgc

SEQ ID NO: 36870 - DNA, 20 bp, synthetic construct
  misc_feature 1..20: note = chemically synthesized
  source 1..20: mol_type = other DNA
attctcagcaaactatcgca

SEQ ID NO: 36871 - DNA, 20 bp, synthetic construct
  misc_feature 1..20: note = chemically synthesized
  source 1..20: mol_type = other DNA
tatcgcaaggacaaaaaacc

SEQ ID NO: 36872 - DNA, 20 bp, synthetic construct
  misc_feature 1..20: note = chemically synthesized
  source 1..20: mol_type = other DNA
gcactgcatgttctcactca

SEQ ID NO: 36873 - DNA, 20 bp, synthetic construct
  misc_feature 1..20: note = chemically synthesized
  source 1..20: mol_type = other DNA
cactgcatgttctcactcat

SEQ ID NO: 36874 - DNA, 20 bp, synthetic construct
  misc_feature 1..20: note = chemically synthesized
  source 1..20: mol_type = other DNA
tgcatgttctcactcatagg

SEQ ID NO: 36875 - DNA, 20 bp, synthetic construct
  misc_feature 1..20: note = chemically synthesized
  source 1..20: mol_type = other DNA
gcatgttctcactcataggt

SEQ ID NO: 36876 - DNA, 20 bp, synthetic construct
  misc_feature 1..20: note = chemically synthesized
  source 1..20: mol_type = other DNA
ataggtgggaattgaacaat

SEQ ID NO: 36877 - DNA, 20 bp, synthetic construct
  misc_feature 1..20: note = chemically synthesized
  source 1..20: mol_type = other DNA
aattgaacaatgagaacaca

SEQ ID NO: 36878 - DNA, 20 bp, synthetic construct
  misc_feature 1..20: note = chemically synthesized
  source 1..20: mol_type = other DNA
acaatgagaacacatggaca

SEQ ID NO: 36879 - DNA, 20 bp, synthetic construct
  misc_feature 1..20: note = chemically synthesized
  source 1..20: mol_type = other DNA
caatgagaacacatggacac

SEQ ID NO: 36880 - DNA, 20 bp, synthetic construct
  misc_feature 1..20: note = chemically synthesized
  source 1..20: mol_type = other DNA
tgagaacacatggacacagg

SEQ ID NO: 36881 - DNA, 20 bp, synthetic construct
  misc_feature 1..20: note = chemically synthesized
  source 1..20: mol_type = other DNA
gagaacacatggacacagga

SEQ ID NO: 36882 - DNA, 20 bp, synthetic construct
  misc_feature 1..20: note = chemically synthesized
  source 1..20: mol_type = other DNA
agaacacatggacacaggaa

SEQ ID NO: 36883 - DNA, 20 bp, synthetic construct
  misc_feature 1..20: note = chemically synthesized
  source 1..20: mol_type = other DNA
gaacacatggacacaggaag

SEQ ID NO: 36884 - DNA, 20 bp, synthetic construct
  misc_feature 1..20: note = chemically synthesized
  source 1..20: mol_type = other DNA
ggaaggggaacaacacactc

SEQ ID NO: 36885 - DNA, 20 bp, synthetic construct
  misc_feature 1..20: note = chemically synthesized
  source 1..20: mol_type = other DNA
gaaggggaacaacacactcc

SEQ ID NO: 36886 - DNA, 20 bp, synthetic construct
  misc_feature 1..20: note = chemically synthesized
  source 1..20: mol_type = other DNA
aaggggaacaacacactccg

SEQ ID NO: 36887 - DNA, 20 bp, synthetic construct
  misc_feature 1..20: note = chemically synthesized
  source 1..20: mol_type = other DNA
cacactccggggactgttgt

SEQ ID NO: 36888 - DNA, 20 bp, synthetic construct
  misc_feature 1..20: note = chemically synthesized
  source 1..20: mol_type = other DNA
acactccggggactgttgtg

SEQ ID NO: 36889 - DNA, 20 bp, synthetic construct
  misc_feature 1..20: note = chemically synthesized
  source 1..20: mol_type = other DNA
ctccggggactgttgtgagg

SEQ ID NO: 36890 - DNA, 20 bp, synthetic construct
  misc_feature 1..20: note = chemically synthesized
  source 1..20: mol_type = other DNA
tccggggactgttgtgaggt

SEQ ID NO: 36891 - DNA, 20 bp, synthetic construct
  misc_feature 1..20: note = chemically synthesized
  source 1..20: mol_type = other DNA
ccggggactgttgtgaggtg

SEQ ID NO: 36892 - DNA, 20 bp, synthetic construct
  misc_feature 1..20: note = chemically synthesized
  source 1..20: mol_type = other DNA
cggggactgttgtgaggtgg

SEQ ID NO: 36893 - DNA, 20 bp, synthetic construct
  misc_feature 1..20: note = chemically synthesized
  source 1..20: mol_type = other DNA
ggggactgttgtgaggtggg

SEQ ID NO: 36894 - DNA, 20 bp, synthetic construct
  misc_feature 1..20: note = chemically synthesized
  source 1..20: mol_type = other DNA
gactgttgtgaggtgggggg

SEQ ID NO: 36895 - DNA, 20 bp, synthetic construct
  misc_feature 1..20: note = chemically synthesized
  source 1..20: mol_type = other DNA
actgttgtgaggtgggggga

SEQ ID NO: 36896 - DNA, 20 bp, synthetic construct
  misc_feature 1..20: note = chemically synthesized
  source 1..20: mol_type = other DNA
ctgttgtgaggtggggggaa

SEQ ID NO: 36897 - DNA, 20 bp, synthetic construct
  misc_feature 1..20: note = chemically synthesized
  source 1..20: mol_type = other DNA
tgttgtgaggtggggggaag

SEQ ID NO: 36898 - DNA, 20 bp, synthetic construct
  misc_feature 1..20: note = chemically synthesized
  source 1..20: mol_type = other DNA
gttgtgaggtggggggaagg

SEQ ID NO: 36899 - DNA, 20 bp, synthetic construct
  misc_feature 1..20: note = chemically synthesized
  source 1..20: mol_type = other DNA
tgtgaggtggggggaagggg

SEQ ID NO: 36900 - DNA, 20 bp, synthetic construct
  misc_feature 1..20: note = chemically synthesized
  source 1..20: mol_type = other DNA
tgaggtggggggaaggggga

SEQ ID NO: 36901 - DNA, 20 bp, synthetic construct
  misc_feature 1..20: note = chemically synthesized
  source 1..20: mol_type = other DNA
aggtggggggaagggggaga

SEQ ID NO: 36902 - DNA, 20 bp, synthetic construct
  misc_feature 1..20: note = chemically synthesized
  source 1..20: mol_type = other DNA
gtggggggaagggggagaga

SEQ ID NO: 36903 - DNA, 20 bp, synthetic construct
  misc_feature 1..20: note = chemically synthesized
  source 1..20: mol_type = other DNA
ggaagggggagagagagcat

SEQ ID NO: 36904 - DNA, 20 bp, synthetic construct
  misc_feature 1..20: note = chemically synthesized
  source 1..20: mol_type = other DNA
gaagggggagagagagcatt

SEQ ID NO: 36905 - DNA, 20 bp, synthetic construct
  misc_feature 1..20: note = chemically synthesized
  source 1..20: mol_type = other DNA
agggggagagagagcattag

SEQ ID NO: 36906 - DNA, 20 bp, synthetic construct
  misc_feature 1..20: note = chemically synthesized
  source 1..20: mol_type = other DNA
taggagatatacctaatgct

SEQ ID NO: 36907 - DNA, 20 bp, synthetic construct
  misc_feature 1..20: note = chemically synthesized
  source 1..20: mol_type = other DNA
tatacctaatgctaagtgac

SEQ ID NO: 36908 - DNA, 20 bp, synthetic construct
  misc_feature 1..20: note = chemically synthesized
  source 1..20: mol_type = other DNA
aatgctaagtgacaagttaa

SEQ ID NO: 36909 - DNA, 20 bp, synthetic construct
  misc_feature 1..20: note = chemically synthesized
  source 1..20: mol_type = other DNA
atgctaagtgacaagttaat

SEQ ID NO: 36910 - DNA, 20 bp, synthetic construct
  misc_feature 1..20: note = chemically synthesized
  source 1..20: mol_type = other DNA
aagtgacaagttaatgggtg

SEQ ID NO: 36911 - DNA, 20 bp, synthetic construct
  misc_feature 1..20: note = chemically synthesized
  source 1..20: mol_type = other DNA
atgggtgcagcacaccaaca

SEQ ID NO: 36912 - DNA, 20 bp, synthetic construct
  misc_feature 1..20: note = chemically synthesized
  source 1..20: mol_type = other DNA
cacatgtaccctaaaactta

SEQ ID NO: 36913 - DNA, 20 bp, synthetic construct
  misc_feature 1..20: note = chemically synthesized
  source 1..20: mol_type = other DNA
ataataaaaatacattattt

SEQ ID NO: 36914 - DNA, 20 bp, synthetic construct
  misc_feature 1..20: note = chemically synthesized
  source 1..20: mol_type = other DNA
tttggattaacaaaaaccaa

SEQ ID NO: 36915 - DNA, 20 bp, synthetic construct
  misc_feature 1..20: note = chemically synthesized
  source 1..20: mol_type = other DNA
ttggattaacaaaaaccaac

SEQ ID NO: 36916 - DNA, 20 bp, synthetic construct
  misc_feature 1..20: note = chemically synthesized
  source 1..20: mol_type = other DNA
caaaaaccaacaggctacca

SEQ ID NO: 36917 - DNA, 20 bp, synthetic construct
  misc_feature 1..20: note = chemically synthesized
  source 1..20: mol_type = other DNA
tctcacatgttttgttattc

SEQ ID NO: 36918 - DNA, 20 bp, synthetic construct
  misc_feature 1..20: note = chemically synthesized
  source 1..20: mol_type = other DNA
ttttgttattctggctctgc

SEQ ID NO: 36919 - DNA, 20 bp, synthetic construct
  misc_feature 1..20: note = chemically synthesized
  source 1..20: mol_type = other DNA
tgctagaattctcttgattt

SEQ ID NO: 36920 - DNA, 20 bp, synthetic construct
  misc_feature 1..20: note = chemically synthesized
  source 1..20: mol_type = other DNA
tcatattttctctttcccca

SEQ ID NO: 36921 - DNA, 20 bp, synthetic construct
  misc_feature 1..20: note = chemically synthesized
  source 1..20: mol_type = other DNA
cttccttgtttttcaattat

SEQ ID NO: 36922 - DNA, 20 bp, synthetic construct
  misc_feature 1..20: note = chemically synthesized
  source 1..20: mol_type = other DNA
gcttaaataatatttctttt

SEQ ID NO: 36923 - DNA, 20 bp, synthetic construct
  misc_feature 1..20: note = chemically synthesized
  source 1..20: mol_type = other DNA
agaaattttcccctgcccca

SEQ ID NO: 36924 - DNA, 20 bp, synthetic construct
  misc_feature 1..20: note = chemically synthesized
  source 1..20: mol_type = other DNA
tgccccaaagatgctttctg

SEQ ID NO: 36925 - DNA, 20 bp, synthetic construct
  misc_feature 1..20: note = chemically synthesized
  source 1..20: mol_type = other DNA
gccccaaagatgctttctgt

SEQ ID NO: 36926 - DNA, 20 bp, synthetic construct
  misc_feature 1..20: note = chemically synthesized
  source 1..20: mol_type = other DNA
tgctttctgtgggctccctt

SEQ ID NO: 36927 - DNA, 20 bp, synthetic construct
  misc_feature 1..20: note = chemically synthesized
  source 1..20: mol_type = other DNA
ttagcatgctaccatctatg

SEQ ID NO: 36928 - DNA, 20 bp, synthetic construct
  misc_feature 1..20: note = chemically synthesized
  source 1..20: mol_type = other DNA
taccatctatgcagtaatga

SEQ ID NO: 36929 - DNA, 20 bp, synthetic construct
  misc_feature 1..20: note = chemically synthesized
  source 1..20: mol_type = other DNA
gatagtgctatgaaaatttg

SEQ ID NO: 36930 - DNA, 20 bp, synthetic construct
  misc_feature 1..20: note = chemically synthesized
  source 1..20: mol_type = other DNA
ctatttacattctgtgaata

SEQ ID NO: 36931 - DNA, 20 bp, synthetic construct
  misc_feature 1..20: note = chemically synthesized
  source 1..20: mol_type = other DNA
tatgctcctcattgtgtatc

SEQ ID NO: 36932 - DNA, 20 bp, synthetic construct
  misc_feature 1..20: note = chemically synthesized
  source 1..20: mol_type = other DNA
atctggcaaaaaaaaaaaaa

SEQ ID NO: 36933 - DNA, 20 bp, synthetic construct
  misc_feature 1..20: note = chemically synthesized
  source 1..20: mol_type = other DNA
tctggcaaaaaaaaaaaaaa

SEQ ID NO: 36934 - DNA, 20 bp, synthetic construct
  misc_feature 1..20: note = chemically synthesized
  source 1..20: mol_type = other DNA
ctggcaaaaaaaaaaaaaaa

SEQ ID NO: 36935 - DNA, 20 bp, synthetic construct
  misc_feature 1..20: note = chemically synthesized
  source 1..20: mol_type = other DNA
aaaaaaaaaaaaagggcaat

SEQ ID NO: 36936 - DNA, 20 bp, synthetic construct
  misc_feature 1..20: note = chemically synthesized
  source 1..20: mol_type = other DNA
aaaaaagggcaatgagctac

SEQ ID NO: 36937 - DNA, 20 bp, synthetic construct
  misc_feature 1..20: note = chemically synthesized
  source 1..20: mol_type = other DNA
gctacaagtaatataatttt

SEQ ID NO: 36938 - DNA, 20 bp, synthetic construct
  misc_feature 1..20: note = chemically synthesized
  source 1..20: mol_type = other DNA
taatataattttaagataaa

SEQ ID NO: 36939 - DNA, 20 bp, synthetic construct
  misc_feature 1..20: note = chemically synthesized
  source 1..20: mol_type = other DNA
taagataaaaagctgaatgt

SEQ ID NO: 36940 - DNA, 20 bp, synthetic construct
  misc_feature 1..20: note = chemically synthesized
  source 1..20: mol_type = other DNA
ataaaaagctgaatgtcagc

SEQ ID NO: 36941 - DNA, 20 bp, synthetic construct
  misc_feature 1..20: note = chemically synthesized
  source 1..20: mol_type = other DNA
taaaaagctgaatgtcagcc

SEQ ID NO: 36942 - DNA, 20 bp, synthetic construct
  misc_feature 1..20: note = chemically synthesized
  source 1..20: mol_type = other DNA
agctgaatgtcagccgggcg

SEQ ID NO: 36943 - DNA, 20 bp, synthetic construct
  misc_feature 1..20: note = chemically synthesized
  source 1..20: mol_type = other DNA
gtgactcacacctgcaatcc

SEQ ID NO: 36944 - DNA, 20 bp, synthetic construct
  misc_feature 1..20: note = chemically synthesized
  source 1..20: mol_type = other DNA
cacctgcaatcccagcactt

SEQ ID NO: 36945 - DNA, 20 bp, synthetic construct
  misc_feature 1..20: note = chemically synthesized
  source 1..20: mol_type = other DNA
acctgcaatcccagcacttt

SEQ ID NO: 36946 - DNA, 20 bp, synthetic construct
  misc_feature 1..20: note = chemically synthesized
  source 1..20: mol_type = other DNA
ctgcaatcccagcactttgg

SEQ ID NO: 36947 - DNA, 20 bp, synthetic construct
  misc_feature 1..20: note = chemically synthesized
  source 1..20: mol_type = other DNA
tgcaatcccagcactttggg

SEQ ID NO: 36948 - DNA, 20 bp, synthetic construct
  misc_feature 1..20: note = chemically synthesized
  source 1..20: mol_type = other DNA
tcccagcactttgggaggcc

SEQ ID NO: 36949 - DNA, 20 bp, synthetic construct
  misc_feature 1..20: note = chemically synthesized
  source 1..20: mol_type = other DNA
cccagcactttgggaggcca

SEQ ID NO: 36950 - DNA, 20 bp, synthetic construct
  misc_feature 1..20: note = chemically synthesized
  source 1..20: mol_type = other DNA
cagcactttgggaggccaag

SEQ ID NO: 36951 - DNA, 20 bp, synthetic construct
  misc_feature 1..20: note = chemically synthesized
  source 1..20: mol_type = other DNA
agcactttgggaggccaagg

SEQ ID NO: 36952 - DNA, 20 bp, synthetic construct
  misc_feature 1..20: note = chemically synthesized
  source 1..20: mol_type = other DNA
gcactttgggaggccaagga

SEQ ID NO: 36953 - DNA, 20 bp, synthetic construct
  misc_feature 1..20: note = chemically synthesized
  source 1..20: mol_type = other DNA
ctttgggaggccaaggaggg

SEQ ID NO: 36954 - DNA, 20 bp, synthetic construct
  misc_feature 1..20: note = chemically synthesized
  source 1..20: mol_type = other DNA
ggccaaggagggtggatcac

SEQ ID NO: 36955 - DNA, 20 bp, synthetic construct
  misc_feature 1..20: note = chemically synthesized
  source 1..20: mol_type = other DNA
gccaaggagggtggatcacg

SEQ ID NO: 36956 - DNA, 20 bp, synthetic construct
  misc_feature 1..20: note = chemically synthesized
  source 1..20: mol_type = other DNA
ggagggtggatcacgaggtc

SEQ ID NO: 36957 - DNA, 20 bp, synthetic construct
  misc_feature 1..20: note = chemically synthesized
  source 1..20: mol_type = other DNA
agggtggatcacgaggtcaa

SEQ ID NO: 36958 - DNA, 20 bp, synthetic construct
  misc_feature 1..20: note = chemically synthesized
  source 1..20: mol_type = other DNA
gatcacgaggtcaagagatc

SEQ ID NO: 36959 - DNA, 20 bp, synthetic construct
  misc_feature 1..20: note = chemically synthesized
  source 1..20: mol_type = other DNA
tcaagagatcgagaccatcc

SEQ ID NO: 36960 - DNA, 20 bp, synthetic construct
  misc_feature 1..20: note = chemically synthesized
  source 1..20: mol_type = other DNA
cgagaccatcctggccaata

SEQ ID NO: 36961 - DNA, 20 bp, synthetic construct
  misc_feature 1..20: note = chemically synthesized
  source 1..20: mol_type = other DNA
tctactaaaaatacaaaaat

SEQ ID NO: 36962 - DNA, 20 bp, synthetic construct
  misc_feature 1..20: note = chemically synthesized
  source 1..20: mol_type = other DNA
ctaaaaatacaaaaattagc

SEQ ID NO: 36963 - DNA, 20 bp, synthetic construct
  misc_feature 1..20: note = chemically synthesized
  source 1..20: mol_type = other DNA
taaaaatacaaaaattagct

SEQ ID NO: 36964 - DNA, 20 bp, synthetic construct
  misc_feature 1..20: note = chemically synthesized
  source 1..20: mol_type = other DNA
atacaaaaattagctgggtg

SEQ ID NO: 36965 - DNA, 20 bp, synthetic construct
  misc_feature 1..20: note = chemically synthesized
  source 1..20: mol_type = other DNA
ggtgtggtgacgcgctactg

SEQ ID NO: 36966 - DNA, 20 bp, synthetic construct
  misc_feature 1..20: note = chemically synthesized
  source 1..20: mol_type = other DNA
gtgacgcgctactgtagtcc

SEQ ID NO: 36967 - DNA, 20 bp, synthetic construct
  misc_feature 1..20: note = chemically synthesized
  source 1..20: mol_type = other DNA
ctactgtagtcccagcttct

SEQ ID NO: 36968 - DNA, 20 bp, synthetic construct
  misc_feature 1..20: note = chemically synthesized
  source 1..20: mol_type = other DNA
tactgtagtcccagcttctc

SEQ ID NO: 36969 - DNA, 20 bp, synthetic construct
  misc_feature 1..20: note = chemically synthesized
  source 1..20: mol_type = other DNA
ctgtagtcccagcttctcag

SEQ ID NO: 36970 - DNA, 20 bp, synthetic construct
  misc_feature 1..20: note = chemically synthesized
  source 1..20: mol_type = other DNA
tgtagtcccagcttctcagg

SEQ ID NO: 36971 - DNA, 20 bp, synthetic construct
  misc_feature 1..20: note = chemically synthesized
  source 1..20: mol_type = other DNA
cccagcttctcaggaggctg

SEQ ID NO: 36972 - DNA, 20 bp, synthetic construct
  misc_feature 1..20: note = chemically synthesized
  source 1..20: mol_type = other DNA
agcttctcaggaggctgtgg

SEQ ID NO: 36973 - DNA, 20 bp, synthetic construct
  misc_feature 1..20: note = chemically synthesized
  source 1..20: mol_type = other DNA
gcttctcaggaggctgtggc

SEQ ID NO: 36974 - DNA, 20 bp, synthetic construct
  misc_feature 1..20: note = chemically synthesized
  source 1..20: mol_type = other DNA
ttctcaggaggctgtggcag

SEQ ID NO: 36975 - DNA, 20 bp, synthetic construct
  misc_feature 1..20: note = chemically synthesized
  source 1..20: mol_type = other DNA
gcaggagaatcacttgaacc

SEQ ID NO: 36976 - DNA, 20 bp, synthetic construct
  misc_feature 1..20: note = chemically synthesized
  source 1..20: mol_type = other DNA
caggagaatcacttgaacct

SEQ ID NO: 36977 - DNA, 20 bp, synthetic construct
  misc_feature 1..20: note = chemically synthesized
  source 1..20: mol_type = other DNA
ggagaatcacttgaacctgg

SEQ ID NO: 36978 - DNA, 20 bp, synthetic construct
  misc_feature 1..20: note = chemically synthesized
  source 1..20: mol_type = other DNA
gagaatcacttgaacctggg

SEQ ID NO: 36979 - DNA, 20 bp, synthetic construct
  misc_feature 1..20: note = chemically synthesized
  source 1..20: mol_type = other DNA
aatcacttgaacctgggagg

SEQ ID NO: 36980 - DNA, 20 bp, synthetic construct
  misc_feature 1..20: note = chemically synthesized
  source 1..20: mol_type = other DNA
tcacttgaacctgggaggtg

SEQ ID NO: 36981 - DNA, 20 bp, synthetic construct
  misc_feature 1..20: note = chemically synthesized
  source 1..20: mol_type = other DNA
aacctgggaggtggagtttg

SEQ ID NO: 36982 - DNA, 20 bp, synthetic construct
  misc_feature 1..20: note = chemically synthesized
  source 1..20: mol_type = other DNA
tgggaggtggagtttgcagt

SEQ ID NO: 36983 - DNA, 20 bp, synthetic construct
  misc_feature 1..20: note = chemically synthesized
  source 1..20: mol_type = other DNA
ggtggagtttgcagtgagct

SEQ ID NO: 36984 - DNA, 20 bp, synthetic construct
  misc_feature 1..20: note = chemically synthesized
  source 1..20: mol_type = other DNA
gagattgtgctactgcactc

SEQ ID NO: 36985 - DNA, 20 bp, synthetic construct
  misc_feature 1..20: note = chemically synthesized
  source 1..20: mol_type = other DNA
tgtgctactgcactccagcc

SEQ ID NO: 36986 - DNA, 20 bp, synthetic construct
  misc_feature 1..20: note = chemically synthesized
  source 1..20: mol_type = other DNA
actgcactccagcctggcga

SEQ ID NO: 36987 - DNA, 20 bp, synthetic construct
  misc_feature 1..20: note = chemically synthesized
  source 1..20: mol_type = other DNA
tgcactccagcctggcgaca

SEQ ID NO: 36988 - DNA, 20 bp, synthetic construct
  misc_feature 1..20: note = chemically synthesized
  source 1..20: mol_type = other DNA
ctccagcctggcgacagagt

SEQ ID NO: 36989 - DNA, 20 bp, synthetic construct
  misc_feature 1..20: note = chemically synthesized
  source 1..20: mol_type = other DNA
aaaaaaaaaaaaaaaaaaaa

SEQ ID NO: 36990 - DNA, 20 bp, synthetic construct
  misc_feature 1..20: note = chemically synthesized
  source 1..20: mol_type = other DNA
tgaatctgcatgactattaa

SEQ ID NO: 36991 - DNA, 20 bp, synthetic construct
  misc_feature 1..20: note = chemically synthesized
  source 1..20: mol_type = other DNA
gactattaacagatccattg

SEQ ID NO: 36992 - DNA, 20 bp, synthetic construct
  misc_feature 1..20: note = chemically synthesized
  source 1..20: mol_type = other DNA
taacagatccattgaagttc

SEQ ID NO: 36993 - DNA, 20 bp, synthetic construct
  misc_feature 1..20: note = chemically synthesized
  source 1..20: mol_type = other DNA
cagatccattgaagttccag

SEQ ID NO: 36994 - DNA, 20 bp, synthetic construct
  misc_feature 1..20: note = chemically synthesized
  source 1..20: mol_type = other DNA
ccattgaagttccagtagat

SEQ ID NO: 36995 - DNA, 20 bp, synthetic construct
  misc_feature 1..20: note = chemically synthesized
  source 1..20: mol_type = other DNA
gataagaacaaattttacca

SEQ ID NO: 36996 - DNA, 20 bp, synthetic construct
  misc_feature 1..20: note = chemically synthesized
  source 1..20: mol_type = other DNA
aacaaattttaccaaagtaa

SEQ ID NO: 36997 - DNA, 20 bp, synthetic construct
  misc_feature 1..20: note = chemically synthesized
  source 1..20: mol_type = other DNA
acaaattttaccaaagtaac

SEQ ID NO: 36998 - DNA, 20 bp, synthetic construct
  misc_feature 1..20: note = chemically synthesized
  source 1..20: mol_type = other DNA
attttaccaaagtaacagga

SEQ ID NO: 36999 - DNA, 20 bp, synthetic construct
  misc_feature 1..20: note = chemically synthesized
  source 1..20: mol_type = other DNA
aggaaagacaaaaacgcaat

SEQ ID NO: 37000 - DNA, 20 bp, synthetic construct
  misc_feature 1..20: note = chemically synthesized
  source 1..20: mol_type = other DNA
aaaacgcaattggaattcat

SEQ ID NO: 37001 - DNA, 20 bp, synthetic construct
  misc_feature 1..20: note = chemically synthesized
  source 1..20: mol_type = other DNA
caattggaattcataagctc

SEQ ID NO: 37002 - DNA, 20 bp, synthetic construct
  misc_feature 1..20: note = chemically synthesized
  source 1..20: mol_type = other DNA
aattggaattcataagctct

SEQ ID NO: 37003 - DNA, 20 bp, synthetic construct
  misc_feature 1..20: note = chemically synthesized
  source 1..20: mol_type = other DNA
ttcataagctctaggacccg

SEQ ID NO: 37004 - DNA, 20 bp, synthetic construct
  misc_feature 1..20: note = chemically synthesized
  source 1..20: mol_type = other DNA
cataagctctaggacccgta

SEQ ID NO: 37005 - DNA, 20 bp, synthetic construct
  misc_feature 1..20: note = chemically synthesized
  source 1..20: mol_type = other DNA
ataagctctaggacccgtag

SEQ ID NO: 37006 - DNA, 20 bp, synthetic construct
  misc_feature 1..20: note = chemically synthesized
  source 1..20: mol_type = other DNA
agaggtacatatgatccctg

SEQ ID NO: 37007 - DNA, 20 bp, synthetic construct
  misc_feature 1..20: note = chemically synthesized
  source 1..20: mol_type = other DNA
ctaaccctttcaaataaact

SEQ ID NO: 37008 - DNA, 20 bp, synthetic construct
  misc_feature 1..20: note = chemically synthesized
  source 1..20: mol_type = other DNA
ataaactaagttatgatgct

SEQ ID NO: 37009 - DNA, 20 bp, synthetic construct
  misc_feature 1..20: note = chemically synthesized
  source 1..20: mol_type = other DNA
gttatgatgctgagcctcct

SEQ ID NO: 37010 - DNA, 20 bp, synthetic construct
  misc_feature 1..20: note = chemically synthesized
  source 1..20: mol_type = other DNA
ttatgatgctgagcctcctt

SEQ ID NO: 37011 - DNA, 20 bp, synthetic construct
  misc_feature 1..20: note = chemically synthesized
  source 1..20: mol_type = other DNA
cctccttgggtcacataacc

SEQ ID NO: 37012 - DNA, 20 bp, synthetic construct
  misc_feature 1..20: note = chemically synthesized
  source 1..20: mol_type = other DNA
tgggtcacataaccaagccc

SEQ ID NO: 37013 - DNA, 20 bp, synthetic construct
  misc_feature 1..20: note = chemically synthesized
  source 1..20: mol_type = other DNA
ctggtatccctatcttacat

SEQ ID NO: 37014 - DNA, 20 bp, synthetic construct
  misc_feature 1..20: note = chemically synthesized
  source 1..20: mol_type = other DNA
tatccctatcttacatcagc

SEQ ID NO: 37015 - DNA, 20 bp, synthetic construct
  misc_feature 1..20: note = chemically synthesized
  source 1..20: mol_type = other DNA
attttcctcaccccattctt

SEQ ID NO: 37016 - DNA, 20 bp, synthetic construct
  misc_feature 1..20: note = chemically synthesized
  source 1..20: mol_type = other DNA
ttttcctcaccccattcttc

SEQ ID NO: 37017 - DNA, 20 bp, synthetic construct
  misc_feature 1..20: note = chemically synthesized
  source 1..20: mol_type = other DNA
aggaaacacctgaaaatccc

SEQ ID NO: 37018 - DNA, 20 bp, synthetic construct
  misc_feature 1..20: note = chemically synthesized
  source 1..20: mol_type = other DNA
ggaaacacctgaaaatcccg

SEQ ID NO: 37019 - DNA, 20 bp, synthetic construct
  misc_feature 1..20: note = chemically synthesized
  source 1..20: mol_type = other DNA
cctgaaaatcccgaggacat

SEQ ID NO: 37020 - DNA, 20 bp, synthetic construct
  misc_feature 1..20: note = chemically synthesized
  source 1..20: mol_type = other DNA
aatcccgaggacatcagttg

SEQ ID NO: 37021 - DNA, 20 bp, synthetic construct
  misc_feature 1..20: note = chemically synthesized
  source 1..20: mol_type = other DNA
atcccgaggacatcagttgt

SEQ ID NO: 37022 - DNA, 20 bp, synthetic construct
  misc_feature 1..20: note = chemically synthesized
  source 1..20: mol_type = other DNA
tcccgaggacatcagttgtg

SEQ ID NO: 37023 - DNA, 20 bp, synthetic construct
  misc_feature 1..20: note = chemically synthesized
  source 1..20: mol_type = other DNA
ggggccctgttcctcccgaa

SEQ ID NO: 37024 - DNA, 20 bp, synthetic construct
  misc_feature 1..20: note = chemically synthesized
  source 1..20: mol_type = other DNA
ggccctgttcctcccgaaca

SEQ ID NO: 37025 - DNA, 20 bp, synthetic construct
  misc_feature 1..20: note = chemically synthesized
  source 1..20: mol_type = other DNA
cctgttcctcccgaacagag

SEQ ID NO: 37026 - DNA, 20 bp, synthetic construct
  misc_feature 1..20: note = chemically synthesized
  source 1..20: mol_type = other DNA
tgttcctcccgaacagagaa

SEQ ID NO: 37027 - DNA, 20 bp, synthetic construct
  misc_feature 1..20: note = chemically synthesized
  source 1..20: mol_type = other DNA
ttcctcccgaacagagaaga

SEQ ID NO: 37028 - DNA, 20 bp, synthetic construct
  misc_feature 1..20: note = chemically synthesized
  source 1..20: mol_type = other DNA
tcctcccgaacagagaagag

SEQ ID NO: 37029 - DNA, 20 bp, synthetic construct
  misc_feature 1..20: note = chemically synthesized
  source 1..20: mol_type = other DNA
cctcccgaacagagaagaga

SEQ ID NO: 37030 - DNA, 20 bp, synthetic construct
  misc_feature 1..20: note = chemically synthesized
  source 1..20: mol_type = other DNA
cccgaacagagaagagaggg

SEQ ID NO: 37031 - DNA, 20 bp, synthetic construct
  misc_feature 1..20: note = chemically synthesized
  source 1..20: mol_type = other DNA
ccgaacagagaagagaggga

SEQ ID NO: 37032 - DNA, 20 bp, synthetic construct
  misc_feature 1..20: note = chemically synthesized
  source 1..20: mol_type = other DNA
cgaacagagaagagagggaa

SEQ ID NO: 37033 - DNA, 20 bp, synthetic construct
  misc_feature 1..20: note = chemically synthesized
  source 1..20: mol_type = other DNA
aacagagaagagagggaagg

SEQ ID NO: 37034 - DNA, 20 bp, synthetic construct
  misc_feature 1..20: note = chemically synthesized
  source 1..20: mol_type = other DNA
gaagagagggaagggagatc

SEQ ID NO: 37035 - DNA, 20 bp, synthetic construct
  misc_feature 1..20: note = chemically synthesized
  source 1..20: mol_type = other DNA
aagagagggaagggagatca

SEQ ID NO: 37036 - DNA, 20 bp, synthetic construct
  misc_feature 1..20: note = chemically synthesized
  source 1..20: mol_type = other DNA
agagagggaagggagatcaa

SEQ ID NO: 37037 - DNA, 20 bp, synthetic construct
  misc_feature 1..20: note = chemically synthesized
  source 1..20: mol_type = other DNA
gagagggaagggagatcaag

SEQ ID NO: 37038 - DNA, 20 bp, synthetic construct
  misc_feature 1..20: note = chemically synthesized
  source 1..20: mol_type = other DNA
gggagatcaaggggtctcct

SEQ ID NO: 37039 - DNA, 20 bp, synthetic construct
  misc_feature 1..20: note = chemically synthesized
  source 1..20: mol_type = other DNA
caaggggtctcctgagatgc

SEQ ID NO: 37040 - DNA, 20 bp, synthetic construct
  misc_feature 1..20: note = chemically synthesized
  source 1..20: mol_type = other DNA
gggtctcctgagatgctaga

SEQ ID NO: 37041 - DNA, 20 bp, synthetic construct
  misc_feature 1..20: note = chemically synthesized
  source 1..20: mol_type = other DNA
gatgctagaaagatgaaact

SEQ ID NO: 37042 - DNA, 20 bp, synthetic construct
  misc_feature 1..20: note = chemically synthesized
  source 1..20: mol_type = other DNA
atgctagaaagatgaaactc

SEQ ID NO: 37043 - DNA, 20 bp, synthetic construct
  misc_feature 1..20: note = chemically synthesized
  source 1..20: mol_type = other DNA
tgctagaaagatgaaactca

SEQ ID NO: 37044 - DNA, 20 bp, synthetic construct
  misc_feature 1..20: note = chemically synthesized
  source 1..20: mol_type = other DNA
gctagaaagatgaaactcag

SEQ ID NO: 37045 - DNA, 20 bp, synthetic construct
  misc_feature 1..20: note = chemically synthesized
  source 1..20: mol_type = other DNA
tagaaagatgaaactcaggg

SEQ ID NO: 37046 - DNA, 20 bp, synthetic construct
  misc_feature 1..20: note = chemically synthesized
  source 1..20: mol_type = other DNA
agaaagatgaaactcagggg

SEQ ID NO: 37047 - DNA, 20 bp, synthetic construct
  misc_feature 1..20: note = chemically synthesized
  source 1..20: mol_type = other DNA
gaggtgatttccacatgcat

SEQ ID NO: 37048 - DNA, 20 bp, synthetic construct
  misc_feature 1..20: note = chemically synthesized
  source 1..20: mol_type = other DNA
acatgcataagctttaaaat

SEQ ID NO: 37049 - DNA, 20 bp, synthetic construct
  misc_feature 1..20: note = chemically synthesized
  source 1..20: mol_type = other DNA
catgcataagctttaaaatg

SEQ ID NO: 37050 - DNA, 20 bp, synthetic construct
  misc_feature 1..20: note = chemically synthesized
  source 1..20: mol_type = other DNA
gctttaaaatgaggcctcat

SEQ ID NO: 37051 - DNA, 20 bp, synthetic construct
  misc_feature 1..20: note = chemically synthesized
  source 1..20: mol_type = other DNA
tttaaaatgaggcctcatga

SEQ ID NO: 37052 - DNA, 20 bp, synthetic construct
  misc_feature 1..20: note = chemically synthesized
  source 1..20: mol_type = other DNA
ttaaaatgaggcctcatgag

SEQ ID NO: 37053 - DNA, 20 bp, synthetic construct
  misc_feature 1..20: note = chemically synthesized
  source 1..20: mol_type = other DNA
aggcctcatgagaggtctgt

SEQ ID NO: 37054 - DNA, 20 bp, synthetic construct
  misc_feature 1..20: note = chemically synthesized
  source 1..20: mol_type = other DNA
gtgagtgaatgatctgaact

SEQ ID NO: 37055 - DNA, 20 bp, synthetic construct
  misc_feature 1..20: note = chemically synthesized
  source 1..20: mol_type = other DNA
tgatctgaactgagtcctca

SEQ ID NO: 37056 - DNA, 20 bp, synthetic construct
  misc_feature 1..20: note = chemically synthesized
  source 1..20: mol_type = other DNA
atctgaactgagtcctcaaa

SEQ ID NO: 37057 - DNA, 20 bp, synthetic construct
  misc_feature 1..20: note = chemically synthesized
  source 1..20: mol_type = other DNA
tctgaactgagtcctcaaag

SEQ ID NO: 37058 - DNA, 20 bp, synthetic construct
  misc_feature 1..20: note = chemically synthesized
  source 1..20: mol_type = other DNA
aactgagtcctcaaagagga

SEQ ID NO: 37059 - DNA, 20 bp, synthetic construct
  misc_feature 1..20: note = chemically synthesized
  source 1..20: mol_type = other DNA
actgagtcctcaaagaggac

SEQ ID NO: 37060 - DNA, 20 bp, synthetic construct
  misc_feature 1..20: note = chemically synthesized
  source 1..20: mol_type = other DNA
gtcctcaaagaggacaggaa

SEQ ID NO: 37061 - DNA, 20 bp, synthetic construct
  misc_feature 1..20: note = chemically synthesized
  source 1..20: mol_type = other DNA
tcctcaaagaggacaggaat

SEQ ID NO: 37062 - DNA, 20 bp, synthetic construct
  misc_feature 1..20: note = chemically synthesized
  source 1..20: mol_type = other DNA
acaggaataggttcctattt

SEQ ID NO: 37063 - DNA, 20 bp, synthetic construct
  misc_feature 1..20: note = chemically synthesized
  source 1..20: mol_type = other DNA
tattttagccacaatactgt

SEQ ID NO: 37064 - DNA, 20 bp, synthetic construct
  misc_feature 1..20: note = chemically synthesized
  source 1..20: mol_type = other DNA
tttagccacaatactgtgag

SEQ ID NO: 37065 - DNA, 20 bp, synthetic construct
  misc_feature 1..20: note = chemically synthesized
  source 1..20: mol_type = other DNA
ttagccacaatactgtgagt

SEQ ID NO: 37066 - DNA, 20 bp, synthetic construct
  misc_feature 1..20: note = chemically synthesized
  source 1..20: mol_type = other DNA
ccacaatactgtgagtgggt

SEQ ID NO: 37067 - DNA, 20 bp, synthetic construct
  misc_feature 1..20: note = chemically synthesized
  source 1..20: mol_type = other DNA
tactgtgagtgggtgagtgc

SEQ ID NO: 37068 - DNA, 20 bp, synthetic construct
  misc_feature 1..20: note = chemically synthesized
  source 1..20: mol_type = other DNA
actgtgagtgggtgagtgcc

SEQ ID NO: 37069 - DNA, 20 bp, synthetic construct
  misc_feature 1..20: note = chemically synthesized
  source 1..20: mol_type = other DNA
gagtgccaggaacttgaata

SEQ ID NO: 37070 - DNA, 20 bp, synthetic construct
  misc_feature 1..20: note = chemically synthesized
  source 1..20: mol_type = other DNA
attcctctctcttctgatgt

SEQ ID NO: 37071 - DNA, 20 bp, synthetic construct
  misc_feature 1..20: note = chemically synthesized
  source 1..20: mol_type = other DNA
ttctgatgtgagatgcactc

SEQ ID NO: 37072 - DNA, 20 bp, synthetic construct
  misc_feature 1..20: note = chemically synthesized
  source 1..20: mol_type = other DNA
tctgatgtgagatgcactca

SEQ ID NO: 37073 - DNA, 20 bp, synthetic construct
  misc_feature 1..20: note = chemically synthesized
  source 1..20: mol_type = other DNA
atgtgagatgcactcaagga

SEQ ID NO: 37074 - DNA, 20 bp, synthetic construct
  misc_feature 1..20: note = chemically synthesized
  source 1..20: mol_type = other DNA
tgcactcaaggaaagcatat

SEQ ID NO: 37075 - DNA, 20 bp, synthetic construct
  misc_feature 1..20: note = chemically synthesized
  source 1..20: mol_type = other DNA
actcaaggaaagcatataag

SEQ ID NO: 37076 - DNA, 20 bp, synthetic construct
  misc_feature 1..20: note = chemically synthesized
  source 1..20: mol_type = other DNA
ctcaaggaaagcatataaga

SEQ ID NO: 37077 - DNA, 20 bp, synthetic construct
  misc_feature 1..20: note = chemically synthesized
  source 1..20: mol_type = other DNA
aagcatataagaaggttttc

SEQ ID NO: 37078 - DNA, 20 bp, synthetic construct
  misc_feature 1..20: note = chemically synthesized
  source 1..20: mol_type = other DNA
gcatataagaaggttttcca

SEQ ID NO: 37079 - DNA, 20 bp, synthetic construct
  misc_feature 1..20: note = chemically synthesized
  source 1..20: mol_type = other DNA
catataagaaggttttccag

SEQ ID NO: 37080 - DNA, 20 bp, synthetic construct
  misc_feature 1..20: note = chemically synthesized
  source 1..20: mol_type = other DNA
aggttttccagaggtctgcc

SEQ ID NO: 37081 - DNA, 20 bp, synthetic construct
  misc_feature 1..20: note = chemically synthesized
  source 1..20: mol_type = other DNA
gttttccagaggtctgccta

SEQ ID NO: 37082 - DNA, 20 bp, synthetic construct
  misc_feature 1..20: note = chemically synthesized
  source 1..20: mol_type = other DNA
ttttccagaggtctgcctag

SEQ ID NO: 37083 - DNA, 20 bp, synthetic construct
  misc_feature 1..20: note = chemically synthesized
  source 1..20: mol_type = other DNA
cagaggtctgcctagaggta

SEQ ID NO: 37084 - DNA, 20 bp, synthetic construct
  misc_feature 1..20: note = chemically synthesized
  source 1..20: mol_type = other DNA
ctgcctagaggtaaagatca

SEQ ID NO: 37085 - DNA, 20 bp, synthetic construct
  misc_feature 1..20: note = chemically synthesized
  source 1..20: mol_type = other DNA
tagaggtaaagatcacagct

SEQ ID NO: 37086 - DNA, 20 bp, synthetic construct
  misc_feature 1..20: note = chemically synthesized
  source 1..20: mol_type = other DNA
agaggtaaagatcacagctg

SEQ ID NO: 37087 - DNA, 20 bp, synthetic construct
  misc_feature 1..20: note = chemically synthesized
  source 1..20: mol_type = other DNA
ggtaaagatcacagctgagg

SEQ ID NO: 37088 - DNA, 20 bp, synthetic construct
  misc_feature 1..20: note = chemically synthesized
  source 1..20: mol_type = other DNA
gtaaagatcacagctgaggt

SEQ ID NO: 37089 - DNA, 20 bp, synthetic construct
  misc_feature 1..20: note = chemically synthesized
  source 1..20: mol_type = other DNA
agctgaggtgggatatccta

SEQ ID NO: 37090 - DNA, 20 bp, synthetic construct
  misc_feature 1..20: note = chemically synthesized
  source 1..20: mol_type = other DNA
aggtgggatatcctacagca

SEQ ID NO: 37091 - DNA, 20 bp, synthetic construct
  misc_feature 1..20: note = chemically synthesized
  source 1..20: mol_type = other DNA
tttttttttttcttttttga

SEQ ID NO: 37092 - DNA, 20 bp, synthetic construct
  misc_feature 1..20: note = chemically synthesized
  source 1..20: mol_type = other DNA
tttttttttcttttttgaaa

SEQ ID NO: 37093 - DNA, 20 bp, synthetic construct
  misc_feature 1..20: note = chemically synthesized
  source 1..20: mol_type = other DNA
tcttttttgaaagagtattt

SEQ ID NO: 37094 - DNA, 20 bp, synthetic construct
  misc_feature 1..20: note = chemically synthesized
  source 1..20: mol_type = other DNA
cttttttgaaagagtattta

SEQ ID NO: 37095 - DNA, 20 bp, synthetic construct
  misc_feature 1..20: note = chemically synthesized
  source 1..20: mol_type = other DNA
gagtatttaaggaactgtga

SEQ ID NO: 37096 - DNA, 20 bp, synthetic construct
  misc_feature 1..20: note = chemically synthesized
  source 1..20: mol_type = other DNA
ttaaggaactgtgatagatt

SEQ ID NO: 37097 - DNA, 20 bp, synthetic construct
  misc_feature 1..20: note = chemically synthesized
  source 1..20: mol_type = other DNA
taaggaactgtgatagattt

SEQ ID NO: 37098 - DNA, 20 bp, synthetic construct
  misc_feature 1..20: note = chemically synthesized
  source 1..20: mol_type = other DNA
tagatttaggttttctaatc

SEQ ID NO: 37099 - DNA, 20 bp, synthetic construct
  misc_feature 1..20: note = chemically synthesized
  source 1..20: mol_type = other DNA
agatttaggttttctaatct

SEQ ID NO: 37100 - DNA, 20 bp, synthetic construct
  misc_feature 1..20: note = chemically synthesized
  source 1..20: mol_type = other DNA
gttttctaatctgggaccct

SEQ ID NO: 37101 - DNA, 20 bp, synthetic construct
  misc_feature 1..20: note = chemically synthesized
  source 1..20: mol_type = other DNA
ctaatctgggacccttggat

SEQ ID NO: 37102 - DNA, 20 bp, synthetic construct
  misc_feature 1..20: note = chemically synthesized
  source 1..20: mol_type = other DNA
tgggacccttggattggcat

SEQ ID NO: 37103 - DNA, 20 bp, synthetic construct
  misc_feature 1..20: note = chemically synthesized
  source 1..20: mol_type = other DNA
taagtataattgttaatgct

SEQ ID NO: 37104 - DNA, 20 bp, synthetic construct
  misc_feature 1..20: note = chemically synthesized
  source 1..20: mol_type = other DNA
ttcttactcatttttctatg

SEQ ID NO: 37105 - DNA, 20 bp, synthetic construct
  misc_feature 1..20: note = chemically synthesized
  source 1..20: mol_type = other DNA
tttttctatgtagatgttta

SEQ ID NO: 37106 - DNA, 20 bp, synthetic construct
  misc_feature 1..20: note = chemically synthesized
  source 1..20: mol_type = other DNA
gatgtttatagctttttttt

SEQ ID NO: 37107 - DNA, 20 bp, synthetic construct
  misc_feature 1..20: note = chemically synthesized
  source 1..20: mol_type = other DNA
tgtttatagcttttttttca

SEQ ID NO: 37108 - DNA, 20 bp, synthetic construct
  misc_feature 1..20: note = chemically synthesized
  source 1..20: mol_type = other DNA
aatatttcttcattccaaaa

SEQ ID NO: 37109 - DNA, 20 bp, synthetic construct
  misc_feature 1..20: note = chemically synthesized
  source 1..20: mol_type = other DNA
tatcactcacctcctttgtt

SEQ ID NO: 37110 - DNA, 20 bp, synthetic construct
  misc_feature 1..20: note = chemically synthesized
  source 1..20: mol_type = other DNA
cacctcctttgttcagttat

SEQ ID NO: 37111 - DNA, 20 bp, synthetic construct
  misc_feature 1..20: note = chemically synthesized
  source 1..20: mol_type = other DNA
tattacatttatatttgtaa

SEQ ID NO: 37112 - DNA, 20 bp, synthetic construct
  misc_feature 1..20: note = chemically synthesized
  source 1..20: mol_type = other DNA
atttatatttgtaatagttc

SEQ ID NO: 37113 - DNA, 20 bp, synthetic construct
  misc_feature 1..20: note = chemically synthesized
  source 1..20: mol_type = other DNA
atacattcatttttgaaaat

SEQ ID NO: 37114 - DNA, 20 bp, synthetic construct
  misc_feature 1..20: note = chemically synthesized
  source 1..20: mol_type = other DNA
cattcatttttgaaaataag

SEQ ID NO: 37115 - DNA, 20 bp, synthetic construct
  misc_feature 1..20: note = chemically synthesized
  source 1..20: mol_type = other DNA
tcatttttgaaaataagaag

SEQ ID NO: 37116 - DNA, 20 bp, synthetic construct
  misc_feature 1..20: note = chemically synthesized
  source 1..20: mol_type = other DNA
ttttgaaaataagaagcaga

SEQ ID NO: 37117 - DNA, 20 bp, synthetic construct
  misc_feature 1..20: note = chemically synthesized
  source 1..20: mol_type = other DNA
tttgaaaataagaagcagaa

SEQ ID NO: 37118 - DNA, 20 bp, synthetic construct
  misc_feature 1..20: note = chemically synthesized
  source 1..20: mol_type = other DNA
aatgacatgactatctttac

SEQ ID NO: 37119 - DNA, 20 bp, synthetic construct
  misc_feature 1..20: note = chemically synthesized
  source 1..20: mol_type = other DNA
ggtgcttttgtcattttatg

SEQ ID NO: 37120 - DNA, 20 bp, synthetic construct
  misc_feature 1..20: note = chemically synthesized
  source 1..20: mol_type = other DNA
tagattcaaatgatcatctt

SEQ ID NO: 37121 - DNA, 20 bp, synthetic construct
  misc_feature 1..20: note = chemically synthesized
  source 1..20: mol_type = other DNA
aatgatcatctttggtcatt

SEQ ID NO: 37122 - DNA, 20 bp, synthetic construct
  misc_feature 1..20: note = chemically synthesized
  source 1..20: mol_type = other DNA
ttggtcatttggtttcaact

SEQ ID NO: 37123 - DNA, 20 bp, synthetic construct
  misc_feature 1..20: note = chemically synthesized
  source 1..20: mol_type = other DNA
caacttagttgaaatcaact

SEQ ID NO: 37124 - DNA, 20 bp, synthetic construct
  misc_feature 1..20: note = chemically synthesized
  source 1..20: mol_type = other DNA
caactcagtttttgtttatc

SEQ ID NO: 37125 - DNA, 20 bp, synthetic construct
  misc_feature 1..20: note = chemically synthesized
  source 1..20: mol_type = other DNA
tcagtttttgtttatccaga

SEQ ID NO: 37126 - DNA, 20 bp, synthetic construct
  misc_feature 1..20: note = chemically synthesized
  source 1..20: mol_type = other DNA
cagtttttgtttatccagaa

SEQ ID NO: 37127 - DNA, 20 bp, synthetic construct
  misc_feature 1..20: note = chemically synthesized
  source 1..20: mol_type = other DNA
agtttttgtttatccagaaa

SEQ ID NO: 37128 - DNA, 20 bp, synthetic construct
  misc_feature 1..20: note = chemically synthesized
  source 1..20: mol_type = other DNA
ttattgataactttcctgtt

SEQ ID NO: 37129 - DNA, 20 bp, synthetic construct
  misc_feature 1..20: note = chemically synthesized
  source 1..20: mol_type = other DNA
attgataactttcctgttca

SEQ ID NO: 37130 - DNA, 20 bp, synthetic construct
  misc_feature 1..20: note = chemically synthesized
  source 1..20: mol_type = other DNA
ttgataactttcctgttcag

SEQ ID NO: 37131 - DNA, 20 bp, synthetic construct
  misc_feature 1..20: note = chemically synthesized
  source 1..20: mol_type = other DNA
ttcagaggattttttgttga

SEQ ID NO: 37132 - DNA, 20 bp, synthetic construct
  misc_feature 1..20: note = chemically synthesized
  source 1..20: mol_type = other DNA
ttgttgatagtttttctctg

SEQ ID NO: 37133 - DNA, 20 bp, synthetic construct
  misc_feature 1..20: note = chemically synthesized
  source 1..20: mol_type = other DNA
gttgatagtttttctctgaa

SEQ ID NO: 37134 - DNA, 20 bp, synthetic construct
  misc_feature 1..20: note = chemically synthesized
  source 1..20: mol_type = other DNA
gatagtttttctctgaagag

SEQ ID NO: 37135 - DNA, 20 bp, synthetic construct
  misc_feature 1..20: note = chemically synthesized
  source 1..20: mol_type = other DNA
tagacaaaaaattctgaatc

SEQ ID NO: 37136 - DNA, 20 bp, synthetic construct
  misc_feature 1..20: note = chemically synthesized
  source 1..20: mol_type = other DNA
aaaattctgaatcgagttga

SEQ ID NO: 37137 - DNA, 20 bp, synthetic construct
  misc_feature 1..20: note = chemically synthesized
  source 1..20: mol_type = other DNA
aaattctgaatcgagttgaa

SEQ ID NO: 37138 - DNA, 20 bp, synthetic construct
  misc_feature 1..20: note = chemically synthesized
  source 1..20: mol_type = other DNA
ctgaatcgagttgaaaggct

SEQ ID NO: 37139 - DNA, 20 bp, synthetic construct
  misc_feature 1..20: note = chemically synthesized
  source 1..20: mol_type = other DNA
tcgagttgaaaggcttagaa

SEQ ID NO: 37140 - DNA, 20 bp, synthetic construct
  misc_feature 1..20: note = chemically synthesized
  source 1..20: mol_type = other DNA
cgagttgaaaggcttagaaa

SEQ ID NO: 37141 - DNA, 20 bp, synthetic construct
  misc_feature 1..20: note = chemically synthesized
  source 1..20: mol_type = other DNA
gagttgaaaggcttagaaaa

SEQ ID NO: 37142 - DNA, 20 bp, synthetic construct
  misc_feature 1..20: note = chemically synthesized
  source 1..20: mol_type = other DNA
ttgaaaggcttagaaaaggg

SEQ ID NO: 37143 - DNA, 20 bp, synthetic construct
  misc_feature 1..20: note = chemically synthesized
  source 1..20: mol_type = other DNA
tagaaaagggcagccaaatt

SEQ ID NO: 37144 - DNA, 20 bp, synthetic construct
  misc_feature 1..20: note = chemically synthesized
  source 1..20: mol_type = other DNA
gggcagccaaattaagatct

SEQ ID NO: 37145 - DNA, 20 bp, synthetic construct
  misc_feature 1..20: note = chemically synthesized
  source 1..20: mol_type = other DNA
agccaaattaagatctaaga

SEQ ID NO: 37146 - DNA, 20 bp, synthetic construct
  misc_feature 1..20: note = chemically synthesized
  source 1..20: mol_type = other DNA
taagatctaagaaagcaaat

SEQ ID NO: 37147 - DNA, 20 bp, synthetic construct
  misc_feature 1..20: note = chemically synthesized
  source 1..20: mol_type = other DNA
tgaaaatgaaatcatattga

SEQ ID NO: 37148 - DNA, 20 bp, synthetic construct
  misc_feature 1..20: note = chemically synthesized
  source 1..20: mol_type = other DNA
aaatgaaatcatattgatgg

SEQ ID NO: 37149 - DNA, 20 bp, synthetic construct
  misc_feature 1..20: note = chemically synthesized
  source 1..20: mol_type = other DNA
gatggcagatgataatatat

SEQ ID NO: 37150 - DNA, 20 bp, synthetic construct
  misc_feature 1..20: note = chemically synthesized
  source 1..20: mol_type = other DNA
cagatgataatatattggac

SEQ ID NO: 37151 - DNA, 20 bp, synthetic construct
  misc_feature 1..20: note = chemically synthesized
  source 1..20: mol_type = other DNA
agatgataatatattggact

SEQ ID NO: 37152 - DNA, 20 bp, synthetic construct
  misc_feature 1..20: note = chemically synthesized
  source 1..20: mol_type = other DNA
gataatatattggactgggt

SEQ ID NO: 37153 - DNA, 20 bp, synthetic construct
  misc_feature 1..20: note = chemically synthesized
  source 1..20: mol_type = other DNA
taatatattggactgggttg

SEQ ID NO: 37154 - DNA, 20 bp, synthetic construct
  misc_feature 1..20: note = chemically synthesized
  source 1..20: mol_type = other DNA
tatattggactgggttggag

SEQ ID NO: 37155 - DNA, 20 bp, synthetic construct
  misc_feature 1..20: note = chemically synthesized
  source 1..20: mol_type = other DNA
atattggactgggttggaga

SEQ ID NO: 37156 - DNA, 20 bp, synthetic construct
  misc_feature 1..20: note = chemically synthesized
  source 1..20: mol_type = other DNA
ttggactgggttggagaagg

SEQ ID NO: 37157 - DNA, 20 bp, synthetic construct
  misc_feature 1..20: note = chemically synthesized
  source 1..20: mol_type = other DNA
tggactgggttggagaaggc

SEQ ID NO: 37158 - DNA, 20 bp, synthetic construct
  misc_feature 1..20: note = chemically synthesized
  source 1..20: mol_type = other DNA
gactgggttggagaaggcag

SEQ ID NO: 37159 - DNA, 20 bp, synthetic construct
  misc_feature 1..20: note = chemically synthesized
  source 1..20: mol_type = other DNA
actgggttggagaaggcagg

SEQ ID NO: 37160 - DNA, 20 bp, synthetic construct
  misc_feature 1..20: note = chemically synthesized
  source 1..20: mol_type = other DNA
ggcaggaggaatttaacttg

SEQ ID NO: 37161 - DNA, 20 bp, synthetic construct
  misc_feature 1..20: note = chemically synthesized
  source 1..20: mol_type = other DNA
ggaatttaacttgtggacaa

SEQ ID NO: 37162 - DNA, 20 bp, synthetic construct
  misc_feature 1..20: note = chemically synthesized
  source 1..20: mol_type = other DNA
cttgtggacaatagaaatct

SEQ ID NO: 37163 - DNA, 20 bp, synthetic construct
  misc_feature 1..20: note = chemically synthesized
  source 1..20: mol_type = other DNA
tgtggacaatagaaatctga

SEQ ID NO: 37164 - DNA, 20 bp, synthetic construct
  misc_feature 1..20: note = chemically synthesized
  source 1..20: mol_type = other DNA
gacaatagaaatctgagagt

SEQ ID NO: 37165 - DNA, 20 bp, synthetic construct
  misc_feature 1..20: note = chemically synthesized
  source 1..20: mol_type = other DNA
acaatagaaatctgagagtt

SEQ ID NO: 37166 - DNA, 20 bp, synthetic construct
  misc_feature 1..20: note = chemically synthesized
  source 1..20: mol_type = other DNA
atagaaatctgagagttggg

SEQ ID NO: 37167 - DNA, 20 bp, synthetic construct
  misc_feature 1..20: note = chemically synthesized
  source 1..20: mol_type = other DNA
agttgggtagtcccaactgt

SEQ ID NO: 37168 - DNA, 20 bp, synthetic construct
  misc_feature 1..20: note = chemically synthesized
  source 1..20: mol_type = other DNA
gttgggtagtcccaactgtc

SEQ ID NO: 37169 - DNA, 20 bp, synthetic construct
  misc_feature 1..20: note = chemically synthesized
  source 1..20: mol_type = other DNA
agtcccaactgtcaggccct

SEQ ID NO: 37170 - DNA, 20 bp, synthetic construct
  misc_feature 1..20: note = chemically synthesized
  source 1..20: mol_type = other DNA
gtcccaactgtcaggccctc

SEQ ID NO: 37171 - DNA, 20 bp, synthetic construct
  misc_feature 1..20: note = chemically synthesized
  source 1..20: mol_type = other DNA
aactgtcaggccctcaggac

SEQ ID NO: 37172 - DNA, 20 bp, synthetic construct
  misc_feature 1..20: note = chemically synthesized
  source 1..20: mol_type = other DNA
actgtcaggccctcaggact

SEQ ID NO: 37173 - DNA, 20 bp, synthetic construct
  misc_feature 1..20: note = chemically synthesized
  source 1..20: mol_type = other DNA
ctgtcaggccctcaggactg

SEQ ID NO: 37174 - DNA, 20 bp, synthetic construct
  misc_feature 1..20: note = chemically synthesized
  source 1..20: mol_type = other DNA
ccctcaggactggggccaaa

SEQ ID NO: 37175 - DNA, 20 bp, synthetic construct
  misc_feature 1..20: note = chemically synthesized
  source 1..20: mol_type = other DNA
ctcaggactggggccaaatg

SEQ ID NO: 37176 - DNA, 20 bp, synthetic construct
  misc_feature 1..20: note = chemically synthesized
  source 1..20: mol_type = other DNA
tcaggactggggccaaatgg

SEQ ID NO: 37177 - DNA, 20 bp, synthetic construct
  misc_feature 1..20: note = chemically synthesized
  source 1..20: mol_type = other DNA
atggaggactcacttttttg

SEQ ID NO: 37178 - DNA, 20 bp, synthetic construct
  misc_feature 1..20: note = chemically synthesized
  source 1..20: mol_type = other DNA
actcacttttttgaagatta

SEQ ID NO: 37179 - DNA, 20 bp, synthetic construct
  misc_feature 1..20: note = chemically synthesized
  source 1..20: mol_type = other DNA
gaagattaaagacaatgcgt

SEQ ID NO: 37180 - DNA, 20 bp, synthetic construct
  misc_feature 1..20: note = chemically synthesized
  source 1..20: mol_type = other DNA
agattaaagacaatgcgtga

SEQ ID NO: 37181 - DNA, 20 bp, synthetic construct
  misc_feature 1..20: note = chemically synthesized
  source 1..20: mol_type = other DNA
aaagacaatgcgtgagagca

SEQ ID NO: 37182 - DNA, 20 bp, synthetic construct
  misc_feature 1..20: note = chemically synthesized
  source 1..20: mol_type = other DNA
agacaatgcgtgagagcacg

SEQ ID NO: 37183 - DNA, 20 bp, synthetic construct
  misc_feature 1..20: note = chemically synthesized
  source 1..20: mol_type = other DNA
cacggagttctgaacctaaa

SEQ ID NO: 37184 - DNA, 20 bp, synthetic construct
  misc_feature 1..20: note = chemically synthesized
  source 1..20: mol_type = other DNA
acggagttctgaacctaaac

SEQ ID NO: 37185 - DNA, 20 bp, synthetic construct
  misc_feature 1..20: note = chemically synthesized
  source 1..20: mol_type = other DNA
gttctgaacctaaacaggct

SEQ ID NO: 37186 - DNA, 20 bp, synthetic construct
  misc_feature 1..20: note = chemically synthesized
  source 1..20: mol_type = other DNA
ctgagcttctgcactctgct

SEQ ID NO: 37187 - DNA, 20 bp, synthetic construct
  misc_feature 1..20: note = chemically synthesized
  source 1..20: mol_type = other DNA
tgctaagatcctgaaattta

SEQ ID NO: 37188 - DNA, 20 bp, synthetic construct
  misc_feature 1..20: note = chemically synthesized
  source 1..20: mol_type = other DNA
aagatcctgaaatttataga

SEQ ID NO: 37189 - DNA, 20 bp, synthetic construct
  misc_feature 1..20: note = chemically synthesized
  source 1..20: mol_type = other DNA
cctgaaatttatagaaagaa

SEQ ID NO: 37190 - DNA, 20 bp, synthetic construct
  misc_feature 1..20: note = chemically synthesized
  source 1..20: mol_type = other DNA
catataacaatttaatttat

SEQ ID NO: 37191 - DNA, 20 bp, synthetic construct
  misc_feature 1..20: note = chemically synthesized
  source 1..20: mol_type = other DNA
tgtgtctgtgtgtttgtttg

SEQ ID NO: 37192 - DNA, 20 bp, synthetic construct
  misc_feature 1..20: note = chemically synthesized
  source 1..20: mol_type = other DNA
tttgtttgaagaactgctct

SEQ ID NO: 37193 - DNA, 20 bp, synthetic construct
  misc_feature 1..20: note = chemically synthesized
  source 1..20: mol_type = other DNA
tgtttgaagaactgctctaa

SEQ ID NO: 37194 - DNA, 20 bp, synthetic construct
  misc_feature 1..20: note = chemically synthesized
  source 1..20: mol_type = other DNA
tgaagaactgctctaagaga

SEQ ID NO: 37195 - DNA, 20 bp, synthetic construct
  misc_feature 1..20: note = chemically synthesized
  source 1..20: mol_type = other DNA
actgctctaagagatggcat

SEQ ID NO: 37196 - DNA, 20 bp, synthetic construct
  misc_feature 1..20: note = chemically synthesized
  source 1..20: mol_type = other DNA
gctctaagagatggcatgag

SEQ ID NO: 37197 - DNA, 20 bp, synthetic construct
  misc_feature 1..20: note = chemically synthesized
  source 1..20: mol_type = other DNA
taagagatggcatgagtagt

SEQ ID NO: 37198 - DNA, 20 bp, synthetic construct
  misc_feature 1..20: note = chemically synthesized
  source 1..20: mol_type = other DNA
gagatggcatgagtagtcag

SEQ ID NO: 37199 - DNA, 20 bp, synthetic construct
  misc_feature 1..20: note = chemically synthesized
  source 1..20: mol_type = other DNA
agatggcatgagtagtcagt

SEQ ID NO: 37200 - DNA, 20 bp, synthetic construct
  misc_feature 1..20: note = chemically synthesized
  source 1..20: mol_type = other DNA
gagtagtcagtgggactcac

SEQ ID NO: 37201 - DNA, 20 bp, synthetic construct
  misc_feature 1..20: note = chemically synthesized
  source 1..20: mol_type = other DNA
gggactcactagaaaaattc

SEQ ID NO: 37202 - DNA, 20 bp, synthetic construct
  misc_feature 1..20: note = chemically synthesized
  source 1..20: mol_type = other DNA
gactcactagaaaaattcta

SEQ ID NO: 37203 - DNA, 20 bp, synthetic construct
  misc_feature 1..20: note = chemically synthesized
  source 1..20: mol_type = other DNA
cactagaaaaattctagaga

SEQ ID NO: 37204 - DNA, 20 bp, synthetic construct
  misc_feature 1..20: note = chemically synthesized
  source 1..20: mol_type = other DNA
actagaaaaattctagagac

SEQ ID NO: 37205 - DNA, 20 bp, synthetic construct
  misc_feature 1..20: note = chemically synthesized
  source 1..20: mol_type = other DNA
ctagaaaaattctagagaca

SEQ ID NO: 37206 - DNA, 20 bp, synthetic construct
  misc_feature 1..20: note = chemically synthesized
  source 1..20: mol_type = other DNA
agagacagggcccatctcct

SEQ ID NO: 37207 - DNA, 20 bp, synthetic construct
  misc_feature 1..20: note = chemically synthesized
  source 1..20: mol_type = other DNA
gagacagggcccatctcctt

SEQ ID NO: 37208 - DNA, 20 bp, synthetic construct
  misc_feature 1..20: note = chemically synthesized
  source 1..20: mol_type = other DNA
acagggcccatctccttagg

SEQ ID NO: 37209 - DNA, 20 bp, synthetic construct
  misc_feature 1..20: note = chemically synthesized
  source 1..20: mol_type = other DNA
cagggcccatctccttagga

SEQ ID NO: 37210 - DNA, 20 bp, synthetic construct
  misc_feature 1..20: note = chemically synthesized
  source 1..20: mol_type = other DNA
cccatctccttaggaaggtg

SEQ ID NO: 37211 - DNA, 20 bp, synthetic construct
  misc_feature 1..20: note = chemically synthesized
  source 1..20: mol_type = other DNA
ccatctccttaggaaggtgc

SEQ ID NO: 37212 - DNA, 20 bp, synthetic construct
  misc_feature 1..20: note = chemically synthesized
  source 1..20: mol_type = other DNA
catctccttaggaaggtgcg

SEQ ID NO: 37213 - DNA, 20 bp, synthetic construct
  misc_feature 1..20: note = chemically synthesized
  source 1..20: mol_type = other DNA
gacacatcttccatccaact

SEQ ID NO: 37214 - DNA, 20 bp, synthetic construct
  misc_feature 1..20: note = chemically synthesized
  source 1..20: mol_type = other DNA
acatcttccatccaactcag

SEQ ID NO: 37215 - DNA, 20 bp, synthetic construct
  misc_feature 1..20: note = chemically synthesized
  source 1..20: mol_type = other DNA
catcttccatccaactcaga

SEQ ID NO: 37216 - DNA, 20 bp, synthetic construct
  misc_feature 1..20: note = chemically synthesized
  source 1..20: mol_type = other DNA
tcttccatccaactcagaag

SEQ ID NO: 37217 - DNA, 20 bp, synthetic construct
  misc_feature 1..20: note = chemically synthesized
  source 1..20: mol_type = other DNA
cttccatccaactcagaagg

SEQ ID NO: 37218 - DNA, 20 bp, synthetic construct
  misc_feature 1..20: note = chemically synthesized
  source 1..20: mol_type = other DNA
ttccatccaactcagaagga

SEQ ID NO: 37219 - DNA, 20 bp, synthetic construct
  misc_feature 1..20: note = chemically synthesized
  source 1..20: mol_type = other DNA
catccaactcagaaggaggg

SEQ ID NO: 37220 - DNA, 20 bp, synthetic construct
  misc_feature 1..20: note = chemically synthesized
  source 1..20: mol_type = other DNA
tccaactcagaaggagggca

SEQ ID NO: 37221 - DNA, 20 bp, synthetic construct
  misc_feature 1..20: note = chemically synthesized
  source 1..20: mol_type = other DNA
aactcagaaggagggcagag

SEQ ID NO: 37222 - DNA, 20 bp, synthetic construct
  misc_feature 1..20: note = chemically synthesized
  source 1..20: mol_type = other DNA
actcagaaggagggcagagt

SEQ ID NO: 37223 - DNA, 20 bp, synthetic construct
  misc_feature 1..20: note = chemically synthesized
  source 1..20: mol_type = other DNA
aggagggcagagtaggaaat

SEQ ID NO: 37224 - DNA, 20 bp, synthetic construct
  misc_feature 1..20: note = chemically synthesized
  source 1..20: mol_type = other DNA
agggcagagtaggaaatgag

SEQ ID NO: 37225 - DNA, 20 bp, synthetic construct
  misc_feature 1..20: note = chemically synthesized
  source 1..20: mol_type = other DNA
agagtaggaaatgagaagat

SEQ ID NO: 37226 - DNA, 20 bp, synthetic construct
  misc_feature 1..20: note = chemically synthesized
  source 1..20: mol_type = other DNA
gagtaggaaatgagaagatg

SEQ ID NO: 37227 - DNA, 20 bp, synthetic construct
  misc_feature 1..20: note = chemically synthesized
  source 1..20: mol_type = other DNA
agtaggaaatgagaagatga

SEQ ID NO: 37228 - DNA, 20 bp, synthetic construct
  misc_feature 1..20: note = chemically synthesized
  source 1..20: mol_type = other DNA
ggaaatgagaagatgaggga

SEQ ID NO: 37229 - DNA, 20 bp, synthetic construct
  misc_feature 1..20: note = chemically synthesized
  source 1..20: mol_type = other DNA
gaaatgagaagatgagggaa

SEQ ID NO: 37230 - DNA, 20 bp, synthetic construct
  misc_feature 1..20: note = chemically synthesized
  source 1..20: mol_type = other DNA
aatgagaagatgagggaaag

SEQ ID NO: 37231 - DNA, 20 bp, synthetic construct
  misc_feature 1..20: note = chemically synthesized
  source 1..20: mol_type = other DNA
atgagaagatgagggaaagg

SEQ ID NO: 37232 - DNA, 20 bp, synthetic construct
  misc_feature 1..20: note = chemically synthesized
  source 1..20: mol_type = other DNA
tcctctttcacttgtttatg

SEQ ID NO: 37233 - DNA, 20 bp, synthetic construct
  misc_feature 1..20: note = chemically synthesized
  source 1..20: mol_type = other DNA
tgtttatgtagactgtataa

SEQ ID NO: 37234 - DNA, 20 bp, synthetic construct
  misc_feature 1..20: note = chemically synthesized
  source 1..20: mol_type = other DNA
actatttactacattttctt

SEQ ID NO: 37235 - DNA, 20 bp, synthetic construct
  misc_feature 1..20: note = chemically synthesized
  source 1..20: mol_type = other DNA
ctatttactacattttcttg

SEQ ID NO: 37236 - DNA, 20 bp, synthetic construct
  misc_feature 1..20: note = chemically synthesized
  source 1..20: mol_type = other DNA
ctacattttcttgaggctaa

SEQ ID NO: 37237 - DNA, 20 bp, synthetic construct
  misc_feature 1..20: note = chemically synthesized
  source 1..20: mol_type = other DNA
tgttccttcttcatactaca

SEQ ID NO: 37238 - DNA, 20 bp, synthetic construct
  misc_feature 1..20: note = chemically synthesized
  source 1..20: mol_type = other DNA
ctcctttactcccttgtatc

SEQ ID NO: 37239 - DNA, 20 bp, synthetic construct
  misc_feature 1..20: note = chemically synthesized
  source 1..20: mol_type = other DNA
acattcaaattatgttctca

SEQ ID NO: 37240 - DNA, 20 bp, synthetic construct
  misc_feature 1..20: note = chemically synthesized
  source 1..20: mol_type = other DNA
tcaaattatgttctcaaagt

SEQ ID NO: 37241 - DNA, 20 bp, synthetic construct
  misc_feature 1..20: note = chemically synthesized
  source 1..20: mol_type = other DNA
agcatgacaacttttttcca

SEQ ID NO: 37242 - DNA, 20 bp, synthetic construct
  misc_feature 1..20: note = chemically synthesized
  source 1..20: mol_type = other DNA
ctgtatgtatttatgcatct

SEQ ID NO: 37243 - DNA, 20 bp, synthetic construct
  misc_feature 1..20: note = chemically synthesized
  source 1..20: mol_type = other DNA
atgtatttatgcatcttggt

SEQ ID NO: 37244 - DNA, 20 bp, synthetic construct
  misc_feature 1..20: note = chemically synthesized
  source 1..20: mol_type = other DNA
gtatttatgcatcttggtga

SEQ ID NO: 37245 - DNA, 20 bp, synthetic construct
  misc_feature 1..20: note = chemically synthesized
  source 1..20: mol_type = other DNA
cttggtgagagtgttgctac

SEQ ID NO: 37246 - DNA, 20 bp, synthetic construct
  misc_feature 1..20: note = chemically synthesized
  source 1..20: mol_type = other DNA
tgagagtgttgctacaagta

SEQ ID NO: 37247 - DNA, 20 bp, synthetic construct
  misc_feature 1..20: note = chemically synthesized
  source 1..20: mol_type = other DNA
gagagtgttgctacaagtat

SEQ ID NO: 37248 - DNA, 20 bp, synthetic construct
  misc_feature 1..20: note = chemically synthesized
  source 1..20: mol_type = other DNA
gtataggaatcttattcatc

SEQ ID NO: 37249 - DNA, 20 bp, synthetic construct
  misc_feature 1..20: note = chemically synthesized
  source 1..20: mol_type = other DNA
atatatcatcatgtgaaatt

SEQ ID NO: 37250 - DNA, 20 bp, synthetic construct
  misc_feature 1..20: note = chemically synthesized
  source 1..20: mol_type = other DNA
tatatcatcatgtgaaattc

SEQ ID NO: 37251 - DNA, 20 bp, synthetic construct
  misc_feature 1..20: note = chemically synthesized
  source 1..20: mol_type = other DNA
tcatgtgaaattcaggtcaa

SEQ ID NO: 37252 - DNA, 20 bp, synthetic construct
  misc_feature 1..20: note = chemically synthesized
  source 1..20: mol_type = other DNA
attcaggtcaatagaacatc

SEQ ID NO: 37253 - DNA, 20 bp, synthetic construct
  misc_feature 1..20: note = chemically synthesized
  source 1..20: mol_type = other DNA
tcaatagaacatctagaatg

SEQ ID NO: 37254 - DNA, 20 bp, synthetic construct
  misc_feature 1..20: note = chemically synthesized
  source 1..20: mol_type = other DNA
tagaacatctagaatgaagc

SEQ ID NO: 37255 - DNA, 20 bp, synthetic construct
  misc_feature 1..20: note = chemically synthesized
  source 1..20: mol_type = other DNA
tctagaatgaagctagaatg

SEQ ID NO: 37256 - DNA, 20 bp, synthetic construct
  misc_feature 1..20: note = chemically synthesized
  source 1..20: mol_type = other DNA
agaatgaagctagaatgaag

SEQ ID NO: 37257 - DNA, 20 bp, synthetic construct
  misc_feature 1..20: note = chemically synthesized
  source 1..20: mol_type = other DNA
gaatgaagctagaatgaagc

SEQ ID NO: 37258 - DNA, 20 bp, synthetic construct
  misc_feature 1..20: note = chemically synthesized
  source 1..20: mol_type = other DNA
aatgaagctagaatgaagca

SEQ ID NO: 37259 - DNA, 20 bp, synthetic construct
  misc_feature 1..20: note = chemically synthesized
  source 1..20: mol_type = other DNA
agctagaatgaagcagggct

SEQ ID NO: 37260 - DNA, 20 bp, synthetic construct
  misc_feature 1..20: note = chemically synthesized
  source 1..20: mol_type = other DNA
ttagatctatgatttttctc

SEQ ID NO: 37261 - DNA, 20 bp, synthetic construct
  misc_feature 1..20: note = chemically synthesized
  source 1..20: mol_type = other DNA
tatgatttttctcaagtttt

SEQ ID NO: 37262 - DNA, 20 bp, synthetic construct
  misc_feature 1..20: note = chemically synthesized
  source 1..20: mol_type = other DNA
ttctcaagttttcagcatta

SEQ ID NO: 37263 - DNA, 20 bp, synthetic construct
  misc_feature 1..20: note = chemically synthesized
  source 1..20: mol_type = other DNA
tcagcattatggatcctgtt

SEQ ID NO: 37264 - DNA, 20 bp, synthetic construct
  misc_feature 1..20: note = chemically synthesized
  source 1..20: mol_type = other DNA
tggatcctgttgagacattc

SEQ ID NO: 37265 - DNA, 20 bp, synthetic construct
  misc_feature 1..20: note = chemically synthesized
  source 1..20: mol_type = other DNA
ggatcctgttgagacattca

SEQ ID NO: 37266 - DNA, 20 bp, synthetic construct
  misc_feature 1..20: note = chemically synthesized
  source 1..20: mol_type = other DNA
gatcctgttgagacattcaa

SEQ ID NO: 37267 - DNA, 20 bp, synthetic construct
  misc_feature 1..20: note = chemically synthesized
  source 1..20: mol_type = other DNA
caatattctgcataaaattg

SEQ ID NO: 37268 - DNA, 20 bp, synthetic construct
  misc_feature 1..20: note = chemically synthesized
  source 1..20: mol_type = other DNA
aatattctgcataaaattga

SEQ ID NO: 37269 - DNA, 20 bp, synthetic construct
  misc_feature 1..20: note = chemically synthesized
  source 1..20: mol_type = other DNA
atattctgcataaaattgaa

SEQ ID NO: 37270 - DNA, 20 bp, synthetic construct
  misc_feature 1..20: note = chemically synthesized
  source 1..20: mol_type = other DNA
attctgcataaaattgaagg

SEQ ID NO: 37271 - DNA, 20 bp, synthetic construct
  misc_feature 1..20: note = chemically synthesized
  source 1..20: mol_type = other DNA
aaaattgaagggagaatatt

SEQ ID NO: 37272 - DNA, 20 bp, synthetic construct
  misc_feature 1..20: note = chemically synthesized
  source 1..20: mol_type = other DNA
taagcactattataaactca

SEQ ID NO: 37273 - DNA, 20 bp, synthetic construct
  misc_feature 1..20: note = chemically synthesized
  source 1..20: mol_type = other DNA
aagcactattataaactcat

SEQ ID NO: 37274 - DNA, 20 bp, synthetic construct
  misc_feature 1..20: note = chemically synthesized
  source 1..20: mol_type = other DNA
ataaactcataggccatatt

SEQ ID NO: 37275 - DNA, 20 bp, synthetic construct
  misc_feature 1..20: note = chemically synthesized
  source 1..20: mol_type = other DNA
aaactcataggccatattga

SEQ ID NO: 37276 - DNA, 20 bp, synthetic construct
  misc_feature 1..20: note = chemically synthesized
  source 1..20: mol_type = other DNA
ggccatattgagagcttctt

SEQ ID NO: 37277 - DNA, 20 bp, synthetic construct
  misc_feature 1..20: note = chemically synthesized
  source 1..20: mol_type = other DNA
ccatattgagagcttcttaa

SEQ ID NO: 37278 - DNA, 20 bp, synthetic construct
  misc_feature 1..20: note = chemically synthesized
  source 1..20: mol_type = other DNA
tattgagagcttcttaagag

SEQ ID NO: 37279 - DNA, 20 bp, synthetic construct
  misc_feature 1..20: note = chemically synthesized
  source 1..20: mol_type = other DNA
agcagactgtgcttattaca

SEQ ID NO: 37280 - DNA, 20 bp, synthetic construct
  misc_feature 1..20: note = chemically synthesized
  source 1..20: mol_type = other DNA
gtgcttattacatggttatt

SEQ ID NO: 37281 - DNA, 20 bp, synthetic construct
  misc_feature 1..20: note = chemically synthesized
  source 1..20: mol_type = other DNA
tggttatttagaactaaaca

SEQ ID NO: 37282 - DNA, 20 bp, synthetic construct
  misc_feature 1..20: note = chemically synthesized
  source 1..20: mol_type = other DNA
atttagaactaaacacagtg

SEQ ID NO: 37283 - DNA, 20 bp, synthetic construct
  misc_feature 1..20: note = chemically synthesized
  source 1..20: mol_type = other DNA
ctaaacacagtgcagttgtg

SEQ ID NO: 37284 - DNA, 20 bp, synthetic construct
  misc_feature 1..20: note = chemically synthesized
  source 1..20: mol_type = other DNA
aattctgtgctgactcaaaa

SEQ ID NO: 37285 - DNA, 20 bp, synthetic construct
  misc_feature 1..20: note = chemically synthesized
  source 1..20: mol_type = other DNA
agtcattttccaacttgtcc

SEQ ID NO: 37286 - DNA, 20 bp, synthetic construct
  misc_feature 1..20: note = chemically synthesized
  source 1..20: mol_type = other DNA
attttccaacttgtcccaga

SEQ ID NO: 37287 - DNA, 20 bp, synthetic construct
  misc_feature 1..20: note = chemically synthesized
  source 1..20: mol_type = other DNA
caacttgtcccagatggtat

SEQ ID NO: 37288 - DNA, 20 bp, synthetic construct
  misc_feature 1..20: note = chemically synthesized
  source 1..20: mol_type = other DNA
tcccagatggtattggtgaa

SEQ ID NO: 37289 - DNA, 20 bp, synthetic construct
  misc_feature 1..20: note = chemically synthesized
  source 1..20: mol_type = other DNA
ccagatggtattggtgaatg

SEQ ID NO: 37290 - DNA, 20 bp, synthetic construct
  misc_feature 1..20: note = chemically synthesized
  source 1..20: mol_type = other DNA
attggtgaatggagctccta

SEQ ID NO: 37291 - DNA, 20 bp, synthetic construct
  misc_feature 1..20: note = chemically synthesized
  source 1..20: mol_type = other DNA
ttggtgaatggagctcctac

SEQ ID NO: 37292 - DNA, 20 bp, synthetic construct
  misc_feature 1..20: note = chemically synthesized
  source 1..20: mol_type = other DNA
tatcttcatatatgatatat

SEQ ID NO: 37293 - DNA, 20 bp, synthetic construct
  misc_feature 1..20: note = chemically synthesized
  source 1..20: mol_type = other DNA
catatatgatatatcagttc

SEQ ID NO: 37294 - DNA, 20 bp, synthetic construct
  misc_feature 1..20: note = chemically synthesized
  source 1..20: mol_type = other DNA
atatatgatatatcagttca

SEQ ID NO: 37295 - DNA, 20 bp, synthetic construct
  misc_feature 1..20: note = chemically synthesized
  source 1..20: mol_type = other DNA
aggaaaaatcatcacacatc

SEQ ID NO: 37296 - DNA, 20 bp, synthetic construct
  misc_feature 1..20: note = chemically synthesized
  source 1..20: mol_type = other DNA
aaaatcatcacacatcaagt

SEQ ID NO: 37297 - DNA, 20 bp, synthetic construct
  misc_feature 1..20: note = chemically synthesized
  source 1..20: mol_type = other DNA
aaatcatcacacatcaagtc

SEQ ID NO: 37298 - DNA, 20 bp, synthetic construct
  misc_feature 1..20: note = chemically synthesized
  source 1..20: mol_type = other DNA
cacacatcaagtcaggaccc

SEQ ID NO: 37299 - DNA, 20 bp, synthetic construct
  misc_feature 1..20: note = chemically synthesized
  source 1..20: mol_type = other DNA
aagtcaggaccccagatcct

SEQ ID NO: 37300 - DNA, 20 bp, synthetic construct
  misc_feature 1..20: note = chemically synthesized
  source 1..20: mol_type = other DNA
agtcaggaccccagatcctt

SEQ ID NO: 37301 - DNA, 20 bp, synthetic construct
  misc_feature 1..20: note = chemically synthesized
  source 1..20: mol_type = other DNA
tcactaaacatttatgttct

SEQ ID NO: 37302 - DNA, 20 bp, synthetic construct
  misc_feature 1..20: note = chemically synthesized
  source 1..20: mol_type = other DNA
aaacatttatgttctgagtt

SEQ ID NO: 37303 - DNA, 20 bp, synthetic construct
  misc_feature 1..20: note = chemically synthesized
  source 1..20: mol_type = other DNA
acatttatgttctgagttga

SEQ ID NO: 37304 - DNA, 20 bp, synthetic construct
  misc_feature 1..20: note = chemically synthesized
  source 1..20: mol_type = other DNA
agagctgcctatcaatttca

SEQ ID NO: 37305 - DNA, 20 bp, synthetic construct
  misc_feature 1..20: note = chemically synthesized
  source 1..20: mol_type = other DNA
gcctatcaatttcacagcca

SEQ ID NO: 37306 - DNA, 20 bp, synthetic construct
  misc_feature 1..20: note = chemically synthesized
  source 1..20: mol_type = other DNA
atagctgctccacctttatc

SEQ ID NO: 37307 - DNA, 20 bp, synthetic construct
  misc_feature 1..20: note = chemically synthesized
  source 1..20: mol_type = other DNA
ccacctttatccagaaaaac

SEQ ID NO: 37308 - DNA, 20 bp, synthetic construct
  misc_feature 1..20: note = chemically synthesized
  source 1..20: mol_type = other DNA
aaaactagttcttgtgcttc

SEQ ID NO: 37309 - DNA, 20 bp, synthetic construct
  misc_feature 1..20: note = chemically synthesized
  source 1..20: mol_type = other DNA
attttcttaacacttgttaa

SEQ ID NO: 37310 - DNA, 20 bp, synthetic construct
  misc_feature 1..20: note = chemically synthesized
  source 1..20: mol_type = other DNA
cttaacacttgttaatagct

SEQ ID NO: 37311 - DNA, 20 bp, synthetic construct
  misc_feature 1..20: note = chemically synthesized
  source 1..20: mol_type = other DNA
taatagctaagccatctgaa

SEQ ID NO: 37312 - DNA, 20 bp, synthetic construct
  misc_feature 1..20: note = chemically synthesized
  source 1..20: mol_type = other DNA
ctgaatggaattttgccaca

SEQ ID NO: 37313 - DNA, 20 bp, synthetic construct
  misc_feature 1..20: note = chemically synthesized
  source 1..20: mol_type = other DNA
tggaattttgccacatagtg

SEQ ID NO: 37314 - DNA, 20 bp, synthetic construct
  misc_feature 1..20: note = chemically synthesized
  source 1..20: mol_type = other DNA
tttgccacatagtgcagcct

SEQ ID NO: 37315 - DNA, 20 bp, synthetic construct
  misc_feature 1..20: note = chemically synthesized
  source 1..20: mol_type = other DNA
ttgccacatagtgcagcctt

SEQ ID NO: 37316 - DNA, 20 bp, synthetic construct
  misc_feature 1..20: note = chemically synthesized
  source 1..20: mol_type = other DNA
gccacatagtgcagccttgg

SEQ ID NO: 37317 - DNA, 20 bp, synthetic construct
  misc_feature 1..20: note = chemically synthesized
  source 1..20: mol_type = other DNA
cagccttgggagcatgcata

SEQ ID NO: 37318 - DNA, 20 bp, synthetic construct
  misc_feature 1..20: note = chemically synthesized
  source 1..20: mol_type = other DNA
ttgggagcatgcatacagta

SEQ ID NO: 37319 - DNA, 20 bp, synthetic construct
  misc_feature 1..20: note = chemically synthesized
  source 1..20: mol_type = other DNA
atacagtatggcttcatctc

SEQ ID NO: 37320 - DNA, 20 bp, synthetic construct
  misc_feature 1..20: note = chemically synthesized
  source 1..20: mol_type = other DNA
atctctggtgacactgctta

SEQ ID NO: 37321 - DNA, 20 bp, synthetic construct
  misc_feature 1..20: note = chemically synthesized
  source 1..20: mol_type = other DNA
tctggtgacactgcttatag

SEQ ID NO: 37322 - DNA, 20 bp, synthetic construct
  misc_feature 1..20: note = chemically synthesized
  source 1..20: mol_type = other DNA
ctggtgacactgcttatagt

SEQ ID NO: 37323 - DNA, 20 bp, synthetic construct
  misc_feature 1..20: note = chemically synthesized
  source 1..20: mol_type = other DNA
acactgcttatagtgggcct

SEQ ID NO: 37324 - DNA, 20 bp, synthetic construct
  misc_feature 1..20: note = chemically synthesized
  source 1..20: mol_type = other DNA
agtgggcctcagtttgatga

SEQ ID NO: 37325 - DNA, 20 bp, synthetic construct
  misc_feature 1..20: note = chemically synthesized
  source 1..20: mol_type = other DNA
ctcagtttgatgacagtatc

SEQ ID NO: 37326 - DNA, 20 bp, synthetic construct
  misc_feature 1..20: note = chemically synthesized
  source 1..20: mol_type = other DNA
atgacagtatctagctctcc

SEQ ID NO: 37327 - DNA, 20 bp, synthetic construct
  misc_feature 1..20: note = chemically synthesized
  source 1..20: mol_type = other DNA
aatccccacacgcctgcctc

SEQ ID NO: 37328 - DNA, 20 bp, synthetic construct
  misc_feature 1..20: note = chemically synthesized
  source 1..20: mol_type = other DNA
atccccacacgcctgcctct

SEQ ID NO: 37329 - DNA, 20 bp, synthetic construct
  misc_feature 1..20: note = chemically synthesized
  source 1..20: mol_type = other DNA
tgcctctgggtaaatatcaa

SEQ ID NO: 37330 - DNA, 20 bp, synthetic construct
  misc_feature 1..20: note = chemically synthesized
  source 1..20: mol_type = other DNA
ggtaaatatcaacggcttcc

SEQ ID NO: 37331 - DNA, 20 bp, synthetic construct
  misc_feature 1..20: note = chemically synthesized
  source 1..20: mol_type = other DNA
tatcaacggcttcccagtgt

SEQ ID NO: 37332 - DNA, 20 bp, synthetic construct
  misc_feature 1..20: note = chemically synthesized
  source 1..20: mol_type = other DNA
atcaacggcttcccagtgtt

SEQ ID NO: 37333 - DNA, 20 bp, synthetic construct
  misc_feature 1..20: note = chemically synthesized
  source 1..20: mol_type = other DNA
aacggcttcccagtgttggg

SEQ ID NO: 37334 - DNA, 20 bp, synthetic construct
  misc_feature 1..20: note = chemically synthesized
  source 1..20: mol_type = other DNA
acggcttcccagtgttgggc

SEQ ID NO: 37335 - DNA, 20 bp, synthetic construct
  misc_feature 1..20: note = chemically synthesized
  source 1..20: mol_type = other DNA
tctttttattcccaaaatct

SEQ ID NO: 37336 - DNA, 20 bp, synthetic construct
  misc_feature 1..20: note = chemically synthesized
  source 1..20: mol_type = other DNA
atttacctttcattttcttt

SEQ ID NO: 37337 - DNA, 20 bp, synthetic construct
  misc_feature 1..20: note = chemically synthesized
  source 1..20: mol_type = other DNA
tttacctttcattttctttg

SEQ ID NO: 37338 - DNA, 20 bp, synthetic construct
  misc_feature 1..20: note = chemically synthesized
  source 1..20: mol_type = other DNA
tgtcttacttttaatgaccc

SEQ ID NO: 37339 - DNA, 20 bp, synthetic construct
  misc_feature 1..20: note = chemically synthesized
  source 1..20: mol_type = other DNA
tacttttaatgacccaagct

SEQ ID NO: 37340 - DNA, 20 bp, synthetic construct
  misc_feature 1..20: note = chemically synthesized
  source 1..20: mol_type = other DNA
cttttaatgacccaagctta

SEQ ID NO: 37341 - DNA, 20 bp, synthetic construct
  misc_feature 1..20: note = chemically synthesized
  source 1..20: mol_type = other DNA
taatgacccaagcttagaga

SEQ ID NO: 37342 - DNA, 20 bp, synthetic construct
  misc_feature 1..20: note = chemically synthesized
  source 1..20: mol_type = other DNA
atgacccaagcttagagatg

SEQ ID NO: 37343 - DNA, 20 bp, synthetic construct
  misc_feature 1..20: note = chemically synthesized
  source 1..20: mol_type = other DNA
tgacccaagcttagagatgg

SEQ ID NO: 37344 - DNA, 20 bp, synthetic construct
  misc_feature 1..20: note = chemically synthesized
  source 1..20: mol_type = other DNA
gacccaagcttagagatgga

SEQ ID NO: 37345 - DNA, 20 bp, synthetic construct
  misc_feature 1..20: note = chemically synthesized
  source 1..20: mol_type = other DNA
cccaagcttagagatggagg

SEQ ID NO: 37346 - DNA, 20 bp, synthetic construct
  misc_feature 1..20: note = chemically synthesized
  source 1..20: mol_type = other DNA
taataaaaaactttcttttt

SEQ ID NO: 37347 - DNA, 20 bp, synthetic construct
  misc_feature 1..20: note = chemically synthesized
  source 1..20: mol_type = other DNA
aaactttcttttttggtttc

SEQ ID NO: 37348 - DNA, 20 bp, synthetic construct
  misc_feature 1..20: note = chemically synthesized
  source 1..20: mol_type = other DNA
ttttggtttcaagtgtttta

SEQ ID NO: 37349 - DNA, 20 bp, synthetic construct
  misc_feature 1..20: note = chemically synthesized
  source 1..20: mol_type = other DNA
ttttatggccaatttctcta

SEQ ID NO: 37350 - DNA, 20 bp, synthetic construct
  misc_feature 1..20: note = chemically synthesized
  source 1..20: mol_type = other DNA
taaagacgttattgtttttt

SEQ ID NO: 37351 - DNA, 20 bp, synthetic construct
  misc_feature 1..20: note = chemically synthesized
  source 1..20: mol_type = other DNA
aaagacgttattgtttttta

SEQ ID NO: 37352 - DNA, 20 bp, synthetic construct
  misc_feature 1..20: note = chemically synthesized
  source 1..20: mol_type = other DNA
cgttattgttttttaaggaa

SEQ ID NO: 37353 - DNA, 20 bp, synthetic construct
  misc_feature 1..20: note = chemically synthesized
  source 1..20: mol_type = other DNA
aagctcacaaacattttaaa

SEQ ID NO: 37354 - DNA, 20 bp, synthetic construct
  misc_feature 1..20: note = chemically synthesized
  source 1..20: mol_type = other DNA
tttaaaaagtacttgtgctc

SEQ ID NO: 37355 - DNA, 20 bp, synthetic construct
  misc_feature 1..20: note = chemically synthesized
  source 1..20: mol_type = other DNA
gtacttgtgctctggaaatc

SEQ ID NO: 37356 - DNA, 20 bp, synthetic construct
  misc_feature 1..20: note = chemically synthesized
  source 1..20: mol_type = other DNA
tccttacacaatttttttta

SEQ ID NO: 37357 - DNA, 20 bp, synthetic construct
  misc_feature 1..20: note = chemically synthesized
  source 1..20: mol_type = other DNA
ccttacacaattttttttaa

SEQ ID NO: 37358 - DNA, 20 bp, synthetic construct
  misc_feature 1..20: note = chemically synthesized
  source 1..20: mol_type = other DNA
aattttttttaaaggaatcc

SEQ ID NO: 37359 - DNA, 20 bp, synthetic construct
  misc_feature 1..20: note = chemically synthesized
  source 1..20: mol_type = other DNA
taaaggaatcccagatttta

SEQ ID NO: 37360 - DNA, 20 bp, synthetic construct
  misc_feature 1..20: note = chemically synthesized
  source 1..20: mol_type = other DNA
tttcttctatgtttaccctt

SEQ ID NO: 37361 - DNA, 20 bp, synthetic construct
  misc_feature 1..20: note = chemically synthesized
  source 1..20: mol_type = other DNA
attcctcaatctgtgttttt

SEQ ID NO: 37362 - DNA, 20 bp, synthetic construct
  misc_feature 1..20: note = chemically synthesized
  source 1..20: mol_type = other DNA
aatctgtgtttttaagcatg

SEQ ID NO: 37363 - DNA, 20 bp, synthetic construct
  misc_feature 1..20: note = chemically synthesized
  source 1..20: mol_type = other DNA
atctgtgtttttaagcatga

SEQ ID NO: 37364 - DNA, 20 bp, synthetic construct
  misc_feature 1..20: note = chemically synthesized
  source 1..20: mol_type = other DNA
taagcatgaaggatctttcg

SEQ ID NO: 37365 - DNA, 20 bp, synthetic construct
  misc_feature 1..20: note = chemically synthesized
  source 1..20: mol_type = other DNA
aagcatgaaggatctttcga

SEQ ID NO: 37366 - DNA, 20 bp, synthetic construct
  misc_feature 1..20: note = chemically synthesized
  source 1..20: mol_type = other DNA
catgaaggatctttcgaagg

SEQ ID NO: 37367 - DNA, 20 bp, synthetic construct
  misc_feature 1..20: note = chemically synthesized
  source 1..20: mol_type = other DNA
tttgtgtaataattataatt

SEQ ID NO: 37368 - DNA, 20 bp, synthetic construct
  misc_feature 1..20: note = chemically synthesized
  source 1..20: mol_type = other DNA
aattcaatgtgatttaattt

SEQ ID NO: 37369 - DNA, 20 bp, synthetic construct
  misc_feature 1..20: note = chemically synthesized
  source 1..20: mol_type = other DNA
attcaatgtgatttaatttt

SEQ ID NO: 37370 - DNA, 20 bp, synthetic construct
  misc_feature 1..20: note = chemically synthesized
  source 1..20: mol_type = other DNA
ttcaatgtgatttaatttta

SEQ ID NO: 37371 - DNA, 20 bp, synthetic construct
  misc_feature 1..20: note = chemically synthesized
  source 1..20: mol_type = other DNA
atttaattttagggattccc

SEQ ID NO: 37372 - DNA, 20 bp, synthetic construct
  misc_feature 1..20: note = chemically synthesized
  source 1..20: mol_type = other DNA
ttttagggattccctagtgt

SEQ ID NO: 37373 - DNA, 20 bp, synthetic construct
  misc_feature 1..20: note = chemically synthesized
  source 1..20: mol_type = other DNA
agtgttggtgatttcaatct

SEQ ID NO: 37374 - DNA, 20 bp, synthetic construct
  misc_feature 1..20: note = chemically synthesized
  source 1..20: mol_type = other DNA
ttggtgatttcaatctcagt

SEQ ID NO: 37375 - DNA, 20 bp, synthetic construct
  misc_feature 1..20: note = chemically synthesized
  source 1..20: mol_type = other DNA
tgatttcaatctcagtaagt

SEQ ID NO: 37376 - DNA, 20 bp, synthetic construct
  misc_feature 1..20: note = chemically synthesized
  source 1..20: mol_type = other DNA
aagttagtaatcctgactca

SEQ ID NO: 37377 - DNA, 20 bp, synthetic construct
  misc_feature 1..20: note = chemically synthesized
  source 1..20: mol_type = other DNA
agttagtaatcctgactcac

SEQ ID NO: 37378 - DNA, 20 bp, synthetic construct
  misc_feature 1..20: note = chemically synthesized
  source 1..20: mol_type = other DNA
ttagtaatcctgactcacag

SEQ ID NO: 37379 - DNA, 20 bp, synthetic construct
  misc_feature 1..20: note = chemically synthesized
  source 1..20: mol_type = other DNA
ctgactcacaggagctgata

SEQ ID NO: 37380 - DNA, 20 bp, synthetic construct
  misc_feature 1..20: note = chemically synthesized
  source 1..20: mol_type = other DNA
gactcacaggagctgataca

SEQ ID NO: 37381 - DNA, 20 bp, synthetic construct
  misc_feature 1..20: note = chemically synthesized
  source 1..20: mol_type = other DNA
actcacaggagctgatacag

SEQ ID NO: 37382 - DNA, 20 bp, synthetic construct
  misc_feature 1..20: note = chemically synthesized
  source 1..20: mol_type = other DNA
cacaggagctgatacagagg

SEQ ID NO: 37383 - DNA, 20 bp, synthetic construct
  misc_feature 1..20: note = chemically synthesized
  source 1..20: mol_type = other DNA
agctgatacagaggtagcat

SEQ ID NO: 37384 - DNA, 20 bp, synthetic construct
  misc_feature 1..20: note = chemically synthesized
  source 1..20: mol_type = other DNA
tctgatttatttttgatact

SEQ ID NO: 37385 - DNA, 20 bp, synthetic construct
  misc_feature 1..20: note = chemically synthesized
  source 1..20: mol_type = other DNA
ctgatttatttttgatactg

SEQ ID NO: 37386 - DNA, 20 bp, synthetic construct
  misc_feature 1..20: note = chemically synthesized
  source 1..20: mol_type = other DNA
gatactgaggccattttatg

SEQ ID NO: 37387 - DNA, 20 bp, synthetic construct
  misc_feature 1..20: note = chemically synthesized
  source 1..20: mol_type = other DNA
cattttatgaagaaaactgc

SEQ ID NO: 37388 - DNA, 20 bp, synthetic construct
  misc_feature 1..20: note = chemically synthesized
  source 1..20: mol_type = other DNA
attttatgaagaaaactgct

SEQ ID NO: 37389 - DNA, 20 bp, synthetic construct
  misc_feature 1..20: note = chemically synthesized
  source 1..20: mol_type = other DNA
aagaaaactgctaggtgcta

SEQ ID NO: 37390 - DNA, 20 bp, synthetic construct
  misc_feature 1..20: note = chemically synthesized
  source 1..20: mol_type = other DNA
aggtgctaaagacttgcctc

SEQ ID NO: 37391 - DNA, 20 bp, synthetic construct
  misc_feature 1..20: note = chemically synthesized
  source 1..20: mol_type = other DNA
ggtgctaaagacttgcctcc

SEQ ID NO: 37392 - DNA, 20 bp, synthetic construct
  misc_feature 1..20: note = chemically synthesized
  source 1..20: mol_type = other DNA
ttctgaatttctcgttaaat

SEQ ID NO: 37393 - DNA, 20 bp, synthetic construct
  misc_feature 1..20: note = chemically synthesized
  source 1..20: mol_type = other DNA
tttctcgttaaataagactg

SEQ ID NO: 37394 - DNA, 20 bp, synthetic construct
  misc_feature 1..20: note = chemically synthesized
  source 1..20: mol_type = other DNA
ctcgttaaataagactgcag

SEQ ID NO: 37395 - DNA, 20 bp, synthetic construct
  misc_feature 1..20: note = chemically synthesized
  source 1..20: mol_type = other DNA
cgttaaataagactgcagca

SEQ ID NO: 37396 - DNA, 20 bp, synthetic construct
  misc_feature 1..20: note = chemically synthesized
  source 1..20: mol_type = other DNA
aaataagactgcagcagagc

SEQ ID NO: 37397 - DNA, 20 bp, synthetic construct
  misc_feature 1..20: note = chemically synthesized
  source 1..20: mol_type = other DNA
actgcagcagagctggtaat

SEQ ID NO: 37398 - DNA, 20 bp, synthetic construct
  misc_feature 1..20: note = chemically synthesized
  source 1..20: mol_type = other DNA
tctttctcccatacccctct

SEQ ID NO: 37399 - DNA, 20 bp, synthetic construct
  misc_feature 1..20: note = chemically synthesized
  source 1..20: mol_type = other DNA
cccatacccctcttggatcg

SEQ ID NO: 37400 - DNA, 20 bp, synthetic construct
  misc_feature 1..20: note = chemically synthesized
  source 1..20: mol_type = other DNA
cctcttggatcgtggcaacc

SEQ ID NO: 37401 - DNA, 20 bp, synthetic construct
  misc_feature 1..20: note = chemically synthesized
  source 1..20: mol_type = other DNA
gatcgtggcaaccaagaaaa

SEQ ID NO: 37402 - DNA, 20 bp, synthetic construct
  misc_feature 1..20: note = chemically synthesized
  source 1..20: mol_type = other DNA
ggcaaccaagaaaacagaaa

SEQ ID NO: 37403 - DNA, 20 bp, synthetic construct
  misc_feature 1..20: note = chemically synthesized
  source 1..20: mol_type = other DNA
aaccaagaaaacagaaacag

SEQ ID NO: 37404 - DNA, 20 bp, synthetic construct
  misc_feature 1..20: note = chemically synthesized
  source 1..20: mol_type = other DNA
gaaaacagaaacagtagtga

SEQ ID NO: 37405 - DNA, 20 bp, synthetic construct
  misc_feature 1..20: note = chemically synthesized
  source 1..20: mol_type = other DNA
acagaaacagtagtgatggc

SEQ ID NO: 37406 - DNA, 20 bp, synthetic construct
  misc_feature 1..20: note = chemically synthesized
  source 1..20: mol_type = other DNA
gtagtgatggctggcatcct

SEQ ID NO: 37407 - DNA, 20 bp, synthetic construct
  misc_feature 1..20: note = chemically synthesized
  source 1..20: mol_type = other DNA
tagtgatggctggcatcctt

SEQ ID NO: 37408 - DNA, 20 bp, synthetic construct
  misc_feature 1..20: note = chemically synthesized
  source 1..20: mol_type = other DNA
tggctggcatccttaggctg

SEQ ID NO: 37409 - DNA, 20 bp, synthetic construct
  misc_feature 1..20: note = chemically synthesized
  source 1..20: mol_type = other DNA
cattataattttacctgtta

SEQ ID NO: 37410 - DNA, 20 bp, synthetic construct
  misc_feature 1..20: note = chemically synthesized
  source 1..20: mol_type = other DNA
tacctgttacagaactgcaa

SEQ ID NO: 37411 - DNA, 20 bp, synthetic construct
  misc_feature 1..20: note = chemically synthesized
  source 1..20: mol_type = other DNA
acagaactgcaacagttcct

SEQ ID NO: 37412 - DNA, 20 bp, synthetic construct
  misc_feature 1..20: note = chemically synthesized
  source 1..20: mol_type = other DNA
cagaactgcaacagttcctc

SEQ ID NO: 37413 - DNA, 20 bp, synthetic construct
  misc_feature 1..20: note = chemically synthesized
  source 1..20: mol_type = other DNA
gaactgcaacagttcctcag

SEQ ID NO: 37414 - DNA, 20 bp, synthetic construct
  misc_feature 1..20: note = chemically synthesized
  source 1..20: mol_type = other DNA
gcaacagttcctcaggagtt

SEQ ID NO: 37415 - DNA, 20 bp, synthetic construct
  misc_feature 1..20: note = chemically synthesized
  source 1..20: mol_type = other DNA
aacagttcctcaggagtttg

SEQ ID NO: 37416 - DNA, 20 bp, synthetic construct
  misc_feature 1..20: note = chemically synthesized
  source 1..20: mol_type = other DNA
cctcaggagtttggagttga

SEQ ID NO: 37417 - DNA, 20 bp, synthetic construct
  misc_feature 1..20: note = chemically synthesized
  source 1..20: mol_type = other DNA
ggagtttggagttgatggaa

SEQ ID NO: 37418 - DNA, 20 bp, synthetic construct
  misc_feature 1..20: note = chemically synthesized
  source 1..20: mol_type = other DNA
gtttggagttgatggaaaag

SEQ ID NO: 37419 - DNA, 20 bp, synthetic construct
  misc_feature 1..20: note = chemically synthesized
  source 1..20: mol_type = other DNA
ttggagttgatggaaaagca

SEQ ID NO: 37420 - DNA, 20 bp, synthetic construct
  misc_feature 1..20: note = chemically synthesized
  source 1..20: mol_type = other DNA
ggagttgatggaaaagcaga

SEQ ID NO: 37421 - DNA, 20 bp, synthetic construct
  misc_feature 1..20: note = chemically synthesized
  source 1..20: mol_type = other DNA
agttgatggaaaagcagaga

SEQ ID NO: 37422 - DNA, 20 bp, synthetic construct
  misc_feature 1..20: note = chemically synthesized
  source 1..20: mol_type = other DNA
gttgatggaaaagcagagag

SEQ ID NO: 37423 - DNA, 20 bp, synthetic construct
  misc_feature 1..20: note = chemically synthesized
  source 1..20: mol_type = other DNA
atggaaaagcagagagaggt

SEQ ID NO: 37424 - DNA, 20 bp, synthetic construct
  misc_feature 1..20: note = chemically synthesized
  source 1..20: mol_type = other DNA
gaaaagcagagagaggtaag

SEQ ID NO: 37425 - DNA, 20 bp, synthetic construct
  misc_feature 1..20: note = chemically synthesized
  source 1..20: mol_type = other DNA
aaaagcagagagaggtaaga

SEQ ID NO: 37426 - DNA, 20 bp, synthetic construct
  misc_feature 1..20: note = chemically synthesized
  source 1..20: mol_type = other DNA
gcagagagaggtaagaagga

SEQ ID NO: 37427 - DNA, 20 bp, synthetic construct
  misc_feature 1..20: note = chemically synthesized
  source 1..20: mol_type = other DNA
aggtaagaaggacagaaaac

SEQ ID NO: 37428 - DNA, 20 bp, synthetic construct
  misc_feature 1..20: note = chemically synthesized
  source 1..20: mol_type = other DNA
agaaggacagaaaaccagct

SEQ ID NO: 37429 - DNA, 20 bp, synthetic construct
  misc_feature 1..20: note = chemically synthesized
  source 1..20: mol_type = other DNA
accagctaagtatttaatta

SEQ ID NO: 37430 - DNA, 20 bp, synthetic construct
  misc_feature 1..20: note = chemically synthesized
  source 1..20: mol_type = other DNA
ccagctaagtatttaattat

SEQ ID NO: 37431 - DNA, 20 bp, synthetic construct
  misc_feature 1..20: note = chemically synthesized
  source 1..20: mol_type = other DNA
ttaattatgggaaataatgt

SEQ ID NO: 37432 - DNA, 20 bp, synthetic construct
  misc_feature 1..20: note = chemically synthesized
  source 1..20: mol_type = other DNA
ttatgggaaataatgttgga

SEQ ID NO: 37433 - DNA, 20 bp, synthetic construct
  misc_feature 1..20: note = chemically synthesized
  source 1..20: mol_type = other DNA
tatgggaaataatgttggaa

SEQ ID NO: 37434 - DNA, 20 bp, synthetic construct
  misc_feature 1..20: note = chemically synthesized
  source 1..20: mol_type = other DNA
atgggaaataatgttggaaa

SEQ ID NO: 37435 - DNA, 20 bp, synthetic construct
  misc_feature 1..20: note = chemically synthesized
  source 1..20: mol_type = other DNA
gaaataatgttggaaagggc

SEQ ID NO: 37436 - DNA, 20 bp, synthetic construct
  misc_feature 1..20: note = chemically synthesized
  source 1..20: mol_type = other DNA
ataatgttggaaagggcaag

SEQ ID NO: 37437 - DNA, 20 bp, synthetic construct
  misc_feature 1..20: note = chemically synthesized
  source 1..20: mol_type = other DNA
atgttggaaagggcaagtgg

SEQ ID NO: 37438 - DNA, 20 bp, synthetic construct
  misc_feature 1..20: note = chemically synthesized
  source 1..20: mol_type = other DNA
tggaaagggcaagtggcaga

SEQ ID NO: 37439 - DNA, 20 bp, synthetic construct
  misc_feature 1..20: note = chemically synthesized
  source 1..20: mol_type = other DNA
aagggcaagtggcagaaaga

SEQ ID NO: 37440 - DNA, 20 bp, synthetic construct
  misc_feature 1..20: note = chemically synthesized
  source 1..20: mol_type = other DNA
gcaagtggcagaaagaaagc

SEQ ID NO: 37441 - DNA, 20 bp, synthetic construct
  misc_feature 1..20: note = chemically synthesized
  source 1..20: mol_type = other DNA
gcagaaagaaagccagtaaa

SEQ ID NO: 37442 - DNA, 20 bp, synthetic construct
  misc_feature 1..20: note = chemically synthesized
  source 1..20: mol_type = other DNA
agaaagccagtaaatggtga

SEQ ID NO: 37443 - DNA, 20 bp, synthetic construct
  misc_feature 1..20: note = chemically synthesized
  source 1..20: mol_type = other DNA
atggtgaaagaaacataaaa

SEQ ID NO: 37444 - DNA, 20 bp, synthetic construct
  misc_feature 1..20: note = chemically synthesized
  source 1..20: mol_type = other DNA
ataaaaaagataattgtatg

SEQ ID NO: 37445 - DNA, 20 bp, synthetic construct
  misc_feature 1..20: note = chemically synthesized
  source 1..20: mol_type = other DNA
gataattgtatgaagatatt

SEQ ID NO: 37446 - DNA, 20 bp, synthetic construct
  misc_feature 1..20: note = chemically synthesized
  source 1..20: mol_type = other DNA
taattgtatgaagatatttg

SEQ ID NO: 37447 - DNA, 20 bp, synthetic construct
  misc_feature 1..20: note = chemically synthesized
  source 1..20: mol_type = other DNA
tgaagatatttggagaaaat

SEQ ID NO: 37448 - DNA, 20 bp, synthetic construct
  misc_feature 1..20: note = chemically synthesized
  source 1..20: mol_type = other DNA
gagaaaatgagaaaatcaac

SEQ ID NO: 37449 - DNA, 20 bp, synthetic construct
  misc_feature 1..20: note = chemically synthesized
  source 1..20: mol_type = other DNA
aaatgagaaaatcaactgga

SEQ ID NO: 37450 - DNA, 20 bp, synthetic construct
  misc_feature 1..20: note = chemically synthesized
  source 1..20: mol_type = other DNA
tgagaaaatcaactggatgg

SEQ ID NO: 37451 - DNA, 20 bp, synthetic construct
  misc_feature 1..20: note = chemically synthesized
  source 1..20: mol_type = other DNA
caactggatggaagcattaa

SEQ ID NO: 37452 - DNA, 20 bp, synthetic construct
  misc_feature 1..20: note = chemically synthesized
  source 1..20: mol_type = other DNA
aactggatggaagcattaaa

SEQ ID NO: 37453 - DNA, 20 bp, synthetic construct
  misc_feature 1..20: note = chemically synthesized
  source 1..20: mol_type = other DNA
ttaaaaggtttctatctcga

SEQ ID NO: 37454 - DNA, 20 bp, synthetic construct
  misc_feature 1..20: note = chemically synthesized
  source 1..20: mol_type = other DNA
aaggtttctatctcgaaaga

SEQ ID NO: 37455 - DNA, 20 bp, synthetic construct
  misc_feature 1..20: note = chemically synthesized
  source 1..20: mol_type = other DNA
ttctatctcgaaagatggat

SEQ ID NO: 37456 - DNA, 20 bp, synthetic construct
  misc_feature 1..20: note = chemically synthesized
  source 1..20: mol_type = other DNA
tctatctcgaaagatggatt

SEQ ID NO: 37457 - DNA, 20 bp, synthetic construct
  misc_feature 1..20: note = chemically synthesized
  source 1..20: mol_type = other DNA
gattaggtatgaaatgctta

SEQ ID NO: 37458 - DNA, 20 bp, synthetic construct
  misc_feature 1..20: note = chemically synthesized
  source 1..20: mol_type = other DNA
taggtatgaaatgcttatag

SEQ ID NO: 37459 - DNA, 20 bp, synthetic construct
  misc_feature 1..20: note = chemically synthesized
  source 1..20: mol_type = other DNA
atgcttatagcagtgatgcc

SEQ ID NO: 37460 - DNA, 20 bp, synthetic construct
  misc_feature 1..20: note = chemically synthesized
  source 1..20: mol_type = other DNA
gcccagacattgttttgcac

SEQ ID NO: 37461 - DNA, 20 bp, synthetic construct
  misc_feature 1..20: note = chemically synthesized
  source 1..20: mol_type = other DNA
gttttgcactggaatcacct

SEQ ID NO: 37462 - DNA, 20 bp, synthetic construct
  misc_feature 1..20: note = chemically synthesized
  source 1..20: mol_type = other DNA
ttttgcactggaatcacctg

SEQ ID NO: 37463 - DNA, 20 bp, synthetic construct
  misc_feature 1..20: note = chemically synthesized
  source 1..20: mol_type = other DNA
atcacctgaggacctgaaaa

SEQ ID NO: 37464 - DNA, 20 bp, synthetic construct
  misc_feature 1..20: note = chemically synthesized
  source 1..20: mol_type = other DNA
tgaaaaaagcgaatttgatt

SEQ ID NO: 37465 - DNA, 20 bp, synthetic construct
  misc_feature 1..20: note = chemically synthesized
  source 1..20: mol_type = other DNA
gcgaatttgattcagaatgt

SEQ ID NO: 37466 - DNA, 20 bp, synthetic construct
  misc_feature 1..20: note = chemically synthesized
  source 1..20: mol_type = other DNA
aatttgattcagaatgttgg

SEQ ID NO: 37467 - DNA, 20 bp, synthetic construct
  misc_feature 1..20: note = chemically synthesized
  source 1..20: mol_type = other DNA
atttgattcagaatgttgga

SEQ ID NO: 37468 - DNA, 20 bp, synthetic construct
  misc_feature 1..20: note = chemically synthesized
  source 1..20: mol_type = other DNA
tttgattcagaatgttggaa

SEQ ID NO: 37469 - DNA, 20 bp, synthetic construct
  misc_feature 1..20: note = chemically synthesized
  source 1..20: mol_type = other DNA
ttgattcagaatgttggaag

SEQ ID NO: 37470 - DNA, 20 bp, synthetic construct
  misc_feature 1..20: note = chemically synthesized
  source 1..20: mol_type = other DNA
attcagaatgttggaagggg

SEQ ID NO: 37471 - DNA, 20 bp, synthetic construct
  misc_feature 1..20: note = chemically synthesized
  source 1..20: mol_type = other DNA
tgttggaaggggcagaatct

SEQ ID NO: 37472 - DNA, 20 bp, synthetic construct
  misc_feature 1..20: note = chemically synthesized
  source 1..20: mol_type = other DNA
gttggaaggggcagaatctg

SEQ ID NO: 37473 - DNA, 20 bp, synthetic construct
  misc_feature 1..20: note = chemically synthesized
  source 1..20: mol_type = other DNA
tctgaggctgcatgcctaac

SEQ ID NO: 37474 - DNA, 20 bp, synthetic construct
  misc_feature 1..20: note = chemically synthesized
  source 1..20: mol_type = other DNA
ctaacaagcccgctgcttgt

SEQ ID NO: 37475 - DNA, 20 bp, synthetic construct
  misc_feature 1..20: note = chemically synthesized
  source 1..20: mol_type = other DNA
cgctgcttgttagctgcgtc

SEQ ID NO: 37476 - DNA, 20 bp, synthetic construct
  misc_feature 1..20: note = chemically synthesized
  source 1..20: mol_type = other DNA
tagtctgtgatccacaactc

SEQ ID NO: 37477 - DNA, 20 bp, synthetic construct
  misc_feature 1..20: note = chemically synthesized
  source 1..20: mol_type = other DNA
tctgtgatccacaactctgg

SEQ ID NO: 37478 - DNA, 20 bp, synthetic construct
  misc_feature 1..20: note = chemically synthesized
  source 1..20: mol_type = other DNA
gatccacaactctggtggcc

SEQ ID NO: 37479 - DNA, 20 bp, synthetic construct
  misc_feature 1..20: note = chemically synthesized
  source 1..20: mol_type = other DNA
caactctggtggccaagctc

SEQ ID NO: 37480 - DNA, 20 bp, synthetic construct
  misc_feature 1..20: note = chemically synthesized
  source 1..20: mol_type = other DNA
ggccaagctcaagtaactgt

SEQ ID NO: 37481 - DNA, 20 bp, synthetic construct
  misc_feature 1..20: note = chemically synthesized
  source 1..20: mol_type = other DNA
ccaagctcaagtaactgtta

SEQ ID NO: 37482 - DNA, 20 bp, synthetic construct
  misc_feature 1..20: note = chemically synthesized
  source 1..20: mol_type = other DNA
aagtaactgttagagtgaca

SEQ ID NO: 37483 - DNA, 20 bp, synthetic construct
  misc_feature 1..20: note = chemically synthesized
  source 1..20: mol_type = other DNA
agagtgacaaagccgttcat

SEQ ID NO: 37484 - DNA, 20 bp, synthetic construct
  misc_feature 1..20: note = chemically synthesized
  source 1..20: mol_type = other DNA
gtgacaaagccgttcattgg

SEQ ID NO: 37485 - DNA, 20 bp, synthetic construct
  misc_feature 1..20: note = chemically synthesized
  source 1..20: mol_type = other DNA
aagccgttcattggtagtga

SEQ ID NO: 37486 - DNA, 20 bp, synthetic construct
  misc_feature 1..20: note = chemically synthesized
  source 1..20: mol_type = other DNA
agtgatggtgatgcacgcta

SEQ ID NO: 37487 - DNA, 20 bp, synthetic construct
  misc_feature 1..20: note = chemically synthesized
  source 1..20: mol_type = other DNA
attcaatttccaaaaaaaat

SEQ ID NO: 37488 - DNA, 20 bp, synthetic construct
  misc_feature 1..20: note = chemically synthesized
  source 1..20: mol_type = other DNA
ttacaacaatcatttccaaa

SEQ ID NO: 37489 - DNA, 20 bp, synthetic construct
  misc_feature 1..20: note = chemically synthesized
  source 1..20: mol_type = other DNA
aacaatcatttccaaatggt

SEQ ID NO: 37490 - DNA, 20 bp, synthetic construct
  misc_feature 1..20: note = chemically synthesized
  source 1..20: mol_type = other DNA
ttccaaatggtcagtaatca

SEQ ID NO: 37491 - DNA, 20 bp, synthetic construct
  misc_feature 1..20: note = chemically synthesized
  source 1..20: mol_type = other DNA
aaatggtcagtaatcacagc

SEQ ID NO: 37492 - DNA, 20 bp, synthetic construct
  misc_feature 1..20: note = chemically synthesized
  source 1..20: mol_type = other DNA
tggtcagtaatcacagcaag

SEQ ID NO: 37493 - DNA, 20 bp, synthetic construct
  misc_feature 1..20: note = chemically synthesized
  source 1..20: mol_type = other DNA
atcacagcaagaagacaact

SEQ ID NO: 37494 - DNA, 20 bp, synthetic construct
  misc_feature 1..20: note = chemically synthesized
  source 1..20: mol_type = other DNA
cagcaagaagacaactaagc

SEQ ID NO: 37495 - DNA, 20 bp, synthetic construct
  misc_feature 1..20: note = chemically synthesized
  source 1..20: mol_type = other DNA
ctgttgttgcaaatatttat

SEQ ID NO: 37496 - DNA, 20 bp, synthetic construct
  misc_feature 1..20: note = chemically synthesized
  source 1..20: mol_type = other DNA
atttataagtaccctcaaaa

SEQ ID NO: 37497 - DNA, 20 bp, synthetic construct
  misc_feature 1..20: note = chemically synthesized
  source 1..20: mol_type = other DNA
aagtaccctcaaaatagttg

SEQ ID NO: 37498 - DNA, 20 bp, synthetic construct
  misc_feature 1..20: note = chemically synthesized
  source 1..20: mol_type = other DNA
aatgaaaaatttttgaattt

SEQ ID NO: 37499 - DNA, 20 bp, synthetic construct
  misc_feature 1..20: note = chemically synthesized
  source 1..20: mol_type = other DNA
gaaaaatcgaaccattaact

SEQ ID NO: 37500 - DNA, 20 bp, synthetic construct
  misc_feature 1..20: note = chemically synthesized
  source 1..20: mol_type = other DNA
aactcagtattttttctaat

SEQ ID NO: 37501 - DNA, 20 bp, synthetic construct
  misc_feature 1..20: note = chemically synthesized
  source 1..20: mol_type = other DNA
actcagtattttttctaatt

SEQ ID NO: 37502 - DNA, 20 bp, synthetic construct
  misc_feature 1..20: note = chemically synthesized
  source 1..20: mol_type = other DNA
ctcagtattttttctaatta

SEQ ID NO: 37503 - DNA, 20 bp, synthetic construct
  misc_feature 1..20: note = chemically synthesized
  source 1..20: mol_type = other DNA
tctaattagggaaaaaacca

SEQ ID NO: 37504 - DNA, 20 bp, synthetic construct
  misc_feature 1..20: note = chemically synthesized
  source 1..20: mol_type = other DNA
ctgtacatgctattcttctt

SEQ ID NO: 37505 - DNA, 20 bp, synthetic construct
  misc_feature 1..20: note = chemically synthesized
  source 1..20: mol_type = other DNA
tgtacatgctattcttcttc

SEQ ID NO: 37506 - DNA, 20 bp, synthetic construct
  misc_feature 1..20: note = chemically synthesized
  source 1..20: mol_type = other DNA
gctattcttcttcaggaaaa

SEQ ID NO: 37507 - DNA, 20 bp, synthetic construct
  misc_feature 1..20: note = chemically synthesized
  source 1..20: mol_type = other DNA
cttcttcaggaaaatagttg

SEQ ID NO: 37508 - DNA, 20 bp, synthetic construct
  misc_feature 1..20: note = chemically synthesized
  source 1..20: mol_type = other DNA
tcttcaggaaaatagttgca

SEQ ID NO: 37509 - DNA, 20 bp, synthetic construct
  misc_feature 1..20: note = chemically synthesized
  source 1..20: mol_type = other DNA
cagagtcaaatttatcacac

SEQ ID NO: 37510 - DNA, 20 bp, synthetic construct
  misc_feature 1..20: note = chemically synthesized
  source 1..20: mol_type = other DNA
cacaccagttaatcatctcc

SEQ ID NO: 37511 - DNA, 20 bp, synthetic construct
  misc_feature 1..20: note = chemically synthesized
  source 1..20: mol_type = other DNA
accagttaatcatctccaag

SEQ ID NO: 37512 - DNA, 20 bp, synthetic construct
  misc_feature 1..20: note = chemically synthesized
  source 1..20: mol_type = other DNA
ccagttaatcatctccaagc

SEQ ID NO: 37513 - DNA, 20 bp, synthetic construct
  misc_feature 1..20: note = chemically synthesized
  source 1..20: mol_type = other DNA
gttaatcatctccaagcagg

SEQ ID NO: 37514 - DNA, 20 bp, synthetic construct
  misc_feature 1..20: note = chemically synthesized
  source 1..20: mol_type = other DNA
tcatctccaagcaggaagat

SEQ ID NO: 37515 - DNA, 20 bp, synthetic construct
  misc_feature 1..20: note = chemically synthesized
  source 1..20: mol_type = other DNA
atctccaagcaggaagattg

SEQ ID NO: 37516 - DNA, 20 bp, synthetic construct
  misc_feature 1..20: note = chemically synthesized
  source 1..20: mol_type = other DNA
tctccaagcaggaagattgg

SEQ ID NO: 37517 - DNA, 20 bp, synthetic construct
  misc_feature 1..20: note = chemically synthesized
  source 1..20: mol_type = other DNA
gcaggaagattggaggctcc

SEQ ID NO: 37518 - DNA, 20 bp, synthetic construct
  misc_feature 1..20: note = chemically synthesized
  source 1..20: mol_type = other DNA
gattggaggctcctggtttc

SEQ ID NO: 37519 - DNA, 20 bp, synthetic construct
  misc_feature 1..20: note = chemically synthesized
  source 1..20: mol_type = other DNA
attggaggctcctggtttca

SEQ ID NO: 37520 - DNA, 20 bp, synthetic construct
  misc_feature 1..20: note = chemically synthesized
  source 1..20: mol_type = other DNA
gctcctggtttcaaggtttc

SEQ ID NO: 37521 - DNA, 20 bp, synthetic construct
  misc_feature 1..20: note = chemically synthesized
  source 1..20: mol_type = other DNA
tcaagaaatctgatctttac

SEQ ID NO: 37522 - DNA, 20 bp, synthetic construct
  misc_feature 1..20: note = chemically synthesized
  source 1..20: mol_type = other DNA
agaaatctgatctttaccgg

SEQ ID NO: 37523 - DNA, 20 bp, synthetic construct
  misc_feature 1..20: note = chemically synthesized
  source 1..20: mol_type = other DNA
ttaccggtggatacactatg

SEQ ID NO: 37524 - DNA, 20 bp, synthetic construct
  misc_feature 1..20: note = chemically synthesized
  source 1..20: mol_type = other DNA
tatgtggcccaatattactg

SEQ ID NO: 37525 - DNA, 20 bp, synthetic construct
  misc_feature 1..20: note = chemically synthesized
  source 1..20: mol_type = other DNA
gcagccccttttttgctgac

SEQ ID NO: 37526 - DNA, 20 bp, synthetic construct
  misc_feature 1..20: note = chemically synthesized
  source 1..20: mol_type = other DNA
ttttttgctgactggctttc

SEQ ID NO: 37527 - DNA, 20 bp, synthetic construct
  misc_feature 1..20: note = chemically synthesized
  source 1..20: mol_type = other DNA
tttttgctgactggctttcc

SEQ ID NO: 37528 - DNA, 20 bp, synthetic construct
  misc_feature 1..20: note = chemically synthesized
  source 1..20: mol_type = other DNA
ttttgctgactggctttcca

SEQ ID NO: 37529 - DNA, 20 bp, synthetic construct
  misc_feature 1..20: note = chemically synthesized
  source 1..20: mol_type = other DNA
gctgactggctttccagggc

SEQ ID NO: 37530 - DNA, 20 bp, synthetic construct
  misc_feature 1..20: note = chemically synthesized
  source 1..20: mol_type = other DNA
tgactggctttccagggctg

SEQ ID NO: 37531 - DNA, 20 bp, synthetic construct
  misc_feature 1..20: note = chemically synthesized
  source 1..20: mol_type = other DNA
gactggctttccagggctgg

SEQ ID NO: 37532 - DNA, 20 bp, synthetic construct
  misc_feature 1..20: note = chemically synthesized
  source 1..20: mol_type = other DNA
tggctttccagggctggagg

SEQ ID NO: 37533 - DNA, 20 bp, synthetic construct
  misc_feature 1..20: note = chemically synthesized
  source 1..20: mol_type = other DNA
ggctggaggcagctcatcac

SEQ ID NO: 37534 - DNA, 20 bp, synthetic construct
  misc_feature 1..20: note = chemically synthesized
  source 1..20: mol_type = other DNA
tgtttatgtgtgcatccttc

SEQ ID NO: 37535 - DNA, 20 bp, synthetic construct
  misc_feature 1..20: note = chemically synthesized
  source 1..20: mol_type = other DNA
gtttatgtgtgcatccttct

SEQ ID NO: 37536 - DNA, 20 bp, synthetic construct
  misc_feature 1..20: note = chemically synthesized
  source 1..20: mol_type = other DNA
gtgtgcatccttctgggcaa

SEQ ID NO: 37537 - DNA, 20 bp, synthetic construct
  misc_feature 1..20: note = chemically synthesized
  source 1..20: mol_type = other DNA
gcatgctcctctacctcatc

SEQ ID NO: 37538 - DNA, 20 bp, synthetic construct
  misc_feature 1..20: note = chemically synthesized
  source 1..20: mol_type = other DNA
tacctcatcaagcatgacca

SEQ ID NO: 37539 - DNA, 20 bp, synthetic construct
  misc_feature 1..20: note = chemically synthesized
  source 1..20: mol_type = other DNA
agcatgaccacagtcttcat

SEQ ID NO: 37540 - DNA, 20 bp, synthetic construct
  misc_feature 1..20: note = chemically synthesized
  source 1..20: mol_type = other DNA
gtactacttcctcaccatgc

SEQ ID NO: 37541 - DNA, 20 bp, synthetic construct
  misc_feature 1..20: note = chemically synthesized
  source 1..20: mol_type = other DNA
ctacttcctcaccatgctgg

SEQ ID NO: 37542 - DNA, 20 bp, synthetic construct
  misc_feature 1..20: note = chemically synthesized
  source 1..20: mol_type = other DNA
tacttcctcaccatgctggc

SEQ ID NO: 37543 - DNA, 20 bp, synthetic construct
  misc_feature 1..20: note = chemically synthesized
  source 1..20: mol_type = other DNA
cctcaccatgctggcaggca

SEQ ID NO: 37544 - DNA, 20 bp, synthetic construct
  misc_feature 1..20: note = chemically synthesized
  source 1..20: mol_type = other DNA
gctggcaggcacagacctca

SEQ ID NO: 37545 - DNA, 20 bp, synthetic construct
  misc_feature 1..20: note = chemically synthesized
  source 1..20: mol_type = other DNA
gaccacgatgcctactgtaa

SEQ ID NO: 37546 - DNA, 20 bp, synthetic construct
  misc_feature 1..20: note = chemically synthesized
  source 1..20: mol_type = other DNA
accacgatgcctactgtaat

SEQ ID NO: 37547 - DNA, 20 bp, synthetic construct
  misc_feature 1..20: note = chemically synthesized
  source 1..20: mol_type = other DNA
ctactgtaatgggcatccta

SEQ ID NO: 37548 - DNA, 20 bp, synthetic construct
  misc_feature 1..20: note = chemically synthesized
  source 1..20: mol_type = other DNA
tactgtaatgggcatcctat

SEQ ID NO: 37549 - DNA, 20 bp, synthetic construct
  misc_feature 1..20: note = chemically synthesized
  source 1..20: mol_type = other DNA
ggcatcctatgggtgaatca

SEQ ID NO: 37550 - DNA, 20 bp, synthetic construct
  misc_feature 1..20: note = chemically synthesized
  source 1..20: mol_type = other DNA
gcatcctatgggtgaatcac

SEQ ID NO: 37551 - DNA, 20 bp, synthetic construct
  misc_feature 1..20: note = chemically synthesized
  source 1..20: mol_type = other DNA
catcctatgggtgaatcaca

SEQ ID NO: 37552 - DNA, 20 bp, synthetic construct
  misc_feature 1..20: note = chemically synthesized
  source 1..20: mol_type = other DNA
tcctatgggtgaatcacagg

SEQ ID NO: 37553 - DNA, 20 bp, synthetic construct
  misc_feature 1..20: note = chemically synthesized
  source 1..20: mol_type = other DNA
tgggtgaatcacagggagat

SEQ ID NO: 37554 - DNA, 20 bp, synthetic construct
  misc_feature 1..20: note = chemically synthesized
  source 1..20: mol_type = other DNA
gtgaatcacagggagattag

SEQ ID NO: 37555 - DNA, 20 bp, synthetic construct
  misc_feature 1..20: note = chemically synthesized
  source 1..20: mol_type = other DNA
tcacagggagattagcagtg

SEQ ID NO: 37556 - DNA, 20 bp, synthetic construct
  misc_feature 1..20: note = chemically synthesized
  source 1..20: mol_type = other DNA
cacagggagattagcagtgt

SEQ ID NO: 37557 - DNA, 20 bp, synthetic construct
  misc_feature 1..20: note = chemically synthesized
  source 1..20: mol_type = other DNA
gcagtgtgggctgcttccta

SEQ ID NO: 37558 - DNA, 20 bp, synthetic construct
  misc_feature 1..20: note = chemically synthesized
  source 1..20: mol_type = other DNA
cagtgtgggctgcttcctac

SEQ ID NO: 37559 - DNA, 20 bp, synthetic construct
  misc_feature 1..20: note = chemically synthesized
  source 1..20: mol_type = other DNA
tattcactccctttctgttg

SEQ ID NO: 37560 - DNA, 20 bp, synthetic construct
  misc_feature 1..20: note = chemically synthesized
  source 1..20: mol_type = other DNA
ctccctttctgttgtggaat

SEQ ID NO: 37561 - DNA, 20 bp, synthetic construct
  misc_feature 1..20: note = chemically synthesized
  source 1..20: mol_type = other DNA
tccctttctgttgtggaatc

SEQ ID NO: 37562 - DNA, 20 bp, synthetic construct
  misc_feature 1..20: note = chemically synthesized
  source 1..20: mol_type = other DNA
tgtggaatcaggttccctcc

SEQ ID NO: 37563 - DNA, 20 bp, synthetic construct
  misc_feature 1..20: note = chemically synthesized
  source 1..20: mol_type = other DNA
atcaggttccctcctggcaa

SEQ ID NO: 37564 - DNA, 20 bp, synthetic construct
  misc_feature 1..20: note = chemically synthesized
  source 1..20: mol_type = other DNA
attgccatccgcaatccttt

SEQ ID NO: 37565 - DNA, 20 bp, synthetic construct
  misc_feature 1..20: note = chemically synthesized
  source 1..20: mol_type = other DNA
gcttccattctcaccaatac

SEQ ID NO: 37566 - DNA, 20 bp, synthetic construct
  misc_feature 1..20: note = chemically synthesized
  source 1..20: mol_type = other DNA
ttccattctcaccaatacta

SEQ ID NO: 37567 - DNA, 20 bp, synthetic construct
  misc_feature 1..20: note = chemically synthesized
  source 1..20: mol_type = other DNA
tctcaccaatactagagtca

SEQ ID NO: 37568 - DNA, 20 bp, synthetic construct
  misc_feature 1..20: note = chemically synthesized
  source 1..20: mol_type = other DNA
caatactagagtcatagcgt

SEQ ID NO: 37569 - DNA, 20 bp, synthetic construct
  misc_feature 1..20: note = chemically synthesized
  source 1..20: mol_type = other DNA
aatactagagtcatagcgtt

SEQ ID NO: 37570 - DNA, 20 bp, synthetic construct
  misc_feature 1..20: note = chemically synthesized
  source 1..20: mol_type = other DNA
tactagagtcatagcgttag

SEQ ID NO: 37571 - DNA, 20 bp, synthetic construct
  misc_feature 1..20: note = chemically synthesized
  source 1..20: mol_type = other DNA
tagagtcatagcgttaggag

SEQ ID NO: 37572 - DNA, 20 bp, synthetic construct
  misc_feature 1..20: note = chemically synthesized
  source 1..20: mol_type = other DNA
agagtcatagcgttaggagt

SEQ ID NO: 37573 - DNA, 20 bp, synthetic construct
  misc_feature 1..20: note = chemically synthesized
  source 1..20: mol_type = other DNA
agtcatagcgttaggagtgg

SEQ ID NO: 37574 - DNA, 20 bp, synthetic construct
  misc_feature 1..20: note = chemically synthesized
  source 1..20: mol_type = other DNA
ttaggagtgggagtgtttct

SEQ ID NO: 37575 - DNA, 20 bp, synthetic construct
  misc_feature 1..20: note = chemically synthesized
  source 1..20: mol_type = other DNA
taggagtgggagtgtttcta

SEQ ID NO: 37576 - DNA, 20 bp, synthetic construct
  misc_feature 1..20: note = chemically synthesized
  source 1..20: mol_type = other DNA
aggagtgggagtgtttctaa

SEQ ID NO: 37577 - DNA, 20 bp, synthetic construct
  misc_feature 1..20: note = chemically synthesized
  source 1..20: mol_type = other DNA
ggagtgggagtgtttctaag

SEQ ID NO: 37578 - DNA, 20 bp, synthetic construct
  misc_feature 1..20: note = chemically synthesized
  source 1..20: mol_type = other DNA
acgtgctttctgcctccacc

SEQ ID NO: 37579 - DNA, 20 bp, synthetic construct
  misc_feature 1..20: note = chemically synthesized
  source 1..20: mol_type = other DNA
tgcctccaccaagaaatcat

SEQ ID NO: 37580 - DNA, 20 bp, synthetic construct
  misc_feature 1..20: note = chemically synthesized
  source 1..20: mol_type = other DNA
ccaccaagaaatcatgagac

SEQ ID NO: 37581 - DNA, 20 bp, synthetic construct
  misc_feature 1..20: note = chemically synthesized
  source 1..20: mol_type = other DNA
tgtgctgacataactttcaa

SEQ ID NO: 37582 - DNA, 20 bp, synthetic construct
  misc_feature 1..20: note = chemically synthesized
  source 1..20: mol_type = other DNA
gatctctttaacaatcttcc

SEQ ID NO: 37583 - DNA, 20 bp, synthetic construct
  misc_feature 1..20: note = chemically synthesized
  source 1..20: mol_type = other DNA
tctaattcttaatactgtca

SEQ ID NO: 37584 - DNA, 20 bp, synthetic construct
  misc_feature 1..20: note = chemically synthesized
  source 1..20: mol_type = other DNA
ctaattcttaatactgtcat

SEQ ID NO: 37585 - DNA, 20 bp, synthetic construct
  misc_feature 1..20: note = chemically synthesized
  source 1..20: mol_type = other DNA
actgtcataggcattgcttc

SEQ ID NO: 37586 - DNA, 20 bp, synthetic construct
  misc_feature 1..20: note = chemically synthesized
  source 1..20: mol_type = other DNA
cataggcattgcttctggtg

SEQ ID NO: 37587 - DNA, 20 bp, synthetic construct
  misc_feature 1..20: note = chemically synthesized
  source 1..20: mol_type = other DNA
taggcattgcttctggtgaa

SEQ ID NO: 37588 - DNA, 20 bp, synthetic construct
  misc_feature 1..20: note = chemically synthesized
  source 1..20: mol_type = other DNA
ggcattgcttctggtgaaga

SEQ ID NO: 37589 - DNA, 20 bp, synthetic construct
  misc_feature 1..20: note = chemically synthesized
  source 1..20: mol_type = other DNA
cattgcttctggtgaagaga

SEQ ID NO: 37590 - DNA, 20 bp, synthetic construct
  misc_feature 1..20: note = chemically synthesized
  source 1..20: mol_type = other DNA
ttctggtgaagagagagcca

SEQ ID NO: 37591 - DNA, 20 bp, synthetic construct
  misc_feature 1..20: note = chemically synthesized
  source 1..20: mol_type = other DNA
aatacctgtatctcccacat

SEQ ID NO: 37592 - DNA, 20 bp, synthetic construct
  misc_feature 1..20: note = chemically synthesized
  source 1..20: mol_type = other DNA
tgttcttatcttctatgtta

SEQ ID NO: 37593 - DNA, 20 bp, synthetic construct
  misc_feature 1..20: note = chemically synthesized
  source 1..20: mol_type = other DNA
tatcttctatgttacagtga

SEQ ID NO: 37594 - DNA, 20 bp, synthetic construct
  misc_feature 1..20: note = chemically synthesized
  source 1..20: mol_type = other DNA
atcttctatgttacagtgat

SEQ ID NO: 37595 - DNA, 20 bp, synthetic construct
  misc_feature 1..20: note = chemically synthesized
  source 1..20: mol_type = other DNA
atgggtttgacattcattta

SEQ ID NO: 37596 - DNA, 20 bp, synthetic construct
  misc_feature 1..20: note = chemically synthesized
  source 1..20: mol_type = other DNA
ttgacattcatttacagatt

SEQ ID NO: 37597 - DNA, 20 bp, synthetic construct
  misc_feature 1..20: note = chemically synthesized
  source 1..20: mol_type = other DNA
tgacattcatttacagattt

SEQ ID NO: 37598 - DNA, 20 bp, synthetic construct
  misc_feature 1..20: note = chemically synthesized
  source 1..20: mol_type = other DNA
cattcatttacagatttggg

SEQ ID NO: 37599 - DNA, 20 bp, synthetic construct
  misc_feature 1..20: note = chemically synthesized
  source 1..20: mol_type = other DNA
cagatttgggaagaatgtgc

SEQ ID NO: 37600 - DNA, 20 bp, synthetic construct
  misc_feature 1..20: note = chemically synthesized
  source 1..20: mol_type = other DNA
gatttgggaagaatgtgcca

SEQ ID NO: 37601 - DNA, 20 bp, synthetic construct
  misc_feature 1..20: note = chemically synthesized
  source 1..20: mol_type = other DNA
atttgggaagaatgtgccag

SEQ ID NO: 37602 - DNA, 20 bp, synthetic construct
  misc_feature 1..20: note = chemically synthesized
  source 1..20: mol_type = other DNA
gaggttgtccacattatcat

SEQ ID NO: 37603 - DNA, 20 bp, synthetic construct
  misc_feature 1..20: note = chemically synthesized
  source 1..20: mol_type = other DNA
ttaatgaaccctgtcatcta

SEQ ID NO: 37604 - DNA, 20 bp, synthetic construct
  misc_feature 1..20: note = chemically synthesized
  source 1..20: mol_type = other DNA
tcatctacagcatcaaaacc

SEQ ID NO: 37605 - DNA, 20 bp, synthetic construct
  misc_feature 1..20: note = chemically synthesized
  source 1..20: mol_type = other DNA
aaaaccaagcaaatacaata

SEQ ID NO: 37606 - DNA, 20 bp, synthetic construct
  misc_feature 1..20: note = chemically synthesized
  source 1..20: mol_type = other DNA
atccgccttttatctaaaca

SEQ ID NO: 37607 - DNA, 20 bp, synthetic construct
  misc_feature 1..20: note = chemically synthesized
  source 1..20: mol_type = other DNA
tccgccttttatctaaacat

SEQ ID NO: 37608 - DNA, 20 bp, synthetic construct
  misc_feature 1..20: note = chemically synthesized
  source 1..20: mol_type = other DNA
cttttatctaaacataggtt

SEQ ID NO: 37609 - DNA, 20 bp, synthetic construct
  misc_feature 1..20: note = chemically synthesized
  source 1..20: mol_type = other DNA
ttatctaaacataggtttag

SEQ ID NO: 37610 - DNA, 20 bp, synthetic construct
  misc_feature 1..20: note = chemically synthesized
  source 1..20: mol_type = other DNA
ataggtttagtagttaaact

SEQ ID NO: 37611 - DNA, 20 bp, synthetic construct
  misc_feature 1..20: note = chemically synthesized
  source 1..20: mol_type = other DNA
ttagtagttaaactcggatc

SEQ ID NO: 37612 - DNA, 20 bp, synthetic construct
  misc_feature 1..20: note = chemically synthesized
  source 1..20: mol_type = other DNA
agtagttaaactcggatctg

SEQ ID NO: 37613 - DNA, 20 bp, synthetic construct
  misc_feature 1..20: note = chemically synthesized
  source 1..20: mol_type = other DNA
taaactcggatctggagaat

SEQ ID NO: 37614 - DNA, 20 bp, synthetic construct
  misc_feature 1..20: note = chemically synthesized
  source 1..20: mol_type = other DNA
cggatctggagaatcagaca

SEQ ID NO: 37615 - DNA, 20 bp, synthetic construct
  misc_feature 1..20: note = chemically synthesized
  source 1..20: mol_type = other DNA
cagacacagacataaaaatg

SEQ ID NO: 37616 - DNA, 20 bp, synthetic construct
  misc_feature 1..20: note = chemically synthesized
  source 1..20: mol_type = other DNA
cacagacataaaaatgaagc

SEQ ID NO: 37617 - DNA, 20 bp, synthetic construct
  misc_feature 1..20: note = chemically synthesized
  source 1..20: mol_type = other DNA
gaagccagaatgaaaaatga

SEQ ID NO: 37618 - DNA, 20 bp, synthetic construct
  misc_feature 1..20: note = chemically synthesized
  source 1..20: mol_type = other DNA
cagaatgaaaaatgaaagcc

SEQ ID NO: 37619 - DNA, 20 bp, synthetic construct
  misc_feature 1..20: note = chemically synthesized
  source 1..20: mol_type = other DNA
gaatgaaaaatgaaagcctg

SEQ ID NO: 37620 - DNA, 20 bp, synthetic construct
  misc_feature 1..20: note = chemically synthesized
  source 1..20: mol_type = other DNA
gaaagcctggagttctttct

SEQ ID NO: 37621 - DNA, 20 bp, synthetic construct
  misc_feature 1..20: note = chemically synthesized
  source 1..20: mol_type = other DNA
cctggagttctttcttagca

SEQ ID NO: 37622 - DNA, 20 bp, synthetic construct
  misc_feature 1..20: note = chemically synthesized
  source 1..20: mol_type = other DNA
tggagttctttcttagcaaa

SEQ ID NO: 37623 - DNA, 20 bp, synthetic construct
  misc_feature 1..20: note = chemically synthesized
  source 1..20: mol_type = other DNA
gttctttcttagcaaagagc

SEQ ID NO: 37624 - DNA, 20 bp, synthetic construct
  misc_feature 1..20: note = chemically synthesized
  source 1..20: mol_type = other DNA
ttctttcttagcaaagagca

SEQ ID NO: 37625 - DNA, 20 bp, synthetic construct
  misc_feature 1..20: note = chemically synthesized
  source 1..20: mol_type = other DNA
tctttcttagcaaagagcaa

SEQ ID NO: 37626 - DNA, 20 bp, synthetic construct
  misc_feature 1..20: note = chemically synthesized
  source 1..20: mol_type = other DNA
agcaaagagcaagggtatac

SEQ ID NO: 37627 - DNA, 20 bp, synthetic construct
  misc_feature 1..20: note = chemically synthesized
  source 1..20: mol_type = other DNA
aaagagcaagggtatactgg

SEQ ID NO: 37628 - DNA, 20 bp, synthetic construct
  misc_feature 1..20: note = chemically synthesized
  source 1..20: mol_type = other DNA
aagacaatgttgtcactcac

SEQ ID NO: 37629 - DNA, 20 bp, synthetic construct
  misc_feature 1..20: note = chemically synthesized
  source 1..20: mol_type = other DNA
agacaatgttgtcactcaca

SEQ ID NO: 37630 - DNA, 20 bp, synthetic construct
  misc_feature 1..20: note = chemically synthesized
  source 1..20: mol_type = other DNA
gttgtcactcacaaggactt

SEQ ID NO: 37631 - DNA, 20 bp, synthetic construct
  misc_feature 1..20: note = chemically synthesized
  source 1..20: mol_type = other DNA
aggacttaagtactttacca

SEQ ID NO: 37632 - DNA, 20 bp, synthetic construct
  misc_feature 1..20: note = chemically synthesized
  source 1..20: mol_type = other DNA
ggacttaagtactttaccat

SEQ ID NO: 37633 - DNA, 20 bp, synthetic construct
  misc_feature 1..20: note = chemically synthesized
  source 1..20: mol_type = other DNA
gacttaagtactttaccata

SEQ ID NO: 37634 - DNA, 20 bp, synthetic construct
  misc_feature 1..20: note = chemically synthesized
  source 1..20: mol_type = other DNA
taagtactttaccatagggt

SEQ ID NO: 37635 - DNA, 20 bp, synthetic construct
  misc_feature 1..20: note = chemically synthesized
  source 1..20: mol_type = other DNA
aagtactttaccatagggtt

SEQ ID NO: 37636 - DNA, 20 bp, synthetic construct
  misc_feature 1..20: note = chemically synthesized
  source 1..20: mol_type = other DNA
agtactttaccatagggttg

SEQ ID NO: 37637 - DNA, 20 bp, synthetic construct
  misc_feature 1..20: note = chemically synthesized
  source 1..20: mol_type = other DNA
gtactttaccatagggttgg

SEQ ID NO: 37638 - DNA, 20 bp, synthetic construct
  misc_feature 1..20: note = chemically synthesized
  source 1..20: mol_type = other DNA
atagggttgggggcatatct

SEQ ID NO: 37639 - DNA, 20 bp, synthetic construct
  misc_feature 1..20: note = chemically synthesized
  source 1..20: mol_type = other DNA
tagggttgggggcatatctt

SEQ ID NO: 37640 - DNA, 20 bp, synthetic construct
  misc_feature 1..20: note = chemically synthesized
  source 1..20: mol_type = other DNA
gggttgggggcatatcttag

SEQ ID NO: 37641 - DNA, 20 bp, synthetic construct
  misc_feature 1..20: note = chemically synthesized
  source 1..20: mol_type = other DNA
ttgggggcatatcttaggag

SEQ ID NO: 37642 - DNA, 20 bp, synthetic construct
  misc_feature 1..20: note = chemically synthesized
  source 1..20: mol_type = other DNA
ggcatatcttaggagaagtc

SEQ ID NO: 37643 - DNA, 20 bp, synthetic construct
  misc_feature 1..20: note = chemically synthesized
  source 1..20: mol_type = other DNA
tcttaggagaagtctggtga

SEQ ID NO: 37644 - DNA, 20 bp, synthetic construct
  misc_feature 1..20: note = chemically synthesized
  source 1..20: mol_type = other DNA
tctggtgacagaacactgaa

SEQ ID NO: 37645 - DNA, 20 bp, synthetic construct
  misc_feature 1..20: note = chemically synthesized
  source 1..20: mol_type = other DNA
agaacactgaatagaccata

SEQ ID NO: 37646 - DNA, 20 bp, synthetic construct
  misc_feature 1..20: note = chemically synthesized
  source 1..20: mol_type = other DNA
tagaccatatggaactgaaa

SEQ ID NO: 37647 - DNA, 20 bp, synthetic construct
  misc_feature 1..20: note = chemically synthesized
  source 1..20: mol_type = other DNA
ctttcaaatgcacctgaaat

SEQ ID NO: 37648 - DNA, 20 bp, synthetic construct
  misc_feature 1..20: note = chemically synthesized
  source 1..20: mol_type = other DNA
gcacctgaaattagccacct

SEQ ID NO: 37649 - DNA, 20 bp, synthetic construct
  misc_feature 1..20: note = chemically synthesized
  source 1..20: mol_type = other DNA
tagccacctcagtgaaattt

SEQ ID NO: 37650 - DNA, 20 bp, synthetic construct
  misc_feature 1..20: note = chemically synthesized
  source 1..20: mol_type = other DNA
agccacctcagtgaaatttg

SEQ ID NO: 37651 - DNA, 20 bp, synthetic construct
  misc_feature 1..20: note = chemically synthesized
  source 1..20: mol_type = other DNA
cctcagtgaaatttgaggaa

SEQ ID NO: 37652 - DNA, 20 bp, synthetic construct
  misc_feature 1..20: note = chemically synthesized
  source 1..20: mol_type = other DNA
ctcagtgaaatttgaggaaa

SEQ ID NO: 37653 - DNA, 20 bp, synthetic construct
  misc_feature 1..20: note = chemically synthesized
  source 1..20: mol_type = other DNA
agtgaaatttgaggaaaagg

SEQ ID NO: 37654 - DNA, 20 bp, synthetic construct
  misc_feature 1..20: note = chemically synthesized
  source 1..20: mol_type = other DNA
tctatgaaaaacttttgcct

SEQ ID NO: 37655 - DNA, 20 bp, synthetic construct
  misc_feature 1..20: note = chemically synthesized
  source 1..20: mol_type = other DNA
tacatgtttatgtgtttgca

SEQ ID NO: 37656 - DNA, 20 bp, synthetic construct
  misc_feature 1..20: note = chemically synthesized
  source 1..20: mol_type = other DNA
acatgtttatgtgtttgcat

SEQ ID NO: 37657 - DNA, 20 bp, synthetic construct
  misc_feature 1..20: note = chemically synthesized
  source 1..20: mol_type = other DNA
ttgcataggctaatgcacac

SEQ ID NO: 37658 - DNA, 20 bp, synthetic construct
  misc_feature 1..20: note = chemically synthesized
  source 1..20: mol_type = other DNA
gcacacaagtgtaaaaaaaa

SEQ ID NO: 37659 - DNA, 20 bp, synthetic construct
  misc_feature 1..20: note = chemically synthesized
  source 1..20: mol_type = other DNA
aaaagttgatcatcattctc

SEQ ID NO: 37660 - DNA, 20 bp, synthetic construct
  misc_feature 1..20: note = chemically synthesized
  source 1..20: mol_type = other DNA
taaaattttcattattctca

SEQ ID NO: 37661 - DNA, 20 bp, synthetic construct
  misc_feature 1..20: note = chemically synthesized
  source 1..20: mol_type = other DNA
cattattctcatggcaaata

SEQ ID NO: 37662 - DNA, 20 bp, synthetic construct
  misc_feature 1..20: note = chemically synthesized
  source 1..20: mol_type = other DNA
ctcatggcaaatatagtgat

SEQ ID NO: 37663 - DNA, 20 bp, synthetic construct
  misc_feature 1..20: note = chemically synthesized
  source 1..20: mol_type = other DNA
ttttaaatttacttttaaat

SEQ ID NO: 37664 - DNA, 20 bp, synthetic construct
  misc_feature 1..20: note = chemically synthesized
  source 1..20: mol_type = other DNA
aaatttacttttaaataagt

SEQ ID NO: 37665 - DNA, 20 bp, synthetic construct
  misc_feature 1..20: note = chemically synthesized
  source 1..20: mol_type = other DNA
acttttaaataagtaagtgt

SEQ ID NO: 37666 - DNA, 20 bp, synthetic construct
  misc_feature 1..20: note = chemically synthesized
  source 1..20: mol_type = other DNA
ttttaactgtcctctaccct

SEQ ID NO: 37667 - DNA, 20 bp, synthetic construct
  misc_feature 1..20: note = chemically synthesized
  source 1..20: mol_type = other DNA
aactgtcctctaccctgagt

SEQ ID NO: 37668 - DNA, 20 bp, synthetic construct
  misc_feature 1..20: note = chemically synthesized
  source 1..20: mol_type = other DNA
actgtcctctaccctgagtt

SEQ ID NO: 37669 - DNA, 20 bp, synthetic construct
  misc_feature 1..20: note = chemically synthesized
  source 1..20: mol_type = other DNA
ctgtcctctaccctgagtta

SEQ ID NO: 37670 - DNA, 20 bp, synthetic construct
  misc_feature 1..20: note = chemically synthesized
  source 1..20: mol_type = other DNA
ccctgagttagggtactctc

SEQ ID NO: 37671 - DNA, 20 bp, synthetic construct
  misc_feature 1..20: note = chemically synthesized
  source 1..20: mol_type = other DNA
cctgagttagggtactctct

SEQ ID NO: 37672 - DNA, 20 bp, synthetic construct
  misc_feature 1..20: note = chemically synthesized
  source 1..20: mol_type = other DNA
ctgagttagggtactctcta

SEQ ID NO: 37673 - DNA, 20 bp, synthetic construct
  misc_feature 1..20: note = chemically synthesized
  source 1..20: mol_type = other DNA
catttaatattttctaaata

SEQ ID NO: 37674 - DNA, 20 bp, synthetic construct
  misc_feature 1..20: note = chemically synthesized
  source 1..20: mol_type = other DNA
tattttctaaatacagtcgt

SEQ ID NO: 37675 - DNA, 20 bp, synthetic construct
  misc_feature 1..20: note = chemically synthesized
  source 1..20: mol_type = other DNA
atacagtcgtaagtcactta

SEQ ID NO: 37676 - DNA, 20 bp, synthetic construct
  misc_feature 1..20: note = chemically synthesized
  source 1..20: mol_type = other DNA
acagtcgtaagtcacttaca

SEQ ID NO: 37677 - DNA, 20 bp, synthetic construct
  misc_feature 1..20: note = chemically synthesized
  source 1..20: mol_type = other DNA
cacttacagagtatttcaat

SEQ ID NO: 37678 - DNA, 20 bp, synthetic construct
  misc_feature 1..20: note = chemically synthesized
  source 1..20: mol_type = other DNA
cttacagagtatttcaataa

SEQ ID NO: 37679 - DNA, 20 bp, synthetic construct
  misc_feature 1..20: note = chemically synthesized
  source 1..20: mol_type = other DNA
aattttcaatacattccttg

SEQ ID NO: 37680 - DNA, 20 bp, synthetic construct
  misc_feature 1..20: note = chemically synthesized
  source 1..20: mol_type = other DNA
attttcaatacattccttgc

SEQ ID NO: 37681 - DNA, 20 bp, synthetic construct
  misc_feature 1..20: note = chemically synthesized
  source 1..20: mol_type = other DNA
tacattccttgcaggatgtc

SEQ ID NO: 37682 - DNA, 20 bp, synthetic construct
  misc_feature 1..20: note = chemically synthesized
  source 1..20: mol_type = other DNA
aggatgtctggattttataa

SEQ ID NO: 37683 - DNA, 20 bp, synthetic construct
  misc_feature 1..20: note = chemically synthesized
  source 1..20: mol_type = other DNA
tcttttgcccaaaaaaatct

SEQ ID NO: 37684 - DNA, 20 bp, synthetic construct
  misc_feature 1..20: note = chemically synthesized
  source 1..20: mol_type = other DNA
tttgcccaaaaaaatcttag

SEQ ID NO: 37685 - DNA, 20 bp, synthetic construct
  misc_feature 1..20: note = chemically synthesized
  source 1..20: mol_type = other DNA
ttgcccaaaaaaatcttaga

SEQ ID NO: 37686 - DNA, 20 bp, synthetic construct
  misc_feature 1..20: note = chemically synthesized
  source 1..20: mol_type = other DNA
aaatcttagaaggaaaaacc

SEQ ID NO: 37687 - DNA, 20 bp, synthetic construct
  misc_feature 1..20: note = chemically synthesized
  source 1..20: mol_type = other DNA
ttagaaggaaaaacctagac

SEQ ID NO: 37688 - DNA, 20 bp, synthetic construct
  misc_feature 1..20: note = chemically synthesized
  source 1..20: mol_type = other DNA
aacctagacaagcttcttgt

SEQ ID NO: 37689 - DNA, 20 bp, synthetic construct
  misc_feature 1..20: note = chemically synthesized
  source 1..20: mol_type = other DNA
cttcttgtcagctcgtaaaa

SEQ ID NO: 37690 - DNA, 20 bp, synthetic construct
  misc_feature 1..20: note = chemically synthesized
  source 1..20: mol_type = other DNA
tcagctcgtaaaaaagtaaa

SEQ ID NO: 37691 - DNA, 20 bp, synthetic construct
  misc_feature 1..20: note = chemically synthesized
  source 1..20: mol_type = other DNA
ctcgtaaaaaagtaaaaagt

SEQ ID NO: 37692 - DNA, 20 bp, synthetic construct
  misc_feature 1..20: note = chemically synthesized
  source 1..20: mol_type = other DNA
aaagtaaaaagtgagttttt

SEQ ID NO: 37693 - DNA, 20 bp, synthetic construct
  misc_feature 1..20: note = chemically synthesized
  source 1..20: mol_type = other DNA
agtaaaaagtgagtttttaa

SEQ ID NO: 37694 - DNA, 20 bp, synthetic construct
  misc_feature 1..20: note = chemically synthesized
  source 1..20: mol_type = other DNA
ttaagagtatgtttgctctt

SEQ ID NO: 37695 - DNA, 20 bp, synthetic construct
  misc_feature 1..20: note = chemically synthesized
  source 1..20: mol_type = other DNA
attttaacatacttttccct

SEQ ID NO: 37696 - DNA, 20 bp, synthetic construct
  misc_feature 1..20: note = chemically synthesized
  source 1..20: mol_type = other DNA
cttttcccttggcctaataa

SEQ ID NO: 37697 - DNA, 20 bp, synthetic construct
  misc_feature 1..20: note = chemically synthesized
  source 1..20: mol_type = other DNA
ttttcccttggcctaataat

SEQ ID NO: 37698 - DNA, 20 bp, synthetic construct
  misc_feature 1..20: note = chemically synthesized
  source 1..20: mol_type = other DNA
tcccttggcctaataatagg

SEQ ID NO: 37699 - DNA, 20 bp, synthetic construct
  misc_feature 1..20: note = chemically synthesized
  source 1..20: mol_type = other DNA
cccttggcctaataatagga

SEQ ID NO: 37700 - DNA, 20 bp, synthetic construct
  misc_feature 1..20: note = chemically synthesized
  source 1..20: mol_type = other DNA
ccttggcctaataataggaa

SEQ ID NO: 37701 - DNA, 20 bp, synthetic construct
  misc_feature 1..20: note = chemically synthesized
  source 1..20: mol_type = other DNA
gcctaataataggaagggtc

SEQ ID NO: 37702 - DNA, 20 bp, synthetic construct
  misc_feature 1..20: note = chemically synthesized
  source 1..20: mol_type = other DNA
cctaataataggaagggtca

SEQ ID NO: 37703 - DNA, 20 bp, synthetic construct
  misc_feature 1..20: note = chemically synthesized
  source 1..20: mol_type = other DNA
gtcaaggctctattcaaaaa

SEQ ID NO: 37704 - DNA, 20 bp, synthetic construct
  misc_feature 1..20: note = chemically synthesized
  source 1..20: mol_type = other DNA
ctattcaaaaatagaaaata

SEQ ID NO: 37705 - DNA, 20 bp, synthetic construct
  misc_feature 1..20: note = chemically synthesized
  source 1..20: mol_type = other DNA
aatagaaaatatagccattc

SEQ ID NO: 37706 - DNA, 20 bp, synthetic construct
  misc_feature 1..20: note = chemically synthesized
  source 1..20: mol_type = other DNA
cattctagaatgaaaaatat

SEQ ID NO: 37707 - DNA, 20 bp, synthetic construct
  misc_feature 1..20: note = chemically synthesized
  source 1..20: mol_type = other DNA
atgagacatcattacttcac

SEQ ID NO: 37708 - DNA, 20 bp, synthetic construct
  misc_feature 1..20: note = chemically synthesized
  source 1..20: mol_type = other DNA
atatatactttatatatgtt

SEQ ID NO: 37709 - DNA, 20 bp, synthetic construct
  misc_feature 1..20: note = chemically synthesized
  source 1..20: mol_type = other DNA
atatactttatatatgttca

SEQ ID NO: 37710 - DNA, 20 bp, synthetic construct
  misc_feature 1..20: note = chemically synthesized
  source 1..20: mol_type = other DNA
tatactttatatatgttcag

SEQ ID NO: 37711 - DNA, 20 bp, synthetic construct
  misc_feature 1..20: note = chemically synthesized
  source 1..20: mol_type = other DNA
atactttatatatgttcaga

SEQ ID NO: 37712 - DNA, 20 bp, synthetic construct
  misc_feature 1..20: note = chemically synthesized
  source 1..20: mol_type = other DNA
atatgttcagagggaaaaat

SEQ ID NO: 37713 - DNA, 20 bp, synthetic construct
  misc_feature 1..20: note = chemically synthesized
  source 1..20: mol_type = other DNA
tcagagggaaaaattagaaa

SEQ ID NO: 37714 - DNA, 20 bp, synthetic construct
  misc_feature 1..20: note = chemically synthesized
  source 1..20: mol_type = other DNA
ctactgtaaactctctatat

SEQ ID NO: 37715 - DNA, 20 bp, synthetic construct
  misc_feature 1..20: note = chemically synthesized
  source 1..20: mol_type = other DNA
tactgtaaactctctatatt

SEQ ID NO: 37716 - DNA, 20 bp, synthetic construct
  misc_feature 1..20: note = chemically synthesized
  source 1..20: mol_type = other DNA
tgtaaactctctatattagg

SEQ ID NO: 37717 - DNA, 20 bp, synthetic construct
  misc_feature 1..20: note = chemically synthesized
  source 1..20: mol_type = other DNA
ttaggaagaccaacaatgtt

SEQ ID NO: 37718 - DNA, 20 bp, synthetic construct
  misc_feature 1..20: note = chemically synthesized
  source 1..20: mol_type = other DNA
aggaagaccaacaatgttga

SEQ ID NO: 37719 - DNA, 20 bp, synthetic construct
  misc_feature 1..20: note = chemically synthesized
  source 1..20: mol_type = other DNA
accaacaatgttgagagaaa

SEQ ID NO: 37720 - DNA, 20 bp, synthetic construct
  misc_feature 1..20: note = chemically synthesized
  source 1..20: mol_type = other DNA
atccaatgactaaaaaattg

SEQ ID NO: 37721 - DNA, 20 bp, synthetic construct
  misc_feature 1..20: note = chemically synthesized
  source 1..20: mol_type = other DNA
caatgactaaaaaattgtgg

SEQ ID NO: 37722 - DNA, 20 bp, synthetic construct
  misc_feature 1..20: note = chemically synthesized
  source 1..20: mol_type = other DNA
aatgactaaaaaattgtggt

SEQ ID NO: 37723 - DNA, 20 bp, synthetic construct
  misc_feature 1..20: note = chemically synthesized
  source 1..20: mol_type = other DNA
tgactaaaaaattgtggtgg

SEQ ID NO: 37724 - DNA, 20 bp, synthetic construct
  misc_feature 1..20: note = chemically synthesized
  source 1..20: mol_type = other DNA
gactaaaaaattgtggtggg

SEQ ID NO: 37725 - DNA, 20 bp, synthetic construct
  misc_feature 1..20: note = chemically synthesized
  source 1..20: mol_type = other DNA
ctaaaaaattgtggtgggag

SEQ ID NO: 37726 - DNA, 20 bp, synthetic construct
  misc_feature 1..20: note = chemically synthesized
  source 1..20: mol_type = other DNA
tttgtgtgactgtgtactaa

SEQ ID NO: 37727 - DNA, 20 bp, synthetic construct
  misc_feature 1..20: note = chemically synthesized
  source 1..20: mol_type = other DNA
tgtgtactaaaagcttcttt

SEQ ID NO: 37728 - DNA, 20 bp, synthetic construct
  misc_feature 1..20: note = chemically synthesized
  source 1..20: mol_type = other DNA
agactgatttaattgtgaaa

SEQ ID NO: 37729 - DNA, 20 bp, synthetic construct
  misc_feature 1..20: note = chemically synthesized
  source 1..20: mol_type = other DNA
gactgatttaattgtgaaac

SEQ ID NO: 37730 - DNA, 20 bp, synthetic construct
  misc_feature 1..20: note = chemically synthesized
  source 1..20: mol_type = other DNA
ttttcatccacaaatttcaa

SEQ ID NO: 37731 - DNA, 20 bp, synthetic construct
  misc_feature 1..20: note = chemically synthesized
  source 1..20: mol_type = other DNA
tttcatccacaaatttcaaa

SEQ ID NO: 37732 - DNA, 20 bp, synthetic construct
  misc_feature 1..20: note = chemically synthesized
  source 1..20: mol_type = other DNA
ttcatccacaaatttcaaaa

SEQ ID NO: 37733 - DNA, 20 bp, synthetic construct
  misc_feature 1..20: note = chemically synthesized
  source 1..20: mol_type = other DNA
tcatccacaaatttcaaaag

SEQ ID NO: 37734 - DNA, 20 bp, synthetic construct
  misc_feature 1..20: note = chemically synthesized
  source 1..20: mol_type = other DNA
caaaaggggaaaacctatct

SEQ ID NO: 37735 - DNA, 20 bp, synthetic construct
  misc_feature 1..20: note = chemically synthesized
  source 1..20: mol_type = other DNA
aaaggggaaaacctatctca

SEQ ID NO: 37736 - DNA, 20 bp, synthetic construct
  misc_feature 1..20: note = chemically synthesized
  source 1..20: mol_type = other DNA
tatctcagagtataatgttc

SEQ ID NO: 37737 - DNA, 20 bp, synthetic construct
  misc_feature 1..20: note = chemically synthesized
  source 1..20: mol_type = other DNA
aatataaactcaaatcctaa

SEQ ID NO: 37738 - DNA, 20 bp, synthetic construct
  misc_feature 1..20: note = chemically synthesized
  source 1..20: mol_type = other DNA
taaactcaaatcctaaaagt

SEQ ID NO: 37739 - DNA, 20 bp, synthetic construct
  misc_feature 1..20: note = chemically synthesized
  source 1..20: mol_type = other DNA
taaaagtcagttatctacca

SEQ ID NO: 37740 - DNA, 20 bp, synthetic construct
  misc_feature 1..20: note = chemically synthesized
  source 1..20: mol_type = other DNA
tgttccttatatgtgaccat

SEQ ID NO: 37741 - DNA, 20 bp, synthetic construct
  misc_feature 1..20: note = chemically synthesized
  source 1..20: mol_type = other DNA
gttccttatatgtgaccatg

SEQ ID NO: 37742 - DNA, 20 bp, synthetic construct
  misc_feature 1..20: note = chemically synthesized
  source 1..20: mol_type = other DNA
catgaggtctataatacatc

SEQ ID NO: 37743 - DNA, 20 bp, synthetic construct
  misc_feature 1..20: note = chemically synthesized
  source 1..20: mol_type = other DNA
atgaggtctataatacatct

SEQ ID NO: 37744 - DNA, 20 bp, synthetic construct
  misc_feature 1..20: note = chemically synthesized
  source 1..20: mol_type = other DNA
aatacatctaggcatcttaa

SEQ ID NO: 37745 - DNA, 20 bp, synthetic construct
  misc_feature 1..20: note = chemically synthesized
  source 1..20: mol_type = other DNA
ttaatggaaaaatctcattt

SEQ ID NO: 37746 - DNA, 20 bp, synthetic construct
  misc_feature 1..20: note = chemically synthesized
  source 1..20: mol_type = other DNA
cttgatttgctatcttgatg

SEQ ID NO: 37747 - DNA, 20 bp, synthetic construct
  misc_feature 1..20: note = chemically synthesized
  source 1..20: mol_type = other DNA
tcttgatgcagaacctcttg

SEQ ID NO: 37748 - DNA, 20 bp, synthetic construct
  misc_feature 1..20: note = chemically synthesized
  source 1..20: mol_type = other DNA
atgcagaacctcttgtagct

SEQ ID NO: 37749 - DNA, 20 bp, synthetic construct
  misc_feature 1..20: note = chemically synthesized
  source 1..20: mol_type = other DNA
tgcagaacctcttgtagctg

SEQ ID NO: 37750 - DNA, 20 bp, synthetic construct
  misc_feature 1..20: note = chemically synthesized
  source 1..20: mol_type = other DNA
gaacctcttgtagctgagga

SEQ ID NO: 37751 - DNA, 20 bp, synthetic construct
  misc_feature 1..20: note = chemically synthesized
  source 1..20: mol_type = other DNA
gcctttgtttcccatctttg

SEQ ID NO: 37752 - DNA, 20 bp, synthetic construct
  misc_feature 1..20: note = chemically synthesized
  source 1..20: mol_type = other DNA
tgtttcccatctttgtagaa

SEQ ID NO: 37753 - DNA, 20 bp, synthetic construct
  misc_feature 1..20: note = chemically synthesized
  source 1..20: mol_type = other DNA
ttcccatctttgtagaacag

SEQ ID NO: 37754 - DNA, 20 bp, synthetic construct
  misc_feature 1..20: note = chemically synthesized
  source 1..20: mol_type = other DNA
tctttgtagaacagaagctg

SEQ ID NO: 37755 - DNA, 20 bp, synthetic construct
  misc_feature 1..20: note = chemically synthesized
  source 1..20: mol_type = other DNA
ctttgtagaacagaagctgt

SEQ ID NO: 37756 - DNA, 20 bp, synthetic construct
  misc_feature 1..20: note = chemically synthesized
  source 1..20: mol_type = other DNA
cagaagctgtgggacatcac

SEQ ID NO: 37757 - DNA, 20 bp, synthetic construct
  misc_feature 1..20: note = chemically synthesized
  source 1..20: mol_type = other DNA
tgggacatcacaagttgctg

SEQ ID NO: 37758 - DNA, 20 bp, synthetic construct
  misc_feature 1..20: note = chemically synthesized
  source 1..20: mol_type = other DNA
caagttgctgtggtaatcac

SEQ ID NO: 37759 - DNA, 20 bp, synthetic construct
  misc_feature 1..20: note = chemically synthesized
  source 1..20: mol_type = other DNA
ccatctgatatctaaatttt

SEQ ID NO: 37760 - DNA, 20 bp, synthetic construct
  misc_feature 1..20: note = chemically synthesized
  source 1..20: mol_type = other DNA
catctgatatctaaattttg

SEQ ID NO: 37761 - DNA, 20 bp, synthetic construct
  misc_feature 1..20: note = chemically synthesized
  source 1..20: mol_type = other DNA
tgatatctaaattttgagga

SEQ ID NO: 37762 - DNA, 20 bp, synthetic construct
  misc_feature 1..20: note = chemically synthesized
  source 1..20: mol_type = other DNA
gatatctaaattttgaggat

SEQ ID NO: 37763 - DNA, 20 bp, synthetic construct
  misc_feature 1..20: note = chemically synthesized
  source 1..20: mol_type = other DNA
aggataggctatctgtttta

SEQ ID NO: 37764 - DNA, 20 bp, synthetic construct
  misc_feature 1..20: note = chemically synthesized
  source 1..20: mol_type = other DNA
ttttacagtgatacatttga

SEQ ID NO: 37765 - DNA, 20 bp, synthetic construct
  misc_feature 1..20: note = chemically synthesized
  source 1..20: mol_type = other DNA
tacagtgatacatttgatgg

SEQ ID NO: 37766 - DNA, 20 bp, synthetic construct
  misc_feature 1..20: note = chemically synthesized
  source 1..20: mol_type = other DNA
acagtgatacatttgatgga

SEQ ID NO: 37767 - DNA, 20 bp, synthetic construct
  misc_feature 1..20: note = chemically synthesized
  source 1..20: mol_type = other DNA
acatttgatggaaggactct

SEQ ID NO: 37768 - DNA, 20 bp, synthetic construct
  misc_feature 1..20: note = chemically synthesized
  source 1..20: mol_type = other DNA
ggaaggactcttagtttaac

SEQ ID NO: 37769 - DNA, 20 bp, synthetic construct
  misc_feature 1..20: note = chemically synthesized
  source 1..20: mol_type = other DNA
gactcttagtttaactggcc

SEQ ID NO: 37770 - DNA, 20 bp, synthetic construct
  misc_feature 1..20: note = chemically synthesized
  source 1..20: mol_type = other DNA
actcttagtttaactggcca

SEQ ID NO: 37771 - DNA, 20 bp, synthetic construct
  misc_feature 1..20: note = chemically synthesized
  source 1..20: mol_type = other DNA
ttagtttaactggccaaggc

SEQ ID NO: 37772 - DNA, 20 bp, synthetic construct
  misc_feature 1..20: note = chemically synthesized
  source 1..20: mol_type = other DNA
tagtttaactggccaaggcc

SEQ ID NO: 37773 - DNA, 20 bp, synthetic construct
  misc_feature 1..20: note = chemically synthesized
  source 1..20: mol_type = other DNA
ctggccaaggccaggacttc

SEQ ID NO: 37774 - DNA, 20 bp, synthetic construct
  misc_feature 1..20: note = chemically synthesized
  source 1..20: mol_type = other DNA
aaggccaggacttcaagcca

SEQ ID NO: 37775 - DNA, 20 bp, synthetic construct
  misc_feature 1..20: note = chemically synthesized
  source 1..20: mol_type = other DNA
taattacctgccacatgtgt

SEQ ID NO: 37776 - DNA, 20 bp, synthetic construct
  misc_feature 1..20: note = chemically synthesized
  source 1..20: mol_type = other DNA
ctgccacatgtgtgagaaat

SEQ ID NO: 37777 - DNA, 20 bp, synthetic construct
  misc_feature 1..20: note = chemically synthesized
  source 1..20: mol_type = other DNA
tgccacatgtgtgagaaata

SEQ ID NO: 37778 - DNA, 20 bp, synthetic construct
  misc_feature 1..20: note = chemically synthesized
  source 1..20: mol_type = other DNA
cacatgtgtgagaaataagg

SEQ ID NO: 37779 - DNA, 20 bp, synthetic construct
  misc_feature 1..20: note = chemically synthesized
  source 1..20: mol_type = other DNA
aaggaagtttcaaaccatga

SEQ ID NO: 37780 - DNA, 20 bp, synthetic construct
  misc_feature 1..20: note = chemically synthesized
  source 1..20: mol_type = other DNA
ggaagtttcaaaccatgatg

SEQ ID NO: 37781 - DNA, 20 bp, synthetic construct
  misc_feature 1..20: note = chemically synthesized
  source 1..20: mol_type = other DNA
agtttcaaaccatgatggag

SEQ ID NO: 37782 - DNA, 20 bp, synthetic construct
  misc_feature 1..20: note = chemically synthesized
  source 1..20: mol_type = other DNA
ccatgatggagcagcatcac

SEQ ID NO: 37783 - DNA, 20 bp, synthetic construct
  misc_feature 1..20: note = chemically synthesized
  source 1..20: mol_type = other DNA
tggcatgccttttgtgtata

SEQ ID NO: 37784 - DNA, 20 bp, synthetic construct
  misc_feature 1..20: note = chemically synthesized
  source 1..20: mol_type = other DNA
catgccttttgtgtatatgg

SEQ ID NO: 37785 - DNA, 20 bp, synthetic construct
  misc_feature 1..20: note = chemically synthesized
  source 1..20: mol_type = other DNA
atgccttttgtgtatatggt

SEQ ID NO: 37786 - DNA, 20 bp, synthetic construct
  misc_feature 1..20: note = chemically synthesized
  source 1..20: mol_type = other DNA
ttttgtgtatatggtgggtt

SEQ ID NO: 37787 - DNA, 20 bp, synthetic construct
  misc_feature 1..20: note = chemically synthesized
  source 1..20: mol_type = other DNA
tttgtgtatatggtgggttg

SEQ ID NO: 37788 - DNA, 20 bp, synthetic construct
  misc_feature 1..20: note = chemically synthesized
  source 1..20: mol_type = other DNA
tatatggtgggttgaggata

SEQ ID NO: 37789 - DNA, 20 bp, synthetic construct
  misc_feature 1..20: note = chemically synthesized
  source 1..20: mol_type = other DNA
ttgaggatatggcaatattg

SEQ ID NO: 37790 - DNA, 20 bp, synthetic construct
  misc_feature 1..20: note = chemically synthesized
  source 1..20: mol_type = other DNA
aatattgcagcctcactgaa

SEQ ID NO: 37791 - DNA, 20 bp, synthetic construct
  misc_feature 1..20: note = chemically synthesized
  source 1..20: mol_type = other DNA
atattgcagcctcactgaat

SEQ ID NO: 37792 - DNA, 20 bp, synthetic construct
  misc_feature 1..20: note = chemically synthesized
  source 1..20: mol_type = other DNA
cagcctcactgaataggtat

SEQ ID NO: 37793 - DNA, 20 bp, synthetic construct
  misc_feature 1..20: note = chemically synthesized
  source 1..20: mol_type = other DNA
agcctcactgaataggtata

SEQ ID NO: 37794 - DNA, 20 bp, synthetic construct
  misc_feature 1..20: note = chemically synthesized
  source 1..20: mol_type = other DNA
cctcactgaataggtataag

SEQ ID NO: 37795 - DNA, 20 bp, synthetic construct
  misc_feature 1..20: note = chemically synthesized
  source 1..20: mol_type = other DNA
ctcactgaataggtataagg

SEQ ID NO: 37796 - DNA, 20 bp, synthetic construct
  misc_feature 1..20: note = chemically synthesized
  source 1..20: mol_type = other DNA
gtataaggaggtgcttactt

SEQ ID NO: 37797 - DNA, 20 bp, synthetic construct
  misc_feature 1..20: note = chemically synthesized
  source 1..20: mol_type = other DNA
aggaggtgcttactttggat

SEQ ID NO: 37798 - DNA, 20 bp, synthetic construct
  misc_feature 1..20: note = chemically synthesized
  source 1..20: mol_type = other DNA
aggtgcttactttggataag

SEQ ID NO: 37799 - DNA, 20 bp, synthetic construct
  misc_feature 1..20: note = chemically synthesized
  source 1..20: mol_type = other DNA
ggataagcagtgttgtttcc

SEQ ID NO: 37800 - DNA, 20 bp, synthetic construct
  misc_feature 1..20: note = chemically synthesized
  source 1..20: mol_type = other DNA
cagtgttgtttccaagatga

SEQ ID NO: 37801 - DNA, 20 bp, synthetic construct
  misc_feature 1..20: note = chemically synthesized
  source 1..20: mol_type = other DNA
tgttgtttccaagatgaaag

SEQ ID NO: 37802 - DNA, 20 bp, synthetic construct
  misc_feature 1..20: note = chemically synthesized
  source 1..20: mol_type = other DNA
atgaaagaagcccaaattat

SEQ ID NO: 37803 - DNA, 20 bp, synthetic construct
  misc_feature 1..20: note = chemically synthesized
  source 1..20: mol_type = other DNA
tgaaagaagcccaaattatt

SEQ ID NO: 37804 - DNA, 20 bp, synthetic construct
  misc_feature 1..20: note = chemically synthesized
  source 1..20: mol_type = other DNA
taatgacgttgtccttaaac

SEQ ID NO: 37805 - DNA, 20 bp, synthetic construct
  misc_feature 1..20: note = chemically synthesized
  source 1..20: mol_type = other DNA
acgttgtccttaaactggtt

SEQ ID NO: 37806 - DNA, 20 bp, synthetic construct
  misc_feature 1..20: note = chemically synthesized
  source 1..20: mol_type = other DNA
gacgttgaattctctgttct

SEQ ID NO: 37807 - DNA, 20 bp, synthetic construct
  misc_feature 1..20: note = chemically synthesized
  source 1..20: mol_type = other DNA
ctctgttcttggtgccttca

SEQ ID NO: 37808 - DNA, 20 bp, synthetic construct
  misc_feature 1..20: note = chemically synthesized
  source 1..20: mol_type = other DNA
ggtgccttcatggttgttta

SEQ ID NO: 37809 - DNA, 20 bp, synthetic construct
  misc_feature 1..20: note = chemically synthesized
  source 1..20: mol_type = other DNA
atatttttcaaattgattct

SEQ ID NO: 37810 - DNA, 20 bp, synthetic construct
  misc_feature 1..20: note = chemically synthesized
  source 1..20: mol_type = other DNA
atttttcaaattgattctaa

SEQ ID NO: 37811 - DNA, 20 bp, synthetic construct
  misc_feature 1..20: note = chemically synthesized
  source 1..20: mol_type = other DNA
tttttcaaattgattctaag

SEQ ID NO: 37812 - DNA, 20 bp, synthetic construct
  misc_feature 1..20: note = chemically synthesized
  source 1..20: mol_type = other DNA
ttttcaaattgattctaaga

SEQ ID NO: 37813 - DNA, 20 bp, synthetic construct
  misc_feature 1..20: note = chemically synthesized
  source 1..20: mol_type = other DNA
agagggtgatctgaatccac

SEQ ID NO: 37814 - DNA, 20 bp, synthetic construct
  misc_feature 1..20: note = chemically synthesized
  source 1..20: mol_type = other DNA
cactagcattttatttcatt

SEQ ID NO: 37815 - DNA, 20 bp, synthetic construct
  misc_feature 1..20: note = chemically synthesized
  source 1..20: mol_type = other DNA
gagacttttcatcttttaca

SEQ ID NO: 37816 - DNA, 20 bp, synthetic construct
  misc_feature 1..20: note = chemically synthesized
  source 1..20: mol_type = other DNA
acttttcatcttttacatag

SEQ ID NO: 37817 - DNA, 20 bp, synthetic construct
  misc_feature 1..20: note = chemically synthesized
  source 1..20: mol_type = other DNA
cttttcatcttttacataga

SEQ ID NO: 37818 - DNA, 20 bp, synthetic construct
  misc_feature 1..20: note = chemically synthesized
  source 1..20: mol_type = other DNA
cttttacatagaaggaaact

SEQ ID NO: 37819 - DNA, 20 bp, synthetic construct
  misc_feature 1..20: note = chemically synthesized
  source 1..20: mol_type = other DNA
atagaaggaaactaagttat

SEQ ID NO: 37820 - DNA, 20 bp, synthetic construct
  misc_feature 1..20: note = chemically synthesized
  source 1..20: mol_type = other DNA
aatatcaactttcatgataa

SEQ ID NO: 37821 - DNA, 20 bp, synthetic construct
  misc_feature 1..20: note = chemically synthesized
  source 1..20: mol_type = other DNA
ctttcatgataaaagataca

SEQ ID NO: 37822 - DNA, 20 bp, synthetic construct
  misc_feature 1..20: note = chemically synthesized
  source 1..20: mol_type = other DNA
aaagatacacagtcccttct

SEQ ID NO: 37823 - DNA, 20 bp, synthetic construct
  misc_feature 1..20: note = chemically synthesized
  source 1..20: mol_type = other DNA
aagatacacagtcccttctg

SEQ ID NO: 37824 - DNA, 20 bp, synthetic construct
  misc_feature 1..20: note = chemically synthesized
  source 1..20: mol_type = other DNA
agatacacagtcccttctga

SEQ ID NO: 37825 - DNA, 20 bp, synthetic construct
  misc_feature 1..20: note = chemically synthesized
  source 1..20: mol_type = other DNA
acagtcccttctgagggcac

SEQ ID NO: 37826 - DNA, 20 bp, synthetic construct
  misc_feature 1..20: note = chemically synthesized
  source 1..20: mol_type = other DNA
aatacttcattaaaccaaac

SEQ ID NO: 37827 - DNA, 20 bp, synthetic construct
  misc_feature 1..20: note = chemically synthesized
  source 1..20: mol_type = other DNA
tcttctgtcatatttttaat

SEQ ID NO: 37828 - DNA, 20 bp, synthetic construct
  misc_feature 1..20: note = chemically synthesized
  source 1..20: mol_type = other DNA
cttctgtcatatttttaata

SEQ ID NO: 37829 - DNA, 20 bp, synthetic construct
  misc_feature 1..20: note = chemically synthesized
  source 1..20: mol_type = other DNA
tctgtcatatttttaataag

SEQ ID NO: 37830 - DNA, 20 bp, synthetic construct
  misc_feature 1..20: note = chemically synthesized
  source 1..20: mol_type = other DNA
ctgtcatatttttaataagg

SEQ ID NO: 37831 - DNA, 20 bp, synthetic construct
  misc_feature 1..20: note = chemically synthesized
  source 1..20: mol_type = other DNA
catatttttaataaggagga

SEQ ID NO: 37832 - DNA, 20 bp, synthetic construct
  misc_feature 1..20: note = chemically synthesized
  source 1..20: mol_type = other DNA
aacaaaataatatccttatt

SEQ ID NO: 37833 - DNA, 20 bp, synthetic construct
  misc_feature 1..20: note = chemically synthesized
  source 1..20: mol_type = other DNA
ctatatgttaatgaaactgt

SEQ ID NO: 37834 - DNA, 20 bp, synthetic construct
  misc_feature 1..20: note = chemically synthesized
  source 1..20: mol_type = other DNA
tgttaatgaaactgttagaa

SEQ ID NO: 37835 - DNA, 20 bp, synthetic construct
  misc_feature 1..20: note = chemically synthesized
  source 1..20: mol_type = other DNA
gttagaaaagaaaatgatat

SEQ ID NO: 37836 - DNA, 20 bp, synthetic construct
  misc_feature 1..20: note = chemically synthesized
  source 1..20: mol_type = other DNA
atgatatgagtaattttctc

SEQ ID NO: 37837 - DNA, 20 bp, synthetic construct
  misc_feature 1..20: note = chemically synthesized
  source 1..20: mol_type = other DNA
tgatatgagtaattttctcc

SEQ ID NO: 37838 - DNA, 20 bp, synthetic construct
  misc_feature 1..20: note = chemically synthesized
  source 1..20: mol_type = other DNA
gatatgagtaattttctcca

SEQ ID NO: 37839 - DNA, 20 bp, synthetic construct
  misc_feature 1..20: note = chemically synthesized
  source 1..20: mol_type = other DNA
tccagggtatcctttgtgca

SEQ ID NO: 37840 - DNA, 20 bp, synthetic construct
  misc_feature 1..20: note = chemically synthesized
  source 1..20: mol_type = other DNA
ttctcttcatcttttctaca

SEQ ID NO: 37841 - DNA, 20 bp, synthetic construct
  misc_feature 1..20: note = chemically synthesized
  source 1..20: mol_type = other DNA
cttcatcttttctacaaagt

SEQ ID NO: 37842 - DNA, 20 bp, synthetic construct
  misc_feature 1..20: note = chemically synthesized
  source 1..20: mol_type = other DNA
atcaataaataactgttgat

SEQ ID NO: 37843 - DNA, 20 bp, synthetic construct
  misc_feature 1..20: note = chemically synthesized
  source 1..20: mol_type = other DNA
taactgttgattagtgaata

SEQ ID NO: 37844 - DNA, 20 bp, synthetic construct
  misc_feature 1..20: note = chemically synthesized
  source 1..20: mol_type = other DNA
ttatcttcttgtgataacta

SEQ ID NO: 37845 - DNA, 20 bp, synthetic construct
  misc_feature 1..20: note = chemically synthesized
  source 1..20: mol_type = other DNA
tcttcttgtgataactatgg

SEQ ID NO: 37846 - DNA, 20 bp, synthetic construct
  misc_feature 1..20: note = chemically synthesized
  source 1..20: mol_type = other DNA
gtgataactatggaagtcaa

SEQ ID NO: 37847 - DNA, 20 bp, synthetic construct
  misc_feature 1..20: note = chemically synthesized
  source 1..20: mol_type = other DNA
caatggaactactctccatt

SEQ ID NO: 37848 - DNA, 20 bp, synthetic construct
  misc_feature 1..20: note = chemically synthesized
  source 1..20: mol_type = other DNA
actctccattcagcaaaact

SEQ ID NO: 37849 - DNA, 20 bp, synthetic construct
  misc_feature 1..20: note = chemically synthesized
  source 1..20: mol_type = other DNA
ttcagcaaaactcagaaatt

SEQ ID NO: 37850 - DNA, 20 bp, synthetic construct
  misc_feature 1..20: note = chemically synthesized
  source 1..20: mol_type = other DNA
tcagcaaaactcagaaattc

SEQ ID NO: 37851 - DNA, 20 bp, synthetic construct
  misc_feature 1..20: note = chemically synthesized
  source 1..20: mol_type = other DNA
gcaaaactcagaaattcagg

SEQ ID NO: 37852 - DNA, 20 bp, synthetic construct
  misc_feature 1..20: note = chemically synthesized
  source 1..20: mol_type = other DNA
atctactaccttcaatcact

SEQ ID NO: 37853 - DNA, 20 bp, synthetic construct
  misc_feature 1..20: note = chemically synthesized
  source 1..20: mol_type = other DNA
caatcactcagttctattct

SEQ ID NO: 37854 - DNA, 20 bp, synthetic construct
  misc_feature 1..20: note = chemically synthesized
  source 1..20: mol_type = other DNA
ctcagttctattctaagtca

SEQ ID NO: 37855 - DNA, 20 bp, synthetic construct
  misc_feature 1..20: note = chemically synthesized
  source 1..20: mol_type = other DNA
atagaatctctcttctattc

SEQ ID NO: 37856 - DNA, 20 bp, synthetic construct
  misc_feature 1..20: note = chemically synthesized
  source 1..20: mol_type = other DNA
ctaatgctactgataacaac

SEQ ID NO: 37857 - DNA, 20 bp, synthetic construct
  misc_feature 1..20: note = chemically synthesized
  source 1..20: mol_type = other DNA
ccaacatgtttctcatactg

SEQ ID NO: 37858 - DNA, 20 bp, synthetic construct
  misc_feature 1..20: note = chemically synthesized
  source 1..20: mol_type = other DNA
tgtttctcatactgtagcca

SEQ ID NO: 37859 - DNA, 20 bp, synthetic construct
  misc_feature 1..20: note = chemically synthesized
  source 1..20: mol_type = other DNA
aacaataactacttgattat

SEQ ID NO: 37860 - DNA, 20 bp, synthetic construct
  misc_feature 1..20: note = chemically synthesized
  source 1..20: mol_type = other DNA
gttttatattcattccctta

SEQ ID NO: 37861 - DNA, 20 bp, synthetic construct
  misc_feature 1..20: note = chemically synthesized
  source 1..20: mol_type = other DNA
aaatgttttacatgatttgc

SEQ ID NO: 37862 - DNA, 20 bp, synthetic construct
  misc_feature 1..20: note = chemically synthesized
  source 1..20: mol_type = other DNA
tttgcaagatatattgtgat

SEQ ID NO: 37863 - DNA, 20 bp, synthetic construct
  misc_feature 1..20: note = chemically synthesized
  source 1..20: mol_type = other DNA
atcagaacctgctactacta

SEQ ID NO: 37864 - DNA, 20 bp, synthetic construct
  misc_feature 1..20: note = chemically synthesized
  source 1..20: mol_type = other DNA
ctacagattcattttctctc

SEQ ID NO: 37865 - DNA, 20 bp, synthetic construct
  misc_feature 1..20: note = chemically synthesized
  source 1..20: mol_type = other DNA
tttttcatgtattgttgttc

SEQ ID NO: 37866 - DNA, 20 bp, synthetic construct
  misc_feature 1..20: note = chemically synthesized
  source 1..20: mol_type = other DNA
tttcatgtattgttgttcaa

SEQ ID NO: 37867 - DNA, 20 bp, synthetic construct
  misc_feature 1..20: note = chemically synthesized
  source 1..20: mol_type = other DNA
attatttttatttgaattta

SEQ ID NO: 37868 - DNA, 20 bp, synthetic construct
  misc_feature 1..20: note = chemically synthesized
  source 1..20: mol_type = other DNA
atactactacactactaata

SEQ ID NO: 37869 - DNA, 20 bp, synthetic construct
  misc_feature 1..20: note = chemically synthesized
  source 1..20: mol_type = other DNA
ctactacactactaatatag

SEQ ID NO: 37870 - DNA, 20 bp, synthetic construct
  misc_feature 1..20: note = chemically synthesized
  source 1..20: mol_type = other DNA
atatagtagcatttaattct

SEQ ID NO: 37871 - DNA, 20 bp, synthetic construct
  misc_feature 1..20: note = chemically synthesized
  source 1..20: mol_type = other DNA
tagcatttaattctcagctt

SEQ ID NO: 37872 - DNA, 20 bp, synthetic construct
  misc_feature 1..20: note = chemically synthesized
  source 1..20: mol_type = other DNA
catttaattctcagcttaag

SEQ ID NO: 37873 - DNA, 20 bp, synthetic construct
  misc_feature 1..20: note = chemically synthesized
  source 1..20: mol_type = other DNA
agcttaagtagcatttcttc

SEQ ID NO: 37874 - DNA, 20 bp, synthetic construct
  misc_feature 1..20: note = chemically synthesized
  source 1..20: mol_type = other DNA
tggaaaatgttccctgatcc

SEQ ID NO: 37875 - DNA, 20 bp, synthetic construct
  misc_feature 1..20: note = chemically synthesized
  source 1..20: mol_type = other DNA
tttatttgatgtgtctctca

SEQ ID NO: 37876 - DNA, 20 bp, synthetic construct
  misc_feature 1..20: note = chemically synthesized
  source 1..20: mol_type = other DNA
atagcacactaatattcacg

SEQ ID NO: 37877 - DNA, 20 bp, synthetic construct
  misc_feature 1..20: note = chemically synthesized
  source 1..20: mol_type = other DNA
taatattcacgtagtaatga

SEQ ID NO: 37878 - DNA, 20 bp, synthetic construct
  misc_feature 1..20: note = chemically synthesized
  source 1..20: mol_type = other DNA
gatagtgttgtatgaattca

SEQ ID NO: 37879 - DNA, 20 bp, synthetic construct
  misc_feature 1..20: note = chemically synthesized
  source 1..20: mol_type = other DNA
catggtaaatattttctttc

SEQ ID NO: 37880 - DNA, 20 bp, synthetic construct
  misc_feature 1..20: note = chemically synthesized
  source 1..20: mol_type = other DNA
ttttctttctagtgcctgct

SEQ ID NO: 37881 - DNA, 20 bp, synthetic construct
  misc_feature 1..20: note = chemically synthesized
  source 1..20: mol_type = other DNA
tttctttctagtgcctgctt

SEQ ID NO: 37882 - DNA, 20 bp, synthetic construct
  misc_feature 1..20: note = chemically synthesized
  source 1..20: mol_type = other DNA
gggttttaaatttcaataaa

SEQ ID NO: 37883 - DNA, 20 bp, synthetic construct
  misc_feature 1..20: note = chemically synthesized
  source 1..20: mol_type = other DNA
taaatttcaataaaaagaac

SEQ ID NO: 37884 - DNA, 20 bp, synthetic construct
  misc_feature 1..20: note = chemically synthesized
  source 1..20: mol_type = other DNA
tcaataaaaagaacaagtcc

SEQ ID NO: 37885 - DNA, 20 bp, synthetic construct
  misc_feature 1..20: note = chemically synthesized
  source 1..20: mol_type = other DNA
caataaaaagaacaagtcct

SEQ ID NO: 37886 - DNA, 20 bp, synthetic construct
  misc_feature 1..20: note = chemically synthesized
  source 1..20: mol_type = other DNA
taggtatttcattttctttg

SEQ ID NO: 37887 - DNA, 20 bp, synthetic construct
  misc_feature 1..20: note = chemically synthesized
  source 1..20: mol_type = other DNA
ttctttgtggctgttcttaa

SEQ ID NO: 37888 - DNA, 20 bp, synthetic construct
  misc_feature 1..20: note = chemically synthesized
  source 1..20: mol_type = other DNA
tctttgtggctgttcttaat

SEQ ID NO: 37889 - DNA, 20 bp, synthetic construct
  misc_feature 1..20: note = chemically synthesized
  source 1..20: mol_type = other DNA
tgtgttctcgatttgactct

SEQ ID NO: 37890 - DNA, 20 bp, synthetic construct
  misc_feature 1..20: note = chemically synthesized
  source 1..20: mol_type = other DNA
tctcgatttgactctcagcc

SEQ ID NO: 37891 - DNA, 20 bp, synthetic construct
  misc_feature 1..20: note = chemically synthesized
  source 1..20: mol_type = other DNA
ctcgatttgactctcagcct

SEQ ID NO: 37892 - DNA, 20 bp, synthetic construct
  misc_feature 1..20: note = chemically synthesized
  source 1..20: mol_type = other DNA
actctcagcctgggccttat

SEQ ID NO: 37893 - DNA, 20 bp, synthetic construct
  misc_feature 1..20: note = chemically synthesized
  source 1..20: mol_type = other DNA
gcctgggccttattggtgta

SEQ ID NO: 37894 - DNA, 20 bp, synthetic construct
  misc_feature 1..20: note = chemically synthesized
  source 1..20: mol_type = other DNA
accttgctaaaattgtttat

SEQ ID NO: 37895 - DNA, 20 bp, synthetic construct
  misc_feature 1..20: note = chemically synthesized
  source 1..20: mol_type = other DNA
ctaaaattgtttatcagttc

SEQ ID NO: 37896 - DNA, 20 bp, synthetic construct
  misc_feature 1..20: note = chemically synthesized
  source 1..20: mol_type = other DNA
aaattgtttatcagttctag

SEQ ID NO: 37897 - DNA, 20 bp, synthetic construct
  misc_feature 1..20: note = chemically synthesized
  source 1..20: mol_type = other DNA
tatcagttctagcagccttt

SEQ ID NO: 37898 - DNA, 20 bp, synthetic construct
  misc_feature 1..20: note = chemically synthesized
  source 1..20: mol_type = other DNA
cagttctagcagccttttgg

SEQ ID NO: 37899 - DNA, 20 bp, synthetic construct
  misc_feature 1..20: note = chemically synthesized
  source 1..20: mol_type = other DNA
cagccttttggaagaatctg

SEQ ID NO: 37900 - DNA, 20 bp, synthetic construct
  misc_feature 1..20: note = chemically synthesized
  source 1..20: mol_type = other DNA
agccttttggaagaatctgt

SEQ ID NO: 37901 - DNA, 20 bp, synthetic construct
  misc_feature 1..20: note = chemically synthesized
  source 1..20: mol_type = other DNA
aagaatctgtaggattttct

SEQ ID NO: 37902 - DNA, 20 bp, synthetic construct
  misc_feature 1..20: note = chemically synthesized
  source 1..20: mol_type = other DNA
tctgtaggattttctaagta

SEQ ID NO: 37903 - DNA, 20 bp, synthetic construct
  misc_feature 1..20: note = chemically synthesized
  source 1..20: mol_type = other DNA
tgtaggattttctaagtata

SEQ ID NO: 37904 - DNA, 20 bp, synthetic construct
  misc_feature 1..20: note = chemically synthesized
  source 1..20: mol_type = other DNA
taagtatagagtcatatcat

SEQ ID NO: 37905 - DNA, 20 bp, synthetic construct
  misc_feature 1..20: note = chemically synthesized
  source 1..20: mol_type = other DNA
atagagtcatatcatcagca

SEQ ID NO: 37906 - DNA, 20 bp, synthetic construct
  misc_feature 1..20: note = chemically synthesized
  source 1..20: mol_type = other DNA
agagtcatatcatcagcaaa

SEQ ID NO: 37907 - DNA, 20 bp, synthetic construct
  misc_feature 1..20: note = chemically synthesized
  source 1..20: mol_type = other DNA
agtcatatcatcagcaaaga

SEQ ID NO: 37908 - DNA, 20 bp, synthetic construct
  misc_feature 1..20: note = chemically synthesized
  source 1..20: mol_type = other DNA
atatcatcagcaaagagaga

SEQ ID NO: 37909 - DNA, 20 bp, synthetic construct
  misc_feature 1..20: note = chemically synthesized
  source 1..20: mol_type = other DNA
atcagcaaagagagatagtt

SEQ ID NO: 37910 - DNA, 20 bp, synthetic construct
  misc_feature 1..20: note = chemically synthesized
  source 1..20: mol_type = other DNA
tttctctcgcctgattgccc

SEQ ID NO: 37911 - DNA, 20 bp, synthetic construct
  misc_feature 1..20: note = chemically synthesized
  source 1..20: mol_type = other DNA
tctcgcctgattgccctggt

SEQ ID NO: 37912 - DNA, 20 bp, synthetic construct
  misc_feature 1..20: note = chemically synthesized
  source 1..20: mol_type = other DNA
ctcgcctgattgccctggtt

SEQ ID NO: 37913 - DNA, 20 bp, synthetic construct
  misc_feature 1..20: note = chemically synthesized
  source 1..20: mol_type = other DNA
acttccaattttatgttcac

SEQ ID NO: 37914 - DNA, 20 bp, synthetic construct
  misc_feature 1..20: note = chemically synthesized
  source 1..20: mol_type = other DNA
cttccaattttatgttcact

SEQ ID NO: 37915 - DNA, 20 bp, synthetic construct
  misc_feature 1..20: note = chemically synthesized
  source 1..20: mol_type = other DNA
tccaattttatgttcactag

SEQ ID NO: 37916 - DNA, 20 bp, synthetic construct
  misc_feature 1..20: note = chemically synthesized
  source 1..20: mol_type = other DNA
aattttatgttcactaggag

SEQ ID NO: 37917 - DNA, 20 bp, synthetic construct
  misc_feature 1..20: note = chemically synthesized
  source 1..20: mol_type = other DNA
ttatgttcactaggagtggt

SEQ ID NO: 37918 - DNA, 20 bp, synthetic construct
  misc_feature 1..20: note = chemically synthesized
  source 1..20: mol_type = other DNA
ttcactaggagtggtgagaa

SEQ ID NO: 37919 - DNA, 20 bp, synthetic construct
  misc_feature 1..20: note = chemically synthesized
  source 1..20: mol_type = other DNA
tcactaggagtggtgagaat

SEQ ID NO: 37920 - DNA, 20 bp, synthetic construct
  misc_feature 1..20: note = chemically synthesized
  source 1..20: mol_type = other DNA
tgggaatccttgtcttgttg

SEQ ID NO: 37921 - DNA, 20 bp, synthetic construct
  misc_feature 1..20: note = chemically synthesized
  source 1..20: mol_type = other DNA
cttgtcttgttgcagttttc

SEQ ID NO: 37922 - DNA, 20 bp, synthetic construct
  misc_feature 1..20: note = chemically synthesized
  source 1..20: mol_type = other DNA
ttgtcttgttgcagttttcg

SEQ ID NO: 37923 - DNA, 20 bp, synthetic construct
  misc_feature 1..20: note = chemically synthesized
  source 1..20: mol_type = other DNA
gtcttgttgcagttttcgag

SEQ ID NO: 37924 - DNA, 20 bp, synthetic construct
  misc_feature 1..20: note = chemically synthesized
  source 1..20: mol_type = other DNA
gttgcagttttcgaggagaa

SEQ ID NO: 37925 - DNA, 20 bp, synthetic construct
  misc_feature 1..20: note = chemically synthesized
  source 1..20: mol_type = other DNA
gttttcgaggagaatagttc

SEQ ID NO: 37926 - DNA, 20 bp, synthetic construct
  misc_feature 1..20: note = chemically synthesized
  source 1..20: mol_type = other DNA
agttccagcttttgcccatt

SEQ ID NO: 37927 - DNA, 20 bp, synthetic construct
  misc_feature 1..20: note = chemically synthesized
  source 1..20: mol_type = other DNA
cagcttttgcccattcagta

SEQ ID NO: 37928 - DNA, 20 bp, synthetic construct
  misc_feature 1..20: note = chemically synthesized
  source 1..20: mol_type = other DNA
ttgcccattcagtatggttt

SEQ ID NO: 37929 - DNA, 20 bp, synthetic construct
  misc_feature 1..20: note = chemically synthesized
  source 1..20: mol_type = other DNA
attcagtatggttttggtta

SEQ ID NO: 37930 - DNA, 20 bp, synthetic construct
  misc_feature 1..20: note = chemically synthesized
  source 1..20: mol_type = other DNA
ttcagtatggttttggttat

SEQ ID NO: 37931 - DNA, 20 bp, synthetic construct
  misc_feature 1..20: note = chemically synthesized
  source 1..20: mol_type = other DNA
ggttatgggtttttcatacg

SEQ ID NO: 37932 - DNA, 20 bp, synthetic construct
  misc_feature 1..20: note = chemically synthesized
  source 1..20: mol_type = other DNA
tacgtggcttttattctttt

SEQ ID NO: 37933 - DNA, 20 bp, synthetic construct
  misc_feature 1..20: note = chemically synthesized
  source 1..20: mol_type = other DNA
acgtggcttttattcttttg

SEQ ID NO: 37934 - DNA, 20 bp, synthetic construct
  misc_feature 1..20: note = chemically synthesized
  source 1..20: mol_type = other DNA
aggtatgttcctttgatgcc

SEQ ID NO: 37935 - DNA, 20 bp, synthetic construct
  misc_feature 1..20: note = chemically synthesized
  source 1..20: mol_type = other DNA
tcctttgatgcctagtctgt

SEQ ID NO: 37936 - DNA, 20 bp, synthetic construct
  misc_feature 1..20: note = chemically synthesized
  source 1..20: mol_type = other DNA
ctttgatgcctagtctgttg

SEQ ID NO: 37937 - DNA, 20 bp, synthetic construct
  misc_feature 1..20: note = chemically synthesized
  source 1..20: mol_type = other DNA
tttgatgcctagtctgttgg

SEQ ID NO: 37938 - DNA, 20 bp, synthetic construct
  misc_feature 1..20: note = chemically synthesized
  source 1..20: mol_type = other DNA
tgttggaggtttttatcatg

SEQ ID NO: 37939 - DNA, 20 bp, synthetic construct
  misc_feature 1..20: note = chemically synthesized
  source 1..20: mol_type = other DNA
gttggaggtttttatcatga

SEQ ID NO: 37940 - DNA, 20 bp, synthetic construct
  misc_feature 1..20: note = chemically synthesized
  source 1..20: mol_type = other DNA
ttggaggtttttatcatgaa

SEQ ID NO: 37941 - DNA, 20 bp, synthetic construct
  misc_feature 1..20: note = chemically synthesized
  source 1..20: mol_type = other DNA
gggatgttgaattttattga

SEQ ID NO: 37942 - DNA, 20 bp, synthetic construct
  misc_feature 1..20: note = chemically synthesized
  source 1..20: mol_type = other DNA
ggatgttgaattttattgaa

SEQ ID NO: 37943 - DNA, 20 bp, synthetic construct
  misc_feature 1..20: note = chemically synthesized
  source 1..20: mol_type = other DNA
ttttattgaaaggtttttct

SEQ ID NO: 37944 - DNA, 20 bp, synthetic construct
  misc_feature 1..20: note = chemically synthesized
  source 1..20: mol_type = other DNA
aaggtttttctcagtctatt

SEQ ID NO: 37945 - DNA, 20 bp, synthetic construct
  misc_feature 1..20: note = chemically synthesized
  source 1..20: mol_type = other DNA
agtctattgagatgatcata

SEQ ID NO: 37946 - DNA, 20 bp, synthetic construct
  misc_feature 1..20: note = chemically synthesized
  source 1..20: mol_type = other DNA
tgagatgatcatatggtttg

SEQ ID NO: 37947 - DNA, 20 bp, synthetic construct
  misc_feature 1..20: note = chemically synthesized
  source 1..20: mol_type = other DNA
gagatgatcatatggtttgt

SEQ ID NO: 37948 - DNA, 20 bp, synthetic construct
  misc_feature 1..20: note = chemically synthesized
  source 1..20: mol_type = other DNA
gatgatcatatggtttgtgg

SEQ ID NO: 37949 - DNA, 20 bp, synthetic construct
  misc_feature 1..20: note = chemically synthesized
  source 1..20: mol_type = other DNA
atgatcatatggtttgtggg

SEQ ID NO: 37950 - DNA, 20 bp, synthetic construct
  misc_feature 1..20: note = chemically synthesized
  source 1..20: mol_type = other DNA
atatggtttgtgggaggtga

SEQ ID NO: 37951 - DNA, 20 bp, synthetic construct
  misc_feature 1..20: note = chemically synthesized
  source 1..20: mol_type = other DNA
gggaggtgaaagatctctac

SEQ ID NO: 37952 - DNA, 20 bp, synthetic construct
  misc_feature 1..20: note = chemically synthesized
  source 1..20: mol_type = other DNA
ggaggtgaaagatctctaca

SEQ ID NO: 37953 - DNA, 20 bp, synthetic construct
  misc_feature 1..20: note = chemically synthesized
  source 1..20: mol_type = other DNA
aggtgaaagatctctacaag

SEQ ID NO: 37954 - DNA, 20 bp, synthetic construct
  misc_feature 1..20: note = chemically synthesized
  source 1..20: mol_type = other DNA
gaactacaaaacactgctga

SEQ ID NO: 37955 - DNA, 20 bp, synthetic construct
  misc_feature 1..20: note = chemically synthesized
  source 1..20: mol_type = other DNA
aaaacactgctgaaagaaat

SEQ ID NO: 37956 - DNA, 20 bp, synthetic construct
  misc_feature 1..20: note = chemically synthesized
  source 1..20: mol_type = other DNA
caacacaaataaataaataa

SEQ ID NO: 37957 - DNA, 20 bp, synthetic construct
  misc_feature 1..20: note = chemically synthesized
  source 1..20: mol_type = other DNA
ataaataaataaaagctttc

SEQ ID NO: 37958 - DNA, 20 bp, synthetic construct
  misc_feature 1..20: note = chemically synthesized
  source 1..20: mol_type = other DNA
taaataaataaaagctttcc

SEQ ID NO: 37959 - DNA, 20 bp, synthetic construct
  misc_feature 1..20: note = chemically synthesized
  source 1..20: mol_type = other DNA
ataaaagctttccaggctca

SEQ ID NO: 37960 - DNA, 20 bp, synthetic construct
  misc_feature 1..20: note = chemically synthesized
  source 1..20: mol_type = other DNA
agctttccaggctcatggat

SEQ ID NO: 37961 - DNA, 20 bp, synthetic construct
  misc_feature 1..20: note = chemically synthesized
  source 1..20: mol_type = other DNA
tttccaggctcatggattgg

SEQ ID NO: 37962 - DNA, 20 bp, synthetic construct
  misc_feature 1..20: note = chemically synthesized
  source 1..20: mol_type = other DNA
agaatcaatatgaatttaaa

SEQ ID NO: 37963 - DNA, 20 bp, synthetic construct
  misc_feature 1..20: note = chemically synthesized
  source 1..20: mol_type = other DNA
ttaaatggccatactgctca

SEQ ID NO: 37964 - DNA, 20 bp, synthetic construct
  misc_feature 1..20: note = chemically synthesized
  source 1..20: mol_type = other DNA
ccatactgctcaaagcaatt

SEQ ID NO: 37965 - DNA, 20 bp, synthetic construct
  misc_feature 1..20: note = chemically synthesized
  source 1..20: mol_type = other DNA
attaccaatgtcattcttca

SEQ ID NO: 37966 - DNA, 20 bp, synthetic construct
  misc_feature 1..20: note = chemically synthesized
  source 1..20: mol_type = other DNA
aatgtcattcttcacagtat

SEQ ID NO: 37967 - DNA, 20 bp, synthetic construct
  misc_feature 1..20: note = chemically synthesized
  source 1..20: mol_type = other DNA
cttcacagtattagaaaaac

SEQ ID NO: 37968 - DNA, 20 bp, synthetic construct
  misc_feature 1..20: note = chemically synthesized
  source 1..20: mol_type = other DNA
aaactagtttaaaattcata

SEQ ID NO: 37969 - DNA, 20 bp, synthetic construct
  misc_feature 1..20: note = chemically synthesized
  source 1..20: mol_type = other DNA
aaaattcatatggaaccaaa

SEQ ID NO: 37970 - DNA, 20 bp, synthetic construct
  misc_feature 1..20: note = chemically synthesized
  source 1..20: mol_type = other DNA
aattcatatggaaccaaaaa

SEQ ID NO: 37971 - DNA, 20 bp, synthetic construct
  misc_feature 1..20: note = chemically synthesized
  source 1..20: mol_type = other DNA
ggaaccaaaaagagcctgaa

SEQ ID NO: 37972 - DNA, 20 bp, synthetic construct
  misc_feature 1..20: note = chemically synthesized
  source 1..20: mol_type = other DNA
gaaccaaaaagagcctgaac

SEQ ID NO: 37973 - DNA, 20 bp, synthetic construct
  misc_feature 1..20: note = chemically synthesized
  source 1..20: mol_type = other DNA
aaaaagagcctgaacaggca

SEQ ID NO: 37974 - DNA, 20 bp, synthetic construct
  misc_feature 1..20: note = chemically synthesized
  source 1..20: mol_type = other DNA
tgaacaggcaaagcaatctt

SEQ ID NO: 37975 - DNA, 20 bp, synthetic construct
  misc_feature 1..20: note = chemically synthesized
  source 1..20: mol_type = other DNA
acaggcaaagcaatcttaag

SEQ ID NO: 37976 - DNA, 20 bp, synthetic construct
  misc_feature 1..20: note = chemically synthesized
  source 1..20: mol_type = other DNA
gcaaagcaatcttaagcaga

SEQ ID NO: 37977 - DNA, 20 bp, synthetic construct
  misc_feature 1..20: note = chemically synthesized
  source 1..20: mol_type = other DNA
ttaagcagaaagaacaaaat

SEQ ID NO: 37978 - DNA, 20 bp, synthetic construct
  misc_feature 1..20: note = chemically synthesized
  source 1..20: mol_type = other DNA
agcagaaagaacaaaattgg

SEQ ID NO: 37979 - DNA, 20 bp, synthetic construct
  misc_feature 1..20: note = chemically synthesized
  source 1..20: mol_type = other DNA
caccacctgacttgaaacta

SEQ ID NO: 37980 - DNA, 20 bp, synthetic construct
  misc_feature 1..20: note = chemically synthesized
  source 1..20: mol_type = other DNA
accacctgacttgaaactac

SEQ ID NO: 37981 - DNA, 20 bp, synthetic construct
  misc_feature 1..20: note = chemically synthesized
  source 1..20: mol_type = other DNA
cctgacttgaaactacaggc

SEQ ID NO: 37982 - DNA, 20 bp, synthetic construct
  misc_feature 1..20: note = chemically synthesized
  source 1..20: mol_type = other DNA
ctgacttgaaactacaggcc

SEQ ID NO: 37983 - DNA, 20 bp, synthetic construct
  misc_feature 1..20: note = chemically synthesized
  source 1..20: mol_type = other DNA
ttgaaactacaggccaggca

SEQ ID NO: 37984 - DNA, 20 bp, synthetic construct
  misc_feature 1..20: note = chemically synthesized
  source 1..20: mol_type = other DNA
aaactacaggccaggcacgg

SEQ ID NO: 37985 - DNA, 20 bp, synthetic construct
  misc_feature 1..20: note = chemically synthesized
  source 1..20: mol_type = other DNA
gtggctcacgcctgtaactc

SEQ ID NO: 37986 - DNA, 20 bp, synthetic construct
  misc_feature 1..20: note = chemically synthesized
  source 1..20: mol_type = other DNA
cgcctgtaactctagcactt

SEQ ID NO: 37987 - DNA, 20 bp, synthetic construct
  misc_feature 1..20: note = chemically synthesized
  source 1..20: mol_type = other DNA
gcctgtaactctagcacttt

SEQ ID NO: 37988 - DNA, 20 bp, synthetic construct
  misc_feature 1..20: note = chemically synthesized
  source 1..20: mol_type = other DNA
cctgtaactctagcacttta

SEQ ID NO: 37989 - DNA, 20 bp, synthetic construct
  misc_feature 1..20: note = chemically synthesized
  source 1..20: mol_type = other DNA
ctgtaactctagcactttag

SEQ ID NO: 37990 - DNA, 20 bp, synthetic construct
  misc_feature 1..20: note = chemically synthesized
  source 1..20: mol_type = other DNA
tgtaactctagcactttagg

SEQ ID NO: 37991 - DNA, 20 bp, synthetic construct
  misc_feature 1..20: note = chemically synthesized
  source 1..20: mol_type = other DNA
ctctagcactttagggggct

SEQ ID NO: 37992 - DNA, 20 bp, synthetic construct
  misc_feature 1..20: note = chemically synthesized
  source 1..20: mol_type = other DNA
tctagcactttagggggctg

SEQ ID NO: 37993 - DNA, 20 bp, synthetic construct
  misc_feature 1..20: note = chemically synthesized
  source 1..20: mol_type = other DNA
agcactttagggggctgagg

SEQ ID NO: 37994 - DNA, 20 bp, synthetic construct
  misc_feature 1..20: note = chemically synthesized
  source 1..20: mol_type = other DNA
gcactttagggggctgaggt

SEQ ID NO: 37995 - DNA, 20 bp, synthetic construct
  misc_feature 1..20: note = chemically synthesized
  source 1..20: mol_type = other DNA
ctgaggtgggtgtatcacct

SEQ ID NO: 37996 - DNA, 20 bp, synthetic construct
  misc_feature 1..20: note = chemically synthesized
  source 1..20: mol_type = other DNA
tgaggtgggtgtatcacctg

SEQ ID NO: 37997 - DNA, 20 bp, synthetic construct
  misc_feature 1..20: note = chemically synthesized
  source 1..20: mol_type = other DNA
gtgggtgtatcacctgaggt

SEQ ID NO: 37998 - DNA, 20 bp, synthetic construct
  misc_feature 1..20: note = chemically synthesized
  source 1..20: mol_type = other DNA
tgggtgtatcacctgaggtc

SEQ ID NO: 37999 - DNA, 20 bp, synthetic construct
  misc_feature 1..20: note = chemically synthesized
  source 1..20: mol_type = other DNA
ggtgtatcacctgaggtcag

SEQ ID NO: 38000 - DNA, 20 bp, synthetic construct
  misc_feature 1..20: note = chemically synthesized
  source 1..20: mol_type = other DNA
tcacctgaggtcaggagttc

SEQ ID NO: 38001 - DNA, 20 bp, synthetic construct
  misc_feature 1..20: note = chemically synthesized
  source 1..20: mol_type = other DNA
tgaggtcaggagttcaagac

SEQ ID NO: 38002 - DNA, 20 bp, synthetic construct
  misc_feature 1..20: note = chemically synthesized
  source 1..20: mol_type = other DNA
tcaggagttcaagaccagcc

SEQ ID NO: 38003 - DNA, 20 bp, synthetic construct
  misc_feature 1..20: note = chemically synthesized
  source 1..20: mol_type = other DNA
caagaccagcctggtcaaca

SEQ ID NO: 38004 - DNA, 20 bp, synthetic construct
  misc_feature 1..20: note = chemically synthesized
  source 1..20: mol_type = other DNA
ctctactaaaaatacaaaat

SEQ ID NO: 38005 - DNA, 20 bp, synthetic construct
  misc_feature 1..20: note = chemically synthesized
  source 1..20: mol_type = other DNA
actaaaaatacaaaattagc

SEQ ID NO: 38006 - DNA, 20 bp, synthetic construct
  misc_feature 1..20: note = chemically synthesized
  source 1..20: mol_type = other DNA
aatacaaaattagccggctg

SEQ ID NO: 38007 - DNA, 20 bp, synthetic construct
  misc_feature 1..20: note = chemically synthesized
  source 1..20: mol_type = other DNA
acaaaattagccggctgtgg

SEQ ID NO: 38008 - DNA, 20 bp, synthetic construct
  misc_feature 1..20: note = chemically synthesized
  source 1..20: mol_type = other DNA
aaattagccggctgtggtgg

SEQ ID NO: 38009 - DNA, 20 bp, synthetic construct
  misc_feature 1..20: note = chemically synthesized
  source 1..20: mol_type = other DNA
aattagccggctgtggtggt

SEQ ID NO: 38010 - DNA, 20 bp, synthetic construct
  misc_feature 1..20: note = chemically synthesized
  source 1..20: mol_type = other DNA
attagccggctgtggtggtg

SEQ ID NO: 38011 - DNA, 20 bp, synthetic construct
  misc_feature 1..20: note = chemically synthesized
  source 1..20: mol_type = other DNA
ttagccggctgtggtggtgg

SEQ ID NO: 38012 - DNA, 20 bp, synthetic construct
  misc_feature 1..20: note = chemically synthesized
  source 1..20: mol_type = other DNA
ggtggtgggggctgtaatcc

SEQ ID NO: 38013 - DNA, 20 bp, synthetic construct
  misc_feature 1..20: note = chemically synthesized
  source 1..20: mol_type = other DNA
gggctgtaatcccagctact

SEQ ID NO: 38014 - DNA, 20 bp, synthetic construct
  misc_feature 1..20: note = chemically synthesized
  source 1..20: mol_type = other DNA
ctgtaatcccagctactcgg

SEQ ID NO: 38015 - DNA, 20 bp, synthetic construct
  misc_feature 1..20: note = chemically synthesized
  source 1..20: mol_type = other DNA
tgtaatcccagctactcgga

SEQ ID NO: 38016 - DNA, 20 bp, synthetic construct
  misc_feature 1..20: note = chemically synthesized
  source 1..20: mol_type = other DNA
tcccagctactcggaaggct

SEQ ID NO: 38017 - DNA, 20 bp, synthetic construct
  misc_feature 1..20: note = chemically synthesized
  source 1..20: mol_type = other DNA
cccagctactcggaaggctg

SEQ ID NO: 38018 - DNA, 20 bp, synthetic construct
  misc_feature 1..20: note = chemically synthesized
  source 1..20: mol_type = other DNA
agctactcggaaggctgagg

SEQ ID NO: 38019 - DNA, 20 bp, synthetic construct
  misc_feature 1..20: note = chemically synthesized
  source 1..20: mol_type = other DNA
gctactcggaaggctgaggc

SEQ ID NO: 38020 - DNA, 20 bp, synthetic construct
  misc_feature 1..20: note = chemically synthesized
  source 1..20: mol_type = other DNA
tactcggaaggctgaggcag

SEQ ID NO: 38021 - DNA, 20 bp, synthetic construct
  misc_feature 1..20: note = chemically synthesized
  source 1..20: mol_type = other DNA
caggagaattgcttgaactc

SEQ ID NO: 38022 - DNA, 20 bp, synthetic construct
  misc_feature 1..20: note = chemically synthesized
  source 1..20: mol_type = other DNA
ggagaattgcttgaactctg

SEQ ID NO: 38023 - DNA, 20 bp, synthetic construct
  misc_feature 1..20: note = chemically synthesized
  source 1..20: mol_type = other DNA
gagaattgcttgaactctgg

SEQ ID NO: 38024 - DNA, 20 bp, synthetic construct
  misc_feature 1..20: note = chemically synthesized
  source 1..20: mol_type = other DNA
aattgcttgaactctggagg

SEQ ID NO: 38025 - DNA, 20 bp, synthetic construct
  misc_feature 1..20: note = chemically synthesized
  source 1..20: mol_type = other DNA
gcttgaactctggaggcaga

SEQ ID NO: 38026 - DNA, 20 bp, synthetic construct
  misc_feature 1..20: note = chemically synthesized
  source 1..20: mol_type = other DNA
aactctggaggcagacggtg

SEQ ID NO: 38027 - DNA, 20 bp, synthetic construct
  misc_feature 1..20: note = chemically synthesized
  source 1..20: mol_type = other DNA
ctggaggcagacggtgcagt

SEQ ID NO: 38028 - DNA, 20 bp, synthetic construct
  misc_feature 1..20: note = chemically synthesized
  source 1..20: mol_type = other DNA
ggcagacggtgcagtgagcc

SEQ ID NO: 38029 - DNA, 20 bp, synthetic construct
  misc_feature 1..20: note = chemically synthesized
  source 1..20: mol_type = other DNA
aagatcgcaccactgcactc

SEQ ID NO: 38030 - DNA, 20 bp, synthetic construct
  misc_feature 1..20: note = chemically synthesized
  source 1..20: mol_type = other DNA
cgcaccactgcactccagcc

SEQ ID NO: 38031 - DNA, 20 bp, synthetic construct
  misc_feature 1..20: note = chemically synthesized
  source 1..20: mol_type = other DNA
gcaccactgcactccagcct

SEQ ID NO: 38032 - DNA, 20 bp, synthetic construct
  misc_feature 1..20: note = chemically synthesized
  source 1..20: mol_type = other DNA
ctgcactccagcctgggtga

SEQ ID NO: 38033 - DNA, 20 bp, synthetic construct
  misc_feature 1..20: note = chemically synthesized
  source 1..20: mol_type = other DNA
gcactccagcctgggtgaca

SEQ ID NO: 38034 - DNA, 20 bp, synthetic construct
  misc_feature 1..20: note = chemically synthesized
  source 1..20: mol_type = other DNA
aaactctgaaaaaataaaaa

SEQ ID NO: 38035 - DNA, 20 bp, synthetic construct
  misc_feature 1..20: note = chemically synthesized
  source 1..20: mol_type = other DNA
tctgaaaaaataaaaaaaga

SEQ ID NO: 38036 - DNA, 20 bp, synthetic construct
  misc_feature 1..20: note = chemically synthesized
  source 1..20: mol_type = other DNA
aaaaataaaaaaagaaagaa

SEQ ID NO: 38037 - DNA, 20 bp, synthetic construct
  misc_feature 1..20: note = chemically synthesized
  source 1..20: mol_type = other DNA
ataaaaaaagaaagaaaaga

SEQ ID NO: 38038 - DNA, 20 bp, synthetic construct
  misc_feature 1..20: note = chemically synthesized
  source 1..20: mol_type = other DNA
aaaaagaaagaaaagaaaga

SEQ ID NO: 38039 - DNA, 20 bp, synthetic construct
  misc_feature 1..20: note = chemically synthesized
  source 1..20: mol_type = other DNA
aaagaaagaaaagaaagaaa

SEQ ID NO: 38040 - DNA, 20 bp, synthetic construct
  misc_feature 1..20: note = chemically synthesized
  source 1..20: mol_type = other DNA
agaaagaaaagaaagaaaga

SEQ ID NO: 38041 - DNA, 20 bp, synthetic construct
  misc_feature 1..20: note = chemically synthesized
  source 1..20: mol_type = other DNA
gaaagaaaagaaagaaagag

SEQ ID NO: 38042 - DNA, 20 bp, synthetic construct
  misc_feature 1..20: note = chemically synthesized
  source 1..20: mol_type = other DNA
aaagaaaagaaagaaagaga

SEQ ID NO: 38043 - DNA, 20 bp, synthetic construct
  misc_feature 1..20: note = chemically synthesized
  source 1..20: mol_type = other DNA
gaaaagaaagaaagagaggg

SEQ ID NO: 38044 - DNA, 20 bp, synthetic construct
  misc_feature 1..20: note = chemically synthesized
  source 1..20: mol_type = other DNA
agaaagaaagagagggaaga

SEQ ID NO: 38045 - DNA, 20 bp, synthetic construct
  misc_feature 1..20: note = chemically synthesized
  source 1..20: mol_type = other DNA
gaaagaaagagagggaagaa

SEQ ID NO: 38046 - DNA, 20 bp, synthetic construct
  misc_feature 1..20: note = chemically synthesized
  source 1..20: mol_type = other DNA
gaaagagagggaagaaagga

SEQ ID NO: 38047 - DNA, 20 bp, synthetic construct
  misc_feature 1..20: note = chemically synthesized
  source 1..20: mol_type = other DNA
aaggaaagaaactacattat

SEQ ID NO: 38048 - DNA, 20 bp, synthetic construct
  misc_feature 1..20: note = chemically synthesized
  source 1..20: mol_type = other DNA
aggaaagaaactacattata

SEQ ID NO: 38049 - DNA, 20 bp, synthetic construct
  misc_feature 1..20: note = chemically synthesized
  source 1..20: mol_type = other DNA
gaaactacattataaggcca

SEQ ID NO: 38050 - DNA, 20 bp, synthetic construct
  misc_feature 1..20: note = chemically synthesized
  source 1..20: mol_type = other DNA
taaggccacagtaccccaaa

SEQ ID NO: 38051 - DNA, 20 bp, synthetic construct
  misc_feature 1..20: note = chemically synthesized
  source 1..20: mol_type = other DNA
gcatgatattgttacaaaaa

SEQ ID NO: 38052 - DNA, 20 bp, synthetic construct
  misc_feature 1..20: note = chemically synthesized
  source 1..20: mol_type = other DNA
caaaaatagacacattgact

SEQ ID NO: 38053 - DNA, 20 bp, synthetic construct
  misc_feature 1..20: note = chemically synthesized
  source 1..20: mol_type = other DNA
aaaaatagacacattgacta

SEQ ID NO: 38054 - DNA, 20 bp, synthetic construct
  misc_feature 1..20: note = chemically synthesized
  source 1..20: mol_type = other DNA
cattgactaaggaaacacaa

SEQ ID NO: 38055 - DNA, 20 bp, synthetic construct
  misc_feature 1..20: note = chemically synthesized
  source 1..20: mol_type = other DNA
caatagaaaactcaaaaata

SEQ ID NO: 38056 - DNA, 20 bp, synthetic construct
  misc_feature 1..20: note = chemically synthesized
  source 1..20: mol_type = other DNA
aactcaaaaataaagctaca

SEQ ID NO: 38057 - DNA, 20 bp, synthetic construct
  misc_feature 1..20: note = chemically synthesized
  source 1..20: mol_type = other DNA
tcaacaacactgacaaaaac

SEQ ID NO: 38058 - DNA, 20 bp, synthetic construct
  misc_feature 1..20: note = chemically synthesized
  source 1..20: mol_type = other DNA
acaacactgacaaaaacaag

SEQ ID NO: 38059 - DNA, 20 bp, synthetic construct
  misc_feature 1..20: note = chemically synthesized
  source 1..20: mol_type = other DNA
acactgacaaaaacaagcag

SEQ ID NO: 38060 - DNA, 20 bp, synthetic construct
  misc_feature 1..20: note = chemically synthesized
  source 1..20: mol_type = other DNA
cactgacaaaaacaagcagc

SEQ ID NO: 38061 - DNA, 20 bp, synthetic construct
  misc_feature 1..20: note = chemically synthesized
  source 1..20: mol_type = other DNA
acaaaaacaagcagcgggaa

SEQ ID NO: 38062 - DNA, 20 bp, synthetic construct
  misc_feature 1..20: note = chemically synthesized
  source 1..20: mol_type = other DNA
caaaaacaagcagcgggaaa

SEQ ID NO: 38063 - DNA, 20 bp, synthetic construct
  misc_feature 1..20: note = chemically synthesized
  source 1..20: mol_type = other DNA
acctatccaataaactgtgc

SEQ ID NO: 38064 - DNA, 20 bp, synthetic construct
  misc_feature 1..20: note = chemically synthesized
  source 1..20: mol_type = other DNA
ataaactgtgctggaatacg

SEQ ID NO: 38065 - DNA, 20 bp, synthetic construct
  misc_feature 1..20: note = chemically synthesized
  source 1..20: mol_type = other DNA
actgtgctggaatacgtggc

SEQ ID NO: 38066 - DNA, 20 bp, synthetic construct
  misc_feature 1..20: note = chemically synthesized
  source 1..20: mol_type = other DNA
aatacgtggctagccatatg

SEQ ID NO: 38067 - DNA, 20 bp, synthetic construct
  misc_feature 1..20: note = chemically synthesized
  source 1..20: mol_type = other DNA
acgtggctagccatatgcag

SEQ ID NO: 38068 - DNA, 20 bp, synthetic construct
  misc_feature 1..20: note = chemically synthesized
  source 1..20: mol_type = other DNA
catatgcagaagaatgaaac

SEQ ID NO: 38069 - DNA, 20 bp, synthetic construct
  misc_feature 1..20: note = chemically synthesized
  source 1..20: mol_type = other DNA
gacccttaccttacaccatt

SEQ ID NO: 38070 - DNA, 20 bp, synthetic construct
  misc_feature 1..20: note = chemically synthesized
  source 1..20: mol_type = other DNA
cccttaccttacaccattta

SEQ ID NO: 38071 - DNA, 20 bp, synthetic construct
  misc_feature 1..20: note = chemically synthesized
  source 1..20: mol_type = other DNA
tgaattcaaaacttaaatgt

SEQ ID NO: 38072 - DNA, 20 bp, synthetic construct
  misc_feature 1..20: note = chemically synthesized
  source 1..20: mol_type = other DNA
atctcaaatcttacctgcac

SEQ ID NO: 38073 - DNA, 20 bp, synthetic construct
  misc_feature 1..20: note = chemically synthesized
  source 1..20: mol_type = other DNA
tcaaatcttacctgcactgg

SEQ ID NO: 38074 - DNA, 20 bp, synthetic construct
  misc_feature 1..20: note = chemically synthesized
  source 1..20: mol_type = other DNA
ctgcactggcagtgcatttt

SEQ ID NO: 38075 - DNA, 20 bp, synthetic construct
  misc_feature 1..20: note = chemically synthesized
  source 1..20: mol_type = other DNA
ctggcagtgcatttttggct

SEQ ID NO: 38076 - DNA, 20 bp, synthetic construct
  misc_feature 1..20: note = chemically synthesized
  source 1..20: mol_type = other DNA
atttttggctaagcccccaa

SEQ ID NO: 38077 - DNA, 20 bp, synthetic construct
  misc_feature 1..20: note = chemically synthesized
  source 1..20: mol_type = other DNA
ccaaaagcaattgcaatgca

SEQ ID NO: 38078 - DNA, 20 bp, synthetic construct
  misc_feature 1..20: note = chemically synthesized
  source 1..20: mol_type = other DNA
caatgcaaagaaaaattcac

SEQ ID NO: 38079 - DNA, 20 bp, synthetic construct
  misc_feature 1..20: note = chemically synthesized
  source 1..20: mol_type = other DNA
tgcaaagaaaaattcacaag

SEQ ID NO: 38080 - DNA, 20 bp, synthetic construct
  misc_feature 1..20: note = chemically synthesized
  source 1..20: mol_type = other DNA
agtggaacctaattaaacta

SEQ ID NO: 38081 - DNA, 20 bp, synthetic construct
  misc_feature 1..20: note = chemically synthesized
  source 1..20: mol_type = other DNA
tggaacctaattaaactaaa

SEQ ID NO: 38082 - DNA, 20 bp, synthetic construct
  misc_feature 1..20: note = chemically synthesized
  source 1..20: mol_type = other DNA
cttcactattcacaataaca

SEQ ID NO: 38083 - DNA, 20 bp, synthetic construct
  misc_feature 1..20: note = chemically synthesized
  source 1..20: mol_type = other DNA
tattcacaataacaaagact

SEQ ID NO: 38084 - DNA, 20 bp, synthetic construct
  misc_feature 1..20: note = chemically synthesized
  source 1..20: mol_type = other DNA
acccaaatgtccaacaatga

SEQ ID NO: 38085 - DNA, 20 bp, synthetic construct
  misc_feature 1..20: note = chemically synthesized
  source 1..20: mol_type = other DNA
aatgtccaacaatgatagaa

SEQ ID NO: 38086 - DNA, 20 bp, synthetic construct
  misc_feature 1..20: note = chemically synthesized
  source 1..20: mol_type = other DNA
caacaatgatagaatggatt

SEQ ID NO: 38087 - DNA, 20 bp, synthetic construct
  misc_feature 1..20: note = chemically synthesized
  source 1..20: mol_type = other DNA
tagaatggattaagaaaatg

SEQ ID NO: 38088 - DNA, 20 bp, synthetic construct
  misc_feature 1..20: note = chemically synthesized
  source 1..20: mol_type = other DNA
aatgtggcacatatacacca

SEQ ID NO: 38089 - DNA, 20 bp, synthetic construct
  misc_feature 1..20: note = chemically synthesized
  source 1..20: mol_type = other DNA
atacaccatggaatactatg

SEQ ID NO: 38090 - DNA, 20 bp, synthetic construct
  misc_feature 1..20: note = chemically synthesized
  source 1..20: mol_type = other DNA
atgcagccataaaaaatgat

SEQ ID NO: 38091 - DNA, 20 bp, synthetic construct
  misc_feature 1..20: note = chemically synthesized
  source 1..20: mol_type = other DNA
tgatgagttcatgtcctttg

SEQ ID NO: 38092 - DNA, 20 bp, synthetic construct
  misc_feature 1..20: note = chemically synthesized
  source 1..20: mol_type = other DNA
gatgagttcatgtcctttgt

SEQ ID NO: 38093 - DNA, 20 bp, synthetic construct
  misc_feature 1..20: note = chemically synthesized
  source 1..20: mol_type = other DNA
atgagttcatgtcctttgta

SEQ ID NO: 38094 - DNA, 20 bp, synthetic construct
  misc_feature 1..20: note = chemically synthesized
  source 1..20: mol_type = other DNA
tcatgtcctttgtagggaca

SEQ ID NO: 38095 - DNA, 20 bp, synthetic construct
  misc_feature 1..20: note = chemically synthesized
  source 1..20: mol_type = other DNA
cctttgtagggacatggatg

SEQ ID NO: 38096 - DNA, 20 bp, synthetic construct
  misc_feature 1..20: note = chemically synthesized
  source 1..20: mol_type = other DNA
tgtagggacatggatgaagc

SEQ ID NO: 38097 - DNA, 20 bp, synthetic construct
  misc_feature 1..20: note = chemically synthesized
  source 1..20: mol_type = other DNA
aagctggaaaccatcattct

SEQ ID NO: 38098 - DNA, 20 bp, synthetic construct
  misc_feature 1..20: note = chemically synthesized
  source 1..20: mol_type = other DNA
cattctcagcaaactatcac

SEQ ID NO: 38099 - DNA, 20 bp, synthetic construct
  misc_feature 1..20: note = chemically synthesized
  source 1..20: mol_type = other DNA
attctcagcaaactatcaca

SEQ ID NO: 38100 - DNA, 20 bp, synthetic construct
  misc_feature 1..20: note = chemically synthesized
  source 1..20: mol_type = other DNA
ataccacatgttctcactta

SEQ ID NO: 38101 - DNA, 20 bp, synthetic construct
  misc_feature 1..20: note = chemically synthesized
  source 1..20: mol_type = other DNA
taccacatgttctcacttat

SEQ ID NO: 38102 - DNA, 20 bp, synthetic construct
  misc_feature 1..20: note = chemically synthesized
  source 1..20: mol_type = other DNA
cacatgttctcacttatagg

SEQ ID NO: 38103 - DNA, 20 bp, synthetic construct
  misc_feature 1..20: note = chemically synthesized
  source 1..20: mol_type = other DNA
acatgttctcacttataggt

SEQ ID NO: 38104 - DNA, 20 bp, synthetic construct
  misc_feature 1..20: note = chemically synthesized
  source 1..20: mol_type = other DNA
ataggtgggaattgaacaat

SEQ ID NO: 38105 - DNA, 20 bp, synthetic construct
  misc_feature 1..20: note = chemically synthesized
  source 1..20: mol_type = other DNA
aattgaacaatgagaacact

SEQ ID NO: 38106 - DNA, 20 bp, synthetic construct
  misc_feature 1..20: note = chemically synthesized
  source 1..20: mol_type = other DNA
gaacaatgagaacacttgga

SEQ ID NO: 38107 - DNA, 20 bp, synthetic construct
  misc_feature 1..20: note = chemically synthesized
  source 1..20: mol_type = other DNA
acaatgagaacacttggaca

SEQ ID NO: 38108 - DNA, 20 bp, synthetic construct
  misc_feature 1..20: note = chemically synthesized
  source 1..20: mol_type = other DNA
caatgagaacacttggacag

SEQ ID NO: 38109 - DNA, 20 bp, synthetic construct
  misc_feature 1..20: note = chemically synthesized
  source 1..20: mol_type = other DNA
tgagaacacttggacagagg

SEQ ID NO: 38110 - DNA, 20 bp, synthetic construct
  misc_feature 1..20: note = chemically synthesized
  source 1..20: mol_type = other DNA
gagaacacttggacagagga

SEQ ID NO: 38111 - DNA, 20 bp, synthetic construct
  misc_feature 1..20: note = chemically synthesized
  source 1..20: mol_type = other DNA
agaacacttggacagaggaa

SEQ ID NO: 38112 - DNA, 20 bp, synthetic construct
  misc_feature 1..20: note = chemically synthesized
  source 1..20: mol_type = other DNA
gaacacttggacagaggaag

SEQ ID NO: 38113 - DNA, 20 bp, synthetic construct
  misc_feature 1..20: note = chemically synthesized
  source 1..20: mol_type = other DNA
ggaaggggaacatcacacac

SEQ ID NO: 38114 - DNA, 20 bp, synthetic construct
  misc_feature 1..20: note = chemically synthesized
  source 1..20: mol_type = other DNA
gaaggggaacatcacacacc

SEQ ID NO: 38115 - DNA, 20 bp, synthetic construct
  misc_feature 1..20: note = chemically synthesized
  source 1..20: mol_type = other DNA
aaggggaacatcacacacca

SEQ ID NO: 38116 - DNA, 20 bp, synthetic construct
  misc_feature 1..20: note = chemically synthesized
  source 1..20: mol_type = other DNA
tcacacaccagggcctgttg

SEQ ID NO: 38117 - DNA, 20 bp, synthetic construct
  misc_feature 1..20: note = chemically synthesized
  source 1..20: mol_type = other DNA
cacacaccagggcctgttgt

SEQ ID NO: 38118 - DNA, 20 bp, synthetic construct
  misc_feature 1..20: note = chemically synthesized
  source 1..20: mol_type = other DNA
acacaccagggcctgttgtg

SEQ ID NO: 38119 - DNA, 20 bp, synthetic construct
  misc_feature 1..20: note = chemically synthesized
  source 1..20: mol_type = other DNA
caccagggcctgttgtgggg

SEQ ID NO: 38120 - DNA, 20 bp, synthetic construct
  misc_feature 1..20: note = chemically synthesized
  source 1..20: mol_type = other DNA
accagggcctgttgtggggt

SEQ ID NO: 38121 - DNA, 20 bp, synthetic construct
  misc_feature 1..20: note = chemically synthesized
  source 1..20: mol_type = other DNA
ccagggcctgttgtggggtg

SEQ ID NO: 38122 - DNA, 20 bp, synthetic construct
  misc_feature 1..20: note = chemically synthesized
  source 1..20: mol_type = other DNA
cagggcctgttgtggggtgg

SEQ ID NO: 38123 - DNA, 20 bp, synthetic construct
  misc_feature 1..20: note = chemically synthesized
  source 1..20: mol_type = other DNA
ggcctgttgtggggtggggg

SEQ ID NO: 38124 - DNA, 20 bp, synthetic construct
  misc_feature 1..20: note = chemically synthesized
  source 1..20: mol_type = other DNA
gcctgttgtggggtgggggt

SEQ ID NO: 38125 - DNA, 20 bp, synthetic construct
  misc_feature 1..20: note = chemically synthesized
  source 1..20: mol_type = other DNA
cctgttgtggggtgggggtg

SEQ ID NO: 38126 - DNA, 20 bp, synthetic construct
  misc_feature 1..20: note = chemically synthesized
  source 1..20: mol_type = other DNA
ctgttgtggggtgggggtgg

SEQ ID NO: 38127 - DNA, 20 bp, synthetic construct
  misc_feature 1..20: note = chemically synthesized
  source 1..20: mol_type = other DNA
tgttgtggggtgggggtggg

SEQ ID NO: 38128 - DNA, 20 bp, synthetic construct
  misc_feature 1..20: note = chemically synthesized
  source 1..20: mol_type = other DNA
tgtggggtgggggtgggggg

SEQ ID NO: 38129 - DNA, 20 bp, synthetic construct
  misc_feature 1..20: note = chemically synthesized
  source 1..20: mol_type = other DNA
tggggtgggggtggggggtg

SEQ ID NO: 38130 - DNA, 20 bp, synthetic construct
  misc_feature 1..20: note = chemically synthesized
  source 1..20: mol_type = other DNA
gggtgggggtggggggtgga

SEQ ID NO: 38131 - DNA, 20 bp, synthetic construct
  misc_feature 1..20: note = chemically synthesized
  source 1..20: mol_type = other DNA
ggtgggggtggggggtggag

SEQ ID NO: 38132 - DNA, 20 bp, synthetic construct
  misc_feature 1..20: note = chemically synthesized
  source 1..20: mol_type = other DNA
gtgggggtggggggtggaga

SEQ ID NO: 38133 - DNA, 20 bp, synthetic construct
  misc_feature 1..20: note = chemically synthesized
  source 1..20: mol_type = other DNA
gggtggggggtggagaggga

SEQ ID NO: 38134 - DNA, 20 bp, synthetic construct
  misc_feature 1..20: note = chemically synthesized
  source 1..20: mol_type = other DNA
ggggtggagagggatagcat

SEQ ID NO: 38135 - DNA, 20 bp, synthetic construct
  misc_feature 1..20: note = chemically synthesized
  source 1..20: mol_type = other DNA
gggtggagagggatagcatt

SEQ ID NO: 38136 - DNA, 20 bp, synthetic construct
  misc_feature 1..20: note = chemically synthesized
  source 1..20: mol_type = other DNA
gtggagagggatagcattag

SEQ ID NO: 38137 - DNA, 20 bp, synthetic construct
  misc_feature 1..20: note = chemically synthesized
  source 1..20: mol_type = other DNA
atatacctaatgtaaatgat

SEQ ID NO: 38138 - DNA, 20 bp, synthetic construct
  misc_feature 1..20: note = chemically synthesized
  source 1..20: mol_type = other DNA
taatgtaaatgatgagttaa

SEQ ID NO: 38139 - DNA, 20 bp, synthetic construct
  misc_feature 1..20: note = chemically synthesized
  source 1..20: mol_type = other DNA
aatgtaaatgatgagttaat

SEQ ID NO: 38140 - DNA, 20 bp, synthetic construct
  misc_feature 1..20: note = chemically synthesized
  source 1..20: mol_type = other DNA
aaatgatgagttaatgggtg

SEQ ID NO: 38141 - DNA, 20 bp, synthetic construct
  misc_feature 1..20: note = chemically synthesized
  source 1..20: mol_type = other DNA
atgggtgcagcacaccaaca

SEQ ID NO: 38142 - DNA, 20 bp, synthetic construct
  misc_feature 1..20: note = chemically synthesized
  source 1..20: mol_type = other DNA
cacgttgcgcacatgtaccc

SEQ ID NO: 38143 - DNA, 20 bp, synthetic construct
  misc_feature 1..20: note = chemically synthesized
  source 1..20: mol_type = other DNA
cacatgtaccctagaactta

SEQ ID NO: 38144 - DNA, 20 bp, synthetic construct
  misc_feature 1..20: note = chemically synthesized
  source 1..20: mol_type = other DNA
agtataataataataataaa

SEQ ID NO: 38145 - DNA, 20 bp, synthetic construct
  misc_feature 1..20: note = chemically synthesized
  source 1..20: mol_type = other DNA
tataataataataataaaaa

SEQ ID NO: 38146 - DNA, 20 bp, synthetic construct
  misc_feature 1..20: note = chemically synthesized
  source 1..20: mol_type = other DNA
taataaaaagagcttctgtg

SEQ ID NO: 38147 - DNA, 20 bp, synthetic construct
  misc_feature 1..20: note = chemically synthesized
  source 1..20: mol_type = other DNA
taaaaagagcttctgtgcag

SEQ ID NO: 38148 - DNA, 20 bp, synthetic construct
  misc_feature 1..20: note = chemically synthesized
  source 1..20: mol_type = other DNA
aaagagcttctgtgcagcag

SEQ ID NO: 38149 - DNA, 20 bp, synthetic construct
  misc_feature 1..20: note = chemically synthesized
  source 1..20: mol_type = other DNA
gcagcagaagaaactatcaa

SEQ ID NO: 38150 - DNA, 20 bp, synthetic construct
  misc_feature 1..20: note = chemically synthesized
  source 1..20: mol_type = other DNA
agcagaagaaactatcaaca

SEQ ID NO: 38151 - DNA, 20 bp, synthetic construct
  misc_feature 1..20: note = chemically synthesized
  source 1..20: mol_type = other DNA
cagagtaaactgacaatcta

SEQ ID NO: 38152 - DNA, 20 bp, synthetic construct
  misc_feature 1..20: note = chemically synthesized
  source 1..20: mol_type = other DNA
agagtaaactgacaatctac

SEQ ID NO: 38153 - DNA, 20 bp, synthetic construct
  misc_feature 1..20: note = chemically synthesized
  source 1..20: mol_type = other DNA
taaactgacaatctacagga

SEQ ID NO: 38154 - DNA, 20 bp, synthetic construct
  misc_feature 1..20: note = chemically synthesized
  source 1..20: mol_type = other DNA
aaactgacaatctacaggat

SEQ ID NO: 38155 - DNA, 20 bp, synthetic construct
  misc_feature 1..20: note = chemically synthesized
  source 1..20: mol_type = other DNA
actgacaatctacaggatag

SEQ ID NO: 38156 - DNA, 20 bp, synthetic construct
  misc_feature 1..20: note = chemically synthesized
  source 1..20: mol_type = other DNA
ctattcacaaactgtgcatc

SEQ ID NO: 38157 - DNA, 20 bp, synthetic construct
  misc_feature 1..20: note = chemically synthesized
  source 1..20: mol_type = other DNA
cacaaactgtgcatctggaa

SEQ ID NO: 38158 - DNA, 20 bp, synthetic construct
  misc_feature 1..20: note = chemically synthesized
  source 1..20: mol_type = other DNA
acaaactgtgcatctggaaa

SEQ ID NO: 38159 - DNA, 20 bp, synthetic construct
  misc_feature 1..20: note = chemically synthesized
  source 1..20: mol_type = other DNA
tctggaaaaggtctaatatt

SEQ ID NO: 38160 - DNA, 20 bp, synthetic construct
  misc_feature 1..20: note = chemically synthesized
  source 1..20: mol_type = other DNA
gtctaatattcagaatctat

SEQ ID NO: 38161 - DNA, 20 bp, synthetic construct
  misc_feature 1..20: note = chemically synthesized
  source 1..20: mol_type = other DNA
tctaatattcagaatctata

SEQ ID NO: 38162 - DNA, 20 bp, synthetic construct
  misc_feature 1..20: note = chemically synthesized
  source 1..20: mol_type = other DNA
tataaggaattcgaacatat

SEQ ID NO: 38163 - DNA, 20 bp, synthetic construct
  misc_feature 1..20: note = chemically synthesized
  source 1..20: mol_type = other DNA
aggaattcgaacatatcagc

SEQ ID NO: 38164 - DNA, 20 bp, synthetic construct
  misc_feature 1..20: note = chemically synthesized
  source 1..20: mol_type = other DNA
cgaacatatcagcaagcaaa

SEQ ID NO: 38165 - DNA, 20 bp, synthetic construct
  misc_feature 1..20: note = chemically synthesized
  source 1..20: mol_type = other DNA
caaacaattccatttaaaaa

SEQ ID NO: 38166 - DNA, 20 bp, synthetic construct
  misc_feature 1..20: note = chemically synthesized
  source 1..20: mol_type = other DNA
aaacaattccatttaaaaat

SEQ ID NO: 38167 - DNA, 20 bp, synthetic construct
  misc_feature 1..20: note = chemically synthesized
  source 1..20: mol_type = other DNA
aaatgggcaaaatccacgaa

SEQ ID NO: 38168 - DNA, 20 bp, synthetic construct
  misc_feature 1..20: note = chemically synthesized
  source 1..20: mol_type = other DNA
tccacgaacagactcttctc

SEQ ID NO: 38169 - DNA, 20 bp, synthetic construct
  misc_feature 1..20: note = chemically synthesized
  source 1..20: mol_type = other DNA
cacgaacagactcttctcaa

SEQ ID NO: 38170 - DNA, 20 bp, synthetic construct
  misc_feature 1..20: note = chemically synthesized
  source 1..20: mol_type = other DNA
gaacagactcttctcaagag

SEQ ID NO: 38171 - DNA, 20 bp, synthetic construct
  misc_feature 1..20: note = chemically synthesized
  source 1..20: mol_type = other DNA
tcttctcaagagaagacata

SEQ ID NO: 38172 - DNA, 20 bp, synthetic construct
  misc_feature 1..20: note = chemically synthesized
  source 1..20: mol_type = other DNA
cttctcaagagaagacatac

SEQ ID NO: 38173 - DNA, 20 bp, synthetic construct
  misc_feature 1..20: note = chemically synthesized
  source 1..20: mol_type = other DNA
ctcaagagaagacatacagg

SEQ ID NO: 38174 - DNA, 20 bp, synthetic construct
  misc_feature 1..20: note = chemically synthesized
  source 1..20: mol_type = other DNA
aaatgatcatcatcactaat

SEQ ID NO: 38175 - DNA, 20 bp, synthetic construct
  misc_feature 1..20: note = chemically synthesized
  source 1..20: mol_type = other DNA
atgatcatcatcactaatga

SEQ ID NO: 38176 - DNA, 20 bp, synthetic construct
  misc_feature 1..20: note = chemically synthesized
  source 1..20: mol_type = other DNA
gaaatgcaaatcaaaaccac

SEQ ID NO: 38177 - DNA, 20 bp, synthetic construct
  misc_feature 1..20: note = chemically synthesized
  source 1..20: mol_type = other DNA
aatgcaaatcaaaaccacaa

SEQ ID NO: 38178 - DNA, 20 bp, synthetic construct
  misc_feature 1..20: note = chemically synthesized
  source 1..20: mol_type = other DNA
caagagatactatctcatac

SEQ ID NO: 38179 - DNA, 20 bp, synthetic construct
  misc_feature 1..20: note = chemically synthesized
  source 1..20: mol_type = other DNA
agatactatctcataccagt

SEQ ID NO: 38180 - DNA, 20 bp, synthetic construct
  misc_feature 1..20: note = chemically synthesized
  source 1..20: mol_type = other DNA
ctatctcataccagtcagaa

SEQ ID NO: 38181 - DNA, 20 bp, synthetic construct
  misc_feature 1..20: note = chemically synthesized
  source 1..20: mol_type = other DNA
tcagaatagctatttttaaa

SEQ ID NO: 38182 - DNA, 20 bp, synthetic construct
  misc_feature 1..20: note = chemically synthesized
  source 1..20: mol_type = other DNA
atttttaaaaagccaaaaaa

SEQ ID NO: 38183 - DNA, 20 bp, synthetic construct
  misc_feature 1..20: note = chemically synthesized
  source 1..20: mol_type = other DNA
gccaaaaaacagattctcat

SEQ ID NO: 38184 - DNA, 20 bp, synthetic construct
  misc_feature 1..20: note = chemically synthesized
  source 1..20: mol_type = other DNA
ccaaaaaacagattctcatg

SEQ ID NO: 38185 - DNA, 20 bp, synthetic construct
  misc_feature 1..20: note = chemically synthesized
  source 1..20: mol_type = other DNA
aacagattctcatgaggcta

SEQ ID NO: 38186 - DNA, 20 bp, synthetic construct
  misc_feature 1..20: note = chemically synthesized
  source 1..20: mol_type = other DNA
cagattctcatgaggctatg

SEQ ID NO: 38187 - DNA, 20 bp, synthetic construct
  misc_feature 1..20: note = chemically synthesized
  source 1..20: mol_type = other DNA
tctcatgaggctatggagaa

SEQ ID NO: 38188 - DNA, 20 bp, synthetic construct
  misc_feature 1..20: note = chemically synthesized
  source 1..20: mol_type = other DNA
ctcatgaggctatggagaaa

SEQ ID NO: 38189 - DNA, 20 bp, synthetic construct
  misc_feature 1..20: note = chemically synthesized
  source 1..20: mol_type = other DNA
tcatgaggctatggagaaaa

SEQ ID NO: 38190 - DNA, 20 bp, synthetic construct
  misc_feature 1..20: note = chemically synthesized
  source 1..20: mol_type = other DNA
gaacacttatacaatgatga

SEQ ID NO: 38191 - DNA, 20 bp, synthetic construct
  misc_feature 1..20: note = chemically synthesized
  source 1..20: mol_type = other DNA
aacacttatacaatgatgat

SEQ ID NO: 38192 - DNA, 20 bp, synthetic construct
  misc_feature 1..20: note = chemically synthesized
  source 1..20: mol_type = other DNA
acacttatacaatgatgatg

SEQ ID NO: 38193 - DNA, 20 bp, synthetic construct
  misc_feature 1..20: note = chemically synthesized
  source 1..20: mol_type = other DNA
atgatgatggggatgtaaat

SEQ ID NO: 38194 - DNA, 20 bp, synthetic construct
  misc_feature 1..20: note = chemically synthesized
  source 1..20: mol_type = other DNA
gtaaattagttcaaccactg

SEQ ID NO: 38195 - DNA, 20 bp, synthetic construct
  misc_feature 1..20: note = chemically synthesized
  source 1..20: mol_type = other DNA
agttcaaccactgcagaaaa

SEQ ID NO: 38196 - DNA, 20 bp, synthetic construct
  misc_feature 1..20: note = chemically synthesized
  source 1..20: mol_type = other DNA
aaccactgcagaaaacagtt

SEQ ID NO: 38197 - DNA, 20 bp, synthetic construct
  misc_feature 1..20: note = chemically synthesized
  source 1..20: mol_type = other DNA
ccactgcagaaaacagtttg

SEQ ID NO: 38198 - DNA, 20 bp, synthetic construct
  misc_feature 1..20: note = chemically synthesized
  source 1..20: mol_type = other DNA
actgcagaaaacagtttgga

SEQ ID NO: 38199 - DNA, 20 bp, synthetic construct
  misc_feature 1..20: note = chemically synthesized
  source 1..20: mol_type = other DNA
aacagtttggagagtcttca

SEQ ID NO: 38200 - DNA, 20 bp, synthetic construct
  misc_feature 1..20: note = chemically synthesized
  source 1..20: mol_type = other DNA
gagagtcttcaaagaacttt

SEQ ID NO: 38201 - DNA, 20 bp, synthetic construct
  misc_feature 1..20: note = chemically synthesized
  source 1..20: mol_type = other DNA
agtcttcaaagaactttaag

SEQ ID NO: 38202 - DNA, 20 bp, synthetic construct
  misc_feature 1..20: note = chemically synthesized
  source 1..20: mol_type = other DNA
tcttcaaagaactttaagca

SEQ ID NO: 38203 - DNA, 20 bp, synthetic construct
  misc_feature 1..20: note = chemically synthesized
  source 1..20: mol_type = other DNA
agcagagctacaatttgaca

SEQ ID NO: 38204 - DNA, 20 bp, synthetic construct
  misc_feature 1..20: note = chemically synthesized
  source 1..20: mol_type = other DNA
tgacacagcaatcccgctac

SEQ ID NO: 38205 - DNA, 20 bp, synthetic construct
  misc_feature 1..20: note = chemically synthesized
  source 1..20: mol_type = other DNA
gacacagcaatcccgctact

SEQ ID NO: 38206 - DNA, 20 bp, synthetic construct
  misc_feature 1..20: note = chemically synthesized
  source 1..20: mol_type = other DNA
cgctactgggtatatatcca

SEQ ID NO: 38207 - DNA, 20 bp, synthetic construct
  misc_feature 1..20: note = chemically synthesized
  source 1..20: mol_type = other DNA
gctactgggtatatatccat

SEQ ID NO: 38208 - DNA, 20 bp, synthetic construct
  misc_feature 1..20: note = chemically synthesized
  source 1..20: mol_type = other DNA
ggtatatatccataggaaaa

SEQ ID NO: 38209 - DNA, 20 bp, synthetic construct
  misc_feature 1..20: note = chemically synthesized
  source 1..20: mol_type = other DNA
tatatatccataggaaaaca

SEQ ID NO: 38210 - DNA, 20 bp, synthetic construct
  misc_feature 1..20: note = chemically synthesized
  source 1..20: mol_type = other DNA
tccataggaaaacagagcat

SEQ ID NO: 38211 - DNA, 20 bp, synthetic construct
  misc_feature 1..20: note = chemically synthesized
  source 1..20: mol_type = other DNA
aaacagagcattagaccaac

SEQ ID NO: 38212 - DNA, 20 bp, synthetic construct
  misc_feature 1..20: note = chemically synthesized
  source 1..20: mol_type = other DNA
atgttcactgtaatgctgtt

SEQ ID NO: 38213 - DNA, 20 bp, synthetic construct
  misc_feature 1..20: note = chemically synthesized
  source 1..20: mol_type = other DNA
cactgtaatgctgtttagaa

SEQ ID NO: 38214 - DNA, 20 bp, synthetic construct
  misc_feature 1..20: note = chemically synthesized
  source 1..20: mol_type = other DNA
gaatagcaaatacaaataac

SEQ ID NO: 38215 - DNA, 20 bp, synthetic construct
  misc_feature 1..20: note = chemically synthesized
  source 1..20: mol_type = other DNA
gcaaatacaaataactggcc

SEQ ID NO: 38216 - DNA, 20 bp, synthetic construct
  misc_feature 1..20: note = chemically synthesized
  source 1..20: mol_type = other DNA
caaatacaaataactggcct

SEQ ID NO: 38217 - DNA, 20 bp, synthetic construct
  misc_feature 1..20: note = chemically synthesized
  source 1..20: mol_type = other DNA
actggcctaggtgtctatca

SEQ ID NO: 38218 - DNA, 20 bp, synthetic construct
  misc_feature 1..20: note = chemically synthesized
  source 1..20: mol_type = other DNA
ctggcctaggtgtctatcaa

SEQ ID NO: 38219 - DNA, 20 bp, synthetic construct
  misc_feature 1..20: note = chemically synthesized
  source 1..20: mol_type = other DNA
gcctaggtgtctatcaaagg

SEQ ID NO: 38220 - DNA, 20 bp, synthetic construct
  misc_feature 1..20: note = chemically synthesized
  source 1..20: mol_type = other DNA
aggtgtctatcaaaggcgga

SEQ ID NO: 38221 - DNA, 20 bp, synthetic construct
  misc_feature 1..20: note = chemically synthesized
  source 1..20: mol_type = other DNA
ggtgtctatcaaaggcggac

SEQ ID NO: 38222 - DNA, 20 bp, synthetic construct
  misc_feature 1..20: note = chemically synthesized
  source 1..20: mol_type = other DNA
tatcaaaggcggacgggata

SEQ ID NO: 38223 - DNA, 20 bp, synthetic construct
  misc_feature 1..20: note = chemically synthesized
  source 1..20: mol_type = other DNA
cggacgggataaagaaactg

SEQ ID NO: 38224 - DNA, 20 bp, synthetic construct
  misc_feature 1..20: note = chemically synthesized
  source 1..20: mol_type = other DNA
acatatacaccaccactatg

SEQ ID NO: 38225 - DNA, 20 bp, synthetic construct
  misc_feature 1..20: note = chemically synthesized
  source 1..20: mol_type = other DNA
caccaccactatgtggcaat

SEQ ID NO: 38226 - DNA, 20 bp, synthetic construct
  misc_feature 1..20: note = chemically synthesized
  source 1..20: mol_type = other DNA
aaatgaaatcatgtcctttt

SEQ ID NO: 38227 - DNA, 20 bp, synthetic construct
  misc_feature 1..20: note = chemically synthesized
  source 1..20: mol_type = other DNA
tcatgtccttttcagcaaca

SEQ ID NO: 38228 - DNA, 20 bp, synthetic construct
  misc_feature 1..20: note = chemically synthesized
  source 1..20: mol_type = other DNA
catgtccttttcagcaacat

SEQ ID NO: 38229 - DNA, 20 bp, synthetic construct
  misc_feature 1..20: note = chemically synthesized
  source 1..20: mol_type = other DNA
gtccttttcagcaacatggg

SEQ ID NO: 38230 - DNA, 20 bp, synthetic construct
  misc_feature 1..20: note = chemically synthesized
  source 1..20: mol_type = other DNA
ccttttcagcaacatgggtg

SEQ ID NO: 38231 - DNA, 20 bp, synthetic construct
  misc_feature 1..20: note = chemically synthesized
  source 1..20: mol_type = other DNA
ttcagcaacatgggtggagc

SEQ ID NO: 38232 - DNA, 20 bp, synthetic construct
  misc_feature 1..20: note = chemically synthesized
  source 1..20: mol_type = other DNA
cagcaacatgggtggagctg

SEQ ID NO: 38233 - DNA, 20 bp, synthetic construct
  misc_feature 1..20: note = chemically synthesized
  source 1..20: mol_type = other DNA
agcaacatgggtggagctgg

SEQ ID NO: 38234 - DNA, 20 bp, synthetic construct
  misc_feature 1..20: note = chemically synthesized
  source 1..20: mol_type = other DNA
gagctggaggctataatcct

SEQ ID NO: 38235 - DNA, 20 bp, synthetic construct
  misc_feature 1..20: note = chemically synthesized
  source 1..20: mol_type = other DNA
aatcctaagcaaattaacgc

SEQ ID NO: 38236 - DNA, 20 bp, synthetic construct
  misc_feature 1..20: note = chemically synthesized
  source 1..20: mol_type = other DNA
aaattaacgcaagaacacaa

SEQ ID NO: 38237 - DNA, 20 bp, synthetic construct
  misc_feature 1..20: note = chemically synthesized
  source 1..20: mol_type = other DNA
taccatatattctcatttat

SEQ ID NO: 38238 - DNA, 20 bp, synthetic construct
  misc_feature 1..20: note = chemically synthesized
  source 1..20: mol_type = other DNA
catatattctcatttataag

SEQ ID NO: 38239 - DNA, 20 bp, synthetic construct
  misc_feature 1..20: note = chemically synthesized
  source 1..20: mol_type = other DNA
atattctcatttataagtgg

SEQ ID NO: 38240 - DNA, 20 bp, synthetic construct
  misc_feature 1..20: note = chemically synthesized
  source 1..20: mol_type = other DNA
ataagtggaagctaaacatt

SEQ ID NO: 38241 - DNA, 20 bp, synthetic construct
  misc_feature 1..20: note = chemically synthesized
  source 1..20: mol_type = other DNA
agctaaacattgagtacacg

SEQ ID NO: 38242 - DNA, 20 bp, synthetic construct
  misc_feature 1..20: note = chemically synthesized
  source 1..20: mol_type = other DNA
agtacacgtggatataaaca

SEQ ID NO: 38243 - DNA, 20 bp, synthetic construct
  misc_feature 1..20: note = chemically synthesized
  source 1..20: mol_type = other DNA
gtacacgtggatataaacat

SEQ ID NO: 38244 - DNA, 20 bp, synthetic construct
  misc_feature 1..20: note = chemically synthesized
  source 1..20: mol_type = other DNA
ggatataaacatgggaacaa

SEQ ID NO: 38245 - DNA, 20 bp, synthetic construct
  misc_feature 1..20: note = chemically synthesized
  source 1..20: mol_type = other DNA
tagccacttgaaactactac

SEQ ID NO: 38246 - DNA, 20 bp, synthetic construct
  misc_feature 1..20: note = chemically synthesized
  source 1..20: mol_type = other DNA
agccacttgaaactactaca

SEQ ID NO: 38247 - DNA, 20 bp, synthetic construct
  misc_feature 1..20: note = chemically synthesized
  source 1..20: mol_type = other DNA
gccacttgaaactactacaa

SEQ ID NO: 38248 - DNA, 20 bp, synthetic construct
  misc_feature 1..20: note = chemically synthesized
  source 1..20: mol_type = other DNA
ccacttgaaactactacaag

SEQ ID NO: 38249 - DNA, 20 bp, synthetic construct
  misc_feature 1..20: note = chemically synthesized
  source 1..20: mol_type = other DNA
cttgaaactactacaagggg

SEQ ID NO: 38250 - DNA, 20 bp, synthetic construct
  misc_feature 1..20: note = chemically synthesized
  source 1..20: mol_type = other DNA
ttgaaactactacaaggggc

SEQ ID NO: 38251 - DNA, 20 bp, synthetic construct
  misc_feature 1..20: note = chemically synthesized
  source 1..20: mol_type = other DNA
tgaaactactacaaggggca

SEQ ID NO: 38252 - DNA, 20 bp, synthetic construct
  misc_feature 1..20: note = chemically synthesized
  source 1..20: mol_type = other DNA
aaactactacaaggggcagg

SEQ ID NO: 38253 - DNA, 20 bp, synthetic construct
  misc_feature 1..20: note = chemically synthesized
  source 1..20: mol_type = other DNA
actactacaaggggcaggga

SEQ ID NO: 38254 - DNA, 20 bp, synthetic construct
  misc_feature 1..20: note = chemically synthesized
  source 1..20: mol_type = other DNA
acaaggggcagggagagatg

SEQ ID NO: 38255 - DNA, 20 bp, synthetic construct
  misc_feature 1..20: note = chemically synthesized
  source 1..20: mol_type = other DNA
caaggggcagggagagatgc

SEQ ID NO: 38256 - DNA, 20 bp, synthetic construct
  misc_feature 1..20: note = chemically synthesized
  source 1..20: mol_type = other DNA
aggggcagggagagatgcgg

SEQ ID NO: 38257 - DNA, 20 bp, synthetic construct
  misc_feature 1..20: note = chemically synthesized
  source 1..20: mol_type = other DNA
gggcagggagagatgcggga

SEQ ID NO: 38258 - DNA, 20 bp, synthetic construct
  misc_feature 1..20: note = chemically synthesized
  source 1..20: mol_type = other DNA
ggcagggagagatgcgggag

SEQ ID NO: 38259 - DNA, 20 bp, synthetic construct
  misc_feature 1..20: note = chemically synthesized
  source 1..20: mol_type = other DNA
gcagggagagatgcgggaga

SEQ ID NO: 38260 - DNA, 20 bp, synthetic construct
  misc_feature 1..20: note = chemically synthesized
  source 1..20: mol_type = other DNA
gagagggttaaaaaatctat

SEQ ID NO: 38261 - DNA, 20 bp, synthetic construct
  misc_feature 1..20: note = chemically synthesized
  source 1..20: mol_type = other DNA
gggttaaaaaatctattgga

SEQ ID NO: 38262 - DNA, 20 bp, synthetic construct
  misc_feature 1..20: note = chemically synthesized
  source 1..20: mol_type = other DNA
tccatgtaaaaaacctgcac

SEQ ID NO: 38263 - DNA, 20 bp, synthetic construct
  misc_feature 1..20: note = chemically synthesized
  source 1..20: mol_type = other DNA
acaagtacccactgtatcta

SEQ ID NO: 38264 - DNA, 20 bp, synthetic construct
  misc_feature 1..20: note = chemically synthesized
  source 1..20: mol_type = other DNA
agtaaatgttgaaaatttaa

SEQ ID NO: 38265 - DNA, 20 bp, synthetic construct
  misc_feature 1..20: note = chemically synthesized
  source 1..20: mol_type = other DNA
aaaaacaaataaataaaaac

SEQ ID NO: 38266 - DNA, 20 bp, synthetic construct
  misc_feature 1..20: note = chemically synthesized
  source 1..20: mol_type = other DNA
aaacaagtctatcctgaacc

SEQ ID NO: 38267 - DNA, 20 bp, synthetic construct
  misc_feature 1..20: note = chemically synthesized
  source 1..20: mol_type = other DNA
atcctgaacctggtatgaaa

SEQ ID NO: 38268 - DNA, 20 bp, synthetic construct
  misc_feature 1..20: note = chemically synthesized
  source 1..20: mol_type = other DNA
tcctgaacctggtatgaaat

SEQ ID NO: 38269 - DNA, 20 bp, synthetic construct
  misc_feature 1..20: note = chemically synthesized
  source 1..20: mol_type = other DNA
tgaacctggtatgaaatggg

SEQ ID NO: 38270 - DNA, 20 bp, synthetic construct
  misc_feature 1..20: note = chemically synthesized
  source 1..20: mol_type = other DNA
cagtgatttttatataaaca

SEQ ID NO: 38271 - DNA, 20 bp, synthetic construct
  misc_feature 1..20: note = chemically synthesized
  source 1..20: mol_type = other DNA
tatataaacaaagttatttt

SEQ ID NO: 38272 - DNA, 20 bp, synthetic construct
  misc_feature 1..20: note = chemically synthesized
  source 1..20: mol_type = other DNA
tattttaagacaaaatataa

SEQ ID NO: 38273 - DNA, 20 bp, synthetic construct
  misc_feature 1..20: note = chemically synthesized
  source 1..20: mol_type = other DNA
attttaagacaaaatataat

SEQ ID NO: 38274 - DNA, 20 bp, synthetic construct
  misc_feature 1..20: note = chemically synthesized
  source 1..20: mol_type = other DNA
taataggcccttcatttact

SEQ ID NO: 38275 - DNA, 20 bp, synthetic construct
  misc_feature 1..20: note = chemically synthesized
  source 1..20: mol_type = other DNA
ttcatttacttggctattaa

SEQ ID NO: 38276 - DNA, 20 bp, synthetic construct
  misc_feature 1..20: note = chemically synthesized
  source 1..20: mol_type = other DNA
tggctattaatagatccatt

SEQ ID NO: 38277 - DNA, 20 bp, synthetic construct
  misc_feature 1..20: note = chemically synthesized
  source 1..20: mol_type = other DNA
ggctattaatagatccattg

SEQ ID NO: 38278 - DNA, 20 bp, synthetic construct
  misc_feature 1..20: note = chemically synthesized
  source 1..20: mol_type = other DNA
tagatccattgaggttcctg

SEQ ID NO: 38279 - DNA, 20 bp, synthetic construct
  misc_feature 1..20: note = chemically synthesized
  source 1..20: mol_type = other DNA
ccattgaggttcctgtggat

SEQ ID NO: 38280 - DNA, 20 bp, synthetic construct
  misc_feature 1..20: note = chemically synthesized
  source 1..20: mol_type = other DNA
gatcagaactgattttccca

SEQ ID NO: 38281 - DNA, 20 bp, synthetic construct
  misc_feature 1..20: note = chemically synthesized
  source 1..20: mol_type = other DNA
aactgattttcccaaagtat

SEQ ID NO: 38282 - DNA, 20 bp, synthetic construct
  misc_feature 1..20: note = chemically synthesized
  source 1..20: mol_type = other DNA
attttcccaaagtatcagaa

SEQ ID NO: 38283 - DNA, 20 bp, synthetic construct
  misc_feature 1..20: note = chemically synthesized
  source 1..20: mol_type = other DNA
caattgaaatgcataaactc

SEQ ID NO: 38284 - DNA, 20 bp, synthetic construct
  misc_feature 1..20: note = chemically synthesized
  source 1..20: mol_type = other DNA
aattgaaatgcataaactcc

SEQ ID NO: 38285 - DNA, 20 bp, synthetic construct
  misc_feature 1..20: note = chemically synthesized
  source 1..20: mol_type = other DNA
aatgcataaactccaggaca

SEQ ID NO: 38286 - DNA, 20 bp, synthetic construct
  misc_feature 1..20: note = chemically synthesized
  source 1..20: mol_type = other DNA
catgtgaccctgcattcaac

SEQ ID NO: 38287 - DNA, 20 bp, synthetic construct
  misc_feature 1..20: note = chemically synthesized
  source 1..20: mol_type = other DNA
tcaatactttgcattgtatt

SEQ ID NO: 38288 - DNA, 20 bp, synthetic construct
  misc_feature 1..20: note = chemically synthesized
  source 1..20: mol_type = other DNA
tactttgcattgtattgaga

SEQ ID NO: 38289 - DNA, 20 bp, synthetic construct
  misc_feature 1..20: note = chemically synthesized
  source 1..20: mol_type = other DNA
gtattgagacagacaatgca

SEQ ID NO: 38290 - DNA, 20 bp, synthetic construct
  misc_feature 1..20: note = chemically synthesized
  source 1..20: mol_type = other DNA
gacaatgcaaagtacacaca

SEQ ID NO: 38291 - DNA, 20 bp, synthetic construct
  misc_feature 1..20: note = chemically synthesized
  source 1..20: mol_type = other DNA
atatactgtgtactgatgct

SEQ ID NO: 38292 - DNA, 20 bp, synthetic construct
  misc_feature 1..20: note = chemically synthesized
  source 1..20: mol_type = other DNA
tatactgtgtactgatgctt

SEQ ID NO: 38293 - DNA, 20 bp, synthetic construct
  misc_feature 1..20: note = chemically synthesized
  source 1..20: mol_type = other DNA
atactgtgtactgatgctta

SEQ ID NO: 38294 - DNA, 20 bp, synthetic construct
  misc_feature 1..20: note = chemically synthesized
  source 1..20: mol_type = other DNA
tactgatgcttagggtcctg

SEQ ID NO: 38295 - DNA, 20 bp, synthetic construct
  misc_feature 1..20: note = chemically synthesized
  source 1..20: mol_type = other DNA
actgatgcttagggtcctga

SEQ ID NO: 38296 - DNA, 20 bp, synthetic construct
  misc_feature 1..20: note = chemically synthesized
  source 1..20: mol_type = other DNA
ctgatgcttagggtcctgaa

SEQ ID NO: 38297 - DNA, 20 bp, synthetic construct
  misc_feature 1..20: note = chemically synthesized
  source 1..20: mol_type = other DNA
tcctgaagggtcacataatt

SEQ ID NO: 38298 - DNA, 20 bp, synthetic construct
  misc_feature 1..20: note = chemically synthesized
  source 1..20: mol_type = other DNA
agggtcacataattaagtcc

SEQ ID NO: 38299 - DNA, 20 bp, synthetic construct
  misc_feature 1..20: note = chemically synthesized
  source 1..20: mol_type = other DNA
taagtcctggcatcccaatg

SEQ ID NO: 38300 - DNA, 20 bp, synthetic construct
  misc_feature 1..20: note = chemically synthesized
  source 1..20: mol_type = other DNA
agtcctggcatcccaatgta

SEQ ID NO: 38301 - DNA, 20 bp, synthetic construct
  misc_feature 1..20: note = chemically synthesized
  source 1..20: mol_type = other DNA
gtcctggcatcccaatgtag

SEQ ID NO: 38302 - DNA, 20 bp, synthetic construct
  misc_feature 1..20: note = chemically synthesized
  source 1..20: mol_type = other DNA
ctggcatcccaatgtagagg

SEQ ID NO: 38303 - DNA, 20 bp, synthetic construct
  misc_feature 1..20: note = chemically synthesized
  source 1..20: mol_type = other DNA
tcccaatgtagaggtggcat

SEQ ID NO: 38304 - DNA, 20 bp, synthetic construct
  misc_feature 1..20: note = chemically synthesized
  source 1..20: mol_type = other DNA
ccaatgtagaggtggcattg

SEQ ID NO: 38305 - DNA, 20 bp, synthetic construct
  misc_feature 1..20: note = chemically synthesized
  source 1..20: mol_type = other DNA
agaggtggcattggagtatg

SEQ ID NO: 38306 - DNA, 20 bp, synthetic construct
  misc_feature 1..20: note = chemically synthesized
  source 1..20: mol_type = other DNA
cagcttttctcatccatcct

SEQ ID NO: 38307 - DNA, 20 bp, synthetic construct
  misc_feature 1..20: note = chemically synthesized
  source 1..20: mol_type = other DNA
gcttttctcatccatccttg

SEQ ID NO: 38308 - DNA, 20 bp, synthetic construct
  misc_feature 1..20: note = chemically synthesized
  source 1..20: mol_type = other DNA
atccttggagaaatacctga

SEQ ID NO: 38309 - DNA, 20 bp, synthetic construct
  misc_feature 1..20: note = chemically synthesized
  source 1..20: mol_type = other DNA
gagaaatacctgaaagttcc

SEQ ID NO: 38310 - DNA, 20 bp, synthetic construct
  misc_feature 1..20: note = chemically synthesized
  source 1..20: mol_type = other DNA
agaaatacctgaaagttccg

SEQ ID NO: 38311 - DNA, 20 bp, synthetic construct
  misc_feature 1..20: note = chemically synthesized
  source 1..20: mol_type = other DNA
cctgaaagttccgaggacat

SEQ ID NO: 38312 - DNA, 20 bp, synthetic construct
  misc_feature 1..20: note = chemically synthesized
  source 1..20: mol_type = other DNA
aagttccgaggacattggtt

SEQ ID NO: 38313 - DNA, 20 bp, synthetic construct
  misc_feature 1..20: note = chemically synthesized
  source 1..20: mol_type = other DNA
ttgagcgtccctgcttctcc

SEQ ID NO: 38314 - DNA, 20 bp, synthetic construct
  misc_feature 1..20: note = chemically synthesized
  source 1..20: mol_type = other DNA
gcgtccctgcttctcccaga

SEQ ID NO: 38315 - DNA, 20 bp, synthetic construct
  misc_feature 1..20: note = chemically synthesized
  source 1..20: mol_type = other DNA
gtccctgcttctcccagaca

SEQ ID NO: 38316 - DNA, 20 bp, synthetic construct
  misc_feature 1..20: note = chemically synthesized
  source 1..20: mol_type = other DNA
tccctgcttctcccagacag

SEQ ID NO: 38317 - DNA, 20 bp, synthetic construct
  misc_feature 1..20: note = chemically synthesized
  source 1..20: mol_type = other DNA
cctgcttctcccagacagag

SEQ ID NO: 38318 - DNA, 20 bp, synthetic construct
  misc_feature 1..20: note = chemically synthesized
  source 1..20: mol_type = other DNA
ctgcttctcccagacagagg

SEQ ID NO: 38319 - DNA, 20 bp, synthetic construct
  misc_feature 1..20: note = chemically synthesized
  source 1..20: mol_type = other DNA
tgcttctcccagacagagga

SEQ ID NO: 38320 - DNA, 20 bp, synthetic construct
  misc_feature 1..20: note = chemically synthesized
  source 1..20: mol_type = other DNA
cttctcccagacagaggagg

SEQ ID NO: 38321 - DNA, 20 bp, synthetic construct
  misc_feature 1..20: note = chemically synthesized
  source 1..20: mol_type = other DNA
ttctcccagacagaggaggg

SEQ ID NO: 38322 - DNA, 20 bp, synthetic construct
  misc_feature 1..20: note = chemically synthesized
  source 1..20: mol_type = other DNA
tctcccagacagaggaggga

SEQ ID NO: 38323 - DNA, 20 bp, synthetic construct
  misc_feature 1..20: note = chemically synthesized
  source 1..20: mol_type = other DNA
ctcccagacagaggagggag

SEQ ID NO: 38324 - DNA, 20 bp, synthetic construct
  misc_feature 1..20: note = chemically synthesized
  source 1..20: mol_type = other DNA
cccagacagaggagggaggg

SEQ ID NO: 38325 - DNA, 20 bp, synthetic construct
  misc_feature 1..20: note = chemically synthesized
  source 1..20: mol_type = other DNA
cagaggagggaggggagatc

SEQ ID NO: 38326 - DNA, 20 bp, synthetic construct
  misc_feature 1..20: note = chemically synthesized
  source 1..20: mol_type = other DNA
agaggagggaggggagatca

SEQ ID NO: 38327 - DNA, 20 bp, synthetic construct
  misc_feature 1..20: note = chemically synthesized
  source 1..20: mol_type = other DNA
gaggagggaggggagatcaa

SEQ ID NO: 38328 - DNA, 20 bp, synthetic construct
  misc_feature 1..20: note = chemically synthesized
  source 1..20: mol_type = other DNA
gggagatcaagggttcttct

SEQ ID NO: 38329 - DNA, 20 bp, synthetic construct
  misc_feature 1..20: note = chemically synthesized
  source 1..20: mol_type = other DNA
caagggttcttctgagtatt

SEQ ID NO: 38330 - DNA, 20 bp, synthetic construct
  misc_feature 1..20: note = chemically synthesized
  source 1..20: mol_type = other DNA
ggttcttctgagtatttgga

SEQ ID NO: 38331 - DNA, 20 bp, synthetic construct
  misc_feature 1..20: note = chemically synthesized
  source 1..20: mol_type = other DNA
ttcttctgagtatttggaaa

SEQ ID NO: 38332 - DNA, 20 bp, synthetic construct
  misc_feature 1..20: note = chemically synthesized
  source 1..20: mol_type = other DNA
tcttctgagtatttggaaag

SEQ ID NO: 38333 - DNA, 20 bp, synthetic construct
  misc_feature 1..20: note = chemically synthesized
  source 1..20: mol_type = other DNA
tatttggaaagaggaaactc

SEQ ID NO: 38334 - DNA, 20 bp, synthetic construct
  misc_feature 1..20: note = chemically synthesized
  source 1..20: mol_type = other DNA
atttggaaagaggaaactct

SEQ ID NO: 38335 - DNA, 20 bp, synthetic construct
  misc_feature 1..20: note = chemically synthesized
  source 1..20: mol_type = other DNA
tttggaaagaggaaactctg

SEQ ID NO: 38336 - DNA, 20 bp, synthetic construct
  misc_feature 1..20: note = chemically synthesized
  source 1..20: mol_type = other DNA
ggaaagaggaaactctgggg

SEQ ID NO: 38337 - DNA, 20 bp, synthetic construct
  misc_feature 1..20: note = chemically synthesized
  source 1..20: mol_type = other DNA
catacataaactctctaatt

SEQ ID NO: 38338 - DNA, 20 bp, synthetic construct
  misc_feature 1..20: note = chemically synthesized
  source 1..20: mol_type = other DNA
ctctaatttggcctcttgaa

SEQ ID NO: 38339 - DNA, 20 bp, synthetic construct
  misc_feature 1..20: note = chemically synthesized
  source 1..20: mol_type = other DNA
tggcctcttgaatagtcttt

SEQ ID NO: 38340 - DNA, 20 bp, synthetic construct
  misc_feature 1..20: note = chemically synthesized
  source 1..20: mol_type = other DNA
cctcttgaatagtctttgag

SEQ ID NO: 38341 - DNA, 20 bp, synthetic construct
  misc_feature 1..20: note = chemically synthesized
  source 1..20: mol_type = other DNA
ttgaatagtctttgagaagt

SEQ ID NO: 38342 - DNA, 20 bp, synthetic construct
  misc_feature 1..20: note = chemically synthesized
  source 1..20: mol_type = other DNA
gagaagtgagtgtctgaact

SEQ ID NO: 38343 - DNA, 20 bp, synthetic construct
  misc_feature 1..20: note = chemically synthesized
  source 1..20: mol_type = other DNA
gtctgaactgagtcttcaaa

SEQ ID NO: 38344 - DNA, 20 bp, synthetic construct
  misc_feature 1..20: note = chemically synthesized
  source 1..20: mol_type = other DNA
ctgaactgagtcttcaaata

SEQ ID NO: 38345 - DNA, 20 bp, synthetic construct
  misc_feature 1..20: note = chemically synthesized
  source 1..20: mol_type = other DNA
aactgagtcttcaaatagag

SEQ ID NO: 38346 - DNA, 20 bp, synthetic construct
  misc_feature 1..20: note = chemically synthesized
  source 1..20: mol_type = other DNA
actgagtcttcaaatagagc

SEQ ID NO: 38347 - DNA, 20 bp, synthetic construct
  misc_feature 1..20: note = chemically synthesized
  source 1..20: mol_type = other DNA
gtcttcaaatagagcaggaa

SEQ ID NO: 38348 - DNA, 20 bp, synthetic construct
  misc_feature 1..20: note = chemically synthesized
  source 1..20: mol_type = other DNA
tcttcaaatagagcaggaat

SEQ ID NO: 38349 - DNA, 20 bp, synthetic construct
  misc_feature 1..20: note = chemically synthesized
  source 1..20: mol_type = other DNA
gcaggaatgggtccttattc

SEQ ID NO: 38350 - DNA, 20 bp, synthetic construct
  misc_feature 1..20: note = chemically synthesized
  source 1..20: mol_type = other DNA
gaatgggtccttattccagc

SEQ ID NO: 38351 - DNA, 20 bp, synthetic construct
  misc_feature 1..20: note = chemically synthesized
  source 1..20: mol_type = other DNA
ttattccagcaagaaaatga

SEQ ID NO: 38352 - DNA, 20 bp, synthetic construct
  misc_feature 1..20: note = chemically synthesized
  source 1..20: mol_type = other DNA
ccagcaagaaaatgacagca

SEQ ID NO: 38353 - DNA, 20 bp, synthetic construct
  misc_feature 1..20: note = chemically synthesized
  source 1..20: mol_type = other DNA
cagcaagaaaatgacagcat

SEQ ID NO: 38354 - DNA, 20 bp, synthetic construct
  misc_feature 1..20: note = chemically synthesized
  source 1..20: mol_type = other DNA
aagaaaatgacagcataggt

SEQ ID NO: 38355 - DNA, 20 bp, synthetic construct
  misc_feature 1..20: note = chemically synthesized
  source 1..20: mol_type = other DNA
atgacagcataggtgagtgc

SEQ ID NO: 38356 - DNA, 20 bp, synthetic construct
  misc_feature 1..20: note = chemically synthesized
  source 1..20: mol_type = other DNA
tgacagcataggtgagtgcc

SEQ ID NO: 38357 - DNA, 20 bp, synthetic construct
  misc_feature 1..20: note = chemically synthesized
  source 1..20: mol_type = other DNA
gcataggtgagtgccaggaa

SEQ ID NO: 38358 - DNA, 20 bp, synthetic construct
  misc_feature 1..20: note = chemically synthesized
  source 1..20: mol_type = other DNA
cataggtgagtgccaggaac

SEQ ID NO: 38359 - DNA, 20 bp, synthetic construct
  misc_feature 1..20: note = chemically synthesized
  source 1..20: mol_type = other DNA
tgagtgccaggaacaggaat

SEQ ID NO: 38360 - DNA, 20 bp, synthetic construct
  misc_feature 1..20: note = chemically synthesized
  source 1..20: mol_type = other DNA
gagtgccaggaacaggaata

SEQ ID NO: 38361 - DNA, 20 bp, synthetic construct
  misc_feature 1..20: note = chemically synthesized
  source 1..20: mol_type = other DNA
attcctcttccttcttatgt

SEQ ID NO: 38362 - DNA, 20 bp, synthetic construct
  misc_feature 1..20: note = chemically synthesized
  source 1..20: mol_type = other DNA
cttccttcttatgttagatg

SEQ ID NO: 38363 - DNA, 20 bp, synthetic construct
  misc_feature 1..20: note = chemically synthesized
  source 1..20: mol_type = other DNA
ttcttatgttagatgcagcg

SEQ ID NO: 38364 - DNA, 20 bp, synthetic construct
  misc_feature 1..20: note = chemically synthesized
  source 1..20: mol_type = other DNA
cttatgttagatgcagcgaa

SEQ ID NO: 38365 - DNA, 20 bp, synthetic construct
  misc_feature 1..20: note = chemically synthesized
  source 1..20: mol_type = other DNA
atgttagatgcagcgaagag

SEQ ID NO: 38366 - DNA, 20 bp, synthetic construct
  misc_feature 1..20: note = chemically synthesized
  source 1..20: mol_type = other DNA
tagatgcagcgaagagaaga

SEQ ID NO: 38367 - DNA, 20 bp, synthetic construct
  misc_feature 1..20: note = chemically synthesized
  source 1..20: mol_type = other DNA
agatgcagcgaagagaagat

SEQ ID NO: 38368 - DNA, 20 bp, synthetic construct
  misc_feature 1..20: note = chemically synthesized
  source 1..20: mol_type = other DNA
tgcagcgaagagaagatagg

SEQ ID NO: 38369 - DNA, 20 bp, synthetic construct
  misc_feature 1..20: note = chemically synthesized
  source 1..20: mol_type = other DNA
agagaagataggaagatttt

SEQ ID NO: 38370 - DNA, 20 bp, synthetic construct
  misc_feature 1..20: note = chemically synthesized
  source 1..20: mol_type = other DNA
agaagataggaagattttca

SEQ ID NO: 38371 - DNA, 20 bp, synthetic construct
  misc_feature 1..20: note = chemically synthesized
  source 1..20: mol_type = other DNA
gaagataggaagattttcag

SEQ ID NO: 38372 - DNA, 20 bp, synthetic construct
  misc_feature 1..20: note = chemically synthesized
  source 1..20: mol_type = other DNA
aagattttcagaggtctgca

SEQ ID NO: 38373 - DNA, 20 bp, synthetic construct
  misc_feature 1..20: note = chemically synthesized
  source 1..20: mol_type = other DNA
agattttcagaggtctgcat

SEQ ID NO: 38374 - DNA, 20 bp, synthetic construct
  misc_feature 1..20: note = chemically synthesized
  source 1..20: mol_type = other DNA
attttcagaggtctgcatag

SEQ ID NO: 38375 - DNA, 20 bp, synthetic construct
  misc_feature 1..20: note = chemically synthesized
  source 1..20: mol_type = other DNA
ataggagaacatactccatc

SEQ ID NO: 38376 - DNA, 20 bp, synthetic construct
  misc_feature 1..20: note = chemically synthesized
  source 1..20: mol_type = other DNA
taggagaacatactccatct

SEQ ID NO: 38377 - DNA, 20 bp, synthetic construct
  misc_feature 1..20: note = chemically synthesized
  source 1..20: mol_type = other DNA
tctgggatgaccaacaccta

SEQ ID NO: 38378 - DNA, 20 bp, synthetic construct
  misc_feature 1..20: note = chemically synthesized
  source 1..20: mol_type = other DNA
gatgaccaacacctaaagca

SEQ ID NO: 38379 - DNA, 20 bp, synthetic construct
  misc_feature 1..20: note = chemically synthesized
  source 1..20: mol_type = other DNA
ttcatctcaacacatgtttc

SEQ ID NO: 38380 - DNA, 20 bp, synthetic construct
  misc_feature 1..20: note = chemically synthesized
  source 1..20: mol_type = other DNA
tcatctcaacacatgtttca

SEQ ID NO: 38381 - DNA, 20 bp, synthetic construct
  misc_feature 1..20: note = chemically synthesized
  source 1..20: mol_type = other DNA
tctcaacacatgtttcaagg

SEQ ID NO: 38382 - DNA, 20 bp, synthetic construct
  misc_feature 1..20: note = chemically synthesized
  source 1..20: mol_type = other DNA
ctcaacacatgtttcaaggc

SEQ ID NO: 38383 - DNA, 20 bp, synthetic construct
  misc_feature 1..20: note = chemically synthesized
  source 1..20: mol_type = other DNA
catgtttcaaggcaggcttg

SEQ ID NO: 38384 - DNA, 20 bp, synthetic construct
  misc_feature 1..20: note = chemically synthesized
  source 1..20: mol_type = other DNA
caggcttgaagtttcaaatg

SEQ ID NO: 38385 - DNA, 20 bp, synthetic construct
  misc_feature 1..20: note = chemically synthesized
  source 1..20: mol_type = other DNA
agtttcaaatgtggtgctca

SEQ ID NO: 38386 - DNA, 20 bp, synthetic construct
  misc_feature 1..20: note = chemically synthesized
  source 1..20: mol_type = other DNA
caaatgtggtgctcatggat

SEQ ID NO: 38387 - DNA, 20 bp, synthetic construct
  misc_feature 1..20: note = chemically synthesized
  source 1..20: mol_type = other DNA
tggtgctcatggattagctt

SEQ ID NO: 38388 - DNA, 20 bp, synthetic construct
  misc_feature 1..20: note = chemically synthesized
  source 1..20: mol_type = other DNA
ggtgctcatggattagcttc

SEQ ID NO: 38389 - DNA, 20 bp, synthetic construct
  misc_feature 1..20: note = chemically synthesized
  source 1..20: mol_type = other DNA
ggaaaacgtgtgaatatttt

SEQ ID NO: 38390 - DNA, 20 bp, synthetic construct
  misc_feature 1..20: note = chemically synthesized
  source 1..20: mol_type = other DNA
cttttgtccatttttctcca

SEQ ID NO: 38391 - DNA, 20 bp, synthetic construct
  misc_feature 1..20: note = chemically synthesized
  source 1..20: mol_type = other DNA
tttgtccatttttctccaca

SEQ ID NO: 38392 - DNA, 20 bp, synthetic construct
  misc_feature 1..20: note = chemically synthesized
  source 1..20: mol_type = other DNA
ttgtccatttttctccacag

SEQ ID NO: 38393 - DNA, 20 bp, synthetic construct
  misc_feature 1..20: note = chemically synthesized
  source 1..20: mol_type = other DNA
tgtccatttttctccacaga

SEQ ID NO: 38394 - DNA, 20 bp, synthetic construct
  misc_feature 1..20: note = chemically synthesized
  source 1..20: mol_type = other DNA
ttttctccacagagggctca

SEQ ID NO: 38395 - DNA, 20 bp, synthetic construct
  misc_feature 1..20: note = chemically synthesized
  source 1..20: mol_type = other DNA
agagggctcatggcttttgt

SEQ ID NO: 38396 - DNA, 20 bp, synthetic construct
  misc_feature 1..20: note = chemically synthesized
  source 1..20: mol_type = other DNA
ttctatttcaaaactaaaca

SEQ ID NO: 38397 - DNA, 20 bp, synthetic construct
  misc_feature 1..20: note = chemically synthesized
  source 1..20: mol_type = other DNA
tttcaaaactaaacaaagaa

SEQ ID NO: 38398 - DNA, 20 bp, synthetic construct
  misc_feature 1..20: note = chemically synthesized
  source 1..20: mol_type = other DNA
tgaaacataaaataaaaatc

SEQ ID NO: 38399 - DNA, 20 bp, synthetic construct
  misc_feature 1..20: note = chemically synthesized
  source 1..20: mol_type = other DNA
atgtatccaaatatgcaatt

SEQ ID NO: 38400 - DNA, 20 bp, synthetic construct
  misc_feature 1..20: note = chemically synthesized
  source 1..20: mol_type = other DNA
tccaaatatgcaattaagct

SEQ ID NO: 38401 - DNA, 20 bp, synthetic construct
  misc_feature 1..20: note = chemically synthesized
  source 1..20: mol_type = other DNA
aaatatgcaattaagctaag

SEQ ID NO: 38402 - DNA, 20 bp, synthetic construct
  misc_feature 1..20: note = chemically synthesized
  source 1..20: mol_type = other DNA
tatgcaattaagctaagcag

SEQ ID NO: 38403 - DNA, 20 bp, synthetic construct
  misc_feature 1..20: note = chemically synthesized
  source 1..20: mol_type = other DNA
atgcaattaagctaagcagc

SEQ ID NO: 38404 - DNA, 20 bp, synthetic construct
  misc_feature 1..20: note = chemically synthesized
  source 1..20: mol_type = other DNA
gccttcttttttgttactat

SEQ ID NO: 38405 - DNA, 20 bp, synthetic construct
  misc_feature 1..20: note = chemically synthesized
  source 1..20: mol_type = other DNA
ctattggttcaaacattgtg

SEQ ID NO: 38406 - DNA, 20 bp, synthetic construct
  misc_feature 1..20: note = chemically synthesized
  source 1..20: mol_type = other DNA
tggttcaaacattgtgcagc

SEQ ID NO: 38407 - DNA, 20 bp, synthetic construct
  misc_feature 1..20: note = chemically synthesized
  source 1..20: mol_type = other DNA
attgtgcagcaagcacacca

SEQ ID NO: 38408 - DNA, 20 bp, synthetic construct
  misc_feature 1..20: note = chemically synthesized
  source 1..20: mol_type = other DNA
tgtgcagcaagcacaccaca

SEQ ID NO: 38409 - DNA, 20 bp, synthetic construct
  misc_feature 1..20: note = chemically synthesized
  source 1..20: mol_type = other DNA
gtgcagcaagcacaccacag

SEQ ID NO: 38410 - DNA, 20 bp, synthetic construct
  misc_feature 1..20: note = chemically synthesized
  source 1..20: mol_type = other DNA
tgcagcaagcacaccacaga

SEQ ID NO: 38411 - DNA, 20 bp, synthetic construct
  misc_feature 1..20: note = chemically synthesized
  source 1..20: mol_type = other DNA
gcagcaagcacaccacagag

SEQ ID NO: 38412 - DNA, 20 bp, synthetic construct
  misc_feature 1..20: note = chemically synthesized
  source 1..20: mol_type = other DNA
attttttaaaatgtgttttt

SEQ ID NO: 38413 - DNA, 20 bp, synthetic construct
  misc_feature 1..20: note = chemically synthesized
  source 1..20: mol_type = other DNA
taaaatgtgttttttagatt

SEQ ID NO: 38414 - DNA, 20 bp, synthetic construct
  misc_feature 1..20: note = chemically synthesized
  source 1..20: mol_type = other DNA
tacttaattattcataactg

SEQ ID NO: 38415 - DNA, 20 bp, synthetic construct
  misc_feature 1..20: note = chemically synthesized
  source 1..20: mol_type = other DNA
tgatcatcattccttatctc

SEQ ID NO: 38416 - DNA, 20 bp, synthetic construct
  misc_feature 1..20: note = chemically synthesized
  source 1..20: mol_type = other DNA
atcattccttatctctagca

SEQ ID NO: 38417 - DNA, 20 bp, synthetic construct
  misc_feature 1..20: note = chemically synthesized
  source 1..20: mol_type = other DNA
taaatgtattgctcttctat

SEQ ID NO: 38418 - DNA, 20 bp, synthetic construct
  misc_feature 1..20: note = chemically synthesized
  source 1..20: mol_type = other DNA
ttattgctaaatatgaatat

SEQ ID NO: 38419 - DNA, 20 bp, synthetic construct
  misc_feature 1..20: note = chemically synthesized
  source 1..20: mol_type = other DNA
tattgctaaatatgaatatt

SEQ ID NO: 38420 - DNA, 20 bp, synthetic construct
  misc_feature 1..20: note = chemically synthesized
  source 1..20: mol_type = other DNA
taaatatgaatattaggatt

SEQ ID NO: 38421 - DNA, 20 bp, synthetic construct
  misc_feature 1..20: note = chemically synthesized
  source 1..20: mol_type = other DNA
aaatatgaatattaggattg

SEQ ID NO: 38422 - DNA, 20 bp, synthetic construct
  misc_feature 1..20: note = chemically synthesized
  source 1..20: mol_type = other DNA
gaatattaggattgaggctg

SEQ ID NO: 38423 - DNA, 20 bp, synthetic construct
  misc_feature 1..20: note = chemically synthesized
  source 1..20: mol_type = other DNA
ggattgaggctgcagaaata

SEQ ID NO: 38424 - DNA, 20 bp, synthetic construct
  misc_feature 1..20: note = chemically synthesized
  source 1..20: mol_type = other DNA
ctgcagaaatacagtttcac

SEQ ID NO: 38425 - DNA, 20 bp, synthetic construct
  misc_feature 1..20: note = chemically synthesized
  source 1..20: mol_type = other DNA
cagaaatacagtttcacaag

SEQ ID NO: 38426 - DNA, 20 bp, synthetic construct
  misc_feature 1..20: note = chemically synthesized
  source 1..20: mol_type = other DNA
agaaatacagtttcacaaga

SEQ ID NO: 38427 - DNA, 20 bp, synthetic construct
  misc_feature 1..20: note = chemically synthesized
  source 1..20: mol_type = other DNA
aatacagtttcacaagaagg

SEQ ID NO: 38428 - DNA, 20 bp, synthetic construct
  misc_feature 1..20: note = chemically synthesized
  source 1..20: mol_type = other DNA
agaaggtagtaaaaactgat

SEQ ID NO: 38429 - DNA, 20 bp, synthetic construct
  misc_feature 1..20: note = chemically synthesized
  source 1..20: mol_type = other DNA
gaaggtagtaaaaactgata

SEQ ID NO: 38430 - DNA, 20 bp, synthetic construct
  misc_feature 1..20: note = chemically synthesized
  source 1..20: mol_type = other DNA
ggtagtaaaaactgataagg

SEQ ID NO: 38431 - DNA, 20 bp, synthetic construct
  misc_feature 1..20: note = chemically synthesized
  source 1..20: mol_type = other DNA
gtagtaaaaactgataaggc

SEQ ID NO: 38432 - DNA, 20 bp, synthetic construct
  misc_feature 1..20: note = chemically synthesized
  source 1..20: mol_type = other DNA
tagtaaaaactgataaggca

SEQ ID NO: 38433 - DNA, 20 bp, synthetic construct
  misc_feature 1..20: note = chemically synthesized
  source 1..20: mol_type = other DNA
aactgataaggcagggattt

SEQ ID NO: 38434 - DNA, 20 bp, synthetic construct
  misc_feature 1..20: note = chemically synthesized
  source 1..20: mol_type = other DNA
aggcagggatttcagtgtaa

SEQ ID NO: 38435 - DNA, 20 bp, synthetic construct
  misc_feature 1..20: note = chemically synthesized
  source 1..20: mol_type = other DNA
tcagtgtaatagtttctata

SEQ ID NO: 38436 - DNA, 20 bp, synthetic construct
  misc_feature 1..20: note = chemically synthesized
  source 1..20: mol_type = other DNA
ccacttgtgaacacacaatg

SEQ ID NO: 38437 - DNA, 20 bp, synthetic construct
  misc_feature 1..20: note = chemically synthesized
  source 1..20: mol_type = other DNA
gcggctccttttttgctgcc

SEQ ID NO: 38438 - DNA, 20 bp, synthetic construct
  misc_feature 1..20: note = chemically synthesized
  source 1..20: mol_type = other DNA
ttttttgctgcctggctttt

SEQ ID NO: 38439 - DNA, 20 bp, synthetic construct
  misc_feature 1..20: note = chemically synthesized
  source 1..20: mol_type = other DNA
gctgcctggcttttcagtac

SEQ ID NO: 38440 - DNA, 20 bp, synthetic construct
  misc_feature 1..20: note = chemically synthesized
  source 1..20: mol_type = other DNA
tgcctggcttttcagtactg

SEQ ID NO: 38441 - DNA, 20 bp, synthetic construct
  misc_feature 1..20: note = chemically synthesized
  source 1..20: mol_type = other DNA
gcctggcttttcagtactgg

SEQ ID NO: 38442 - DNA, 20 bp, synthetic construct
  misc_feature 1..20: note = chemically synthesized
  source 1..20: mol_type = other DNA
gtttatgtgtgcgtccttct

SEQ ID NO: 38443 - DNA, 20 bp, synthetic construct
  misc_feature 1..20: note = chemically synthesized
  source 1..20: mol_type = other DNA
gtgtgcgtccttcttggcaa

SEQ ID NO: 38444 - DNA, 20 bp, synthetic construct
  misc_feature 1..20: note = chemically synthesized
  source 1..20: mol_type = other DNA
gcgtccttcttggcaatggc

SEQ ID NO: 38445 - DNA, 20 bp, synthetic construct
  misc_feature 1..20: note = chemically synthesized
  source 1..20: mol_type = other DNA
gcaagctcctctacctcatc

SEQ ID NO: 38446 - DNA, 20 bp, synthetic construct
  misc_feature 1..20: note = chemically synthesized
  source 1..20: mol_type = other DNA
tacctcatcaagcatgacca

SEQ ID NO: 38447 - DNA, 20 bp, synthetic construct
  misc_feature 1..20: note = chemically synthesized
  source 1..20: mol_type = other DNA
tactgtttccttgccacact

SEQ ID NO: 38448 - DNA, 20 bp, synthetic construct
  misc_feature 1..20: note = chemically synthesized
  source 1..20: mol_type = other DNA
actgtttccttgccacactg

SEQ ID NO: 38449 - DNA, 20 bp, synthetic construct
  misc_feature 1..20: note = chemically synthesized
  source 1..20: mol_type = other DNA
tttccttgccacactgaggc

SEQ ID NO: 38450 - DNA, 20 bp, synthetic construct
  misc_feature 1..20: note = chemically synthesized
  source 1..20: mol_type = other DNA
cacactgaggcaagacctca

SEQ ID NO: 38451 - DNA, 20 bp, synthetic construct
  misc_feature 1..20: note = chemically synthesized
  source 1..20: mol_type = other DNA
gaccatgatgcccactgtaa

SEQ ID NO: 38452 - DNA, 20 bp, synthetic construct
  misc_feature 1..20: note = chemically synthesized
  source 1..20: mol_type = other DNA
accatgatgcccactgtaat

SEQ ID NO: 38453 - DNA, 20 bp, synthetic construct
  misc_feature 1..20: note = chemically synthesized
  source 1..20: mol_type = other DNA
ccactgtaatgggcgtcttg

SEQ ID NO: 38454 - DNA, 20 bp, synthetic construct
  misc_feature 1..20: note = chemically synthesized
  source 1..20: mol_type = other DNA
cgtcttgtggatgaatcaca

SEQ ID NO: 38455 - DNA, 20 bp, synthetic construct
  misc_feature 1..20: note = chemically synthesized
  source 1..20: mol_type = other DNA
tcttgtggatgaatcacaaa

SEQ ID NO: 38456 - DNA, 20 bp, synthetic construct
  misc_feature 1..20: note = chemically synthesized
  source 1..20: mol_type = other DNA
cttgtggatgaatcacaaag

SEQ ID NO: 38457 - DNA, 20 bp, synthetic construct
  misc_feature 1..20: note = chemically synthesized
  source 1..20: mol_type = other DNA
aatcacaaagaggttatcca

SEQ ID NO: 38458 - DNA, 20 bp, synthetic construct
  misc_feature 1..20: note = chemically synthesized
  source 1..20: mol_type = other DNA
atcacaaagaggttatccat

SEQ ID NO: 38459 - DNA, 20 bp, synthetic construct
  misc_feature 1..20: note = chemically synthesized
  source 1..20: mol_type = other DNA
tcacaaagaggttatccatg

SEQ ID NO: 38460 - DNA, 20 bp, synthetic construct
  misc_feature 1..20: note = chemically synthesized
  source 1..20: mol_type = other DNA
tccatggggcctgcttcttg

SEQ ID NO: 38461 - DNA, 20 bp, synthetic construct
  misc_feature 1..20: note = chemically synthesized
  source 1..20: mol_type = other DNA
ccatggggcctgcttcttgc

SEQ ID NO: 38462 - DNA, 20 bp, synthetic construct
  misc_feature 1..20: note = chemically synthesized
  source 1..20: mol_type = other DNA
ccactcccattatccacttg

SEQ ID NO: 38463 - DNA, 20 bp, synthetic construct
  misc_feature 1..20: note = chemically synthesized
  source 1..20: mol_type = other DNA
ccattatccacttgcagaat

SEQ ID NO: 38464 - DNA, 20 bp, synthetic construct
  misc_feature 1..20: note = chemically synthesized
  source 1..20: mol_type = other DNA
cattatccacttgcagaatc

SEQ ID NO: 38465 - DNA, 20 bp, synthetic construct
  misc_feature 1..20: note = chemically synthesized
  source 1..20: mol_type = other DNA
atcaggtattctcctgtcaa

SEQ ID NO: 38466 - DNA, 20 bp, synthetic construct
  misc_feature 1..20: note = chemically synthesized
  source 1..20: mol_type = other DNA
attatcatccacatgcttct

SEQ ID NO: 38467 - DNA, 20 bp, synthetic construct
  misc_feature 1..20: note = chemically synthesized
  source 1..20: mol_type = other DNA
ttatcatccacatgcttctc

SEQ ID NO: 38468 - DNA, 20 bp, synthetic construct
  misc_feature 1..20: note = chemically synthesized
  source 1..20: mol_type = other DNA
taactatttctactaaatct

SEQ ID NO: 38469 - DNA, 20 bp, synthetic construct
  misc_feature 1..20: note = chemically synthesized
  source 1..20: mol_type = other DNA
aactatttctactaaatctt

SEQ ID NO: 38470 - DNA, 20 bp, synthetic construct
  misc_feature 1..20: note = chemically synthesized
  source 1..20: mol_type = other DNA
tttctactaaatcttgggtg

SEQ ID NO: 38471 - DNA, 20 bp, synthetic construct
  misc_feature 1..20: note = chemically synthesized
  source 1..20: mol_type = other DNA
tactaaatcttgggtgaaga

SEQ ID NO: 38472 - DNA, 20 bp, synthetic construct
  misc_feature 1..20: note = chemically synthesized
  source 1..20: mol_type = other DNA
cttgggtgaagatagaactg

SEQ ID NO: 38473 - DNA, 20 bp, synthetic construct
  misc_feature 1..20: note = chemically synthesized
  source 1..20: mol_type = other DNA
atagaactgtggctatttat

SEQ ID NO: 38474 - DNA, 20 bp, synthetic construct
  misc_feature 1..20: note = chemically synthesized
  source 1..20: mol_type = other DNA
tagaactgtggctatttatg

SEQ ID NO: 38475 - DNA, 20 bp, synthetic construct
  misc_feature 1..20: note = chemically synthesized
  source 1..20: mol_type = other DNA
agaactgtggctatttatga

SEQ ID NO: 38476 - DNA, 20 bp, synthetic construct
  misc_feature 1..20: note = chemically synthesized
  source 1..20: mol_type = other DNA
ccacaccttttttctccatc

SEQ ID NO: 38477 - DNA, 20 bp, synthetic construct
  misc_feature 1..20: note = chemically synthesized
  source 1..20: mol_type = other DNA
tacattcaatcacttatacc

SEQ ID NO: 38478 - DNA, 20 bp, synthetic construct
  misc_feature 1..20: note = chemically synthesized
  source 1..20: mol_type = other DNA
tcacttatacccagctattc

SEQ ID NO: 38479 - DNA, 20 bp, synthetic construct
  misc_feature 1..20: note = chemically synthesized
  source 1..20: mol_type = other DNA
ggttgctttgattttcttcc

SEQ ID NO: 38480 - DNA, 20 bp, synthetic construct
  misc_feature 1..20: note = chemically synthesized
  source 1..20: mol_type = other DNA
ttatatcctgatccttaaaa

SEQ ID NO: 38481 - DNA, 20 bp, synthetic construct
  misc_feature 1..20: note = chemically synthesized
  source 1..20: mol_type = other DNA
cctgatccttaaaacagtta

SEQ ID NO: 38482 - DNA, 20 bp, synthetic construct
  misc_feature 1..20: note = chemically synthesized
  source 1..20: mol_type = other DNA
ctgatccttaaaacagttaa

SEQ ID NO: 38483 - DNA, 20 bp, synthetic construct
  misc_feature 1..20: note = chemically synthesized
  source 1..20: mol_type = other DNA
acagttaaaggtattgcctc

SEQ ID NO: 38484 - DNA, 20 bp, synthetic construct
  misc_feature 1..20: note = chemically synthesized
  source 1..20: mol_type = other DNA
taaaggtattgcctccagaa

SEQ ID NO: 38485 - DNA, 20 bp, synthetic construct
  misc_feature 1..20: note = chemically synthesized
  source 1..20: mol_type = other DNA
aaggtattgcctccagaaaa

SEQ ID NO: 38486 - DNA, 20 bp, synthetic construct
  misc_feature 1..20: note = chemically synthesized
  source 1..20: mol_type = other DNA
tattgcctccagaaaagagc

SEQ ID NO: 38487 - DNA, 20 bp, synthetic construct
  misc_feature 1..20: note = chemically synthesized
  source 1..20: mol_type = other DNA
ctccagaaaagagcaagcca

SEQ ID NO: 38488 - DNA, 20 bp, synthetic construct
  misc_feature 1..20: note = chemically synthesized
  source 1..20: mol_type = other DNA
aacatgtgtgtctcccatat

SEQ ID NO: 38489 - DNA, 20 bp, synthetic construct
  misc_feature 1..20: note = chemically synthesized
  source 1..20: mol_type = other DNA
ctcccatatcagctgtgtct

SEQ ID NO: 38490 - DNA, 20 bp, synthetic construct
  misc_feature 1..20: note = chemically synthesized
  source 1..20: mol_type = other DNA
gtatttcacatcaccgtgat

SEQ ID NO: 38491 - DNA, 20 bp, synthetic construct
  misc_feature 1..20: note = chemically synthesized
  source 1..20: mol_type = other DNA
ttcacatcaccgtgatcagt

SEQ ID NO: 38492 - DNA, 20 bp, synthetic construct
  misc_feature 1..20: note = chemically synthesized
  source 1..20: mol_type = other DNA
atcagtgagactttcattca

SEQ ID NO: 38493 - DNA, 20 bp, synthetic construct
  misc_feature 1..20: note = chemically synthesized
  source 1..20: mol_type = other DNA
tcagtgagactttcattcac

SEQ ID NO: 38494 - DNA, 20 bp, synthetic construct
  misc_feature 1..20: note = chemically synthesized
  source 1..20: mol_type = other DNA
gagactttcattcacaggtt

SEQ ID NO: 38495 - DNA, 20 bp, synthetic construct
  misc_feature 1..20: note = chemically synthesized
  source 1..20: mol_type = other DNA
agactttcattcacaggttt

SEQ ID NO: 38496 - DNA, 20 bp, synthetic construct
  misc_feature 1..20: note = chemically synthesized
  source 1..20: mol_type = other DNA
tgggaaacatgcaccacatg

SEQ ID NO: 38497 - DNA, 20 bp, synthetic construct
  misc_feature 1..20: note = chemically synthesized
  source 1..20: mol_type = other DNA
catgtggtgcacattaccgt

SEQ ID NO: 38498 - DNA, 20 bp, synthetic construct
  misc_feature 1..20: note = chemically synthesized
  source 1..20: mol_type = other DNA
ttcatgaaccctattatata

SEQ ID NO: 38499 - DNA, 20 bp, synthetic construct
  misc_feature 1..20: note = chemically synthesized
  source 1..20: mol_type = other DNA
attatatacagcatcaaacc

SEQ ID NO: 38500 - DNA, 20 bp, synthetic construct
  misc_feature 1..20: note = chemically synthesized
  source 1..20: mol_type = other DNA
atatacagcatcaaaccaag

SEQ ID NO: 38501 - DNA, 20 bp, synthetic construct
  misc_feature 1..20: note = chemically synthesized
  source 1..20: mol_type = other DNA
catcaaaccaagcagatcca

SEQ ID NO: 38502 - DNA, 20 bp, synthetic construct
  misc_feature 1..20: note = chemically synthesized
  source 1..20: mol_type = other DNA
caaaccaagcagatccaaag

SEQ ID NO: 38503 - DNA, 20 bp, synthetic construct
  misc_feature 1..20: note = chemically synthesized
  source 1..20: mol_type = other DNA
agcattgttcgcctattttc

SEQ ID NO: 38504 - DNA, 20 bp, synthetic construct
  misc_feature 1..20: note = chemically synthesized
  source 1..20: mol_type = other DNA
gcattgttcgcctattttct

SEQ ID NO: 38505 - DNA, 20 bp, synthetic construct
  misc_feature 1..20: note = chemically synthesized
  source 1..20: mol_type = other DNA
gttcgcctattttctgggca

SEQ ID NO: 38506 - DNA, 20 bp, synthetic construct
  misc_feature 1..20: note = chemically synthesized
  source 1..20: mol_type = other DNA
cctattttctgggcacagaa

SEQ ID NO: 38507 - DNA, 20 bp, synthetic construct
  misc_feature 1..20: note = chemically synthesized
  source 1..20: mol_type = other DNA
ttctgggcacagaatggctt

SEQ ID NO: 38508 - DNA, 20 bp, synthetic construct
  misc_feature 1..20: note = chemically synthesized
  source 1..20: mol_type = other DNA
aatggcttgagccctttttt

SEQ ID NO: 38509 - DNA, 20 bp, synthetic construct
  misc_feature 1..20: note = chemically synthesized
  source 1..20: mol_type = other DNA
tttgtgatcttcatgatttc

SEQ ID NO: 38510 - DNA, 20 bp, synthetic construct
  misc_feature 1..20: note = chemically synthesized
  source 1..20: mol_type = other DNA
ttgtgatcttcatgatttct

SEQ ID NO: 38511 - DNA, 20 bp, synthetic construct
  misc_feature 1..20: note = chemically synthesized
  source 1..20: mol_type = other DNA
tcatgatttctgggcctttt

SEQ ID NO: 38512 - DNA, 20 bp, synthetic construct
  misc_feature 1..20: note = chemically synthesized
  source 1..20: mol_type = other DNA
ttctgggccttttgagtaat

SEQ ID NO: 38513 - DNA, 20 bp, synthetic construct
  misc_feature 1..20: note = chemically synthesized
  source 1..20: mol_type = other DNA
gggccttttgagtaattgga

SEQ ID NO: 38514 - DNA, 20 bp, synthetic construct
  misc_feature 1..20: note = chemically synthesized
  source 1..20: mol_type = other DNA
ggccttttgagtaattggaa

SEQ ID NO: 38515 - DNA, 20 bp, synthetic construct
  misc_feature 1..20: note = chemically synthesized
  source 1..20: mol_type = other DNA
ccttttgagtaattggaaag

SEQ ID NO: 38516 - DNA, 20 bp, synthetic construct
  misc_feature 1..20: note = chemically synthesized
  source 1..20: mol_type = other DNA
atacccaatatctcttgtat

SEQ ID NO: 38517 - DNA, 20 bp, synthetic construct
  misc_feature 1..20: note = chemically synthesized
  source 1..20: mol_type = other DNA
aatatctcttgtatcagtgt

SEQ ID NO: 38518 - DNA, 20 bp, synthetic construct
  misc_feature 1..20: note = chemically synthesized
  source 1..20: mol_type = other DNA
tctcttgtatcagtgttaga

SEQ ID NO: 38519 - DNA, 20 bp, synthetic construct
  misc_feature 1..20: note = chemically synthesized
  source 1..20: mol_type = other DNA
ctcttgtatcagtgttagat

SEQ ID NO: 38520 - DNA, 20 bp, synthetic construct
  misc_feature 1..20: note = chemically synthesized
  source 1..20: mol_type = other DNA
taggctttaactattatcta

SEQ ID NO: 38521 - DNA, 20 bp, synthetic construct
  misc_feature 1..20: note = chemically synthesized
  source 1..20: mol_type = other DNA
taactattatctaaagtgaa

SEQ ID NO: 38522 - DNA, 20 bp, synthetic construct
  misc_feature 1..20: note = chemically synthesized
  source 1..20: mol_type = other DNA
atctaaagtgaaaagctaca

SEQ ID NO: 38523 - DNA, 20 bp, synthetic construct
  misc_feature 1..20: note = chemically synthesized
  source 1..20: mol_type = other DNA
tgtataaatgtattcatatg

SEQ ID NO: 38524 - DNA, 20 bp, synthetic construct
  misc_feature 1..20: note = chemically synthesized
  source 1..20: mol_type = other DNA
tgtattcatatgtagatgta

SEQ ID NO: 38525 - DNA, 20 bp, synthetic construct
  misc_feature 1..20: note = chemically synthesized
  source 1..20: mol_type = other DNA
tgtagatgtaaagctttatc

SEQ ID NO: 38526 - DNA, 20 bp, synthetic construct
  misc_feature 1..20: note = chemically synthesized
  source 1..20: mol_type = other DNA
gtagatgtaaagctttatcg

SEQ ID NO: 38527 - DNA, 20 bp, synthetic construct
  misc_feature 1..20: note = chemically synthesized
  source 1..20: mol_type = other DNA
tagatgtaaagctttatcga

SEQ ID NO: 38528 - DNA, 20 bp, synthetic construct
  misc_feature 1..20: note = chemically synthesized
  source 1..20: mol_type = other DNA
gatgtaaagctttatcgagg

SEQ ID NO: 38529 - DNA, 20 bp, synthetic construct
  misc_feature 1..20: note = chemically synthesized
  source 1..20: mol_type = other DNA
ctataatttacctatctatt

SEQ ID NO: 38530 - DNA, 20 bp, synthetic construct
  misc_feature 1..20: note = chemically synthesized
  source 1..20: mol_type = other DNA
ataatttacctatctattga

SEQ ID NO: 38531 - DNA, 20 bp, synthetic construct
  misc_feature 1..20: note = chemically synthesized
  source 1..20: mol_type = other DNA
acctatctattgagagatac

SEQ ID NO: 38532 - DNA, 20 bp, synthetic construct
  misc_feature 1..20: note = chemically synthesized
  source 1..20: mol_type = other DNA
cctatctattgagagatact

SEQ ID NO: 38533 - DNA, 20 bp, synthetic construct
  misc_feature 1..20: note = chemically synthesized
  source 1..20: mol_type = other DNA
tctattgagagatactagga

SEQ ID NO: 38534 - DNA, 20 bp, synthetic construct
  misc_feature 1..20: note = chemically synthesized
  source 1..20: mol_type = other DNA
attgagagatactaggaaag

SEQ ID NO: 38535 - DNA, 20 bp, synthetic construct
  misc_feature 1..20: note = chemically synthesized
  source 1..20: mol_type = other DNA
aagtggaatactattgaata

SEQ ID NO: 38536 - DNA, 20 bp, synthetic construct
  misc_feature 1..20: note = chemically synthesized
  source 1..20: mol_type = other DNA
gtggaatactattgaatatg

SEQ ID NO: 38537 - DNA, 20 bp, synthetic construct
  misc_feature 1..20: note = chemically synthesized
  source 1..20: mol_type = other DNA
gaatatggagataaaacatg

SEQ ID NO: 38538 - DNA, 20 bp, synthetic construct
  misc_feature 1..20: note = chemically synthesized
  source 1..20: mol_type = other DNA
tagataaataccctaataat

SEQ ID NO: 38539 - DNA, 20 bp, synthetic construct
  misc_feature 1..20: note = chemically synthesized
  source 1..20: mol_type = other DNA
agataaataccctaataatc

SEQ ID NO: 38540 - DNA, 20 bp, synthetic construct
  misc_feature 1..20: note = chemically synthesized
  source 1..20: mol_type = other DNA
gataaataccctaataatca

SEQ ID NO: 38541 - DNA, 20 bp, synthetic construct
  misc_feature 1..20: note = chemically synthesized
  source 1..20: mol_type = other DNA
cctaataatcagggaaaata

SEQ ID NO: 38542 - DNA, 20 bp, synthetic construct
  misc_feature 1..20: note = chemically synthesized
  source 1..20: mol_type = other DNA
tattcataacctgtattcat

SEQ ID NO: 38543 - DNA, 20 bp, synthetic construct
  misc_feature 1..20: note = chemically synthesized
  source 1..20: mol_type = other DNA
cctgtattcataagaactga

SEQ ID NO: 38544 - DNA, 20 bp, synthetic construct
  misc_feature 1..20: note = chemically synthesized
  source 1..20: mol_type = other DNA
aagaactgaaagtaccattt

SEQ ID NO: 38545 - DNA, 20 bp, synthetic construct
  misc_feature 1..20: note = chemically synthesized
  source 1..20: mol_type = other DNA
agaactgaaagtaccatttt

SEQ ID NO: 38546 - DNA, 20 bp, synthetic construct
  misc_feature 1..20: note = chemically synthesized
  source 1..20: mol_type = other DNA
actgaaagtaccattttagg

SEQ ID NO: 38547 - DNA, 20 bp, synthetic construct
  misc_feature 1..20: note = chemically synthesized
  source 1..20: mol_type = other DNA
tgaaagtaccattttaggaa

SEQ ID NO: 38548 - DNA, 20 bp, synthetic construct
  misc_feature 1..20: note = chemically synthesized
  source 1..20: mol_type = other DNA
gtaccattttaggaagagtc

SEQ ID NO: 38549 - DNA, 20 bp, synthetic construct
  misc_feature 1..20: note = chemically synthesized
  source 1..20: mol_type = other DNA
ccattttaggaagagtcaag

SEQ ID NO: 38550 - DNA, 20 bp, synthetic construct
  misc_feature 1..20: note = chemically synthesized
  source 1..20: mol_type = other DNA
tttaggaagagtcaagtggc

SEQ ID NO: 38551 - DNA, 20 bp, synthetic construct
  misc_feature 1..20: note = chemically synthesized
  source 1..20: mol_type = other DNA
gaagagtcaagtggccagtc

SEQ ID NO: 38552 - DNA, 20 bp, synthetic construct
  misc_feature 1..20: note = chemically synthesized
  source 1..20: mol_type = other DNA
tggccagtctagttcaacca

SEQ ID NO: 38553 - DNA, 20 bp, synthetic construct
  misc_feature 1..20: note = chemically synthesized
  source 1..20: mol_type = other DNA
tctagttcaaccaaagccta

SEQ ID NO: 38554 - DNA, 20 bp, synthetic construct
  misc_feature 1..20: note = chemically synthesized
  source 1..20: mol_type = other DNA
agttcaaccaaagcctacag

SEQ ID NO: 38555 - DNA, 20 bp, synthetic construct
  misc_feature 1..20: note = chemically synthesized
  source 1..20: mol_type = other DNA
gttcaaccaaagcctacaga

SEQ ID NO: 38556 - DNA, 20 bp, synthetic construct
  misc_feature 1..20: note = chemically synthesized
  source 1..20: mol_type = other DNA
gaaggaaaaatgtgcaattg

SEQ ID NO: 38557 - DNA, 20 bp, synthetic construct
  misc_feature 1..20: note = chemically synthesized
  source 1..20: mol_type = other DNA
aaaatgtgcaattgcagatc

SEQ ID NO: 38558 - DNA, 20 bp, synthetic construct
  misc_feature 1..20: note = chemically synthesized
  source 1..20: mol_type = other DNA
tgcaattgcagatctagttt

SEQ ID NO: 38559 - DNA, 20 bp, synthetic construct
  misc_feature 1..20: note = chemically synthesized
  source 1..20: mol_type = other DNA
gatctagttttggccatata

SEQ ID NO: 38560 - DNA, 20 bp, synthetic construct
  misc_feature 1..20: note = chemically synthesized
  source 1..20: mol_type = other DNA
ggccatataaagatgaatta

SEQ ID NO: 38561 - DNA, 20 bp, synthetic construct
  misc_feature 1..20: note = chemically synthesized
  source 1..20: mol_type = other DNA
tgaattatagcatgtgaatt

SEQ ID NO: 38562 - DNA, 20 bp, synthetic construct
  misc_feature 1..20: note = chemically synthesized
  source 1..20: mol_type = other DNA
gaattatagcatgtgaattg

SEQ ID NO: 38563 - DNA, 20 bp, synthetic construct
  misc_feature 1..20: note = chemically synthesized
  source 1..20: mol_type = other DNA
tagcatgtgaattgaggtca

SEQ ID NO: 38564 - DNA, 20 bp, synthetic construct
  misc_feature 1..20: note = chemically synthesized
  source 1..20: mol_type = other DNA
atctcaaaactactctattt

SEQ ID NO: 38565 - DNA, 20 bp, synthetic construct
  misc_feature 1..20: note = chemically synthesized
  source 1..20: mol_type = other DNA
tctcaaaactactctatttc

SEQ ID NO: 38566 - DNA, 20 bp, synthetic construct
  misc_feature 1..20: note = chemically synthesized
  source 1..20: mol_type = other DNA
ctcaaaactactctatttca

SEQ ID NO: 38567 - DNA, 20 bp, synthetic construct
  misc_feature 1..20: note = chemically synthesized
  source 1..20: mol_type = other DNA
aaaactactctatttcaggg

SEQ ID NO: 38568 - DNA, 20 bp, synthetic construct
  misc_feature 1..20: note = chemically synthesized
  source 1..20: mol_type = other DNA
ttttttttttttttttaaaa

SEQ ID NO: 38569 - DNA, 20 bp, synthetic construct
  misc_feature 1..20: note = chemically synthesized
  source 1..20: mol_type = other DNA
tttattttccttcaacttat

SEQ ID NO: 38570 - DNA, 20 bp, synthetic construct
  misc_feature 1..20: note = chemically synthesized
  source 1..20: mol_type = other DNA
ttattttccttcaacttatt

SEQ ID NO: 38571 - DNA, 20 bp, synthetic construct
  misc_feature 1..20: note = chemically synthesized
  source 1..20: mol_type = other DNA
ttttccttcaacttattagg

SEQ ID NO: 38572 - DNA, 20 bp, synthetic construct
  misc_feature 1..20: note = chemically synthesized
  source 1..20: mol_type = other DNA
tttccttcaacttattaggt

SEQ ID NO: 38573 - DNA, 20 bp, synthetic construct
  misc_feature 1..20: note = chemically synthesized
  source 1..20: mol_type = other DNA
caacttattaggtaggtgca

SEQ ID NO: 38574 - DNA, 20 bp, synthetic construct
  misc_feature 1..20: note = chemically synthesized
  source 1..20: mol_type = other DNA
aacttattaggtaggtgcaa

SEQ ID NO: 38575 - DNA, 20 bp, synthetic construct
  misc_feature 1..20: note = chemically synthesized
  source 1..20: mol_type = other DNA
ggtaggtgcaaaggtaattg

SEQ ID NO: 38576 - DNA, 20 bp, synthetic construct
  misc_feature 1..20: note = chemically synthesized
  source 1..20: mol_type = other DNA
gcaaaggtaattgcagttca

SEQ ID NO: 38577 - DNA, 20 bp, synthetic construct
  misc_feature 1..20: note = chemically synthesized
  source 1..20: mol_type = other DNA
gtaccaacataatatatttt

SEQ ID NO: 38578 - DNA, 20 bp, synthetic construct
  misc_feature 1..20: note = chemically synthesized
  source 1..20: mol_type = other DNA
acataatatattttaagttc

SEQ ID NO: 38579 - DNA, 20 bp, synthetic construct
  misc_feature 1..20: note = chemically synthesized
  source 1..20: mol_type = other DNA
cataatatattttaagttcc

SEQ ID NO: 38580 - DNA, 20 bp, synthetic construct
  misc_feature 1..20: note = chemically synthesized
  source 1..20: mol_type = other DNA
ataatatattttaagttcca

SEQ ID NO: 38581 - DNA, 20 bp, synthetic construct
  misc_feature 1..20: note = chemically synthesized
  source 1..20: mol_type = other DNA
taagttccagggcacatgtg

SEQ ID NO: 38582 - DNA, 20 bp, synthetic construct
  misc_feature 1..20: note = chemically synthesized
  source 1..20: mol_type = other DNA
aagttccagggcacatgtgc

SEQ ID NO: 38583 - DNA, 20 bp, synthetic construct
  misc_feature 1..20: note = chemically synthesized
  source 1..20: mol_type = other DNA
gggcacatgtgcaggatgtg

SEQ ID NO: 38584 - DNA, 20 bp, synthetic construct
  misc_feature 1..20: note = chemically synthesized
  source 1..20: mol_type = other DNA
ggcacatgtgcaggatgtgc

SEQ ID NO: 38585 - DNA, 20 bp, synthetic construct
  misc_feature 1..20: note = chemically synthesized
  source 1..20: mol_type = other DNA
ggatgtgcaggtttattaca

SEQ ID NO: 38586 - DNA, 20 bp, synthetic construct
  misc_feature 1..20: note = chemically synthesized
  source 1..20: mol_type = other DNA
gatgtgcaggtttattacat

SEQ ID NO: 38587 - DNA, 20 bp, synthetic construct
  misc_feature 1..20: note = chemically synthesized
  source 1..20: mol_type = other DNA
ataggtaaatgtgtgccatg

SEQ ID NO: 38588 - DNA, 20 bp, synthetic construct
  misc_feature 1..20: note = chemically synthesized
  source 1..20: mol_type = other DNA
taggtaaatgtgtgccatgc

SEQ ID NO: 38589 - DNA, 20 bp, synthetic construct
  misc_feature 1..20: note = chemically synthesized
  source 1..20: mol_type = other DNA
tgcaggtttgctgcattcgt

SEQ ID NO: 38590 - DNA, 20 bp, synthetic construct
  misc_feature 1..20: note = chemically synthesized
  source 1..20: mol_type = other DNA
cattcgttagctattcttcc

SEQ ID NO: 38591 - DNA, 20 bp, synthetic construct
  misc_feature 1..20: note = chemically synthesized
  source 1..20: mol_type = other DNA
ctctcctccccacccactac

SEQ ID NO: 38592 - DNA, 20 bp, synthetic construct
  misc_feature 1..20: note = chemically synthesized
  source 1..20: mol_type = other DNA
cctccccacccactaccgga

SEQ ID NO: 38593 - DNA, 20 bp, synthetic construct
  misc_feature 1..20: note = chemically synthesized
  source 1..20: mol_type = other DNA
ctccccacccactaccggac

SEQ ID NO: 38594 - DNA, 20 bp, synthetic construct
  misc_feature 1..20: note = chemically synthesized
  source 1..20: mol_type = other DNA
ctgtgtgtgttgttccccac

SEQ ID NO: 38595 - DNA, 20 bp, synthetic construct
  misc_feature 1..20: note = chemically synthesized
  source 1..20: mol_type = other DNA
gtccatgtgttctcactgtt

SEQ ID NO: 38596 - DNA, 20 bp, synthetic construct
  misc_feature 1..20: note = chemically synthesized
  source 1..20: mol_type = other DNA
ttcagctcccatttctgtgt

SEQ ID NO: 38597 - DNA, 20 bp, synthetic construct
  misc_feature 1..20: note = chemically synthesized
  source 1..20: mol_type = other DNA
tgtgtgagaacatgtgtgtt

SEQ ID NO: 38598 - DNA, 20 bp, synthetic construct
  misc_feature 1..20: note = chemically synthesized
  source 1..20: mol_type = other DNA
ttggttttctgttcctgtgt

SEQ ID NO: 38599 - DNA, 20 bp, synthetic construct
  misc_feature 1..20: note = chemically synthesized
  source 1..20: mol_type = other DNA
tgttcctgtgttagtttgat

SEQ ID NO: 38600 - DNA, 20 bp, synthetic construct
  misc_feature 1..20: note = chemically synthesized
  source 1..20: mol_type = other DNA
gttcctgtgttagtttgatg

SEQ ID NO: 38601 - DNA, 20 bp, synthetic construct
  misc_feature 1..20: note = chemically synthesized
  source 1..20: mol_type = other DNA
tgttagtttgatgaggataa

SEQ ID NO: 38602 - DNA, 20 bp, synthetic construct
  misc_feature 1..20: note = chemically synthesized
  source 1..20: mol_type = other DNA
ttgatgaggataatggcttc

SEQ ID NO: 38603 - DNA, 20 bp, synthetic construct
  misc_feature 1..20: note = chemically synthesized
  source 1..20: mol_type = other DNA
agctccattcatgtccctgc

SEQ ID NO: 38604 - DNA, 20 bp, synthetic construct
  misc_feature 1..20: note = chemically synthesized
  source 1..20: mol_type = other DNA
gctccattcatgtccctgca

SEQ ID NO: 38605 - DNA, 20 bp, synthetic construct
  misc_feature 1..20: note = chemically synthesized
  source 1..20: mol_type = other DNA
cacaatccttttccttttta

SEQ ID NO: 38606 - DNA, 20 bp, synthetic construct
  misc_feature 1..20: note = chemically synthesized
  source 1..20: mol_type = other DNA
ttttcctttttatggctgta

SEQ ID NO: 38607 - DNA, 20 bp, synthetic construct
  misc_feature 1..20: note = chemically synthesized
  source 1..20: mol_type = other DNA
tatggctgtatagtattcca

SEQ ID NO: 38608 - DNA, 20 bp, synthetic construct
  misc_feature 1..20: note = chemically synthesized
  source 1..20: mol_type = other DNA
tttatccactctatcattga

SEQ ID NO: 38609 - DNA, 20 bp, synthetic construct
  misc_feature 1..20: note = chemically synthesized
  source 1..20: mol_type = other DNA
ctctatcattgatggacatt

SEQ ID NO: 38610 - DNA, 20 bp, synthetic construct
  misc_feature 1..20: note = chemically synthesized
  source 1..20: mol_type = other DNA
tctatcattgatggacattt

SEQ ID NO: 38611 - DNA, 20 bp, synthetic construct
  misc_feature 1..20: note = chemically synthesized
  source 1..20: mol_type = other DNA
tttgggttgattccacatct

SEQ ID NO: 38612 - DNA, 20 bp, synthetic construct
  misc_feature 1..20: note = chemically synthesized
  source 1..20: mol_type = other DNA
aataatgctgcaatgaacat

SEQ ID NO: 38613 - DNA, 20 bp, synthetic construct
  misc_feature 1..20: note = chemically synthesized
  source 1..20: mol_type = other DNA
gcatgcctgtatttttataa

SEQ ID NO: 38614 - DNA, 20 bp, synthetic construct
  misc_feature 1..20: note = chemically synthesized
  source 1..20: mol_type = other DNA
tagattgatttatattcctt

SEQ ID NO: 38615 - DNA, 20 bp, synthetic construct
  misc_feature 1..20: note = chemically synthesized
  source 1..20: mol_type = other DNA
agattgatttatattccttt

SEQ ID NO: 38616 - DNA, 20 bp, synthetic construct
  misc_feature 1..20: note = chemically synthesized
  source 1..20: mol_type = other DNA
tattcctttgggtatatacc

SEQ ID NO: 38617 - DNA, 20 bp, synthetic construct
  misc_feature 1..20: note = chemically synthesized
  source 1..20: mol_type = other DNA
ttgggtatatacccagtaat

SEQ ID NO: 38618 - DNA, 20 bp, synthetic construct
  misc_feature 1..20: note = chemically synthesized
  source 1..20: mol_type = other DNA
tacccagtaatgagattgct

SEQ ID NO: 38619 - DNA, 20 bp, synthetic construct
  misc_feature 1..20: note = chemically synthesized
  source 1..20: mol_type = other DNA
agtaatgagattgctgagtc

SEQ ID NO: 38620 - DNA, 20 bp, synthetic construct
  misc_feature 1..20: note = chemically synthesized
  source 1..20: mol_type = other DNA
aatgagattgctgagtcaag

SEQ ID NO: 38621 - DNA, 20 bp, synthetic construct
  misc_feature 1..20: note = chemically synthesized
  source 1..20: mol_type = other DNA
atttctgcttctacatcttt

SEQ ID NO: 38622 - DNA, 20 bp, synthetic construct
  misc_feature 1..20: note = chemically synthesized
  source 1..20: mol_type = other DNA
tttctgcttctacatctttg

SEQ ID NO: 38623 - DNA, 20 bp, synthetic construct
  misc_feature 1..20: note = chemically synthesized
  source 1..20: mol_type = other DNA
tgcttctacatctttgagga

SEQ ID NO: 38624 - DNA, 20 bp, synthetic construct
  misc_feature 1..20: note = chemically synthesized
  source 1..20: mol_type = other DNA
gcttctacatctttgaggaa

SEQ ID NO: 38625 - DNA, 20 bp, synthetic construct
  misc_feature 1..20: note = chemically synthesized
  source 1..20: mol_type = other DNA
ctaatttactctcccgttaa

SEQ ID NO: 38626 - DNA, 20 bp, synthetic construct
  misc_feature 1..20: note = chemically synthesized
  source 1..20: mol_type = other DNA
ctctcccgttaacagtgtaa

SEQ ID NO: 38627 - DNA, 20 bp, synthetic construct
  misc_feature 1..20: note = chemically synthesized
  source 1..20: mol_type = other DNA
ctttctctctgcaaccttgc

SEQ ID NO: 38628 - DNA, 20 bp, synthetic construct
  misc_feature 1..20: note = chemically synthesized
  source 1..20: mol_type = other DNA
ttaataattgccattctgac

SEQ ID NO: 38629 - DNA, 20 bp, synthetic construct
  misc_feature 1..20: note = chemically synthesized
  source 1..20: mol_type = other DNA
attgccattctgactggtgt

SEQ ID NO: 38630 - DNA, 20 bp, synthetic construct
  misc_feature 1..20: note = chemically synthesized
  source 1..20: mol_type = other DNA
ccattctgactggtgtgaga

SEQ ID NO: 38631 - DNA, 20 bp, synthetic construct
  misc_feature 1..20: note = chemically synthesized
  source 1..20: mol_type = other DNA
tgtgagatggtatcccattg

SEQ ID NO: 38632 - DNA, 20 bp, synthetic construct
  misc_feature 1..20: note = chemically synthesized
  source 1..20: mol_type = other DNA
atttgcatttttctaatgac

SEQ ID NO: 38633 - DNA, 20 bp, synthetic construct
  misc_feature 1..20: note = chemically synthesized
  source 1..20: mol_type = other DNA
gcatttttctaatgaccagt

SEQ ID NO: 38634 - DNA, 20 bp, synthetic construct
  misc_feature 1..20: note = chemically synthesized
  source 1..20: mol_type = other DNA
catttttctaatgaccagta

SEQ ID NO: 38635 - DNA, 20 bp, synthetic construct
  misc_feature 1..20: note = chemically synthesized
  source 1..20: mol_type = other DNA
ttctaatgaccagtaaggtt

SEQ ID NO: 38636 - DNA, 20 bp, synthetic construct
  misc_feature 1..20: note = chemically synthesized
  source 1..20: mol_type = other DNA
tttttttttcatatgtttat

SEQ ID NO: 38637 - DNA, 20 bp, synthetic construct
  misc_feature 1..20: note = chemically synthesized
  source 1..20: mol_type = other DNA
ttttttcatatgtttattag

SEQ ID NO: 38638 - DNA, 20 bp, synthetic construct
  misc_feature 1..20: note = chemically synthesized
  source 1..20: mol_type = other DNA
agaagcatgaatgtcttctt

SEQ ID NO: 38639 - DNA, 20 bp, synthetic construct
  misc_feature 1..20: note = chemically synthesized
  source 1..20: mol_type = other DNA
aagcatgaatgtcttcttta

SEQ ID NO: 38640 - DNA, 20 bp, synthetic construct
  misc_feature 1..20: note = chemically synthesized
  source 1..20: mol_type = other DNA
catgaatgtcttctttagag

SEQ ID NO: 38641 - DNA, 20 bp, synthetic construct
  misc_feature 1..20: note = chemically synthesized
  source 1..20: mol_type = other DNA
tgtcattccccactttttaa

SEQ ID NO: 38642 - DNA, 20 bp, synthetic construct
  misc_feature 1..20: note = chemically synthesized
  source 1..20: mol_type = other DNA
gtcattccccactttttaat

SEQ ID NO: 38643 - DNA, 20 bp, synthetic construct
  misc_feature 1..20: note = chemically synthesized
  source 1..20: mol_type = other DNA
tcattccccactttttaatg

SEQ ID NO: 38644 - DNA, 20 bp, synthetic construct
  misc_feature 1..20: note = chemically synthesized
  source 1..20: mol_type = other DNA
tttttcttgtaaatttgttt

SEQ ID NO: 38645 - DNA, 20 bp, synthetic construct
  misc_feature 1..20: note = chemically synthesized
  source 1..20: mol_type = other DNA
aaatttgttttagttcctca

SEQ ID NO: 38646 - DNA, 20 bp, synthetic construct
  misc_feature 1..20: note = chemically synthesized
  source 1..20: mol_type = other DNA
ttttagttcctcatagactc

SEQ ID NO: 38647 - DNA, 20 bp, synthetic construct
  misc_feature 1..20: note = chemically synthesized
  source 1..20: mol_type = other DNA
tcctcatagactccagatat

SEQ ID NO: 38648 - DNA, 20 bp, synthetic construct
  misc_feature 1..20: note = chemically synthesized
  source 1..20: mol_type = other DNA
tccagatattagacttttgt

SEQ ID NO: 38649 - DNA, 20 bp, synthetic construct
  misc_feature 1..20: note = chemically synthesized
  source 1..20: mol_type = other DNA
gatattagacttttgtcaga

SEQ ID NO: 38650 - DNA, 20 bp, synthetic construct
  misc_feature 1..20: note = chemically synthesized
  source 1..20: mol_type = other DNA
tattagacttttgtcagatg

SEQ ID NO: 38651 - DNA, 20 bp, synthetic construct
  misc_feature 1..20: note = chemically synthesized
  source 1..20: mol_type = other DNA
aaaaattttcttctattctg

SEQ ID NO: 38652 - DNA, 20 bp, synthetic construct
  misc_feature 1..20: note = chemically synthesized
  source 1..20: mol_type = other DNA
aaaattttcttctattctgt

SEQ ID NO: 38653 - DNA, 20 bp, synthetic construct
  misc_feature 1..20: note = chemically synthesized
  source 1..20: mol_type = other DNA
ttgtctgttatctctgatga

SEQ ID NO: 38654 - DNA, 20 bp, synthetic construct
  misc_feature 1..20: note = chemically synthesized
  source 1..20: mol_type = other DNA
tgatagtttcttttgctgtg

SEQ ID NO: 38655 - DNA, 20 bp, synthetic construct
  misc_feature 1..20: note = chemically synthesized
  source 1..20: mol_type = other DNA
tagtttcttttgctgtgcag

SEQ ID NO: 38656 - DNA, 20 bp, synthetic construct
  misc_feature 1..20: note = chemically synthesized
  source 1..20: mol_type = other DNA
cagaagctctttaatttaat

SEQ ID NO: 38657 - DNA, 20 bp, synthetic construct
  misc_feature 1..20: note = chemically synthesized
  source 1..20: mol_type = other DNA
catttgtcaatttttttttg

SEQ ID NO: 38658 - DNA, 20 bp, synthetic construct
  misc_feature 1..20: note = chemically synthesized
  source 1..20: mol_type = other DNA
tttttttttgcagttgcttt

SEQ ID NO: 38659 - DNA, 20 bp, synthetic construct
  misc_feature 1..20: note = chemically synthesized
  source 1..20: mol_type = other DNA
gcagttgcttttggtgtctt

SEQ ID NO: 38660 - DNA, 20 bp, synthetic construct
  misc_feature 1..20: note = chemically synthesized
  source 1..20: mol_type = other DNA
atgatacaatgtcatctata

SEQ ID NO: 38661 - DNA, 20 bp, synthetic construct
  misc_feature 1..20: note = chemically synthesized
  source 1..20: mol_type = other DNA
atgtcatctataaagtttta

SEQ ID NO: 38662 - DNA, 20 bp, synthetic construct
  misc_feature 1..20: note = chemically synthesized
  source 1..20: mol_type = other DNA
tcatctataaagttttacag

SEQ ID NO: 38663 - DNA, 20 bp, synthetic construct
  misc_feature 1..20: note = chemically synthesized
  source 1..20: mol_type = other DNA
atctataaagttttacagta

SEQ ID NO: 38664 - DNA, 20 bp, synthetic construct
  misc_feature 1..20: note = chemically synthesized
  source 1..20: mol_type = other DNA
ctctaaattcataaatttcc

SEQ ID NO: 38665 - DNA, 20 bp, synthetic construct
  misc_feature 1..20: note = chemically synthesized
  source 1..20: mol_type = other DNA
ttcctagttgctcatttcat

SEQ ID NO: 38666 - DNA, 20 bp, synthetic construct
  misc_feature 1..20: note = chemically synthesized
  source 1..20: mol_type = other DNA
cttgtgttctctctaaatgc

SEQ ID NO: 38667 - DNA, 20 bp, synthetic construct
  misc_feature 1..20: note = chemically synthesized
  source 1..20: mol_type = other DNA
tgttctctctaaatgctgga

SEQ ID NO: 38668 - DNA, 20 bp, synthetic construct
  misc_feature 1..20: note = chemically synthesized
  source 1..20: mol_type = other DNA
aacatttctgatatgtccaa

SEQ ID NO: 38669 - DNA, 20 bp, synthetic construct
  misc_feature 1..20: note = chemically synthesized
  source 1..20: mol_type = other DNA
tttttattctaataaatcac

SEQ ID NO: 38670 - DNA, 20 bp, synthetic construct
  misc_feature 1..20: note = chemically synthesized
  source 1..20: mol_type = other DNA
caagtgatctcaatttgttg

SEQ ID NO: 38671 - DNA, 20 bp, synthetic construct
  misc_feature 1..20: note = chemically synthesized
  source 1..20: mol_type = other DNA
ctcaatttgttgcagcaact

SEQ ID NO: 38672 - DNA, 20 bp, synthetic construct
  misc_feature 1..20: note = chemically synthesized
  source 1..20: mol_type = other DNA
cagcaacttggaaatctcac

SEQ ID NO: 38673 - DNA, 20 bp, synthetic construct
  misc_feature 1..20: note = chemically synthesized
  source 1..20: mol_type = other DNA
agcaacttggaaatctcact

SEQ ID NO: 38674 - DNA, 20 bp, synthetic construct
  misc_feature 1..20: note = chemically synthesized
  source 1..20: mol_type = other DNA
atccttttataattgatttt

SEQ ID NO: 38675 - DNA, 20 bp, synthetic construct
  misc_feature 1..20: note = chemically synthesized
  source 1..20: mol_type = other DNA
cttttataattgattttaag

SEQ ID NO: 38676 - DNA, 20 bp, synthetic construct
  misc_feature 1..20: note = chemically synthesized
  source 1..20: mol_type = other DNA
agtttattatgtattatctc

SEQ ID NO: 38677 - DNA, 20 bp, synthetic construct
  misc_feature 1..20: note = chemically synthesized
  source 1..20: mol_type = other DNA
tatctctagtgttttatttt

SEQ ID NO: 38678 - DNA, 20 bp, synthetic construct
  misc_feature 1..20: note = chemically synthesized
  source 1..20: mol_type = other DNA
ttttagtgtacgtattttcc

SEQ ID NO: 38679 - DNA, 20 bp, synthetic construct
  misc_feature 1..20: note = chemically synthesized
  source 1..20: mol_type = other DNA
ttgctatatacacaatttaa

SEQ ID NO: 38680 - DNA, 20 bp, synthetic construct
  misc_feature 1..20: note = chemically synthesized
  source 1..20: mol_type = other DNA
attatttactttatctactg

SEQ ID NO: 38681 - DNA, 20 bp, synthetic construct
  misc_feature 1..20: note = chemically synthesized
  source 1..20: mol_type = other DNA
tactttatctactgaagtat

SEQ ID NO: 38682 - DNA, 20 bp, synthetic construct
  misc_feature 1..20: note = chemically synthesized
  source 1..20: mol_type = other DNA
ctttatctactgaagtattg

SEQ ID NO: 38683 - DNA, 20 bp, synthetic construct
  misc_feature 1..20: note = chemically synthesized
  source 1..20: mol_type = other DNA
gtattggagccatactatca

SEQ ID NO: 38684 - DNA, 20 bp, synthetic construct
  misc_feature 1..20: note = chemically synthesized
  source 1..20: mol_type = other DNA
atcaaagcccttgctgactt

SEQ ID NO: 38685 - DNA, 20 bp, synthetic construct
  misc_feature 1..20: note = chemically synthesized
  source 1..20: mol_type = other DNA
tcaaagcccttgctgacttc

SEQ ID NO: 38686 - DNA, 20 bp, synthetic construct
  misc_feature 1..20: note = chemically synthesized
  source 1..20: mol_type = other DNA
tgtacatatcctatgtttaa

SEQ ID NO: 38687 - DNA, 20 bp, synthetic construct
  misc_feature 1..20: note = chemically synthesized
  source 1..20: mol_type = other DNA
gtacatatcctatgtttaaa

SEQ ID NO: 38688 - DNA, 20 bp, synthetic construct
  misc_feature 1..20: note = chemically synthesized
  source 1..20: mol_type = other DNA
tacatatcctatgtttaaaa

SEQ ID NO: 38689 - DNA, 20 bp, synthetic construct
  misc_feature 1..20: note = chemically synthesized
  source 1..20: mol_type = other DNA
tgtttaaaagggtttgtgtt

SEQ ID NO: 38690 - DNA, 20 bp, synthetic construct
  misc_feature 1..20: note = chemically synthesized
  source 1..20: mol_type = other DNA
tttaaaagggtttgtgtttg

SEQ ID NO: 38691 - DNA, 20 bp, synthetic construct
  misc_feature 1..20: note = chemically synthesized
  source 1..20: mol_type = other DNA
ttaaaagggtttgtgtttgg

SEQ ID NO: 38692 - DNA, 20 bp, synthetic construct
  misc_feature 1..20: note = chemically synthesized
  source 1..20: mol_type = other DNA
aaaagggtttgtgtttggag

SEQ ID NO: 38693 - DNA, 20 bp, synthetic construct
  misc_feature 1..20: note = chemically synthesized
  source 1..20: mol_type = other DNA
aagggtttgtgtttggagga

SEQ ID NO: 38694 - DNA, 20 bp, synthetic construct
  misc_feature 1..20: note = chemically synthesized
  source 1..20: mol_type = other DNA
ggtttgtgtttggaggagag

SEQ ID NO: 38695 - DNA, 20 bp, synthetic construct
  misc_feature 1..20: note = chemically synthesized
  source 1..20: mol_type = other DNA
gtttgtgtttggaggagagt

SEQ ID NO: 38696 - DNA, 20 bp, synthetic construct
  misc_feature 1..20: note = chemically synthesized
  source 1..20: mol_type = other DNA
tcctcatgtgcctattttcg

SEQ ID NO: 38697 - DNA, 20 bp, synthetic construct
  misc_feature 1..20: note = chemically synthesized
  source 1..20: mol_type = other DNA
ctaatatttaatcattcctt

SEQ ID NO: 38698 - DNA, 20 bp, synthetic construct
  misc_feature 1..20: note = chemically synthesized
  source 1..20: mol_type = other DNA
attcctttggttaatttttt

SEQ ID NO: 38699 - DNA, 20 bp, synthetic construct
  misc_feature 1..20: note = chemically synthesized
  source 1..20: mol_type = other DNA
ttcctttggttaatttttta

SEQ ID NO: 38700 - DNA, 20 bp, synthetic construct
  misc_feature 1..20: note = chemically synthesized
  source 1..20: mol_type = other DNA
tcctttggttaattttttaa

SEQ ID NO: 38701 - DNA, 20 bp, synthetic construct
  misc_feature 1..20: note = chemically synthesized
  source 1..20: mol_type = other DNA
attttttaagggcactatta

SEQ ID NO: 38702 - DNA, 20 bp, synthetic construct
  misc_feature 1..20: note = chemically synthesized
  source 1..20: mol_type = other DNA
ttttttaagggcactattat

SEQ ID NO: 38703 - DNA, 20 bp, synthetic construct
  misc_feature 1..20: note = chemically synthesized
  source 1..20: mol_type = other DNA
ctattatgggtcaccttgct

SEQ ID NO: 38704 - DNA, 20 bp, synthetic construct
  misc_feature 1..20: note = chemically synthesized
  source 1..20: mol_type = other DNA
ttgctaagcaaaaatgatat

SEQ ID NO: 38705 - DNA, 20 bp, synthetic construct
  misc_feature 1..20: note = chemically synthesized
  source 1..20: mol_type = other DNA
gctaagcaaaaatgatataa

SEQ ID NO: 38706 - DNA, 20 bp, synthetic construct
  misc_feature 1..20: note = chemically synthesized
  source 1..20: mol_type = other DNA
taagcaaaaatgatataaga

SEQ ID NO: 38707 - DNA, 20 bp, synthetic construct
  misc_feature 1..20: note = chemically synthesized
  source 1..20: mol_type = other DNA
aaatgatataagagagcaaa

SEQ ID NO: 38708 - DNA, 20 bp, synthetic construct
  misc_feature 1..20: note = chemically synthesized
  source 1..20: mol_type = other DNA
tagacaaacttttcttctta

SEQ ID NO: 38709 - DNA, 20 bp, synthetic construct
  misc_feature 1..20: note = chemically synthesized
  source 1..20: mol_type = other DNA
tcttcttaaagtcttcaaat

SEQ ID NO: 38710 - DNA, 20 bp, synthetic construct
  misc_feature 1..20: note = chemically synthesized
  source 1..20: mol_type = other DNA
tcttaaagtcttcaaataag

SEQ ID NO: 38711 - DNA, 20 bp, synthetic construct
  misc_feature 1..20: note = chemically synthesized
  source 1..20: mol_type = other DNA
cttaaagtcttcaaataagt

SEQ ID NO: 38712 - DNA, 20 bp, synthetic construct
  misc_feature 1..20: note = chemically synthesized
  source 1..20: mol_type = other DNA
ttaaagtcttcaaataagtg

SEQ ID NO: 38713 - DNA, 20 bp, synthetic construct
  misc_feature 1..20: note = chemically synthesized
  source 1..20: mol_type = other DNA
ttcaaataagtggggactca

SEQ ID NO: 38714 - DNA, 20 bp, synthetic construct
  misc_feature 1..20: note = chemically synthesized
  source 1..20: mol_type = other DNA
agtggggactcaaagaataa

SEQ ID NO: 38715 - DNA, 20 bp, synthetic construct
  misc_feature 1..20: note = chemically synthesized
  source 1..20: mol_type = other DNA
aagaaatccaaatttaaaac

SEQ ID NO: 38716 - DNA, 20 bp, synthetic construct
  misc_feature 1..20: note = chemically synthesized
  source 1..20: mol_type = other DNA
aagtgctgtgattaatcata

SEQ ID NO: 38717 - DNA, 20 bp, synthetic construct
  misc_feature 1..20: note = chemically synthesized
  source 1..20: mol_type = other DNA
tgctgtgattaatcataaag

SEQ ID NO: 38718 - DNA, 20 bp, synthetic construct
  misc_feature 1..20: note = chemically synthesized
  source 1..20: mol_type = other DNA
gtgattaatcataaagcaga

SEQ ID NO: 38719 - DNA, 20 bp, synthetic construct
  misc_feature 1..20: note = chemically synthesized
  source 1..20: mol_type = other DNA
attaatcataaagcagaaag

SEQ ID NO: 38720 - DNA, 20 bp, synthetic construct
  misc_feature 1..20: note = chemically synthesized
  source 1..20: mol_type = other DNA
agcagaaagaagacactgaa

SEQ ID NO: 38721 - DNA, 20 bp, synthetic construct
  misc_feature 1..20: note = chemically synthesized
  source 1..20: mol_type = other DNA
cagaaagaagacactgaatg

SEQ ID NO: 38722 - DNA, 20 bp, synthetic construct
  misc_feature 1..20: note = chemically synthesized
  source 1..20: mol_type = other DNA
gaaagaagacactgaatgga

SEQ ID NO: 38723 - DNA, 20 bp, synthetic construct
  misc_feature 1..20: note = chemically synthesized
  source 1..20: mol_type = other DNA
aagacactgaatggagagtg

SEQ ID NO: 38724 - DNA, 20 bp, synthetic construct
  misc_feature 1..20: note = chemically synthesized
  source 1..20: mol_type = other DNA
agacactgaatggagagtgt

SEQ ID NO: 38725 - DNA, 20 bp, synthetic construct
  misc_feature 1..20: note = chemically synthesized
  source 1..20: mol_type = other DNA
ggagagtgtgggtctcaaaa

SEQ ID NO: 38726 - DNA, 20 bp, synthetic construct
  misc_feature 1..20: note = chemically synthesized
  source 1..20: mol_type = other DNA
gagagtgtgggtctcaaaaa

SEQ ID NO: 38727 - DNA, 20 bp, synthetic construct
  misc_feature 1..20: note = chemically synthesized
  source 1..20: mol_type = other DNA
gtgggtctcaaaaaaggctt

SEQ ID NO: 38728 - DNA, 20 bp, synthetic construct
  misc_feature 1..20: note = chemically synthesized
  source 1..20: mol_type = other DNA
tgggtctcaaaaaaggcttg

SEQ ID NO: 38729 - DNA, 20 bp, synthetic construct
  misc_feature 1..20: note = chemically synthesized
  source 1..20: mol_type = other DNA
tcaaaaaaggcttgaggtta

SEQ ID NO: 38730 - DNA, 20 bp, synthetic construct
  misc_feature 1..20: note = chemically synthesized
  source 1..20: mol_type = other DNA
ttgaggttatggcttgaaat

SEQ ID NO: 38731 - DNA, 20 bp, synthetic construct
  misc_feature 1..20: note = chemically synthesized
  source 1..20: mol_type = other DNA
tgaggttatggcttgaaata

SEQ ID NO: 38732 - DNA, 20 bp, synthetic construct
  misc_feature 1..20: note = chemically synthesized
  source 1..20: mol_type = other DNA
gaggttatggcttgaaataa

SEQ ID NO: 38733 - DNA, 20 bp, synthetic construct
  misc_feature 1..20: note = chemically synthesized
  source 1..20: mol_type = other DNA
ttatggcttgaaataagggt

SEQ ID NO: 38734 - DNA, 20 bp, synthetic construct
  misc_feature 1..20: note = chemically synthesized
  source 1..20: mol_type = other DNA
aaataagggtaagattccct

SEQ ID NO: 38735 - DNA, 20 bp, synthetic construct
  misc_feature 1..20: note = chemically synthesized
  source 1..20: mol_type = other DNA
aagggtaagattccctgaga

SEQ ID NO: 38736 - DNA, 20 bp, synthetic construct
  misc_feature 1..20: note = chemically synthesized
  source 1..20: mol_type = other DNA
tccctgagaaagtgtccctt

SEQ ID NO: 38737 - DNA, 20 bp, synthetic construct
  misc_feature 1..20: note = chemically synthesized
  source 1..20: mol_type = other DNA
gagaaagtgtcccttcagct

SEQ ID NO: 38738 - DNA, 20 bp, synthetic construct
  misc_feature 1..20: note = chemically synthesized
  source 1..20: mol_type = other DNA
cttcagctgagacctgaaaa

SEQ ID NO: 38739 - DNA, 20 bp, synthetic construct
  misc_feature 1..20: note = chemically synthesized
  source 1..20: mol_type = other DNA
gctgagacctgaaaatggat

SEQ ID NO: 38740 - DNA, 20 bp, synthetic construct
  misc_feature 1..20: note = chemically synthesized
  source 1..20: mol_type = other DNA
aaaatggattagaaactaac

SEQ ID NO: 38741 - DNA, 20 bp, synthetic construct
  misc_feature 1..20: note = chemically synthesized
  source 1..20: mol_type = other DNA
gaaactaactggtgaaaata

SEQ ID NO: 38742 - DNA, 20 bp, synthetic construct
  misc_feature 1..20: note = chemically synthesized
  source 1..20: mol_type = other DNA
taactggtgaaaatacagac

SEQ ID NO: 38743 - DNA, 20 bp, synthetic construct
  misc_feature 1..20: note = chemically synthesized
  source 1..20: mol_type = other DNA
aatacagacaagaatattct

SEQ ID NO: 38744 - DNA, 20 bp, synthetic construct
  misc_feature 1..20: note = chemically synthesized
  source 1..20: mol_type = other DNA
acaagaatattctaagactg

SEQ ID NO: 38745 - DNA, 20 bp, synthetic construct
  misc_feature 1..20: note = chemically synthesized
  source 1..20: mol_type = other DNA
caagaatattctaagactga

SEQ ID NO: 38746 - DNA, 20 bp, synthetic construct
  misc_feature 1..20: note = chemically synthesized
  source 1..20: mol_type = other DNA
agaatattctaagactgaag

SEQ ID NO: 38747 - DNA, 20 bp, synthetic construct
  misc_feature 1..20: note = chemically synthesized
  source 1..20: mol_type = other DNA
taagactgaaggagtgtgtg

SEQ ID NO: 38748 - DNA, 20 bp, synthetic construct
  misc_feature 1..20: note = chemically synthesized
  source 1..20: mol_type = other DNA
agactgaaggagtgtgtgtg

SEQ ID NO: 38749 - DNA, 20 bp, synthetic construct
  misc_feature 1..20: note = chemically synthesized
  source 1..20: mol_type = other DNA
aggagtgtgtgtggagacct

SEQ ID NO: 38750 - DNA, 20 bp, synthetic construct
  misc_feature 1..20: note = chemically synthesized
  source 1..20: mol_type = other DNA
gtgtgtgtggagacctcagc

SEQ ID NO: 38751 - DNA, 20 bp, synthetic construct
  misc_feature 1..20: note = chemically synthesized
  source 1..20: mol_type = other DNA
tgtgtgtggagacctcagct

SEQ ID NO: 38752 - DNA, 20 bp, synthetic construct
  misc_feature 1..20: note = chemically synthesized
  source 1..20: mol_type = other DNA
tgtggagacctcagctaggt

SEQ ID NO: 38753 - DNA, 20 bp, synthetic construct
  misc_feature 1..20: note = chemically synthesized
  source 1..20: mol_type = other DNA
tcagctaggttggtttatat

SEQ ID NO: 38754 - DNA, 20 bp, synthetic construct
  misc_feature 1..20: note = chemically synthesized
  source 1..20: mol_type = other DNA
cagctaggttggtttatatt

SEQ ID NO: 38755 - DNA, 20 bp, synthetic construct
  misc_feature 1..20: note = chemically synthesized
  source 1..20: mol_type = other DNA
agctaggttggtttatatta

SEQ ID NO: 38756 - DNA, 20 bp, synthetic construct
  misc_feature 1..20: note = chemically synthesized
  source 1..20: mol_type = other DNA
taggttggtttatattaggg

SEQ ID NO: 38757 - DNA, 20 bp, synthetic construct
  misc_feature 1..20: note = chemically synthesized
  source 1..20: mol_type = other DNA
aggttggtttatattaggga

SEQ ID NO: 38758 - DNA, 20 bp, synthetic construct
  misc_feature 1..20: note = chemically synthesized
  source 1..20: mol_type = other DNA
ttggtttatattagggaagg

SEQ ID NO: 38759 - DNA, 20 bp, synthetic construct
  misc_feature 1..20: note = chemically synthesized
  source 1..20: mol_type = other DNA
atattagggaaggtggctac

SEQ ID NO: 38760 - DNA, 20 bp, synthetic construct
  misc_feature 1..20: note = chemically synthesized
  source 1..20: mol_type = other DNA
ttagggaaggtggctactgg

SEQ ID NO: 38761 - DNA, 20 bp, synthetic construct
  misc_feature 1..20: note = chemically synthesized
  source 1..20: mol_type = other DNA
agggaaggtggctactggaa

SEQ ID NO: 38762 - DNA, 20 bp, synthetic construct
  misc_feature 1..20: note = chemically synthesized
  source 1..20: mol_type = other DNA
gggaaggtggctactggaag

SEQ ID NO: 38763 - DNA, 20 bp, synthetic construct
  misc_feature 1..20: note = chemically synthesized
  source 1..20: mol_type = other DNA
ggaaggtggctactggaaga

SEQ ID NO: 38764 - DNA, 20 bp, synthetic construct
  misc_feature 1..20: note = chemically synthesized
  source 1..20: mol_type = other DNA
tggaagagggtgtttgcttt

SEQ ID NO: 38765 - DNA, 20 bp, synthetic construct
  misc_feature 1..20: note = chemically synthesized
  source 1..20: mol_type = other DNA
aagagggtgtttgctttgag

SEQ ID NO: 38766 - DNA, 20 bp, synthetic construct
  misc_feature 1..20: note = chemically synthesized
  source 1..20: mol_type = other DNA
gagggtgtttgctttgagaa

SEQ ID NO: 38767 - DNA, 20 bp, synthetic construct
  misc_feature 1..20: note = chemically synthesized
  source 1..20: mol_type = other DNA
agggtgtttgctttgagaag

SEQ ID NO: 38768 - DNA, 20 bp, synthetic construct
  misc_feature 1..20: note = chemically synthesized
  source 1..20: mol_type = other DNA
tttgctttgagaagaggctg

SEQ ID NO: 38769 - DNA, 20 bp, synthetic construct
  misc_feature 1..20: note = chemically synthesized
  source 1..20: mol_type = other DNA
tgctttgagaagaggctgaa

SEQ ID NO: 38770 - DNA, 20 bp, synthetic construct
  misc_feature 1..20: note = chemically synthesized
  source 1..20: mol_type = other DNA
gctttgagaagaggctgaag

SEQ ID NO: 38771 - DNA, 20 bp, synthetic construct
  misc_feature 1..20: note = chemically synthesized
  source 1..20: mol_type = other DNA
ctttgagaagaggctgaaga

SEQ ID NO: 38772 - DNA, 20 bp, synthetic construct
  misc_feature 1..20: note = chemically synthesized
  source 1..20: mol_type = other DNA
tgagaagaggctgaagaggg

SEQ ID NO: 38773 - DNA, 20 bp, synthetic construct
  misc_feature 1..20: note = chemically synthesized
  source 1..20: mol_type = other DNA
gagaagaggctgaagaggga

SEQ ID NO: 38774 - DNA, 20 bp, synthetic construct
  misc_feature 1..20: note = chemically synthesized
  source 1..20: mol_type = other DNA
gaggctgaagagggaaggaa

SEQ ID NO: 38775 - DNA, 20 bp, synthetic construct
  misc_feature 1..20: note = chemically synthesized
  source 1..20: mol_type = other DNA
gagggaaggaatggccttat

SEQ ID NO: 38776 - DNA, 20 bp, synthetic construct
  misc_feature 1..20: note = chemically synthesized
  source 1..20: mol_type = other DNA
atggccttattggtcatcat

SEQ ID NO: 38777 - DNA, 20 bp, synthetic construct
  misc_feature 1..20: note = chemically synthesized
  source 1..20: mol_type = other DNA
ggccttattggtcatcataa

SEQ ID NO: 38778 - DNA, 20 bp, synthetic construct
  misc_feature 1..20: note = chemically synthesized
  source 1..20: mol_type = other DNA
attggtcatcataagagttt

SEQ ID NO: 38779 - DNA, 20 bp, synthetic construct
  misc_feature 1..20: note = chemically synthesized
  source 1..20: mol_type = other DNA
taagagtttgagtctctact

SEQ ID NO: 38780 - DNA, 20 bp, synthetic construct
  misc_feature 1..20: note = chemically synthesized
  source 1..20: mol_type = other DNA
agagtttgagtctctactcg

SEQ ID NO: 38781 - DNA, 20 bp, synthetic construct
  misc_feature 1..20: note = chemically synthesized
  source 1..20: mol_type = other DNA
tgagtctctactcggagtca

SEQ ID NO: 38782 - DNA, 20 bp, synthetic construct
  misc_feature 1..20: note = chemically synthesized
  source 1..20: mol_type = other DNA
tctctactcggagtcatgga

SEQ ID NO: 38783 - DNA, 20 bp, synthetic construct
  misc_feature 1..20: note = chemically synthesized
  source 1..20: mol_type = other DNA
gagtcatggaaagctactga

SEQ ID NO: 38784 - DNA, 20 bp, synthetic construct
  misc_feature 1..20: note = chemically synthesized
  source 1..20: mol_type = other DNA
tcatggaaagctactgaaag

SEQ ID NO: 38785 - DNA, 20 bp, synthetic construct
  misc_feature 1..20: note = chemically synthesized
  source 1..20: mol_type = other DNA
cttcaatattatttataaaa

SEQ ID NO: 38786 - DNA, 20 bp, synthetic construct
  misc_feature 1..20: note = chemically synthesized
  source 1..20: mol_type = other DNA
attatttataaaatggaatt

SEQ ID NO: 38787 - DNA, 20 bp, synthetic construct
  misc_feature 1..20: note = chemically synthesized
  source 1..20: mol_type = other DNA
ttatttataaaatggaattg

SEQ ID NO: 38788 - DNA, 20 bp, synthetic construct
  misc_feature 1..20: note = chemically synthesized
  source 1..20: mol_type = other DNA
tatttataaaatggaattga

SEQ ID NO: 38789 - DNA, 20 bp, synthetic construct
  misc_feature 1..20: note = chemically synthesized
  source 1..20: mol_type = other DNA
tttataaaatggaattgagg

SEQ ID NO: 38790 - DNA, 20 bp, synthetic construct
  misc_feature 1..20: note = chemically synthesized
  source 1..20: mol_type = other DNA
ttataaaatggaattgaggg

SEQ ID NO: 38791 - DNA, 20 bp, synthetic construct
  misc_feature 1..20: note = chemically synthesized
  source 1..20: mol_type = other DNA
taaaatggaattgagggagg

SEQ ID NO: 38792 - DNA, 20 bp, synthetic construct
  misc_feature 1..20: note = chemically synthesized
  source 1..20: mol_type = other DNA
aaaatggaattgagggaggc

SEQ ID NO: 38793 - DNA, 20 bp, synthetic construct
  misc_feature 1..20: note = chemically synthesized
  source 1..20: mol_type = other DNA
aaatggaattgagggaggca

SEQ ID NO: 38794 - DNA, 20 bp, synthetic construct
  misc_feature 1..20: note = chemically synthesized
  source 1..20: mol_type = other DNA
ggaattgagggaggcaggga

SEQ ID NO: 38795 - DNA, 20 bp, synthetic construct
  misc_feature 1..20: note = chemically synthesized
  source 1..20: mol_type = other DNA
gaattgagggaggcagggaa

SEQ ID NO: 38796 - DNA, 20 bp, synthetic construct
  misc_feature 1..20: note = chemically synthesized
  source 1..20: mol_type = other DNA
aattgagggaggcagggaaa

SEQ ID NO: 38797 - DNA, 20 bp, synthetic construct
  misc_feature 1..20: note = chemically synthesized
  source 1..20: mol_type = other DNA
tgagggaggcagggaaaggg

SEQ ID NO: 38798 - DNA, 20 bp, synthetic construct
  misc_feature 1..20: note = chemically synthesized
  source 1..20: mol_type = other DNA
gcagggaaagggcagaatat

SEQ ID NO: 38799 - DNA, 20 bp, synthetic construct
  misc_feature 1..20: note = chemically synthesized
  source 1..20: mol_type = other DNA
agggaaagggcagaatatta

SEQ ID NO: 38800 - DNA, 20 bp, synthetic construct
  misc_feature 1..20: note = chemically synthesized
  source 1..20: mol_type = other DNA
cagaatattagagtaatttg

SEQ ID NO: 38801 - DNA, 20 bp, synthetic construct
  misc_feature 1..20: note = chemically synthesized
  source 1..20: mol_type = other DNA
atattagagtaatttgaaga

SEQ ID NO: 38802 - DNA, 20 bp, synthetic construct
  misc_feature 1..20: note = chemically synthesized
  source 1..20: mol_type = other DNA
agtaatttgaagaaagataa

SEQ ID NO: 38803 - DNA, 20 bp, synthetic construct
  misc_feature 1..20: note = chemically synthesized
  source 1..20: mol_type = other DNA
aagataatagtaactcaatt

SEQ ID NO: 38804 - DNA, 20 bp, synthetic construct
  misc_feature 1..20: note = chemically synthesized
  source 1..20: mol_type = other DNA
agataatagtaactcaattt

SEQ ID NO: 38805 - DNA, 20 bp, synthetic construct
  misc_feature 1..20: note = chemically synthesized
  source 1..20: mol_type = other DNA
aatagtaactcaatttagga

SEQ ID NO: 38806 - DNA, 20 bp, synthetic construct
  misc_feature 1..20: note = chemically synthesized
  source 1..20: mol_type = other DNA
agtaactcaatttaggaaag

SEQ ID NO: 38807 - DNA, 20 bp, synthetic construct
  misc_feature 1..20: note = chemically synthesized
  source 1..20: mol_type = other DNA
tcaatttaggaaagtggaaa

SEQ ID NO: 38808 - DNA, 20 bp, synthetic construct
  misc_feature 1..20: note = chemically synthesized
  source 1..20: mol_type = other DNA
taggaaagtggaaatggtaa

SEQ ID NO: 38809 - DNA, 20 bp, synthetic construct
  misc_feature 1..20: note = chemically synthesized
  source 1..20: mol_type = other DNA
ggaaagtggaaatggtaatg

SEQ ID NO: 38810 - DNA, 20 bp, synthetic construct
  misc_feature 1..20: note = chemically synthesized
  source 1..20: mol_type = other DNA
aaagtggaaatggtaatgga

SEQ ID NO: 38811 - DNA, 20 bp, synthetic construct
  misc_feature 1..20: note = chemically synthesized
  source 1..20: mol_type = other DNA
gagagatatgacaaatattt

SEQ ID NO: 38812 - DNA, 20 bp, synthetic construct
  misc_feature 1..20: note = chemically synthesized
  source 1..20: mol_type = other DNA
agagatatgacaaatattta

SEQ ID NO: 38813 - DNA, 20 bp, synthetic construct
  misc_feature 1..20: note = chemically synthesized
  source 1..20: mol_type = other DNA
atttaaggtctaaatataat

SEQ ID NO: 38814 - DNA, 20 bp, synthetic construct
  misc_feature 1..20: note = chemically synthesized
  source 1..20: mol_type = other DNA
tttaaggtctaaatataata

SEQ ID NO: 38815 - DNA, 20 bp, synthetic construct
  misc_feature 1..20: note = chemically synthesized
  source 1..20: mol_type = other DNA
tctaaatataataaggttta

SEQ ID NO: 38816 - DNA, 20 bp, synthetic construct
  misc_feature 1..20: note = chemically synthesized
  source 1..20: mol_type = other DNA
ctaaatataataaggtttac

SEQ ID NO: 38817 - DNA, 20 bp, synthetic construct
  misc_feature 1..20: note = chemically synthesized
  source 1..20: mol_type = other DNA
aataaggtttacaggttatt

SEQ ID NO: 38818 - DNA, 20 bp, synthetic construct
  misc_feature 1..20: note = chemically synthesized
  source 1..20: mol_type = other DNA
ggtttacaggttatttagaa

SEQ ID NO: 38819 - DNA, 20 bp, synthetic construct
  misc_feature 1..20: note = chemically synthesized
  source 1..20: mol_type = other DNA
ttacaggttatttagaaaag

SEQ ID NO: 38820 - DNA, 20 bp, synthetic construct
  misc_feature 1..20: note = chemically synthesized
  source 1..20: mol_type = other DNA
acaggttatttagaaaagca

SEQ ID NO: 38821 - DNA, 20 bp, synthetic construct
  misc_feature 1..20: note = chemically synthesized
  source 1..20: mol_type = other DNA
caggttatttagaaaagcag

SEQ ID NO: 38822 - DNA, 20 bp, synthetic construct
  misc_feature 1..20: note = chemically synthesized
  source 1..20: mol_type = other DNA
ttatttagaaaagcagagga

SEQ ID NO: 38823 - DNA, 20 bp, synthetic construct
  misc_feature 1..20: note = chemically synthesized
  source 1..20: mol_type = other DNA
ttagaaaagcagaggaaaga

SEQ ID NO: 38824 - DNA, 20 bp, synthetic construct
  misc_feature 1..20: note = chemically synthesized
  source 1..20: mol_type = other DNA
agaaaagcagaggaaagaaa

SEQ ID NO: 38825 - DNA, 20 bp, synthetic construct
  misc_feature 1..20: note = chemically synthesized
  source 1..20: mol_type = other DNA
aagcagaggaaagaaagagt

SEQ ID NO: 38826 - DNA, 20 bp, synthetic construct
  misc_feature 1..20: note = chemically synthesized
  source 1..20: mol_type = other DNA
agaggaaagaaagagttgga

SEQ ID NO: 38827 - DNA, 20 bp, synthetic construct
  misc_feature 1..20: note = chemically synthesized
  source 1..20: mol_type = other DNA
gaggaaagaaagagttggaa

SEQ ID NO: 38828 - DNA, 20 bp, synthetic construct
  misc_feature 1..20: note = chemically synthesized
  source 1..20: mol_type = other DNA
ggaaagaaagagttggaaag

SEQ ID NO: 38829 - DNA, 20 bp, synthetic construct
  misc_feature 1..20: note = chemically synthesized
  source 1..20: mol_type = other DNA
atcaatttctgacatgttct

SEQ ID NO: 38830 - DNA, 20 bp, synthetic construct
  misc_feature 1..20: note = chemically synthesized
  source 1..20: mol_type = other DNA
aatttctgacatgttcttgg

SEQ ID NO: 38831 - DNA, 20 bp, synthetic construct
  misc_feature 1..20: note = chemically synthesized
  source 1..20: mol_type = other DNA
tctgacatgttcttggaaga

SEQ ID NO: 38832 - DNA, 20 bp, synthetic construct
  misc_feature 1..20: note = chemically synthesized
  source 1..20: mol_type = other DNA
ctgacatgttcttggaagaa

SEQ ID NO: 38833 - DNA, 20 bp, synthetic construct
  misc_feature 1..20: note = chemically synthesized
  source 1..20: mol_type = other DNA
acatgttcttggaagaaagg

SEQ ID NO: 38834 - DNA, 20 bp, synthetic construct
  misc_feature 1..20: note = chemically synthesized
  source 1..20: mol_type = other DNA
tggaagaaaggcagtgccaa

SEQ ID NO: 38835 - DNA, 20 bp, synthetic construct
  misc_feature 1..20: note = chemically synthesized
  source 1..20: mol_type = other DNA
agaaaggcagtgccaaaaga

SEQ ID NO: 38836 - DNA, 20 bp, synthetic construct
  misc_feature 1..20: note = chemically synthesized
  source 1..20: mol_type = other DNA
gaaaggcagtgccaaaagaa

SEQ ID NO: 38837 - DNA, 20 bp, synthetic construct
  misc_feature 1..20: note = chemically synthesized
  source 1..20: mol_type = other DNA
aggcagtgccaaaagaaagg

SEQ ID NO: 38838 - DNA, 20 bp, synthetic construct
  misc_feature 1..20: note = chemically synthesized
  source 1..20: mol_type = other DNA
attatgtattgtctataaat

SEQ ID NO: 38839 - DNA, 20 bp, synthetic construct
  misc_feature 1..20: note = chemically synthesized
  source 1..20: mol_type = other DNA
atgtattgtctataaataag

SEQ ID NO: 38840 - DNA, 20 bp, synthetic construct
  misc_feature 1..20: note = chemically synthesized
  source 1..20: mol_type = other DNA
aagaatcattataattttta

SEQ ID NO: 38841 - DNA, 20 bp, synthetic construct
  misc_feature 1..20: note = chemically synthesized
  source 1..20: mol_type = other DNA
cattataatttttaaagttg

SEQ ID NO: 38842 - DNA, 20 bp, synthetic construct
  misc_feature 1..20: note = chemically synthesized
  source 1..20: mol_type = other DNA
attataatttttaaagttgt

SEQ ID NO: 38843 - DNA, 20 bp, synthetic construct
  misc_feature 1..20: note = chemically synthesized
  source 1..20: mol_type = other DNA
ttttaaagttgtgggacact

SEQ ID NO: 38844 - DNA, 20 bp, synthetic construct
  misc_feature 1..20: note = chemically synthesized
  source 1..20: mol_type = other DNA
agttgtgggacactgagaat

SEQ ID NO: 38845 - DNA, 20 bp, synthetic construct
  misc_feature 1..20: note = chemically synthesized
  source 1..20: mol_type = other DNA
aaataataaacatgtgattt

SEQ ID NO: 38846 - DNA, 20 bp, synthetic construct
  misc_feature 1..20: note = chemically synthesized
  source 1..20: mol_type = other DNA
aataaacatgtgatttaaga

SEQ ID NO: 38847 - DNA, 20 bp, synthetic construct
  misc_feature 1..20: note = chemically synthesized
  source 1..20: mol_type = other DNA
gtgatttaagaaagcaattg

SEQ ID NO: 38848 - DNA, 20 bp, synthetic construct
  misc_feature 1..20: note = chemically synthesized
  source 1..20: mol_type = other DNA
tgatttaagaaagcaattga

SEQ ID NO: 38849 - DNA, 20 bp, synthetic construct
  misc_feature 1..20: note = chemically synthesized
  source 1..20: mol_type = other DNA
tttaagaaagcaattgaagg

SEQ ID NO: 38850 - DNA, 20 bp, synthetic construct
  misc_feature 1..20: note = chemically synthesized
  source 1..20: mol_type = other DNA
gaaggaagtatttcaaactg

SEQ ID NO: 38851 - DNA, 20 bp, synthetic construct
  misc_feature 1..20: note = chemically synthesized
  source 1..20: mol_type = other DNA
agtatttcaaactgtagaac

SEQ ID NO: 38852 - DNA, 20 bp, synthetic construct
  misc_feature 1..20: note = chemically synthesized
  source 1..20: mol_type = other DNA
gacttttaaaaacaaaatat

SEQ ID NO: 38853 - DNA, 20 bp, synthetic construct
  misc_feature 1..20: note = chemically synthesized
  source 1..20: mol_type = other DNA
atcattcattcaaatcattt

SEQ ID NO: 38854 - DNA, 20 bp, synthetic construct
  misc_feature 1..20: note = chemically synthesized
  source 1..20: mol_type = other DNA
tttctttttgcctgatcatg

SEQ ID NO: 38855 - DNA, 20 bp, synthetic construct
  misc_feature 1..20: note = chemically synthesized
  source 1..20: mol_type = other DNA
tctttttgcctgatcatgaa

SEQ ID NO: 38856 - DNA, 20 bp, synthetic construct
  misc_feature 1..20: note = chemically synthesized
  source 1..20: mol_type = other DNA
tgcctgatcatgaagagtca

SEQ ID NO: 38857 - DNA, 20 bp, synthetic construct
  misc_feature 1..20: note = chemically synthesized
  source 1..20: mol_type = other DNA
gatcatgaagagtcatagta

SEQ ID NO: 38858 - DNA, 20 bp, synthetic construct
  misc_feature 1..20: note = chemically synthesized
  source 1..20: mol_type = other DNA
atcatgaagagtcatagtaa

SEQ ID NO: 38859 - DNA, 20 bp, synthetic construct
  misc_feature 1..20: note = chemically synthesized
  source 1..20: mol_type = other DNA
tgaagagtcatagtaaaggc

SEQ ID NO: 38860 - DNA, 20 bp, synthetic construct
  misc_feature 1..20: note = chemically synthesized
  source 1..20: mol_type = other DNA
agtaaaggcaagacatatgt

SEQ ID NO: 38861 - DNA, 20 bp, synthetic construct
  misc_feature 1..20: note = chemically synthesized
  source 1..20: mol_type = other DNA
gacatatgtcagaaaatgat

SEQ ID NO: 38862 - DNA, 20 bp, synthetic construct
  misc_feature 1..20: note = chemically synthesized
  source 1..20: mol_type = other DNA
cagaaaatgatgagaattta

SEQ ID NO: 38863 - DNA, 20 bp, synthetic construct
  misc_feature 1..20: note = chemically synthesized
  source 1..20: mol_type = other DNA
tgatgagaatttacagatgc

SEQ ID NO: 38864 - DNA, 20 bp, synthetic construct
  misc_feature 1..20: note = chemically synthesized
  source 1..20: mol_type = other DNA
aatttacagatgcaagacaa

SEQ ID NO: 38865 - DNA, 20 bp, synthetic construct
  misc_feature 1..20: note = chemically synthesized
  source 1..20: mol_type = other DNA
aagacaacagaaacaaactg

SEQ ID NO: 38866 - DNA, 20 bp, synthetic construct
  misc_feature 1..20: note = chemically synthesized
  source 1..20: mol_type = other DNA
acaacagaaacaaactgaag

SEQ ID NO: 38867 - DNA, 20 bp, synthetic construct
  misc_feature 1..20: note = chemically synthesized
  source 1..20: mol_type = other DNA
actgaagcagatgacaccca

SEQ ID NO: 38868 - DNA, 20 bp, synthetic construct
  misc_feature 1..20: note = chemically synthesized
  source 1..20: mol_type = other DNA
gaagcagatgacacccaaag

SEQ ID NO: 38869 - DNA, 20 bp, synthetic construct
  misc_feature 1..20: note = chemically synthesized
  source 1..20: mol_type = other DNA
aagcagatgacacccaaaga

SEQ ID NO: 38870 - DNA, 20 bp, synthetic construct
  misc_feature 1..20: note = chemically synthesized
  source 1..20: mol_type = other DNA
agatgacacccaaagaaggt

SEQ ID NO: 38871 - DNA, 20 bp, synthetic construct
  misc_feature 1..20: note = chemically synthesized
  source 1..20: mol_type = other DNA
atgacacccaaagaaggtca

SEQ ID NO: 38872 - DNA, 20 bp, synthetic construct
  misc_feature 1..20: note = chemically synthesized
  source 1..20: mol_type = other DNA
cccaaagaaggtcagagaat

SEQ ID NO: 38873 - DNA, 20 bp, synthetic construct
  misc_feature 1..20: note = chemically synthesized
  source 1..20: mol_type = other DNA
aggtcagagaataagtgaaa

SEQ ID NO: 38874 - DNA, 20 bp, synthetic construct
  misc_feature 1..20: note = chemically synthesized
  source 1..20: mol_type = other DNA
tcagagaataagtgaaacag

SEQ ID NO: 38875 - DNA, 20 bp, synthetic construct
  misc_feature 1..20: note = chemically synthesized
  source 1..20: mol_type = other DNA
gaaacagtggctcactatcc

SEQ ID NO: 38876 - DNA, 20 bp, synthetic construct
  misc_feature 1..20: note = chemically synthesized
  source 1..20: mol_type = other DNA
aaacagtggctcactatcct

SEQ ID NO: 38877 - DNA, 20 bp, synthetic construct
  misc_feature 1..20: note = chemically synthesized
  source 1..20: mol_type = other DNA
acagtggctcactatcctag

SEQ ID NO: 38878 - DNA, 20 bp, synthetic construct
  misc_feature 1..20: note = chemically synthesized
  source 1..20: mol_type = other DNA
tggctcactatcctaggaga

SEQ ID NO: 38879 - DNA, 20 bp, synthetic construct
  misc_feature 1..20: note = chemically synthesized
  source 1..20: mol_type = other DNA
ctcactatcctaggagaaag

SEQ ID NO: 38880 - DNA, 20 bp, synthetic construct
  misc_feature 1..20: note = chemically synthesized
  source 1..20: mol_type = other DNA
tcactatcctaggagaaagc

SEQ ID NO: 38881 - DNA, 20 bp, synthetic construct
  misc_feature 1..20: note = chemically synthesized
  source 1..20: mol_type = other DNA
tatcctaggagaaagcagga

SEQ ID NO: 38882 - DNA, 20 bp, synthetic construct
  misc_feature 1..20: note = chemically synthesized
  source 1..20: mol_type = other DNA
aggagaaagcaggatagatc

SEQ ID NO: 38883 - DNA, 20 bp, synthetic construct
  misc_feature 1..20: note = chemically synthesized
  source 1..20: mol_type = other DNA
ggagaaagcaggatagatcc

SEQ ID NO: 38884 - DNA, 20 bp, synthetic construct
  misc_feature 1..20: note = chemically synthesized
  source 1..20: mol_type = other DNA
ggatagatccgggtttttct

SEQ ID NO: 38885 - DNA, 20 bp, synthetic construct
  misc_feature 1..20: note = chemically synthesized
  source 1..20: mol_type = other DNA
gatagatccgggtttttctt

SEQ ID NO: 38886 - DNA, 20 bp, synthetic construct
  misc_feature 1..20: note = chemically synthesized
  source 1..20: mol_type = other DNA
ttcttgggtgtcattcactg

SEQ ID NO: 38887 - DNA, 20 bp, synthetic construct
  misc_feature 1..20: note = chemically synthesized
  source 1..20: mol_type = other DNA
ttgggtgtcattcactgaag

SEQ ID NO: 38888 - DNA, 20 bp, synthetic construct
  misc_feature 1..20: note = chemically synthesized
  source 1..20: mol_type = other DNA
gtcattcactgaagtagacc

SEQ ID NO: 38889 - DNA, 20 bp, synthetic construct
  misc_feature 1..20: note = chemically synthesized
  source 1..20: mol_type = other DNA
aagtagacccagttttaaaa

SEQ ID NO: 38890 - DNA, 20 bp, synthetic construct
  misc_feature 1..20: note = chemically synthesized
  source 1..20: mol_type = other DNA
tagacccagttttaaaatag

SEQ ID NO: 38891 - DNA, 20 bp, synthetic construct
  misc_feature 1..20: note = chemically synthesized
  source 1..20: mol_type = other DNA
caaaaaatactgccaaacgt

SEQ ID NO: 38892 - DNA, 20 bp, synthetic construct
  misc_feature 1..20: note = chemically synthesized
  source 1..20: mol_type = other DNA
tatcaattatatgatacaac

SEQ ID NO: 38893 - DNA, 20 bp, synthetic construct
  misc_feature 1..20: note = chemically synthesized
  source 1..20: mol_type = other DNA
aattatatgatacaactggt

SEQ ID NO: 38894 - DNA, 20 bp, synthetic construct
  misc_feature 1..20: note = chemically synthesized
  source 1..20: mol_type = other DNA
ttatatgatacaactggtta

SEQ ID NO: 38895 - DNA, 20 bp, synthetic construct
  misc_feature 1..20: note = chemically synthesized
  source 1..20: mol_type = other DNA
atgatacaactggttagagc

SEQ ID NO: 38896 - DNA, 20 bp, synthetic construct
  misc_feature 1..20: note = chemically synthesized
  source 1..20: mol_type = other DNA
taatctgatacaaacataaa

SEQ ID NO: 38897 - DNA, 20 bp, synthetic construct
  misc_feature 1..20: note = chemically synthesized
  source 1..20: mol_type = other DNA
aatctgatacaaacataaat

SEQ ID NO: 38898 - DNA, 20 bp, synthetic construct
  misc_feature 1..20: note = chemically synthesized
  source 1..20: mol_type = other DNA
ctgatacaaacataaatagg

SEQ ID NO: 38899 - DNA, 20 bp, synthetic construct
  misc_feature 1..20: note = chemically synthesized
  source 1..20: mol_type = other DNA
tacaaacataaataggaaga

SEQ ID NO: 38900 - DNA, 20 bp, synthetic construct
  misc_feature 1..20: note = chemically synthesized
  source 1..20: mol_type = other DNA
ttaactaaattctgaattac

SEQ ID NO: 38901 - DNA, 20 bp, synthetic construct
  misc_feature 1..20: note = chemically synthesized
  source 1..20: mol_type = other DNA
taaattctgaattaccagat

SEQ ID NO: 38902 - DNA, 20 bp, synthetic construct
  misc_feature 1..20: note = chemically synthesized
  source 1..20: mol_type = other DNA
ttaccagatgagtaaataac

SEQ ID NO: 38903 - DNA, 20 bp, synthetic construct
  misc_feature 1..20: note = chemically synthesized
  source 1..20: mol_type = other DNA
caagaatttattgaaaaatg

SEQ ID NO: 38904 - DNA, 20 bp, synthetic construct
  misc_feature 1..20: note = chemically synthesized
  source 1..20: mol_type = other DNA
gaaaaatgaagttttttcat

SEQ ID NO: 38905 - DNA, 20 bp, synthetic construct
  misc_feature 1..20: note = chemically synthesized
  source 1..20: mol_type = other DNA
tttttcatgagtgcttatgt

SEQ ID NO: 38906 - DNA, 20 bp, synthetic construct
  misc_feature 1..20: note = chemically synthesized
  source 1..20: mol_type = other DNA
agtgcttatgttagttaccc

SEQ ID NO: 38907 - DNA, 20 bp, synthetic construct
  misc_feature 1..20: note = chemically synthesized
  source 1..20: mol_type = other DNA
tgttagttaccctagatttg

SEQ ID NO: 38908 - DNA, 20 bp, synthetic construct
  misc_feature 1..20: note = chemically synthesized
  source 1..20: mol_type = other DNA
agatttgcggcatgccttca

SEQ ID NO: 38909 - DNA, 20 bp, synthetic construct
  misc_feature 1..20: note = chemically synthesized
  source 1..20: mol_type = other DNA
ccttcacagatgtccaatca

SEQ ID NO: 38910 - DNA, 20 bp, synthetic construct
  misc_feature 1..20: note = chemically synthesized
  source 1..20: mol_type = other DNA
atgtccaatcatagatattt

SEQ ID NO: 38911 - DNA, 20 bp, synthetic construct
  misc_feature 1..20: note = chemically synthesized
  source 1..20: mol_type = other DNA
tgtccaatcatagatatttg

SEQ ID NO: 38912 - DNA, 20 bp, synthetic construct
  misc_feature 1..20: note = chemically synthesized
  source 1..20: mol_type = other DNA
tccaatcatagatatttgag

SEQ ID NO: 38913 - DNA, 20 bp, synthetic construct
  misc_feature 1..20: note = chemically synthesized
  source 1..20: mol_type = other DNA
ccaatcatagatatttgagg

SEQ ID NO: 38914 - DNA, 20 bp, synthetic construct
  misc_feature 1..20: note = chemically synthesized
  source 1..20: mol_type = other DNA
gatatttgaggaggaccata

SEQ ID NO: 38915 - DNA, 20 bp, synthetic construct
  misc_feature 1..20: note = chemically synthesized
  source 1..20: mol_type = other DNA
tatgcttgattctttctctc

SEQ ID NO: 38916 - DNA, 20 bp, synthetic construct
  misc_feature 1..20: note = chemically synthesized
  source 1..20: mol_type = other DNA
ttctctcaagtgaaattgtt

SEQ ID NO: 38917 - DNA, 20 bp, synthetic construct
  misc_feature 1..20: note = chemically synthesized
  source 1..20: mol_type = other DNA
atttattaaaatcaaataaa

SEQ ID NO: 38918 - DNA, 20 bp, synthetic construct
  misc_feature 1..20: note = chemically synthesized
  source 1..20: mol_type = other DNA
aaatcaaataaatggtcttt

SEQ ID NO: 38919 - DNA, 20 bp, synthetic construct
  misc_feature 1..20: note = chemically synthesized
  source 1..20: mol_type = other DNA
ataaatggtctttaagatat

SEQ ID NO: 38920 - DNA, 20 bp, synthetic construct
  misc_feature 1..20: note = chemically synthesized
  source 1..20: mol_type = other DNA
aaatggtctttaagatataa

SEQ ID NO: 38921 - DNA, 20 bp, synthetic construct
  misc_feature 1..20: note = chemically synthesized
  source 1..20: mol_type = other DNA
agatataagagactttatcc

SEQ ID NO: 38922 - DNA, 20 bp, synthetic construct
  misc_feature 1..20: note = chemically synthesized
  source 1..20: mol_type = other DNA
tatcctagtatgtatatata

SEQ ID NO: 38923 - DNA, 20 bp, synthetic construct
  misc_feature 1..20: note = chemically synthesized
  source 1..20: mol_type = other DNA
gttgtgtttgcatgtgtgtg

SEQ ID NO: 38924 - DNA, 20 bp, synthetic construct
  misc_feature 1..20: note = chemically synthesized
  source 1..20: mol_type = other DNA
tgtgtggacacctgcacatg

SEQ ID NO: 38925 - DNA, 20 bp, synthetic construct
  misc_feature 1..20: note = chemically synthesized
  source 1..20: mol_type = other DNA
aatcttttaatattttatct

SEQ ID NO: 38926 - DNA, 20 bp, synthetic construct
  misc_feature 1..20: note = chemically synthesized
  source 1..20: mol_type = other DNA
catttattgttttattttta

SEQ ID NO: 38927 - DNA, 20 bp, synthetic construct
  misc_feature 1..20: note = chemically synthesized
  source 1..20: mol_type = other DNA
ttattgttttatttttatag

SEQ ID NO: 38928 - DNA, 20 bp, synthetic construct
  misc_feature 1..20: note = chemically synthesized
  source 1..20: mol_type = other DNA
atatatacaatttgccactt

SEQ ID NO: 38929 - DNA, 20 bp, synthetic construct
  misc_feature 1..20: note = chemically synthesized
  source 1..20: mol_type = other DNA
cctttttataatgtataatg

SEQ ID NO: 38930 - DNA, 20 bp, synthetic construct
  misc_feature 1..20: note = chemically synthesized
  source 1..20: mol_type = other DNA
ttttataatgtataatgcag

SEQ ID NO: 38931 - DNA, 20 bp, synthetic construct
  misc_feature 1..20: note = chemically synthesized
  source 1..20: mol_type = other DNA
aaaactctatattgattaat

SEQ ID NO: 38932 - DNA, 20 bp, synthetic construct
  misc_feature 1..20: note = chemically synthesized
  source 1..20: mol_type = other DNA
tccatgttcttcctacactc

SEQ ID NO: 38933 - DNA, 20 bp, synthetic construct
  misc_feature 1..20: note = chemically synthesized
  source 1..20: mol_type = other DNA
ctctatgaatttgcctattc

SEQ ID NO: 38934 - DNA, 20 bp, synthetic construct
  misc_feature 1..20: note = chemically synthesized
  source 1..20: mol_type = other DNA
atgaatttgcctattctaga

SEQ ID NO: 38935 - DNA, 20 bp, synthetic construct
  misc_feature 1..20: note = chemically synthesized
  source 1..20: mol_type = other DNA
ctattctagatagctcatgt

SEQ ID NO: 38936 - DNA, 20 bp, synthetic construct
  misc_feature 1..20: note = chemically synthesized
  source 1..20: mol_type = other DNA
atagctcatgtaagtgaaat

SEQ ID NO: 38937 - DNA, 20 bp, synthetic construct
  misc_feature 1..20: note = chemically synthesized
  source 1..20: mol_type = other DNA
tgcgtatgacttattgcact

SEQ ID NO: 38938 - DNA, 20 bp, synthetic construct
  misc_feature 1..20: note = chemically synthesized
  source 1..20: mol_type = other DNA
gcgtatgacttattgcactt

SEQ ID NO: 38939 - DNA, 20 bp, synthetic construct
  misc_feature 1..20: note = chemically synthesized
  source 1..20: mol_type = other DNA
atgacttattgcacttagga

SEQ ID NO: 38940 - DNA, 20 bp, synthetic construct
  misc_feature 1..20: note = chemically synthesized
  source 1..20: mol_type = other DNA
tgcacttaggatagtttttt

SEQ ID NO: 38941 - DNA, 20 bp, synthetic construct
  misc_feature 1..20: note = chemically synthesized
  source 1..20: mol_type = other DNA
gcacttaggatagtttttta

SEQ ID NO: 38942 - DNA, 20 bp, synthetic construct
  misc_feature 1..20: note = chemically synthesized
  source 1..20: mol_type = other DNA
tttaaggtttattcatgttg

SEQ ID NO: 38943 - DNA, 20 bp, synthetic construct
  misc_feature 1..20: note = chemically synthesized
  source 1..20: mol_type = other DNA
attcatgttgtagcatgtgt

SEQ ID NO: 38944 - DNA, 20 bp, synthetic construct
  misc_feature 1..20: note = chemically synthesized
  source 1..20: mol_type = other DNA
tgtgtcagacctacttttta

SEQ ID NO: 38945 - DNA, 20 bp, synthetic construct
  misc_feature 1..20: note = chemically synthesized
  source 1..20: mol_type = other DNA
taatattctatcacatatat

SEQ ID NO: 38946 - DNA, 20 bp, synthetic construct
  misc_feature 1..20: note = chemically synthesized
  source 1..20: mol_type = other DNA
ttgatatacgcatctgttga

SEQ ID NO: 38947 - DNA, 20 bp, synthetic construct
  misc_feature 1..20: note = chemically synthesized
  source 1..20: mol_type = other DNA
cttgtattgtttctattcct

SEQ ID NO: 38948 - DNA, 20 bp, synthetic construct
  misc_feature 1..20: note = chemically synthesized
  source 1..20: mol_type = other DNA
tgtcttcccttcaatatgcc

SEQ ID NO: 38949 - DNA, 20 bp, synthetic construct
  misc_feature 1..20: note = chemically synthesized
  source 1..20: mol_type = other DNA
tctgaatattctgcttttca

SEQ ID NO: 38950 - DNA, 20 bp, synthetic construct
  misc_feature 1..20: note = chemically synthesized
  source 1..20: mol_type = other DNA
gcttttcaaagaatattcct

SEQ ID NO: 38951 - DNA, 20 bp, synthetic construct
  misc_feature 1..20: note = chemically synthesized
  source 1..20: mol_type = other DNA
atattccttggaatattcca

SEQ ID NO: 38952 - DNA, 20 bp, synthetic construct
  misc_feature 1..20: note = chemically synthesized
  source 1..20: mol_type = other DNA
ttccttggaatattccatgg

SEQ ID NO: 38953 - DNA, 20 bp, synthetic construct
  misc_feature 1..20: note = chemically synthesized
  source 1..20: mol_type = other DNA
cttggaatattccatggaag

SEQ ID NO: 38954 - DNA, 20 bp, synthetic construct
  misc_feature 1..20: note = chemically synthesized
  source 1..20: mol_type = other DNA
attccatggaagaagaaaat

SEQ ID NO: 38955 - DNA, 20 bp, synthetic construct
  misc_feature 1..20: note = chemically synthesized
  source 1..20: mol_type = other DNA
atggaagaagaaaatgagac

SEQ ID NO: 38956 - DNA, 20 bp, synthetic construct
  misc_feature 1..20: note = chemically synthesized
  source 1..20: mol_type = other DNA
agaaaatgagacaagctttc

SEQ ID NO: 38957 - DNA, 20 bp, synthetic construct
  misc_feature 1..20: note = chemically synthesized
  source 1..20: mol_type = other DNA
aaaatgagacaagctttctg

SEQ ID NO: 38958 - DNA, 20 bp, synthetic construct
  misc_feature 1..20: note = chemically synthesized
  source 1..20: mol_type = other DNA
tgagacaagctttctggaga

SEQ ID NO: 38959 - DNA, 20 bp, synthetic construct
  misc_feature 1..20: note = chemically synthesized
  source 1..20: mol_type = other DNA
gagacaagctttctggagaa

SEQ ID NO: 38960 - DNA, 20 bp, synthetic construct
  misc_feature 1..20: note = chemically synthesized
  source 1..20: mol_type = other DNA
acaagctttctggagaaagg

SEQ ID NO: 38961 - DNA, 20 bp, synthetic construct
  misc_feature 1..20: note = chemically synthesized
  source 1..20: mol_type = other DNA
ttctggagaaaggaagtttt

SEQ ID NO: 38962 - DNA, 20 bp, synthetic construct
  misc_feature 1..20: note = chemically synthesized
  source 1..20: mol_type = other DNA
agttttcagtgccttgatct

SEQ ID NO: 38963 - DNA, 20 bp, synthetic construct
  misc_feature 1..20: note = chemically synthesized
  source 1..20: mol_type = other DNA
tgactgcaacctctgcctcc

SEQ ID NO: 38964 - DNA, 20 bp, synthetic construct
  misc_feature 1..20: note = chemically synthesized
  source 1..20: mol_type = other DNA
gactgcaacctctgcctcct

SEQ ID NO: 38965 - DNA, 20 bp, synthetic construct
  misc_feature 1..20: note = chemically synthesized
  source 1..20: mol_type = other DNA
caacctctgcctcctgggtt

SEQ ID NO: 38966 - DNA, 20 bp, synthetic construct
  misc_feature 1..20: note = chemically synthesized
  source 1..20: mol_type = other DNA
tgcctcctgggttcagtttt

SEQ ID NO: 38967 - DNA, 20 bp, synthetic construct
  misc_feature 1..20: note = chemically synthesized
  source 1..20: mol_type = other DNA
ctgggttcagttttcagtta

SEQ ID NO: 38968 - DNA, 20 bp, synthetic construct
  misc_feature 1..20: note = chemically synthesized
  source 1..20: mol_type = other DNA
aacaaattttttcactcaac

SEQ ID NO: 38969 - DNA, 20 bp, synthetic construct
  misc_feature 1..20: note = chemically synthesized
  source 1..20: mol_type = other DNA
caaattttttcactcaacta

SEQ ID NO: 38970 - DNA, 20 bp, synthetic construct
  misc_feature 1..20: note = chemically synthesized
  source 1..20: mol_type = other DNA
gattttatgataatgcaata

SEQ ID NO: 38971 - DNA, 20 bp, synthetic construct
  misc_feature 1..20: note = chemically synthesized
  source 1..20: mol_type = other DNA
tgataatgcaatacagataa

SEQ ID NO: 38972 - DNA, 20 bp, synthetic construct
  misc_feature 1..20: note = chemically synthesized
  source 1..20: mol_type = other DNA
aaaagataatgcaatccttc

SEQ ID NO: 38973 - DNA, 20 bp, synthetic construct
  misc_feature 1..20: note = chemically synthesized
  source 1..20: mol_type = other DNA
cttccagacctaaaaatatg

SEQ ID NO: 38974 - DNA, 20 bp, synthetic construct
  misc_feature 1..20: note = chemically synthesized
  source 1..20: mol_type = other DNA
tatgtggcatccacatttta

SEQ ID NO: 38975 - DNA, 20 bp, synthetic construct
  misc_feature 1..20: note = chemically synthesized
  source 1..20: mol_type = other DNA
atgtggcatccacattttac

SEQ ID NO: 38976 - DNA, 20 bp, synthetic construct
  misc_feature 1..20: note = chemically synthesized
  source 1..20: mol_type = other DNA
attttacaggtacattttca

SEQ ID NO: 38977 - DNA, 20 bp, synthetic construct
  misc_feature 1..20: note = chemically synthesized
  source 1..20: mol_type = other DNA
tttacaggtacattttcacg

SEQ ID NO: 38978 - DNA, 20 bp, synthetic construct
  misc_feature 1..20: note = chemically synthesized
  source 1..20: mol_type = other DNA
caggtacattttcacggaga

SEQ ID NO: 38979 - DNA, 20 bp, synthetic construct
  misc_feature 1..20: note = chemically synthesized
  source 1..20: mol_type = other DNA
acattttcacggagaaagat

SEQ ID NO: 38980 - DNA, 20 bp, synthetic construct
  misc_feature 1..20: note = chemically synthesized
  source 1..20: mol_type = other DNA
tcacggagaaagataagaac

SEQ ID NO: 38981 - DNA, 20 bp, synthetic construct
  misc_feature 1..20: note = chemically synthesized
  source 1..20: mol_type = other DNA
tttgcaacaaatctttgctc

SEQ ID NO: 38982 - DNA, 20 bp, synthetic construct
  misc_feature 1..20: note = chemically synthesized
  source 1..20: mol_type = other DNA
tctttgctctggacttcact

SEQ ID NO: 38983 - DNA, 20 bp, synthetic construct
  misc_feature 1..20: note = chemically synthesized
  source 1..20: mol_type = other DNA
gctctggacttcactgagta

SEQ ID NO: 38984 - DNA, 20 bp, synthetic construct
  misc_feature 1..20: note = chemically synthesized
  source 1..20: mol_type = other DNA
ctttgttttgttttgttttt

SEQ ID NO: 38985 - DNA, 20 bp, synthetic construct
  misc_feature 1..20: note = chemically synthesized
  source 1..20: mol_type = other DNA
gttttgttttgtttttgaga

SEQ ID NO: 38986 - DNA, 20 bp, synthetic construct
  misc_feature 1..20: note = chemically synthesized
  source 1..20: mol_type = other DNA
tttgttttgtttttgagatg

SEQ ID NO: 38987 - DNA, 20 bp, synthetic construct
  misc_feature 1..20: note = chemically synthesized
  source 1..20: mol_type = other DNA
tggagtctcgctctgtcgcc

SEQ ID NO: 38988 - DNA, 20 bp, synthetic construct
  misc_feature 1..20: note = chemically synthesized
  source 1..20: mol_type = other DNA
ggagtctcgctctgtcgccc

SEQ ID NO: 38989 - DNA, 20 bp, synthetic construct
  misc_feature 1..20: note = chemically synthesized
  source 1..20: mol_type = other DNA
tctcgctctgtcgcccaggc

SEQ ID NO: 38990 - DNA, 20 bp, synthetic construct
  misc_feature 1..20: note = chemically synthesized
  source 1..20: mol_type = other DNA
tcgctctgtcgcccaggctg

SEQ ID NO: 38991 - DNA, 20 bp, synthetic construct
  misc_feature 1..20: note = chemically synthesized
  source 1..20: mol_type = other DNA
ctgtcgcccaggctggagtg

SEQ ID NO: 38992 - DNA, 20 bp, synthetic construct
  misc_feature 1..20: note = chemically synthesized
  source 1..20: mol_type = other DNA
tcgcccaggctggagtgcag

SEQ ID NO: 38993 - DNA, 20 bp, synthetic construct
  misc_feature 1..20: note = chemically synthesized
  source 1..20: mol_type = other DNA
ggagtgcagtggcgtgatct

SEQ ID NO: 38994 - DNA, 20 bp, synthetic construct
  misc_feature 1..20: note = chemically synthesized
  source 1..20: mol_type = other DNA
gcgtgatctcagctcactgc

SEQ ID NO: 38995 - DNA, 20 bp, synthetic construct
  misc_feature 1..20: note = chemically synthesized
  source 1..20: mol_type = other DNA
tcactgcaagctctgcctcc

SEQ ID NO: 38996 - DNA, 20 bp, synthetic construct
  misc_feature 1..20: note = chemically synthesized
  source 1..20: mol_type = other DNA
cactgcaagctctgcctccc

SEQ ID NO: 38997 - DNA, 20 bp, synthetic construct
  misc_feature 1..20: note = chemically synthesized
  source 1..20: mol_type = other DNA
ttcacgccattctcctgcct

SEQ ID NO: 38998 - DNA, 20 bp, synthetic construct
  misc_feature 1..20: note = chemically synthesized
  source 1..20: mol_type = other DNA
ttctcctgcctcagcctccc

SEQ ID NO: 38999 - DNA, 20 bp, synthetic construct
  misc_feature 1..20: note = chemically synthesized
  source 1..20: mol_type = other DNA
tcctgcctcagcctcccgag

SEQ ID NO: 39000 - DNA, 20 bp, synthetic construct
  misc_feature 1..20: note = chemically synthesized
  source 1..20: mol_type = other DNA
gcctcagcctcccgagtagc

SEQ ID NO: 39001 - DNA, 20 bp, synthetic construct
  misc_feature 1..20: note = chemically synthesized
  source 1..20: mol_type = other DNA
cctcagcctcccgagtagct

SEQ ID NO: 39002 - DNA, 20 bp, synthetic construct
  misc_feature 1..20: note = chemically synthesized
  source 1..20: mol_type = other DNA
ctcccgagtagctgggacta

SEQ ID NO: 39003 - DNA, 20 bp, synthetic construct
  misc_feature 1..20: note = chemically synthesized
  source 1..20: mol_type = other DNA
tcccgagtagctgggactac

SEQ ID NO: 39004 - DNA, 20 bp, synthetic construct
  misc_feature 1..20: note = chemically synthesized
  source 1..20: mol_type = other DNA
acaggcgcccgccaccacgc

SEQ ID NO: 39005 - DNA, 20 bp, synthetic construct
  misc_feature 1..20: note = chemically synthesized
  source 1..20: mol_type = other DNA
caggcgcccgccaccacgcc

SEQ ID NO: 39006 - DNA, 20 bp, synthetic construct
  misc_feature 1..20: note = chemically synthesized
  source 1..20: mol_type = other DNA
ggcaaatttttttgtctttt

SEQ ID NO: 39007 - DNA, 20 bp, synthetic construct
  misc_feature 1..20: note = chemically synthesized
  source 1..20: mol_type = other DNA
aaatttttttgtctttttag

SEQ ID NO: 39008 - DNA, 20 bp, synthetic construct
  misc_feature 1..20: note = chemically synthesized
  source 1..20: mol_type = other DNA
atttttttgtctttttagta

SEQ ID NO: 39009 - DNA, 20 bp, synthetic construct
  misc_feature 1..20: note = chemically synthesized
  source 1..20: mol_type = other DNA
ttttgtctttttagtagaga

SEQ ID NO: 39010 - DNA, 20 bp, synthetic construct
  misc_feature 1..20: note = chemically synthesized
  source 1..20: mol_type = other DNA
tttgtctttttagtagagac

SEQ ID NO: 39011 - DNA, 20 bp, synthetic construct
  misc_feature 1..20: note = chemically synthesized
  source 1..20: mol_type = other DNA
ttgtctttttagtagagacg

SEQ ID NO: 39012 - DNA, 20 bp, synthetic construct
  misc_feature 1..20: note = chemically synthesized
  source 1..20: mol_type = other DNA
gagacggggtttcactgtgt

SEQ ID NO: 39013 - DNA, 20 bp, synthetic construct
  misc_feature 1..20: note = chemically synthesized
  source 1..20: mol_type = other DNA
cggggtttcactgtgttagc

SEQ ID NO: 39014 - DNA, 20 bp, synthetic construct
  misc_feature 1..20: note = chemically synthesized
  source 1..20: mol_type = other DNA
ggggtttcactgtgttagcc

SEQ ID NO: 39015 - DNA, 20 bp, synthetic construct
  misc_feature 1..20: note = chemically synthesized
  source 1..20: mol_type = other DNA
tttcactgtgttagccagga

SEQ ID NO: 39016 - DNA, 20 bp, synthetic construct
  misc_feature 1..20: note = chemically synthesized
  source 1..20: mol_type = other DNA
acctcgtgatccacccgcct

SEQ ID NO: 39017 - DNA, 20 bp, synthetic construct
  misc_feature 1..20: note = chemically synthesized
  source 1..20: mol_type = other DNA
ccacccgcctcggcctccca

SEQ ID NO: 39018 - DNA, 20 bp, synthetic construct
  misc_feature 1..20: note = chemically synthesized
  source 1..20: mol_type = other DNA
gcctcggcctcccaaagtgc

SEQ ID NO: 39019 - DNA, 20 bp, synthetic construct
  misc_feature 1..20: note = chemically synthesized
  source 1..20: mol_type = other DNA
cctcggcctcccaaagtgct

SEQ ID NO: 39020 - DNA, 20 bp, synthetic construct
  misc_feature 1..20: note = chemically synthesized
  source 1..20: mol_type = other DNA
ctcccaaagtgctgggatta

SEQ ID NO: 39021 - DNA, 20 bp, synthetic construct
  misc_feature 1..20: note = chemically synthesized
  source 1..20: mol_type = other DNA
tcccaaagtgctgggattac

SEQ ID NO: 39022 - DNA, 20 bp, synthetic construct
  misc_feature 1..20: note = chemically synthesized
  source 1..20: mol_type = other DNA
agtgctgggattacaggcgt

SEQ ID NO: 39023 - DNA, 20 bp, synthetic construct
  misc_feature 1..20: note = chemically synthesized
  source 1..20: mol_type = other DNA
caggcgtgagccaccgcgcc

SEQ ID NO: 39024 - DNA, 20 bp, synthetic construct
  misc_feature 1..20: note = chemically synthesized
  source 1..20: mol_type = other DNA
tgagccaccgcgcccggcct

SEQ ID NO: 39025 - DNA, 20 bp, synthetic construct
  misc_feature 1..20: note = chemically synthesized
  source 1..20: mol_type = other DNA
caccgcgcccggcctgagta

SEQ ID NO: 39026 - DNA, 20 bp, synthetic construct
  misc_feature 1..20: note = chemically synthesized
  source 1..20: mol_type = other DNA
gcctgagtaaagttttatat

SEQ ID NO: 39027 - DNA, 20 bp, synthetic construct
  misc_feature 1..20: note = chemically synthesized
  source 1..20: mol_type = other DNA
cctgagtaaagttttatatt

SEQ ID NO: 39028 - DNA, 20 bp, synthetic construct
  misc_feature 1..20: note = chemically synthesized
  source 1..20: mol_type = other DNA
gagtaaagttttatattggg

SEQ ID NO: 39029 - DNA, 20 bp, synthetic construct
  misc_feature 1..20: note = chemically synthesized
  source 1..20: mol_type = other DNA
attgggaagacataaaaatg

SEQ ID NO: 39030 - DNA, 20 bp, synthetic construct
  misc_feature 1..20: note = chemically synthesized
  source 1..20: mol_type = other DNA
tgggaagacataaaaatgtg

SEQ ID NO: 39031 - DNA, 20 bp, synthetic construct
  misc_feature 1..20: note = chemically synthesized
  source 1..20: mol_type = other DNA
ggaagacataaaaatgtgga

SEQ ID NO: 39032 - DNA, 20 bp, synthetic construct
  misc_feature 1..20: note = chemically synthesized
  source 1..20: mol_type = other DNA
ataaaaatgtggagagaaat

SEQ ID NO: 39033 - DNA, 20 bp, synthetic construct
  misc_feature 1..20: note = chemically synthesized
  source 1..20: mol_type = other DNA
gagaaatgagatccaatcta

SEQ ID NO: 39034 - DNA, 20 bp, synthetic construct
  misc_feature 1..20: note = chemically synthesized
  source 1..20: mol_type = other DNA
ctatggaatgcttaaaaaaa

SEQ ID NO: 39035 - DNA, 20 bp, synthetic construct
  misc_feature 1..20: note = chemically synthesized
  source 1..20: mol_type = other DNA
tatggaatgcttaaaaaaat

SEQ ID NO: 39036 - DNA, 20 bp, synthetic construct
  misc_feature 1..20: note = chemically synthesized
  source 1..20: mol_type = other DNA
aatgcttaaaaaaataggtg

SEQ ID NO: 39037 - DNA, 20 bp, synthetic construct
  misc_feature 1..20: note = chemically synthesized
  source 1..20: mol_type = other DNA
atgcttaaaaaaataggtgt

SEQ ID NO: 39038 - DNA, 20 bp, synthetic construct
  misc_feature 1..20: note = chemically synthesized
  source 1..20: mol_type = other DNA
aaaaaaataggtgtaggcgc

SEQ ID NO: 39039 - DNA, 20 bp, synthetic construct
  misc_feature 1..20: note = chemically synthesized
  source 1..20: mol_type = other DNA
atttacccaatgcatgctgt

SEQ ID NO: 39040 - DNA, 20 bp, synthetic construct
  misc_feature 1..20: note = chemically synthesized
  source 1..20: mol_type = other DNA
aagcaaaattatatgctatt

SEQ ID NO: 39041 - DNA, 20 bp, synthetic construct
  misc_feature 1..20: note = chemically synthesized
  source 1..20: mol_type = other DNA
tgctattgagtacaatgttt

SEQ ID NO: 39042 - DNA, 20 bp, synthetic construct
  misc_feature 1..20: note = chemically synthesized
  source 1..20: mol_type = other DNA
atgtttaagctattgatact

SEQ ID NO: 39043 - DNA, 20 bp, synthetic construct
  misc_feature 1..20: note = chemically synthesized
  source 1..20: mol_type = other DNA
taaacacaaatcttaaaatc

SEQ ID NO: 39044 - DNA, 20 bp, synthetic construct
  misc_feature 1..20: note = chemically synthesized
  source 1..20: mol_type = other DNA
taaaatctggttatccccca

SEQ ID NO: 39045 - DNA, 20 bp, synthetic construct
  misc_feature 1..20: note = chemically synthesized
  source 1..20: mol_type = other DNA
tctgtttctcataatgtgcc

SEQ ID NO: 39046 - DNA, 20 bp, synthetic construct
  misc_feature 1..20: note = chemically synthesized
  source 1..20: mol_type = other DNA
tttctcataatgtgcccagt

SEQ ID NO: 39047 - DNA, 20 bp, synthetic construct
  misc_feature 1..20: note = chemically synthesized
  source 1..20: mol_type = other DNA
agtaagttcctaatgtttat

SEQ ID NO: 39048 - DNA, 20 bp, synthetic construct
  misc_feature 1..20: note = chemically synthesized
  source 1..20: mol_type = other DNA
cctaatgtttattagtgtgt

SEQ ID NO: 39049 - DNA, 20 bp, synthetic construct
  misc_feature 1..20: note = chemically synthesized
  source 1..20: mol_type = other DNA
aatgtttattagtgtgttgg

SEQ ID NO: 39050 - DNA, 20 bp, synthetic construct
  misc_feature 1..20: note = chemically synthesized
  source 1..20: mol_type = other DNA
atgtttattagtgtgttggt

SEQ ID NO: 39051 - DNA, 20 bp, synthetic construct
  misc_feature 1..20: note = chemically synthesized
  source 1..20: mol_type = other DNA
tccatcttgatttgctgacc

SEQ ID NO: 39052 - DNA, 20 bp, synthetic construct
  misc_feature 1..20: note = chemically synthesized
  source 1..20: mol_type = other DNA
ccatcttgatttgctgacct

SEQ ID NO: 39053 - DNA, 20 bp, synthetic construct
  misc_feature 1..20: note = chemically synthesized
  source 1..20: mol_type = other DNA
ttgatttgctgacctgggtg

SEQ ID NO: 39054 - DNA, 20 bp, synthetic construct
  misc_feature 1..20: note = chemically synthesized
  source 1..20: mol_type = other DNA
tgatttgctgacctgggtgc

SEQ ID NO: 39055 - DNA, 20 bp, synthetic construct
  misc_feature 1..20: note = chemically synthesized
  source 1..20: mol_type = other DNA
ctgggtgcaggttcttatga

SEQ ID NO: 39056 - DNA, 20 bp, synthetic construct
  misc_feature 1..20: note = chemically synthesized
  source 1..20: mol_type = other DNA
gggtgcaggttcttatgaca

SEQ ID NO: 39057 - DNA, 20 bp, synthetic construct
  misc_feature 1..20: note = chemically synthesized
  source 1..20: mol_type = other DNA
ggtgcaggttcttatgacag

SEQ ID NO: 39058 - DNA, 20 bp, synthetic construct
  misc_feature 1..20: note = chemically synthesized
  source 1..20: mol_type = other DNA
caggttcttatgacagagga

SEQ ID NO: 39059 - DNA, 20 bp, synthetic construct
  misc_feature 1..20: note = chemically synthesized
  source 1..20: mol_type = other DNA
agaggaaagactgtctttgt

SEQ ID NO: 39060 - DNA, 20 bp, synthetic construct
  misc_feature 1..20: note = chemically synthesized
  source 1..20: mol_type = other DNA
actgtctttgtaagttattt

SEQ ID NO: 39061 - DNA, 20 bp, synthetic construct
  misc_feature 1..20: note = chemically synthesized
  source 1..20: mol_type = other DNA
gtctttgtaagttattttgg

SEQ ID NO: 39062 - DNA, 20 bp, synthetic construct
  misc_feature 1..20: note = chemically synthesized
  source 1..20: mol_type = other DNA
tgtaagttattttggaagaa

SEQ ID NO: 39063 - DNA, 20 bp, synthetic construct
  misc_feature 1..20: note = chemically synthesized
  source 1..20: mol_type = other DNA
tagaaactgtgaaaaatata

SEQ ID NO: 39064 - DNA, 20 bp, synthetic construct
  misc_feature 1..20: note = chemically synthesized
  source 1..20: mol_type = other DNA
tgaaaaatatatggcttctt

SEQ ID NO: 39065 - DNA, 20 bp, synthetic construct
  misc_feature 1..20: note = chemically synthesized
  source 1..20: mol_type = other DNA
atggcttctttggtgctcat

SEQ ID NO: 39066 - DNA, 20 bp, synthetic construct
  misc_feature 1..20: note = chemically synthesized
  source 1..20: mol_type = other DNA
tggcttctttggtgctcatg

SEQ ID NO: 39067 - DNA, 20 bp, synthetic construct
  misc_feature 1..20: note = chemically synthesized
  source 1..20: mol_type = other DNA
atacatctgctcctctttta

SEQ ID NO: 39068 - DNA, 20 bp, synthetic construct
  misc_feature 1..20: note = chemically synthesized
  source 1..20: mol_type = other DNA
cctcttttacagctttatct

SEQ ID NO: 39069 - DNA, 20 bp, synthetic construct
  misc_feature 1..20: note = chemically synthesized
  source 1..20: mol_type = other DNA
ctcttttacagctttatctt

SEQ ID NO: 39070 - DNA, 20 bp, synthetic construct
  misc_feature 1..20: note = chemically synthesized
  source 1..20: mol_type = other DNA
ttttacagctttatcttagg

SEQ ID NO: 39071 - DNA, 20 bp, synthetic construct
  misc_feature 1..20: note = chemically synthesized
  source 1..20: mol_type = other DNA
tacagctttatcttaggtgg

SEQ ID NO: 39072 - DNA, 20 bp, synthetic construct
  misc_feature 1..20: note = chemically synthesized
  source 1..20: mol_type = other DNA
acagctttatcttaggtgga

SEQ ID NO: 39073 - DNA, 20 bp, synthetic construct
  misc_feature 1..20: note = chemically synthesized
  source 1..20: mol_type = other DNA
cagctttatcttaggtggaa

SEQ ID NO: 39074 - DNA, 20 bp, synthetic construct
  misc_feature 1..20: note = chemically synthesized
  source 1..20: mol_type = other DNA
atcttaggtggaagggactt

SEQ ID NO: 39075 - DNA, 20 bp, synthetic construct
  misc_feature 1..20: note = chemically synthesized
  source 1..20: mol_type = other DNA
aggtggaagggacttcagct

SEQ ID NO: 39076 - DNA, 20 bp, synthetic construct
  misc_feature 1..20: note = chemically synthesized
  source 1..20: mol_type = other DNA
ggaagggacttcagctaagt

SEQ ID NO: 39077 - DNA, 20 bp, synthetic construct
  misc_feature 1..20: note = chemically synthesized
  source 1..20: mol_type = other DNA
ggacttcagctaagttggct

SEQ ID NO: 39078 - DNA, 20 bp, synthetic construct
  misc_feature 1..20: note = chemically synthesized
  source 1..20: mol_type = other DNA
gacttcagctaagttggcta

SEQ ID NO: 39079 - DNA, 20 bp, synthetic construct
  misc_feature 1..20: note = chemically synthesized
  source 1..20: mol_type = other DNA
ccttcaaattaaaactctgt

SEQ ID NO: 39080 - DNA, 20 bp, synthetic construct
  misc_feature 1..20: note = chemically synthesized
  source 1..20: mol_type = other DNA
ctgttagtttttctcatgct

SEQ ID NO: 39081 - DNA, 20 bp, synthetic construct
  misc_feature 1..20: note = chemically synthesized
  source 1..20: mol_type = other DNA
tagtttttctcatgcttagt

SEQ ID NO: 39082 - DNA, 20 bp, synthetic construct
  misc_feature 1..20: note = chemically synthesized
  source 1..20: mol_type = other DNA
ttttctcatgcttagtgaga

SEQ ID NO: 39083 - DNA, 20 bp, synthetic construct
  misc_feature 1..20: note = chemically synthesized
  source 1..20: mol_type = other DNA
actttctgctatgaaacttc

SEQ ID NO: 39084 - DNA, 20 bp, synthetic construct
  misc_feature 1..20: note = chemically synthesized
  source 1..20: mol_type = other DNA
tgctatgaaacttcaagtta

SEQ ID NO: 39085 - DNA, 20 bp, synthetic construct
  misc_feature 1..20: note = chemically synthesized
  source 1..20: mol_type = other DNA
ataacctgcaatttacgtcc

SEQ ID NO: 39086 - DNA, 20 bp, synthetic construct
  misc_feature 1..20: note = chemically synthesized
  source 1..20: mol_type = other DNA
acctgcaatttacgtccaag

SEQ ID NO: 39087 - DNA, 20 bp, synthetic construct
  misc_feature 1..20: note = chemically synthesized
  source 1..20: mol_type = other DNA
gcaatttacgtccaagaaga

SEQ ID NO: 39088 - DNA, 20 bp, synthetic construct
  misc_feature 1..20: note = chemically synthesized
  source 1..20: mol_type = other DNA
caatttacgtccaagaagaa

SEQ ID NO: 39089 - DNA, 20 bp, synthetic construct
  misc_feature 1..20: note = chemically synthesized
  source 1..20: mol_type = other DNA
tttacgtccaagaagaaagg

SEQ ID NO: 39090 - DNA, 20 bp, synthetic construct
  misc_feature 1..20: note = chemically synthesized
  source 1..20: mol_type = other DNA
aggaagattcaatctatctt

SEQ ID NO: 39091 - DNA, 20 bp, synthetic construct
  misc_feature 1..20: note = chemically synthesized
  source 1..20: mol_type = other DNA
aatctatcttcagtgatgac

SEQ ID NO: 39092 - DNA, 20 bp, synthetic construct
  misc_feature 1..20: note = chemically synthesized
  source 1..20: mol_type = other DNA
tgatgaccagcatcactgaa

SEQ ID NO: 39093 - DNA, 20 bp, synthetic construct
  misc_feature 1..20: note = chemically synthesized
  source 1..20: mol_type = other DNA
agcatcactgaacggttatc

SEQ ID NO: 39094 - DNA, 20 bp, synthetic construct
  misc_feature 1..20: note = chemically synthesized
  source 1..20: mol_type = other DNA
gcatcactgaacggttatct

SEQ ID NO: 39095 - DNA, 20 bp, synthetic construct
  misc_feature 1..20: note = chemically synthesized
  source 1..20: mol_type = other DNA
acggttatctgggcctgttg

SEQ ID NO: 39096 - DNA, 20 bp, synthetic construct
  misc_feature 1..20: note = chemically synthesized
  source 1..20: mol_type = other DNA
aatatttgaatctctctgac

SEQ ID NO: 39097 - DNA, 20 bp, synthetic construct
  misc_feature 1..20: note = chemically synthesized
  source 1..20: mol_type = other DNA
atatttgaatctctctgacg

SEQ ID NO: 39098 - DNA, 20 bp, synthetic construct
  misc_feature 1..20: note = chemically synthesized
  source 1..20: mol_type = other DNA
gaatctctctgacgaggtat

SEQ ID NO: 39099 - DNA, 20 bp, synthetic construct
  misc_feature 1..20: note = chemically synthesized
  source 1..20: mol_type = other DNA
atctctctgacgaggtataa

SEQ ID NO: 39100 - DNA, 20 bp, synthetic construct
  misc_feature 1..20: note = chemically synthesized
  source 1..20: mol_type = other DNA
ctctctgacgaggtataaga

SEQ ID NO: 39101 - DNA, 20 bp, synthetic construct
  misc_feature 1..20: note = chemically synthesized
  source 1..20: mol_type = other DNA
tctctgacgaggtataagag

SEQ ID NO: 39102 - DNA, 20 bp, synthetic construct
  misc_feature 1..20: note = chemically synthesized
  source 1..20: mol_type = other DNA
ctctgacgaggtataagaga

SEQ ID NO: 39103 - DNA, 20 bp, synthetic construct
  misc_feature 1..20: note = chemically synthesized
  source 1..20: mol_type = other DNA
gacactcacttttgaatatg

SEQ ID NO: 39104 - DNA, 20 bp, synthetic construct
  misc_feature 1..20: note = chemically synthesized
  source 1..20: mol_type = other DNA
acactcacttttgaatatgc

SEQ ID NO: 39105 - DNA, 20 bp, synthetic construct
  misc_feature 1..20: note = chemically synthesized
  source 1..20: mol_type = other DNA
cactcacttttgaatatgca

SEQ ID NO: 39106 - DNA, 20 bp, synthetic construct
  misc_feature 1..20: note = chemically synthesized
  source 1..20: mol_type = other DNA
atgcagggctgtttccatga

SEQ ID NO: 39107 - DNA, 20 bp, synthetic construct
  misc_feature 1..20: note = chemically synthesized
  source 1..20: mol_type = other DNA
gcagggctgtttccatgatg

SEQ ID NO: 39108 - DNA, 20 bp, synthetic construct
  misc_feature 1..20: note = chemically synthesized
  source 1..20: mol_type = other DNA
cagggctgtttccatgatgg

SEQ ID NO: 39109 - DNA, 20 bp, synthetic construct
  misc_feature 1..20: note = chemically synthesized
  source 1..20: mol_type = other DNA
gctgtttccatgatggagga

SEQ ID NO: 39110 - DNA, 20 bp, synthetic construct
  misc_feature 1..20: note = chemically synthesized
  source 1..20: mol_type = other DNA
tgtttccatgatggaggaaa

SEQ ID NO: 39111 - DNA, 20 bp, synthetic construct
  misc_feature 1..20: note = chemically synthesized
  source 1..20: mol_type = other DNA
ccatgatggaggaaagagat

SEQ ID NO: 39112 - DNA, 20 bp, synthetic construct
  misc_feature 1..20: note = chemically synthesized
  source 1..20: mol_type = other DNA
atgatggaggaaagagattg

SEQ ID NO: 39113 - DNA, 20 bp, synthetic construct
  misc_feature 1..20: note = chemically synthesized
  source 1..20: mol_type = other DNA
tgatggaggaaagagattgg

SEQ ID NO: 39114 - DNA, 20 bp, synthetic construct
  misc_feature 1..20: note = chemically synthesized
  source 1..20: mol_type = other DNA
ggaaagagattggaggaatg

SEQ ID NO: 39115 - DNA, 20 bp, synthetic construct
  misc_feature 1..20: note = chemically synthesized
  source 1..20: mol_type = other DNA
attggaggaatgtagattta

SEQ ID NO: 39116 - DNA, 20 bp, synthetic construct
  misc_feature 1..20: note = chemically synthesized
  source 1..20: mol_type = other DNA
ttggaggaatgtagatttat

SEQ ID NO: 39117 - DNA, 20 bp, synthetic construct
  misc_feature 1..20: note = chemically synthesized
  source 1..20: mol_type = other DNA
ggaatgtagatttatgggtg

SEQ ID NO: 39118 - DNA, 20 bp, synthetic construct
  misc_feature 1..20: note = chemically synthesized
  source 1..20: mol_type = other DNA
gatttatgggtgaagttgtt

SEQ ID NO: 39119 - DNA, 20 bp, synthetic construct
  misc_feature 1..20: note = chemically synthesized
  source 1..20: mol_type = other DNA
atgggtgaagttgtttggct

SEQ ID NO: 39120 - DNA, 20 bp, synthetic construct
  misc_feature 1..20: note = chemically synthesized
  source 1..20: mol_type = other DNA
ggtgaagttgtttggcttgg

SEQ ID NO: 39121 - DNA, 20 bp, synthetic construct
  misc_feature 1..20: note = chemically synthesized
  source 1..20: mol_type = other DNA
aagttgtttggcttggaagt

SEQ ID NO: 39122 - DNA, 20 bp, synthetic construct
  misc_feature 1..20: note = chemically synthesized
  source 1..20: mol_type = other DNA
tgtttggcttggaagttgga

SEQ ID NO: 39123 - DNA, 20 bp, synthetic construct
  misc_feature 1..20: note = chemically synthesized
  source 1..20: mol_type = other DNA
tggcttggaagttggatggt

SEQ ID NO: 39124 - DNA, 20 bp, synthetic construct
  misc_feature 1..20: note = chemically synthesized
  source 1..20: mol_type = other DNA
ggaagttggatggtcagttc

SEQ ID NO: 39125 - DNA, 20 bp, synthetic construct
  misc_feature 1..20: note = chemically synthesized
  source 1..20: mol_type = other DNA
gaagttggatggtcagttcc

SEQ ID NO: 39126 - DNA, 20 bp, synthetic construct
  misc_feature 1..20: note = chemically synthesized
  source 1..20: mol_type = other DNA
tcagttccaggtgctaccat

SEQ ID NO: 39127 - DNA, 20 bp, synthetic construct
  misc_feature 1..20: note = chemically synthesized
  source 1..20: mol_type = other DNA
aggtgctaccattggtgctg

SEQ ID NO: 39128 - DNA, 20 bp, synthetic construct
  misc_feature 1..20: note = chemically synthesized
  source 1..20: mol_type = other DNA
ggtgctaccattggtgctga

SEQ ID NO: 39129 - DNA, 20 bp, synthetic construct
  misc_feature 1..20: note = chemically synthesized
  source 1..20: mol_type = other DNA
tgctaccattggtgctgaag

SEQ ID NO: 39130 - DNA, 20 bp, synthetic construct
  misc_feature 1..20: note = chemically synthesized
  source 1..20: mol_type = other DNA
gaacgtttccaaaatgtctt

SEQ ID NO: 39131 - DNA, 20 bp, synthetic construct
  misc_feature 1..20: note = chemically synthesized
  source 1..20: mol_type = other DNA
aacgtttccaaaatgtcttt

SEQ ID NO: 39132 - DNA, 20 bp, synthetic construct
  misc_feature 1..20: note = chemically synthesized
  source 1..20: mol_type = other DNA
acgtttccaaaatgtctttg

SEQ ID NO: 39133 - DNA, 20 bp, synthetic construct
  misc_feature 1..20: note = chemically synthesized
  source 1..20: mol_type = other DNA
caatttcctatcgttttgtt

SEQ ID NO: 39134 - DNA, 20 bp, synthetic construct
  misc_feature 1..20: note = chemically synthesized
  source 1..20: mol_type = other DNA
agttgacacaaaatcttact

SEQ ID NO: 39135 - DNA, 20 bp, synthetic construct
  misc_feature 1..20: note = chemically synthesized
  source 1..20: mol_type = other DNA
tgacacaaaatcttactcag

SEQ ID NO: 39136 - DNA, 20 bp, synthetic construct
  misc_feature 1..20: note = chemically synthesized
  source 1..20: mol_type = other DNA
gacacaaaatcttactcagc

SEQ ID NO: 39137 - DNA, 20 bp, synthetic construct
  misc_feature 1..20: note = chemically synthesized
  source 1..20: mol_type = other DNA
acacaaaatcttactcagca

SEQ ID NO: 39138 - DNA, 20 bp, synthetic construct
  misc_feature 1..20: note = chemically synthesized
  source 1..20: mol_type = other DNA
cacaaaatcttactcagcag

SEQ ID NO: 39139 - DNA, 20 bp, synthetic construct
  misc_feature 1..20: note = chemically synthesized
  source 1..20: mol_type = other DNA
tcttactcagcaggggccca

SEQ ID NO: 39140 - DNA, 20 bp, synthetic construct
  misc_feature 1..20: note = chemically synthesized
  source 1..20: mol_type = other DNA
gcaggggcccaaagtgcaat

SEQ ID NO: 39141 - DNA, 20 bp, synthetic construct
  misc_feature 1..20: note = chemically synthesized
  source 1..20: mol_type = other DNA
tcaactcctctatacatatt

SEQ ID NO: 39142 - DNA, 20 bp, synthetic construct
  misc_feature 1..20: note = chemically synthesized
  source 1..20: mol_type = other DNA
atacatatttagacacttcg

SEQ ID NO: 39143 - DNA, 20 bp, synthetic construct
  misc_feature 1..20: note = chemically synthesized
  source 1..20: mol_type = other DNA
tacatatttagacacttcgc

SEQ ID NO: 39144 - DNA, 20 bp, synthetic construct
  misc_feature 1..20: note = chemically synthesized
  source 1..20: mol_type = other DNA
ttagacacttcgcaggtatc

SEQ ID NO: 39145 - DNA, 20 bp, synthetic construct
  misc_feature 1..20: note = chemically synthesized
  source 1..20: mol_type = other DNA
cgcaggtatcaagtcattac

SEQ ID NO: 39146 - DNA, 20 bp, synthetic construct
  misc_feature 1..20: note = chemically synthesized
  source 1..20: mol_type = other DNA
gcaggtatcaagtcattacc

SEQ ID NO: 39147 - DNA, 20 bp, synthetic construct
  misc_feature 1..20: note = chemically synthesized
  source 1..20: mol_type = other DNA
aggtatcaagtcattaccag

SEQ ID NO: 39148 - DNA, 20 bp, synthetic construct
  misc_feature 1..20: note = chemically synthesized
  source 1..20: mol_type = other DNA
caagtcattaccaggagcac

SEQ ID NO: 39149 - DNA, 20 bp, synthetic construct
  misc_feature 1..20: note = chemically synthesized
  source 1..20: mol_type = other DNA
cattaccaggagcaccagct

SEQ ID NO: 39150 - DNA, 20 bp, synthetic construct
  misc_feature 1..20: note = chemically synthesized
  source 1..20: mol_type = other DNA
ttcatcttctacaacctcat

SEQ ID NO: 39151 - DNA, 20 bp, synthetic construct
  misc_feature 1..20: note = chemically synthesized
  source 1..20: mol_type = other DNA
acttctttcaacgtaatctc

SEQ ID NO: 39152 - DNA, 20 bp, synthetic construct
  misc_feature 1..20: note = chemically synthesized
  source 1..20: mol_type = other DNA
caacgtaatctccagaaaac

SEQ ID NO: 39153 - DNA, 20 bp, synthetic construct
  misc_feature 1..20: note = chemically synthesized
  source 1..20: mol_type = other DNA
aaccttaaaatgtctccttt

SEQ ID NO: 39154 - DNA, 20 bp, synthetic construct
  misc_feature 1..20: note = chemically synthesized
  source 1..20: mol_type = other DNA
cagccttgtccctgtactat

SEQ ID NO: 39155 - DNA, 20 bp, synthetic construct
  misc_feature 1..20: note = chemically synthesized
  source 1..20: mol_type = other DNA
ttagtcctatttgccttgca

SEQ ID NO: 39156 - DNA, 20 bp, synthetic construct
  misc_feature 1..20: note = chemically synthesized
  source 1..20: mol_type = other DNA
tatttgccttgcatagatgt

SEQ ID NO: 39157 - DNA, 20 bp, synthetic construct
  misc_feature 1..20: note = chemically synthesized
  source 1..20: mol_type = other DNA
tgccttgcatagatgtgaga

SEQ ID NO: 39158 - DNA, 20 bp, synthetic construct
  misc_feature 1..20: note = chemically synthesized
  source 1..20: mol_type = other DNA
catagatgtgagatggtaca

SEQ ID NO: 39159 - DNA, 20 bp, synthetic construct
  misc_feature 1..20: note = chemically synthesized
  source 1..20: mol_type = other DNA
attttctttctcttcctata

SEQ ID NO: 39160 - DNA, 20 bp, synthetic construct
  misc_feature 1..20: note = chemically synthesized
  source 1..20: mol_type = other DNA
tatatggtaacataactgat

SEQ ID NO: 39161 - DNA, 20 bp, synthetic construct
  misc_feature 1..20: note = chemically synthesized
  source 1..20: mol_type = other DNA
aacataactgataagacaca

SEQ ID NO: 39162 - DNA, 20 bp, synthetic construct
  misc_feature 1..20: note = chemically synthesized
  source 1..20: mol_type = other DNA
ataactgataagacacaaag

SEQ ID NO: 39163 - DNA, 20 bp, synthetic construct
  misc_feature 1..20: note = chemically synthesized
  source 1..20: mol_type = other DNA
aagacacaaagaagataaaa

SEQ ID NO: 39164 - DNA, 20 bp, synthetic construct
  misc_feature 1..20: note = chemically synthesized
  source 1..20: mol_type = other DNA
aatgtctgatatattattgt

SEQ ID NO: 39165 - DNA, 20 bp, synthetic construct
  misc_feature 1..20: note = chemically synthesized
  source 1..20: mol_type = other DNA
atgtctgatatattattgtt

SEQ ID NO: 39166 - DNA, 20 bp, synthetic construct
  misc_feature 1..20: note = chemically synthesized
  source 1..20: mol_type = other DNA
tgtctgatatattattgttg

SEQ ID NO: 39167 - DNA, 20 bp, synthetic construct
  misc_feature 1..20: note = chemically synthesized
  source 1..20: mol_type = other DNA
gatatattattgttggggta

SEQ ID NO: 39168 - DNA, 20 bp, synthetic construct
  misc_feature 1..20: note = chemically synthesized
  source 1..20: mol_type = other DNA
ttggggtacagttctttatt

SEQ ID NO: 39169 - DNA, 20 bp, synthetic construct
  misc_feature 1..20: note = chemically synthesized
  source 1..20: mol_type = other DNA
tacagttctttattgagaat

SEQ ID NO: 39170 - DNA, 20 bp, synthetic construct
  misc_feature 1..20: note = chemically synthesized
  source 1..20: mol_type = other DNA
cagttctttattgagaataa

SEQ ID NO: 39171 - DNA, 20 bp, synthetic construct
  misc_feature 1..20: note = chemically synthesized
  source 1..20: mol_type = other DNA
aagagtttcttttcatgtat

SEQ ID NO: 39172 - DNA, 20 bp, synthetic construct
  misc_feature 1..20: note = chemically synthesized
  source 1..20: mol_type = other DNA
tttcttttcatgtattggtc

SEQ ID NO: 39173 - DNA, 20 bp, synthetic construct
  misc_feature 1..20: note = chemically synthesized
  source 1..20: mol_type = other DNA
catgtattggtctagctatt

SEQ ID NO: 39174 - DNA, 20 bp, synthetic construct
  misc_feature 1..20: note = chemically synthesized
  source 1..20: mol_type = other DNA
gtattggtctagctatttag

SEQ ID NO: 39175 - DNA, 20 bp, synthetic construct
  misc_feature 1..20: note = chemically synthesized
  source 1..20: mol_type = other DNA
ggtctagctatttagtagta

SEQ ID NO: 39176 - DNA, 20 bp, synthetic construct
  misc_feature 1..20: note = chemically synthesized
  source 1..20: mol_type = other DNA
tagctatttagtagtataga

SEQ ID NO: 39177 - DNA, 20 bp, synthetic construct
  misc_feature 1..20: note = chemically synthesized
  source 1..20: mol_type = other DNA
ttagtagtatagatagatca

SEQ ID NO: 39178 - DNA, 20 bp, synthetic construct
  misc_feature 1..20: note = chemically synthesized
  source 1..20: mol_type = other DNA
tagtagtatagatagatcac

SEQ ID NO: 39179 - DNA, 20 bp, synthetic construct
  misc_feature 1..20: note = chemically synthesized
  source 1..20: mol_type = other DNA
agatagatcacaggaaattg

SEQ ID NO: 39180 - DNA, 20 bp, synthetic construct
  misc_feature 1..20: note = chemically synthesized
  source 1..20: mol_type = other DNA
atcacaggaaattgtagact

SEQ ID NO: 39181 - DNA, 20 bp, synthetic construct
  misc_feature 1..20: note = chemically synthesized
  source 1..20: mol_type = other DNA
aattgtagacttggtgtatt

SEQ ID NO: 39182 - DNA, 20 bp, synthetic construct
  misc_feature 1..20: note = chemically synthesized
  source 1..20: mol_type = other DNA
catcaacaaaaacattttca

SEQ ID NO: 39183 - DNA, 20 bp, synthetic construct
  misc_feature 1..20: note = chemically synthesized
  source 1..20: mol_type = other DNA
caacaaaaacattttcaaag

SEQ ID NO: 39184 - DNA, 20 bp, synthetic construct
  misc_feature 1..20: note = chemically synthesized
  source 1..20: mol_type = other DNA
tttcaaagtagtcttttcat

SEQ ID NO: 39185 - DNA, 20 bp, synthetic construct
  misc_feature 1..20: note = chemically synthesized
  source 1..20: mol_type = other DNA
aagtagtcttttcattggaa

SEQ ID NO: 39186 - DNA, 20 bp, synthetic construct
  misc_feature 1..20: note = chemically synthesized
  source 1..20: mol_type = other DNA
agtagtcttttcattggaat

SEQ ID NO: 39187 - DNA, 20 bp, synthetic construct
  misc_feature 1..20: note = chemically synthesized
  source 1..20: mol_type = other DNA
tagtcttttcattggaatgg

SEQ ID NO: 39188 - DNA, 20 bp, synthetic construct
  misc_feature 1..20: note = chemically synthesized
  source 1..20: mol_type = other DNA
tcattggaatgggagaatat

SEQ ID NO: 39189 - DNA, 20 bp, synthetic construct
  misc_feature 1..20: note = chemically synthesized
  source 1..20: mol_type = other DNA
tgggagaatataagttccat

SEQ ID NO: 39190 - DNA, 20 bp, synthetic construct
  misc_feature 1..20: note = chemically synthesized
  source 1..20: mol_type = other DNA
gagaatataagttccataag

SEQ ID NO: 39191 - DNA, 20 bp, synthetic construct
  misc_feature 1..20: note = chemically synthesized
  source 1..20: mol_type = other DNA
tggttaaaacatcttacctt

SEQ ID NO: 39192 - DNA, 20 bp, synthetic construct
  misc_feature 1..20: note = chemically synthesized
  source 1..20: mol_type = other DNA
cttaccttgagactcacttg

SEQ ID NO: 39193 - DNA, 20 bp, synthetic construct
  misc_feature 1..20: note = chemically synthesized
  source 1..20: mol_type = other DNA
ttgagactcacttgcagcca

SEQ ID NO: 39194 - DNA, 20 bp, synthetic construct
  misc_feature 1..20: note = chemically synthesized
  source 1..20: mol_type = other DNA
tcacttgcagccaaagtact

SEQ ID NO: 39195 - DNA, 20 bp, synthetic construct
  misc_feature 1..20: note = chemically synthesized
  source 1..20: mol_type = other DNA
cttgcagccaaagtactaag

SEQ ID NO: 39196 - DNA, 20 bp, synthetic construct
  misc_feature 1..20: note = chemically synthesized
  source 1..20: mol_type = other DNA
ttgcagccaaagtactaaga

SEQ ID NO: 39197 - DNA, 20 bp, synthetic construct
  misc_feature 1..20: note = chemically synthesized
  source 1..20: mol_type = other DNA
cataaatgtctcttctcatg

SEQ ID NO: 39198 - DNA, 20 bp, synthetic construct
  misc_feature 1..20: note = chemically synthesized
  source 1..20: mol_type = other DNA
tgtctcttctcatgtggtca

SEQ ID NO: 39199 - DNA, 20 bp, synthetic construct
  misc_feature 1..20: note = chemically synthesized
  source 1..20: mol_type = other DNA
ctcatgtggtcacagctatt

SEQ ID NO: 39200 - DNA, 20 bp, synthetic construct
  misc_feature 1..20: note = chemically synthesized
  source 1..20: mol_type = other DNA
tcatgtggtcacagctattt

SEQ ID NO: 39201 - DNA, 20 bp, synthetic construct
  misc_feature 1..20: note = chemically synthesized
  source 1..20: mol_type = other DNA
atgtggtcacagctatttgg

SEQ ID NO: 39202 - DNA, 20 bp, synthetic construct
  misc_feature 1..20: note = chemically synthesized
  source 1..20: mol_type = other DNA
tgtggtcacagctatttggg

SEQ ID NO: 39203 - DNA, 20 bp, synthetic construct
  misc_feature 1..20: note = chemically synthesized
  source 1..20: mol_type = other DNA
tcacagctatttgggaggct

SEQ ID NO: 39204 - DNA, 20 bp, synthetic construct
  misc_feature 1..20: note = chemically synthesized
  source 1..20: mol_type = other DNA
cacagctatttgggaggctg

SEQ ID NO: 39205 - DNA, 20 bp, synthetic construct
  misc_feature 1..20: note = chemically synthesized
  source 1..20: mol_type = other DNA
ctgaggtgtaaaaatcactt

SEQ ID NO: 39206 - DNA, 20 bp, synthetic construct
  misc_feature 1..20: note = chemically synthesized
  source 1..20: mol_type = other DNA
taaaaatcacttaagcctaa

SEQ ID NO: 39207 - DNA, 20 bp, synthetic construct
  misc_feature 1..20: note = chemically synthesized
  source 1..20: mol_type = other DNA
tcacttaagcctaaaagctt

SEQ ID NO: 39208 - DNA, 20 bp, synthetic construct
  misc_feature 1..20: note = chemically synthesized
  source 1..20: mol_type = other DNA
cacttaagcctaaaagcttg

SEQ ID NO: 39209 - DNA, 20 bp, synthetic construct
  misc_feature 1..20: note = chemically synthesized
  source 1..20: mol_type = other DNA
agcctaaaagcttgaggctg

SEQ ID NO: 39210 - DNA, 20 bp, synthetic construct
  misc_feature 1..20: note = chemically synthesized
  source 1..20: mol_type = other DNA
ctcaccactgcactccctcc

SEQ ID NO: 39211 - DNA, 20 bp, synthetic construct
  misc_feature 1..20: note = chemically synthesized
  source 1..20: mol_type = other DNA
tcaccactgcactccctcct

SEQ ID NO: 39212 - DNA, 20 bp, synthetic construct
  misc_feature 1..20: note = chemically synthesized
  source 1..20: mol_type = other DNA
ctgcactccctcctgggtga

SEQ ID NO: 39213 - DNA, 20 bp, synthetic construct
  misc_feature 1..20: note = chemically synthesized
  source 1..20: mol_type = other DNA
gcactccctcctgggtgaca

SEQ ID NO: 39214 - DNA, 20 bp, synthetic construct
  misc_feature 1..20: note = chemically synthesized
  source 1..20: mol_type = other DNA
tccctcctgggtgacagagc

SEQ ID NO: 39215 - DNA, 20 bp, synthetic construct
  misc_feature 1..20: note = chemically synthesized
  source 1..20: mol_type = other DNA
agagcaagacactgtctcaa

SEQ ID NO: 39216 - DNA, 20 bp, synthetic construct
  misc_feature 1..20: note = chemically synthesized
  source 1..20: mol_type = other DNA
agcaagacactgtctcaaaa

SEQ ID NO: 39217 - DNA, 20 bp, synthetic construct
  misc_feature 1..20: note = chemically synthesized
  source 1..20: mol_type = other DNA
caagacactgtctcaaaaga

SEQ ID NO: 39218 - DNA, 20 bp, synthetic construct
  misc_feature 1..20: note = chemically synthesized
  source 1..20: mol_type = other DNA
aagacactgtctcaaaagag

SEQ ID NO: 39219 - DNA, 20 bp, synthetic construct
  misc_feature 1..20: note = chemically synthesized
  source 1..20: mol_type = other DNA
cactgtctcaaaagagagga

SEQ ID NO: 39220 - DNA, 20 bp, synthetic construct
  misc_feature 1..20: note = chemically synthesized
  source 1..20: mol_type = other DNA
tctcaaaagagaggaaagaa

SEQ ID NO: 39221 - DNA, 20 bp, synthetic construct
  misc_feature 1..20: note = chemically synthesized
  source 1..20: mol_type = other DNA
aaagagaggaaagaaaagaa

SEQ ID NO: 39222 - DNA, 20 bp, synthetic construct
  misc_feature 1..20: note = chemically synthesized
  source 1..20: mol_type = other DNA
agagaggaaagaaaagaaaa

SEQ ID NO: 39223 - DNA, 20 bp, synthetic construct
  misc_feature 1..20: note = chemically synthesized
  source 1..20: mol_type = other DNA
aagaaaagaaaagagaataa

SEQ ID NO: 39224 - DNA, 20 bp, synthetic construct
  misc_feature 1..20: note = chemically synthesized
  source 1..20: mol_type = other DNA
agaaaagaaaagagaataaa

SEQ ID NO: 39225 - DNA, 20 bp, synthetic construct
  misc_feature 1..20: note = chemically synthesized
  source 1..20: mol_type = other DNA
aagaaaagagaataaaagga

SEQ ID NO: 39226 - DNA, 20 bp, synthetic construct
  misc_feature 1..20: note = chemically synthesized
  source 1..20: mol_type = other DNA
agaaaagagaataaaaggaa

SEQ ID NO: 39227 - DNA, 20 bp, synthetic construct
  misc_feature 1..20: note = chemically synthesized
  source 1..20: mol_type = other DNA
aagagaataaaaggaaagga

SEQ ID NO: 39228 - DNA, 20 bp, synthetic construct
  misc_feature 1..20: note = chemically synthesized
  source 1..20: mol_type = other DNA
agagaataaaaggaaaggaa

SEQ ID NO: 39229 - DNA, 20 bp, synthetic construct
  misc_feature 1..20: note = chemically synthesized
  source 1..20: mol_type = other DNA
aataaaaggaaaggaaagga

SEQ ID NO: 39230 - DNA, 20 bp, synthetic construct
  misc_feature 1..20: note = chemically synthesized
  source 1..20: mol_type = other DNA
ataaaaggaaaggaaaggaa

SEQ ID NO: 39231 - DNA, 20 bp, synthetic construct
  misc_feature 1..20: note = chemically synthesized
  source 1..20: mol_type = other DNA
taaaaggaaaggaaaggaaa

SEQ ID NO: 39232 - DNA, 20 bp, synthetic construct
  misc_feature 1..20: note = chemically synthesized
  source 1..20: mol_type = other DNA
aaaggaaaggaaaggaaagg

SEQ ID NO: 39233 - DNA, 20 bp, synthetic construct
  misc_feature 1..20: note = chemically synthesized
  source 1..20: mol_type = other DNA
gaaaggaaaggaaagggaga

SEQ ID NO: 39234 - DNA, 20 bp, synthetic construct
  misc_feature 1..20: note = chemically synthesized
  source 1..20: mol_type = other DNA
ggaaaggaaagggagaaaga

SEQ ID NO: 39235 - DNA, 20 bp, synthetic construct
  misc_feature 1..20: note = chemically synthesized
  source 1..20: mol_type = other DNA
gaaaggaaagggagaaagaa

SEQ ID NO: 39236 - DNA, 20 bp, synthetic construct
  misc_feature 1..20: note = chemically synthesized
  source 1..20: mol_type = other DNA
aggaaagggagaaagaaagg

SEQ ID NO: 39237 - DNA, 20 bp, synthetic construct
  misc_feature 1..20: note = chemically synthesized
  source 1..20: mol_type = other DNA
ggaaagggagaaagaaagga

SEQ ID NO: 39238 - DNA, 20 bp, synthetic construct
  misc_feature 1..20: note = chemically synthesized
  source 1..20: mol_type = other DNA
aagggagaaagaaaggaagg

SEQ ID NO: 39239 - DNA, 20 bp, synthetic construct
  misc_feature 1..20: note = chemically synthesized
  source 1..20: mol_type = other DNA
agggagaaagaaaggaagga

SEQ ID NO: 39240 - DNA, 20 bp, synthetic construct
  misc_feature 1..20: note = chemically synthesized
  source 1..20: mol_type = other DNA
gagaaagaaaggaaggaagg

SEQ ID NO: 39241 - DNA, 20 bp, synthetic construct
  misc_feature 1..20: note = chemically synthesized
  source 1..20: mol_type = other DNA
gaaaggaaggaaggaagaaa

SEQ ID NO: 39242 - DNA, 20 bp, synthetic construct
  misc_feature 1..20: note = chemically synthesized
  source 1..20: mol_type = other DNA
aaggaaggaaggaagaaaaa

SEQ ID NO: 39243 - DNA, 20 bp, synthetic construct
  misc_feature 1..20: note = chemically synthesized
  source 1..20: mol_type = other DNA
ggaaggaaggaagaaaaaga

SEQ ID NO: 39244 - DNA, 20 bp, synthetic construct
  misc_feature 1..20: note = chemically synthesized
  source 1..20: mol_type = other DNA
aaggaaggaagaaaaagaga

SEQ ID NO: 39245 - DNA, 20 bp, synthetic construct
  misc_feature 1..20: note = chemically synthesized
  source 1..20: mol_type = other DNA
ggaaggaagaaaaagagaga

SEQ ID NO: 39246 - DNA, 20 bp, synthetic construct
  misc_feature 1..20: note = chemically synthesized
  source 1..20: mol_type = other DNA
agaaaaagagagagagaaat

SEQ ID NO: 39247 - DNA, 20 bp, synthetic construct
  misc_feature 1..20: note = chemically synthesized
  source 1..20: mol_type = other DNA
gaaaaagagagagagaaata

SEQ ID NO: 39248 - DNA, 20 bp, synthetic construct
  misc_feature 1..20: note = chemically synthesized
  source 1..20: mol_type = other DNA
aagagagagagaaataagga

SEQ ID NO: 39249 - DNA, 20 bp, synthetic construct
  misc_feature 1..20: note = chemically synthesized
  source 1..20: mol_type = other DNA
gagagagaaataaggaaaga

SEQ ID NO: 39250 - DNA, 20 bp, synthetic construct
  misc_feature 1..20: note = chemically synthesized
  source 1..20: mol_type = other DNA
aaataaggaaagaaagaaaa

SEQ ID NO: 39251 - DNA, 20 bp, synthetic construct
  misc_feature 1..20: note = chemically synthesized
  source 1..20: mol_type = other DNA
aaggaaagaaagaaaaaaga

SEQ ID NO: 39252 - DNA, 20 bp, synthetic construct
  misc_feature 1..20: note = chemically synthesized
  source 1..20: mol_type = other DNA
aggaaagaaagaaaaaagaa

SEQ ID NO: 39253 - DNA, 20 bp, synthetic construct
  misc_feature 1..20: note = chemically synthesized
  source 1..20: mol_type = other DNA
aaagaaagaaaaaagaaagg

SEQ ID NO: 39254 - DNA, 20 bp, synthetic construct
  misc_feature 1..20: note = chemically synthesized
  source 1..20: mol_type = other DNA
aagaaagaaaaaagaaagga

SEQ ID NO: 39255 - DNA, 20 bp, synthetic construct
  misc_feature 1..20: note = chemically synthesized
  source 1..20: mol_type = other DNA
gaaaaaagaaaggaaggaat

SEQ ID NO: 39256 - DNA, 20 bp, synthetic construct
  misc_feature 1..20: note = chemically synthesized
  source 1..20: mol_type = other DNA
aaaaaagaaaggaaggaatg

SEQ ID NO: 39257 - DNA, 20 bp, synthetic construct
  misc_feature 1..20: note = chemically synthesized
  source 1..20: mol_type = other DNA
aaaaagaaaggaaggaatga

SEQ ID NO: 39258 - DNA, 20 bp, synthetic construct
  misc_feature 1..20: note = chemically synthesized
  source 1..20: mol_type = other DNA
aagaaaggaaggaatgaggg

SEQ ID NO: 39259 - DNA, 20 bp, synthetic construct
  misc_feature 1..20: note = chemically synthesized
  source 1..20: mol_type = other DNA
agaaaggaaggaatgaggga

SEQ ID NO: 39260 - DNA, 20 bp, synthetic construct
  misc_feature 1..20: note = chemically synthesized
  source 1..20: mol_type = other DNA
aaaggaaggaatgagggaag

SEQ ID NO: 39261 - DNA, 20 bp, synthetic construct
  misc_feature 1..20: note = chemically synthesized
  source 1..20: mol_type = other DNA
aaggaaggaatgagggaagg

SEQ ID NO: 39262 - DNA, 20 bp, synthetic construct
  misc_feature 1..20: note = chemically synthesized
  source 1..20: mol_type = other DNA
aggaaggaatgagggaagga

SEQ ID NO: 39263 - DNA, 20 bp, synthetic construct
  misc_feature 1..20: note = chemically synthesized
  source 1..20: mol_type = other DNA
aaggaatgagggaaggaggg

SEQ ID NO: 39264 - DNA, 20 bp, synthetic construct
  misc_feature 1..20: note = chemically synthesized
  source 1..20: mol_type = other DNA
aggaatgagggaaggaggga

SEQ ID NO: 39265 - DNA, 20 bp, synthetic construct
  misc_feature 1..20: note = chemically synthesized
  source 1..20: mol_type = other DNA
gaatgagggaaggagggaag

SEQ ID NO: 39266 - DNA, 20 bp, synthetic construct
  misc_feature 1..20: note = chemically synthesized
  source 1..20: mol_type = other DNA
aatgagggaaggagggaagg

SEQ ID NO: 39267 - DNA, 20 bp, synthetic construct
  misc_feature 1..20: note = chemically synthesized
  source 1..20: mol_type = other DNA
atgagggaaggagggaagga

SEQ ID NO: 39268 - DNA, 20 bp, synthetic construct
  misc_feature 1..20: note = chemically synthesized
  source 1..20: mol_type = other DNA
agggaaggagggaaggaggg

SEQ ID NO: 39269 - DNA, 20 bp, synthetic construct
  misc_feature 1..20: note = chemically synthesized
  source 1..20: mol_type = other DNA
gggaaggagggaaggaggga

SEQ ID NO: 39270 - DNA, 20 bp, synthetic construct
  misc_feature 1..20: note = chemically synthesized
  source 1..20: mol_type = other DNA
ggaaggagggaaggagggaa

SEQ ID NO: 39271 - DNA, 20 bp, synthetic construct
  misc_feature 1..20: note = chemically synthesized
  source 1..20: mol_type = other DNA
gaaggagggaaggagggaag

SEQ ID NO: 39272 - DNA, 20 bp, synthetic construct
  misc_feature 1..20: note = chemically synthesized
  source 1..20: mol_type = other DNA
aaggagggaaggagggaagg

SEQ ID NO: 39273 - DNA, 20 bp, synthetic construct
  misc_feature 1..20: note = chemically synthesized
  source 1..20: mol_type = other DNA
gagggaaggagggaaggggg

SEQ ID NO: 39274 - DNA, 20 bp, synthetic construct
  misc_feature 1..20: note = chemically synthesized
  source 1..20: mol_type = other DNA
agggaaggagggaaggggga

SEQ ID NO: 39275 - DNA, 20 bp, synthetic construct
  misc_feature 1..20: note = chemically synthesized
  source 1..20: mol_type = other DNA
gggaaggagggaagggggaa

SEQ ID NO: 39276 - DNA, 20 bp, synthetic construct
  misc_feature 1..20: note = chemically synthesized
  source 1..20: mol_type = other DNA
ggaaggagggaagggggaag

SEQ ID NO: 39277 - DNA, 20 bp, synthetic construct
  misc_feature 1..20: note = chemically synthesized
  source 1..20: mol_type = other DNA
gaaggagggaagggggaagg

SEQ ID NO: 39278 - DNA, 20 bp, synthetic construct
  misc_feature 1..20: note = chemically synthesized
  source 1..20: mol_type = other DNA
ggagggaagggggaaggggg

SEQ ID NO: 39279 - DNA, 20 bp, synthetic construct
  misc_feature 1..20: note = chemically synthesized
  source 1..20: mol_type = other DNA
gagggaagggggaaggggga

SEQ ID NO: 39280 - DNA, 20 bp, synthetic construct
  misc_feature 1..20: note = chemically synthesized
  source 1..20: mol_type = other DNA
agggaagggggaagggggaa

SEQ ID NO: 39281 - DNA, 20 bp, synthetic construct
  misc_feature 1..20: note = chemically synthesized
  source 1..20: mol_type = other DNA
gggaagggggaagggggaag

SEQ ID NO: 39282 - DNA, 20 bp, synthetic construct
  misc_feature 1..20: note = chemically synthesized
  source 1..20: mol_type = other DNA
ggaagggggaagggggaagg

SEQ ID NO: 39283 - DNA, 20 bp, synthetic construct
  misc_feature 1..20: note = chemically synthesized
  source 1..20: mol_type = other DNA
aagggggaagggggaagggg

SEQ ID NO: 39284 - DNA, 20 bp, synthetic construct
  misc_feature 1..20: note = chemically synthesized
  source 1..20: mol_type = other DNA
agggggaagggggaaggggg

SEQ ID NO: 39285 - DNA, 20 bp, synthetic construct
  misc_feature 1..20: note = chemically synthesized
  source 1..20: mol_type = other DNA
gggggaagggggaaggggga

SEQ ID NO: 39286 - DNA, 20 bp, synthetic construct
  misc_feature 1..20: note = chemically synthesized
  source 1..20: mol_type = other DNA
gggaagggggaagggggagg

SEQ ID NO: 39287 - DNA, 20 bp, synthetic construct
  misc_feature 1..20: note = chemically synthesized
  source 1..20: mol_type = other DNA
ggaagggggaagggggaggg

SEQ ID NO: 39288 - DNA, 20 bp, synthetic construct
  misc_feature 1..20: note = chemically synthesized
  source 1..20: mol_type = other DNA
gaagggggaagggggaggga

SEQ ID NO: 39289 - DNA, 20 bp, synthetic construct
  misc_feature 1..20: note = chemically synthesized
  source 1..20: mol_type = other DNA
agggggaagggggagggagg

SEQ ID NO: 39290 - DNA, 20 bp, synthetic construct
  misc_feature 1..20: note = chemically synthesized
  source 1..20: mol_type = other DNA
gggggaagggggagggaggg

SEQ ID NO: 39291 - DNA, 20 bp, synthetic construct
  misc_feature 1..20: note = chemically synthesized
  source 1..20: mol_type = other DNA
ggggaagggggagggaggga

SEQ ID NO: 39292 - DNA, 20 bp, synthetic construct
  misc_feature 1..20: note = chemically synthesized
  source 1..20: mol_type = other DNA
ggaagggggagggagggagg

SEQ ID NO: 39293 - DNA, 20 bp, synthetic construct
  misc_feature 1..20: note = chemically synthesized
  source 1..20: mol_type = other DNA
gaagggggagggagggaggg

SEQ ID NO: 39294 - DNA, 20 bp, synthetic construct
  misc_feature 1..20: note = chemically synthesized
  source 1..20: mol_type = other DNA
gggggagggagggagggagg

SEQ ID NO: 39295 - DNA, 20 bp, synthetic construct
  misc_feature 1..20: note = chemically synthesized
  source 1..20: mol_type = other DNA
ggggagggagggagggagga

SEQ ID NO: 39296 - DNA, 20 bp, synthetic construct
  misc_feature 1..20: note = chemically synthesized
  source 1..20: mol_type = other DNA
gagggagggagggaggaagg

SEQ ID NO: 39297 - DNA, 20 bp, synthetic construct
  misc_feature 1..20: note = chemically synthesized
  source 1..20: mol_type = other DNA
agggagggagggaggaagga

SEQ ID NO: 39298 - DNA, 20 bp, synthetic construct
  misc_feature 1..20: note = chemically synthesized
  source 1..20: mol_type = other DNA
ctttcttcttgatgttgtta

SEQ ID NO: 39299 - DNA, 20 bp, synthetic construct
  misc_feature 1..20: note = chemically synthesized
  source 1..20: mol_type = other DNA
accatgattgatgtaaaaat

SEQ ID NO: 39300 - DNA, 20 bp, synthetic construct
  misc_feature 1..20: note = chemically synthesized
  source 1..20: mol_type = other DNA
catgattgatgtaaaaatta

SEQ ID NO: 39301 - DNA, 20 bp, synthetic construct
  misc_feature 1..20: note = chemically synthesized
  source 1..20: mol_type = other DNA
tgtaaaaattagagacatcg

SEQ ID NO: 39302 - DNA, 20 bp, synthetic construct
  misc_feature 1..20: note = chemically synthesized
  source 1..20: mol_type = other DNA
catcgaagtactaaacaata

SEQ ID NO: 39303 - DNA, 20 bp, synthetic construct
  misc_feature 1..20: note = chemically synthesized
  source 1..20: mol_type = other DNA
aagtactaaacaataaagaa

SEQ ID NO: 39304 - DNA, 20 bp, synthetic construct
  misc_feature 1..20: note = chemically synthesized
  source 1..20: mol_type = other DNA
agtactaaacaataaagaaa

SEQ ID NO: 39305 - DNA, 20 bp, synthetic construct
  misc_feature 1..20: note = chemically synthesized
  source 1..20: mol_type = other DNA
tactaaacaataaagaaaag

SEQ ID NO: 39306 - DNA, 20 bp, synthetic construct
  misc_feature 1..20: note = chemically synthesized
  source 1..20: mol_type = other DNA
aaacaataaagaaaaggaga

SEQ ID NO: 39307 - DNA, 20 bp, synthetic construct
  misc_feature 1..20: note = chemically synthesized
  source 1..20: mol_type = other DNA
gaaaaggagatagcattgtt

SEQ ID NO: 39308 - DNA, 20 bp, synthetic construct
  misc_feature 1..20: note = chemically synthesized
  source 1..20: mol_type = other DNA
attgtttggcatgcttgaac

SEQ ID NO: 39309 - DNA, 20 bp, synthetic construct
  misc_feature 1..20: note = chemically synthesized
  source 1..20: mol_type = other DNA
actagtaatcttattacaaa

SEQ ID NO: 39310 - DNA, 20 bp, synthetic construct
  misc_feature 1..20: note = chemically synthesized
  source 1..20: mol_type = other DNA
aatcttattacaaacagatg

SEQ ID NO: 39311 - DNA, 20 bp, synthetic construct
  misc_feature 1..20: note = chemically synthesized
  source 1..20: mol_type = other DNA
tcttattacaaacagatgta

SEQ ID NO: 39312 - DNA, 20 bp, synthetic construct
  misc_feature 1..20: note = chemically synthesized
  source 1..20: mol_type = other DNA
cttattacaaacagatgtag

SEQ ID NO: 39313 - DNA, 20 bp, synthetic construct
  misc_feature 1..20: note = chemically synthesized
  source 1..20: mol_type = other DNA
aaacagatgtagaggttgta

SEQ ID NO: 39314 - DNA, 20 bp, synthetic construct
  misc_feature 1..20: note = chemically synthesized
  source 1..20: mol_type = other DNA
aacagatgtagaggttgtaa

SEQ ID NO: 39315 - DNA, 20 bp, synthetic construct
  misc_feature 1..20: note = chemically synthesized
  source 1..20: mol_type = other DNA
ggttgtaaaggtctacaatt

SEQ ID NO: 39316 - DNA, 20 bp, synthetic construct
  misc_feature 1..20: note = chemically synthesized
  source 1..20: mol_type = other DNA
caatttggctacaaaaccaa

SEQ ID NO: 39317 - DNA, 20 bp, synthetic construct
  misc_feature 1..20: note = chemically synthesized
  source 1..20: mol_type = other DNA
aaaaccaatggcttgatcac

SEQ ID NO: 39318 - DNA, 20 bp, synthetic construct
  misc_feature 1..20: note = chemically synthesized
  source 1..20: mol_type = other DNA
caatggcttgatcacaagaa

SEQ ID NO: 39319 - DNA, 20 bp, synthetic construct
  misc_feature 1..20: note = chemically synthesized
  source 1..20: mol_type = other DNA
atagcattcatttgcttaac

SEQ ID NO: 39320 - DNA, 20 bp, synthetic construct
  misc_feature 1..20: note = chemically synthesized
  source 1..20: mol_type = other DNA
ttgcttaactagtacttact

SEQ ID NO: 39321 - DNA, 20 bp, synthetic construct
  misc_feature 1..20: note = chemically synthesized
  source 1..20: mol_type = other DNA
ctgagcacccactatatgtt

SEQ ID NO: 39322 - DNA, 20 bp, synthetic construct
  misc_feature 1..20: note = chemically synthesized
  source 1..20: mol_type = other DNA
tatatgttaagctccatttt

SEQ ID NO: 39323 - DNA, 20 bp, synthetic construct
  misc_feature 1..20: note = chemically synthesized
  source 1..20: mol_type = other DNA
gtcactcacttaaaatcttt

SEQ ID NO: 39324 - DNA, 20 bp, synthetic construct
  misc_feature 1..20: note = chemically synthesized
  source 1..20: mol_type = other DNA
actcacttaaaatctttcag

SEQ ID NO: 39325 - DNA, 20 bp, synthetic construct
  misc_feature 1..20: note = chemically synthesized
  source 1..20: mol_type = other DNA
cagaagttttgttttactgt

SEQ ID NO: 39326 - DNA, 20 bp, synthetic construct
  misc_feature 1..20: note = chemically synthesized
  source 1..20: mol_type = other DNA
tttgttttactgtgagtaca

SEQ ID NO: 39327 - DNA, 20 bp, synthetic construct
  misc_feature 1..20: note = chemically synthesized
  source 1..20: mol_type = other DNA
tgttttactgtgagtacaaa

SEQ ID NO: 39328 - DNA, 20 bp, synthetic construct
  misc_feature 1..20: note = chemically synthesized
  source 1..20: mol_type = other DNA
agagaactgactttatgata

SEQ ID NO: 39329 - DNA, 20 bp, synthetic construct
  misc_feature 1..20: note = chemically synthesized
  source 1..20: mol_type = other DNA
ttatgatatggttatttacc

SEQ ID NO: 39330 - DNA, 20 bp, synthetic construct
  misc_feature 1..20: note = chemically synthesized
  source 1..20: mol_type = other DNA
tttaccaagccgtcacttct

SEQ ID NO: 39331 - DNA, 20 bp, synthetic construct
  misc_feature 1..20: note = chemically synthesized
  source 1..20: mol_type = other DNA
agccgtcacttcttagctac

SEQ ID NO: 39332 - DNA, 20 bp, synthetic construct
  misc_feature 1..20: note = chemically synthesized
  source 1..20: mol_type = other DNA
tcacttcttagctacaagtc

SEQ ID NO: 39333 - DNA, 20 bp, synthetic construct
  misc_feature 1..20: note = chemically synthesized
  source 1..20: mol_type = other DNA
agctacaagtctagaatcaa

SEQ ID NO: 39334 - DNA, 20 bp, synthetic construct
  misc_feature 1..20: note = chemically synthesized
  source 1..20: mol_type = other DNA
gctacaagtctagaatcaac

SEQ ID NO: 39335 - DNA, 20 bp, synthetic construct
  misc_feature 1..20: note = chemically synthesized
  source 1..20: mol_type = other DNA
aggttctgcaaaatgaattc

SEQ ID NO: 39336 - DNA, 20 bp, synthetic construct
  misc_feature 1..20: note = chemically synthesized
  source 1..20: mol_type = other DNA
tatgacctaaaatcacgttt

SEQ ID NO: 39337 - DNA, 20 bp, synthetic construct
  misc_feature 1..20: note = chemically synthesized
  source 1..20: mol_type = other DNA
aaaatcttacctgaatatat

SEQ ID NO: 39338 - DNA, 20 bp, synthetic construct
  misc_feature 1..20: note = chemically synthesized
  source 1..20: mol_type = other DNA
aatcttacctgaatatatga

SEQ ID NO: 39339 - DNA, 20 bp, synthetic construct
  misc_feature 1..20: note = chemically synthesized
  source 1..20: mol_type = other DNA
atcttacctgaatatatgag

SEQ ID NO: 39340 - DNA, 20 bp, synthetic construct
  misc_feature 1..20: note = chemically synthesized
  source 1..20: mol_type = other DNA
tgaatatatgagaggatatt

SEQ ID NO: 39341 - DNA, 20 bp, synthetic construct
  misc_feature 1..20: note = chemically synthesized
  source 1..20: mol_type = other DNA
gaatatatgagaggatattt

SEQ ID NO: 39342 - DNA, 20 bp, synthetic construct
  misc_feature 1..20: note = chemically synthesized
  source 1..20: mol_type = other DNA
tatttaggtttttttcccct

SEQ ID NO: 39343 - DNA, 20 bp, synthetic construct
  misc_feature 1..20: note = chemically synthesized
  source 1..20: mol_type = other DNA
ttttttcccctaagtataaa

SEQ ID NO: 39344 - DNA, 20 bp, synthetic construct
  misc_feature 1..20: note = chemically synthesized
  source 1..20: mol_type = other DNA
tttttcccctaagtataaac

SEQ ID NO: 39345 - DNA, 20 bp, synthetic construct
  misc_feature 1..20: note = chemically synthesized
  source 1..20: mol_type = other DNA
ccctaagtataaacaggtga

SEQ ID NO: 39346 - DNA, 20 bp, synthetic construct
  misc_feature 1..20: note = chemically synthesized
  source 1..20: mol_type = other DNA
tataaacaggtgatagtaaa

SEQ ID NO: 39347 - DNA, 20 bp, synthetic construct
  misc_feature 1..20: note = chemically synthesized
  source 1..20: mol_type = other DNA
taaacaggtgatagtaaata

SEQ ID NO: 39348 - DNA, 20 bp, synthetic construct
  misc_feature 1..20: note = chemically synthesized
  source 1..20: mol_type = other DNA
taaatagagtaacttgctgc

SEQ ID NO: 39349 - DNA, 20 bp, synthetic construct
  misc_feature 1..20: note = chemically synthesized
  source 1..20: mol_type = other DNA
cgagtgtcacatatattatg

SEQ ID NO: 39350 - DNA, 20 bp, synthetic construct
  misc_feature 1..20: note = chemically synthesized
  source 1..20: mol_type = other DNA
tatcactattttaaatctga

SEQ ID NO: 39351 - DNA, 20 bp, synthetic construct
  misc_feature 1..20: note = chemically synthesized
  source 1..20: mol_type = other DNA
gactgaatttgacatgtttt

SEQ ID NO: 39352 - DNA, 20 bp, synthetic construct
  misc_feature 1..20: note = chemically synthesized
  source 1..20: mol_type = other DNA
aatttgacatgttttgagat

SEQ ID NO: 39353 - DNA, 20 bp, synthetic construct
  misc_feature 1..20: note = chemically synthesized
  source 1..20: mol_type = other DNA
tttgacatgttttgagataa

SEQ ID NO: 39354 - DNA, 20 bp, synthetic construct
  misc_feature 1..20: note = chemically synthesized
  source 1..20: mol_type = other DNA
catgttttgagataagagtt

SEQ ID NO: 39355 - DNA, 20 bp, synthetic construct
  misc_feature 1..20: note = chemically synthesized
  source 1..20: mol_type = other DNA
atgttttgagataagagttt

SEQ ID NO: 39356 - DNA, 20 bp, synthetic construct
  misc_feature 1..20: note = chemically synthesized
  source 1..20: mol_type = other DNA
tgttttgagataagagttta

SEQ ID NO: 39357 - DNA, 20 bp, synthetic construct
  misc_feature 1..20: note = chemically synthesized
  source 1..20: mol_type = other DNA
tttgagataagagtttaggg

SEQ ID NO: 39358 - DNA, 20 bp, synthetic construct
  misc_feature 1..20: note = chemically synthesized
  source 1..20: mol_type = other DNA
tgagataagagtttagggta

SEQ ID NO: 39359 - DNA, 20 bp, synthetic construct
  misc_feature 1..20: note = chemically synthesized
  source 1..20: mol_type = other DNA
gttgtgtatctgcacgatct

SEQ ID NO: 39360 - DNA, 20 bp, synthetic construct
  misc_feature 1..20: note = chemically synthesized
  source 1..20: mol_type = other DNA
acgatcttagactacttaaa

SEQ ID NO: 39361 - DNA, 20 bp, synthetic construct
  misc_feature 1..20: note = chemically synthesized
  source 1..20: mol_type = other DNA
agactacttaaatagaaact

SEQ ID NO: 39362 - DNA, 20 bp, synthetic construct
  misc_feature 1..20: note = chemically synthesized
  source 1..20: mol_type = other DNA
agcacataatccaatgaaaa

SEQ ID NO: 39363 - DNA, 20 bp, synthetic construct
  misc_feature 1..20: note = chemically synthesized
  source 1..20: mol_type = other DNA
cacataatccaatgaaaaaa

SEQ ID NO: 39364 - DNA, 20 bp, synthetic construct
  misc_feature 1..20: note = chemically synthesized
  source 1..20: mol_type = other DNA
tccaatgaaaaaagagattt

SEQ ID NO: 39365 - DNA, 20 bp, synthetic construct
  misc_feature 1..20: note = chemically synthesized
  source 1..20: mol_type = other DNA
tgaaaaaagagatttcagaa

SEQ ID NO: 39366 - DNA, 20 bp, synthetic construct
  misc_feature 1..20: note = chemically synthesized
  source 1..20: mol_type = other DNA
gaaaaaagagatttcagaat

SEQ ID NO: 39367 - DNA, 20 bp, synthetic construct
  misc_feature 1..20: note = chemically synthesized
  source 1..20: mol_type = other DNA
gggactaatatgacaacatc

SEQ ID NO: 39368 - DNA, 20 bp, synthetic construct
  misc_feature 1..20: note = chemically synthesized
  source 1..20: mol_type = other DNA
tctggattattatgttcaat

SEQ ID NO: 39369 - DNA, 20 bp, synthetic construct
  misc_feature 1..20: note = chemically synthesized
  source 1..20: mol_type = other DNA
ctggattattatgttcaata

SEQ ID NO: 39370 - DNA, 20 bp, synthetic construct
  misc_feature 1..20: note = chemically synthesized
  source 1..20: mol_type = other DNA
gattattatgttcaataagg

SEQ ID NO: 39371 - DNA, 20 bp, synthetic construct
  misc_feature 1..20: note = chemically synthesized
  source 1..20: mol_type = other DNA
ttattatgttcaataaggtg

SEQ ID NO: 39372 - DNA, 20 bp, synthetic construct
  misc_feature 1..20: note = chemically synthesized
  source 1..20: mol_type = other DNA
ttcaataaggtggagcatca

SEQ ID NO: 39373 - DNA, 20 bp, synthetic construct
  misc_feature 1..20: note = chemically synthesized
  source 1..20: mol_type = other DNA
tcaataaggtggagcatcat

SEQ ID NO: 39374 - DNA, 20 bp, synthetic construct
  misc_feature 1..20: note = chemically synthesized
  source 1..20: mol_type = other DNA
gagcatcataggaaataaat

SEQ ID NO: 39375 - DNA, 20 bp, synthetic construct
  misc_feature 1..20: note = chemically synthesized
  source 1..20: mol_type = other DNA
agcatcataggaaataaatc

SEQ ID NO: 39376 - DNA, 20 bp, synthetic construct
  misc_feature 1..20: note = chemically synthesized
  source 1..20: mol_type = other DNA
cataggaaataaatcaggat

SEQ ID NO: 39377 - DNA, 20 bp, synthetic construct
  misc_feature 1..20: note = chemically synthesized
  source 1..20: mol_type = other DNA
ataggaaataaatcaggatt

SEQ ID NO: 39378 - DNA, 20 bp, synthetic construct
  misc_feature 1..20: note = chemically synthesized
  source 1..20: mol_type = other DNA
aattacatgataaacattta

SEQ ID NO: 39379 - DNA, 20 bp, synthetic construct
  misc_feature 1..20: note = chemically synthesized
  source 1..20: mol_type = other DNA
attacatgataaacatttaa

SEQ ID NO: 39380 - DNA, 20 bp, synthetic construct
  misc_feature 1..20: note = chemically synthesized
  source 1..20: mol_type = other DNA
atttaaaggactgttgatat

SEQ ID NO: 39381 - DNA, 20 bp, synthetic construct
  misc_feature 1..20: note = chemically synthesized
  source 1..20: mol_type = other DNA
gttgatattggttcacccat

SEQ ID NO: 39382 - DNA, 20 bp, synthetic construct
  misc_feature 1..20: note = chemically synthesized
  source 1..20: mol_type = other DNA
ttgatattggttcacccatc

SEQ ID NO: 39383 - DNA, 20 bp, synthetic construct
  misc_feature 1..20: note = chemically synthesized
  source 1..20: mol_type = other DNA
tattggttcacccatcagga

SEQ ID NO: 39384 - DNA, 20 bp, synthetic construct
  misc_feature 1..20: note = chemically synthesized
  source 1..20: mol_type = other DNA
tggttcacccatcaggaaag

SEQ ID NO: 39385 - DNA, 20 bp, synthetic construct
  misc_feature 1..20: note = chemically synthesized
  source 1..20: mol_type = other DNA
acccatcaggaaagaagtct

SEQ ID NO: 39386 - DNA, 20 bp, synthetic construct
  misc_feature 1..20: note = chemically synthesized
  source 1..20: mol_type = other DNA
cccatcaggaaagaagtctt

SEQ ID NO: 39387 - DNA, 20 bp, synthetic construct
  misc_feature 1..20: note = chemically synthesized
  source 1..20: mol_type = other DNA
ccatcaggaaagaagtctta

SEQ ID NO: 39388 - DNA, 20 bp, synthetic construct
  misc_feature 1..20: note = chemically synthesized
  source 1..20: mol_type = other DNA
aagtcttagggtttttaatg

SEQ ID NO: 39389 - DNA, 20 bp, synthetic construct
  misc_feature 1..20: note = chemically synthesized
  source 1..20: mol_type = other DNA
tgcagatatctttatacatc

SEQ ID NO: 39390 - DNA, 20 bp, synthetic construct
  misc_feature 1..20: note = chemically synthesized
  source 1..20: mol_type = other DNA
aaaattatgtatgaatataa

SEQ ID NO: 39391 - DNA, 20 bp, synthetic construct
  misc_feature 1..20: note = chemically synthesized
  source 1..20: mol_type = other DNA
tgaatataatggctaatata

SEQ ID NO: 39392 - DNA, 20 bp, synthetic construct
  misc_feature 1..20: note = chemically synthesized
  source 1..20: mol_type = other DNA
aatatatggttattttattc

SEQ ID NO: 39393 - DNA, 20 bp, synthetic construct
  misc_feature 1..20: note = chemically synthesized
  source 1..20: mol_type = other DNA
tatatggttattttattctg

SEQ ID NO: 39394 - DNA, 20 bp, synthetic construct
  misc_feature 1..20: note = chemically synthesized
  source 1..20: mol_type = other DNA
ggttattttattctggagat

SEQ ID NO: 39395 - DNA, 20 bp, synthetic construct
  misc_feature 1..20: note = chemically synthesized
  source 1..20: mol_type = other DNA
tggagatcagacctaaatat

SEQ ID NO: 39396 - DNA, 20 bp, synthetic construct
  misc_feature 1..20: note = chemically synthesized
  source 1..20: mol_type = other DNA
ggagatcagacctaaatata

SEQ ID NO: 39397 - DNA, 20 bp, synthetic construct
  misc_feature 1..20: note = chemically synthesized
  source 1..20: mol_type = other DNA
agatcagacctaaatataag

SEQ ID NO: 39398 - DNA, 20 bp, synthetic construct
  misc_feature 1..20: note = chemically synthesized
  source 1..20: mol_type = other DNA
tcagacctaaatataaggag

SEQ ID NO: 39399 - DNA, 20 bp, synthetic construct
  misc_feature 1..20: note = chemically synthesized
  source 1..20: mol_type = other DNA
ggagtagatattatatgttt

SEQ ID NO: 39400 - DNA, 20 bp, synthetic construct
  misc_feature 1..20: note = chemically synthesized
  source 1..20: mol_type = other DNA
agtagatattatatgtttca

SEQ ID NO: 39401 - DNA, 20 bp, synthetic construct
  misc_feature 1..20: note = chemically synthesized
  source 1..20: mol_type = other DNA
agatattatatgtttcagag

SEQ ID NO: 39402 - DNA, 20 bp, synthetic construct
  misc_feature 1..20: note = chemically synthesized
  source 1..20: mol_type = other DNA
cctatgcatacatatattga

SEQ ID NO: 39403 - DNA, 20 bp, synthetic construct
  misc_feature 1..20: note = chemically synthesized
  source 1..20: mol_type = other DNA
aaacccacatatatatgaat

SEQ ID NO: 39404 - DNA, 20 bp, synthetic construct
  misc_feature 1..20: note = chemically synthesized
  source 1..20: mol_type = other DNA
ccacatatatatgaatgaga

SEQ ID NO: 39405 - DNA, 20 bp, synthetic construct
  misc_feature 1..20: note = chemically synthesized
  source 1..20: mol_type = other DNA
tatatatgaatgagatagct

SEQ ID NO: 39406 - DNA, 20 bp, synthetic construct
  misc_feature 1..20: note = chemically synthesized
  source 1..20: mol_type = other DNA
atatatgaatgagatagctc

SEQ ID NO: 39407 - DNA, 20 bp, synthetic construct
  misc_feature 1..20: note = chemically synthesized
  source 1..20: mol_type = other DNA
tatatgaatgagatagctca

SEQ ID NO: 39408 - DNA, 20 bp, synthetic construct
  misc_feature 1..20: note = chemically synthesized
  source 1..20: mol_type = other DNA
atgaatgagatagctcaggg

SEQ ID NO: 39409 - DNA, 20 bp, synthetic construct
  misc_feature 1..20: note = chemically synthesized
  source 1..20: mol_type = other DNA
tgaatgagatagctcagggt

SEQ ID NO: 39410 - DNA, 20 bp, synthetic construct
  misc_feature 1..20: note = chemically synthesized
  source 1..20: mol_type = other DNA
gaatgagatagctcagggta

SEQ ID NO: 39411 - DNA, 20 bp, synthetic construct
  misc_feature 1..20: note = chemically synthesized
  source 1..20: mol_type = other DNA
tgagatagctcagggtaggg

SEQ ID NO: 39412 - DNA, 20 bp, synthetic construct
  misc_feature 1..20: note = chemically synthesized
  source 1..20: mol_type = other DNA
atagctcagggtagggtagt

SEQ ID NO: 39413 - DNA, 20 bp, synthetic construct
  misc_feature 1..20: note = chemically synthesized
  source 1..20: mol_type = other DNA
ggtagtgagttttgaatcaa

SEQ ID NO: 39414 - DNA, 20 bp, synthetic construct
  misc_feature 1..20: note = chemically synthesized
  source 1..20: mol_type = other DNA
gtgagttttgaatcaataga

SEQ ID NO: 39415 - DNA, 20 bp, synthetic construct
  misc_feature 1..20: note = chemically synthesized
  source 1..20: mol_type = other DNA
atgtctgatgaataatcatc

SEQ ID NO: 39416 - DNA, 20 bp, synthetic construct
  misc_feature 1..20: note = chemically synthesized
  source 1..20: mol_type = other DNA
tgaataatcatcaagacgaa

SEQ ID NO: 39417 - DNA, 20 bp, synthetic construct
  misc_feature 1..20: note = chemically synthesized
  source 1..20: mol_type = other DNA
gaataatcatcaagacgaaa

SEQ ID NO: 39418 - DNA, 20 bp, synthetic construct
  misc_feature 1..20: note = chemically synthesized
  source 1..20: mol_type = other DNA
atcatcaagacgaaaaggtt

SEQ ID NO: 39419 - DNA, 20 bp, synthetic construct
  misc_feature 1..20: note = chemically synthesized
  source 1..20: mol_type = other DNA
atcaagacgaaaaggtttgg

SEQ ID NO: 39420 - DNA, 20 bp, synthetic construct
  misc_feature 1..20: note = chemically synthesized
  source 1..20: mol_type = other DNA
aagacgaaaaggtttggtgg

SEQ ID NO: 39421 - DNA, 20 bp, synthetic construct
  misc_feature 1..20: note = chemically synthesized
  source 1..20: mol_type = other DNA
aaaaggtttggtggtggctc

SEQ ID NO: 39422 - DNA, 20 bp, synthetic construct
  misc_feature 1..20: note = chemically synthesized
  source 1..20: mol_type = other DNA
aaaggtttggtggtggctca

SEQ ID NO: 39423 - DNA, 20 bp, synthetic construct
  misc_feature 1..20: note = chemically synthesized
  source 1..20: mol_type = other DNA
ggtggctcaaggattttgta

SEQ ID NO: 39424 - DNA, 20 bp, synthetic construct
  misc_feature 1..20: note = chemically synthesized
  source 1..20: mol_type = other DNA
gtggctcaaggattttgtaa

SEQ ID NO: 39425 - DNA, 20 bp, synthetic construct
  misc_feature 1..20: note = chemically synthesized
  source 1..20: mol_type = other DNA
tggctcaaggattttgtaaa

SEQ ID NO: 39426 - DNA, 20 bp, synthetic construct
  misc_feature 1..20: note = chemically synthesized
  source 1..20: mol_type = other DNA
gattttgtaaagggttgaat

SEQ ID NO: 39427 - DNA, 20 bp, synthetic construct
  misc_feature 1..20: note = chemically synthesized
  source 1..20: mol_type = other DNA
ttttgtaaagggttgaatta

SEQ ID NO: 39428 - DNA, 20 bp, synthetic construct
  misc_feature 1..20: note = chemically synthesized
  source 1..20: mol_type = other DNA
ttgaattagagaatataata

SEQ ID NO: 39429 - DNA, 20 bp, synthetic construct
  misc_feature 1..20: note = chemically synthesized
  source 1..20: mol_type = other DNA
agaatataatacagtttgaa

SEQ ID NO: 39430 - DNA, 20 bp, synthetic construct
  misc_feature 1..20: note = chemically synthesized
  source 1..20: mol_type = other DNA
gaatataatacagtttgaaa

SEQ ID NO: 39431 - DNA, 20 bp, synthetic construct
  misc_feature 1..20: note = chemically synthesized
  source 1..20: mol_type = other DNA
aatataatacagtttgaaaa

SEQ ID NO: 39432 - DNA, 20 bp, synthetic construct
  misc_feature 1..20: note = chemically synthesized
  source 1..20: mol_type = other DNA
atataatacagtttgaaaag

SEQ ID NO: 39433 - DNA, 20 bp, synthetic construct
  misc_feature 1..20: note = chemically synthesized
  source 1..20: mol_type = other DNA
ttcaaatgttaacatttaca

SEQ ID NO: 39434 - DNA, 20 bp, synthetic construct
  misc_feature 1..20: note = chemically synthesized
  source 1..20: mol_type = other DNA
tgttaacatttacaaagaca

SEQ ID NO: 39435 - DNA, 20 bp, synthetic construct
  misc_feature 1..20: note = chemically synthesized
  source 1..20: mol_type = other DNA
atttacaaagacaaagtgac

SEQ ID NO: 39436 - DNA, 20 bp, synthetic construct
  misc_feature 1..20: note = chemically synthesized
  source 1..20: mol_type = other DNA
gtgactggtcttcccactct

SEQ ID NO: 39437 - DNA, 20 bp, synthetic construct
  misc_feature 1..20: note = chemically synthesized
  source 1..20: mol_type = other DNA
tcttcccactctaagaccaa

SEQ ID NO: 39438 - DNA, 20 bp, synthetic construct
  misc_feature 1..20: note = chemically synthesized
  source 1..20: mol_type = other DNA
ctaagaccaatggaacactt

SEQ ID NO: 39439 - DNA, 20 bp, synthetic construct
  misc_feature 1..20: note = chemically synthesized
  source 1..20: mol_type = other DNA
aagaccaatggaacacttga

SEQ ID NO: 39440 - DNA, 20 bp, synthetic construct
  misc_feature 1..20: note = chemically synthesized
  source 1..20: mol_type = other DNA
cacttgagagtgactcattt

SEQ ID NO: 39441 - DNA, 20 bp, synthetic construct
  misc_feature 1..20: note = chemically synthesized
  source 1..20: mol_type = other DNA
ggtcatgcctcatctgatgt

SEQ ID NO: 39442 - DNA, 20 bp, synthetic construct
  misc_feature 1..20: note = chemically synthesized
  source 1..20: mol_type = other DNA
tcatgcctcatctgatgtta

SEQ ID NO: 39443 - DNA, 20 bp, synthetic construct
  misc_feature 1..20: note = chemically synthesized
  source 1..20: mol_type = other DNA
gttagagacacaacttctct

SEQ ID NO: 39444 - DNA, 20 bp, synthetic construct
  misc_feature 1..20: note = chemically synthesized
  source 1..20: mol_type = other DNA
tagagacacaacttctctta

SEQ ID NO: 39445 - DNA, 20 bp, synthetic construct
  misc_feature 1..20: note = chemically synthesized
  source 1..20: mol_type = other DNA
tcttagagactctccttcca

SEQ ID NO: 39446 - DNA, 20 bp, synthetic construct
  misc_feature 1..20: note = chemically synthesized
  source 1..20: mol_type = other DNA
ctccttccaaagaaaaaata

SEQ ID NO: 39447 - DNA, 20 bp, synthetic construct
  misc_feature 1..20: note = chemically synthesized
  source 1..20: mol_type = other DNA
tccttccaaagaaaaaataa

SEQ ID NO: 39448 - DNA, 20 bp, synthetic construct
  misc_feature 1..20: note = chemically synthesized
  source 1..20: mol_type = other DNA
caaagaaaaaataaaggcca

SEQ ID NO: 39449 - DNA, 20 bp, synthetic construct
  misc_feature 1..20: note = chemically synthesized
  source 1..20: mol_type = other DNA
aaagaaaaaataaaggccat

SEQ ID NO: 39450 - DNA, 20 bp, synthetic construct
  misc_feature 1..20: note = chemically synthesized
  source 1..20: mol_type = other DNA
aagaaaaaataaaggccatg

SEQ ID NO: 39451 - DNA, 20 bp, synthetic construct
  misc_feature 1..20: note = chemically synthesized
  source 1..20: mol_type = other DNA
aaaataaaggccatggggac

SEQ ID NO: 39452 - DNA, 20 bp, synthetic construct
  misc_feature 1..20: note = chemically synthesized
  source 1..20: mol_type = other DNA
gccatggggaccagtttcaa

SEQ ID NO: 39453 - DNA, 20 bp, synthetic construct
  misc_feature 1..20: note = chemically synthesized
  source 1..20: mol_type = other DNA
ggggaccagtttcaatggcc

SEQ ID NO: 39454 - DNA, 20 bp, synthetic construct
  misc_feature 1..20: note = chemically synthesized
  source 1..20: mol_type = other DNA
tcaatggcccagatctttcc

SEQ ID NO: 39455 - DNA, 20 bp, synthetic construct
  misc_feature 1..20: note = chemically synthesized
  source 1..20: mol_type = other DNA
caatggcccagatctttccc

SEQ ID NO: 39456 - DNA, 20 bp, synthetic construct
  misc_feature 1..20: note = chemically synthesized
  source 1..20: mol_type = other DNA
ggcccagatctttcccaggt

SEQ ID NO: 39457 - DNA, 20 bp, synthetic construct
  misc_feature 1..20: note = chemically synthesized
  source 1..20: mol_type = other DNA
gcccagatctttcccaggtt

SEQ ID NO: 39458 - DNA, 20 bp, synthetic construct
  misc_feature 1..20: note = chemically synthesized
  source 1..20: mol_type = other DNA
cccagatctttcccaggttg

SEQ ID NO: 39459 - DNA, 20 bp, synthetic construct
  misc_feature 1..20: note = chemically synthesized
  source 1..20: mol_type = other DNA
cagatctttcccaggttggg

SEQ ID NO: 39460 - DNA, 20 bp, synthetic construct
  misc_feature 1..20: note = chemically synthesized
  source 1..20: mol_type = other DNA
agatctttcccaggttgggg

SEQ ID NO: 39461 - DNA, 20 bp, synthetic construct
  misc_feature 1..20: note = chemically synthesized
  source 1..20: mol_type = other DNA
tttcccaggttggggaggaa

SEQ ID NO: 39462 - DNA, 20 bp, synthetic construct
  misc_feature 1..20: note = chemically synthesized
  source 1..20: mol_type = other DNA
tcccaggttggggaggaaaa

SEQ ID NO: 39463 - DNA, 20 bp, synthetic construct
  misc_feature 1..20: note = chemically synthesized
  source 1..20: mol_type = other DNA
gggaggaaaagagaattatt

SEQ ID NO: 39464 - DNA, 20 bp, synthetic construct
  misc_feature 1..20: note = chemically synthesized
  source 1..20: mol_type = other DNA
ctattcccaaatatcctatg

SEQ ID NO: 39465 - DNA, 20 bp, synthetic construct
  misc_feature 1..20: note = chemically synthesized
  source 1..20: mol_type = other DNA
caaatatcctatgtggaaat

SEQ ID NO: 39466 - DNA, 20 bp, synthetic construct
  misc_feature 1..20: note = chemically synthesized
  source 1..20: mol_type = other DNA
tatcctatgtggaaatgagc

SEQ ID NO: 39467 - DNA, 20 bp, synthetic construct
  misc_feature 1..20: note = chemically synthesized
  source 1..20: mol_type = other DNA
atgagctagaataacccctt

SEQ ID NO: 39468 - DNA, 20 bp, synthetic construct
  misc_feature 1..20: note = chemically synthesized
  source 1..20: mol_type = other DNA
gagctagaataaccccttga

SEQ ID NO: 39469 - DNA, 20 bp, synthetic construct
  misc_feature 1..20: note = chemically synthesized
  source 1..20: mol_type = other DNA
gtaacaaatatatctctcat

SEQ ID NO: 39470 - DNA, 20 bp, synthetic construct
  misc_feature 1..20: note = chemically synthesized
  source 1..20: mol_type = other DNA
atatatctctcatcagaatt

SEQ ID NO: 39471 - DNA, 20 bp, synthetic construct
  misc_feature 1..20: note = chemically synthesized
  source 1..20: mol_type = other DNA
atatctctcatcagaattaa

SEQ ID NO: 39472 - DNA, 20 bp, synthetic construct
  misc_feature 1..20: note = chemically synthesized
  source 1..20: mol_type = other DNA
cagaattaagagtaaatact

SEQ ID NO: 39473 - DNA, 20 bp, synthetic construct
  misc_feature 1..20: note = chemically synthesized
  source 1..20: mol_type = other DNA
agaattaagagtaaatactg

SEQ ID NO: 39474 - DNA, 20 bp, synthetic construct
  misc_feature 1..20: note = chemically synthesized
  source 1..20: mol_type = other DNA
aagagtaaatactgaggata

SEQ ID NO: 39475 - DNA, 20 bp, synthetic construct
  misc_feature 1..20: note = chemically synthesized
  source 1..20: mol_type = other DNA
tatagcaaacaaccaatatt

SEQ ID NO: 39476 - DNA, 20 bp, synthetic construct
  misc_feature 1..20: note = chemically synthesized
  source 1..20: mol_type = other DNA
atagcaaacaaccaatattc

SEQ ID NO: 39477 - DNA, 20 bp, synthetic construct
  misc_feature 1..20: note = chemically synthesized
  source 1..20: mol_type = other DNA
accaatattcaggtcatgct

SEQ ID NO: 39478 - DNA, 20 bp, synthetic construct
  misc_feature 1..20: note = chemically synthesized
  source 1..20: mol_type = other DNA
ggtcatgctcagaaaccgca

SEQ ID NO: 39479 - DNA, 20 bp, synthetic construct
  misc_feature 1..20: note = chemically synthesized
  source 1..20: mol_type = other DNA
tcatgctcagaaaccgcaaa

SEQ ID NO: 39480 - DNA, 20 bp, synthetic construct
  misc_feature 1..20: note = chemically synthesized
  source 1..20: mol_type = other DNA
aaaccgcaaagagaaaactg

SEQ ID NO: 39481 - DNA, 20 bp, synthetic construct
  misc_feature 1..20: note = chemically synthesized
  source 1..20: mol_type = other DNA
gcaaagagaaaactgtggct

SEQ ID NO: 39482 - DNA, 20 bp, synthetic construct
  misc_feature 1..20: note = chemically synthesized
  source 1..20: mol_type = other DNA
caaagagaaaactgtggctc

SEQ ID NO: 39483 - DNA, 20 bp, synthetic construct
  misc_feature 1..20: note = chemically synthesized
  source 1..20: mol_type = other DNA
gagaaaactgtggctcaggt

SEQ ID NO: 39484 - DNA, 20 bp, synthetic construct
  misc_feature 1..20: note = chemically synthesized
  source 1..20: mol_type = other DNA
aactgtggctcaggtaagaa

SEQ ID NO: 39485 - DNA, 20 bp, synthetic construct
  misc_feature 1..20: note = chemically synthesized
  source 1..20: mol_type = other DNA
tggctcaggtaagaaaagcc

SEQ ID NO: 39486 - DNA, 20 bp, synthetic construct
  misc_feature 1..20: note = chemically synthesized
  source 1..20: mol_type = other DNA
ggctcaggtaagaaaagcca

SEQ ID NO: 39487 - DNA, 20 bp, synthetic construct
  misc_feature 1..20: note = chemically synthesized
  source 1..20: mol_type = other DNA
aaaagccaaggattcaaata

SEQ ID NO: 39488 - DNA, 20 bp, synthetic construct
  misc_feature 1..20: note = chemically synthesized
  source 1..20: mol_type = other DNA
aaagccaaggattcaaatac

SEQ ID NO: 39489 - DNA, 20 bp, synthetic construct
  misc_feature 1..20: note = chemically synthesized
  source 1..20: mol_type = other DNA
gccaaggattcaaatacggg

SEQ ID NO: 39490 - DNA, 20 bp, synthetic construct
  misc_feature 1..20: note = chemically synthesized
  source 1..20: mol_type = other DNA
aggattcaaatacgggaagc

SEQ ID NO: 39491 - DNA, 20 bp, synthetic construct
  misc_feature 1..20: note = chemically synthesized
  source 1..20: mol_type = other DNA
gtttaaccatttccatttga

SEQ ID NO: 39492 - DNA, 20 bp, synthetic construct
  misc_feature 1..20: note = chemically synthesized
  source 1..20: mol_type = other DNA
catttccatttgatggacat

SEQ ID NO: 39493 - DNA, 20 bp, synthetic construct
  misc_feature 1..20: note = chemically synthesized
  source 1..20: mol_type = other DNA
ccatttgatggacattggtt

SEQ ID NO: 39494 - DNA, 20 bp, synthetic construct
  misc_feature 1..20: note = chemically synthesized
  source 1..20: mol_type = other DNA
tggacattggttgagaatat

SEQ ID NO: 39495 - DNA, 20 bp, synthetic construct
  misc_feature 1..20: note = chemically synthesized
  source 1..20: mol_type = other DNA
attggttgagaatatgagct

SEQ ID NO: 39496 - DNA, 20 bp, synthetic construct
  misc_feature 1..20: note = chemically synthesized
  source 1..20: mol_type = other DNA
ttggttgagaatatgagctt

SEQ ID NO: 39497 - DNA, 20 bp, synthetic construct
  misc_feature 1..20: note = chemically synthesized
  source 1..20: mol_type = other DNA
gagaatatgagcttgggttt

SEQ ID NO: 39498 - DNA, 20 bp, synthetic construct
  misc_feature 1..20: note = chemically synthesized
  source 1..20: mol_type = other DNA
agaatatgagcttgggtttt

SEQ ID NO: 39499 - DNA, 20 bp, synthetic construct
  misc_feature 1..20: note = chemically synthesized
  source 1..20: mol_type = other DNA
tatgagcttgggttttgggt

SEQ ID NO: 39500 - DNA, 20 bp, synthetic construct
  misc_feature 1..20: note = chemically synthesized
  source 1..20: mol_type = other DNA
aattcctttatgacacatat

SEQ ID NO: 39501 - DNA, 20 bp, synthetic construct
  misc_feature 1..20: note = chemically synthesized
  source 1..20: mol_type = other DNA
acatattagttgcgtgatct

SEQ ID NO: 39502 - DNA, 20 bp, synthetic construct
  misc_feature 1..20: note = chemically synthesized
  source 1..20: mol_type = other DNA
catattagttgcgtgatctt

SEQ ID NO: 39503 - DNA, 20 bp, synthetic construct
  misc_feature 1..20: note = chemically synthesized
  source 1..20: mol_type = other DNA
gctaattgcttaacttgtct

SEQ ID NO: 39504 - DNA, 20 bp, synthetic construct
  misc_feature 1..20: note = chemically synthesized
  source 1..20: mol_type = other DNA
ctaattgcttaacttgtcta

SEQ ID NO: 39505 - DNA, 20 bp, synthetic construct
  misc_feature 1..20: note = chemically synthesized
  source 1..20: mol_type = other DNA
ttttctctctctctctttaa

SEQ ID NO: 39506 - DNA, 20 bp, synthetic construct
  misc_feature 1..20: note = chemically synthesized
  source 1..20: mol_type = other DNA
acagatttttctctgttgcc

SEQ ID NO: 39507 - DNA, 20 bp, synthetic construct
  misc_feature 1..20: note = chemically synthesized
  source 1..20: mol_type = other DNA
cagatttttctctgttgccc

SEQ ID NO: 39508 - DNA, 20 bp, synthetic construct
  misc_feature 1..20: note = chemically synthesized
  source 1..20: mol_type = other DNA
tttttctctgttgcccaggc

SEQ ID NO: 39509 - DNA, 20 bp, synthetic construct
  misc_feature 1..20: note = chemically synthesized
  source 1..20: mol_type = other DNA
tttctctgttgcccaggcta

SEQ ID NO: 39510 - DNA, 20 bp, synthetic construct
  misc_feature 1..20: note = chemically synthesized
  source 1..20: mol_type = other DNA
ctgttgcccaggctagagtg

SEQ ID NO: 39511 - DNA, 20 bp, synthetic construct
  misc_feature 1..20: note = chemically synthesized
  source 1..20: mol_type = other DNA
ttgcccaggctagagtgcag

SEQ ID NO: 39512 - DNA, 20 bp, synthetic construct
  misc_feature 1..20: note = chemically synthesized
  source 1..20: mol_type = other DNA
agagtgcagtggtgcgatct

SEQ ID NO: 39513 - DNA, 20 bp, synthetic construct
  misc_feature 1..20: note = chemically synthesized
  source 1..20: mol_type = other DNA
ctcactgcgacctcctccac

SEQ ID NO: 39514 - DNA, 20 bp, synthetic construct
  misc_feature 1..20: note = chemically synthesized
  source 1..20: mol_type = other DNA
tcactgcgacctcctccacc

SEQ ID NO: 39515 - DNA, 20 bp, synthetic construct
  misc_feature 1..20: note = chemically synthesized
  source 1..20: mol_type = other DNA
cactgcgacctcctccacca

SEQ ID NO: 39516 - DNA, 20 bp, synthetic construct
  misc_feature 1..20: note = chemically synthesized
  source 1..20: mol_type = other DNA
cgacctcctccaccagggtt

SEQ ID NO: 39517 - DNA, 20 bp, synthetic construct
  misc_feature 1..20: note = chemically synthesized
  source 1..20: mol_type = other DNA
gacctcctccaccagggttc

SEQ ID NO: 39518 - DNA, 20 bp, synthetic construct
  misc_feature 1..20: note = chemically synthesized
  source 1..20: mol_type = other DNA
acctcctccaccagggttca

SEQ ID NO: 39519 - DNA, 20 bp, synthetic construct
  misc_feature 1..20: note = chemically synthesized
  source 1..20: mol_type = other DNA
cctcctccaccagggttcag

SEQ ID NO: 39520 - DNA, 20 bp, synthetic construct
  misc_feature 1..20: note = chemically synthesized
  source 1..20: mol_type = other DNA
ttcaggggattctcatgcct

SEQ ID NO: 39521 - DNA, 20 bp, synthetic construct
  misc_feature 1..20: note = chemically synthesized
  source 1..20: mol_type = other DNA
gattctcatgcctcagcctc

SEQ ID NO: 39522 - DNA, 20 bp, synthetic construct
  misc_feature 1..20: note = chemically synthesized
  source 1..20: mol_type = other DNA
ttctcatgcctcagcctcca

SEQ ID NO: 39523 - DNA, 20 bp, synthetic construct
  misc_feature 1..20: note = chemically synthesized
  source 1..20: mol_type = other DNA
tcatgcctcagcctccagag

SEQ ID NO: 39524 - DNA, 20 bp, synthetic construct
  misc_feature 1..20: note = chemically synthesized
  source 1..20: mol_type = other DNA
gcctcagcctccagagtagc

SEQ ID NO: 39525 - DNA, 20 bp, synthetic construct
  misc_feature 1..20: note = chemically synthesized
  source 1..20: mol_type = other DNA
cctcagcctccagagtagct

SEQ ID NO: 39526 - DNA, 20 bp, synthetic construct
  misc_feature 1..20: note = chemically synthesized
  source 1..20: mol_type = other DNA
tgatcatgtgccaccacacc

SEQ ID NO: 39527 - DNA, 20 bp, synthetic construct
  misc_feature 1..20: note = chemically synthesized
  source 1..20: mol_type = other DNA
ctggcttatttttgtaatta

SEQ ID NO: 39528 - DNA, 20 bp, synthetic construct
  misc_feature 1..20: note = chemically synthesized
  source 1..20: mol_type = other DNA
gcttatttttgtaattatag

SEQ ID NO: 39529 - DNA, 20 bp, synthetic construct
  misc_feature 1..20: note = chemically synthesized
  source 1..20: mol_type = other DNA
ttttgtaattatagtagtga

SEQ ID NO: 39530 - DNA, 20 bp, synthetic construct
  misc_feature 1..20: note = chemically synthesized
  source 1..20: mol_type = other DNA
gtgatggtgttttgccatgt

SEQ ID NO: 39531 - DNA, 20 bp, synthetic construct
  misc_feature 1..20: note = chemically synthesized
  source 1..20: mol_type = other DNA
ggtgttttgccatgttggcc

SEQ ID NO: 39532 - DNA, 20 bp, synthetic construct
  misc_feature 1..20: note = chemically synthesized
  source 1..20: mol_type = other DNA
ttttgccatgttggcccagc

SEQ ID NO: 39533 - DNA, 20 bp, synthetic construct
  misc_feature 1..20: note = chemically synthesized
  source 1..20: mol_type = other DNA
ggtctcgaactcctgaactc

SEQ ID NO: 39534 - DNA, 20 bp, synthetic construct
  misc_feature 1..20: note = chemically synthesized
  source 1..20: mol_type = other DNA
ctcaagtgatccaccctcct

SEQ ID NO: 39535 - DNA, 20 bp, synthetic construct
  misc_feature 1..20: note = chemically synthesized
  source 1..20: mol_type = other DNA
ccaccctcctcggcctccca

SEQ ID NO: 39536 - DNA, 20 bp, synthetic construct
  misc_feature 1..20: note = chemically synthesized
  source 1..20: mol_type = other DNA
tcctcggcctcccaaagtgc

SEQ ID NO: 39537 - DNA, 20 bp, synthetic construct
  misc_feature 1..20: note = chemically synthesized
  source 1..20: mol_type = other DNA
cctcggcctcccaaagtgct

SEQ ID NO: 39538 - DNA, 20 bp, synthetic construct
  misc_feature 1..20: note = chemically synthesized
  source 1..20: mol_type = other DNA
ctcccaaagtgctgggatta

SEQ ID NO: 39539 - DNA, 20 bp, synthetic construct
  misc_feature 1..20: note = chemically synthesized
  source 1..20: mol_type = other DNA
tcccaaagtgctgggattat

SEQ ID NO: 39540 - DNA, 20 bp, synthetic construct
  misc_feature 1..20: note = chemically synthesized
  source 1..20: mol_type = other DNA
agtgctgggattataggcat

SEQ ID NO: 39541 - DNA, 20 bp, synthetic construct
  misc_feature 1..20: note = chemically synthesized
  source 1..20: mol_type = other DNA
taggcatgagccaccgtgcc

SEQ ID NO: 39542 - DNA, 20 bp, synthetic construct
  misc_feature 1..20: note = chemically synthesized
  source 1..20: mol_type = other DNA
tttactcactttttgtctca

SEQ ID NO: 39543 - DNA, 20 bp, synthetic construct
  misc_feature 1..20: note = chemically synthesized
  source 1..20: mol_type = other DNA
actttttgtctcacagtcat

SEQ ID NO: 39544 - DNA, 20 bp, synthetic construct
  misc_feature 1..20: note = chemically synthesized
  source 1..20: mol_type = other DNA
ctttttgtctcacagtcatt

SEQ ID NO: 39545 - DNA, 20 bp, synthetic construct
  misc_feature 1..20: note = chemically synthesized
  source 1..20: mol_type = other DNA
tgaaattgtcaatattacca

SEQ ID NO: 39546 - DNA, 20 bp, synthetic construct
  misc_feature 1..20: note = chemically synthesized
  source 1..20: mol_type = other DNA
tgtcaatattaccaaagacc

SEQ ID NO: 39547 - DNA, 20 bp, synthetic construct
  misc_feature 1..20: note = chemically synthesized
  source 1..20: mol_type = other DNA
ttttcactattaacctacca

SEQ ID NO: 39548 - DNA, 20 bp, synthetic construct
  misc_feature 1..20: note = chemically synthesized
  source 1..20: mol_type = other DNA
tcattgtttttttgtaaata

SEQ ID NO: 39549 - DNA, 20 bp, synthetic construct
  misc_feature 1..20: note = chemically synthesized
  source 1..20: mol_type = other DNA
cttctttgtctatctccttt

SEQ ID NO: 39550 - DNA, 20 bp, synthetic construct
  misc_feature 1..20: note = chemically synthesized
  source 1..20: mol_type = other DNA
ttgagatctttctttttact

SEQ ID NO: 39551 - DNA, 20 bp, synthetic construct
  misc_feature 1..20: note = chemically synthesized
  source 1..20: mol_type = other DNA
gagatctttctttttactga

SEQ ID NO: 39552 - DNA, 20 bp, synthetic construct
  misc_feature 1..20: note = chemically synthesized
  source 1..20: mol_type = other DNA
actgagagcaaaatttgtcc

SEQ ID NO: 39553 - DNA, 20 bp, synthetic construct
  misc_feature 1..20: note = chemically synthesized
  source 1..20: mol_type = other DNA
cctttttttttttttttttt

SEQ ID NO: 39554 - DNA, 20 bp, synthetic construct
  misc_feature 1..20: note = chemically synthesized
  source 1..20: mol_type = other DNA
ttttttttttttttttgaga

SEQ ID NO: 39555 - DNA, 20 bp, synthetic construct
  misc_feature 1..20: note = chemically synthesized
  source 1..20: mol_type = other DNA
ttttttttttttttgagaca

SEQ ID NO: 39556 - DNA, 20 bp, synthetic construct
  misc_feature 1..20: note = chemically synthesized
  source 1..20: mol_type = other DNA
cagagccttgctttgtcgcc

SEQ ID NO: 39557 - DNA, 20 bp, synthetic construct
  misc_feature 1..20: note = chemically synthesized
  source 1..20: mol_type = other DNA
agagccttgctttgtcgccc

SEQ ID NO: 39558 - DNA, 20 bp, synthetic construct
  misc_feature 1..20: note = chemically synthesized
  source 1..20: mol_type = other DNA
ttgctttgtcgcccaggctg

SEQ ID NO: 39559 - DNA, 20 bp, synthetic construct
  misc_feature 1..20: note = chemically synthesized
  source 1..20: mol_type = other DNA
ttgtcgcccaggctgtagtg

SEQ ID NO: 39560 - DNA, 20 bp, synthetic construct
  misc_feature 1..20: note = chemically synthesized
  source 1..20: mol_type = other DNA
tcgcccaggctgtagtgcag

SEQ ID NO: 39561 - DNA, 20 bp, synthetic construct
  misc_feature 1..20: note = chemically synthesized
  source 1..20: mol_type = other DNA
gtagtgcagtggcacaatct

SEQ ID NO: 39562 - DNA, 20 bp, synthetic construct
  misc_feature 1..20: note = chemically synthesized
  source 1..20: mol_type = other DNA
ctgcgacgacctctgctccc

SEQ ID NO: 39563 - DNA, 20 bp, synthetic construct
  misc_feature 1..20: note = chemically synthesized
  source 1..20: mol_type = other DNA
tctgctccccagttttttta

SEQ ID NO: 39564 - DNA, 20 bp, synthetic construct
  misc_feature 1..20: note = chemically synthesized
  source 1..20: mol_type = other DNA
ttaaagcaattctcctgcct

SEQ ID NO: 39565 - DNA, 20 bp, synthetic construct
  misc_feature 1..20: note = chemically synthesized
  source 1..20: mol_type = other DNA
ttctcctgcctcagcctccc

SEQ ID NO: 39566 - DNA, 20 bp, synthetic construct
  misc_feature 1..20: note = chemically synthesized
  source 1..20: mol_type = other DNA
tcctgcctcagcctcccgag

SEQ ID NO: 39567 - DNA, 20 bp, synthetic construct
  misc_feature 1..20: note = chemically synthesized
  source 1..20: mol_type = other DNA
gcctcagcctcccgagtagc

SEQ ID NO: 39568 - DNA, 20 bp, synthetic construct
  misc_feature 1..20: note = chemically synthesized
  source 1..20: mol_type = other DNA
cctcagcctcccgagtagct

SEQ ID NO: 39569 - DNA, 20 bp, synthetic construct
  misc_feature 1..20: note = chemically synthesized
  source 1..20: mol_type = other DNA
ctcccgagtagctgggatta

SEQ ID NO: 39570 - DNA, 20 bp, synthetic construct
  misc_feature 1..20: note = chemically synthesized
  source 1..20: mol_type = other DNA
tcccgagtagctgggattac

SEQ ID NO: 39571 - DNA, 20 bp, synthetic construct
  misc_feature 1..20: note = chemically synthesized
  source 1..20: mol_type = other DNA
caggcgctcaccaccacacc

SEQ ID NO: 39572 - DNA, 20 bp, synthetic construct
  misc_feature 1..20: note = chemically synthesized
  source 1..20: mol_type = other DNA
ccagctaatttttgtatttt

SEQ ID NO: 39573 - DNA, 20 bp, synthetic construct
  misc_feature 1..20: note = chemically synthesized
  source 1..20: mol_type = other DNA
gctaatttttgtatttttag

SEQ ID NO: 39574 - DNA, 20 bp, synthetic construct
  misc_feature 1..20: note = chemically synthesized
  source 1..20: mol_type = other DNA
taatttttgtatttttagta

SEQ ID NO: 39575 - DNA, 20 bp, synthetic construct
  misc_feature 1..20: note = chemically synthesized
  source 1..20: mol_type = other DNA
ttttgtatttttagtagaga

SEQ ID NO: 39576 - DNA, 20 bp, synthetic construct
  misc_feature 1..20: note = chemically synthesized
  source 1..20: mol_type = other DNA
tttgtatttttagtagagac

SEQ ID NO: 39577 - DNA, 20 bp, synthetic construct
  misc_feature 1..20: note = chemically synthesized
  source 1..20: mol_type = other DNA
ttgtatttttagtagagaca

SEQ ID NO: 39578 - DNA, 20 bp, synthetic construct
  misc_feature 1..20: note = chemically synthesized
  source 1..20: mol_type = other DNA
gagacagggtttcaccatgt

SEQ ID NO: 39579 - DNA, 20 bp, synthetic construct
  misc_feature 1..20: note = chemically synthesized
  source 1..20: mol_type = other DNA
cagggtttcaccatgttggc

SEQ ID NO: 39580 - DNA, 20 bp, synthetic construct
  misc_feature 1..20: note = chemically synthesized
  source 1..20: mol_type = other DNA
agggtttcaccatgttggcc

SEQ ID NO: 39581 - DNA, 20 bp, synthetic construct
  misc_feature 1..20: note = chemically synthesized
  source 1..20: mol_type = other DNA
tttcaccatgttggccaggc

SEQ ID NO: 39582 - DNA, 20 bp, synthetic construct
  misc_feature 1..20: note = chemically synthesized
  source 1..20: mol_type = other DNA
gctgacctcgtgatccacct

SEQ ID NO: 39583 - DNA, 20 bp, synthetic construct
  misc_feature 1..20: note = chemically synthesized
  source 1..20: mol_type = other DNA
tgatccacctcagccttcca

SEQ ID NO: 39584 - DNA, 20 bp, synthetic construct
  misc_feature 1..20: note = chemically synthesized
  source 1..20: mol_type = other DNA
acctcagccttccaaagtgc

SEQ ID NO: 39585 - DNA, 20 bp, synthetic construct
  misc_feature 1..20: note = chemically synthesized
  source 1..20: mol_type = other DNA
cctcagccttccaaagtgct

SEQ ID NO: 39586 - DNA, 20 bp, synthetic construct
  misc_feature 1..20: note = chemically synthesized
  source 1..20: mol_type = other DNA
cttccaaagtgctaggatta

SEQ ID NO: 39587 - DNA, 20 bp, synthetic construct
  misc_feature 1..20: note = chemically synthesized
  source 1..20: mol_type = other DNA
ttccaaagtgctaggattac

SEQ ID NO: 39588 - DNA, 20 bp, synthetic construct
  misc_feature 1..20: note = chemically synthesized
  source 1..20: mol_type = other DNA
agtgctaggattacaggcat

SEQ ID NO: 39589 - DNA, 20 bp, synthetic construct
  misc_feature 1..20: note = chemically synthesized
  source 1..20: mol_type = other DNA
caggcatgagcctctgtgcc

SEQ ID NO: 39590 - DNA, 20 bp, synthetic construct
  misc_feature 1..20: note = chemically synthesized
  source 1..20: mol_type = other DNA
ttccattttaatttgtactt

SEQ ID NO: 39591 - DNA, 20 bp, synthetic construct
  misc_feature 1..20: note = chemically synthesized
  source 1..20: mol_type = other DNA
tccattttaatttgtactta

SEQ ID NO: 39592 - DNA, 20 bp, synthetic construct
  misc_feature 1..20: note = chemically synthesized
  source 1..20: mol_type = other DNA
ttttaatttgtacttaaggt

SEQ ID NO: 39593 - DNA, 20 bp, synthetic construct
  misc_feature 1..20: note = chemically synthesized
  source 1..20: mol_type = other DNA
acttaaggtaagatataaaa

SEQ ID NO: 39594 - DNA, 20 bp, synthetic construct
  misc_feature 1..20: note = chemically synthesized
  source 1..20: mol_type = other DNA
gatataaaaaagtcacttaa

SEQ ID NO: 39595 - DNA, 20 bp, synthetic construct
  misc_feature 1..20: note = chemically synthesized
  source 1..20: mol_type = other DNA
aaaaaagtcacttaaaagct

SEQ ID NO: 39596 - DNA, 20 bp, synthetic construct
  misc_feature 1..20: note = chemically synthesized
  source 1..20: mol_type = other DNA
acttaaaagctgagattttt

SEQ ID NO: 39597 - DNA, 20 bp, synthetic construct
  misc_feature 1..20: note = chemically synthesized
  source 1..20: mol_type = other DNA
gatattttgtcttcatctca

SEQ ID NO: 39598 - DNA, 20 bp, synthetic construct
  misc_feature 1..20: note = chemically synthesized
  source 1..20: mol_type = other DNA
atctcatggcttcccattgt

SEQ ID NO: 39599 - DNA, 20 bp, synthetic construct
  misc_feature 1..20: note = chemically synthesized
  source 1..20: mol_type = other DNA
ttgactttaaatatttattt

SEQ ID NO: 39600 - DNA, 20 bp, synthetic construct
  misc_feature 1..20: note = chemically synthesized
  source 1..20: mol_type = other DNA
atatttattaatttcttcta

SEQ ID NO: 39601 - DNA, 20 bp, synthetic construct
  misc_feature 1..20: note = chemically synthesized
  source 1..20: mol_type = other DNA
tatttattaatttcttctat

SEQ ID NO: 39602 - DNA, 20 bp, synthetic construct
  misc_feature 1..20: note = chemically synthesized
  source 1..20: mol_type = other DNA
cttctataggaacacaattt

SEQ ID NO: 39603 - DNA, 20 bp, synthetic construct
  misc_feature 1..20: note = chemically synthesized
  source 1..20: mol_type = other DNA
ttctataggaacacaatttt

SEQ ID NO: 39604 - DNA, 20 bp, synthetic construct
  misc_feature 1..20: note = chemically synthesized
  source 1..20: mol_type = other DNA
tctataggaacacaattttg

SEQ ID NO: 39605 - DNA, 20 bp, synthetic construct
  misc_feature 1..20: note = chemically synthesized
  source 1..20: mol_type = other DNA
cacaattttggggcaatatg

SEQ ID NO: 39606 - DNA, 20 bp, synthetic construct
  misc_feature 1..20: note = chemically synthesized
  source 1..20: mol_type = other DNA
caattttggggcaatatgtg

SEQ ID NO: 39607 - DNA, 20 bp, synthetic construct
  misc_feature 1..20: note = chemically synthesized
  source 1..20: mol_type = other DNA
ggcaatatgtggagatgaaa

SEQ ID NO: 39608 - DNA, 20 bp, synthetic construct
  misc_feature 1..20: note = chemically synthesized
  source 1..20: mol_type = other DNA
aatatgtggagatgaaaaag

SEQ ID NO: 39609 - DNA, 20 bp, synthetic construct
  misc_feature 1..20: note = chemically synthesized
  source 1..20: mol_type = other DNA
tggagatgaaaaagtggatt

SEQ ID NO: 39610 - DNA, 20 bp, synthetic construct
  misc_feature 1..20: note = chemically synthesized
  source 1..20: mol_type = other DNA
ggagatgaaaaagtggattc

SEQ ID NO: 39611 - DNA, 20 bp, synthetic construct
  misc_feature 1..20: note = chemically synthesized
  source 1..20: mol_type = other DNA
gagatgaaaaagtggattca

SEQ ID NO: 39612 - DNA, 20 bp, synthetic construct
  misc_feature 1..20: note = chemically synthesized
  source 1..20: mol_type = other DNA
agatgaaaaagtggattcag

SEQ ID NO: 39613 - DNA, 20 bp, synthetic construct
  misc_feature 1..20: note = chemically synthesized
  source 1..20: mol_type = other DNA
ttcaggggacactgattgta

SEQ ID NO: 39614 - DNA, 20 bp, synthetic construct
  misc_feature 1..20: note = chemically synthesized
  source 1..20: mol_type = other DNA
tcaggggacactgattgtac

SEQ ID NO: 39615 - DNA, 20 bp, synthetic construct
  misc_feature 1..20: note = chemically synthesized
  source 1..20: mol_type = other DNA
caggggacactgattgtaca

SEQ ID NO: 39616 - DNA, 20 bp, synthetic construct
  misc_feature 1..20: note = chemically synthesized
  source 1..20: mol_type = other DNA
ctgattgtacagggcacttg

SEQ ID NO: 39617 - DNA, 20 bp, synthetic construct
  misc_feature 1..20: note = chemically synthesized
  source 1..20: mol_type = other DNA
cagggcacttgcagattatc

SEQ ID NO: 39618 - DNA, 20 bp, synthetic construct
  misc_feature 1..20: note = chemically synthesized
  source 1..20: mol_type = other DNA
gcagattatctggaactaaa

SEQ ID NO: 39619 - DNA, 20 bp, synthetic construct
  misc_feature 1..20: note = chemically synthesized
  source 1..20: mol_type = other DNA
gattatctggaactaaacgg

SEQ ID NO: 39620 - DNA, 20 bp, synthetic construct
  misc_feature 1..20: note = chemically synthesized
  source 1..20: mol_type = other DNA
ctctttttgtcttctcattt

SEQ ID NO: 39621 - DNA, 20 bp, synthetic construct
  misc_feature 1..20: note = chemically synthesized
  source 1..20: mol_type = other DNA
ttagtttatgtctttataaa

SEQ ID NO: 39622 - DNA, 20 bp, synthetic construct
  misc_feature 1..20: note = chemically synthesized
  source 1..20: mol_type = other DNA
tttataaatggtttcctgaa

SEQ ID NO: 39623 - DNA, 20 bp, synthetic construct
  misc_feature 1..20: note = chemically synthesized
  source 1..20: mol_type = other DNA
tggtttcctgaacagttcct

SEQ ID NO: 39624 - DNA, 20 bp, synthetic construct
  misc_feature 1..20: note = chemically synthesized
  source 1..20: mol_type = other DNA
acagttcctaagctttttgt

SEQ ID NO: 39625 - DNA, 20 bp, synthetic construct
  misc_feature 1..20: note = chemically synthesized
  source 1..20: mol_type = other DNA
tcctaagctttttgtcagca

SEQ ID NO: 39626 - DNA, 20 bp, synthetic construct
  misc_feature 1..20: note = chemically synthesized
  source 1..20: mol_type = other DNA
aagctttttgtcagcatggc

SEQ ID NO: 39627 - DNA, 20 bp, synthetic construct
  misc_feature 1..20: note = chemically synthesized
  source 1..20: mol_type = other DNA
tttgtcagcatggcaagttg

SEQ ID NO: 39628 - DNA, 20 bp, synthetic construct
  misc_feature 1..20: note = chemically synthesized
  source 1..20: mol_type = other DNA
gtcagcatggcaagttgaag

SEQ ID NO: 39629 - DNA, 20 bp, synthetic construct
  misc_feature 1..20: note = chemically synthesized
  source 1..20: mol_type = other DNA
atggcaagttgaagaagctc

SEQ ID NO: 39630 - DNA, 20 bp, synthetic construct
  misc_feature 1..20: note = chemically synthesized
  source 1..20: mol_type = other DNA
gttgaagaagctctggatga

SEQ ID NO: 39631 - DNA, 20 bp, synthetic construct
  misc_feature 1..20: note = chemically synthesized
  source 1..20: mol_type = other DNA
tgatggatctatgttacctt

SEQ ID NO: 39632 - DNA, 20 bp, synthetic construct
  misc_feature 1..20: note = chemically synthesized
  source 1..20: mol_type = other DNA
tgttaccttcagaaactctt

SEQ ID NO: 39633 - DNA, 20 bp, synthetic construct
  misc_feature 1..20: note = chemically synthesized
  source 1..20: mol_type = other DNA
gttaccttcagaaactcttg

SEQ ID NO: 39634 - DNA, 20 bp, synthetic construct
  misc_feature 1..20: note = chemically synthesized
  source 1..20: mol_type = other DNA
tcagaaactcttgaggactc

SEQ ID NO: 39635 - DNA, 20 bp, synthetic construct
  misc_feature 1..20: note = chemically synthesized
  source 1..20: mol_type = other DNA
cagaaactcttgaggactct

SEQ ID NO: 39636 - DNA, 20 bp, synthetic construct
  misc_feature 1..20: note = chemically synthesized
  source 1..20: mol_type = other DNA
aactcttgaggactctggga

SEQ ID NO: 39637 - DNA, 20 bp, synthetic construct
  misc_feature 1..20: note = chemically synthesized
  source 1..20: mol_type = other DNA
ctctgggatagttgctgtca

SEQ ID NO: 39638 - DNA, 20 bp, synthetic construct
  misc_feature 1..20: note = chemically synthesized
  source 1..20: mol_type = other DNA
gatagttgctgtcaaagaat

SEQ ID NO: 39639 - DNA, 20 bp, synthetic construct
  misc_feature 1..20: note = chemically synthesized
  source 1..20: mol_type = other DNA
gctgtcaaagaatcagtcca

SEQ ID NO: 39640 - DNA, 20 bp, synthetic construct
  misc_feature 1..20: note = chemically synthesized
  source 1..20: mol_type = other DNA
ctgtcaaagaatcagtccaa

SEQ ID NO: 39641 - DNA, 20 bp, synthetic construct
  misc_feature 1..20: note = chemically synthesized
  source 1..20: mol_type = other DNA
agaatcagtccaaaggcact

SEQ ID NO: 39642 - DNA, 20 bp, synthetic construct
  misc_feature 1..20: note = chemically synthesized
  source 1..20: mol_type = other DNA
tcagtccaaaggcactcaga

SEQ ID NO: 39643 - DNA, 20 bp, synthetic construct
  misc_feature 1..20: note = chemically synthesized
  source 1..20: mol_type = other DNA
cagtccaaaggcactcagaa

SEQ ID NO: 39644 - DNA, 20 bp, synthetic construct
  misc_feature 1..20: note = chemically synthesized
  source 1..20: mol_type = other DNA
agtccaaaggcactcagaaa

SEQ ID NO: 39645 - DNA, 20 bp, synthetic construct
  misc_feature 1..20: note = chemically synthesized
  source 1..20: mol_type = other DNA
gtccaaaggcactcagaaag

SEQ ID NO: 39646 - DNA, 20 bp, synthetic construct
  misc_feature 1..20: note = chemically synthesized
  source 1..20: mol_type = other DNA
aaaggcactcagaaaggggc

SEQ ID NO: 39647 - DNA, 20 bp, synthetic construct
  misc_feature 1..20: note = chemically synthesized
  source 1..20: mol_type = other DNA
aggcactcagaaaggggcaa

SEQ ID NO: 39648 - DNA, 20 bp, synthetic construct
  misc_feature 1..20: note = chemically synthesized
  source 1..20: mol_type = other DNA
ctcagaaaggggcaagagaa

SEQ ID NO: 39649 - DNA, 20 bp, synthetic construct
  misc_feature 1..20: note = chemically synthesized
  source 1..20: mol_type = other DNA
gaaaggggcaagagaacagt

SEQ ID NO: 39650 - DNA, 20 bp, synthetic construct
  misc_feature 1..20: note = chemically synthesized
  source 1..20: mol_type = other DNA
ggggcaagagaacagtgagc

SEQ ID NO: 39651 - DNA, 20 bp, synthetic construct
  misc_feature 1..20: note = chemically synthesized
  source 1..20: mol_type = other DNA
ccagtcatttttgcatccct

SEQ ID NO: 39652 - DNA, 20 bp, synthetic construct
  misc_feature 1..20: note = chemically synthesized
  source 1..20: mol_type = other DNA
cagtcatttttgcatccctc

SEQ ID NO: 39653 - DNA, 20 bp, synthetic construct
  misc_feature 1..20: note = chemically synthesized
  source 1..20: mol_type = other DNA
agtcatttttgcatccctca

SEQ ID NO: 39654 - DNA, 20 bp, synthetic construct
  misc_feature 1..20: note = chemically synthesized
  source 1..20: mol_type = other DNA
gtcatttttgcatccctcag

SEQ ID NO: 39655 - DNA, 20 bp, synthetic construct
  misc_feature 1..20: note = chemically synthesized
  source 1..20: mol_type = other DNA
tcatttttgcatccctcagg

SEQ ID NO: 39656 - DNA, 20 bp, synthetic construct
  misc_feature 1..20: note = chemically synthesized
  source 1..20: mol_type = other DNA
gggggcctctatgcttgcct

SEQ ID NO: 39657 - DNA, 20 bp, synthetic construct
  misc_feature 1..20: note = chemically synthesized
  source 1..20: mol_type = other DNA
gggcctctatgcttgcctga

SEQ ID NO: 39658 - DNA, 20 bp, synthetic construct
  misc_feature 1..20: note = chemically synthesized
  source 1..20: mol_type = other DNA
gagagtgataaattccacta

SEQ ID NO: 39659 - DNA, 20 bp, synthetic construct
  misc_feature 1..20: note = chemically synthesized
  source 1..20: mol_type = other DNA
ttttgtcatgtatcacattc

SEQ ID NO: 39660 - DNA, 20 bp, synthetic construct
  misc_feature 1..20: note = chemically synthesized
  source 1..20: mol_type = other DNA
tttgtcatgtatcacattct

SEQ ID NO: 39661 - DNA, 20 bp, synthetic construct
  misc_feature 1..20: note = chemically synthesized
  source 1..20: mol_type = other DNA
tgtcatgtatcacattctag

SEQ ID NO: 39662 - DNA, 20 bp, synthetic construct
  misc_feature 1..20: note = chemically synthesized
  source 1..20: mol_type = other DNA
taggagactccctaaactat

SEQ ID NO: 39663 - DNA, 20 bp, synthetic construct
  misc_feature 1..20: note = chemically synthesized
  source 1..20: mol_type = other DNA
aggagactccctaaactatt

SEQ ID NO: 39664 - DNA, 20 bp, synthetic construct
  misc_feature 1..20: note = chemically synthesized
  source 1..20: mol_type = other DNA
ggagactccctaaactatta

SEQ ID NO: 39665 - DNA, 20 bp, synthetic construct
  misc_feature 1..20: note = chemically synthesized
  source 1..20: mol_type = other DNA
attagggcaactattctccc

SEQ ID NO: 39666 - DNA, 20 bp, synthetic construct
  misc_feature 1..20: note = chemically synthesized
  source 1..20: mol_type = other DNA
actattctccctggaatatt

SEQ ID NO: 39667 - DNA, 20 bp, synthetic construct
  misc_feature 1..20: note = chemically synthesized
  source 1..20: mol_type = other DNA
ctattctccctggaatattt

SEQ ID NO: 39668 - DNA, 20 bp, synthetic construct
  misc_feature 1..20: note = chemically synthesized
  source 1..20: mol_type = other DNA
ccctggaatatttgggtatg

SEQ ID NO: 39669 - DNA, 20 bp, synthetic construct
  misc_feature 1..20: note = chemically synthesized
  source 1..20: mol_type = other DNA
ggaatatttgggtatgtgga

SEQ ID NO: 39670 - DNA, 20 bp, synthetic construct
  misc_feature 1..20: note = chemically synthesized
  source 1..20: mol_type = other DNA
ttgggtatgtggacagtttc

SEQ ID NO: 39671 - DNA, 20 bp, synthetic construct
  misc_feature 1..20: note = chemically synthesized
  source 1..20: mol_type = other DNA
aatttgccacaattaaatgc

SEQ ID NO: 39672 - DNA, 20 bp, synthetic construct
  misc_feature 1..20: note = chemically synthesized
  source 1..20: mol_type = other DNA
gccacaattaaatgccagcg

SEQ ID NO: 39673 - DNA, 20 bp, synthetic construct
  misc_feature 1..20: note = chemically synthesized
  source 1..20: mol_type = other DNA
tgccagcgtagctgttttgc

SEQ ID NO: 39674 - DNA, 20 bp, synthetic construct
  misc_feature 1..20: note = chemically synthesized
  source 1..20: mol_type = other DNA
ccagcgtagctgttttgcta

SEQ ID NO: 39675 - DNA, 20 bp, synthetic construct
  misc_feature 1..20: note = chemically synthesized
  source 1..20: mol_type = other DNA
agctgttttgctagagactg

SEQ ID NO: 39676 - DNA, 20 bp, synthetic construct
  misc_feature 1..20: note = chemically synthesized
  source 1..20: mol_type = other DNA
tagagactgcagatgttaaa

SEQ ID NO: 39677 - DNA, 20 bp, synthetic construct
  misc_feature 1..20: note = chemically synthesized
  source 1..20: mol_type = other DNA
gagactgcagatgttaaata

SEQ ID NO: 39678 - DNA, 20 bp, synthetic construct
  misc_feature 1..20: note = chemically synthesized
  source 1..20: mol_type = other DNA
agactgcagatgttaaatag

SEQ ID NO: 39679 - DNA, 20 bp, synthetic construct
  misc_feature 1..20: note = chemically synthesized
  source 1..20: mol_type = other DNA
gactgcagatgttaaataga

SEQ ID NO: 39680 - DNA, 20 bp, synthetic construct
  misc_feature 1..20: note = chemically synthesized
  source 1..20: mol_type = other DNA
gttaaatagagggctatctt

SEQ ID NO: 39681 - DNA, 20 bp, synthetic construct
  misc_feature 1..20: note = chemically synthesized
  source 1..20: mol_type = other DNA
ttaaatagagggctatcttt

SEQ ID NO: 39682 - DNA, 20 bp, synthetic construct
  misc_feature 1..20: note = chemically synthesized
  source 1..20: mol_type = other DNA
aattgtattaactatttccc

SEQ ID NO: 39683 - DNA, 20 bp, synthetic construct
  misc_feature 1..20: note = chemically synthesized
  source 1..20: mol_type = other DNA
tttccccagtaattaccaca

SEQ ID NO: 39684 - DNA, 20 bp, synthetic construct
  misc_feature 1..20: note = chemically synthesized
  source 1..20: mol_type = other DNA
gcatccgcatgtcccaaacg

SEQ ID NO: 39685 - DNA, 20 bp, synthetic construct
  misc_feature 1..20: note = chemically synthesized
  source 1..20: mol_type = other DNA
cgcatgtcccaaacgcagct

SEQ ID NO: 39686 - DNA, 20 bp, synthetic construct
  misc_feature 1..20: note = chemically synthesized
  source 1..20: mol_type = other DNA
gcatgtcccaaacgcagctc

SEQ ID NO: 39687 - DNA, 20 bp, synthetic construct
  misc_feature 1..20: note = chemically synthesized
  source 1..20: mol_type = other DNA
aggttttgaaaacacgacta

SEQ ID NO: 39688 - DNA, 20 bp, synthetic construct
  misc_feature 1..20: note = chemically synthesized
  source 1..20: mol_type = other DNA
tgaaaacacgactatagttt

SEQ ID NO: 39689 - DNA, 20 bp, synthetic construct
  misc_feature 1..20: note = chemically synthesized
  source 1..20: mol_type = other DNA
gactatagtttaagaataat

SEQ ID NO: 39690 - DNA, 20 bp, synthetic construct
  misc_feature 1..20: note = chemically synthesized
  source 1..20: mol_type = other DNA
actatagtttaagaataatc

SEQ ID NO: 39691 - DNA, 20 bp, synthetic construct
  misc_feature 1..20: note = chemically synthesized
  source 1..20: mol_type = other DNA
aagaataatcaggcctcctc

SEQ ID NO: 39692 - DNA, 20 bp, synthetic construct
  misc_feature 1..20: note = chemically synthesized
  source 1..20: mol_type = other DNA
ctcctccggcttcctccatc

SEQ ID NO: 39693 - DNA, 20 bp, synthetic construct
  misc_feature 1..20: note = chemically synthesized
  source 1..20: mol_type = other DNA
cctccatctggtccattatc

SEQ ID NO: 39694 - DNA, 20 bp, synthetic construct
  misc_feature 1..20: note = chemically synthesized
  source 1..20: mol_type = other DNA
ctccatctggtccattatct

SEQ ID NO: 39695 - DNA, 20 bp, synthetic construct
  misc_feature 1..20: note = chemically synthesized
  source 1..20: mol_type = other DNA
ctggtccattatctgggtga

SEQ ID NO: 39696 - DNA, 20 bp, synthetic construct
  misc_feature 1..20: note = chemically synthesized
  source 1..20: mol_type = other DNA
gtccattatctgggtgacag

SEQ ID NO: 39697 - DNA, 20 bp, synthetic construct
  misc_feature 1..20: note = chemically synthesized
  source 1..20: mol_type = other DNA
gggtgacagtagatccaaat

SEQ ID NO: 39698 - DNA, 20 bp, synthetic construct
  misc_feature 1..20: note = chemically synthesized
  source 1..20: mol_type = other DNA
tgacagtagatccaaataag

SEQ ID NO: 39699 - DNA, 20 bp, synthetic construct
  misc_feature 1..20: note = chemically synthesized
  source 1..20: mol_type = other DNA
agtagatccaaataagtggt

SEQ ID NO: 39700 - DNA, 20 bp, synthetic construct
  misc_feature 1..20: note = chemically synthesized
  source 1..20: mol_type = other DNA
ttatcctgtacaacaaattt

SEQ ID NO: 39701 - DNA, 20 bp, synthetic construct
  misc_feature 1..20: note = chemically synthesized
  source 1..20: mol_type = other DNA
gcattaatccattctcttat

SEQ ID NO: 39702 - DNA, 20 bp, synthetic construct
  misc_feature 1..20: note = chemically synthesized
  source 1..20: mol_type = other DNA
cattaatccattctcttata

SEQ ID NO: 39703 - DNA, 20 bp, synthetic construct
  misc_feature 1..20: note = chemically synthesized
  source 1..20: mol_type = other DNA
attctcttataaggcaacat

SEQ ID NO: 39704 - DNA, 20 bp, synthetic construct
  misc_feature 1..20: note = chemically synthesized
  source 1..20: mol_type = other DNA
ctcttataaggcaacattgg

SEQ ID NO: 39705 - DNA, 20 bp, synthetic construct
  misc_feature 1..20: note = chemically synthesized
  source 1..20: mol_type = other DNA
tcttataaggcaacattgga

SEQ ID NO: 39706 - DNA, 20 bp, synthetic construct
  misc_feature 1..20: note = chemically synthesized
  source 1..20: mol_type = other DNA
taaggcaacattggaaggtt

SEQ ID NO: 39707 - DNA, 20 bp, synthetic construct
  misc_feature 1..20: note = chemically synthesized
  source 1..20: mol_type = other DNA
aggcaacattggaaggttaa

SEQ ID NO: 39708 - DNA, 20 bp, synthetic construct
  misc_feature 1..20: note = chemically synthesized
  source 1..20: mol_type = other DNA
tgatatacacatcactcctg

SEQ ID NO: 39709 - DNA, 20 bp, synthetic construct
  misc_feature 1..20: note = chemically synthesized
  source 1..20: mol_type = other DNA
tatacacatcactcctgtgg

SEQ ID NO: 39710 - DNA, 20 bp, synthetic construct
  misc_feature 1..20: note = chemically synthesized
  source 1..20: mol_type = other DNA
acacatcactcctgtggcgg

SEQ ID NO: 39711 - DNA, 20 bp, synthetic construct
  misc_feature 1..20: note = chemically synthesized
  source 1..20: mol_type = other DNA
tcactcctgtggcggtagat

SEQ ID NO: 39712 - DNA, 20 bp, synthetic construct
  misc_feature 1..20: note = chemically synthesized
  source 1..20: mol_type = other DNA
tagataagttctgccacatt

SEQ ID NO: 39713 - DNA, 20 bp, synthetic construct
  misc_feature 1..20: note = chemically synthesized
  source 1..20: mol_type = other DNA
ctgccacattaagcactatg

SEQ ID NO: 39714 - DNA, 20 bp, synthetic construct
  misc_feature 1..20: note = chemically synthesized
  source 1..20: mol_type = other DNA
tgccacattaagcactatgc

SEQ ID NO: 39715 - DNA, 20 bp, synthetic construct
  misc_feature 1..20: note = chemically synthesized
  source 1..20: mol_type = other DNA
gcactatgcaggtcataatt

SEQ ID NO: 39716 - DNA, 20 bp, synthetic construct
  misc_feature 1..20: note = chemically synthesized
  source 1..20: mol_type = other DNA
ctatgcaggtcataattcag

SEQ ID NO: 39717 - DNA, 20 bp, synthetic construct
  misc_feature 1..20: note = chemically synthesized
  source 1..20: mol_type = other DNA
aggtcataattcagtggatc

SEQ ID NO: 39718 - DNA, 20 bp, synthetic construct
  misc_feature 1..20: note = chemically synthesized
  source 1..20: mol_type = other DNA
cataattcagtggatcaagt

SEQ ID NO: 39719 - DNA, 20 bp, synthetic construct
  misc_feature 1..20: note = chemically synthesized
  source 1..20: mol_type = other DNA
attcagtggatcaagttagt

SEQ ID NO: 39720 - DNA, 20 bp, synthetic construct
  misc_feature 1..20: note = chemically synthesized
  source 1..20: mol_type = other DNA
cagtggatcaagttagttag

SEQ ID NO: 39721 - DNA, 20 bp, synthetic construct
  misc_feature 1..20: note = chemically synthesized
  source 1..20: mol_type = other DNA
aagttagttagcagtgtttt

SEQ ID NO: 39722 - DNA, 20 bp, synthetic construct
  misc_feature 1..20: note = chemically synthesized
  source 1..20: mol_type = other DNA
ttttagtatccatatgaaca

SEQ ID NO: 39723 - DNA, 20 bp, synthetic construct
  misc_feature 1..20: note = chemically synthesized
  source 1..20: mol_type = other DNA
gaacatagtctctgctactg

SEQ ID NO: 39724 - DNA, 20 bp, synthetic construct
  misc_feature 1..20: note = chemically synthesized
  source 1..20: mol_type = other DNA
gtctctgctactgcagtgcc

SEQ ID NO: 39725 - DNA, 20 bp, synthetic construct
  misc_feature 1..20: note = chemically synthesized
  source 1..20: mol_type = other DNA
actgacatttttgttatcaa

SEQ ID NO: 39726 - DNA, 20 bp, synthetic construct
  misc_feature 1..20: note = chemically synthesized
  source 1..20: mol_type = other DNA
gttatcaacagtgtcccctg

SEQ ID NO: 39727 - DNA, 20 bp, synthetic construct
  misc_feature 1..20: note = chemically synthesized
  source 1..20: mol_type = other DNA
atcaacagtgtcccctgaag

SEQ ID NO: 39728 - DNA, 20 bp, synthetic construct
  misc_feature 1..20: note = chemically synthesized
  source 1..20: mol_type = other DNA
aacagtgtcccctgaagtag

SEQ ID NO: 39729 - DNA, 20 bp, synthetic construct
  misc_feature 1..20: note = chemically synthesized
  source 1..20: mol_type = other DNA
tgaagtagcagccctttcaa

SEQ ID NO: 39730 - DNA, 20 bp, synthetic construct
  misc_feature 1..20: note = chemically synthesized
  source 1..20: mol_type = other DNA
ccaccaataattgcttatat

SEQ ID NO: 39731 - DNA, 20 bp, synthetic construct
  misc_feature 1..20: note = chemically synthesized
  source 1..20: mol_type = other DNA
accaataattgcttatatta

SEQ ID NO: 39732 - DNA, 20 bp, synthetic construct
  misc_feature 1..20: note = chemically synthesized
  source 1..20: mol_type = other DNA
tataattattattgtttcta

SEQ ID NO: 39733 - DNA, 20 bp, synthetic construct
  misc_feature 1..20: note = chemically synthesized
  source 1..20: mol_type = other DNA
ataattattattgtttctat

SEQ ID NO: 39734 - DNA, 20 bp, synthetic construct
  misc_feature 1..20: note = chemically synthesized
  source 1..20: mol_type = other DNA
taggtttttataaaataaaa

SEQ ID NO: 39735 - DNA, 20 bp, synthetic construct
  misc_feature 1..20: note = chemically synthesized
  source 1..20: mol_type = other DNA
aggtttttataaaataaaaa

SEQ ID NO: 39736 - DNA, 20 bp, synthetic construct
  misc_feature 1..20: note = chemically synthesized
  source 1..20: mol_type = other DNA
tataaaataaaaaaggtgca

SEQ ID NO: 39737 - DNA, 20 bp, synthetic construct
  misc_feature 1..20: note = chemically synthesized
  source 1..20: mol_type = other DNA
ttttactgaattacacttca

SEQ ID NO: 39738 - DNA, 20 bp, synthetic construct
  misc_feature 1..20: note = chemically synthesized
  source 1..20: mol_type = other DNA
tttactgaattacacttcaa

SEQ ID NO: 39739 - DNA, 20 bp, synthetic construct
  misc_feature 1..20: note = chemically synthesized
  source 1..20: mol_type = other DNA
gaattacacttcaaaggtgt

SEQ ID NO: 39740 - DNA, 20 bp, synthetic construct
  misc_feature 1..20: note = chemically synthesized
  source 1..20: mol_type = other DNA
ttacacttcaaaggtgtcgg

SEQ ID NO: 39741 - DNA, 20 bp, synthetic construct
  misc_feature 1..20: note = chemically synthesized
  source 1..20: mol_type = other DNA
aatattgaatgatattttaa

SEQ ID NO: 39742 - DNA, 20 bp, synthetic construct
  misc_feature 1..20: note = chemically synthesized
  source 1..20: mol_type = other DNA
aatgatattttaaaagactc

SEQ ID NO: 39743 - DNA, 20 bp, synthetic construct
  misc_feature 1..20: note = chemically synthesized
  source 1..20: mol_type = other DNA
taaaagactctggacacata

SEQ ID NO: 39744 - DNA, 20 bp, synthetic construct
  misc_feature 1..20: note = chemically synthesized
  source 1..20: mol_type = other DNA
catacagaatcaattgaatt

SEQ ID NO: 39745 - DNA, 20 bp, synthetic construct
  misc_feature 1..20: note = chemically synthesized
  source 1..20: mol_type = other DNA
atacagaatcaattgaattt

SEQ ID NO: 39746 - DNA, 20 bp, synthetic construct
  misc_feature 1..20: note = chemically synthesized
  source 1..20: mol_type = other DNA
acagaatcaattgaatttgg

SEQ ID NO: 39747 - DNA, 20 bp, synthetic construct
  misc_feature 1..20: note = chemically synthesized
  source 1..20: mol_type = other DNA
aattgaatttgggagaaact

SEQ ID NO: 39748 - DNA, 20 bp, synthetic construct
  misc_feature 1..20: note = chemically synthesized
  source 1..20: mol_type = other DNA
gagaaactgagtttcccttg

SEQ ID NO: 39749 - DNA, 20 bp, synthetic construct
  misc_feature 1..20: note = chemically synthesized
  source 1..20: mol_type = other DNA
aaacctgctacaaaatttct

SEQ ID NO: 39750 - DNA, 20 bp, synthetic construct
  misc_feature 1..20: note = chemically synthesized
  source 1..20: mol_type = other DNA
caaaaatcttgactttgtaa

SEQ ID NO: 39751 - DNA, 20 bp, synthetic construct
  misc_feature 1..20: note = chemically synthesized
  source 1..20: mol_type = other DNA
aaataaatattaattataaa

SEQ ID NO: 39752 - DNA, 20 bp, synthetic construct
  misc_feature 1..20: note = chemically synthesized
  source 1..20: mol_type = other DNA
ttaattataaatagacttca

SEQ ID NO: 39753 - DNA, 20 bp, synthetic construct
  misc_feature 1..20: note = chemically synthesized
  source 1..20: mol_type = other DNA
tagacttcatagttccctat

SEQ ID NO: 39754 - DNA, 20 bp, synthetic construct
  misc_feature 1..20: note = chemically synthesized
  source 1..20: mol_type = other DNA
agacttcatagttccctatg

SEQ ID NO: 39755 - DNA, 20 bp, synthetic construct
  misc_feature 1..20: note = chemically synthesized
  source 1..20: mol_type = other DNA
ttgtgaatttttctcaatac

SEQ ID NO: 39756 - DNA, 20 bp, synthetic construct
  misc_feature 1..20: note = chemically synthesized
  source 1..20: mol_type = other DNA
ttttctcaatacgagtctta

SEQ ID NO: 39757 - DNA, 20 bp, synthetic construct
  misc_feature 1..20: note = chemically synthesized
  source 1..20: mol_type = other DNA
tcttacagattcataatgat

SEQ ID NO: 39758 - DNA, 20 bp, synthetic construct
  misc_feature 1..20: note = chemically synthesized
  source 1..20: mol_type = other DNA
ttacagattcataatgatta

SEQ ID NO: 39759 - DNA, 20 bp, synthetic construct
  misc_feature 1..20: note = chemically synthesized
  source 1..20: mol_type = other DNA
tacagattcataatgattag

SEQ ID NO: 39760 - DNA, 20 bp, synthetic construct
  misc_feature 1..20: note = chemically synthesized
  source 1..20: mol_type = other DNA
acagattcataatgattaga

SEQ ID NO: 39761 - DNA, 20 bp, synthetic construct
  misc_feature 1..20: note = chemically synthesized
  source 1..20: mol_type = other DNA
ataatgattagagggtctgt

SEQ ID NO: 39762 - DNA, 20 bp, synthetic construct
  misc_feature 1..20: note = chemically synthesized
  source 1..20: mol_type = other DNA
gtctgtaagattgtctccat

SEQ ID NO: 39763 - DNA, 20 bp, synthetic construct
  misc_feature 1..20: note = chemically synthesized
  source 1..20: mol_type = other DNA
gattgtctccatcagcaaca

SEQ ID NO: 39764 - DNA, 20 bp, synthetic construct
  misc_feature 1..20: note = chemically synthesized
  source 1..20: mol_type = other DNA
tagttgccgtattttctctc

SEQ ID NO: 39765 - DNA, 20 bp, synthetic construct
  misc_feature 1..20: note = chemically synthesized
  source 1..20: mol_type = other DNA
agttgccgtattttctctct

SEQ ID NO: 39766 - DNA, 20 bp, synthetic construct
  misc_feature 1..20: note = chemically synthesized
  source 1..20: mol_type = other DNA
ttgccgtattttctctctgg

SEQ ID NO: 39767 - DNA, 20 bp, synthetic construct
  misc_feature 1..20: note = chemically synthesized
  source 1..20: mol_type = other DNA
gggagtgcttatcttttccc

SEQ ID NO: 39768 - DNA, 20 bp, synthetic construct
  misc_feature 1..20: note = chemically synthesized
  source 1..20: mol_type = other DNA
gcttatcttttccctagaac

SEQ ID NO: 39769 - DNA, 20 bp, synthetic construct
  misc_feature 1..20: note = chemically synthesized
  source 1..20: mol_type = other DNA
tccctagaactggttgtgtg

SEQ ID NO: 39770 - DNA, 20 bp, synthetic construct
  misc_feature 1..20: note = chemically synthesized
  source 1..20: mol_type = other DNA
ccgatattactattgccctt

SEQ ID NO: 39771 - DNA, 20 bp, synthetic construct
  misc_feature 1..20: note = chemically synthesized
  source 1..20: mol_type = other DNA
tacgaatctatgactctaac

SEQ ID NO: 39772 - DNA, 20 bp, synthetic construct
  misc_feature 1..20: note = chemically synthesized
  source 1..20: mol_type = other DNA
tctatgactctaacaagtat

SEQ ID NO: 39773 - DNA, 20 bp, synthetic construct
  misc_feature 1..20: note = chemically synthesized
  source 1..20: mol_type = other DNA
ctatgactctaacaagtatt

SEQ ID NO: 39774 - DNA, 20 bp, synthetic construct
  misc_feature 1..20: note = chemically synthesized
  source 1..20: mol_type = other DNA
taacaagtattaggcttttg

SEQ ID NO: 39775 - DNA, 20 bp, synthetic construct
  misc_feature 1..20: note = chemically synthesized
  source 1..20: mol_type = other DNA
acaagtattaggcttttgtg

SEQ ID NO: 39776 - DNA, 20 bp, synthetic construct
  misc_feature 1..20: note = chemically synthesized
  source 1..20: mol_type = other DNA
caagtattaggcttttgtgg

SEQ ID NO: 39777 - DNA, 20 bp, synthetic construct
  misc_feature 1..20: note = chemically synthesized
  source 1..20: mol_type = other DNA
ttttgtggaggccctcattg

SEQ ID NO: 39778 - DNA, 20 bp, synthetic construct
  misc_feature 1..20: note = chemically synthesized
  source 1..20: mol_type = other DNA
tgtggaggccctcattgtag

SEQ ID NO: 39779 - DNA, 20 bp, synthetic construct
  misc_feature 1..20: note = chemically synthesized
  source 1..20: mol_type = other DNA
ccttaaaatatttccgttat

SEQ ID NO: 39780 - DNA, 20 bp, synthetic construct
  misc_feature 1..20: note = chemically synthesized
  source 1..20: mol_type = other DNA
ccgttatgagcttccaacat

SEQ ID NO: 39781 - DNA, 20 bp, synthetic construct
  misc_feature 1..20: note = chemically synthesized
  source 1..20: mol_type = other DNA
gtccctaatgtgccaaaact

SEQ ID NO: 39782 - DNA, 20 bp, synthetic construct
  misc_feature 1..20: note = chemically synthesized
  source 1..20: mol_type = other DNA
gccaaaactcagactttttg

SEQ ID NO: 39783 - DNA, 20 bp, synthetic construct
  misc_feature 1..20: note = chemically synthesized
  source 1..20: mol_type = other DNA
aactcagactttttgcagca

SEQ ID NO: 39784 - DNA, 20 bp, synthetic construct
  misc_feature 1..20: note = chemically synthesized
  source 1..20: mol_type = other DNA
actcagactttttgcagcat

SEQ ID NO: 39785 - DNA, 20 bp, synthetic construct
  misc_feature 1..20: note = chemically synthesized
  source 1..20: mol_type = other DNA
ctcagactttttgcagcata

SEQ ID NO: 39786 - DNA, 20 bp, synthetic construct
  misc_feature 1..20: note = chemically synthesized
  source 1..20: mol_type = other DNA
tgcagcatagggaacttgct

SEQ ID NO: 39787 - DNA, 20 bp, synthetic construct
  misc_feature 1..20: note = chemically synthesized
  source 1..20: mol_type = other DNA
tagggaacttgctgagtccc

SEQ ID NO: 39788 - DNA, 20 bp, synthetic construct
  misc_feature 1..20: note = chemically synthesized
  source 1..20: mol_type = other DNA
tgctgagtcccaagtccact

SEQ ID NO: 39789 - DNA, 20 bp, synthetic construct
  misc_feature 1..20: note = chemically synthesized
  source 1..20: mol_type = other DNA
taattacacctttctaaaat

SEQ ID NO: 39790 - DNA, 20 bp, synthetic construct
  misc_feature 1..20: note = chemically synthesized
  source 1..20: mol_type = other DNA
actaactttacccacttgtt

SEQ ID NO: 39791 - DNA, 20 bp, synthetic construct
  misc_feature 1..20: note = chemically synthesized
  source 1..20: mol_type = other DNA
ctaactttacccacttgttc

SEQ ID NO: 39792 - DNA, 20 bp, synthetic construct
  misc_feature 1..20: note = chemically synthesized
  source 1..20: mol_type = other DNA
tacccacttgttcaggtgtt

SEQ ID NO: 39793 - DNA, 20 bp, synthetic construct
  misc_feature 1..20: note = chemically synthesized
  source 1..20: mol_type = other DNA
ttcaggtgttcagatttctg

SEQ ID NO: 39794 - DNA, 20 bp, synthetic construct
  misc_feature 1..20: note = chemically synthesized
  source 1..20: mol_type = other DNA
atttctgtggaaactcacaa

SEQ ID NO: 39795 - DNA, 20 bp, synthetic construct
  misc_feature 1..20: note = chemically synthesized
  source 1..20: mol_type = other DNA
tgtggaaactcacaatagat

SEQ ID NO: 39796 - DNA, 20 bp, synthetic construct
  misc_feature 1..20: note = chemically synthesized
  source 1..20: mol_type = other DNA
ttattttattttatttttta

SEQ ID NO: 39797 - DNA, 20 bp, synthetic construct
  misc_feature 1..20: note = chemically synthesized
  source 1..20: mol_type = other DNA
attttattttattttttata

SEQ ID NO: 39798 - DNA, 20 bp, synthetic construct
  misc_feature 1..20: note = chemically synthesized
  source 1..20: mol_type = other DNA
tattttattttttatagaga

SEQ ID NO: 39799 - DNA, 20 bp, synthetic construct
  misc_feature 1..20: note = chemically synthesized
  source 1..20: mol_type = other DNA
ttttattttttatagagaca

SEQ ID NO: 39800 - DNA, 20 bp, synthetic construct
  misc_feature 1..20: note = chemically synthesized
  source 1..20: mol_type = other DNA
cagagtctgactccgttgcc

SEQ ID NO: 39801 - DNA, 20 bp, synthetic construct
  misc_feature 1..20: note = chemically synthesized
  source 1..20: mol_type = other DNA
agagtctgactccgttgccc

SEQ ID NO: 39802 - DNA, 20 bp, synthetic construct
  misc_feature 1..20: note = chemically synthesized
  source 1..20: mol_type = other DNA
tctgactccgttgcccaggc

SEQ ID NO: 39803 - DNA, 20 bp, synthetic construct
  misc_feature 1..20: note = chemically synthesized
  source 1..20: mol_type = other DNA
tgactccgttgcccaggctg

SEQ ID NO: 39804 - DNA, 20 bp, synthetic construct
  misc_feature 1..20: note = chemically synthesized
  source 1..20: mol_type = other DNA
actccgttgcccaggctgga

SEQ ID NO: 39805 - DNA, 20 bp, synthetic construct
  misc_feature 1..20: note = chemically synthesized
  source 1..20: mol_type = other DNA
ccgttgcccaggctggagag

SEQ ID NO: 39806 - DNA, 20 bp, synthetic construct
  misc_feature 1..20: note = chemically synthesized
  source 1..20: mol_type = other DNA
ggagagcagtgctgcaatca

SEQ ID NO: 39807 - DNA, 20 bp, synthetic construct
  misc_feature 1..20: note = chemically synthesized
  source 1..20: mol_type = other DNA
gctgcaatcatagctccctg

SEQ ID NO: 39808 - DNA, 20 bp, synthetic construct
  misc_feature 1..20: note = chemically synthesized
  source 1..20: mol_type = other DNA
catagctccctgcagcctca

SEQ ID NO: 39809 - DNA, 20 bp, synthetic construct
  misc_feature 1..20: note = chemically synthesized
  source 1..20: mol_type = other DNA
tccctgcagcctcacagtcc

SEQ ID NO: 39810 - DNA, 20 bp, synthetic construct
  misc_feature 1..20: note = chemically synthesized
  source 1..20: mol_type = other DNA
ccctgcagcctcacagtcct

SEQ ID NO: 39811 - DNA, 20 bp, synthetic construct
  misc_feature 1..20: note = chemically synthesized
  source 1..20: mol_type = other DNA
cagcctcacagtcctgggct

SEQ ID NO: 39812 - DNA, 20 bp, synthetic construct
  misc_feature 1..20: note = chemically synthesized
  source 1..20: mol_type = other DNA
agcctcacagtcctgggctc

SEQ ID NO: 39813 - DNA, 20 bp, synthetic construct
  misc_feature 1..20: note = chemically synthesized
  source 1..20: mol_type = other DNA
gtgatgtgtgcccctgtgcc

SEQ ID NO: 39814 - DNA, 20 bp, synthetic construct
  misc_feature 1..20: note = chemically synthesized
  source 1..20: mol_type = other DNA
tttatcttttcttttttttt

SEQ ID NO: 39815 - DNA, 20 bp, synthetic construct
  misc_feature 1..20: note = chemically synthesized
  source 1..20: mol_type = other DNA
atcttttcttttttttttgg

SEQ ID NO: 39816 - DNA, 20 bp, synthetic construct
  misc_feature 1..20: note = chemically synthesized
  source 1..20: mol_type = other DNA
cttttcttttttttttggtg

SEQ ID NO: 39817 - DNA, 20 bp, synthetic construct
  misc_feature 1..20: note = chemically synthesized
  source 1..20: mol_type = other DNA
ttttcttttttttttggtgg

SEQ ID NO: 39818 - DNA, 20 bp, synthetic construct
  misc_feature 1..20: note = chemically synthesized
  source 1..20: mol_type = other DNA
tcttttttttttggtggagg

SEQ ID NO: 39819 - DNA, 20 bp, synthetic construct
  misc_feature 1..20: note = chemically synthesized
  source 1..20: mol_type = other DNA
cttttttttttggtggaggc

SEQ ID NO: 39820 - DNA, 20 bp, synthetic construct
  misc_feature 1..20: note = chemically synthesized
  source 1..20: mol_type = other DNA
ttttttttttggtggaggca

SEQ ID NO: 39821 - DNA, 20 bp, synthetic construct
  misc_feature 1..20: note = chemically synthesized
  source 1..20: mol_type = other DNA
tttttggtggaggcagggtc

SEQ ID NO: 39822 - DNA, 20 bp, synthetic construct
  misc_feature 1..20: note = chemically synthesized
  source 1..20: mol_type = other DNA
cagggtctagctatgttgcc

SEQ ID NO: 39823 - DNA, 20 bp, synthetic construct
  misc_feature 1..20: note = chemically synthesized
  source 1..20: mol_type = other DNA
agggtctagctatgttgccc

SEQ ID NO: 39824 - DNA, 20 bp, synthetic construct
  misc_feature 1..20: note = chemically synthesized
  source 1..20: mol_type = other DNA
tctagctatgttgcccaggc

SEQ ID NO: 39825 - DNA, 20 bp, synthetic construct
  misc_feature 1..20: note = chemically synthesized
  source 1..20: mol_type = other DNA
ctagctatgttgcccaggct

SEQ ID NO: 39826 - DNA, 20 bp, synthetic construct
  misc_feature 1..20: note = chemically synthesized
  source 1..20: mol_type = other DNA
ctgggttctcttcttattca

SEQ ID NO: 39827 - DNA, 20 bp, synthetic construct
  misc_feature 1..20: note = chemically synthesized
  source 1..20: mol_type = other DNA
ttcttattcacagtccactt

SEQ ID NO: 39828 - DNA, 20 bp, synthetic construct
  misc_feature 1..20: note = chemically synthesized
  source 1..20: mol_type = other DNA
tattcacagtccacttgaga

SEQ ID NO: 39829 - DNA, 20 bp, synthetic construct
  misc_feature 1..20: note = chemically synthesized
  source 1..20: mol_type = other DNA
acattgatcacaatatttct

SEQ ID NO: 39830 - DNA, 20 bp, synthetic construct
  misc_feature 1..20: note = chemically synthesized
  source 1..20: mol_type = other DNA
ctcagtcatttctattgaat

SEQ ID NO: 39831 - DNA, 20 bp, synthetic construct
  misc_feature 1..20: note = chemically synthesized
  source 1..20: mol_type = other DNA
tattgaataagcattttcct

SEQ ID NO: 39832 - DNA, 20 bp, synthetic construct
  misc_feature 1..20: note = chemically synthesized
  source 1..20: mol_type = other DNA
tgaataagcattttcctcag

SEQ ID NO: 39833 - DNA, 20 bp, synthetic construct
  misc_feature 1..20: note = chemically synthesized
  source 1..20: mol_type = other DNA
tcagtggttaatcctaaata

SEQ ID NO: 39834 - DNA, 20 bp, synthetic construct
  misc_feature 1..20: note = chemically synthesized
  source 1..20: mol_type = other DNA
cctaaatacagctgtcccat

SEQ ID NO: 39835 - DNA, 20 bp, synthetic construct
  misc_feature 1..20: note = chemically synthesized
  source 1..20: mol_type = other DNA
acagctgtcccattagtttc

SEQ ID NO: 39836 - DNA, 20 bp, synthetic construct
  misc_feature 1..20: note = chemically synthesized
  source 1..20: mol_type = other DNA
agctgtcccattagtttcaa

SEQ ID NO: 39837 - DNA, 20 bp, synthetic construct
  misc_feature 1..20: note = chemically synthesized
  source 1..20: mol_type = other DNA
aaatttgaactgactcaact

SEQ ID NO: 39838 - DNA, 20 bp, synthetic construct
  misc_feature 1..20: note = chemically synthesized
  source 1..20: mol_type = other DNA
ttgaactgactcaacttgga

SEQ ID NO: 39839 - DNA, 20 bp, synthetic construct
  misc_feature 1..20: note = chemically synthesized
  source 1..20: mol_type = other DNA
actcaacttggatagtaaca

SEQ ID NO: 39840 - DNA, 20 bp, synthetic construct
  misc_feature 1..20: note = chemically synthesized
  source 1..20: mol_type = other DNA
aacttggatagtaacacagt

SEQ ID NO: 39841 - DNA, 20 bp, synthetic construct
  misc_feature 1..20: note = chemically synthesized
  source 1..20: mol_type = other DNA
acttggatagtaacacagta

SEQ ID NO: 39842 - DNA, 20 bp, synthetic construct
  misc_feature 1..20: note = chemically synthesized
  source 1..20: mol_type = other DNA
cttggatagtaacacagtaa

SEQ ID NO: 39843 - DNA, 20 bp, synthetic construct
  misc_feature 1..20: note = chemically synthesized
  source 1..20: mol_type = other DNA
agggcccatatgataaataa

SEQ ID NO: 39844 - DNA, 20 bp, synthetic construct
  misc_feature 1..20: note = chemically synthesized
  source 1..20: mol_type = other DNA
gggcccatatgataaataat

SEQ ID NO: 39845 - DNA, 20 bp, synthetic construct
  misc_feature 1..20: note = chemically synthesized
  source 1..20: mol_type = other DNA
gcccatatgataaataatag

SEQ ID NO: 39846 - DNA, 20 bp, synthetic construct
  misc_feature 1..20: note = chemically synthesized
  source 1..20: mol_type = other DNA
cccatatgataaataatagg

SEQ ID NO: 39847 - DNA, 20 bp, synthetic construct
  misc_feature 1..20: note = chemically synthesized
  source 1..20: mol_type = other DNA
catatgataaataataggag

SEQ ID NO: 39848 - DNA, 20 bp, synthetic construct
  misc_feature 1..20: note = chemically synthesized
  source 1..20: mol_type = other DNA
atatgataaataataggagg

SEQ ID NO: 39849 - DNA, 20 bp, synthetic construct
  misc_feature 1..20: note = chemically synthesized
  source 1..20: mol_type = other DNA
aataataggaggaggaataa

SEQ ID NO: 39850 - DNA, 20 bp, synthetic construct
  misc_feature 1..20: note = chemically synthesized
  source 1..20: mol_type = other DNA
taataggaggaggaataaaa

SEQ ID NO: 39851 - DNA, 20 bp, synthetic construct
  misc_feature 1..20: note = chemically synthesized
  source 1..20: mol_type = other DNA
ggaggaggaataaaagagta

SEQ ID NO: 39852 - DNA, 20 bp, synthetic construct
  misc_feature 1..20: note = chemically synthesized
  source 1..20: mol_type = other DNA
aggaggaataaaagagtaaa

SEQ ID NO: 39853 - DNA, 20 bp, synthetic construct
  misc_feature 1..20: note = chemically synthesized
  source 1..20: mol_type = other DNA
taaaagagtaaagagaataa

SEQ ID NO: 39854 - DNA, 20 bp, synthetic construct
  misc_feature 1..20: note = chemically synthesized
  source 1..20: mol_type = other DNA
aaaagagtaaagagaataaa

SEQ ID NO: 39855 - DNA, 20 bp, synthetic construct
  misc_feature 1..20: note = chemically synthesized
  source 1..20: mol_type = other DNA
aaagagtaaagagaataaaa

SEQ ID NO: 39856 - DNA, 20 bp, synthetic construct
  misc_feature 1..20: note = chemically synthesized
  source 1..20: mol_type = other DNA
aaagagaataaaagggaaca

SEQ ID NO: 39857 - DNA, 20 bp, synthetic construct
  misc_feature 1..20: note = chemically synthesized
  source 1..20: mol_type = other DNA
aagagaataaaagggaacaa

SEQ ID NO: 39858 - DNA, 20 bp, synthetic construct
  misc_feature 1..20: note = chemically synthesized
  source 1..20: mol_type = other DNA
gagaataaaagggaacaaag

SEQ ID NO: 39859 - DNA, 20 bp, synthetic construct
  misc_feature 1..20: note = chemically synthesized
  source 1..20: mol_type = other DNA
gggaacaaaggagtcctatt

SEQ ID NO: 39860 - DNA, 20 bp, synthetic construct
  misc_feature 1..20: note = chemically synthesized
  source 1..20: mol_type = other DNA
ggaacaaaggagtcctattt

SEQ ID NO: 39861 - DNA, 20 bp, synthetic construct
  misc_feature 1..20: note = chemically synthesized
  source 1..20: mol_type = other DNA
aaggagtcctatttgggacc

SEQ ID NO: 39862 - DNA, 20 bp, synthetic construct
  misc_feature 1..20: note = chemically synthesized
  source 1..20: mol_type = other DNA
ggagtcctatttgggaccaa

SEQ ID NO: 39863 - DNA, 20 bp, synthetic construct
  misc_feature 1..20: note = chemically synthesized
  source 1..20: mol_type = other DNA
cctatttgggaccaagagtc

SEQ ID NO: 39864 - DNA, 20 bp, synthetic construct
  misc_feature 1..20: note = chemically synthesized
  source 1..20: mol_type = other DNA
ctatttgggaccaagagtca

SEQ ID NO: 39865 - DNA, 20 bp, synthetic construct
  misc_feature 1..20: note = chemically synthesized
  source 1..20: mol_type = other DNA
ggaccaagagtcaaggctat

SEQ ID NO: 39866 - DNA, 20 bp, synthetic construct
  misc_feature 1..20: note = chemically synthesized
  source 1..20: mol_type = other DNA
aagagtcaaggctatgagca

SEQ ID NO: 39867 - DNA, 20 bp, synthetic construct
  misc_feature 1..20: note = chemically synthesized
  source 1..20: mol_type = other DNA
aaggctatgagcacagacgt

SEQ ID NO: 39868 - DNA, 20 bp, synthetic construct
  misc_feature 1..20: note = chemically synthesized
  source 1..20: mol_type = other DNA
tatgagcacagacgtaagat

SEQ ID NO: 39869 - DNA, 20 bp, synthetic construct
  misc_feature 1..20: note = chemically synthesized
  source 1..20: mol_type = other DNA
agatgagtgttgaaaaaata

SEQ ID NO: 39870 - DNA, 20 bp, synthetic construct
  misc_feature 1..20: note = chemically synthesized
  source 1..20: mol_type = other DNA
gatgagtgttgaaaaaataa

SEQ ID NO: 39871 - DNA, 20 bp, synthetic construct
  misc_feature 1..20: note = chemically synthesized
  source 1..20: mol_type = other DNA
aataaaggttgtatgcttca

SEQ ID NO: 39872 - DNA, 20 bp, synthetic construct
  misc_feature 1..20: note = chemically synthesized
  source 1..20: mol_type = other DNA
ttgtatgcttcatagtgaat

SEQ ID NO: 39873 - DNA, 20 bp, synthetic construct
  misc_feature 1..20: note = chemically synthesized
  source 1..20: mol_type = other DNA
atttttgttatttgttattc

SEQ ID NO: 39874 - DNA, 20 bp, synthetic construct
  misc_feature 1..20: note = chemically synthesized
  source 1..20: mol_type = other DNA
tttttgttatttgttattct

SEQ ID NO: 39875 - DNA, 20 bp, synthetic construct
  misc_feature 1..20: note = chemically synthesized
  source 1..20: mol_type = other DNA
ttttgttatttgttattcta

SEQ ID NO: 39876 - DNA, 20 bp, synthetic construct
  misc_feature 1..20: note = chemically synthesized
  source 1..20: mol_type = other DNA
gttatttgttattctaggga

SEQ ID NO: 39877 - DNA, 20 bp, synthetic construct
  misc_feature 1..20: note = chemically synthesized
  source 1..20: mol_type = other DNA
ttatttgttattctagggaa

SEQ ID NO: 39878 - DNA, 20 bp, synthetic construct
  misc_feature 1..20: note = chemically synthesized
  source 1..20: mol_type = other DNA
attctagggaaaggccttgt

SEQ ID NO: 39879 - DNA, 20 bp, synthetic construct
  misc_feature 1..20: note = chemically synthesized
  source 1..20: mol_type = other DNA
agggaaaggccttgtgagta

SEQ ID NO: 39880 - DNA, 20 bp, synthetic construct
  misc_feature 1..20: note = chemically synthesized
  source 1..20: mol_type = other DNA
gggaaaggccttgtgagtac

SEQ ID NO: 39881 - DNA, 20 bp, synthetic construct
  misc_feature 1..20: note = chemically synthesized
  source 1..20: mol_type = other DNA
gtacaggcttacaattaatt

SEQ ID NO: 39882 - DNA, 20 bp, synthetic construct
  misc_feature 1..20: note = chemically synthesized
  source 1..20: mol_type = other DNA
gcttacaattaattaagtat

SEQ ID NO: 39883 - DNA, 20 bp, synthetic construct
  misc_feature 1..20: note = chemically synthesized
  source 1..20: mol_type = other DNA
taattaagtatgagacaatc

SEQ ID NO: 39884 - DNA, 20 bp, synthetic construct
  misc_feature 1..20: note = chemically synthesized
  source 1..20: mol_type = other DNA
gacaatccagaaaaatattt

SEQ ID NO: 39885 - DNA, 20 bp, synthetic construct
  misc_feature 1..20: note = chemically synthesized
  source 1..20: mol_type = other DNA
cagaaaaatatttaagtttt

SEQ ID NO: 39886 - DNA, 20 bp, synthetic construct
  misc_feature 1..20: note = chemically synthesized
  source 1..20: mol_type = other DNA
agaaaaatatttaagttttg

SEQ ID NO: 39887 - DNA, 20 bp, synthetic construct
  misc_feature 1..20: note = chemically synthesized
  source 1..20: mol_type = other DNA
ttaagttttgaggtaaaaaa

SEQ ID NO: 39888 - DNA, 20 bp, synthetic construct
  misc_feature 1..20: note = chemically synthesized
  source 1..20: mol_type = other DNA
atggcctgatgatgtgctac

SEQ ID NO: 39889 - DNA, 20 bp, synthetic construct
  misc_feature 1..20: note = chemically synthesized
  source 1..20: mol_type = other DNA
gcctgatgatgtgctacaag

SEQ ID NO: 39890 - DNA, 20 bp, synthetic construct
  misc_feature 1..20: note = chemically synthesized
  source 1..20: mol_type = other DNA
atgtgctacaagaagattgt

SEQ ID NO: 39891 - DNA, 20 bp, synthetic construct
  misc_feature 1..20: note = chemically synthesized
  source 1..20: mol_type = other DNA
gtgctacaagaagattgtga

SEQ ID NO: 39892 - DNA, 20 bp, synthetic construct
  misc_feature 1..20: note = chemically synthesized
  source 1..20: mol_type = other DNA
aagaagattgtgagagaaaa

SEQ ID NO: 39893 - DNA, 20 bp, synthetic construct
  misc_feature 1..20: note = chemically synthesized
  source 1..20: mol_type = other DNA
aaaaaagaaaactgcatctt

SEQ ID NO: 39894 - DNA, 20 bp, synthetic construct
  misc_feature 1..20: note = chemically synthesized
  source 1..20: mol_type = other DNA
aaaagaaaactgcatctttg

SEQ ID NO: 39895 - DNA, 20 bp, synthetic construct
  misc_feature 1..20: note = chemically synthesized
  source 1..20: mol_type = other DNA
aaagaaaactgcatctttgg

SEQ ID NO: 39896 - DNA, 20 bp, synthetic construct
  misc_feature 1..20: note = chemically synthesized
  source 1..20: mol_type = other DNA
cacctgcaaaacctaccatg

SEQ ID NO: 39897 - DNA, 20 bp, synthetic construct
  misc_feature 1..20: note = chemically synthesized
  source 1..20: mol_type = other DNA
cctaccatgtggtataacaa

SEQ ID NO: 39898 - DNA, 20 bp, synthetic construct
  misc_feature 1..20: note = chemically synthesized
  source 1..20: mol_type = other DNA
atgtggtataacaacagtgc

SEQ ID NO: 39899 - DNA, 20 bp, synthetic construct
  misc_feature 1..20: note = chemically synthesized
  source 1..20: mol_type = other DNA
gctggccccttcttgctgac

SEQ ID NO: 39900 - DNA, 20 bp, synthetic construct
  misc_feature 1..20: note = chemically synthesized
  source 1..20: mol_type = other DNA
cttcttgctgactggcttct

SEQ ID NO: 39901 - DNA, 20 bp, synthetic construct
  misc_feature 1..20: note = chemically synthesized
  source 1..20: mol_type = other DNA
ttcttgctgactggcttctt

SEQ ID NO: 39902 - DNA, 20 bp, synthetic construct
  misc_feature 1..20: note = chemically synthesized
  source 1..20: mol_type = other DNA
gctgactggcttcttgggct

SEQ ID NO: 39903 - DNA, 20 bp, synthetic construct
  misc_feature 1..20: note = chemically synthesized
  source 1..20: mol_type = other DNA
tgactggcttcttgggctca

SEQ ID NO: 39904 - DNA, 20 bp, synthetic construct
  misc_feature 1..20: note = chemically synthesized
  source 1..20: mol_type = other DNA
gactggcttcttgggctcag

SEQ ID NO: 39905 - DNA, 20 bp, synthetic construct
  misc_feature 1..20: note = chemically synthesized
  source 1..20: mol_type = other DNA
tggcttcttgggctcagagg

SEQ ID NO: 39906 - DNA, 20 bp, synthetic construct
  misc_feature 1..20: note = chemically synthesized
  source 1..20: mol_type = other DNA
gctcagaggcagttcactac

SEQ ID NO: 39907 - DNA, 20 bp, synthetic construct
  misc_feature 1..20: note = chemically synthesized
  source 1..20: mol_type = other DNA
atctacttctccgtcctttt

SEQ ID NO: 39908 - DNA, 20 bp, synthetic construct
  misc_feature 1..20: note = chemically synthesized
  source 1..20: mol_type = other DNA
ttctccgtcctttttggaaa

SEQ ID NO: 39909 - DNA, 20 bp, synthetic construct
  misc_feature 1..20: note = chemically synthesized
  source 1..20: mol_type = other DNA
gcactcttcttgtcctcatt

SEQ ID NO: 39910 - DNA, 20 bp, synthetic construct
  misc_feature 1..20: note = chemically synthesized
  source 1..20: mol_type = other DNA
gtcctcatttggaatgatca

SEQ ID NO: 39911 - DNA, 20 bp, synthetic construct
  misc_feature 1..20: note = chemically synthesized
  source 1..20: mol_type = other DNA
ggaatgatcacagcctccat

SEQ ID NO: 39912 - DNA, 20 bp, synthetic construct
  misc_feature 1..20: note = chemically synthesized
  source 1..20: mol_type = other DNA
tgagcccatgtactacttcc

SEQ ID NO: 39913 - DNA, 20 bp, synthetic construct
  misc_feature 1..20: note = chemically synthesized
  source 1..20: mol_type = other DNA
gtactacttcctggctatgc

SEQ ID NO: 39914 - DNA, 20 bp, synthetic construct
  misc_feature 1..20: note = chemically synthesized
  source 1..20: mol_type = other DNA
ctacttcctggctatgctgg

SEQ ID NO: 39915 - DNA, 20 bp, synthetic construct
  misc_feature 1..20: note = chemically synthesized
  source 1..20: mol_type = other DNA
cctggctatgctggcagaca

SEQ ID NO: 39916 - DNA, 20 bp, synthetic construct
  misc_feature 1..20: note = chemically synthesized
  source 1..20: mol_type = other DNA
atgctggcagacacggacct

SEQ ID NO: 39917 - DNA, 20 bp, synthetic construct
  misc_feature 1..20: note = chemically synthesized
  source 1..20: mol_type = other DNA
tgctggcagacacggacctt

SEQ ID NO: 39918 - DNA, 20 bp, synthetic construct
  misc_feature 1..20: note = chemically synthesized
  source 1..20: mol_type = other DNA
gacattcactacaatgccca

SEQ ID NO: 39919 - DNA, 20 bp, synthetic construct
  misc_feature 1..20: note = chemically synthesized
  source 1..20: mol_type = other DNA
cactacaatgcccacagtcc

SEQ ID NO: 39920 - DNA, 20 bp, synthetic construct
  misc_feature 1..20: note = chemically synthesized
  source 1..20: mol_type = other DNA
actacaatgcccacagtcct

SEQ ID NO: 39921 - DNA, 20 bp, synthetic construct
  misc_feature 1..20: note = chemically synthesized
  source 1..20: mol_type = other DNA
agtcctgggtgtcctgctgc

SEQ ID NO: 39922 - DNA, 20 bp, synthetic construct
  misc_feature 1..20: note = chemically synthesized
  source 1..20: mol_type = other DNA
tgggtgtcctgctgctagac

SEQ ID NO: 39923 - DNA, 20 bp, synthetic construct
  misc_feature 1..20: note = chemically synthesized
  source 1..20: mol_type = other DNA
ggtgtcctgctgctagacca

SEQ ID NO: 39924 - DNA, 20 bp, synthetic construct
  misc_feature 1..20: note = chemically synthesized
  source 1..20: mol_type = other DNA
gtgtcctgctgctagaccag

SEQ ID NO: 39925 - DNA, 20 bp, synthetic construct
  misc_feature 1..20: note = chemically synthesized
  source 1..20: mol_type = other DNA
tgtcctgctgctagaccaga

SEQ ID NO: 39926 - DNA, 20 bp, synthetic construct
  misc_feature 1..20: note = chemically synthesized
  source 1..20: mol_type = other DNA
tcctgctgctagaccagagg

SEQ ID NO: 39927 - DNA, 20 bp, synthetic construct
  misc_feature 1..20: note = chemically synthesized
  source 1..20: mol_type = other DNA
ccaatccttcattcattcac

SEQ ID NO: 39928 - DNA, 20 bp, synthetic construct
  misc_feature 1..20: note = chemically synthesized
  source 1..20: mol_type = other DNA
cattcattcactggccattg

SEQ ID NO: 39929 - DNA, 20 bp, synthetic construct
  misc_feature 1..20: note = chemically synthesized
  source 1..20: mol_type = other DNA
ttcactggccattgtagaat

SEQ ID NO: 39930 - DNA, 20 bp, synthetic construct
  misc_feature 1..20: note = chemically synthesized
  source 1..20: mol_type = other DNA
tcactggccattgtagaatc

SEQ ID NO: 39931 - DNA, 20 bp, synthetic construct
  misc_feature 1..20: note = chemically synthesized
  source 1..20: mol_type = other DNA
atcaggtatcttgcttgttt

SEQ ID NO: 39932 - DNA, 20 bp, synthetic construct
  misc_feature 1..20: note = chemically synthesized
  source 1..20: mol_type = other DNA
attgccatccgcacaccact

SEQ ID NO: 39933 - DNA, 20 bp, synthetic construct
  misc_feature 1..20: note = chemically synthesized
  source 1..20: mol_type = other DNA
ttgccatccgcacaccactg

SEQ ID NO: 39934 - DNA, 20 bp, synthetic construct
  misc_feature 1..20: note = chemically synthesized
  source 1..20: mol_type = other DNA
ctgcattcttaccaattccc

SEQ ID NO: 39935 - DNA, 20 bp, synthetic construct
  misc_feature 1..20: note = chemically synthesized
  source 1..20: mol_type = other DNA
caattcccgagtgatgaaca

SEQ ID NO: 39936 - DNA, 20 bp, synthetic construct
  misc_feature 1..20: note = chemically synthesized
  source 1..20: mol_type = other DNA
aattcccgagtgatgaacat

SEQ ID NO: 39937 - DNA, 20 bp, synthetic construct
  misc_feature 1..20: note = chemically synthesized
  source 1..20: mol_type = other DNA
ccgagtgatgaacataggac

SEQ ID NO: 39938 - DNA, 20 bp, synthetic construct
  misc_feature 1..20: note = chemically synthesized
  source 1..20: mol_type = other DNA
cgagtgatgaacataggact

SEQ ID NO: 39939 - DNA, 20 bp, synthetic construct
  misc_feature 1..20: note = chemically synthesized
  source 1..20: mol_type = other DNA
gagtgatgaacataggactg

SEQ ID NO: 39940 - DNA, 20 bp, synthetic construct
  misc_feature 1..20: note = chemically synthesized
  source 1..20: mol_type = other DNA
agtgatgaacataggactgg

SEQ ID NO: 39941 - DNA, 20 bp, synthetic construct
  misc_feature 1..20: note = chemically synthesized
  source 1..20: mol_type = other DNA
ataggactgggggtactgat

SEQ ID NO: 39942 - DNA, 20 bp, synthetic construct
  misc_feature 1..20: note = chemically synthesized
  source 1..20: mol_type = other DNA
aggactgggggtactgatga

SEQ ID NO: 39943 - DNA, 20 bp, synthetic construct
  misc_feature 1..20: note = chemically synthesized
  source 1..20: mol_type = other DNA
ggactgggggtactgatgag

SEQ ID NO: 39944 - DNA, 20 bp, synthetic construct
  misc_feature 1..20: note = chemically synthesized
  source 1..20: mol_type = other DNA
ctctactgctacccatattg

SEQ ID NO: 39945 - DNA, 20 bp, synthetic construct
  misc_feature 1..20: note = chemically synthesized
  source 1..20: mol_type = other DNA
gcacacattttgcctccatc

SEQ ID NO: 39946 - DNA, 20 bp, synthetic construct
  misc_feature 1..20: note = chemically synthesized
  source 1..20: mol_type = other DNA
atcacatatatccaattatt

SEQ ID NO: 39947 - DNA, 20 bp, synthetic construct
  misc_feature 1..20: note = chemically synthesized
  source 1..20: mol_type = other DNA
gacttctttgactgtctttt

SEQ ID NO: 39948 - DNA, 20 bp, synthetic construct
  misc_feature 1..20: note = chemically synthesized
  source 1..20: mol_type = other DNA
tttcttatatactaatcctc

SEQ ID NO: 39949 - DNA, 20 bp, synthetic construct
  misc_feature 1..20: note = chemically synthesized
  source 1..20: mol_type = other DNA
ttatatactaatcctcaaga

SEQ ID NO: 39950 - DNA, 20 bp, synthetic construct
  misc_feature 1..20: note = chemically synthesized
  source 1..20: mol_type = other DNA
actaatcctcaagacagtga

SEQ ID NO: 39951 - DNA, 20 bp, synthetic construct
  misc_feature 1..20: note = chemically synthesized
  source 1..20: mol_type = other DNA
ctaatcctcaagacagtgat

SEQ ID NO: 39952 - DNA, 20 bp, synthetic construct
  misc_feature 1..20: note = chemically synthesized
  source 1..20: mol_type = other DNA
acagtgatgggcattgcgtc

SEQ ID NO: 39953 - DNA, 20 bp, synthetic construct
  misc_feature 1..20: note = chemically synthesized
  source 1..20: mol_type = other DNA
gatgggcattgcgtctggac

SEQ ID NO: 39954 - DNA, 20 bp, synthetic construct
  misc_feature 1..20: note = chemically synthesized
  source 1..20: mol_type = other DNA
tgggcattgcgtctggacaa

SEQ ID NO: 39955 - DNA, 20 bp, synthetic construct
  misc_feature 1..20: note = chemically synthesized
  source 1..20: mol_type = other DNA
gggcattgcgtctggacaag

SEQ ID NO: 39956 - DNA, 20 bp, synthetic construct
  misc_feature 1..20: note = chemically synthesized
  source 1..20: mol_type = other DNA
cattgcgtctggacaagagg

SEQ ID NO: 39957 - DNA, 20 bp, synthetic construct
  misc_feature 1..20: note = chemically synthesized
  source 1..20: mol_type = other DNA
aacacttgtgtctcccatat

SEQ ID NO: 39958 - DNA, 20 bp, synthetic construct
  misc_feature 1..20: note = chemically synthesized
  source 1..20: mol_type = other DNA
ctcccatattagctgtgtcc

SEQ ID NO: 39959 - DNA, 20 bp, synthetic construct
  misc_feature 1..20: note = chemically synthesized
  source 1..20: mol_type = other DNA
agtatttcacatcactgtga

SEQ ID NO: 39960 - DNA, 20 bp, synthetic construct
  misc_feature 1..20: note = chemically synthesized
  source 1..20: mol_type = other DNA
gtatttcacatcactgtgat

SEQ ID NO: 39961 - DNA, 20 bp, synthetic construct
  misc_feature 1..20: note = chemically synthesized
  source 1..20: mol_type = other DNA
atgggactgtcattcattca

SEQ ID NO: 39962 - DNA, 20 bp, synthetic construct
  misc_feature 1..20: note = chemically synthesized
  source 1..20: mol_type = other DNA
tgggactgtcattcattcac

SEQ ID NO: 39963 - DNA, 20 bp, synthetic construct
  misc_feature 1..20: note = chemically synthesized
  source 1..20: mol_type = other DNA
ctgtcattcattcacaggtt

SEQ ID NO: 39964 - DNA, 20 bp, synthetic construct
  misc_feature 1..20: note = chemically synthesized
  source 1..20: mol_type = other DNA
tgtcattcattcacaggttt

SEQ ID NO: 39965 - DNA, 20 bp, synthetic construct
  misc_feature 1..20: note = chemically synthesized
  source 1..20: mol_type = other DNA
tgggaaacatgcacctcatg

SEQ ID NO: 39966 - DNA, 20 bp, synthetic construct
  misc_feature 1..20: note = chemically synthesized
  source 1..20: mol_type = other DNA
catgtggtccccattaccat

SEQ ID NO: 39967 - DNA, 20 bp, synthetic construct
  misc_feature 1..20: note = chemically synthesized
  source 1..20: mol_type = other DNA
ttcgtgaatcctatcattta

SEQ ID NO: 39968 - DNA, 20 bp, synthetic construct
  misc_feature 1..20: note = chemically synthesized
  source 1..20: mol_type = other DNA
atcctatcatttatagcatc

SEQ ID NO: 39969 - DNA, 20 bp, synthetic construct
  misc_feature 1..20: note = chemically synthesized
  source 1..20: mol_type = other DNA
tcatttatagcatcaagacc

SEQ ID NO: 39970 - DNA, 20 bp, synthetic construct
  misc_feature 1..20: note = chemically synthesized
  source 1..20: mol_type = other DNA
tttatagcatcaagaccaag

SEQ ID NO: 39971 - DNA, 20 bp, synthetic construct
  misc_feature 1..20: note = chemically synthesized
  source 1..20: mol_type = other DNA
atcaagaccaagcagattca

SEQ ID NO: 39972 - DNA, 20 bp, synthetic construct
  misc_feature 1..20: note = chemically synthesized
  source 1..20: mol_type = other DNA
aagaccaagcagattcaaag

SEQ ID NO: 39973 - DNA, 20 bp, synthetic construct
  misc_feature 1..20: note = chemically synthesized
  source 1..20: mol_type = other DNA
agcattattcgcctattttc

SEQ ID NO: 39974 - DNA, 20 bp, synthetic construct
  misc_feature 1..20: note = chemically synthesized
  source 1..20: mol_type = other DNA
gcattattcgcctattttct

SEQ ID NO: 39975 - DNA, 20 bp, synthetic construct
  misc_feature 1..20: note = chemically synthesized
  source 1..20: mol_type = other DNA
ttattcgcctattttctggg

SEQ ID NO: 39976 - DNA, 20 bp, synthetic construct
  misc_feature 1..20: note = chemically synthesized
  source 1..20: mol_type = other DNA
attcgcctattttctgggca

SEQ ID NO: 39977 - DNA, 20 bp, synthetic construct
  misc_feature 1..20: note = chemically synthesized
  source 1..20: mol_type = other DNA
cgcctattttctgggcagag

SEQ ID NO: 39978 - DNA, 20 bp, synthetic construct
  misc_feature 1..20: note = chemically synthesized
  source 1..20: mol_type = other DNA
gcctattttctgggcagagt

SEQ ID NO: 39979 - DNA, 20 bp, synthetic construct
  misc_feature 1..20: note = chemically synthesized
  source 1..20: mol_type = other DNA
cctattttctgggcagagta

SEQ ID NO: 39980 - DNA, 20 bp, synthetic construct
  misc_feature 1..20: note = chemically synthesized
  source 1..20: mol_type = other DNA
ttctgggcagagtagggctt

SEQ ID NO: 39981 - DNA, 20 bp, synthetic construct
  misc_feature 1..20: note = chemically synthesized
  source 1..20: mol_type = other DNA
tagggcttgagcccttattt

SEQ ID NO: 39982 - DNA, 20 bp, synthetic construct
  misc_feature 1..20: note = chemically synthesized
  source 1..20: mol_type = other DNA
agcccttatttcagaatctc

SEQ ID NO: 39983 - DNA, 20 bp, synthetic construct
  misc_feature 1..20: note = chemically synthesized
  source 1..20: mol_type = other DNA
tttcagaatctcaagatctc

SEQ ID NO: 39984 - DNA, 20 bp, synthetic construct
  misc_feature 1..20: note = chemically synthesized
  source 1..20: mol_type = other DNA
ttcagaatctcaagatctct

SEQ ID NO: 39985 - DNA, 20 bp, synthetic construct
  misc_feature 1..20: note = chemically synthesized
  source 1..20: mol_type = other DNA
ctcaagatctctaggatttc

SEQ ID NO: 39986 - DNA, 20 bp, synthetic construct
  misc_feature 1..20: note = chemically synthesized
  source 1..20: mol_type = other DNA
tcaagatctctaggatttct

SEQ ID NO: 39987 - DNA, 20 bp, synthetic construct
  misc_feature 1..20: note = chemically synthesized
  source 1..20: mol_type = other DNA
gggcctctcccattactgaa

SEQ ID NO: 39988 - DNA, 20 bp, synthetic construct
  misc_feature 1..20: note = chemically synthesized
  source 1..20: mol_type = other DNA
ggcctctcccattactgaaa

SEQ ID NO: 39989 - DNA, 20 bp, synthetic construct
  misc_feature 1..20: note = chemically synthesized
  source 1..20: mol_type = other DNA
ccattactgaaaaggaaccc

SEQ ID NO: 39990 - DNA, 20 bp, synthetic construct
  misc_feature 1..20: note = chemically synthesized
  source 1..20: mol_type = other DNA
tatccacacttttttttcct

SEQ ID NO: 39991 - DNA, 20 bp, synthetic construct
  misc_feature 1..20: note = chemically synthesized
  source 1..20: mol_type = other DNA
tccacacttttttttcctca

SEQ ID NO: 39992 - DNA, 20 bp, synthetic construct
  misc_feature 1..20: note = chemically synthesized
  source 1..20: mol_type = other DNA
cacttttttttcctcagagt

SEQ ID NO: 39993 - DNA, 20 bp, synthetic construct
  misc_feature 1..20: note = chemically synthesized
  source 1..20: mol_type = other DNA
attttaattatcacatgaaa

SEQ ID NO: 39994 - DNA, 20 bp, synthetic construct
  misc_feature 1..20: note = chemically synthesized
  source 1..20: mol_type = other DNA
tcacatgaaaaagctgatgt

SEQ ID NO: 39995 - DNA, 20 bp, synthetic construct
  misc_feature 1..20: note = chemically synthesized
  source 1..20: mol_type = other DNA
atgaaaaagctgatgtgagc

SEQ ID NO: 39996 - DNA, 20 bp, synthetic construct
  misc_feature 1..20: note = chemically synthesized
  source 1..20: mol_type = other DNA
tatatatatatcacctaata

SEQ ID NO: 39997 - DNA, 20 bp, synthetic construct
  misc_feature 1..20: note = chemically synthesized
  source 1..20: mol_type = other DNA
tatatatatcacctaataaa

SEQ ID NO: 39998 - DNA, 20 bp, synthetic construct
  misc_feature 1..20: note = chemically synthesized
  source 1..20: mol_type = other DNA
atatatatcacctaataaag

SEQ ID NO: 39999 - DNA, 20 bp, synthetic construct
  misc_feature 1..20: note = chemically synthesized
  source 1..20: mol_type = other DNA
tatatatcacctaataaaga

SEQ ID NO: 40000 - DNA, 20 bp, synthetic construct
  misc_feature 1..20: note = chemically synthesized
  source 1..20: mol_type = other DNA
acctaataaagagggaatgc

SEQ ID NO: 40001 - DNA, 20 bp, synthetic construct
  misc_feature 1..20: note = chemically synthesized
  source 1..20: mol_type = other DNA
agggaatgccagtgatgctg

SEQ ID NO: 40002 - DNA, 20 bp, synthetic construct
  misc_feature 1..20: note = chemically synthesized
  source 1..20: mol_type = other DNA
tgccagtgatgctgaagaaa

SEQ ID NO: 40003 - DNA, 20 bp, synthetic construct
  misc_feature 1..20: note = chemically synthesized
  source 1..20: mol_type = other DNA
gatgctgaagaaaaagaata

SEQ ID NO: 40004 - DNA, 20 bp, synthetic construct
  misc_feature 1..20: note = chemically synthesized
  source 1..20: mol_type = other DNA
atgctgaagaaaaagaatac

SEQ ID NO: 40005 - DNA, 20 bp, synthetic construct
  misc_feature 1..20: note = chemically synthesized
  source 1..20: mol_type = other DNA
ctgaagaaaaagaatacagg

SEQ ID NO: 40006 - DNA, 20 bp, synthetic construct
  misc_feature 1..20: note = chemically synthesized
  source 1..20: mol_type = other DNA
aagaaaaagaatacaggaag

SEQ ID NO: 40007 - DNA, 20 bp, synthetic construct
  misc_feature 1..20: note = chemically synthesized
  source 1..20: mol_type = other DNA
gaaaaagaatacaggaagca

SEQ ID NO: 40008 - DNA, 20 bp, synthetic construct
  misc_feature 1..20: note = chemically synthesized
  source 1..20: mol_type = other DNA
aaaaagaatacaggaagcag

SEQ ID NO: 40009 - DNA, 20 bp, synthetic construct
  misc_feature 1..20: note = chemically synthesized
  source 1..20: mol_type = other DNA
aaagaatacaggaagcagag

SEQ ID NO: 40010 - DNA, 20 bp, synthetic construct
  misc_feature 1..20: note = chemically synthesized
  source 1..20: mol_type = other DNA
gaggagatataacaatccaa

SEQ ID NO: 40011 - DNA, 20 bp, synthetic construct
  misc_feature 1..20: note = chemically synthesized
  source 1..20: mol_type = other DNA
gagatataacaatccaaaag

SEQ ID NO: 40012 - DNA, 20 bp, synthetic construct
  misc_feature 1..20: note = chemically synthesized
  source 1..20: mol_type = other DNA
gatataacaatccaaaagaa

SEQ ID NO: 40013 - DNA, 20 bp, synthetic construct
  misc_feature 1..20: note = chemically synthesized
  source 1..20: mol_type = other DNA
aagaagagtaactatgattt

SEQ ID NO: 40014 - DNA, 20 bp, synthetic construct
  misc_feature 1..20: note = chemically synthesized
  source 1..20: mol_type = other DNA
agtaactatgatttcagaaa

SEQ ID NO: 40015 - DNA, 20 bp, synthetic construct
  misc_feature 1..20: note = chemically synthesized
  source 1..20: mol_type = other DNA
ctatgatttcagaaatagtc

SEQ ID NO: 40016 - DNA, 20 bp, synthetic construct
  misc_feature 1..20: note = chemically synthesized
  source 1..20: mol_type = other DNA
atttcagaaatagtcaagat

SEQ ID NO: 40017 - DNA, 20 bp, synthetic construct
  misc_feature 1..20: note = chemically synthesized
  source 1..20: mol_type = other DNA
tcagaaatagtcaagataag

SEQ ID NO: 40018 - DNA, 20 bp, synthetic construct
  misc_feature 1..20: note = chemically synthesized
  source 1..20: mol_type = other DNA
tagtcaagataagtggacta

SEQ ID NO: 40019 - DNA, 20 bp, synthetic construct
  misc_feature 1..20: note = chemically synthesized
  source 1..20: mol_type = other DNA
tcaagataagtggactaaag

SEQ ID NO: 40020 - DNA, 20 bp, synthetic construct
  misc_feature 1..20: note = chemically synthesized
  source 1..20: mol_type = other DNA
ataagtggactaaagcagct

SEQ ID NO: 40021 - DNA, 20 bp, synthetic construct
  misc_feature 1..20: note = chemically synthesized
  source 1..20: mol_type = other DNA
taagtggactaaagcagctt

SEQ ID NO: 40022 - DNA, 20 bp, synthetic construct
  misc_feature 1..20: note = chemically synthesized
  source 1..20: mol_type = other DNA
aaagcagcttgggtcaaata

SEQ ID NO: 40023 - DNA, 20 bp, synthetic construct
  misc_feature 1..20: note = chemically synthesized
  source 1..20: mol_type = other DNA
ggtcaaatacagttcatcta

SEQ ID NO: 40024 - DNA, 20 bp, synthetic construct
  misc_feature 1..20: note = chemically synthesized
  source 1..20: mol_type = other DNA
ttcatctaaagaaaaatgtg

SEQ ID NO: 40025 - DNA, 20 bp, synthetic construct
  misc_feature 1..20: note = chemically synthesized
  source 1..20: mol_type = other DNA
tctaaagaaaaatgtgcagt

SEQ ID NO: 40026 - DNA, 20 bp, synthetic construct
  misc_feature 1..20: note = chemically synthesized
  source 1..20: mol_type = other DNA
taaagaaaaatgtgcagttg

SEQ ID NO: 40027 - DNA, 20 bp, synthetic construct
  misc_feature 1..20: note = chemically synthesized
  source 1..20: mol_type = other DNA
aaagaaaaatgtgcagttgg

SEQ ID NO: 40028 - DNA, 20 bp, synthetic construct
  misc_feature 1..20: note = chemically synthesized
  source 1..20: mol_type = other DNA
tacattttatgtgtcttata

SEQ ID NO: 40029 - DNA, 20 bp, synthetic construct
  misc_feature 1..20: note = chemically synthesized
  source 1..20: mol_type = other DNA
acattttatgtgtcttataa

SEQ ID NO: 40030 - DNA, 20 bp, synthetic construct
  misc_feature 1..20: note = chemically synthesized
  source 1..20: mol_type = other DNA
tcatctccatactttgaaac

SEQ ID NO: 40031 - DNA, 20 bp, synthetic construct
  misc_feature 1..20: note = chemically synthesized
  source 1..20: mol_type = other DNA
ttgaaactagttactctgaa

SEQ ID NO: 40032 - DNA, 20 bp, synthetic construct
  misc_feature 1..20: note = chemically synthesized
  source 1..20: mol_type = other DNA
tgaaactagttactctgaaa

SEQ ID NO: 40033 - DNA, 20 bp, synthetic construct
  misc_feature 1..20: note = chemically synthesized
  source 1..20: mol_type = other DNA
tgaaaaggatcttgcttgat

SEQ ID NO: 40034 - DNA, 20 bp, synthetic construct
  misc_feature 1..20: note = chemically synthesized
  source 1..20: mol_type = other DNA
aaggatcttgcttgattagt

SEQ ID NO: 40035 - DNA, 20 bp, synthetic construct
  misc_feature 1..20: note = chemically synthesized
  source 1..20: mol_type = other DNA
attagtaagcaaacttgtgt

SEQ ID NO: 40036 - DNA, 20 bp, synthetic construct
  misc_feature 1..20: note = chemically synthesized
  source 1..20: mol_type = other DNA
ttagtaagcaaacttgtgtg

SEQ ID NO: 40037 - DNA, 20 bp, synthetic construct
  misc_feature 1..20: note = chemically synthesized
  source 1..20: mol_type = other DNA
caaacttgtgtgaggctaaa

SEQ ID NO: 40038 - DNA, 20 bp, synthetic construct
  misc_feature 1..20: note = chemically synthesized
  source 1..20: mol_type = other DNA
gaggctaaacagcaaatatc

SEQ ID NO: 40039 - DNA, 20 bp, synthetic construct
  misc_feature 1..20: note = chemically synthesized
  source 1..20: mol_type = other DNA
acagcaaatatctagaactt

SEQ ID NO: 40040 - DNA, 20 bp, synthetic construct
  misc_feature 1..20: note = chemically synthesized
  source 1..20: mol_type = other DNA
cagcaaatatctagaacttt

SEQ ID NO: 40041 - DNA, 20 bp, synthetic construct
  misc_feature 1..20: note = chemically synthesized
  source 1..20: mol_type = other DNA
caaatatctagaactttagg

SEQ ID NO: 40042 - DNA, 20 bp, synthetic construct
  misc_feature 1..20: note = chemically synthesized
  source 1..20: mol_type = other DNA
tcatgaaatgtaatttccct

SEQ ID NO: 40043 - DNA, 20 bp, synthetic construct
  misc_feature 1..20: note = chemically synthesized
  source 1..20: mol_type = other DNA
tgaaatgtaatttcccttag

SEQ ID NO: 40044 - DNA, 20 bp, synthetic construct
  misc_feature 1..20: note = chemically synthesized
  source 1..20: mol_type = other DNA
tgtaatttcccttagtagac

SEQ ID NO: 40045 - DNA, 20 bp, synthetic construct
  misc_feature 1..20: note = chemically synthesized
  source 1..20: mol_type = other DNA
ctggcatattttactactaa

SEQ ID NO: 40046 - DNA, 20 bp, synthetic construct
  misc_feature 1..20: note = chemically synthesized
  source 1..20: mol_type = other DNA
tggcatattttactactaaa

SEQ ID NO: 40047 - DNA, 20 bp, synthetic construct
  misc_feature 1..20: note = chemically synthesized
  source 1..20: mol_type = other DNA
ctactaaaaggcgtgtgata

SEQ ID NO: 40048 - DNA, 20 bp, synthetic construct
  misc_feature 1..20: note = chemically synthesized
  source 1..20: mol_type = other DNA
aggcgtgtgatacagactaa

SEQ ID NO: 40049 - DNA, 20 bp, synthetic construct
  misc_feature 1..20: note = chemically synthesized
  source 1..20: mol_type = other DNA
gatacagactaacagctaaa

SEQ ID NO: 40050 - DNA, 20 bp, synthetic construct
  misc_feature 1..20: note = chemically synthesized
  source 1..20: mol_type = other DNA
acagactaacagctaaatag

SEQ ID NO: 40051 - DNA, 20 bp, synthetic construct
  misc_feature 1..20: note = chemically synthesized
  source 1..20: mol_type = other DNA
acacatttcttatcatctcg

SEQ ID NO: 40052 - DNA, 20 bp, synthetic construct
  misc_feature 1..20: note = chemically synthesized
  source 1..20: mol_type = other DNA
catttcttatcatctcgtgg

SEQ ID NO: 40053 - DNA, 20 bp, synthetic construct
  misc_feature 1..20: note = chemically synthesized
  source 1..20: mol_type = other DNA
tcttatcatctcgtggaagc

SEQ ID NO: 40054 - DNA, 20 bp, synthetic construct
  misc_feature 1..20: note = chemically synthesized
  source 1..20: mol_type = other DNA
ctcgtggaagccagatatcc

SEQ ID NO: 40055 - DNA, 20 bp, synthetic construct
  misc_feature 1..20: note = chemically synthesized
  source 1..20: mol_type = other DNA
ttaatactttttcttctttc

SEQ ID NO: 40056 - DNA, 20 bp, synthetic construct
  misc_feature 1..20: note = chemically synthesized
  source 1..20: mol_type = other DNA
aaaataaccaactataaatt

SEQ ID NO: 40057 - DNA, 20 bp, synthetic construct
  misc_feature 1..20: note = chemically synthesized
  source 1..20: mol_type = other DNA
cttctcacataaaaaatctc

SEQ ID NO: 40058 - DNA, 20 bp, synthetic construct
  misc_feature 1..20: note = chemically synthesized
  source 1..20: mol_type = other DNA
gactttttcacttcatgaaa

SEQ ID NO: 40059 - DNA, 20 bp, synthetic construct
  misc_feature 1..20: note = chemically synthesized
  source 1..20: mol_type = other DNA
tgataattaatgcaaaaact

SEQ ID NO: 40060 - DNA, 20 bp, synthetic construct
  misc_feature 1..20: note = chemically synthesized
  source 1..20: mol_type = other DNA
attaatgcaaaaacttggca

SEQ ID NO: 40061 - DNA, 20 bp, synthetic construct
  misc_feature 1..20: note = chemically synthesized
  source 1..20: mol_type = other DNA
ttaatgcaaaaacttggcaa

SEQ ID NO: 40062 - DNA, 20 bp, synthetic construct
  misc_feature 1..20: note = chemically synthesized
  source 1..20: mol_type = other DNA
gcaaaggtaatgttatattt

SEQ ID NO: 40063 - DNA, 20 bp, synthetic construct
  misc_feature 1..20: note = chemically synthesized
  source 1..20: mol_type = other DNA
ttttagaaatttttcactga

SEQ ID NO: 40064 - DNA, 20 bp, synthetic construct
  misc_feature 1..20: note = chemically synthesized
  source 1..20: mol_type = other DNA
gaaatttttcactgatggaa

SEQ ID NO: 40065 - DNA, 20 bp, synthetic construct
  misc_feature 1..20: note = chemically synthesized
  source 1..20: mol_type = other DNA
tcttccttcaatcttcttca

SEQ ID NO: 40066 - DNA, 20 bp, synthetic construct
  misc_feature 1..20: note = chemically synthesized
  source 1..20: mol_type = other DNA
atcttcttcaaagtgtttgt

SEQ ID NO: 40067 - DNA, 20 bp, synthetic construct
  misc_feature 1..20: note = chemically synthesized
  source 1..20: mol_type = other DNA
taagtctttatgctgttcat

SEQ ID NO: 40068 - DNA, 20 bp, synthetic construct
  misc_feature 1..20: note = chemically synthesized
  source 1..20: mol_type = other DNA
aagtctttatgctgttcatt

SEQ ID NO: 40069 - DNA, 20 bp, synthetic construct
  misc_feature 1..20: note = chemically synthesized
  source 1..20: mol_type = other DNA
tgttcattgggtctgaaccg

SEQ ID NO: 40070 - DNA, 20 bp, synthetic construct
  misc_feature 1..20: note = chemically synthesized
  source 1..20: mol_type = other DNA
cgcagtctaccacttgctat

SEQ ID NO: 40071 - DNA, 20 bp, synthetic construct
  misc_feature 1..20: note = chemically synthesized
  source 1..20: mol_type = other DNA
accacttgctattagtgtaa

SEQ ID NO: 40072 - DNA, 20 bp, synthetic construct
  misc_feature 1..20: note = chemically synthesized
  source 1..20: mol_type = other DNA
ccacttgctattagtgtaac

SEQ ID NO: 40073 - DNA, 20 bp, synthetic construct
  misc_feature 1..20: note = chemically synthesized
  source 1..20: mol_type = other DNA
cacttgctattagtgtaaca

SEQ ID NO: 40074 - DNA, 20 bp, synthetic construct
  misc_feature 1..20: note = chemically synthesized
  source 1..20: mol_type = other DNA
acttgctattagtgtaacag

SEQ ID NO: 40075 - DNA, 20 bp, synthetic construct
  misc_feature 1..20: note = chemically synthesized
  source 1..20: mol_type = other DNA
acaatttcttcatctactgc

SEQ ID NO: 40076 - DNA, 20 bp, synthetic construct
  misc_feature 1..20: note = chemically synthesized
  source 1..20: mol_type = other DNA
atctactgctagttctgcgc

SEQ ID NO: 40077 - DNA, 20 bp, synthetic construct
  misc_feature 1..20: note = chemically synthesized
  source 1..20: mol_type = other DNA
tagttctgcgctagtatttg

SEQ ID NO: 40078 - DNA, 20 bp, synthetic construct
  misc_feature 1..20: note = chemically synthesized
  source 1..20: mol_type = other DNA
atttgcagctgatctcctta

SEQ ID NO: 40079 - DNA, 20 bp, synthetic construct
  misc_feature 1..20: note = chemically synthesized
  source 1..20: mol_type = other DNA
tttgcagctgatctccttat

SEQ ID NO: 40080 - DNA, 20 bp, synthetic construct
  misc_feature 1..20: note = chemically synthesized
  source 1..20: mol_type = other DNA
ttataggaaactaatctcaa

SEQ ID NO: 40081 - DNA, 20 bp, synthetic construct
  misc_feature 1..20: note = chemically synthesized
  source 1..20: mol_type = other DNA
gttgcattcattcctctctg

SEQ ID NO: 40082 - DNA, 20 bp, synthetic construct
  misc_feature 1..20: note = chemically synthesized
  source 1..20: mol_type = other DNA
tgctgtttcttccaattttt

SEQ ID NO: 40083 - DNA, 20 bp, synthetic construct
  misc_feature 1..20: note = chemically synthesized
  source 1..20: mol_type = other DNA
ccaatttttaagttctcgtt

SEQ ID NO: 40084 - DNA, 20 bp, synthetic construct
  misc_feature 1..20: note = chemically synthesized
  source 1..20: mol_type = other DNA
atattttcttttctgattga

SEQ ID NO: 40085 - DNA, 20 bp, synthetic construct
  misc_feature 1..20: note = chemically synthesized
  source 1..20: mol_type = other DNA
tctgattgaaagtccatgtt

SEQ ID NO: 40086 - DNA, 20 bp, synthetic construct
  misc_feature 1..20: note = chemically synthesized
  source 1..20: mol_type = other DNA
gaaagtccatgttcagaacc

SEQ ID NO: 40087 - DNA, 20 bp, synthetic construct
  misc_feature 1..20: note = chemically synthesized
  source 1..20: mol_type = other DNA
aaattctctctgcttcactt

SEQ ID NO: 40088 - DNA, 20 bp, synthetic construct
  misc_feature 1..20: note = chemically synthesized
  source 1..20: mol_type = other DNA
tttcatatttattttacatc

SEQ ID NO: 40089 - DNA, 20 bp, synthetic construct
  misc_feature 1..20: note = chemically synthesized
  source 1..20: mol_type = other DNA
atatttattttacatctgga

SEQ ID NO: 40090 - DNA, 20 bp, synthetic construct
  misc_feature 1..20: note = chemically synthesized
  source 1..20: mol_type = other DNA
ttattttacatctggacagt

SEQ ID NO: 40091 - DNA, 20 bp, synthetic construct
  misc_feature 1..20: note = chemically synthesized
  source 1..20: mol_type = other DNA
tgagcactctgaaaatattc

SEQ ID NO: 40092 - DNA, 20 bp, synthetic construct
  misc_feature 1..20: note = chemically synthesized
  source 1..20: mol_type = other DNA
agcactctgaaaatattcca

SEQ ID NO: 40093 - DNA, 20 bp, synthetic construct
  misc_feature 1..20: note = chemically synthesized
  source 1..20: mol_type = other DNA
aaatattccagagatttgat

SEQ ID NO: 40094 - DNA, 20 bp, synthetic construct
  misc_feature 1..20: note = chemically synthesized
  source 1..20: mol_type = other DNA
aaaatacttactgaaaacta

SEQ ID NO: 40095 - DNA, 20 bp, synthetic construct
  misc_feature 1..20: note = chemically synthesized
  source 1..20: mol_type = other DNA
aaaactaaagctaaataatg

SEQ ID NO: 40096 - DNA, 20 bp, synthetic construct
  misc_feature 1..20: note = chemically synthesized
  source 1..20: mol_type = other DNA
aatgcagtatttctccaaat

SEQ ID NO: 40097 - DNA, 20 bp, synthetic construct
  misc_feature 1..20: note = chemically synthesized
  source 1..20: mol_type = other DNA
gcagtatttctccaaattag

SEQ ID NO: 40098 - DNA, 20 bp, synthetic construct
  misc_feature 1..20: note = chemically synthesized
  source 1..20: mol_type = other DNA
cagtatttctccaaattaga

SEQ ID NO: 40099 - DNA, 20 bp, synthetic construct
  misc_feature 1..20: note = chemically synthesized
  source 1..20: mol_type = other DNA
tccaaattagaaggcccatt

SEQ ID NO: 40100 - DNA, 20 bp, synthetic construct
  misc_feature 1..20: note = chemically synthesized
  source 1..20: mol_type = other DNA
ttagaaggcccatttggatg

SEQ ID NO: 40101 - DNA, 20 bp, synthetic construct
  misc_feature 1..20: note = chemically synthesized
  source 1..20: mol_type = other DNA
tagaaggcccatttggatgc

SEQ ID NO: 40102 - DNA, 20 bp, synthetic construct
  misc_feature 1..20: note = chemically synthesized
  source 1..20: mol_type = other DNA
ctaataaatgactactcctg

SEQ ID NO: 40103 - DNA, 20 bp, synthetic construct
  misc_feature 1..20: note = chemically synthesized
  source 1..20: mol_type = other DNA
taataaatgactactcctga

SEQ ID NO: 40104 - DNA, 20 bp, synthetic construct
  misc_feature 1..20: note = chemically synthesized
  source 1..20: mol_type = other DNA
atgactactcctgaaggatt

SEQ ID NO: 40105 - DNA, 20 bp, synthetic construct
  misc_feature 1..20: note = chemically synthesized
  source 1..20: mol_type = other DNA
ttattgtgcgaattgtttgt

SEQ ID NO: 40106 - DNA, 20 bp, synthetic construct
  misc_feature 1..20: note = chemically synthesized
  source 1..20: mol_type = other DNA
attgtgcgaattgtttgtga

SEQ ID NO: 40107 - DNA, 20 bp, synthetic construct
  misc_feature 1..20: note = chemically synthesized
  source 1..20: mol_type = other DNA
tgtttgtgagagttctttga

SEQ ID NO: 40108 - DNA, 20 bp, synthetic construct
  misc_feature 1..20: note = chemically synthesized
  source 1..20: mol_type = other DNA
ttgtgagagttctttgaaag

SEQ ID NO: 40109 - DNA, 20 bp, synthetic construct
  misc_feature 1..20: note = chemically synthesized
  source 1..20: mol_type = other DNA
tgtgagagttctttgaaagt

SEQ ID NO: 40110 - DNA, 20 bp, synthetic construct
  misc_feature 1..20: note = chemically synthesized
  source 1..20: mol_type = other DNA
agttctttgaaagtaggacg

SEQ ID NO: 40111 - DNA, 20 bp, synthetic construct
  misc_feature 1..20: note = chemically synthesized
  source 1..20: mol_type = other DNA
gttctttgaaagtaggacgt

SEQ ID NO: 40112 - DNA, 20 bp, synthetic construct
  misc_feature 1..20: note = chemically synthesized
  source 1..20: mol_type = other DNA
ttctttgaaagtaggacgtg

SEQ ID NO: 40113 - DNA, 20 bp, synthetic construct
  misc_feature 1..20: note = chemically synthesized
  source 1..20: mol_type = other DNA
tctttgaaagtaggacgtgg

SEQ ID NO: 40114 - DNA, 20 bp, synthetic construct
  misc_feature 1..20: note = chemically synthesized
  source 1..20: mol_type = other DNA
ctttgaaagtaggacgtggg

SEQ ID NO: 40115 - DNA, 20 bp, synthetic construct
  misc_feature 1..20: note = chemically synthesized
  source 1..20: mol_type = other DNA
gggtttattcattgtcattt

SEQ ID NO: 40116 - DNA, 20 bp, synthetic construct
  misc_feature 1..20: note = chemically synthesized
  source 1..20: mol_type = other DNA
tttatttatttgtttttcca

SEQ ID NO: 40117 - DNA, 20 bp, synthetic construct
  misc_feature 1..20: note = chemically synthesized
  source 1..20: mol_type = other DNA
tttatttgtttttccaaagt

SEQ ID NO: 40118 - DNA, 20 bp, synthetic construct
  misc_feature 1..20: note = chemically synthesized
  source 1..20: mol_type = other DNA
gtttttccaaagttggcata

SEQ ID NO: 40119 - DNA, 20 bp, synthetic construct
  misc_feature 1..20: note = chemically synthesized
  source 1..20: mol_type = other DNA
ttttccaaagttggcataca

SEQ ID NO: 40120 - DNA, 20 bp, synthetic construct
  misc_feature 1..20: note = chemically synthesized
  source 1..20: mol_type = other DNA
catacagagtttattctatt

SEQ ID NO: 40121 - DNA, 20 bp, synthetic construct
  misc_feature 1..20: note = chemically synthesized
  source 1..20: mol_type = other DNA
tatttagaaacgtcgttttc

SEQ ID NO: 40122 - DNA, 20 bp, synthetic construct
  misc_feature 1..20: note = chemically synthesized
  source 1..20: mol_type = other DNA
ttctggttgcctttgttgtt

SEQ ID NO: 40123 - DNA, 20 bp, synthetic construct
  misc_feature 1..20: note = chemically synthesized
  source 1..20: mol_type = other DNA
gctaacatacaaactacatt

SEQ ID NO: 40124 - DNA, 20 bp, synthetic construct
  misc_feature 1..20: note = chemically synthesized
  source 1..20: mol_type = other DNA
ctaacatacaaactacattt

SEQ ID NO: 40125 - DNA, 20 bp, synthetic construct
  misc_feature 1..20: note = chemically synthesized
  source 1..20: mol_type = other DNA
catacaaactacatttagga

SEQ ID NO: 40126 - DNA, 20 bp, synthetic construct
  misc_feature 1..20: note = chemically synthesized
  source 1..20: mol_type = other DNA
gcatctctattgaccactga

SEQ ID NO: 40127 - DNA, 20 bp, synthetic construct
  misc_feature 1..20: note = chemically synthesized
  source 1..20: mol_type = other DNA
catctctattgaccactgaa

SEQ ID NO: 40128 - DNA, 20 bp, synthetic construct
  misc_feature 1..20: note = chemically synthesized
  source 1..20: mol_type = other DNA
accactgaaaggatgtctgt

SEQ ID NO: 40129 - DNA, 20 bp, synthetic construct
  misc_feature 1..20: note = chemically synthesized
  source 1..20: mol_type = other DNA
cactgaaaggatgtctgtaa

SEQ ID NO: 40130 - DNA, 20 bp, synthetic construct
  misc_feature 1..20: note = chemically synthesized
  source 1..20: mol_type = other DNA
gtctgtaagagtaaaaaaca

SEQ ID NO: 40131 - DNA, 20 bp, synthetic construct
  misc_feature 1..20: note = chemically synthesized
  source 1..20: mol_type = other DNA
tgtaagagtaaaaaacatag

SEQ ID NO: 40132 - DNA, 20 bp, synthetic construct
  misc_feature 1..20: note = chemically synthesized
  source 1..20: mol_type = other DNA
catagcggtattaaaatttt

SEQ ID NO: 40133 - DNA, 20 bp, synthetic construct
  misc_feature 1..20: note = chemically synthesized
  source 1..20: mol_type = other DNA
atagcggtattaaaattttc

SEQ ID NO: 40134 - DNA, 20 bp, synthetic construct
  misc_feature 1..20: note = chemically synthesized
  source 1..20: mol_type = other DNA
attaaaattttcaggcgaat

SEQ ID NO: 40135 - DNA, 20 bp, synthetic construct
  misc_feature 1..20: note = chemically synthesized
  source 1..20: mol_type = other DNA
ttaaaattttcaggcgaata

SEQ ID NO: 40136 - DNA, 20 bp, synthetic construct
  misc_feature 1..20: note = chemically synthesized
  source 1..20: mol_type = other DNA
taaaattttcaggcgaataa

SEQ ID NO: 40137 - DNA, 20 bp, synthetic construct
  misc_feature 1..20: note = chemically synthesized
  source 1..20: mol_type = other DNA
ataagggttttttgtaaaaa

SEQ ID NO: 40138 - DNA, 20 bp, synthetic construct
  misc_feature 1..20: note = chemically synthesized
  source 1..20: mol_type = other DNA
aaaatggcaaatgtatttgt

SEQ ID NO: 40139 - DNA, 20 bp, synthetic construct
  misc_feature 1..20: note = chemically synthesized
  source 1..20: mol_type = other DNA
atggcaaatgtatttgtcag

SEQ ID NO: 40140 - DNA, 20 bp, synthetic construct
  misc_feature 1..20: note = chemically synthesized
  source 1..20: mol_type = other DNA
tggcaaatgtatttgtcagt

SEQ ID NO: 40141 - DNA, 20 bp, synthetic construct
  misc_feature 1..20: note = chemically synthesized
  source 1..20: mol_type = other DNA
ggcaaatgtatttgtcagta

SEQ ID NO: 40142 - DNA, 20 bp, synthetic construct
  misc_feature 1..20: note = chemically synthesized
  source 1..20: mol_type = other DNA
gcaaatgtatttgtcagtag

SEQ ID NO: 40143 - DNA, 20 bp, synthetic construct
  misc_feature 1..20: note = chemically synthesized
  source 1..20: mol_type = other DNA
gctgttttcttgattgttat

SEQ ID NO: 40144 - DNA, 20 bp, synthetic construct
  misc_feature 1..20: note = chemically synthesized
  source 1..20: mol_type = other DNA
gttttcttgattgttataag

SEQ ID NO: 40145 - DNA, 20 bp, synthetic construct
  misc_feature 1..20: note = chemically synthesized
  source 1..20: mol_type = other DNA
tcttgattgttataagaaga

SEQ ID NO: 40146 - DNA, 20 bp, synthetic construct
  misc_feature 1..20: note = chemically synthesized
  source 1..20: mol_type = other DNA
gtaaatgtgtaatgcaaact

SEQ ID NO: 40147 - DNA, 20 bp, synthetic construct
  misc_feature 1..20: note = chemically synthesized
  source 1..20: mol_type = other DNA
taaatgtgtaatgcaaactt

SEQ ID NO: 40148 - DNA, 20 bp, synthetic construct
  misc_feature 1..20: note = chemically synthesized
  source 1..20: mol_type = other DNA
aaatgtgtaatgcaaactta

SEQ ID NO: 40149 - DNA, 20 bp, synthetic construct
  misc_feature 1..20: note = chemically synthesized
  source 1..20: mol_type = other DNA
aatgtgtaatgcaaacttag

SEQ ID NO: 40150 - DNA, 20 bp, synthetic construct
  misc_feature 1..20: note = chemically synthesized
  source 1..20: mol_type = other DNA
aggggcgatgtgctgaaaat

SEQ ID NO: 40151 - DNA, 20 bp, synthetic construct
  misc_feature 1..20: note = chemically synthesized
  source 1..20: mol_type = other DNA
ggggcgatgtgctgaaaata

SEQ ID NO: 40152 - DNA, 20 bp, synthetic construct
  misc_feature 1..20: note = chemically synthesized
  source 1..20: mol_type = other DNA
gtgctgaaaataaggtatga

SEQ ID NO: 40153 - DNA, 20 bp, synthetic construct
  misc_feature 1..20: note = chemically synthesized
  source 1..20: mol_type = other DNA
gaaaataaggtatgatagcg

SEQ ID NO: 40154 - DNA, 20 bp, synthetic construct
  misc_feature 1..20: note = chemically synthesized
  source 1..20: mol_type = other DNA
aaggtatgatagcgaagtct

SEQ ID NO: 40155 - DNA, 20 bp, synthetic construct
  misc_feature 1..20: note = chemically synthesized
  source 1..20: mol_type = other DNA
tgatagcgaagtctaagaaa

SEQ ID NO: 40156 - DNA, 20 bp, synthetic construct
  misc_feature 1..20: note = chemically synthesized
  source 1..20: mol_type = other DNA
atagcgaagtctaagaaaca

SEQ ID NO: 40157 - DNA, 20 bp, synthetic construct
  misc_feature 1..20: note = chemically synthesized
  source 1..20: mol_type = other DNA
tagcgaagtctaagaaacag

SEQ ID NO: 40158 - DNA, 20 bp, synthetic construct
  misc_feature 1..20: note = chemically synthesized
  source 1..20: mol_type = other DNA
agaggtatctaattataaat

SEQ ID NO: 40159 - DNA, 20 bp, synthetic construct
  misc_feature 1..20: note = chemically synthesized
  source 1..20: mol_type = other DNA
ggtatctaattataaataag

SEQ ID NO: 40160 - DNA, 20 bp, synthetic construct
  misc_feature 1..20: note = chemically synthesized
  source 1..20: mol_type = other DNA
atctaattataaataagaag

SEQ ID NO: 40161 - DNA, 20 bp, synthetic construct
  misc_feature 1..20: note = chemically synthesized
  source 1..20: mol_type = other DNA
taattataaataagaagaag

SEQ ID NO: 40162 - DNA, 20 bp, synthetic construct
  misc_feature 1..20: note = chemically synthesized
  source 1..20: mol_type = other DNA
aattataaataagaagaagt

SEQ ID NO: 40163 - DNA, 20 bp, synthetic construct
  misc_feature 1..20: note = chemically synthesized
  source 1..20: mol_type = other DNA
tataaataagaagaagtggg

SEQ ID NO: 40164 - DNA, 20 bp, synthetic construct
  misc_feature 1..20: note = chemically synthesized
  source 1..20: mol_type = other DNA
taagaagaagtgggaagatc

SEQ ID NO: 40165 - DNA, 20 bp, synthetic construct
  misc_feature 1..20: note = chemically synthesized
  source 1..20: mol_type = other DNA
agaagtgggaagatcaagtt

SEQ ID NO: 40166 - DNA, 20 bp, synthetic construct
  misc_feature 1..20: note = chemically synthesized
  source 1..20: mol_type = other DNA
aagtgggaagatcaagttga

SEQ ID NO: 40167 - DNA, 20 bp, synthetic construct
  misc_feature 1..20: note = chemically synthesized
  source 1..20: mol_type = other DNA
gaagatcaagttgagagctc

SEQ ID NO: 40168 - DNA, 20 bp, synthetic construct
  misc_feature 1..20: note = chemically synthesized
  source 1..20: mol_type = other DNA
gctcaagtttactcatatgt

SEQ ID NO: 40169 - DNA, 20 bp, synthetic construct
  misc_feature 1..20: note = chemically synthesized
  source 1..20: mol_type = other DNA
aagtttactcatatgttagc

SEQ ID NO: 40170 - DNA, 20 bp, synthetic construct
  misc_feature 1..20: note = chemically synthesized
  source 1..20: mol_type = other DNA
agtttactcatatgttagca

SEQ ID NO: 40171 - DNA, 20 bp, synthetic construct
  misc_feature 1..20: note = chemically synthesized
  source 1..20: mol_type = other DNA
gtttactcatatgttagcaa

SEQ ID NO: 40172 - DNA, 20 bp, synthetic construct
  misc_feature 1..20: note = chemically synthesized
  source 1..20: mol_type = other DNA
gatgacataatatgatatta

SEQ ID NO: 40173 - DNA, 20 bp, synthetic construct
  misc_feature 1..20: note = chemically synthesized
  source 1..20: mol_type = other DNA
atagcctattgatctttaaa

SEQ ID NO: 40174 - DNA, 20 bp, synthetic construct
  misc_feature 1..20: note = chemically synthesized
  source 1..20: mol_type = other DNA
ctttaaacagcctgtatcaa

SEQ ID NO: 40175 - DNA, 20 bp, synthetic construct
  misc_feature 1..20: note = chemically synthesized
  source 1..20: mol_type = other DNA
atagtcaaaaatcaattaaa

SEQ ID NO: 40176 - DNA, 20 bp, synthetic construct
  misc_feature 1..20: note = chemically synthesized
  source 1..20: mol_type = other DNA
tagtcaaaaatcaattaaaa

SEQ ID NO: 40177 - DNA, 20 bp, synthetic construct
  misc_feature 1..20: note = chemically synthesized
  source 1..20: mol_type = other DNA
taaaaatcactcattttctt

SEQ ID NO: 40178 - DNA, 20 bp, synthetic construct
  misc_feature 1..20: note = chemically synthesized
  source 1..20: mol_type = other DNA
tattatattttacaacttct

SEQ ID NO: 40179 - DNA, 20 bp, synthetic construct
  misc_feature 1..20: note = chemically synthesized
  source 1..20: mol_type = other DNA
tgaaaatcctttcaattatt

SEQ ID NO: 40180 - DNA, 20 bp, synthetic construct
  misc_feature 1..20: note = chemically synthesized
  source 1..20: mol_type = other DNA
aatcctttcaattattaagt

SEQ ID NO: 40181 - DNA, 20 bp, synthetic construct
  misc_feature 1..20: note = chemically synthesized
  source 1..20: mol_type = other DNA
tcagcatccacctgctgatc

SEQ ID NO: 40182 - DNA, 20 bp, synthetic construct
  misc_feature 1..20: note = chemically synthesized
  source 1..20: mol_type = other DNA
ctgctgatccagtgatatat

SEQ ID NO: 40183 - DNA, 20 bp, synthetic construct
  misc_feature 1..20: note = chemically synthesized
  source 1..20: mol_type = other DNA
tgctgatccagtgatatata

SEQ ID NO: 40184 - DNA, 20 bp, synthetic construct
  misc_feature 1..20: note = chemically synthesized
  source 1..20: mol_type = other DNA
ggacatttattgcaccactg

SEQ ID NO: 40185 - DNA, 20 bp, synthetic construct
  misc_feature 1..20: note = chemically synthesized
  source 1..20: mol_type = other DNA
ttgcaccactgaagtaaaat

SEQ ID NO: 40186 - DNA, 20 bp, synthetic construct
  misc_feature 1..20: note = chemically synthesized
  source 1..20: mol_type = other DNA
aaatcagtgtcctttcaaac

SEQ ID NO: 40187 - DNA, 20 bp, synthetic construct
  misc_feature 1..20: note = chemically synthesized
  source 1..20: mol_type = other DNA
agtgtcctttcaaacaagtg

SEQ ID NO: 40188 - DNA, 20 bp, synthetic construct
  misc_feature 1..20: note = chemically synthesized
  source 1..20: mol_type = other DNA
tttcaaacaagtgcagcttc

SEQ ID NO: 40189 - DNA, 20 bp, synthetic construct
  misc_feature 1..20: note = chemically synthesized
  source 1..20: mol_type = other DNA
aacaagtgcagcttccagac

SEQ ID NO: 40190 - DNA, 20 bp, synthetic construct
  misc_feature 1..20: note = chemically synthesized
  source 1..20: mol_type = other DNA
cagcttccagacaagtctct

SEQ ID NO: 40191 - DNA, 20 bp, synthetic construct
  misc_feature 1..20: note = chemically synthesized
  source 1..20: mol_type = other DNA
agtctcttagacctcatcct

SEQ ID NO: 40192 - DNA, 20 bp, synthetic construct
  misc_feature 1..20: note = chemically synthesized
  source 1..20: mol_type = other DNA
tcagtctcaccctgactgac

SEQ ID NO: 40193 - DNA, 20 bp, synthetic construct
  misc_feature 1..20: note = chemically synthesized
  source 1..20: mol_type = other DNA
ctgacaagtttgccatactt

SEQ ID NO: 40194 - DNA, 20 bp, synthetic construct
  misc_feature 1..20: note = chemically synthesized
  source 1..20: mol_type = other DNA
ccatacttgagaaccttgtg

SEQ ID NO: 40195 - DNA, 20 bp, synthetic construct
  misc_feature 1..20: note = chemically synthesized
  source 1..20: mol_type = other DNA
tacttgagaaccttgtgaag

SEQ ID NO: 40196 - DNA, 20 bp, synthetic construct
  misc_feature 1..20: note = chemically synthesized
  source 1..20: mol_type = other DNA
acttgagaaccttgtgaagc

SEQ ID NO: 40197 - DNA, 20 bp, synthetic construct
  misc_feature 1..20: note = chemically synthesized
  source 1..20: mol_type = other DNA
gaagcaggcgttgtgtctat

SEQ ID NO: 40198 - DNA, 20 bp, synthetic construct
  misc_feature 1..20: note = chemically synthesized
  source 1..20: mol_type = other DNA
gttgtgtctataagctctct

SEQ ID NO: 40199 - DNA, 20 bp, synthetic construct
  misc_feature 1..20: note = chemically synthesized
  source 1..20: mol_type = other DNA
tgtgtctataagctctctta

SEQ ID NO: 40200 - DNA, 20 bp, synthetic construct
  misc_feature 1..20: note = chemically synthesized
  source 1..20: mol_type = other DNA
ctctcttagagatctgctct

SEQ ID NO: 40201 - DNA, 20 bp, synthetic construct
  misc_feature 1..20: note = chemically synthesized
  source 1..20: mol_type = other DNA
tctcttagagatctgctctg

SEQ ID NO: 40202 - DNA, 20 bp, synthetic construct
  misc_feature 1..20: note = chemically synthesized
  source 1..20: mol_type = other DNA
atctgctctgaggaattatc

SEQ ID NO: 40203 - DNA, 20 bp, synthetic construct
  misc_feature 1..20: note = chemically synthesized
  source 1..20: mol_type = other DNA
gctctgaggaattatcaagt

SEQ ID NO: 40204 - DNA, 20 bp, synthetic construct
  misc_feature 1..20: note = chemically synthesized
  source 1..20: mol_type = other DNA
gaggaattatcaagtcagca

SEQ ID NO: 40205 - DNA, 20 bp, synthetic construct
  misc_feature 1..20: note = chemically synthesized
  source 1..20: mol_type = other DNA
ttaattctctgtcatactgt

SEQ ID NO: 40206 - DNA, 20 bp, synthetic construct
  misc_feature 1..20: note = chemically synthesized
  source 1..20: mol_type = other DNA
tctctgtcatactgtgagtt

SEQ ID NO: 40207 - DNA, 20 bp, synthetic construct
  misc_feature 1..20: note = chemically synthesized
  source 1..20: mol_type = other DNA
tgtcatactgtgagtttagt

SEQ ID NO: 40208 - DNA, 20 bp, synthetic construct
  misc_feature 1..20: note = chemically synthesized
  source 1..20: mol_type = other DNA
gtcatactgtgagtttagtc

SEQ ID NO: 40209 - DNA, 20 bp, synthetic construct
  misc_feature 1..20: note = chemically synthesized
  source 1..20: mol_type = other DNA
tcatactgtgagtttagtca

SEQ ID NO: 40210 - DNA, 20 bp, synthetic construct
  misc_feature 1..20: note = chemically synthesized
  source 1..20: mol_type = other DNA
tactgtgagtttagtcaggg

SEQ ID NO: 40211 - DNA, 20 bp, synthetic construct
  misc_feature 1..20: note = chemically synthesized
  source 1..20: mol_type = other DNA
cagtaattatatttccccat

SEQ ID NO: 40212 - DNA, 20 bp, synthetic construct
  misc_feature 1..20: note = chemically synthesized
  source 1..20: mol_type = other DNA
catcagcatattgtcttccc

SEQ ID NO: 40213 - DNA, 20 bp, synthetic construct
  misc_feature 1..20: note = chemically synthesized
  source 1..20: mol_type = other DNA
atcagcatattgtcttccca

SEQ ID NO: 40214 - DNA, 20 bp, synthetic construct
  misc_feature 1..20: note = chemically synthesized
  source 1..20: mol_type = other DNA
aacccccaaatttattaatg

SEQ ID NO: 40215 - DNA, 20 bp, synthetic construct
  misc_feature 1..20: note = chemically synthesized
  source 1..20: mol_type = other DNA
aatacacaatgttacttgtc

SEQ ID NO: 40216 - DNA, 20 bp, synthetic construct
  misc_feature 1..20: note = chemically synthesized
  source 1..20: mol_type = other DNA
acaatgttacttgtctggtg

SEQ ID NO: 40217 - DNA, 20 bp, synthetic construct
  misc_feature 1..20: note = chemically synthesized
  source 1..20: mol_type = other DNA
ttacttgtctggtgtggcta

SEQ ID NO: 40218 - DNA, 20 bp, synthetic construct
  misc_feature 1..20: note = chemically synthesized
  source 1..20: mol_type = other DNA
tatttatttatttattttta

SEQ ID NO: 40219 - DNA, 20 bp, synthetic construct
  misc_feature 1..20: note = chemically synthesized
  source 1..20: mol_type = other DNA
catgatcttgctctgttgcc

SEQ ID NO: 40220 - DNA, 20 bp, synthetic construct
  misc_feature 1..20: note = chemically synthesized
  source 1..20: mol_type = other DNA
atgatcttgctctgttgccc

SEQ ID NO: 40221 - DNA, 20 bp, synthetic construct
  misc_feature 1..20: note = chemically synthesized
  source 1..20: mol_type = other DNA
tcttgctctgttgcccaggc

SEQ ID NO: 40222 - DNA, 20 bp, synthetic construct
  misc_feature 1..20: note = chemically synthesized
  source 1..20: mol_type = other DNA
ttgctctgttgcccaggctg

SEQ ID NO: 40223 - DNA, 20 bp, synthetic construct
  misc_feature 1..20: note = chemically synthesized
  source 1..20: mol_type = other DNA
ctgttgcccaggctggagtg

SEQ ID NO: 40224 - DNA, 20 bp, synthetic construct
  misc_feature 1..20: note = chemically synthesized
  source 1..20: mol_type = other DNA
ttgcccaggctggagtgcag

SEQ ID NO: 40225 - DNA, 20 bp, synthetic construct
  misc_feature 1..20: note = chemically synthesized
  source 1..20: mol_type = other DNA
ggagtgcagtggtgccatca

SEQ ID NO: 40226 - DNA, 20 bp, synthetic construct
  misc_feature 1..20: note = chemically synthesized
  source 1..20: mol_type = other DNA
ggtgccatcacagctcactg

SEQ ID NO: 40227 - DNA, 20 bp, synthetic construct
  misc_feature 1..20: note = chemically synthesized
  source 1..20: mol_type = other DNA
tcactgcagccttgaaatcc

SEQ ID NO: 40228 - DNA, 20 bp, synthetic construct
  misc_feature 1..20: note = chemically synthesized
  source 1..20: mol_type = other DNA
cactgcagccttgaaatcct

SEQ ID NO: 40229 - DNA, 20 bp, synthetic construct
  misc_feature 1..20: note = chemically synthesized
  source 1..20: mol_type = other DNA
agccttgaaatcctgggctc

SEQ ID NO: 40230 - DNA, 20 bp, synthetic construct
  misc_feature 1..20: note = chemically synthesized
  source 1..20: mol_type = other DNA
ctcaagcaatccttcttcct

SEQ ID NO: 40231 - DNA, 20 bp, synthetic construct
  misc_feature 1..20: note = chemically synthesized
  source 1..20: mol_type = other DNA
tccttcttcctcagcttttt

SEQ ID NO: 40232 - DNA, 20 bp, synthetic construct
  misc_feature 1..20: note = chemically synthesized
  source 1..20: mol_type = other DNA
tcctcagctttttgagtacc

SEQ ID NO: 40233 - DNA, 20 bp, synthetic construct
  misc_feature 1..20: note = chemically synthesized
  source 1..20: mol_type = other DNA
cctcagctttttgagtacct

SEQ ID NO: 40234 - DNA, 20 bp, synthetic construct
  misc_feature 1..20: note = chemically synthesized
  source 1..20: mol_type = other DNA
tttttgagtacctaggacta

SEQ ID NO: 40235 - DNA, 20 bp, synthetic construct
  misc_feature 1..20: note = chemically synthesized
  source 1..20: mol_type = other DNA
ttttgagtacctaggactac

SEQ ID NO: 40236 - DNA, 20 bp, synthetic construct
  misc_feature 1..20: note = chemically synthesized
  source 1..20: mol_type = other DNA
caggtttatgccactgcacc

SEQ ID NO: 40237 - DNA, 20 bp, synthetic construct
  misc_feature 1..20: note = chemically synthesized
  source 1..20: mol_type = other DNA
gtttttattttttgtaaata

SEQ ID NO: 40238 - DNA, 20 bp, synthetic construct
  misc_feature 1..20: note = chemically synthesized
  source 1..20: mol_type = other DNA
tttttattttttgtaaatat

SEQ ID NO: 40239 - DNA, 20 bp, synthetic construct
  misc_feature 1..20: note = chemically synthesized
  source 1..20: mol_type = other DNA
tgggatcatgttatgttgcc

SEQ ID NO: 40240 - DNA, 20 bp, synthetic construct
  misc_feature 1..20: note = chemically synthesized
  source 1..20: mol_type = other DNA
gggatcatgttatgttgccg

SEQ ID NO: 40241 - DNA, 20 bp, synthetic construct
  misc_feature 1..20: note = chemically synthesized
  source 1..20: mol_type = other DNA
gctctccaattcctaacctc

SEQ ID NO: 40242 - DNA, 20 bp, synthetic construct
  misc_feature 1..20: note = chemically synthesized
  source 1..20: mol_type = other DNA
ctcaagcaatcctcccaccc

SEQ ID NO: 40243 - DNA, 20 bp, synthetic construct
  misc_feature 1..20: note = chemically synthesized
  source 1..20: mol_type = other DNA
ccaccctggcctcctaatga

SEQ ID NO: 40244 - DNA, 20 bp, synthetic construct
  misc_feature 1..20: note = chemically synthesized
  source 1..20: mol_type = other DNA
caccctggcctcctaatgat

SEQ ID NO: 40245 - DNA, 20 bp, synthetic construct
  misc_feature 1..20: note = chemically synthesized
  source 1..20: mol_type = other DNA
accctggcctcctaatgata

SEQ ID NO: 40246 - DNA, 20 bp, synthetic construct
  misc_feature 1..20: note = chemically synthesized
  source 1..20: mol_type = other DNA
tggcctcctaatgataggga

SEQ ID NO: 40247 - DNA, 20 bp, synthetic construct
  misc_feature 1..20: note = chemically synthesized
  source 1..20: mol_type = other DNA
ggcctcctaatgatagggac

SEQ ID NO: 40248 - DNA, 20 bp, synthetic construct
  misc_feature 1..20: note = chemically synthesized
  source 1..20: mol_type = other DNA
cctcctaatgatagggacag

SEQ ID NO: 40249 - DNA, 20 bp, synthetic construct
  misc_feature 1..20: note = chemically synthesized
  source 1..20: mol_type = other DNA
ctcctaatgatagggacagg

SEQ ID NO: 40250 - DNA, 20 bp, synthetic construct
  misc_feature 1..20: note = chemically synthesized
  source 1..20: mol_type = other DNA
ctaatgatagggacaggagg

SEQ ID NO: 40251 - DNA, 20 bp, synthetic construct
  misc_feature 1..20: note = chemically synthesized
  source 1..20: mol_type = other DNA
aatgatagggacaggaggca

SEQ ID NO: 40252 - DNA, 20 bp, synthetic construct
  misc_feature 1..20: note = chemically synthesized
  source 1..20: mol_type = other DNA
gacaggaggcagagaaattt

SEQ ID NO: 40253 - DNA, 20 bp, synthetic construct
  misc_feature 1..20: note = chemically synthesized
  source 1..20: mol_type = other DNA
acaggaggcagagaaatttt

SEQ ID NO: 40254 - DNA, 20 bp, synthetic construct
  misc_feature 1..20: note = chemically synthesized
  source 1..20: mol_type = other DNA
ggaggcagagaaattttagg

SEQ ID NO: 40255 - DNA, 20 bp, synthetic construct
  misc_feature 1..20: note = chemically synthesized
  source 1..20: mol_type = other DNA
cagagaaattttaggcagaa

SEQ ID NO: 40256 - DNA, 20 bp, synthetic construct
  misc_feature 1..20: note = chemically synthesized
  source 1..20: mol_type = other DNA
agagaaattttaggcagaaa

SEQ ID NO: 40257 - DNA, 20 bp, synthetic construct
  misc_feature 1..20: note = chemically synthesized
  source 1..20: mol_type = other DNA
gagaaattttaggcagaaaa

SEQ ID NO: 40258 - DNA, 20 bp, synthetic construct
  misc_feature 1..20: note = chemically synthesized
  source 1..20: mol_type = other DNA
aaattttaggcagaaaaggg

SEQ ID NO: 40259 - DNA, 20 bp, synthetic construct
  misc_feature 1..20: note = chemically synthesized
  source 1..20: mol_type = other DNA
aattttaggcagaaaagggc

SEQ ID NO: 40260 - DNA, 20 bp, synthetic construct
  misc_feature 1..20: note = chemically synthesized
  source 1..20: mol_type = other DNA
attttaggcagaaaagggcg

SEQ ID NO: 40261 - DNA, 20 bp, synthetic construct
  misc_feature 1..20: note = chemically synthesized
  source 1..20: mol_type = other DNA
gcagaaaagggcggggtccc

SEQ ID NO: 40262 - DNA, 20 bp, synthetic construct
  misc_feature 1..20: note = chemically synthesized
  source 1..20: mol_type = other DNA
aaagggcggggtccctggca

SEQ ID NO: 40263 - DNA, 20 bp, synthetic construct
  misc_feature 1..20: note = chemically synthesized
  source 1..20: mol_type = other DNA
aagggcggggtccctggcat

SEQ ID NO: 40264 - DNA, 20 bp, synthetic construct
  misc_feature 1..20: note = chemically synthesized
  source 1..20: mol_type = other DNA
ctggcatgggtcctaccctg

SEQ ID NO: 40265 - DNA, 20 bp, synthetic construct
  misc_feature 1..20: note = chemically synthesized
  source 1..20: mol_type = other DNA
atgggtcctaccctgaagcc

SEQ ID NO: 40266 - DNA, 20 bp, synthetic construct
  misc_feature 1..20: note = chemically synthesized
  source 1..20: mol_type = other DNA
ctaccctgaagcctggaaca

SEQ ID NO: 40267 - DNA, 20 bp, synthetic construct
  misc_feature 1..20: note = chemically synthesized
  source 1..20: mol_type = other DNA
cctggaacatggccattcct

SEQ ID NO: 40268 - DNA, 20 bp, synthetic construct
  misc_feature 1..20: note = chemically synthesized
  source 1..20: mol_type = other DNA
cattcctgagatatttctct

SEQ ID NO: 40269 - DNA, 20 bp, synthetic construct
  misc_feature 1..20: note = chemically synthesized
  source 1..20: mol_type = other DNA
cctgagatatttctctcagc

SEQ ID NO: 40270 - DNA, 20 bp, synthetic construct
  misc_feature 1..20: note = chemically synthesized
  source 1..20: mol_type = other DNA
ctgtttcacattcacatttt

SEQ ID NO: 40271 - DNA, 20 bp, synthetic construct
  misc_feature 1..20: note = chemically synthesized
  source 1..20: mol_type = other DNA
cacattcacattttaagtgc

SEQ ID NO: 40272 - DNA, 20 bp, synthetic construct
  misc_feature 1..20: note = chemically synthesized
  source 1..20: mol_type = other DNA
acattcacattttaagtgcc

SEQ ID NO: 40273 - DNA, 20 bp, synthetic construct
  misc_feature 1..20: note = chemically synthesized
  source 1..20: mol_type = other DNA
gccaggtctttctatctttc

SEQ ID NO: 40274 - DNA, 20 bp, synthetic construct
  misc_feature 1..20: note = chemically synthesized
  source 1..20: mol_type = other DNA
tgtcttattcatgcactttc

SEQ ID NO: 40275 - DNA, 20 bp, synthetic construct
  misc_feature 1..20: note = chemically synthesized
  source 1..20: mol_type = other DNA
ttgtctcatgaatattccct

SEQ ID NO: 40276 - DNA, 20 bp, synthetic construct
  misc_feature 1..20: note = chemically synthesized
  source 1..20: mol_type = other DNA
tgtctcatgaatattccctc

SEQ ID NO: 40277 - DNA, 20 bp, synthetic construct
  misc_feature 1..20: note = chemically synthesized
  source 1..20: mol_type = other DNA
cccacgccgttccctttatc

SEQ ID NO: 40278 - DNA, 20 bp, synthetic construct
  misc_feature 1..20: note = chemically synthesized
  source 1..20: mol_type = other DNA
attcctcttgctgtactgat

SEQ ID NO: 40279 - DNA, 20 bp, synthetic construct
  misc_feature 1..20: note = chemically synthesized
  source 1..20: mol_type = other DNA
attagccttgactcctctta

SEQ ID NO: 40280 - DNA, 20 bp, synthetic construct
  misc_feature 1..20: note = chemically synthesized
  source 1..20: mol_type = other DNA
actcctcttatagctcaccc

SEQ ID NO: 40281 - DNA, 20 bp, synthetic construct
  misc_feature 1..20: note = chemically synthesized
  source 1..20: mol_type = other DNA
tatagctcaccccagcctct

SEQ ID NO: 40282 - DNA, 20 bp, synthetic construct
  misc_feature 1..20: note = chemically synthesized
  source 1..20: mol_type = other DNA
agcctcttggcattattatc

SEQ ID NO: 40283 - DNA, 20 bp, synthetic construct
  misc_feature 1..20: note = chemically synthesized
  source 1..20: mol_type = other DNA
attattatcaagtgttacca

SEQ ID NO: 40284 - DNA, 20 bp, synthetic construct
  misc_feature 1..20: note = chemically synthesized
  source 1..20: mol_type = other DNA
caagtgttaccacagttgaa

SEQ ID NO: 40285 - DNA, 20 bp, synthetic construct
  misc_feature 1..20: note = chemically synthesized
  source 1..20: mol_type = other DNA
tgttaccacagttgaacagc

SEQ ID NO: 40286 - DNA, 20 bp, synthetic construct
  misc_feature 1..20: note = chemically synthesized
  source 1..20: mol_type = other DNA
agttgaacagctggatccaa

SEQ ID NO: 40287 - DNA, 20 bp, synthetic construct
  misc_feature 1..20: note = chemically synthesized
  source 1..20: mol_type = other DNA
atccaaaagtattgaccaat

SEQ ID NO: 40288 - DNA, 20 bp, synthetic construct
  misc_feature 1..20: note = chemically synthesized
  source 1..20: mol_type = other DNA
tccaaaagtattgaccaata

SEQ ID NO: 40289 - DNA, 20 bp, synthetic construct
  misc_feature 1..20: note = chemically synthesized
  source 1..20: mol_type = other DNA
aagtattgaccaataaggaa

SEQ ID NO: 40290 - DNA, 20 bp, synthetic construct
  misc_feature 1..20: note = chemically synthesized
  source 1..20: mol_type = other DNA
ttgcaatgtaaattataata

SEQ ID NO: 40291 - DNA, 20 bp, synthetic construct
  misc_feature 1..20: note = chemically synthesized
  source 1..20: mol_type = other DNA
atgtaaattataatatggat

SEQ ID NO: 40292 - DNA, 20 bp, synthetic construct
  misc_feature 1..20: note = chemically synthesized
  source 1..20: mol_type = other DNA
attataatatggataagcat

SEQ ID NO: 40293 - DNA, 20 bp, synthetic construct
  misc_feature 1..20: note = chemically synthesized
  source 1..20: mol_type = other DNA
aagcattggtactaaacctg

SEQ ID NO: 40294 - DNA, 20 bp, synthetic construct
  misc_feature 1..20: note = chemically synthesized
  source 1..20: mol_type = other DNA
attggtactaaacctgaagt

SEQ ID NO: 40295 - DNA, 20 bp, synthetic construct
  misc_feature 1..20: note = chemically synthesized
  source 1..20: mol_type = other DNA
gtattttactctatacctac

SEQ ID NO: 40296 - DNA, 20 bp, synthetic construct
  misc_feature 1..20: note = chemically synthesized
  source 1..20: mol_type = other DNA
tattttactctatacctaca

SEQ ID NO: 40297 - DNA, 20 bp, synthetic construct
  misc_feature 1..20: note = chemically synthesized
  source 1..20: mol_type = other DNA
tttactctatacctacaagg

SEQ ID NO: 40298 - DNA, 20 bp, synthetic construct
  misc_feature 1..20: note = chemically synthesized
  source 1..20: mol_type = other DNA
tacctacaaggaagatatac

SEQ ID NO: 40299 - DNA, 20 bp, synthetic construct
  misc_feature 1..20: note = chemically synthesized
  source 1..20: mol_type = other DNA
agatatacaagtatttctct

SEQ ID NO: 40300 - DNA, 20 bp, synthetic construct
  misc_feature 1..20: note = chemically synthesized
  source 1..20: mol_type = other DNA
gatatacaagtatttctcta

SEQ ID NO: 40301 - DNA, 20 bp, synthetic construct
  misc_feature 1..20: note = chemically synthesized
  source 1..20: mol_type = other DNA
atacaagtatttctctaagg

SEQ ID NO: 40302 - DNA, 20 bp, synthetic construct
  misc_feature 1..20: note = chemically synthesized
  source 1..20: mol_type = other DNA
tttctctaaggtagtttgaa

SEQ ID NO: 40303 - DNA, 20 bp, synthetic construct
  misc_feature 1..20: note = chemically synthesized
  source 1..20: mol_type = other DNA
ctaaggtagtttgaaaagcc

SEQ ID NO: 40304 - DNA, 20 bp, synthetic construct
  misc_feature 1..20: note = chemically synthesized
  source 1..20: mol_type = other DNA
tagtttgaaaagcctagata

SEQ ID NO: 40305 - DNA, 20 bp, synthetic construct
  misc_feature 1..20: note = chemically synthesized
  source 1..20: mol_type = other DNA
aaaagcctagatatagaaac

SEQ ID NO: 40306 - DNA, 20 bp, synthetic construct
  misc_feature 1..20: note = chemically synthesized
  source 1..20: mol_type = other DNA
tagaaactggatcctcacat

SEQ ID NO: 40307 - DNA, 20 bp, synthetic construct
  misc_feature 1..20: note = chemically synthesized
  source 1..20: mol_type = other DNA
actggatcctcacatgagtt

SEQ ID NO: 40308 - DNA, 20 bp, synthetic construct
  misc_feature 1..20: note = chemically synthesized
  source 1..20: mol_type = other DNA
agttcagtatataattgtaa

SEQ ID NO: 40309 - DNA, 20 bp, synthetic construct
  misc_feature 1..20: note = chemically synthesized
  source 1..20: mol_type = other DNA
aaaaaatcaattatgtattc

SEQ ID NO: 40310 - DNA, 20 bp, synthetic construct
  misc_feature 1..20: note = chemically synthesized
  source 1..20: mol_type = other DNA
caattatgtattcaagttgc

SEQ ID NO: 40311 - DNA, 20 bp, synthetic construct
  misc_feature 1..20: note = chemically synthesized
  source 1..20: mol_type = other DNA
attcaagttgctagtgtctt

SEQ ID NO: 40312 - DNA, 20 bp, synthetic construct
  misc_feature 1..20: note = chemically synthesized
  source 1..20: mol_type = other DNA
tcaagttgctagtgtcttaa

SEQ ID NO: 40313 - DNA, 20 bp, synthetic construct
  misc_feature 1..20: note = chemically synthesized
  source 1..20: mol_type = other DNA
caagttgctagtgtcttaag

SEQ ID NO: 40314 - DNA, 20 bp, synthetic construct
  misc_feature 1..20: note = chemically synthesized
  source 1..20: mol_type = other DNA
gattatcacaaaaatacttc

SEQ ID NO: 40315 - DNA, 20 bp, synthetic construct
  misc_feature 1..20: note = chemically synthesized
  source 1..20: mol_type = other DNA
ataattcctgactacacatg

SEQ ID NO: 40316 - DNA, 20 bp, synthetic construct
  misc_feature 1..20: note = chemically synthesized
  source 1..20: mol_type = other DNA
aattcctgactacacatgaa

SEQ ID NO: 40317 - DNA, 20 bp, synthetic construct
  misc_feature 1..20: note = chemically synthesized
  source 1..20: mol_type = other DNA
cacatgaagagactgacacg

SEQ ID NO: 40318 - DNA, 20 bp, synthetic construct
  misc_feature 1..20: note = chemically synthesized
  source 1..20: mol_type = other DNA
acatgaagagactgacacgt

SEQ ID NO: 40319 - DNA, 20 bp, synthetic construct
  misc_feature 1..20: note = chemically synthesized
  source 1..20: mol_type = other DNA
tgacacgtaggtgccttact

SEQ ID NO: 40320 - DNA, 20 bp, synthetic construct
  misc_feature 1..20: note = chemically synthesized
  source 1..20: mol_type = other DNA
gacacgtaggtgccttactt

SEQ ID NO: 40321 - DNA, 20 bp, synthetic construct
  misc_feature 1..20: note = chemically synthesized
  source 1..20: mol_type = other DNA
acgtaggtgccttacttagg

SEQ ID NO: 40322 - DNA, 20 bp, synthetic construct
  misc_feature 1..20: note = chemically synthesized
  source 1..20: mol_type = other DNA
cgtaggtgccttacttaggt

SEQ ID NO: 40323 - DNA, 20 bp, synthetic construct
  misc_feature 1..20: note = chemically synthesized
  source 1..20: mol_type = other DNA
gtgccttacttaggtaggtt

SEQ ID NO: 40324 - DNA, 20 bp, synthetic construct
  misc_feature 1..20: note = chemically synthesized
  source 1..20: mol_type = other DNA
ttatccaaaaccacacaatg

SEQ ID NO: 40325 - DNA, 20 bp, synthetic construct
  misc_feature 1..20: note = chemically synthesized
  source 1..20: mol_type = other DNA
aaccacacaatgtagaacct

SEQ ID NO: 40326 - DNA, 20 bp, synthetic construct
  misc_feature 1..20: note = chemically synthesized
  source 1..20: mol_type = other DNA
atgtagaacctaagctgatt

SEQ ID NO: 40327 - DNA, 20 bp, synthetic construct
  misc_feature 1..20: note = chemically synthesized
  source 1..20: mol_type = other DNA
aacctaagctgattcggcca

SEQ ID NO: 40328 - DNA, 20 bp, synthetic construct
  misc_feature 1..20: note = chemically synthesized
  source 1..20: mol_type = other DNA
ggccatagaaacacaatatg

SEQ ID NO: 40329 - DNA, 20 bp, synthetic construct
  misc_feature 1..20: note = chemically synthesized
  source 1..20: mol_type = other DNA
acacaatatgtggtataaat

SEQ ID NO: 40330 - DNA, 20 bp, synthetic construct
  misc_feature 1..20: note = chemically synthesized
  source 1..20: mol_type = other DNA
aatatgtggtataaatgaga

SEQ ID NO: 40331 - DNA, 20 bp, synthetic construct
  misc_feature 1..20: note = chemically synthesized
  source 1..20: mol_type = other DNA
tatgtggtataaatgagaca

SEQ ID NO: 40332 - DNA, 20 bp, synthetic construct
  misc_feature 1..20: note = chemically synthesized
  source 1..20: mol_type = other DNA
atgtggtataaatgagacag

SEQ ID NO: 40333 - DNA, 20 bp, synthetic construct
  misc_feature 1..20: note = chemically synthesized
  source 1..20: mol_type = other DNA
tgtggtataaatgagacaga

SEQ ID NO: 40334 - DNA, 20 bp, synthetic construct
  misc_feature 1..20: note = chemically synthesized
  source 1..20: mol_type = other DNA
ttctctccttcctatgctgt

SEQ ID NO: 40335 - DNA, 20 bp, synthetic construct
  misc_feature 1..20: note = chemically synthesized
  source 1..20: mol_type = other DNA
tatgctgtcagatgaatact

SEQ ID NO: 40336 - DNA, 20 bp, synthetic construct
  misc_feature 1..20: note = chemically synthesized
  source 1..20: mol_type = other DNA
ctgtcagatgaatactgaga

SEQ ID NO: 40337 - DNA, 20 bp, synthetic construct
  misc_feature 1..20: note = chemically synthesized
  source 1..20: mol_type = other DNA
gaatactgagatagaatatt

SEQ ID NO: 40338 - DNA, 20 bp, synthetic construct
  misc_feature 1..20: note = chemically synthesized
  source 1..20: mol_type = other DNA
ttcatctatcacacattaaa

SEQ ID NO: 40339 - DNA, 20 bp, synthetic construct
  misc_feature 1..20: note = chemically synthesized
  source 1..20: mol_type = other DNA
tcatctatcacacattaaac

SEQ ID NO: 40340 - DNA, 20 bp, synthetic construct
  misc_feature 1..20: note = chemically synthesized
  source 1..20: mol_type = other DNA
ctttacatttctgtctgttg

SEQ ID NO: 40341 - DNA, 20 bp, synthetic construct
  misc_feature 1..20: note = chemically synthesized
  source 1..20: mol_type = other DNA
atttctgtctgttgaagatt

SEQ ID NO: 40342 - DNA, 20 bp, synthetic construct
  misc_feature 1..20: note = chemically synthesized
  source 1..20: mol_type = other DNA
tttctgtctgttgaagattt

SEQ ID NO: 40343 - DNA, 20 bp, synthetic construct
  misc_feature 1..20: note = chemically synthesized
  source 1..20: mol_type = other DNA
gtctgttgaagatttgggtg

SEQ ID NO: 40344 - DNA, 20 bp, synthetic construct
  misc_feature 1..20: note = chemically synthesized
  source 1..20: mol_type = other DNA
tctgttgaagatttgggtgt

SEQ ID NO: 40345 - DNA, 20 bp, synthetic construct
  misc_feature 1..20: note = chemically synthesized
  source 1..20: mol_type = other DNA
ctgttgaagatttgggtgtg

SEQ ID NO: 40346 - DNA, 20 bp, synthetic construct
  misc_feature 1..20: note = chemically synthesized
  source 1..20: mol_type = other DNA
tttgggtgtggggataactc

SEQ ID NO: 40347 - DNA, 20 bp, synthetic construct
  misc_feature 1..20: note = chemically synthesized
  source 1..20: mol_type = other DNA
ttgggtgtggggataactca

SEQ ID NO: 40348 - DNA, 20 bp, synthetic construct
  misc_feature 1..20: note = chemically synthesized
  source 1..20: mol_type = other DNA
taactcaaggtatcatatcc

SEQ ID NO: 40349 - DNA, 20 bp, synthetic construct
  misc_feature 1..20: note = chemically synthesized
  source 1..20: mol_type = other DNA
aactcaaggtatcatatcca

SEQ ID NO: 40350 - DNA, 20 bp, synthetic construct
  misc_feature 1..20: note = chemically synthesized
  source 1..20: mol_type = other DNA
actcaaggtatcatatccaa

SEQ ID NO: 40351 - DNA, 20 bp, synthetic construct
  misc_feature 1..20: note = chemically synthesized
  source 1..20: mol_type = other DNA
aaggtatcatatccaaggga

SEQ ID NO: 40352 - DNA, 20 bp, synthetic construct
  misc_feature 1..20: note = chemically synthesized
  source 1..20: mol_type = other DNA
tcatatccaagggatggatg

SEQ ID NO: 40353 - DNA, 20 bp, synthetic construct
  misc_feature 1..20: note = chemically synthesized
  source 1..20: mol_type = other DNA
catatccaagggatggatga

SEQ ID NO: 40354 - DNA, 20 bp, synthetic construct
  misc_feature 1..20: note = chemically synthesized
  source 1..20: mol_type = other DNA
atccaagggatggatgaagg

SEQ ID NO: 40355 - DNA, 20 bp, synthetic construct
  misc_feature 1..20: note = chemically synthesized
  source 1..20: mol_type = other DNA
tccaagggatggatgaaggc

SEQ ID NO: 40356 - DNA, 20 bp, synthetic construct
  misc_feature 1..20: note = chemically synthesized
  source 1..20: mol_type = other DNA
atgaaggcaggtgactctaa

SEQ ID NO: 40357 - DNA, 20 bp, synthetic construct
  misc_feature 1..20: note = chemically synthesized
  source 1..20: mol_type = other DNA
aggcaggtgactctaacaga

SEQ ID NO: 40358 - DNA, 20 bp, synthetic construct
  misc_feature 1..20: note = chemically synthesized
  source 1..20: mol_type = other DNA
ggcaggtgactctaacagaa

SEQ ID NO: 40359 - DNA, 20 bp, synthetic construct
  misc_feature 1..20: note = chemically synthesized
  source 1..20: mol_type = other DNA
gcaggtgactctaacagaaa

SEQ ID NO: 40360 - DNA, 20 bp, synthetic construct
  misc_feature 1..20: note = chemically synthesized
  source 1..20: mol_type = other DNA
gtgactctaacagaaaggga

SEQ ID NO: 40361 - DNA, 20 bp, synthetic construct
  misc_feature 1..20: note = chemically synthesized
  source 1..20: mol_type = other DNA
tgactctaacagaaagggaa

SEQ ID NO: 40362 - DNA, 20 bp, synthetic construct
  misc_feature 1..20: note = chemically synthesized
  source 1..20: mol_type = other DNA
aacagaaagggaaaggatgt

SEQ ID NO: 40363 - DNA, 20 bp, synthetic construct
  misc_feature 1..20: note = chemically synthesized
  source 1..20: mol_type = other DNA
gaaagggaaaggatgttggc

SEQ ID NO: 40364 - DNA, 20 bp, synthetic construct
  misc_feature 1..20: note = chemically synthesized
  source 1..20: mol_type = other DNA
aaagggaaaggatgttggca

SEQ ID NO: 40365 - DNA, 20 bp, synthetic construct
  misc_feature 1..20: note = chemically synthesized
  source 1..20: mol_type = other DNA
tggcaaggctatgttcatga

SEQ ID NO: 40366 - DNA, 20 bp, synthetic construct
  misc_feature 1..20: note = chemically synthesized
  source 1..20: mol_type = other DNA
gtatatgtaaaatccacatt

SEQ ID NO: 40367 - DNA, 20 bp, synthetic construct
  misc_feature 1..20: note = chemically synthesized
  source 1..20: mol_type = other DNA
aagcttctttctgcatgcat

SEQ ID NO: 40368 - DNA, 20 bp, synthetic construct
  misc_feature 1..20: note = chemically synthesized
  source 1..20: mol_type = other DNA
tatgaataatgtgtatgtaa

SEQ ID NO: 40369 - DNA, 20 bp, synthetic construct
  misc_feature 1..20: note = chemically synthesized
  source 1..20: mol_type = other DNA
aaagtgtgctgtatattcaa

SEQ ID NO: 40370 - DNA, 20 bp, synthetic construct
  misc_feature 1..20: note = chemically synthesized
  source 1..20: mol_type = other DNA
tcaaaagtgtttcatgtgcc

SEQ ID NO: 40371 - DNA, 20 bp, synthetic construct
  misc_feature 1..20: note = chemically synthesized
  source 1..20: mol_type = other DNA
caaaagtgtttcatgtgcct

SEQ ID NO: 40372 - DNA, 20 bp, synthetic construct
  misc_feature 1..20: note = chemically synthesized
  source 1..20: mol_type = other DNA
aaaagtgtttcatgtgccta

SEQ ID NO: 40373 - DNA, 20 bp, synthetic construct
  misc_feature 1..20: note = chemically synthesized
  source 1..20: mol_type = other DNA
aaagtgtttcatgtgcctag

SEQ ID NO: 40374 - DNA, 20 bp, synthetic construct
  misc_feature 1..20: note = chemically synthesized
  source 1..20: mol_type = other DNA
ctaggggtgtcaaatacttt

SEQ ID NO: 40375 - DNA, 20 bp, synthetic construct
  misc_feature 1..20: note = chemically synthesized
  source 1..20: mol_type = other DNA
gtcaaatactttgagtttgt

SEQ ID NO: 40376 - DNA, 20 bp, synthetic construct
  misc_feature 1..20: note = chemically synthesized
  source 1..20: mol_type = other DNA
ctatttacttgattctcaat

SEQ ID NO: 40377 - DNA, 20 bp, synthetic construct
  misc_feature 1..20: note = chemically synthesized
  source 1..20: mol_type = other DNA
tttacttgattctcaataag

SEQ ID NO: 40378 - DNA, 20 bp, synthetic construct
  misc_feature 1..20: note = chemically synthesized
  source 1..20: mol_type = other DNA
ttacttgattctcaataagt

SEQ ID NO: 40379 - DNA, 20 bp, synthetic construct
  misc_feature 1..20: note = chemically synthesized
  source 1..20: mol_type = other DNA
ttctcaataagtaggtatca

SEQ ID NO: 40380 - DNA, 20 bp, synthetic construct
  misc_feature 1..20: note = chemically synthesized
  source 1..20: mol_type = other DNA
tgaacatctgacaaatgttt

SEQ ID NO: 40381 - DNA, 20 bp, synthetic construct
  misc_feature 1..20: note = chemically synthesized
  source 1..20: mol_type = other DNA
gaacatctgacaaatgtttg

SEQ ID NO: 40382 - DNA, 20 bp, synthetic construct
  misc_feature 1..20: note = chemically synthesized
  source 1..20: mol_type = other DNA
caaatgtttgaggaacaatt

SEQ ID NO: 40383 - DNA, 20 bp, synthetic construct
  misc_feature 1..20: note = chemically synthesized
  source 1..20: mol_type = other DNA
attaaatgcctaatctgtat

SEQ ID NO: 40384 - DNA, 20 bp, synthetic construct
  misc_feature 1..20: note = chemically synthesized
  source 1..20: mol_type = other DNA
gtatcagatatacaattatc

SEQ ID NO: 40385 - DNA, 20 bp, synthetic construct
  misc_feature 1..20: note = chemically synthesized
  source 1..20: mol_type = other DNA
tctgtaattcctaatttaaa

SEQ ID NO: 40386 - DNA, 20 bp, synthetic construct
  misc_feature 1..20: note = chemically synthesized
  source 1..20: mol_type = other DNA
tcctaatttaaacagctgtg

SEQ ID NO: 40387 - DNA, 20 bp, synthetic construct
  misc_feature 1..20: note = chemically synthesized
  source 1..20: mol_type = other DNA
aaacagctgtgtagcctaat

SEQ ID NO: 40388 - DNA, 20 bp, synthetic construct
  misc_feature 1..20: note = chemically synthesized
  source 1..20: mol_type = other DNA
aacagctgtgtagcctaatt

SEQ ID NO: 40389 - DNA, 20 bp, synthetic construct
  misc_feature 1..20: note = chemically synthesized
  source 1..20: mol_type = other DNA
acagctgtgtagcctaatta

SEQ ID NO: 40390 - DNA, 20 bp, synthetic construct
  misc_feature 1..20: note = chemically synthesized
  source 1..20: mol_type = other DNA
gtgtagcctaattagggata

SEQ ID NO: 40391 - DNA, 20 bp, synthetic construct
  misc_feature 1..20: note = chemically synthesized
  source 1..20: mol_type = other DNA
tgtagcctaattagggataa

SEQ ID NO: 40392 - DNA, 20 bp, synthetic construct
  misc_feature 1..20: note = chemically synthesized
  source 1..20: mol_type = other DNA
atgcaaacccataatttgtg

SEQ ID NO: 40393 - DNA, 20 bp, synthetic construct
  misc_feature 1..20: note = chemically synthesized
  source 1..20: mol_type = other DNA
tgcaaacccataatttgtgt

SEQ ID NO: 40394 - DNA, 20 bp, synthetic construct
  misc_feature 1..20: note = chemically synthesized
  source 1..20: mol_type = other DNA
taatttgtgtaggttgaaat

SEQ ID NO: 40395 - DNA, 20 bp, synthetic construct
  misc_feature 1..20: note = chemically synthesized
  source 1..20: mol_type = other DNA
gtgtaggttgaaatgagcta

SEQ ID NO: 40396 - DNA, 20 bp, synthetic construct
  misc_feature 1..20: note = chemically synthesized
  source 1..20: mol_type = other DNA
aaatgagctatagaaaaatg

SEQ ID NO: 40397 - DNA, 20 bp, synthetic construct
  misc_feature 1..20: note = chemically synthesized
  source 1..20: mol_type = other DNA
gaaaaatgcagtatatttat

SEQ ID NO: 40398 - DNA, 20 bp, synthetic construct
  misc_feature 1..20: note = chemically synthesized
  source 1..20: mol_type = other DNA
aaatgcagtatatttatcag

SEQ ID NO: 40399 - DNA, 20 bp, synthetic construct
  misc_feature 1..20: note = chemically synthesized
  source 1..20: mol_type = other DNA
gtatatttatcagaagtctt

SEQ ID NO: 40400 - DNA, 20 bp, synthetic construct
  misc_feature 1..20: note = chemically synthesized
  source 1..20: mol_type = other DNA
tatatttatcagaagtcttt

SEQ ID NO: 40401 - DNA, 20 bp, synthetic construct
  misc_feature 1..20: note = chemically synthesized
  source 1..20: mol_type = other DNA
atatttatcagaagtcttta

SEQ ID NO: 40402 - DNA, 20 bp, synthetic construct
  misc_feature 1..20: note = chemically synthesized
  source 1..20: mol_type = other DNA
gaagtctttagggtcatgaa

SEQ ID NO: 40403 - DNA, 20 bp, synthetic construct
  misc_feature 1..20: note = chemically synthesized
  source 1..20: mol_type = other DNA
aagtctttagggtcatgaaa

SEQ ID NO: 40404 - DNA, 20 bp, synthetic construct
  misc_feature 1..20: note = chemically synthesized
  source 1..20: mol_type = other DNA
tttagggtcatgaaaaggaa

SEQ ID NO: 40405 - DNA, 20 bp, synthetic construct
  misc_feature 1..20: note = chemically synthesized
  source 1..20: mol_type = other DNA
gaatggtcaactgacactgc

SEQ ID NO: 40406 - DNA, 20 bp, synthetic construct
  misc_feature 1..20: note = chemically synthesized
  source 1..20: mol_type = other DNA
aatggtcaactgacactgcc

SEQ ID NO: 40407 - DNA, 20 bp, synthetic construct
  misc_feature 1..20: note = chemically synthesized
  source 1..20: mol_type = other DNA
atggtcaactgacactgcca

SEQ ID NO: 40408 - DNA, 20 bp, synthetic construct
  misc_feature 1..20: note = chemically synthesized
  source 1..20: mol_type = other DNA
actgccagggactcatatgt

SEQ ID NO: 40409 - DNA, 20 bp, synthetic construct
  misc_feature 1..20: note = chemically synthesized
  source 1..20: mol_type = other DNA
tgccagggactcatatgtaa

SEQ ID NO: 40410 - DNA, 20 bp, synthetic construct
  misc_feature 1..20: note = chemically synthesized
  source 1..20: mol_type = other DNA
tgtaagagataactaatgtg

SEQ ID NO: 40411 - DNA, 20 bp, synthetic construct
  misc_feature 1..20: note = chemically synthesized
  source 1..20: mol_type = other DNA
actaatgtgaagtgacttta

SEQ ID NO: 40412 - DNA, 20 bp, synthetic construct
  misc_feature 1..20: note = chemically synthesized
  source 1..20: mol_type = other DNA
ctaatgtgaagtgactttaa

SEQ ID NO: 40413 - DNA, 20 bp, synthetic construct
  misc_feature 1..20: note = chemically synthesized
  source 1..20: mol_type = other DNA
aatgtgaagtgactttaaag

SEQ ID NO: 40414 - DNA, 20 bp, synthetic construct
  misc_feature 1..20: note = chemically synthesized
  source 1..20: mol_type = other DNA
agtgactttaaaggagaaat

SEQ ID NO: 40415 - DNA, 20 bp, synthetic construct
  misc_feature 1..20: note = chemically synthesized
  source 1..20: mol_type = other DNA
gactttaaaggagaaattag

SEQ ID NO: 40416 - DNA, 20 bp, synthetic construct
  misc_feature 1..20: note = chemically synthesized
  source 1..20: mol_type = other DNA
tttaaaggagaaattagcag

SEQ ID NO: 40417 - DNA, 20 bp, synthetic construct
  misc_feature 1..20: note = chemically synthesized
  source 1..20: mol_type = other DNA
tcctcatcatgttacaataa

SEQ ID NO: 40418 - DNA, 20 bp, synthetic construct
  misc_feature 1..20: note = chemically synthesized
  source 1..20: mol_type = other DNA
tcatcatgttacaataacgg

SEQ ID NO: 40419 - DNA, 20 bp, synthetic construct
  misc_feature 1..20: note = chemically synthesized
  source 1..20: mol_type = other DNA
atcatgttacaataacggaa

SEQ ID NO: 40420 - DNA, 20 bp, synthetic construct
  misc_feature 1..20: note = chemically synthesized
  source 1..20: mol_type = other DNA
attaaaacaacaaatacatt

SEQ ID NO: 40421 - DNA, 20 bp, synthetic construct
  misc_feature 1..20: note = chemically synthesized
  source 1..20: mol_type = other DNA
aaacaacaaatacatttaga

SEQ ID NO: 40422 - DNA, 20 bp, synthetic construct
  misc_feature 1..20: note = chemically synthesized
  source 1..20: mol_type = other DNA
ttagacagcaatgtttatcc

SEQ ID NO: 40423 - DNA, 20 bp, synthetic construct
  misc_feature 1..20: note = chemically synthesized
  source 1..20: mol_type = other DNA
acagcaatgtttatcctggt

SEQ ID NO: 40424 - DNA, 20 bp, synthetic construct
  misc_feature 1..20: note = chemically synthesized
  source 1..20: mol_type = other DNA
gttttaatctaaatctatct

SEQ ID NO: 40425 - DNA, 20 bp, synthetic construct
  misc_feature 1..20: note = chemically synthesized
  source 1..20: mol_type = other DNA
tttaatctaaatctatcttg

SEQ ID NO: 40426 - DNA, 20 bp, synthetic construct
  misc_feature 1..20: note = chemically synthesized
  source 1..20: mol_type = other DNA
cctactttaaaatataaatg

SEQ ID NO: 40427 - DNA, 20 bp, synthetic construct
  misc_feature 1..20: note = chemically synthesized
  source 1..20: mol_type = other DNA
ctactttaaaatataaatga

SEQ ID NO: 40428 - DNA, 20 bp, synthetic construct
  misc_feature 1..20: note = chemically synthesized
  source 1..20: mol_type = other DNA
ctttaaaatataaatgaagg

SEQ ID NO: 40429 - DNA, 20 bp, synthetic construct
  misc_feature 1..20: note = chemically synthesized
  source 1..20: mol_type = other DNA
tttaaaatataaatgaaggt

SEQ ID NO: 40430 - DNA, 20 bp, synthetic construct
  misc_feature 1..20: note = chemically synthesized
  source 1..20: mol_type = other DNA
taaatgaaggtaggaacctg

SEQ ID NO: 40431 - DNA, 20 bp, synthetic construct
  misc_feature 1..20: note = chemically synthesized
  source 1..20: mol_type = other DNA
taggaacctgtagatacaaa

SEQ ID NO: 40432 - DNA, 20 bp, synthetic construct
  misc_feature 1..20: note = chemically synthesized
  source 1..20: mol_type = other DNA
aacctgtagatacaaaaagt

SEQ ID NO: 40433 - DNA, 20 bp, synthetic construct
  misc_feature 1..20: note = chemically synthesized
  source 1..20: mol_type = other DNA
cctgtagatacaaaaagttg

SEQ ID NO: 40434 - DNA, 20 bp, synthetic construct
  misc_feature 1..20: note = chemically synthesized
  source 1..20: mol_type = other DNA
tacaaaaagttggagaaaaa

SEQ ID NO: 40435 - DNA, 20 bp, synthetic construct
  misc_feature 1..20: note = chemically synthesized
  source 1..20: mol_type = other DNA
ttggagaaaaaaagacaata

SEQ ID NO: 40436 - DNA, 20 bp, synthetic construct
  misc_feature 1..20: note = chemically synthesized
  source 1..20: mol_type = other DNA
aaaaatctattaatccttga

SEQ ID NO: 40437 - DNA, 20 bp, synthetic construct
  misc_feature 1..20: note = chemically synthesized
  source 1..20: mol_type = other DNA
attaatccttgatagaaaat

SEQ ID NO: 40438 - DNA, 20 bp, synthetic construct
  misc_feature 1..20: note = chemically synthesized
  source 1..20: mol_type = other DNA
aatccttgatagaaaatgag

SEQ ID NO: 40439 - DNA, 20 bp, synthetic construct
  misc_feature 1..20: note = chemically synthesized
  source 1..20: mol_type = other DNA
tccttgatagaaaatgagaa

SEQ ID NO: 40440 - DNA, 20 bp, synthetic construct
  misc_feature 1..20: note = chemically synthesized
  source 1..20: mol_type = other DNA
aatgagaagagataaaacac

SEQ ID NO: 40441 - DNA, 20 bp, synthetic construct
  misc_feature 1..20: note = chemically synthesized
  source 1..20: mol_type = other DNA
ataaaacactggtttacata

SEQ ID NO: 40442 - DNA, 20 bp, synthetic construct
  misc_feature 1..20: note = chemically synthesized
  source 1..20: mol_type = other DNA
ctggtttacataaagaaaat

SEQ ID NO: 40443 - DNA, 20 bp, synthetic construct
  misc_feature 1..20: note = chemically synthesized
  source 1..20: mol_type = other DNA
tttacataaagaaaataaga

SEQ ID NO: 40444 - DNA, 20 bp, synthetic construct
  misc_feature 1..20: note = chemically synthesized
  source 1..20: mol_type = other DNA
cataaagaaaataagatgga

SEQ ID NO: 40445 - DNA, 20 bp, synthetic construct
  misc_feature 1..20: note = chemically synthesized
  source 1..20: mol_type = other DNA
aagaaaataagatggataga

SEQ ID NO: 40446 - DNA, 20 bp, synthetic construct
  misc_feature 1..20: note = chemically synthesized
  source 1..20: mol_type = other DNA
aaaataagatggatagatag

SEQ ID NO: 40447 - DNA, 20 bp, synthetic construct
  misc_feature 1..20: note = chemically synthesized
  source 1..20: mol_type = other DNA
tagatagcagatccttataa

SEQ ID NO: 40448 - DNA, 20 bp, synthetic construct
  misc_feature 1..20: note = chemically synthesized
  source 1..20: mol_type = other DNA
ccttataaaagtgataattt

SEQ ID NO: 40449 - DNA, 20 bp, synthetic construct
  misc_feature 1..20: note = chemically synthesized
  source 1..20: mol_type = other DNA
aaaaaaatactccatattct

SEQ ID NO: 40450 - DNA, 20 bp, synthetic construct
  misc_feature 1..20: note = chemically synthesized
  source 1..20: mol_type = other DNA
aaaataatacaaatctgctg

SEQ ID NO: 40451 - DNA, 20 bp, synthetic construct
  misc_feature 1..20: note = chemically synthesized
  source 1..20: mol_type = other DNA
taatacaaatctgctgtggt

SEQ ID NO: 40452 - DNA, 20 bp, synthetic construct
  misc_feature 1..20: note = chemically synthesized
  source 1..20: mol_type = other DNA
atctgctgtggtaagttaca

SEQ ID NO: 40453 - DNA, 20 bp, synthetic construct
  misc_feature 1..20: note = chemically synthesized
  source 1..20: mol_type = other DNA
ctgctgtggtaagttacaaa

SEQ ID NO: 40454 - DNA, 20 bp, synthetic construct
  misc_feature 1..20: note = chemically synthesized
  source 1..20: mol_type = other DNA
tgtggtaagttacaaagaga

SEQ ID NO: 40455 - DNA, 20 bp, synthetic construct
  misc_feature 1..20: note = chemically synthesized
  source 1..20: mol_type = other DNA
gattttttatcattatataa

SEQ ID NO: 40456 - DNA, 20 bp, synthetic construct
  misc_feature 1..20: note = chemically synthesized
  source 1..20: mol_type = other DNA
tatataaaagatattttaaa

SEQ ID NO: 40457 - DNA, 20 bp, synthetic construct
  misc_feature 1..20: note = chemically synthesized
  source 1..20: mol_type = other DNA
tataaaagatattttaaaca

SEQ ID NO: 40458 - DNA, 20 bp, synthetic construct
  misc_feature 1..20: note = chemically synthesized
  source 1..20: mol_type = other DNA
ttaaacagagttatacaaca

SEQ ID NO: 40459 - DNA, 20 bp, synthetic construct
  misc_feature 1..20: note = chemically synthesized
  source 1..20: mol_type = other DNA
taaacagagttatacaacaa

SEQ ID NO: 40460 - DNA, 20 bp, synthetic construct
  misc_feature 1..20: note = chemically synthesized
  source 1..20: mol_type = other DNA
agagttatacaacaaaggaa

SEQ ID NO: 40461 - DNA, 20 bp, synthetic construct
  misc_feature 1..20: note = chemically synthesized
  source 1..20: mol_type = other DNA
acttatcactataaacatct

SEQ ID NO: 40462 - DNA, 20 bp, synthetic construct
  misc_feature 1..20: note = chemically synthesized
  source 1..20: mol_type = other DNA
aaatctgcaaaatcatttca

SEQ ID NO: 40463 - DNA, 20 bp, synthetic construct
  misc_feature 1..20: note = chemically synthesized
  source 1..20: mol_type = other DNA
tcatttcatagcattttaaa

SEQ ID NO: 40464 - DNA, 20 bp, synthetic construct
  misc_feature 1..20: note = chemically synthesized
  source 1..20: mol_type = other DNA
ttcatagcattttaaatagt

SEQ ID NO: 40465 - DNA, 20 bp, synthetic construct
  misc_feature 1..20: note = chemically synthesized
  source 1..20: mol_type = other DNA
tcatagcattttaaatagtt

SEQ ID NO: 40466 - DNA, 20 bp, synthetic construct
  misc_feature 1..20: note = chemically synthesized
  source 1..20: mol_type = other DNA
ttaaatagttaggaataatg

SEQ ID NO: 40467 - DNA, 20 bp, synthetic construct
  misc_feature 1..20: note = chemically synthesized
  source 1..20: mol_type = other DNA
aataatgtagaaaactgaaa

SEQ ID NO: 40468 - DNA, 20 bp, synthetic construct
  misc_feature 1..20: note = chemically synthesized
  source 1..20: mol_type = other DNA
tagaaaactgaaacagttct

SEQ ID NO: 40469 - DNA, 20 bp, synthetic construct
  misc_feature 1..20: note = chemically synthesized
  source 1..20: mol_type = other DNA
ttctaagtttcccacaaact

SEQ ID NO: 40470 - DNA, 20 bp, synthetic construct
  misc_feature 1..20: note = chemically synthesized
  source 1..20: mol_type = other DNA
ctaagtttcccacaaactta

SEQ ID NO: 40471 - DNA, 20 bp, synthetic construct
  misc_feature 1..20: note = chemically synthesized
  source 1..20: mol_type = other DNA
caaatttgcacatgctactc

SEQ ID NO: 40472 - DNA, 20 bp, synthetic construct
  misc_feature 1..20: note = chemically synthesized
  source 1..20: mol_type = other DNA
tcaaaaatatatgtacatta

SEQ ID NO: 40473 - DNA, 20 bp, synthetic construct
  misc_feature 1..20: note = chemically synthesized
  source 1..20: mol_type = other DNA
caaaaatatatgtacattat

SEQ ID NO: 40474 - DNA, 20 bp, synthetic construct
  misc_feature 1..20: note = chemically synthesized
  source 1..20: mol_type = other DNA
ggtattttctgtgtgtaact

SEQ ID NO: 40475 - DNA, 20 bp, synthetic construct
  misc_feature 1..20: note = chemically synthesized
  source 1..20: mol_type = other DNA
ttctgtgtgtaacttggttc

SEQ ID NO: 40476 - DNA, 20 bp, synthetic construct
  misc_feature 1..20: note = chemically synthesized
  source 1..20: mol_type = other DNA
ttggttctagttgcttcttt

SEQ ID NO: 40477 - DNA, 20 bp, synthetic construct
  misc_feature 1..20: note = chemically synthesized
  source 1..20: mol_type = other DNA
ctagttgcttctttcagaaa

SEQ ID NO: 40478 - DNA, 20 bp, synthetic construct
  misc_feature 1..20: note = chemically synthesized
  source 1..20: mol_type = other DNA
taaaatcacattcctctcca

SEQ ID NO: 40479 - DNA, 20 bp, synthetic construct
  misc_feature 1..20: note = chemically synthesized
  source 1..20: mol_type = other DNA
caaagccttctaaatacttc

SEQ ID NO: 40480 - DNA, 20 bp, synthetic construct
  misc_feature 1..20: note = chemically synthesized
  source 1..20: mol_type = other DNA
cttccagactaactactttt

SEQ ID NO: 40481 - DNA, 20 bp, synthetic construct
  misc_feature 1..20: note = chemically synthesized
  source 1..20: mol_type = other DNA
aactactttttagtacatct

SEQ ID NO: 40482 - DNA, 20 bp, synthetic construct
  misc_feature 1..20: note = chemically synthesized
  source 1..20: mol_type = other DNA
tactttttagtacatctaag

SEQ ID NO: 40483 - DNA, 20 bp, synthetic construct
  misc_feature 1..20: note = chemically synthesized
  source 1..20: mol_type = other DNA
tttagtacatctaagaagaa

SEQ ID NO: 40484 - DNA, 20 bp, synthetic construct
  misc_feature 1..20: note = chemically synthesized
  source 1..20: mol_type = other DNA
tagtacatctaagaagaaaa

SEQ ID NO: 40485 - DNA, 20 bp, synthetic construct
  misc_feature 1..20: note = chemically synthesized
  source 1..20: mol_type = other DNA
tttgtctcttatccacctct

SEQ ID NO: 40486 - DNA, 20 bp, synthetic construct
  misc_feature 1..20: note = chemically synthesized
  source 1..20: mol_type = other DNA
ttatccacctctgagtcaaa

SEQ ID NO: 40487 - DNA, 20 bp, synthetic construct
  misc_feature 1..20: note = chemically synthesized
  source 1..20: mol_type = other DNA
tccacctctgagtcaaaaag

SEQ ID NO: 40488 - DNA, 20 bp, synthetic construct
  misc_feature 1..20: note = chemically synthesized
  source 1..20: mol_type = other DNA
aaagcagcatgtccatcaat

SEQ ID NO: 40489 - DNA, 20 bp, synthetic construct
  misc_feature 1..20: note = chemically synthesized
  source 1..20: mol_type = other DNA
catgtccatcaattggtaca

SEQ ID NO: 40490 - DNA, 20 bp, synthetic construct
  misc_feature 1..20: note = chemically synthesized
  source 1..20: mol_type = other DNA
caattggtacatagttccca

SEQ ID NO: 40491 - DNA, 20 bp, synthetic construct
  misc_feature 1..20: note = chemically synthesized
  source 1..20: mol_type = other DNA
atagttcccacagccccact

SEQ ID NO: 40492 - DNA, 20 bp, synthetic construct
  misc_feature 1..20: note = chemically synthesized
  source 1..20: mol_type = other DNA
cccacagccccacttagctc

SEQ ID NO: 40493 - DNA, 20 bp, synthetic construct
  misc_feature 1..20: note = chemically synthesized
  source 1..20: mol_type = other DNA
agccccacttagctctggat

SEQ ID NO: 40494 - DNA, 20 bp, synthetic construct
  misc_feature 1..20: note = chemically synthesized
  source 1..20: mol_type = other DNA
ccccacttagctctggattg

SEQ ID NO: 40495 - DNA, 20 bp, synthetic construct
  misc_feature 1..20: note = chemically synthesized
  source 1..20: mol_type = other DNA
ctctggattggagttctact

SEQ ID NO: 40496 - DNA, 20 bp, synthetic construct
  misc_feature 1..20: note = chemically synthesized
  source 1..20: mol_type = other DNA
tggcattgtttgcaactaca

SEQ ID NO: 40497 - DNA, 20 bp, synthetic construct
  misc_feature 1..20: note = chemically synthesized
  source 1..20: mol_type = other DNA
ctacatggacgtaaaatgca

SEQ ID NO: 40498 - DNA, 20 bp, synthetic construct
  misc_feature 1..20: note = chemically synthesized
  source 1..20: mol_type = other DNA
tctgccatgatgttctctga

SEQ ID NO: 40499 - DNA, 20 bp, synthetic construct
  misc_feature 1..20: note = chemically synthesized
  source 1..20: mol_type = other DNA
tgccatgatgttctctgaaa

SEQ ID NO: 40500 - DNA, 20 bp, synthetic construct
  misc_feature 1..20: note = chemically synthesized
  source 1..20: mol_type = other DNA
actaaccttccctcgctttg

SEQ ID NO: 40501 - DNA, 20 bp, synthetic construct
  misc_feature 1..20: note = chemically synthesized
  source 1..20: mol_type = other DNA
taaccttccctcgctttgca

SEQ ID NO: 40502 - DNA, 20 bp, synthetic construct
  misc_feature 1..20: note = chemically synthesized
  source 1..20: mol_type = other DNA
cttccctcgctttgcagaga

SEQ ID NO: 40503 - DNA, 20 bp, synthetic construct
  misc_feature 1..20: note = chemically synthesized
  source 1..20: mol_type = other DNA
gaccttcatgtctttgctct

SEQ ID NO: 40504 - DNA, 20 bp, synthetic construct
  misc_feature 1..20: note = chemically synthesized
  source 1..20: mol_type = other DNA
tacatcctcaatctacacac

SEQ ID NO: 40505 - DNA, 20 bp, synthetic construct
  misc_feature 1..20: note = chemically synthesized
  source 1..20: mol_type = other DNA
acatcctcaatctacacact

SEQ ID NO: 40506 - DNA, 20 bp, synthetic construct
  misc_feature 1..20: note = chemically synthesized
  source 1..20: mol_type = other DNA
cctcaatctacacactagga

SEQ ID NO: 40507 - DNA, 20 bp, synthetic construct
  misc_feature 1..20: note = chemically synthesized
  source 1..20: mol_type = other DNA
tacacactaggatagtataa

SEQ ID NO: 40508 - DNA, 20 bp, synthetic construct
  misc_feature 1..20: note = chemically synthesized
  source 1..20: mol_type = other DNA
ctaggatagtataaaagtaa

SEQ ID NO: 40509 - DNA, 20 bp, synthetic construct
  misc_feature 1..20: note = chemically synthesized
  source 1..20: mol_type = other DNA
tataaaagtaatagtaataa

SEQ ID NO: 40510 - DNA, 20 bp, synthetic construct
  misc_feature 1..20: note = chemically synthesized
  source 1..20: mol_type = other DNA
aaaagtaatagtaataatag

SEQ ID NO: 40511 - DNA, 20 bp, synthetic construct
  misc_feature 1..20: note = chemically synthesized
  source 1..20: mol_type = other DNA
aatagtaataatagtagtaa

SEQ ID NO: 40512 - DNA, 20 bp, synthetic construct
  misc_feature 1..20: note = chemically synthesized
  source 1..20: mol_type = other DNA
taataacaatacaatgatta

SEQ ID NO: 40513 - DNA, 20 bp, synthetic construct
  misc_feature 1..20: note = chemically synthesized
  source 1..20: mol_type = other DNA
ttatggcttatactatacac

SEQ ID NO: 40514 - DNA, 20 bp, synthetic construct
  misc_feature 1..20: note = chemically synthesized
  source 1..20: mol_type = other DNA
tgttgatatattatttcatt

SEQ ID NO: 40515 - DNA, 20 bp, synthetic construct
  misc_feature 1..20: note = chemically synthesized
  source 1..20: mol_type = other DNA
attatttcatttagtattca

SEQ ID NO: 40516 - DNA, 20 bp, synthetic construct
  misc_feature 1..20: note = chemically synthesized
  source 1..20: mol_type = other DNA
tcacagtaactctgtgcctc

SEQ ID NO: 40517 - DNA, 20 bp, synthetic construct
  misc_feature 1..20: note = chemically synthesized
  source 1..20: mol_type = other DNA
gtactattgtaatacccttt

SEQ ID NO: 40518 - DNA, 20 bp, synthetic construct
  misc_feature 1..20: note = chemically synthesized
  source 1..20: mol_type = other DNA
actattgtaataccctttaa

SEQ ID NO: 40519 - DNA, 20 bp, synthetic construct
  misc_feature 1..20: note = chemically synthesized
  source 1..20: mol_type = other DNA
ctattgtaataccctttaag

SEQ ID NO: 40520 - DNA, 20 bp, synthetic construct
  misc_feature 1..20: note = chemically synthesized
  source 1..20: mol_type = other DNA
attgtaataccctttaagag

SEQ ID NO: 40521 - DNA, 20 bp, synthetic construct
  misc_feature 1..20: note = chemically synthesized
  source 1..20: mol_type = other DNA
ttgtaataccctttaagagg

SEQ ID NO: 40522 - DNA, 20 bp, synthetic construct
  misc_feature 1..20: note = chemically synthesized
  source 1..20: mol_type = other DNA
ccctttaagaggaggaaact

SEQ ID NO: 40523 - DNA, 20 bp, synthetic construct
  misc_feature 1..20: note = chemically synthesized
  source 1..20: mol_type = other DNA
cctttaagaggaggaaactg

SEQ ID NO: 40524 - DNA, 20 bp, synthetic construct
  misc_feature 1..20: note = chemically synthesized
  source 1..20: mol_type = other DNA
aagaggaggaaactgaggca

SEQ ID NO: 40525 - DNA, 20 bp, synthetic construct
  misc_feature 1..20: note = chemically synthesized
  source 1..20: mol_type = other DNA
agaggaggaaactgaggcac

SEQ ID NO: 40526 - DNA, 20 bp, synthetic construct
  misc_feature 1..20: note = chemically synthesized
  source 1..20: mol_type = other DNA
gaggaggaaactgaggcaca

SEQ ID NO: 40527 - DNA, 20 bp, synthetic construct
  misc_feature 1..20: note = chemically synthesized
  source 1..20: mol_type = other DNA
aactgaggcacagggcccta

SEQ ID NO: 40528 - DNA, 20 bp, synthetic construct
  misc_feature 1..20: note = chemically synthesized
  source 1..20: mol_type = other DNA
gggccctaaagtaatattcc

SEQ ID NO: 40529 - DNA, 20 bp, synthetic construct
  misc_feature 1..20: note = chemically synthesized
  source 1..20: mol_type = other DNA
taaagtaatattccaagatg

SEQ ID NO: 40530 - DNA, 20 bp, synthetic construct
  misc_feature 1..20: note = chemically synthesized
  source 1..20: mol_type = other DNA
agtaatattccaagatgaag

SEQ ID NO: 40531 - DNA, 20 bp, synthetic construct
  misc_feature 1..20: note = chemically synthesized
  source 1..20: mol_type = other DNA
atgaagtggctactaactga

SEQ ID NO: 40532 - DNA, 20 bp, synthetic construct
  misc_feature 1..20: note = chemically synthesized
  source 1..20: mol_type = other DNA
gaagtggctactaactgaca

SEQ ID NO: 40533 - DNA, 20 bp, synthetic construct
  misc_feature 1..20: note = chemically synthesized
  source 1..20: mol_type = other DNA
aagtggctactaactgacag

SEQ ID NO: 40534 - DNA, 20 bp, synthetic construct
  misc_feature 1..20: note = chemically synthesized
  source 1..20: mol_type = other DNA
agtggctactaactgacaga

SEQ ID NO: 40535 - DNA, 20 bp, synthetic construct
  misc_feature 1..20: note = chemically synthesized
  source 1..20: mol_type = other DNA
ataattcaactcatgatatt

SEQ ID NO: 40536 - DNA, 20 bp, synthetic construct
  misc_feature 1..20: note = chemically synthesized
  source 1..20: mol_type = other DNA
caactcatgatatttggctc

SEQ ID NO: 40537 - DNA, 20 bp, synthetic construct
  misc_feature 1..20: note = chemically synthesized
  source 1..20: mol_type = other DNA
attatacaataataattcat

SEQ ID NO: 40538 - DNA, 20 bp, synthetic construct
  misc_feature 1..20: note = chemically synthesized
  source 1..20: mol_type = other DNA
ttatacaataataattcatg

SEQ ID NO: 40539 - DNA, 20 bp, synthetic construct
  misc_feature 1..20: note = chemically synthesized
  source 1..20: mol_type = other DNA
tcatgaggaaacatttttta

SEQ ID NO: 40540 - DNA, 20 bp, synthetic construct
  misc_feature 1..20: note = chemically synthesized
  source 1..20: mol_type = other DNA
ggaaacattttttaaagcct

SEQ ID NO: 40541 - DNA, 20 bp, synthetic construct
  misc_feature 1..20: note = chemically synthesized
  source 1..20: mol_type = other DNA
taagttatttgctctgaaat

SEQ ID NO: 40542 - DNA, 20 bp, synthetic construct
  misc_feature 1..20: note = chemically synthesized
  source 1..20: mol_type = other DNA
ctctgaaataagacataatt

SEQ ID NO: 40543 - DNA, 20 bp, synthetic construct
  misc_feature 1..20: note = chemically synthesized
  source 1..20: mol_type = other DNA
tctgaaataagacataattt

SEQ ID NO: 40544 - DNA, 20 bp, synthetic construct
  misc_feature 1..20: note = chemically synthesized
  source 1..20: mol_type = other DNA
ctgaaataagacataatttg

SEQ ID NO: 40545 - DNA, 20 bp, synthetic construct
  misc_feature 1..20: note = chemically synthesized
  source 1..20: mol_type = other DNA
aataagacataatttggggt

SEQ ID NO: 40546 - DNA, 20 bp, synthetic construct
  misc_feature 1..20: note = chemically synthesized
  source 1..20: mol_type = other DNA
agacataatttggggtgaga

SEQ ID NO: 40547 - DNA, 20 bp, synthetic construct
  misc_feature 1..20: note = chemically synthesized
  source 1..20: mol_type = other DNA
taatttggggtgagaaagct

SEQ ID NO: 40548 - DNA, 20 bp, synthetic construct
  misc_feature 1..20: note = chemically synthesized
  source 1..20: mol_type = other DNA
gagaaagcttagattccatg

SEQ ID NO: 40549 - DNA, 20 bp, synthetic construct
  misc_feature 1..20: note = chemically synthesized
  source 1..20: mol_type = other DNA
ttagattccatgaagtatta

SEQ ID NO: 40550 - DNA, 20 bp, synthetic construct
  misc_feature 1..20: note = chemically synthesized
  source 1..20: mol_type = other DNA
ccatgaagtattacagcatt

SEQ ID NO: 40551 - DNA, 20 bp, synthetic construct
  misc_feature 1..20: note = chemically synthesized
  source 1..20: mol_type = other DNA
tgaagtattacagcatttgg

SEQ ID NO: 40552 - DNA, 20 bp, synthetic construct
  misc_feature 1..20: note = chemically synthesized
  source 1..20: mol_type = other DNA
ttggtagtctttttgcactc

SEQ ID NO: 40553 - DNA, 20 bp, synthetic construct
  misc_feature 1..20: note = chemically synthesized
  source 1..20: mol_type = other DNA
tggtagtctttttgcactcc

SEQ ID NO: 40554 - DNA, 20 bp, synthetic construct
  misc_feature 1..20: note = chemically synthesized
  source 1..20: mol_type = other DNA
cttaaacataataaaacata

SEQ ID NO: 40555 - DNA, 20 bp, synthetic construct
  misc_feature 1..20: note = chemically synthesized
  source 1..20: mol_type = other DNA
acataataaaacatatggtt

SEQ ID NO: 40556 - DNA, 20 bp, synthetic construct
  misc_feature 1..20: note = chemically synthesized
  source 1..20: mol_type = other DNA
aataatattcctgttatttt

SEQ ID NO: 40557 - DNA, 20 bp, synthetic construct
  misc_feature 1..20: note = chemically synthesized
  source 1..20: mol_type = other DNA
aatattcctgttatttttgg

SEQ ID NO: 40558 - DNA, 20 bp, synthetic construct
  misc_feature 1..20: note = chemically synthesized
  source 1..20: mol_type = other DNA
tcctgttatttttggaagca

SEQ ID NO: 40559 - DNA, 20 bp, synthetic construct
  misc_feature 1..20: note = chemically synthesized
  source 1..20: mol_type = other DNA
cctgttatttttggaagcac

SEQ ID NO: 40560 - DNA, 20 bp, synthetic construct
  misc_feature 1..20: note = chemically synthesized
  source 1..20: mol_type = other DNA
ctgttatttttggaagcaca

SEQ ID NO: 40561 - DNA, 20 bp, synthetic construct
  misc_feature 1..20: note = chemically synthesized
  source 1..20: mol_type = other DNA
atttttggaagcacagggtg

SEQ ID NO: 40562 - DNA, 20 bp, synthetic construct
  misc_feature 1..20: note = chemically synthesized
  source 1..20: mol_type = other DNA
tttttggaagcacagggtgt

SEQ ID NO: 40563 - DNA, 20 bp, synthetic construct
  misc_feature 1..20: note = chemically synthesized
  source 1..20: mol_type = other DNA
tgtgggataatgctaattac

SEQ ID NO: 40564 - DNA, 20 bp, synthetic construct
  misc_feature 1..20: note = chemically synthesized
  source 1..20: mol_type = other DNA
taatgctaattactagtgat

SEQ ID NO: 40565 - DNA, 20 bp, synthetic construct
  misc_feature 1..20: note = chemically synthesized
  source 1..20: mol_type = other DNA
aattactagtgattagtatt

SEQ ID NO: 40566 - DNA, 20 bp, synthetic construct
  misc_feature 1..20: note = chemically synthesized
  source 1..20: mol_type = other DNA
ttactagtgattagtattga

SEQ ID NO: 40567 - DNA, 20 bp, synthetic construct
  misc_feature 1..20: note = chemically synthesized
  source 1..20: mol_type = other DNA
tactagtgattagtattgag

SEQ ID NO: 40568 - DNA, 20 bp, synthetic construct
  misc_feature 1..20: note = chemically synthesized
  source 1..20: mol_type = other DNA
tgattagtattgagaggtga

SEQ ID NO: 40569 - DNA, 20 bp, synthetic construct
  misc_feature 1..20: note = chemically synthesized
  source 1..20: mol_type = other DNA
attgagaggtgacagcgtgc

SEQ ID NO: 40570 - DNA, 20 bp, synthetic construct
  misc_feature 1..20: note = chemically synthesized
  source 1..20: mol_type = other DNA
gagaggtgacagcgtgctgg

SEQ ID NO: 40571 - DNA, 20 bp, synthetic construct
  misc_feature 1..20: note = chemically synthesized
  source 1..20: mol_type = other DNA
cagcgtgctggcagtcctca

SEQ ID NO: 40572 - DNA, 20 bp, synthetic construct
  misc_feature 1..20: note = chemically synthesized
  source 1..20: mol_type = other DNA
tcacagccctcgctcgctct

SEQ ID NO: 40573 - DNA, 20 bp, synthetic construct
  misc_feature 1..20: note = chemically synthesized
  source 1..20: mol_type = other DNA
ctcttggcgcctcctctgcc

SEQ ID NO: 40574 - DNA, 20 bp, synthetic construct
  misc_feature 1..20: note = chemically synthesized
  source 1..20: mol_type = other DNA
tcttggcgcctcctctgcct

SEQ ID NO: 40575 - DNA, 20 bp, synthetic construct
  misc_feature 1..20: note = chemically synthesized
  source 1..20: mol_type = other DNA
ctctgcctgggctcccacat

SEQ ID NO: 40576 - DNA, 20 bp, synthetic construct
  misc_feature 1..20: note = chemically synthesized
  source 1..20: mol_type = other DNA
tgcctgggctcccacattgg

SEQ ID NO: 40577 - DNA, 20 bp, synthetic construct
  misc_feature 1..20: note = chemically synthesized
  source 1..20: mol_type = other DNA
ctcccacattggtggcactt

SEQ ID NO: 40578 - DNA, 20 bp, synthetic construct
  misc_feature 1..20: note = chemically synthesized
  source 1..20: mol_type = other DNA
tcccacattggtggcacttg

SEQ ID NO: 40579 - DNA, 20 bp, synthetic construct
  misc_feature 1..20: note = chemically synthesized
  source 1..20: mol_type = other DNA
ccacattggtggcacttgag

SEQ ID NO: 40580 - DNA, 20 bp, synthetic construct
  misc_feature 1..20: note = chemically synthesized
  source 1..20: mol_type = other DNA
gtggcacttgaggagccctt

SEQ ID NO: 40581 - DNA, 20 bp, synthetic construct
  misc_feature 1..20: note = chemically synthesized
  source 1..20: mol_type = other DNA
cacttgaggagcccttcagc

SEQ ID NO: 40582 - DNA, 20 bp, synthetic construct
  misc_feature 1..20: note = chemically synthesized
  source 1..20: mol_type = other DNA
ttcagccggccgctgcactg

SEQ ID NO: 40583 - DNA, 20 bp, synthetic construct
  misc_feature 1..20: note = chemically synthesized
  source 1..20: mol_type = other DNA
tcagccggccgctgcactgt

SEQ ID NO: 40584 - DNA, 20 bp, synthetic construct
  misc_feature 1..20: note = chemically synthesized
  source 1..20: mol_type = other DNA
agccggccgctgcactgtgg

SEQ ID NO: 40585 - DNA, 20 bp, synthetic construct
  misc_feature 1..20: note = chemically synthesized
  source 1..20: mol_type = other DNA
gcactgtgggagcccttttc

SEQ ID NO: 40586 - DNA, 20 bp, synthetic construct
  misc_feature 1..20: note = chemically synthesized
  source 1..20: mol_type = other DNA
cactgtgggagcccttttct

SEQ ID NO: 40587 - DNA, 20 bp, synthetic construct
  misc_feature 1..20: note = chemically synthesized
  source 1..20: mol_type = other DNA
gtgggagcccttttctgggc

SEQ ID NO: 40588 - DNA, 20 bp, synthetic construct
  misc_feature 1..20: note = chemically synthesized
  source 1..20: mol_type = other DNA
agcccttttctgggctggcc

SEQ ID NO: 40589 - DNA, 20 bp, synthetic construct
  misc_feature 1..20: note = chemically synthesized
  source 1..20: mol_type = other DNA
gcccttttctgggctggcca

SEQ ID NO: 40590 - DNA, 20 bp, synthetic construct
  misc_feature 1..20: note = chemically synthesized
  source 1..20: mol_type = other DNA
ttttctgggctggccaaggc

SEQ ID NO: 40591 - DNA, 20 bp, synthetic construct
  misc_feature 1..20: note = chemically synthesized
  source 1..20: mol_type = other DNA
ttctgggctggccaaggcca

SEQ ID NO: 40592 - DNA, 20 bp, synthetic construct
  misc_feature 1..20: note = chemically synthesized
  source 1..20: mol_type = other DNA
gggctggccaaggccagagc

SEQ ID NO: 40593 - DNA, 20 bp, synthetic construct
  misc_feature 1..20: note = chemically synthesized
  source 1..20: mol_type = other DNA
aaggccagagccggctccct

SEQ ID NO: 40594 - DNA, 20 bp, synthetic construct
  misc_feature 1..20: note = chemically synthesized
  source 1..20: mol_type = other DNA
agccggctccctcagcttgc

SEQ ID NO: 40595 - DNA, 20 bp, synthetic construct
  misc_feature 1..20: note = chemically synthesized
  source 1..20: mol_type = other DNA
gccggctccctcagcttgcc

SEQ ID NO: 40596 - DNA, 20 bp, synthetic construct
  misc_feature 1..20: note = chemically synthesized
  source 1..20: mol_type = other DNA
cggctccctcagcttgccag

SEQ ID NO: 40597 - DNA, 20 bp, synthetic construct
  misc_feature 1..20: note = chemically synthesized
  source 1..20: mol_type = other DNA
ggctccctcagcttgccagg

SEQ ID NO: 40598 - DNA, 20 bp, synthetic construct
  misc_feature 1..20: note = chemically synthesized
  source 1..20: mol_type = other DNA
cctcagcttgccaggaggtg

SEQ ID NO: 40599 - DNA, 20 bp, synthetic construct
  misc_feature 1..20: note = chemically synthesized
  source 1..20: mol_type = other DNA
tcagcttgccaggaggtgtg

SEQ ID NO: 40600 - DNA, 20 bp, synthetic construct
  misc_feature 1..20: note = chemically synthesized
  source 1..20: mol_type = other DNA
cagcttgccaggaggtgtgg

SEQ ID NO: 40601 - DNA, 20 bp, synthetic construct
  misc_feature 1..20: note = chemically synthesized
  source 1..20: mol_type = other DNA
agcttgccaggaggtgtgga

SEQ ID NO: 40602 - DNA, 20 bp, synthetic construct
  misc_feature 1..20: note = chemically synthesized
  source 1..20: mol_type = other DNA
tgccaggaggtgtggaggga

SEQ ID NO: 40603 - DNA, 20 bp, synthetic construct
  misc_feature 1..20: note = chemically synthesized
  source 1..20: mol_type = other DNA
gaggtgtggagggacagacg

SEQ ID NO: 40604 - DNA, 20 bp, synthetic construct
  misc_feature 1..20: note = chemically synthesized
  source 1..20: mol_type = other DNA
aggtgtggagggacagacgc

SEQ ID NO: 40605 - DNA, 20 bp, synthetic construct
  misc_feature 1..20: note = chemically synthesized
  source 1..20: mol_type = other DNA
tgtggagggacagacgcggg

SEQ ID NO: 40606 - DNA, 20 bp, synthetic construct
  misc_feature 1..20: note = chemically synthesized
  source 1..20: mol_type = other DNA
gtggagggacagacgcgggc

SEQ ID NO: 40607 - DNA, 20 bp, synthetic construct
  misc_feature 1..20: note = chemically synthesized
  source 1..20: mol_type = other DNA
ggacagacgcgggcaggaac

SEQ ID NO: 40608 - DNA, 20 bp, synthetic construct
  misc_feature 1..20: note = chemically synthesized
  source 1..20: mol_type = other DNA
gacagacgcgggcaggaacc

SEQ ID NO: 40609 - DNA, 20 bp, synthetic construct
  misc_feature 1..20: note = chemically synthesized
  source 1..20: mol_type = other DNA
ccgggctgtgcgccgtgctt

SEQ ID NO: 40610 - DNA, 20 bp, synthetic construct
  misc_feature 1..20: note = chemically synthesized
  source 1..20: mol_type = other DNA
cgggctgtgcgccgtgcttg

SEQ ID NO: 40611 - DNA, 20 bp, synthetic construct
  misc_feature 1..20: note = chemically synthesized
  source 1..20: mol_type = other DNA
gggctgtgcgccgtgcttga

SEQ ID NO: 40612 - DNA, 20 bp, synthetic construct
  misc_feature 1..20: note = chemically synthesized
  source 1..20: mol_type = other DNA
gctgtgcgccgtgcttgagg

SEQ ID NO: 40613 - DNA, 20 bp, synthetic construct
  misc_feature 1..20: note = chemically synthesized
  source 1..20: mol_type = other DNA
cgccgtgcttgagggagttc

SEQ ID NO: 40614 - DNA, 20 bp, synthetic construct
  misc_feature 1..20: note = chemically synthesized
  source 1..20: mol_type = other DNA
gccgtgcttgagggagttcc

SEQ ID NO: 40615 - DNA, 20 bp, synthetic construct
  misc_feature 1..20: note = chemically synthesized
  source 1..20: mol_type = other DNA
gtgcttgagggagttccggg

SEQ ID NO: 40616 - DNA, 20 bp, synthetic construct
  misc_feature 1..20: note = chemically synthesized
  source 1..20: mol_type = other DNA
tgcttgagggagttccgggt

SEQ ID NO: 40617 - DNA, 20 bp, synthetic construct
  misc_feature 1..20: note = chemically synthesized
  source 1..20: mol_type = other DNA
gagggagttccgggtgggca

SEQ ID NO: 40618 - DNA, 20 bp, synthetic construct
  misc_feature 1..20: note = chemically synthesized
  source 1..20: mol_type = other DNA
agggagttccgggtgggcat

SEQ ID NO: 40619 - DNA, 20 bp, synthetic construct
  misc_feature 1..20: note = chemically synthesized
  source 1..20: mol_type = other DNA
tccgggtgggcatgggctcc

SEQ ID NO: 40620 - DNA, 20 bp, synthetic construct
  misc_feature 1..20: note = chemically synthesized
  source 1..20: mol_type = other DNA
ccgggtgggcatgggctccg

SEQ ID NO: 40621 - DNA, 20 bp, synthetic construct
  misc_feature 1..20: note = chemically synthesized
  source 1..20: mol_type = other DNA
ggctccgaggaccccgcact

SEQ ID NO: 40622 - DNA, 20 bp, synthetic construct
  misc_feature 1..20: note = chemically synthesized
  source 1..20: mol_type = other DNA
ctccgaggaccccgcactcg

SEQ ID NO: 40623 - DNA, 20 bp, synthetic construct
  misc_feature 1..20: note = chemically synthesized
  source 1..20: mol_type = other DNA
gaccccgcactcggagccgc

SEQ ID NO: 40624 - DNA, 20 bp, synthetic construct
  misc_feature 1..20: note = chemically synthesized
  source 1..20: mol_type = other DNA
ccgcactcggagccgccagc

SEQ ID NO: 40625 - DNA, 20 bp, synthetic construct
  misc_feature 1..20: note = chemically synthesized
  source 1..20: mol_type = other DNA
gagccgccagccggccccac

SEQ ID NO: 40626 - DNA, 20 bp, synthetic construct
  misc_feature 1..20: note = chemically synthesized
  source 1..20: mol_type = other DNA
ccagccggccccaccggccg

SEQ ID NO: 40627 - DNA, 20 bp, synthetic construct
  misc_feature 1..20: note = chemically synthesized
  source 1..20: mol_type = other DNA
cagccggccccaccggccgc

SEQ ID NO: 40628 - DNA, 20 bp, synthetic construct
  misc_feature 1..20: note = chemically synthesized
  source 1..20: mol_type = other DNA
ccggccccaccggccgcggg

SEQ ID NO: 40629 - DNA, 20 bp, synthetic construct
  misc_feature 1..20: note = chemically synthesized
  source 1..20: mol_type = other DNA
ccccaccggccgcgggcagt

SEQ ID NO: 40630 - DNA, 20 bp, synthetic construct
  misc_feature 1..20: note = chemically synthesized
  source 1..20: mol_type = other DNA
cccaccggccgcgggcagtg

SEQ ID NO: 40631 - DNA, 20 bp, synthetic construct
  misc_feature 1..20: note = chemically synthesized
  source 1..20: mol_type = other DNA
ccaccggccgcgggcagtga

SEQ ID NO: 40632 - DNA, 20 bp, synthetic construct
  misc_feature 1..20: note = chemically synthesized
  source 1..20: mol_type = other DNA
caccggccgcgggcagtgag

SEQ ID NO: 40633 - DNA, 20 bp, synthetic construct
  misc_feature 1..20: note = chemically synthesized
  source 1..20: mol_type = other DNA
gccgcgggcagtgaggggct

SEQ ID NO: 40634 - DNA, 20 bp, synthetic construct
  misc_feature 1..20: note = chemically synthesized
  source 1..20: mol_type = other DNA
gcagtgaggggcttagcacc

SEQ ID NO: 40635 - DNA, 20 bp, synthetic construct
  misc_feature 1..20: note = chemically synthesized
  source 1..20: mol_type = other DNA
cagtgaggggcttagcacct

SEQ ID NO: 40636 - DNA, 20 bp, synthetic construct
  misc_feature 1..20: note = chemically synthesized
  source 1..20: mol_type = other DNA
gaggggcttagcacctgggc

SEQ ID NO: 40637 - DNA, 20 bp, synthetic construct
  misc_feature 1..20: note = chemically synthesized
  source 1..20: mol_type = other DNA
gggcttagcacctgggccag

SEQ ID NO: 40638 - DNA, 20 bp, synthetic construct
  misc_feature 1..20: note = chemically synthesized
  source 1..20: mol_type = other DNA
tgctgtgctcaattcctcgc

SEQ ID NO: 40639 - DNA, 20 bp, synthetic construct
  misc_feature 1..20: note = chemically synthesized
  source 1..20: mol_type = other DNA
gctgtgctcaattcctcgcc

SEQ ID NO: 40640 - DNA, 20 bp, synthetic construct
  misc_feature 1..20: note = chemically synthesized
  source 1..20: mol_type = other DNA
ctcaattcctcgccgggcct

SEQ ID NO: 40641 - DNA, 20 bp, synthetic construct
  misc_feature 1..20: note = chemically synthesized
  source 1..20: mol_type = other DNA
gggccttagctgccttcctg

SEQ ID NO: 40642 - DNA, 20 bp, synthetic construct
  misc_feature 1..20: note = chemically synthesized
  source 1..20: mol_type = other DNA
ggccttagctgccttcctgc

SEQ ID NO: 40643 - DNA, 20 bp, synthetic construct
  misc_feature 1..20: note = chemically synthesized
  source 1..20: mol_type = other DNA
gccttagctgccttcctgcg

SEQ ID NO: 40644 - DNA, 20 bp, synthetic construct
  misc_feature 1..20: note = chemically synthesized
  source 1..20: mol_type = other DNA
ttagctgccttcctgcgggg

SEQ ID NO: 40645 - DNA, 20 bp, synthetic construct
  misc_feature 1..20: note = chemically synthesized
  source 1..20: mol_type = other DNA
tagctgccttcctgcggggc

SEQ ID NO: 40646 - DNA, 20 bp, synthetic construct
  misc_feature 1..20: note = chemically synthesized
  source 1..20: mol_type = other DNA
agctgccttcctgcggggca

SEQ ID NO: 40647 - DNA, 20 bp, synthetic construct
  misc_feature 1..20: note = chemically synthesized
  source 1..20: mol_type = other DNA
ccttcctgcggggcagggct

SEQ ID NO: 40648 - DNA, 20 bp, synthetic construct
  misc_feature 1..20: note = chemically synthesized
  source 1..20: mol_type = other DNA
cttcctgcggggcagggctc

SEQ ID NO: 40649 - DNA, 20 bp, synthetic construct
  misc_feature 1..20: note = chemically synthesized
  source 1..20: mol_type = other DNA
ggggcagggctcgggacctg

SEQ ID NO: 40650 - DNA, 20 bp, synthetic construct
  misc_feature 1..20: note = chemically synthesized
  source 1..20: mol_type = other DNA
acctgcagcgcgccatgcct

SEQ ID NO: 40651 - DNA, 20 bp, synthetic construct
  misc_feature 1..20: note = chemically synthesized
  source 1..20: mol_type = other DNA
cctgagcctccccaccttca

SEQ ID NO: 40652 - DNA, 20 bp, synthetic construct
  misc_feature 1..20: note = chemically synthesized
  source 1..20: mol_type = other DNA
ctgagcctccccaccttcat

SEQ ID NO: 40653 - DNA, 20 bp, synthetic construct
  misc_feature 1..20: note = chemically synthesized
  source 1..20: mol_type = other DNA
caccttcatgggctcctgtg

SEQ ID NO: 40654 - DNA, 20 bp, synthetic construct
  misc_feature 1..20: note = chemically synthesized
  source 1..20: mol_type = other DNA
catgggctcctgtgcggccc

SEQ ID NO: 40655 - DNA, 20 bp, synthetic construct
  misc_feature 1..20: note = chemically synthesized
  source 1..20: mol_type = other DNA
gcggcccgagcctcgccgac

SEQ ID NO: 40656 - DNA, 20 bp, synthetic construct
  misc_feature 1..20: note = chemically synthesized
  source 1..20: mol_type = other DNA
acgagcgccgccccctgctc

SEQ ID NO: 40657 - DNA, 20 bp, synthetic construct
  misc_feature 1..20: note = chemically synthesized
  source 1..20: mol_type = other DNA
cgagcgccgccccctgctcc

SEQ ID NO: 40658 - DNA, 20 bp, synthetic construct
  misc_feature 1..20: note = chemically synthesized
  source 1..20: mol_type = other DNA
gagcgccgccccctgctcca

SEQ ID NO: 40659 - DNA, 20 bp, synthetic construct
  misc_feature 1..20: note = chemically synthesized
  source 1..20: mol_type = other DNA
gccccctgctccagggcacc

SEQ ID NO: 40660 - DNA, 20 bp, synthetic construct
  misc_feature 1..20: note = chemically synthesized
  source 1..20: mol_type = other DNA
cccagtcccatcgaccaccc

SEQ ID NO: 40661 - DNA, 20 bp, synthetic construct
  misc_feature 1..20: note = chemically synthesized
  source 1..20: mol_type = other DNA
ccagtcccatcgaccaccca

SEQ ID NO: 40662 - DNA, 20 bp, synthetic construct
  misc_feature 1..20: note = chemically synthesized
  source 1..20: mol_type = other DNA
cagtcccatcgaccacccaa

SEQ ID NO: 40663 - DNA, 20 bp, synthetic construct
  misc_feature 1..20: note = chemically synthesized
  source 1..20: mol_type = other DNA
catcgaccacccaagggctg

SEQ ID NO: 40664 - DNA, 20 bp, synthetic construct
  misc_feature 1..20: note = chemically synthesized
  source 1..20: mol_type = other DNA
tcgaccacccaagggctgaa

SEQ ID NO: 40665 - DNA, 20 bp, synthetic construct
  misc_feature 1..20: note = chemically synthesized
  source 1..20: mol_type = other DNA
cacccaagggctgaagagtg

SEQ ID NO: 40666 - DNA, 20 bp, synthetic construct
  misc_feature 1..20: note = chemically synthesized
  source 1..20: mol_type = other DNA
acccaagggctgaagagtgc

SEQ ID NO: 40667 - DNA, 20 bp, synthetic construct
  misc_feature 1..20: note = chemically synthesized
  source 1..20: mol_type = other DNA
ggctgaagagtgcgggcgca

SEQ ID NO: 40668 - DNA, 20 bp, synthetic construct
  misc_feature 1..20: note = chemically synthesized
  source 1..20: mol_type = other DNA
tgaagagtgcgggcgcacgg

SEQ ID NO: 40669 - DNA, 20 bp, synthetic construct
  misc_feature 1..20: note = chemically synthesized
  source 1..20: mol_type = other DNA
gaagagtgcgggcgcacggc

SEQ ID NO: 40670 - DNA, 20 bp, synthetic construct
  misc_feature 1..20: note = chemically synthesized
  source 1..20: mol_type = other DNA
aagagtgcgggcgcacggca

SEQ ID NO: 40671 - DNA, 20 bp, synthetic construct
  misc_feature 1..20: note = chemically synthesized
  source 1..20: mol_type = other DNA
agagtgcgggcgcacggcag

SEQ ID NO: 40672 - DNA, 20 bp, synthetic construct
  misc_feature 1..20: note = chemically synthesized
  source 1..20: mol_type = other DNA
gcgggcgcacggcaggggac

SEQ ID NO: 40673 - DNA, 20 bp, synthetic construct
  misc_feature 1..20: note = chemically synthesized
  source 1..20: mol_type = other DNA
ggcgcacggcaggggactgg

SEQ ID NO: 40674 - DNA, 20 bp, synthetic construct
  misc_feature 1..20: note = chemically synthesized
  source 1..20: mol_type = other DNA
gcgcacggcaggggactggc

SEQ ID NO: 40675 - DNA, 20 bp, synthetic construct
  misc_feature 1..20: note = chemically synthesized
  source 1..20: mol_type = other DNA
cacggcaggggactggcagg

SEQ ID NO: 40676 - DNA, 20 bp, synthetic construct
  misc_feature 1..20: note = chemically synthesized
  source 1..20: mol_type = other DNA
ctggcaggcagctccccctg

SEQ ID NO: 40677 - DNA, 20 bp, synthetic construct
  misc_feature 1..20: note = chemically synthesized
  source 1..20: mol_type = other DNA
aggcagctccccctgcagcc

SEQ ID NO: 40678 - DNA, 20 bp, synthetic construct
  misc_feature 1..20: note = chemically synthesized
  source 1..20: mol_type = other DNA
ggcagctccccctgcagccc

SEQ ID NO: 40679 - DNA, 20 bp, synthetic construct
  misc_feature 1..20: note = chemically synthesized
  source 1..20: mol_type = other DNA
ctccccctgcagcccaggtg

SEQ ID NO: 40680 - DNA, 20 bp, synthetic construct
  misc_feature 1..20: note = chemically synthesized
  source 1..20: mol_type = other DNA
tccccctgcagcccaggtgc

SEQ ID NO: 40681 - DNA, 20 bp, synthetic construct
  misc_feature 1..20: note = chemically synthesized
  source 1..20: mol_type = other DNA
agcccaggtgcgggatccac

SEQ ID NO: 40682 - DNA, 20 bp, synthetic construct
  misc_feature 1..20: note = chemically synthesized
  source 1..20: mol_type = other DNA
gcccaggtgcgggatccact

SEQ ID NO: 40683 - DNA, 20 bp, synthetic construct
  misc_feature 1..20: note = chemically synthesized
  source 1..20: mol_type = other DNA
ggtgcgggatccactgggtg

SEQ ID NO: 40684 - DNA, 20 bp, synthetic construct
  misc_feature 1..20: note = chemically synthesized
  source 1..20: mol_type = other DNA
cgggatccactgggtgaagc

SEQ ID NO: 40685 - DNA, 20 bp, synthetic construct
  misc_feature 1..20: note = chemically synthesized
  source 1..20: mol_type = other DNA
atccactgggtgaagccggc

SEQ ID NO: 40686 - DNA, 20 bp, synthetic construct
  misc_feature 1..20: note = chemically synthesized
  source 1..20: mol_type = other DNA
tccactgggtgaagccggct

SEQ ID NO: 40687 - DNA, 20 bp, synthetic construct
  misc_feature 1..20: note = chemically synthesized
  source 1..20: mol_type = other DNA
gtgaagccggctaggctcct

SEQ ID NO: 40688 - DNA, 20 bp, synthetic construct
  misc_feature 1..20: note = chemically synthesized
  source 1..20: mol_type = other DNA
ggctaggctcctgagtttgc

SEQ ID NO: 40689 - DNA, 20 bp, synthetic construct
  misc_feature 1..20: note = chemically synthesized
  source 1..20: mol_type = other DNA
gctaggctcctgagtttgct

SEQ ID NO: 40690 - DNA, 20 bp, synthetic construct
  misc_feature 1..20: note = chemically synthesized
  source 1..20: mol_type = other DNA
ctaggctcctgagtttgctg

SEQ ID NO: 40691 - DNA, 20 bp, synthetic construct
  misc_feature 1..20: note = chemically synthesized
  source 1..20: mol_type = other DNA
ctgagtttgctggggatgcg

SEQ ID NO: 40692 - DNA, 20 bp, synthetic construct
  misc_feature 1..20: note = chemically synthesized
  source 1..20: mol_type = other DNA
atgcgaagaacccttatgtc

SEQ ID NO: 40693 - DNA, 20 bp, synthetic construct
  misc_feature 1..20: note = chemically synthesized
  source 1..20: mol_type = other DNA
aagaacccttatgtctagat

SEQ ID NO: 40694 - DNA, 20 bp, synthetic construct
  misc_feature 1..20: note = chemically synthesized
  source 1..20: mol_type = other DNA
agaacccttatgtctagata

SEQ ID NO: 40695 - DNA, 20 bp, synthetic construct
  misc_feature 1..20: note = chemically synthesized
  source 1..20: mol_type = other DNA
gaacccttatgtctagataa

SEQ ID NO: 40696 - DNA, 20 bp, synthetic construct
  misc_feature 1..20: note = chemically synthesized
  source 1..20: mol_type = other DNA
gggattgtaaatacaccaat

SEQ ID NO: 40697 - DNA, 20 bp, synthetic construct
  misc_feature 1..20: note = chemically synthesized
  source 1..20: mol_type = other DNA
accaattggcactctgtatc

SEQ ID NO: 40698 - DNA, 20 bp, synthetic construct
  misc_feature 1..20: note = chemically synthesized
  source 1..20: mol_type = other DNA
tggcactctgtatctagctc

SEQ ID NO: 40699 - DNA, 20 bp, synthetic construct
  misc_feature 1..20: note = chemically synthesized
  source 1..20: mol_type = other DNA
ggcactctgtatctagctca

SEQ ID NO: 40700 - DNA, 20 bp, synthetic construct
  misc_feature 1..20: note = chemically synthesized
  source 1..20: mol_type = other DNA
aggtttgtaaacacaccaat

SEQ ID NO: 40701 - DNA, 20 bp, synthetic construct
  misc_feature 1..20: note = chemically synthesized
  source 1..20: mol_type = other DNA
accaatcagcaccctgtgtc

SEQ ID NO: 40702 - DNA, 20 bp, synthetic construct
  misc_feature 1..20: note = chemically synthesized
  source 1..20: mol_type = other DNA
tcagcaccctgtgtctagct

SEQ ID NO: 40703 - DNA, 20 bp, synthetic construct
  misc_feature 1..20: note = chemically synthesized
  source 1..20: mol_type = other DNA
cagcaccctgtgtctagctc

SEQ ID NO: 40704 - DNA, 20 bp, synthetic construct
  misc_feature 1..20: note = chemically synthesized
  source 1..20: mol_type = other DNA
agcaccctgtgtctagctca

SEQ ID NO: 40705 - DNA, 20 bp, synthetic construct
  misc_feature 1..20: note = chemically synthesized
  source 1..20: mol_type = other DNA
gcaccaatcaacactctatc

SEQ ID NO: 40706 - DNA, 20 bp, synthetic construct
  misc_feature 1..20: note = chemically synthesized
  source 1..20: mol_type = other DNA
aacactctatctagctactc

SEQ ID NO: 40707 - DNA, 20 bp, synthetic construct
  misc_feature 1..20: note = chemically synthesized
  source 1..20: mol_type = other DNA
actctatctagctactctgg

SEQ ID NO: 40708 - DNA, 20 bp, synthetic construct
  misc_feature 1..20: note = chemically synthesized
  source 1..20: mol_type = other DNA
ctctatctagctactctggt

SEQ ID NO: 40709 - DNA, 20 bp, synthetic construct
  misc_feature 1..20: note = chemically synthesized
  source 1..20: mol_type = other DNA
tctatctagctactctggtg

SEQ ID NO: 40710 - DNA, 20 bp, synthetic construct
  misc_feature 1..20: note = chemically synthesized
  source 1..20: mol_type = other DNA
tagctactctggtggggcct

SEQ ID NO: 40711 - DNA, 20 bp, synthetic construct
  misc_feature 1..20: note = chemically synthesized
  source 1..20: mol_type = other DNA
gctactctggtggggccttg

SEQ ID NO: 40712 - DNA, 20 bp, synthetic construct
  misc_feature 1..20: note = chemically synthesized
  source 1..20: mol_type = other DNA
ccttggagaacctttatgtc

SEQ ID NO: 40713 - DNA, 20 bp, synthetic construct
  misc_feature 1..20: note = chemically synthesized
  source 1..20: mol_type = other DNA
gagaacctttatgtctagct

SEQ ID NO: 40714 - DNA, 20 bp, synthetic construct
  misc_feature 1..20: note = chemically synthesized
  source 1..20: mol_type = other DNA
agaacctttatgtctagctc

SEQ ID NO: 40715 - DNA, 20 bp, synthetic construct
  misc_feature 1..20: note = chemically synthesized
  source 1..20: mol_type = other DNA
gaacctttatgtctagctca

SEQ ID NO: 40716 - DNA, 20 bp, synthetic construct
  misc_feature 1..20: note = chemically synthesized
  source 1..20: mol_type = other DNA
gggattgtaaatacaccaat

SEQ ID NO: 40717 - DNA, 20 bp, synthetic construct
  misc_feature 1..20: note = chemically synthesized
  source 1..20: mol_type = other DNA
attgtaaatacaccaatcgg

SEQ ID NO: 40718 - DNA, 20 bp, synthetic construct
  misc_feature 1..20: note = chemically synthesized
  source 1..20: mol_type = other DNA
accaatcggcagtctgtatc

SEQ ID NO: 40719 - DNA, 20 bp, synthetic construct
  misc_feature 1..20: note = chemically synthesized
  source 1..20: mol_type = other DNA
cggcagtctgtatctagctc

SEQ ID NO: 40720 - DNA, 20 bp, synthetic construct
  misc_feature 1..20: note = chemically synthesized
  source 1..20: mol_type = other DNA
ggcagtctgtatctagctca

SEQ ID NO: 40721 - DNA, 20 bp, synthetic construct
  misc_feature 1..20: note = chemically synthesized
  source 1..20: mol_type = other DNA
aggtttgtaaacacaccaat

SEQ ID NO: 40722 - DNA, 20 bp, synthetic construct
  misc_feature 1..20: note = chemically synthesized
  source 1..20: mol_type = other DNA
accaatcagcaccctgtgtc

SEQ ID NO: 40723 - DNA, 20 bp, synthetic construct
  misc_feature 1..20: note = chemically synthesized
  source 1..20: mol_type = other DNA
tcagcaccctgtgtctagct

SEQ ID NO: 40724 - DNA, 20 bp, synthetic construct
  misc_feature 1..20: note = chemically synthesized
  source 1..20: mol_type = other DNA
cagcaccctgtgtctagctc

SEQ ID NO: 40725 - DNA, 20 bp, synthetic construct
  misc_feature 1..20: note = chemically synthesized
  source 1..20: mol_type = other DNA
agcaccctgtgtctagctca

SEQ ID NO: 40726 - DNA, 20 bp, synthetic construct
  misc_feature 1..20: note = chemically synthesized
  source 1..20: mol_type = other DNA
accaatcaacactctgtatc

SEQ ID NO: 40727 - DNA, 20 bp, synthetic construct
  misc_feature 1..20: note = chemically synthesized
  source 1..20: mol_type = other DNA
cactctgtatctagctactc

SEQ ID NO: 40728 - DNA, 20 bp, synthetic construct
  misc_feature 1..20: note = chemically synthesized
  source 1..20: mol_type = other DNA
tctgtatctagctactctgg

SEQ ID NO: 40729 - DNA, 20 bp, synthetic construct
  misc_feature 1..20: note = chemically synthesized
  source 1..20: mol_type = other DNA
ctgtatctagctactctggt

SEQ ID NO: 40730 - DNA, 20 bp, synthetic construct
  misc_feature 1..20: note = chemically synthesized
  source 1..20: mol_type = other DNA
tgtatctagctactctggtg

SEQ ID NO: 40731 - DNA, 20 bp, synthetic construct
  misc_feature 1..20: note = chemically synthesized
  source 1..20: mol_type = other DNA
tagctactctggtggggacg

SEQ ID NO: 40732 - DNA, 20 bp, synthetic construct
  misc_feature 1..20: note = chemically synthesized
  source 1..20: mol_type = other DNA
gctactctggtggggacgtg

SEQ ID NO: 40733 - DNA, 20 bp, synthetic construct
  misc_feature 1..20: note = chemically synthesized
  source 1..20: mol_type = other DNA
acgtggagaacctttatgtc

SEQ ID NO: 40734 - DNA, 20 bp, synthetic construct
  misc_feature 1..20: note = chemically synthesized
  source 1..20: mol_type = other DNA
gagaacctttatgtctagct

SEQ ID NO: 40735 - DNA, 20 bp, synthetic construct
  misc_feature 1..20: note = chemically synthesized
  source 1..20: mol_type = other DNA
agaacctttatgtctagctc

SEQ ID NO: 40736 - DNA, 20 bp, synthetic construct
  misc_feature 1..20: note = chemically synthesized
  source 1..20: mol_type = other DNA
gaacctttatgtctagctca

SEQ ID NO: 40737 - DNA, 20 bp, synthetic construct
  misc_feature 1..20: note = chemically synthesized
  source 1..20: mol_type = other DNA
gggattgtaaatacaccact

SEQ ID NO: 40738 - DNA, 20 bp, synthetic construct
  misc_feature 1..20: note = chemically synthesized
  source 1..20: mol_type = other DNA
attgtaaatacaccactcgg

SEQ ID NO: 40739 - DNA, 20 bp, synthetic construct
  misc_feature 1..20: note = chemically synthesized
  source 1..20: mol_type = other DNA
accactcggcagtctgtatc

SEQ ID NO: 40740 - DNA, 20 bp, synthetic construct
  misc_feature 1..20: note = chemically synthesized
  source 1..20: mol_type = other DNA
cggcagtctgtatctagctc

SEQ ID NO: 40741 - DNA, 20 bp, synthetic construct
  misc_feature 1..20: note = chemically synthesized
  source 1..20: mol_type = other DNA
ggcagtctgtatctagctca

SEQ ID NO: 40742 - DNA, 20 bp, synthetic construct
  misc_feature 1..20: note = chemically synthesized
  source 1..20: mol_type = other DNA
aggtttgtaaacacaccaat

SEQ ID NO: 40743 - DNA, 20 bp, synthetic construct
  misc_feature 1..20: note = chemically synthesized
  source 1..20: mol_type = other DNA
accaatcagcaccctgtgtc

SEQ ID NO: 40744 - DNA, 20 bp, synthetic construct
  misc_feature 1..20: note = chemically synthesized
  source 1..20: mol_type = other DNA
tcagcaccctgtgtctagct

SEQ ID NO: 40745 - DNA, 20 bp, synthetic construct
  misc_feature 1..20: note = chemically synthesized
  source 1..20: mol_type = other DNA
cagcaccctgtgtctagctc

SEQ ID NO: 40746 - DNA, 20 bp, synthetic construct
  misc_feature 1..20: note = chemically synthesized
  source 1..20: mol_type = other DNA
agcaccctgtgtctagctca

SEQ ID NO: 40747 - DNA, 20 bp, synthetic construct
  misc_feature 1..20: note = chemically synthesized
  source 1..20: mol_type = other DNA
accaatcaacactctgtatc

SEQ ID NO: 40748 - DNA, 20 bp, synthetic construct
  misc_feature 1..20: note = chemically synthesized
  source 1..20: mol_type = other DNA
cactctgtatctagctactc

SEQ ID NO: 40749 - DNA, 20 bp, synthetic construct
  misc_feature 1..20: note = chemically synthesized
  source 1..20: mol_type = other DNA
tctgtatctagctactctgg

SEQ ID NO: 40750 - DNA, 20 bp, synthetic construct
  misc_feature 1..20: note = chemically synthesized
  source 1..20: mol_type = other DNA
ctgtatctagctactctggt

SEQ ID NO: 40751 - DNA, 20 bp, synthetic construct
  misc_feature 1..20: note = chemically synthesized
  source 1..20: mol_type = other DNA
tgtatctagctactctggtg

SEQ ID NO: 40752 - DNA, 20 bp, synthetic construct
  misc_feature 1..20: note = chemically synthesized
  source 1..20: mol_type = other DNA
tagctactctggtggggact

SEQ ID NO: 40753 - DNA, 20 bp, synthetic construct
  misc_feature 1..20: note = chemically synthesized
  source 1..20: mol_type = other DNA
gctactctggtggggacttg

SEQ ID NO: 40754 - DNA, 20 bp, synthetic construct
  misc_feature 1..20: note = chemically synthesized
  source 1..20: mol_type = other DNA
ggacttggagaacctttgtg

SEQ ID NO: 40755 - DNA, 20 bp, synthetic construct
  misc_feature 1..20: note = chemically synthesized
  source 1..20: mol_type = other DNA
ttgtgtggacactctgtatc

SEQ ID NO: 40756 - DNA, 20 bp, synthetic construct
  misc_feature 1..20: note = chemically synthesized
  source 1..20: mol_type = other DNA
cactctgtatctagctaatc

SEQ ID NO: 40757 - DNA, 20 bp, synthetic construct
  misc_feature 1..20: note = chemically synthesized
  source 1..20: mol_type = other DNA
tctgtatctagctaatctgg

SEQ ID NO: 40758 - DNA, 20 bp, synthetic construct
  misc_feature 1..20: note = chemically synthesized
  source 1..20: mol_type = other DNA
ctgtatctagctaatctggt

SEQ ID NO: 40759 - DNA, 20 bp, synthetic construct
  misc_feature 1..20: note = chemically synthesized
  source 1..20: mol_type = other DNA
tgtatctagctaatctggtg

SEQ ID NO: 40760 - DNA, 20 bp, synthetic construct
  misc_feature 1..20: note = chemically synthesized
  source 1..20: mol_type = other DNA
tagctaatctggtggggacg

SEQ ID NO: 40761 - DNA, 20 bp, synthetic construct
  misc_feature 1..20: note = chemically synthesized
  source 1..20: mol_type = other DNA
gctaatctggtggggacgtg

SEQ ID NO: 40762 - DNA, 20 bp, synthetic construct
  misc_feature 1..20: note = chemically synthesized
  source 1..20: mol_type = other DNA
acgtggagaacctttgtgtc

SEQ ID NO: 40763 - DNA, 20 bp, synthetic construct
  misc_feature 1..20: note = chemically synthesized
  source 1..20: mol_type = other DNA
gaacctttgtgtctagctca

SEQ ID NO: 40764 - DNA, 20 bp, synthetic construct
  misc_feature 1..20: note = chemically synthesized
  source 1..20: mol_type = other DNA
tggattgtaaatgcaccaat

SEQ ID NO: 40765 - DNA, 20 bp, synthetic construct
  misc_feature 1..20: note = chemically synthesized
  source 1..20: mol_type = other DNA
caatcagtgccctgtcaaaa

SEQ ID NO: 40766 - DNA, 20 bp, synthetic construct
  misc_feature 1..20: note = chemically synthesized
  source 1..20: mol_type = other DNA
gccctgtcaaaacagaccac

SEQ ID NO: 40767 - DNA, 20 bp, synthetic construct
  misc_feature 1..20: note = chemically synthesized
  source 1..20: mol_type = other DNA
ccctgtcaaaacagaccact

SEQ ID NO: 40768 - DNA, 20 bp, synthetic construct
  misc_feature 1..20: note = chemically synthesized
  source 1..20: mol_type = other DNA
gaccactgggctctaccaat

SEQ ID NO: 40769 - DNA, 20 bp, synthetic construct
  misc_feature 1..20: note = chemically synthesized
  source 1..20: mol_type = other DNA
cactgggctctaccaatcag

SEQ ID NO: 40770 - DNA, 20 bp, synthetic construct
  misc_feature 1..20: note = chemically synthesized
  source 1..20: mol_type = other DNA
actgggctctaccaatcagc

SEQ ID NO: 40771 - DNA, 20 bp, synthetic construct
  misc_feature 1..20: note = chemically synthesized
  source 1..20: mol_type = other DNA
ctctaccaatcagcaggatg

SEQ ID NO: 40772 - DNA, 20 bp, synthetic construct
  misc_feature 1..20: note = chemically synthesized
  source 1..20: mol_type = other DNA
tctaccaatcagcaggatgt

SEQ ID NO: 40773 - DNA, 20 bp, synthetic construct
  misc_feature 1..20: note = chemically synthesized
  source 1..20: mol_type = other DNA
accaatcagcaggatgtggg

SEQ ID NO: 40774 - DNA, 20 bp, synthetic construct
  misc_feature 1..20: note = chemically synthesized
  source 1..20: mol_type = other DNA
ccaatcagcaggatgtgggt

SEQ ID NO: 40775 - DNA, 20 bp, synthetic construct
  misc_feature 1..20: note = chemically synthesized
  source 1..20: mol_type = other DNA
caatcagcaggatgtgggtg

SEQ ID NO: 40776 - DNA, 20 bp, synthetic construct
  misc_feature 1..20: note = chemically synthesized
  source 1..20: mol_type = other DNA
cagcaggatgtgggtggggc

SEQ ID NO: 40777 - DNA, 20 bp, synthetic construct
  misc_feature 1..20: note = chemically synthesized
  source 1..20: mol_type = other DNA
ggatgtgggtggggccagat

SEQ ID NO: 40778 - DNA, 20 bp, synthetic construct
  misc_feature 1..20: note = chemically synthesized
  source 1..20: mol_type = other DNA
atgtgggtggggccagataa

SEQ ID NO: 40779 - DNA, 20 bp, synthetic construct
  misc_feature 1..20: note = chemically synthesized
  source 1..20: mol_type = other DNA
ggggccagataagagaataa

SEQ ID NO: 40780 - DNA, 20 bp, synthetic construct
  misc_feature 1..20: note = chemically synthesized
  source 1..20: mol_type = other DNA
gccagataagagaataaaag

SEQ ID NO: 40781 - DNA, 20 bp, synthetic construct
  misc_feature 1..20: note = chemically synthesized
  source 1..20: mol_type = other DNA
ccagataagagaataaaagc

SEQ ID NO: 40782 - DNA, 20 bp, synthetic construct
  misc_feature 1..20: note = chemically synthesized
  source 1..20: mol_type = other DNA
agaataaaagcaggctgccc

SEQ ID NO: 40783 - DNA, 20 bp, synthetic construct
  misc_feature 1..20: note = chemically synthesized
  source 1..20: mol_type = other DNA
taaaagcaggctgcccgagc

SEQ ID NO: 40784 - DNA, 20 bp, synthetic construct
  misc_feature 1..20: note = chemically synthesized
  source 1..20: mol_type = other DNA
aagcaggctgcccgagccag

SEQ ID NO: 40785 - DNA, 20 bp, synthetic construct
  misc_feature 1..20: note = chemically synthesized
  source 1..20: mol_type = other DNA
caggctgcccgagccagcag

SEQ ID NO: 40786 - DNA, 20 bp, synthetic construct
  misc_feature 1..20: note = chemically synthesized
  source 1..20: mol_type = other DNA
gccagcagtggcaacccgct

SEQ ID NO: 40787 - DNA, 20 bp, synthetic construct
  misc_feature 1..20: note = chemically synthesized
  source 1..20: mol_type = other DNA
ccagcagtggcaacccgctc

SEQ ID NO: 40788 - DNA, 20 bp, synthetic construct
  misc_feature 1..20: note = chemically synthesized
  source 1..20: mol_type = other DNA
tcgggtccccttccacactg

SEQ ID NO: 40789 - DNA, 20 bp, synthetic construct
  misc_feature 1..20: note = chemically synthesized
  source 1..20: mol_type = other DNA
ggtccccttccacactgtgg

SEQ ID NO: 40790 - DNA, 20 bp, synthetic construct
  misc_feature 1..20: note = chemically synthesized
  source 1..20: mol_type = other DNA
tcttgctgctgctcactgtt

SEQ ID NO: 40791 - DNA, 20 bp, synthetic construct
  misc_feature 1..20: note = chemically synthesized
  source 1..20: mol_type = other DNA
cttgctgctgctcactgttt

SEQ ID NO: 40792 - DNA, 20 bp, synthetic construct
  misc_feature 1..20: note = chemically synthesized
  source 1..20: mol_type = other DNA
tgggtctacactgcctttat

SEQ ID NO: 40793 - DNA, 20 bp, synthetic construct
  misc_feature 1..20: note = chemically synthesized
  source 1..20: mol_type = other DNA
gagctgtaacgctcaccgcg

SEQ ID NO: 40794 - DNA, 20 bp, synthetic construct
  misc_feature 1..20: note = chemically synthesized
  source 1..20: mol_type = other DNA
agctgtaacgctcaccgcga

SEQ ID NO: 40795 - DNA, 20 bp, synthetic construct
  misc_feature 1..20: note = chemically synthesized
  source 1..20: mol_type = other DNA
acgctcaccgcgaaggtctg

SEQ ID NO: 40796 - DNA, 20 bp, synthetic construct
  misc_feature 1..20: note = chemically synthesized
  source 1..20: mol_type = other DNA
ggtctgcagcttcactcttg

SEQ ID NO: 40797 - DNA, 20 bp, synthetic construct
  misc_feature 1..20: note = chemically synthesized
  source 1..20: mol_type = other DNA
tgcagcttcactcttgaagc

SEQ ID NO: 40798 - DNA, 20 bp, synthetic construct
  misc_feature 1..20: note = chemically synthesized
  source 1..20: mol_type = other DNA
gcttcactcttgaagccagc

SEQ ID NO: 40799 - DNA, 20 bp, synthetic construct
  misc_feature 1..20: note = chemically synthesized
  source 1..20: mol_type = other DNA
cagcgagaccacgaacccac

SEQ ID NO: 40800 - DNA, 20 bp, synthetic construct
  misc_feature 1..20: note = chemically synthesized
  source 1..20: mol_type = other DNA
agcgagaccacgaacccacc

SEQ ID NO: 40801 - DNA, 20 bp, synthetic construct
  misc_feature 1..20: note = chemically synthesized
  source 1..20: mol_type = other DNA
cgagaccacgaacccaccgg

SEQ ID NO: 40802 - DNA, 20 bp, synthetic construct
  misc_feature 1..20: note = chemically synthesized
  source 1..20: mol_type = other DNA
gagaccacgaacccaccggg

SEQ ID NO: 40803 - DNA, 20 bp, synthetic construct
  misc_feature 1..20: note = chemically synthesized
  source 1..20: mol_type = other DNA
ccgggaggaacgaacaactc

SEQ ID NO: 40804 - DNA, 20 bp, synthetic construct
  misc_feature 1..20: note = chemically synthesized
  source 1..20: mol_type = other DNA
gggaggaacgaacaactcca

SEQ ID NO: 40805 - DNA, 20 bp, synthetic construct
  misc_feature 1..20: note = chemically synthesized
  source 1..20: mol_type = other DNA
ggaggaacgaacaactccag

SEQ ID NO: 40806 - DNA, 20 bp, synthetic construct
  misc_feature 1..20: note = chemically synthesized
  source 1..20: mol_type = other DNA
aactccagaggcgccgcctt

SEQ ID NO: 40807 - DNA, 20 bp, synthetic construct
  misc_feature 1..20: note = chemically synthesized
  source 1..20: mol_type = other DNA
ctccagaggcgccgccttaa

SEQ ID NO: 40808 - DNA, 20 bp, synthetic construct
  misc_feature 1..20: note = chemically synthesized
  source 1..20: mol_type = other DNA
agaggcgccgccttaagagc

SEQ ID NO: 40809 - DNA, 20 bp, synthetic construct
  misc_feature 1..20: note = chemically synthesized
  source 1..20: mol_type = other DNA
gagctggaacgttcactgtg

SEQ ID NO: 40810 - DNA, 20 bp, synthetic construct
  misc_feature 1..20: note = chemically synthesized
  source 1..20: mol_type = other DNA
agctggaacgttcactgtga

SEQ ID NO: 40811 - DNA, 20 bp, synthetic construct
  misc_feature 1..20: note = chemically synthesized
  source 1..20: mol_type = other DNA
acgttcactgtgaaggtctg

SEQ ID NO: 40812 - DNA, 20 bp, synthetic construct
  misc_feature 1..20: note = chemically synthesized
  source 1..20: mol_type = other DNA
aggtctgcagcttcactcct

SEQ ID NO: 40813 - DNA, 20 bp, synthetic construct
  misc_feature 1..20: note = chemically synthesized
  source 1..20: mol_type = other DNA
ctgcagcttcactcctgagc

SEQ ID NO: 40814 - DNA, 20 bp, synthetic construct
  misc_feature 1..20: note = chemically synthesized
  source 1..20: mol_type = other DNA
agcttcactcctgagccagc

SEQ ID NO: 40815 - DNA, 20 bp, synthetic construct
  misc_feature 1..20: note = chemically synthesized
  source 1..20: mol_type = other DNA
cagcgagaccacgaacccat

SEQ ID NO: 40816 - DNA, 20 bp, synthetic construct
  misc_feature 1..20: note = chemically synthesized
  source 1..20: mol_type = other DNA
cgagaccacgaacccatcag

SEQ ID NO: 40817 - DNA, 20 bp, synthetic construct
  misc_feature 1..20: note = chemically synthesized
  source 1..20: mol_type = other DNA
gagaccacgaacccatcaga

SEQ ID NO: 40818 - DNA, 20 bp, synthetic construct
  misc_feature 1..20: note = chemically synthesized
  source 1..20: mol_type = other DNA
accacgaacccatcagaagg

SEQ ID NO: 40819 - DNA, 20 bp, synthetic construct
  misc_feature 1..20: note = chemically synthesized
  source 1..20: mol_type = other DNA
ctccgaacacatccaaacat

SEQ ID NO: 40820 - DNA, 20 bp, synthetic construct
  misc_feature 1..20: note = chemically synthesized
  source 1..20: mol_type = other DNA
acgaacaaactccacacacg

SEQ ID NO: 40821 - DNA, 20 bp, synthetic construct
  misc_feature 1..20: note = chemically synthesized
  source 1..20: mol_type = other DNA
actccacacacgcagccttt

SEQ ID NO: 40822 - DNA, 20 bp, synthetic construct
  misc_feature 1..20: note = chemically synthesized
  source 1..20: mol_type = other DNA
agaactgtaacactcaccac

SEQ ID NO: 40823 - DNA, 20 bp, synthetic construct
  misc_feature 1..20: note = chemically synthesized
  source 1..20: mol_type = other DNA
gaactgtaacactcaccacg

SEQ ID NO: 40824 - DNA, 20 bp, synthetic construct
  misc_feature 1..20: note = chemically synthesized
  source 1..20: mol_type = other DNA
aactgtaacactcaccacga

SEQ ID NO: 40825 - DNA, 20 bp, synthetic construct
  misc_feature 1..20: note = chemically synthesized
  source 1..20: mol_type = other DNA
acactcaccacgagggtccc

SEQ ID NO: 40826 - DNA, 20 bp, synthetic construct
  misc_feature 1..20: note = chemically synthesized
  source 1..20: mol_type = other DNA
ggtccccggcttcattcttg

SEQ ID NO: 40827 - DNA, 20 bp, synthetic construct
  misc_feature 1..20: note = chemically synthesized
  source 1..20: mol_type = other DNA
cccggcttcattcttgaagt

SEQ ID NO: 40828 - DNA, 20 bp, synthetic construct
  misc_feature 1..20: note = chemically synthesized
  source 1..20: mol_type = other DNA
ttcttgaagtcagtgaaacc

SEQ ID NO: 40829 - DNA, 20 bp, synthetic construct
  misc_feature 1..20: note = chemically synthesized
  source 1..20: mol_type = other DNA
aaccaagaacccaccaattc

SEQ ID NO: 40830 - DNA, 20 bp, synthetic construct
  misc_feature 1..20: note = chemically synthesized
  source 1..20: mol_type = other DNA
gaacccaccaattccggaca

SEQ ID NO: 40831 - DNA, 20 bp, synthetic construct
  misc_feature 1..20: note = chemically synthesized
  source 1..20: mol_type = other DNA
caattccggacacagtatgt

SEQ ID NO: 40832 - DNA, 20 bp, synthetic construct
  misc_feature 1..20: note = chemically synthesized
  source 1..20: mol_type = other DNA
cagtatgtcagaaacaatat

SEQ ID NO: 40833 - DNA, 20 bp, synthetic construct
  misc_feature 1..20: note = chemically synthesized
  source 1..20: mol_type = other DNA
tacttctcaacaatttccaa

SEQ ID NO: 40834 - DNA, 20 bp, synthetic construct
  misc_feature 1..20: note = chemically synthesized
  source 1..20: mol_type = other DNA
aacagcccttgcaattaact

SEQ ID NO: 40835 - DNA, 20 bp, synthetic construct
  misc_feature 1..20: note = chemically synthesized
  source 1..20: mol_type = other DNA
aattaacttggccatgtgac

SEQ ID NO: 40836 - DNA, 20 bp, synthetic construct
  misc_feature 1..20: note = chemically synthesized
  source 1..20: mol_type = other DNA
tggttgtgactaaaataatg

SEQ ID NO: 40837 - DNA, 20 bp, synthetic construct
  misc_feature 1..20: note = chemically synthesized
  source 1..20: mol_type = other DNA
gttgtgactaaaataatgtg

SEQ ID NO: 40838 - DNA, 20 bp, synthetic construct
  misc_feature 1..20: note = chemically synthesized
  source 1..20: mol_type = other DNA
ataataatgtgttactccct

SEQ ID NO: 40839 - DNA, 20 bp, synthetic construct
  misc_feature 1..20: note = chemically synthesized
  source 1..20: mol_type = other DNA
taataatgtgttactcccta

SEQ ID NO: 40840 - DNA, 20 bp, synthetic construct
  misc_feature 1..20: note = chemically synthesized
  source 1..20: mol_type = other DNA
taatgtgttactccctaagg

SEQ ID NO: 40841 - DNA, 20 bp, synthetic construct
  misc_feature 1..20: note = chemically synthesized
  source 1..20: mol_type = other DNA
atgtgttactccctaaggca

SEQ ID NO: 40842 - DNA, 20 bp, synthetic construct
  misc_feature 1..20: note = chemically synthesized
  source 1..20: mol_type = other DNA
tctctttcccttcctctatg

SEQ ID NO: 40843 - DNA, 20 bp, synthetic construct
  misc_feature 1..20: note = chemically synthesized
  source 1..20: mol_type = other DNA
ctttcccttcctctatgtgg

SEQ ID NO: 40844 - DNA, 20 bp, synthetic construct
  misc_feature 1..20: note = chemically synthesized
  source 1..20: mol_type = other DNA
cccttcctctatgtggcaga

SEQ ID NO: 40845 - DNA, 20 bp, synthetic construct
  misc_feature 1..20: note = chemically synthesized
  source 1..20: mol_type = other DNA
ctctatgtggcagaaagtaa

SEQ ID NO: 40846 - DNA, 20 bp, synthetic construct
  misc_feature 1..20: note = chemically synthesized
  source 1..20: mol_type = other DNA
taaaagattctgaaatgata

SEQ ID NO: 40847 - DNA, 20 bp, synthetic construct
  misc_feature 1..20: note = chemically synthesized
  source 1..20: mol_type = other DNA
tgaaatgataaagtcaatca

SEQ ID NO: 40848 - DNA, 20 bp, synthetic construct
  misc_feature 1..20: note = chemically synthesized
  source 1..20: mol_type = other DNA
gaaatgataaagtcaatcac

SEQ ID NO: 40849 - DNA, 20 bp, synthetic construct
  misc_feature 1..20: note = chemically synthesized
  source 1..20: mol_type = other DNA
atgataaagtcaatcacagg

SEQ ID NO: 40850 - DNA, 20 bp, synthetic construct
  misc_feature 1..20: note = chemically synthesized
  source 1..20: mol_type = other DNA
tgataaagtcaatcacagga

SEQ ID NO: 40851 - DNA, 20 bp, synthetic construct
  misc_feature 1..20: note = chemically synthesized
  source 1..20: mol_type = other DNA
gtcaatcacaggaaggcacc

SEQ ID NO: 40852 - DNA, 20 bp, synthetic construct
  misc_feature 1..20: note = chemically synthesized
  source 1..20: mol_type = other DNA
caggaaggcacctggactcc

SEQ ID NO: 40853 - DNA, 20 bp, synthetic construct
  misc_feature 1..20: note = chemically synthesized
  source 1..20: mol_type = other DNA
tggactcctggcccactgct

SEQ ID NO: 40854 - DNA, 20 bp, synthetic construct
  misc_feature 1..20: note = chemically synthesized
  source 1..20: mol_type = other DNA
gactcctggcccactgcttg

SEQ ID NO: 40855 - DNA, 20 bp, synthetic construct
  misc_feature 1..20: note = chemically synthesized
  source 1..20: mol_type = other DNA
actcctggcccactgcttgg

SEQ ID NO: 40856 - DNA, 20 bp, synthetic construct
  misc_feature 1..20: note = chemically synthesized
  source 1..20: mol_type = other DNA
tcctggcccactgcttggag

SEQ ID NO: 40857 - DNA, 20 bp, synthetic construct
  misc_feature 1..20: note = chemically synthesized
  source 1..20: mol_type = other DNA
ctggcccactgcttggagga

SEQ ID NO: 40858 - DNA, 20 bp, synthetic construct
  misc_feature 1..20: note = chemically synthesized
  source 1..20: mol_type = other DNA
actgcttggaggagagcact

SEQ ID NO: 40859 - DNA, 20 bp, synthetic construct
  misc_feature 1..20: note = chemically synthesized
  source 1..20: mol_type = other DNA
ctgcttggaggagagcactc

SEQ ID NO: 40860 - DNA, 20 bp, synthetic construct
  misc_feature 1..20: note = chemically synthesized
  source 1..20: mol_type = other DNA
atgaacatctgactgtgacg

SEQ ID NO: 40861 - DNA, 20 bp, synthetic construct
  misc_feature 1..20: note = chemically synthesized
  source 1..20: mol_type = other DNA
ctgactgtgacgtagcaata

SEQ ID NO: 40862 - DNA, 20 bp, synthetic construct
  misc_feature 1..20: note = chemically synthesized
  source 1..20: mol_type = other DNA
atgaaactgcttaaaattaa

SEQ ID NO: 40863 - DNA, 20 bp, synthetic construct
  misc_feature 1..20: note = chemically synthesized
  source 1..20: mol_type = other DNA
ctgcttaaaattaatggcac

SEQ ID NO: 40864 - DNA, 20 bp, synthetic construct
  misc_feature 1..20: note = chemically synthesized
  source 1..20: mol_type = other DNA
tgcacatttgtctttatttg

SEQ ID NO: 40865 - DNA, 20 bp, synthetic construct
  misc_feature 1..20: note = chemically synthesized
  source 1..20: mol_type = other DNA
gcttccacatcaatccactc

SEQ ID NO: 40866 - DNA, 20 bp, synthetic construct
  misc_feature 1..20: note = chemically synthesized
  source 1..20: mol_type = other DNA
cttccacatcaatccactca

SEQ ID NO: 40867 - DNA, 20 bp, synthetic construct
  misc_feature 1..20: note = chemically synthesized
  source 1..20: mol_type = other DNA
ttctgctataatgcaatttc

SEQ ID NO: 40868 - DNA, 20 bp, synthetic construct
  misc_feature 1..20: note = chemically synthesized
  source 1..20: mol_type = other DNA
atgcaatttcaagttcttta

SEQ ID NO: 40869 - DNA, 20 bp, synthetic construct
  misc_feature 1..20: note = chemically synthesized
  source 1..20: mol_type = other DNA
tgcaatttcaagttctttac

SEQ ID NO: 40870 - DNA, 20 bp, synthetic construct
  misc_feature 1..20: note = chemically synthesized
  source 1..20: mol_type = other DNA
tttcaagttctttacaggcc

SEQ ID NO: 40871 - DNA, 20 bp, synthetic construct
  misc_feature 1..20: note = chemically synthesized
  source 1..20: mol_type = other DNA
tctgaattcctgacctccaa

SEQ ID NO: 40872 - DNA, 20 bp, synthetic construct
  misc_feature 1..20: note = chemically synthesized
  source 1..20: mol_type = other DNA
cctgacctccaaaagtgatc

SEQ ID NO: 40873 - DNA, 20 bp, synthetic construct
  misc_feature 1..20: note = chemically synthesized
  source 1..20: mol_type = other DNA
aaaagtgatcaagatatttt

SEQ ID NO: 40874 - DNA, 20 bp, synthetic construct
  misc_feature 1..20: note = chemically synthesized
  source 1..20: mol_type = other DNA
tgatcaagatatttttagtt

SEQ ID NO: 40875 - DNA, 20 bp, synthetic construct
  misc_feature 1..20: note = chemically synthesized
  source 1..20: mol_type = other DNA
gatcaagatatttttagttc

SEQ ID NO: 40876 - DNA, 20 bp, synthetic construct
  misc_feature 1..20: note = chemically synthesized
  source 1..20: mol_type = other DNA
ccaaaattttctcattttca

SEQ ID NO: 40877 - DNA, 20 bp, synthetic construct
  misc_feature 1..20: note = chemically synthesized
  source 1..20: mol_type = other DNA
caaaattttctcattttcat

SEQ ID NO: 40878 - DNA, 20 bp, synthetic construct
  misc_feature 1..20: note = chemically synthesized
  source 1..20: mol_type = other DNA
gatcattattcatgatttgc

SEQ ID NO: 40879 - DNA, 20 bp, synthetic construct
  misc_feature 1..20: note = chemically synthesized
  source 1..20: mol_type = other DNA
atcattattcatgatttgca

SEQ ID NO: 40880 - DNA, 20 bp, synthetic construct
  misc_feature 1..20: note = chemically synthesized
  source 1..20: mol_type = other DNA
atgacattttaactatgttc

SEQ ID NO: 40881 - DNA, 20 bp, synthetic construct
  misc_feature 1..20: note = chemically synthesized
  source 1..20: mol_type = other DNA
atgttccagatttttgaatg

SEQ ID NO: 40882 - DNA, 20 bp, synthetic construct
  misc_feature 1..20: note = chemically synthesized
  source 1..20: mol_type = other DNA
gttccagatttttgaatgaa

SEQ ID NO: 40883 - DNA, 20 bp, synthetic construct
  misc_feature 1..20: note = chemically synthesized
  source 1..20: mol_type = other DNA
atgttttcaccacaaaaaat

SEQ ID NO: 40884 - DNA, 20 bp, synthetic construct
  misc_feature 1..20: note = chemically synthesized
  source 1..20: mol_type = other DNA
ccacaaaaaataagtatgtg

SEQ ID NO: 40885 - DNA, 20 bp, synthetic construct
  misc_feature 1..20: note = chemically synthesized
  source 1..20: mol_type = other DNA
caaaaaataagtatgtgaag

SEQ ID NO: 40886 - DNA, 20 bp, synthetic construct
  misc_feature 1..20: note = chemically synthesized
  source 1..20: mol_type = other DNA
aaaataagtatgtgaagtgg

SEQ ID NO: 40887 - DNA, 20 bp, synthetic construct
  misc_feature 1..20: note = chemically synthesized
  source 1..20: mol_type = other DNA
gaagtggtggatttgttaat

SEQ ID NO: 40888 - DNA, 20 bp, synthetic construct
  misc_feature 1..20: note = chemically synthesized
  source 1..20: mol_type = other DNA
aatattgtacacgtacacca

SEQ ID NO: 40889 - DNA, 20 bp, synthetic construct
  misc_feature 1..20: note = chemically synthesized
  source 1..20: mol_type = other DNA
tgaaataataaaaaataaca

SEQ ID NO: 40890 - DNA, 20 bp, synthetic construct
  misc_feature 1..20: note = chemically synthesized
  source 1..20: mol_type = other DNA
gaaataataaaaaataacaa

SEQ ID NO: 40891 - DNA, 20 bp, synthetic construct
  misc_feature 1..20: note = chemically synthesized
  source 1..20: mol_type = other DNA
ataaaaaataacaaaggcat

SEQ ID NO: 40892 - DNA, 20 bp, synthetic construct
  misc_feature 1..20: note = chemically synthesized
  source 1..20: mol_type = other DNA
agcctctgcattgcctttac

SEQ ID NO: 40893 - DNA, 20 bp, synthetic construct
  misc_feature 1..20: note = chemically synthesized
  source 1..20: mol_type = other DNA
gcctttaccggtcatcctca

SEQ ID NO: 40894 - DNA, 20 bp, synthetic construct
  misc_feature 1..20: note = chemically synthesized
  source 1..20: mol_type = other DNA
atctttgatgcctctttgtc

SEQ ID NO: 40895 - DNA, 20 bp, synthetic construct
  misc_feature 1..20: note = chemically synthesized
  source 1..20: mol_type = other DNA
ttttctctacgttatttata

SEQ ID NO: 40896 - DNA, 20 bp, synthetic construct
  misc_feature 1..20: note = chemically synthesized
  source 1..20: mol_type = other DNA
tttctctacgttatttatat

SEQ ID NO: 40897 - DNA, 20 bp, synthetic construct
  misc_feature 1..20: note = chemically synthesized
  source 1..20: mol_type = other DNA
tatgggtatcatcaccatcc

SEQ ID NO: 40898 - DNA, 20 bp, synthetic construct
  misc_feature 1..20: note = chemically synthesized
  source 1..20: mol_type = other DNA
atcaccatcctggacaacat

SEQ ID NO: 40899 - DNA, 20 bp, synthetic construct
  misc_feature 1..20: note = chemically synthesized
  source 1..20: mol_type = other DNA
tcaccatcctggacaacatc

SEQ ID NO: 40900 - DNA, 20 bp, synthetic construct
  misc_feature 1..20: note = chemically synthesized
  source 1..20: mol_type = other DNA
catcctggacaacatcagga

SEQ ID NO: 40901 - DNA, 20 bp, synthetic construct
  misc_feature 1..20: note = chemically synthesized
  source 1..20: mol_type = other DNA
caggacagatatccctcacc

SEQ ID NO: 40902 - DNA, 20 bp, synthetic construct
  misc_feature 1..20: note = chemically synthesized
  source 1..20: mol_type = other DNA
gccaatgttcctctctatgt

SEQ ID NO: 40903 - DNA, 20 bp, synthetic construct
  misc_feature 1..20: note = chemically synthesized
  source 1..20: mol_type = other DNA
tcctttcaccaccctttcca

SEQ ID NO: 40904 - DNA, 20 bp, synthetic construct
  misc_feature 1..20: note = chemically synthesized
  source 1..20: mol_type = other DNA
accaccctttccacagtcaa

SEQ ID NO: 40905 - DNA, 20 bp, synthetic construct
  misc_feature 1..20: note = chemically synthesized
  source 1..20: mol_type = other DNA
ccaccctttccacagtcaaa

SEQ ID NO: 40906 - DNA, 20 bp, synthetic construct
  misc_feature 1..20: note = chemically synthesized
  source 1..20: mol_type = other DNA
ccacagtcaaaaggatattg

SEQ ID NO: 40907 - DNA, 20 bp, synthetic construct
  misc_feature 1..20: note = chemically synthesized
  source 1..20: mol_type = other DNA
gatattgtagtttaatgcct

SEQ ID NO: 40908 - DNA, 20 bp, synthetic construct
  misc_feature 1..20: note = chemically synthesized
  source 1..20: mol_type = other DNA
tattgtagtttaatgcctca

SEQ ID NO: 40909 - DNA, 20 bp, synthetic construct
  misc_feature 1..20: note = chemically synthesized
  source 1..20: mol_type = other DNA
tagtttaatgcctcagagtt

SEQ ID NO: 40910 - DNA, 20 bp, synthetic construct
  misc_feature 1..20: note = chemically synthesized
  source 1..20: mol_type = other DNA
tgcctcagagttcagctttt

SEQ ID NO: 40911 - DNA, 20 bp, synthetic construct
  misc_feature 1..20: note = chemically synthesized
  source 1..20: mol_type = other DNA
gacaaattattcttcctctt

SEQ ID NO: 40912 - DNA, 20 bp, synthetic construct
  misc_feature 1..20: note = chemically synthesized
  source 1..20: mol_type = other DNA
acaaattattcttcctcttt

SEQ ID NO: 40913 - DNA, 20 bp, synthetic construct
  misc_feature 1..20: note = chemically synthesized
  source 1..20: mol_type = other DNA
cctctttaggttctccttta

SEQ ID NO: 40914 - DNA, 20 bp, synthetic construct
  misc_feature 1..20: note = chemically synthesized
  source 1..20: mol_type = other DNA
tatggaatcttctgtactga

SEQ ID NO: 40915 - DNA, 20 bp, synthetic construct
  misc_feature 1..20: note = chemically synthesized
  source 1..20: mol_type = other DNA
catgtcctttaactactatg

SEQ ID NO: 40916 - DNA, 20 bp, synthetic construct
  misc_feature 1..20: note = chemically synthesized
  source 1..20: mol_type = other DNA
tattatgcctctacctttat

SEQ ID NO: 40917 - DNA, 20 bp, synthetic construct
  misc_feature 1..20: note = chemically synthesized
  source 1..20: mol_type = other DNA
tatgcctctacctttattag

SEQ ID NO: 40918 - DNA, 20 bp, synthetic construct
  misc_feature 1..20: note = chemically synthesized
  source 1..20: mol_type = other DNA
tgcctctacctttattagca

SEQ ID NO: 40919 - DNA, 20 bp, synthetic construct
  misc_feature 1..20: note = chemically synthesized
  source 1..20: mol_type = other DNA
agcagagttatctgtactgt

SEQ ID NO: 40920 - DNA, 20 bp, synthetic construct
  misc_feature 1..20: note = chemically synthesized
  source 1..20: mol_type = other DNA
ttctgctattcttgatcaaa

SEQ ID NO: 40921 - DNA, 20 bp, synthetic construct
  misc_feature 1..20: note = chemically synthesized
  source 1..20: mol_type = other DNA
tcatttctcctgccttcact

SEQ ID NO: 40922 - DNA, 20 bp, synthetic construct
  misc_feature 1..20: note = chemically synthesized
  source 1..20: mol_type = other DNA
tcacttggacgtgcttcacg

SEQ ID NO: 40923 - DNA, 20 bp, synthetic construct
  misc_feature 1..20: note = chemically synthesized
  source 1..20: mol_type = other DNA
acgtagtctgtgcttatgac

SEQ ID NO: 40924 - DNA, 20 bp, synthetic construct
  misc_feature 1..20: note = chemically synthesized
  source 1..20: mol_type = other DNA
gactggattaaaaattgata

SEQ ID NO: 40925 - DNA, 20 bp, synthetic construct
  misc_feature 1..20: note = chemically synthesized
  source 1..20: mol_type = other DNA
taatgttgttcgtcataata

SEQ ID NO: 40926 - DNA, 20 bp, synthetic construct
  misc_feature 1..20: note = chemically synthesized
  source 1..20: mol_type = other DNA
aatgttgttcgtcataatat

SEQ ID NO: 40927 - DNA, 20 bp, synthetic construct
  misc_feature 1..20: note = chemically synthesized
  source 1..20: mol_type = other DNA
tcgtcataatatgggtttta

SEQ ID NO: 40928 - DNA, 20 bp, synthetic construct
  misc_feature 1..20: note = chemically synthesized
  source 1..20: mol_type = other DNA
ttatttcctatgcattgatc

SEQ ID NO: 40929 - DNA, 20 bp, synthetic construct
  misc_feature 1..20: note = chemically synthesized
  source 1..20: mol_type = other DNA
atttcctatgcattgatctg

SEQ ID NO: 40930 - DNA, 20 bp, synthetic construct
  misc_feature 1..20: note = chemically synthesized
  source 1..20: mol_type = other DNA
tcctatgcattgatctggag

SEQ ID NO: 40931 - DNA, 20 bp, synthetic construct
  misc_feature 1..20: note = chemically synthesized
  source 1..20: mol_type = other DNA
cctatgcattgatctggaga

SEQ ID NO: 40932 - DNA, 20 bp, synthetic construct
  misc_feature 1..20: note = chemically synthesized
  source 1..20: mol_type = other DNA
ttcaatccttttactctttg

SEQ ID NO: 40933 - DNA, 20 bp, synthetic construct
  misc_feature 1..20: note = chemically synthesized
  source 1..20: mol_type = other DNA
gaaaatatctgtaaaccttc

SEQ ID NO: 40934 - DNA, 20 bp, synthetic construct
  misc_feature 1..20: note = chemically synthesized
  source 1..20: mol_type = other DNA
ccttctggttcactctgcta

SEQ ID NO: 40935 - DNA, 20 bp, synthetic construct
  misc_feature 1..20: note = chemically synthesized
  source 1..20: mol_type = other DNA
tcactctgctatagcaattt

SEQ ID NO: 40936 - DNA, 20 bp, synthetic construct
  misc_feature 1..20: note = chemically synthesized
  source 1..20: mol_type = other DNA
ctgctatagcaatttcagtt

SEQ ID NO: 40937 - DNA, 20 bp, synthetic construct
  misc_feature 1..20: note = chemically synthesized
  source 1..20: mol_type = other DNA
tgctatagcaatttcagttt

SEQ ID NO: 40938 - DNA, 20 bp, synthetic construct
  misc_feature 1..20: note = chemically synthesized
  source 1..20: mol_type = other DNA
atagcaatttcagtttaggc

SEQ ID NO: 40939 - DNA, 20 bp, synthetic construct
  misc_feature 1..20: note = chemically synthesized
  source 1..20: mol_type = other DNA
caatttcagtttaggctagt

SEQ ID NO: 40940 - DNA, 20 bp, synthetic construct
  misc_feature 1..20: note = chemically synthesized
  source 1..20: mol_type = other DNA
cagtttaggctagtaagcat

SEQ ID NO: 40941 - DNA, 20 bp, synthetic construct
  misc_feature 1..20: note = chemically synthesized
  source 1..20: mol_type = other DNA
agtttaggctagtaagcatg

SEQ ID NO: 40942 - DNA, 20 bp, synthetic construct
  misc_feature 1..20: note = chemically synthesized
  source 1..20: mol_type = other DNA
tccttctctgatttttccca

SEQ ID NO: 40943 - DNA, 20 bp, synthetic construct
  misc_feature 1..20: note = chemically synthesized
  source 1..20: mol_type = other DNA
tgatttttcccacagtctgt

SEQ ID NO: 40944 - DNA, 20 bp, synthetic construct
  misc_feature 1..20: note = chemically synthesized
  source 1..20: mol_type = other DNA
ttcccacagtctgttggtca

SEQ ID NO: 40945 - DNA, 20 bp, synthetic construct
  misc_feature 1..20: note = chemically synthesized
  source 1..20: mol_type = other DNA
tgttggtcacagaataacct

SEQ ID NO: 40946 - DNA, 20 bp, synthetic construct
  misc_feature 1..20: note = chemically synthesized
  source 1..20: mol_type = other DNA
acctgagtgattactgatga

SEQ ID NO: 40947 - DNA, 20 bp, synthetic construct
  misc_feature 1..20: note = chemically synthesized
  source 1..20: mol_type = other DNA
ctgagtgattactgatgaaa

SEQ ID NO: 40948 - DNA, 20 bp, synthetic construct
  misc_feature 1..20: note = chemically synthesized
  source 1..20: mol_type = other DNA
gtgattactgatgaaagagt

SEQ ID NO: 40949 - DNA, 20 bp, synthetic construct
  misc_feature 1..20: note = chemically synthesized
  source 1..20: mol_type = other DNA
aagagtgagaatgttattga

SEQ ID NO: 40950 - DNA, 20 bp, synthetic construct
  misc_feature 1..20: note = chemically synthesized
  source 1..20: mol_type = other DNA
tgacaaaaaacaaacaacta

SEQ ID NO: 40951 - DNA, 20 bp, synthetic construct
  misc_feature 1..20: note = chemically synthesized
  source 1..20: mol_type = other DNA
caaaatgtttctctttttat

SEQ ID NO: 40952 - DNA, 20 bp, synthetic construct
  misc_feature 1..20: note = chemically synthesized
  source 1..20: mol_type = other DNA
aatgtttctctttttattag

SEQ ID NO: 40953 - DNA, 20 bp, synthetic construct
  misc_feature 1..20: note = chemically synthesized
  source 1..20: mol_type = other DNA
tatatttcctgacctatatc

SEQ ID NO: 40954 - DNA, 20 bp, synthetic construct
  misc_feature 1..20: note = chemically synthesized
  source 1..20: mol_type = other DNA
atttcctgacctatatctgg

SEQ ID NO: 40955 - DNA, 20 bp, synthetic construct
  misc_feature 1..20: note = chemically synthesized
  source 1..20: mol_type = other DNA
tttcctgacctatatctggc

SEQ ID NO: 40956 - DNA, 20 bp, synthetic construct
  misc_feature 1..20: note = chemically synthesized
  source 1..20: mol_type = other DNA
ctatatctggcaggactctt

SEQ ID NO: 40957 - DNA, 20 bp, synthetic construct
  misc_feature 1..20: note = chemically synthesized
  source 1..20: mol_type = other DNA
atatctggcaggactcttta

SEQ ID NO: 40958 - DNA, 20 bp, synthetic construct
  misc_feature 1..20: note = chemically synthesized
  source 1..20: mol_type = other DNA
atctggcaggactctttaga

SEQ ID NO: 40959 - DNA, 20 bp, synthetic construct
  misc_feature 1..20: note = chemically synthesized
  source 1..20: mol_type = other DNA
tctggcaggactctttagag

SEQ ID NO: 40960 - DNA, 20 bp, synthetic construct
  misc_feature 1..20: note = chemically synthesized
  source 1..20: mol_type = other DNA
ggcaggactctttagagagg

SEQ ID NO: 40961 - DNA, 20 bp, synthetic construct
  misc_feature 1..20: note = chemically synthesized
  source 1..20: mol_type = other DNA
actctttagagaggtagctg

SEQ ID NO: 40962 - DNA, 20 bp, synthetic construct
  misc_feature 1..20: note = chemically synthesized
  source 1..20: mol_type = other DNA
gaagctgctgttatgaccac

SEQ ID NO: 40963 - DNA, 20 bp, synthetic construct
  misc_feature 1..20: note = chemically synthesized
  source 1..20: mol_type = other DNA
agctgctgttatgaccacta

SEQ ID NO: 40964 - DNA, 20 bp, synthetic construct
  misc_feature 1..20: note = chemically synthesized
  source 1..20: mol_type = other DNA
gctgctgttatgaccactag

SEQ ID NO: 40965 - DNA, 20 bp, synthetic construct
  misc_feature 1..20: note = chemically synthesized
  source 1..20: mol_type = other DNA
ctgctgttatgaccactaga

SEQ ID NO: 40966 - DNA, 20 bp, synthetic construct
  misc_feature 1..20: note = chemically synthesized
  source 1..20: mol_type = other DNA
ctgttatgaccactagaggg

SEQ ID NO: 40967 - DNA, 20 bp, synthetic construct
  misc_feature 1..20: note = chemically synthesized
  source 1..20: mol_type = other DNA
ttatgaccactagagggaag

SEQ ID NO: 40968 - DNA, 20 bp, synthetic construct
  misc_feature 1..20: note = chemically synthesized
  source 1..20: mol_type = other DNA
tagagggaagaagatacctg

SEQ ID NO: 40969 - DNA, 20 bp, synthetic construct
  misc_feature 1..20: note = chemically synthesized
  source 1..20: mol_type = other DNA
gagggaagaagatacctgtg

SEQ ID NO: 40970 - DNA, 20 bp, synthetic construct
  misc_feature 1..20: note = chemically synthesized
  source 1..20: mol_type = other DNA
gaagatacctgtggagctaa

SEQ ID NO: 40971 - DNA, 20 bp, synthetic construct
  misc_feature 1..20: note = chemically synthesized
  source 1..20: mol_type = other DNA
acctgtggagctaatggtcc

SEQ ID NO: 40972 - DNA, 20 bp, synthetic construct
  misc_feature 1..20: note = chemically synthesized
  source 1..20: mol_type = other DNA
gtggagctaatggtccaaga

SEQ ID NO: 40973 - DNA, 20 bp, synthetic construct
  misc_feature 1..20: note = chemically synthesized
  source 1..20: mol_type = other DNA
gagctaatggtccaagatgg

SEQ ID NO: 40974 - DNA, 20 bp, synthetic construct
  misc_feature 1..20: note = chemically synthesized
  source 1..20: mol_type = other DNA
gctaatggtccaagatggtg

SEQ ID NO: 40975 - DNA, 20 bp, synthetic construct
  misc_feature 1..20: note = chemically synthesized
  source 1..20: mol_type = other DNA
gtccaagatggtggagcccc

SEQ ID NO: 40976 - DNA, 20 bp, synthetic construct
  misc_feature 1..20: note = chemically synthesized
  source 1..20: mol_type = other DNA
aagatggtggagccccaagc

SEQ ID NO: 40977 - DNA, 20 bp, synthetic construct
  misc_feature 1..20: note = chemically synthesized
  source 1..20: mol_type = other DNA
agatggtggagccccaagca

SEQ ID NO: 40978 - DNA, 20 bp, synthetic construct
  misc_feature 1..20: note = chemically synthesized
  source 1..20: mol_type = other DNA
tggtggagccccaagcaagg

SEQ ID NO: 40979 - DNA, 20 bp, synthetic construct
  misc_feature 1..20: note = chemically synthesized
  source 1..20: mol_type = other DNA
ccccaagcaaggaagttgtt

SEQ ID NO: 40980 - DNA, 20 bp, synthetic construct
  misc_feature 1..20: note = chemically synthesized
  source 1..20: mol_type = other DNA
cccaagcaaggaagttgtta

SEQ ID NO: 40981 - DNA, 20 bp, synthetic construct
  misc_feature 1..20: note = chemically synthesized
  source 1..20: mol_type = other DNA
caagcaaggaagttgttaag

SEQ ID NO: 40982 - DNA, 20 bp, synthetic construct
  misc_feature 1..20: note = chemically synthesized
  source 1..20: mol_type = other DNA
ttaaggagcccttttgattg

SEQ ID NO: 40983 - DNA, 20 bp, synthetic construct
  misc_feature 1..20: note = chemically synthesized
  source 1..20: mol_type = other DNA
taaggagcccttttgattga

SEQ ID NO: 40984 - DNA, 20 bp, synthetic construct
  misc_feature 1..20: note = chemically synthesized
  source 1..20: mol_type = other DNA
ggagcccttttgattgaagg

SEQ ID NO: 40985 - DNA, 20 bp, synthetic construct
  misc_feature 1..20: note = chemically synthesized
  source 1..20: mol_type = other DNA
gagcccttttgattgaaggt

SEQ ID NO: 40986 - DNA, 20 bp, synthetic construct
  misc_feature 1..20: note = chemically synthesized
  source 1..20: mol_type = other DNA
aggtgggtgcccccacctta

SEQ ID NO: 40987 - DNA, 20 bp, synthetic construct
  misc_feature 1..20: note = chemically synthesized
  source 1..20: mol_type = other DNA
ggtgggtgcccccaccttac

SEQ ID NO: 40988 - DNA, 20 bp, synthetic construct
  misc_feature 1..20: note = chemically synthesized
  source 1..20: mol_type = other DNA
gtgggtgcccccaccttaca

SEQ ID NO: 40989 - DNA, 20 bp, synthetic construct
  misc_feature 1..20: note = chemically synthesized
  source 1..20: mol_type = other DNA
gtgcccccaccttacaggga

SEQ ID NO: 40990 - DNA, 20 bp, synthetic construct
  misc_feature 1..20: note = chemically synthesized
  source 1..20: mol_type = other DNA
tgcccccaccttacagggac

SEQ ID NO: 40991 - DNA, 20 bp, synthetic construct
  misc_feature 1..20: note = chemically synthesized
  source 1..20: mol_type = other DNA
ccttacagggacaggacatc

SEQ ID NO: 40992 - DNA, 20 bp, synthetic construct
  misc_feature 1..20: note = chemically synthesized
  source 1..20: mol_type = other DNA
ggacatctggatactcctcc

SEQ ID NO: 40993 - DNA, 20 bp, synthetic construct
  misc_feature 1..20: note = chemically synthesized
  source 1..20: mol_type = other DNA
gatactcctcccagtttctc

SEQ ID NO: 40994 - DNA, 20 bp, synthetic construct
  misc_feature 1..20: note = chemically synthesized
  source 1..20: mol_type = other DNA
cttccccatttctaataata

SEQ ID NO: 40995 - DNA, 20 bp, synthetic construct
  misc_feature 1..20: note = chemically synthesized
  source 1..20: mol_type = other DNA
ccatttctaataataaagca

SEQ ID NO: 40996 - DNA, 20 bp, synthetic construct
  misc_feature 1..20: note = chemically synthesized
  source 1..20: mol_type = other DNA
catttctaataataaagcaa

SEQ ID NO: 40997 - DNA, 20 bp, synthetic construct
  misc_feature 1..20: note = chemically synthesized
  source 1..20: mol_type = other DNA
tctaataataaagcaaaggc

SEQ ID NO: 40998 - DNA, 20 bp, synthetic construct
  misc_feature 1..20: note = chemically synthesized
  source 1..20: mol_type = other DNA
ataataaagcaaaggctagt

SEQ ID NO: 40999 - DNA, 20 bp, synthetic construct
  misc_feature 1..20: note = chemically synthesized
  source 1..20: mol_type = other DNA
taaagcaaaggctagttagt

SEQ ID NO: 41000 - DNA, 20 bp, synthetic construct
  misc_feature 1..20: note = chemically synthesized
  source 1..20: mol_type = other DNA
cttgcattttgaaaatgcca

SEQ ID NO: 41001 - DNA, 20 bp, synthetic construct
  misc_feature 1..20: note = chemically synthesized
  source 1..20: mol_type = other DNA
ttcaaaattatttcatacat

SEQ ID NO: 41002 - DNA, 20 bp, synthetic construct
  misc_feature 1..20: note = chemically synthesized
  source 1..20: mol_type = other DNA
catcggtctttctttatttc

SEQ ID NO: 41003 - DNA, 20 bp, synthetic construct
  misc_feature 1..20: note = chemically synthesized
  source 1..20: mol_type = other DNA
tcggtctttctttatttcaa

SEQ ID NO: 41004 - DNA, 20 bp, synthetic construct
  misc_feature 1..20: note = chemically synthesized
  source 1..20: mol_type = other DNA
ctttctttatttcaagagtc

SEQ ID NO: 41005 - DNA, 20 bp, synthetic construct
  misc_feature 1..20: note = chemically synthesized
  source 1..20: mol_type = other DNA
ttatttcaagagtccagaaa

SEQ ID NO: 41006 - DNA, 20 bp, synthetic construct
  misc_feature 1..20: note = chemically synthesized
  source 1..20: mol_type = other DNA
ttacctttgattcaatgtaa

SEQ ID NO: 41007 - DNA, 20 bp, synthetic construct
  misc_feature 1..20: note = chemically synthesized
  source 1..20: mol_type = other DNA
ctttgattcaatgtaatgga

SEQ ID NO: 41008 - DNA, 20 bp, synthetic construct
  misc_feature 1..20: note = chemically synthesized
  source 1..20: mol_type = other DNA
ttgattcaatgtaatggaaa

SEQ ID NO: 41009 - DNA, 20 bp, synthetic construct
  misc_feature 1..20: note = chemically synthesized
  source 1..20: mol_type = other DNA
gtaatggaaagagctctttc

SEQ ID NO: 41010 - DNA, 20 bp, synthetic construct
  misc_feature 1..20: note = chemically synthesized
  source 1..20: mol_type = other DNA
aatggaaagagctctttcaa

SEQ ID NO: 41011 - DNA, 20 bp, synthetic construct
  misc_feature 1..20: note = chemically synthesized
  source 1..20: mol_type = other DNA
gaaagagctctttcaagaga

SEQ ID NO: 41012 - DNA, 20 bp, synthetic construct
  misc_feature 1..20: note = chemically synthesized
  source 1..20: mol_type = other DNA
aagagctctttcaagagaca

SEQ ID NO: 41013 - DNA, 20 bp, synthetic construct
  misc_feature 1..20: note = chemically synthesized
  source 1..20: mol_type = other DNA
ctctttcaagagacagagaa

SEQ ID NO: 41014 - DNA, 20 bp, synthetic construct
  misc_feature 1..20: note = chemically synthesized
  source 1..20: mol_type = other DNA
catttctctctctcatttct

SEQ ID NO: 41015 - DNA, 20 bp, synthetic construct
  misc_feature 1..20: note = chemically synthesized
  source 1..20: mol_type = other DNA
ttctctctctcatttctcag

SEQ ID NO: 41016 - DNA, 20 bp, synthetic construct
  misc_feature 1..20: note = chemically synthesized
  source 1..20: mol_type = other DNA
ttctcagaagtatattttga

SEQ ID NO: 41017 - DNA, 20 bp, synthetic construct
  misc_feature 1..20: note = chemically synthesized
  source 1..20: mol_type = other DNA
tctcagaagtatattttgaa

SEQ ID NO: 41018 - DNA, 20 bp, synthetic construct
  misc_feature 1..20: note = chemically synthesized
  source 1..20: mol_type = other DNA
gtatattttgaaaggattca

SEQ ID NO: 41019 - DNA, 20 bp, synthetic construct
  misc_feature 1..20: note = chemically synthesized
  source 1..20: mol_type = other DNA
tattttgaaaggattcatag

SEQ ID NO: 41020 - DNA, 20 bp, synthetic construct
  misc_feature 1..20: note = chemically synthesized
  source 1..20: mol_type = other DNA
ttgaaaggattcatagcaga

SEQ ID NO: 41021 - DNA, 20 bp, synthetic construct
  misc_feature 1..20: note = chemically synthesized
  source 1..20: mol_type = other DNA
aggattcatagcagacagct

SEQ ID NO: 41022 - DNA, 20 bp, synthetic construct
  misc_feature 1..20: note = chemically synthesized
  source 1..20: mol_type = other DNA
ggattcatagcagacagcta

SEQ ID NO: 41023 - DNA, 20 bp, synthetic construct
  misc_feature 1..20: note = chemically synthesized
  source 1..20: mol_type = other DNA
tcatagcagacagctaaggc

SEQ ID NO: 41024 - DNA, 20 bp, synthetic construct
  misc_feature 1..20: note = chemically synthesized
  source 1..20: mol_type = other DNA
agctaaggctggttttttct

SEQ ID NO: 41025 - DNA, 20 bp, synthetic construct
  misc_feature 1..20: note = chemically synthesized
  source 1..20: mol_type = other DNA
aggctggttttttctaagtg

SEQ ID NO: 41026 - DNA, 20 bp, synthetic construct
  misc_feature 1..20: note = chemically synthesized
  source 1..20: mol_type = other DNA
ctggttttttctaagtgaag

SEQ ID NO: 41027 - DNA, 20 bp, synthetic construct
  misc_feature 1..20: note = chemically synthesized
  source 1..20: mol_type = other DNA
ctaagtgaagaagtgatatt

SEQ ID NO: 41028 - DNA, 20 bp, synthetic construct
  misc_feature 1..20: note = chemically synthesized
  source 1..20: mol_type = other DNA
agtgaagaagtgatattgag

SEQ ID NO: 41029 - DNA, 20 bp, synthetic construct
  misc_feature 1..20: note = chemically synthesized
  source 1..20: mol_type = other DNA
gtgaagaagtgatattgaga

SEQ ID NO: 41030 - DNA, 20 bp, synthetic construct
  misc_feature 1..20: note = chemically synthesized
  source 1..20: mol_type = other DNA
aagaagtgatattgagaagg

SEQ ID NO: 41031 - DNA, 20 bp, synthetic construct
  misc_feature 1..20: note = chemically synthesized
  source 1..20: mol_type = other DNA
agaagtgatattgagaaggt

SEQ ID NO: 41032 - DNA, 20 bp, synthetic construct
  misc_feature 1..20: note = chemically synthesized
  source 1..20: mol_type = other DNA
gaagtgatattgagaaggta

SEQ ID NO: 41033 - DNA, 20 bp, synthetic construct
  misc_feature 1..20: note = chemically synthesized
  source 1..20: mol_type = other DNA
ttgagaaggtagggttgcat

SEQ ID NO: 41034 - DNA, 20 bp, synthetic construct
  misc_feature 1..20: note = chemically synthesized
  source 1..20: mol_type = other DNA
tagggttgcatgagcccttt

SEQ ID NO: 41035 - DNA, 20 bp, synthetic construct
  misc_feature 1..20: note = chemically synthesized
  source 1..20: mol_type = other DNA
catgagccctttcagttttt

SEQ ID NO: 41036 - DNA, 20 bp, synthetic construct
  misc_feature 1..20: note = chemically synthesized
  source 1..20: mol_type = other DNA
tttatatacatctgtattgt

SEQ ID NO: 41037 - DNA, 20 bp, synthetic construct
  misc_feature 1..20: note = chemically synthesized
  source 1..20: mol_type = other DNA
atataaataaaattatttct

SEQ ID NO: 41038 - DNA, 20 bp, synthetic construct
  misc_feature 1..20: note = chemically synthesized
  source 1..20: mol_type = other DNA
attatttctcagttatatac

SEQ ID NO: 41039 - DNA, 20 bp, synthetic construct
  misc_feature 1..20: note = chemically synthesized
  source 1..20: mol_type = other DNA
tatactagctatgtaacctg

SEQ ID NO: 41040 - DNA, 20 bp, synthetic construct
  misc_feature 1..20: note = chemically synthesized
  source 1..20: mol_type = other DNA
taacctgtggatatttcctt

SEQ ID NO: 41041 - DNA, 20 bp, synthetic construct
  misc_feature 1..20: note = chemically synthesized
  source 1..20: mol_type = other DNA
gatatttccttaagtattac

SEQ ID NO: 41042 - DNA, 20 bp, synthetic construct
  misc_feature 1..20: note = chemically synthesized
  source 1..20: mol_type = other DNA
caagctatacttaactcact

SEQ ID NO: 41043 - DNA, 20 bp, synthetic construct
  misc_feature 1..20: note = chemically synthesized
  source 1..20: mol_type = other DNA
tcaaataaatacctgcttca

SEQ ID NO: 41044 - DNA, 20 bp, synthetic construct
  misc_feature 1..20: note = chemically synthesized
  source 1..20: mol_type = other DNA
cctgcttcatagttattaat

SEQ ID NO: 41045 - DNA, 20 bp, synthetic construct
  misc_feature 1..20: note = chemically synthesized
  source 1..20: mol_type = other DNA
ctgcttcatagttattaata

SEQ ID NO: 41046 - DNA, 20 bp, synthetic construct
  misc_feature 1..20: note = chemically synthesized
  source 1..20: mol_type = other DNA
catagttattaataaggatt

SEQ ID NO: 41047 - DNA, 20 bp, synthetic construct
  misc_feature 1..20: note = chemically synthesized
  source 1..20: mol_type = other DNA
gttattaataaggattaagt

SEQ ID NO: 41048 - DNA, 20 bp, synthetic construct
  misc_feature 1..20: note = chemically synthesized
  source 1..20: mol_type = other DNA
ttaagtgagataatgcccat

SEQ ID NO: 41049 - DNA, 20 bp, synthetic construct
  misc_feature 1..20: note = chemically synthesized
  source 1..20: mol_type = other DNA
cataagattcctattaataa

SEQ ID NO: 41050 - DNA, 20 bp, synthetic construct
  misc_feature 1..20: note = chemically synthesized
  source 1..20: mol_type = other DNA
tacacacacacacacattga

SEQ ID NO: 41051 - DNA, 20 bp, synthetic construct
  misc_feature 1..20: note = chemically synthesized
  source 1..20: mol_type = other DNA
acacacacacacacattgaa

SEQ ID NO: 41052 - DNA, 20 bp, synthetic construct
  misc_feature 1..20: note = chemically synthesized
  source 1..20: mol_type = other DNA
aaaggattcttactttgtgc

SEQ ID NO: 41053 - DNA, 20 bp, synthetic construct
  misc_feature 1..20: note = chemically synthesized
  source 1..20: mol_type = other DNA
aaggattcttactttgtgct

SEQ ID NO: 41054 - DNA, 20 bp, synthetic construct
  misc_feature 1..20: note = chemically synthesized
  source 1..20: mol_type = other DNA
tttgtgctaggaactataat

SEQ ID NO: 41055 - DNA, 20 bp, synthetic construct
  misc_feature 1..20: note = chemically synthesized
  source 1..20: mol_type = other DNA
cattgatgcattatatcatt

SEQ ID NO: 41056 - DNA, 20 bp, synthetic construct
  misc_feature 1..20: note = chemically synthesized
  source 1..20: mol_type = other DNA
ttaagttctaatttcaacac

SEQ ID NO: 41057 - DNA, 20 bp, synthetic construct
  misc_feature 1..20: note = chemically synthesized
  source 1..20: mol_type = other DNA
agttctaatttcaacactag

SEQ ID NO: 41058 - DNA, 20 bp, synthetic construct
  misc_feature 1..20: note = chemically synthesized
  source 1..20: mol_type = other DNA
gttctaatttcaacactaga

SEQ ID NO: 41059 - DNA, 20 bp, synthetic construct
  misc_feature 1..20: note = chemically synthesized
  source 1..20: mol_type = other DNA
ctaatttcaacactagaagg

SEQ ID NO: 41060 - DNA, 20 bp, synthetic construct
  misc_feature 1..20: note = chemically synthesized
  source 1..20: mol_type = other DNA
taatttcaacactagaaggc

SEQ ID NO: 41061 - DNA, 20 bp, synthetic construct
  misc_feature 1..20: note = chemically synthesized
  source 1..20: mol_type = other DNA
gtattatctaaatttcatac

SEQ ID NO: 41062 - DNA, 20 bp, synthetic construct
  misc_feature 1..20: note = chemically synthesized
  source 1..20: mol_type = other DNA
tggatacctccaaactcata

SEQ ID NO: 41063 - DNA, 20 bp, synthetic construct
  misc_feature 1..20: note = chemically synthesized
  source 1..20: mol_type = other DNA
tttgtcatatatttattcaa

SEQ ID NO: 41064 - DNA, 20 bp, synthetic construct
  misc_feature 1..20: note = chemically synthesized
  source 1..20: mol_type = other DNA
ttgtcatatatttattcaaa

SEQ ID NO: 41065 - DNA, 20 bp, synthetic construct
  misc_feature 1..20: note = chemically synthesized
  source 1..20: mol_type = other DNA
tgtcatatatttattcaaaa

SEQ ID NO: 41066 - DNA, 20 bp, synthetic construct
  misc_feature 1..20: note = chemically synthesized
  source 1..20: mol_type = other DNA
aaaagggtaaactcaaacta

SEQ ID NO: 41067 - DNA, 20 bp, synthetic construct
  misc_feature 1..20: note = chemically synthesized
  source 1..20: mol_type = other DNA
tattttataaaattattctc

SEQ ID NO: 41068 - DNA, 20 bp, synthetic construct
  misc_feature 1..20: note = chemically synthesized
  source 1..20: mol_type = other DNA
aattattctcaagttattat

SEQ ID NO: 41069 - DNA, 20 bp, synthetic construct
  misc_feature 1..20: note = chemically synthesized
  source 1..20: mol_type = other DNA
attattctcaagttattatg

SEQ ID NO: 41070 - DNA, 20 bp, synthetic construct
  misc_feature 1..20: note = chemically synthesized
  source 1..20: mol_type = other DNA
agttattatgaggatgttga

SEQ ID NO: 41071 - DNA, 20 bp, synthetic construct
  misc_feature 1..20: note = chemically synthesized
  source 1..20: mol_type = other DNA
attatgaggatgttgaaaga

SEQ ID NO: 41072 - DNA, 20 bp, synthetic construct
  misc_feature 1..20: note = chemically synthesized
  source 1..20: mol_type = other DNA
tatgaggatgttgaaagaca

SEQ ID NO: 41073 - DNA, 20 bp, synthetic construct
  misc_feature 1..20: note = chemically synthesized
  source 1..20: mol_type = other DNA
tgaggatgttgaaagacaga

SEQ ID NO: 41074 - DNA, 20 bp, synthetic construct
  misc_feature 1..20: note = chemically synthesized
  source 1..20: mol_type = other DNA
gaggatgttgaaagacagag

SEQ ID NO: 41075 - DNA, 20 bp, synthetic construct
  misc_feature 1..20: note = chemically synthesized
  source 1..20: mol_type = other DNA
atgttgaaagacagagagga

SEQ ID NO: 41076 - DNA, 20 bp, synthetic construct
  misc_feature 1..20: note = chemically synthesized
  source 1..20: mol_type = other DNA
tgttgaaagacagagaggat

SEQ ID NO: 41077 - DNA, 20 bp, synthetic construct
  misc_feature 1..20: note = chemically synthesized
  source 1..20: mol_type = other DNA
gttgaaagacagagaggatg

SEQ ID NO: 41078 - DNA, 20 bp, synthetic construct
  misc_feature 1..20: note = chemically synthesized
  source 1..20: mol_type = other DNA
tggggtgctatgccccaaat

SEQ ID NO: 41079 - DNA, 20 bp, synthetic construct
  misc_feature 1..20: note = chemically synthesized
  source 1..20: mol_type = other DNA
cccaaatcagcctcacaatt

SEQ ID NO: 41080 - DNA, 20 bp, synthetic construct
  misc_feature 1..20: note = chemically synthesized
  source 1..20: mol_type = other DNA
atcagcctcacaattaagct

SEQ ID NO: 41081 - DNA, 20 bp, synthetic construct
  misc_feature 1..20: note = chemically synthesized
  source 1..20: mol_type = other DNA
agcctcacaattaagctaag

SEQ ID NO: 41082 - DNA, 20 bp, synthetic construct
  misc_feature 1..20: note = chemically synthesized
  source 1..20: mol_type = other DNA
cacaattaagctaagcagct

SEQ ID NO: 41083 - DNA, 20 bp, synthetic construct
  misc_feature 1..20: note = chemically synthesized
  source 1..20: mol_type = other DNA
caattaagctaagcagctaa

SEQ ID NO: 41084 - DNA, 20 bp, synthetic construct
  misc_feature 1..20: note = chemically synthesized
  source 1..20: mol_type = other DNA
ctaagcagctaagagtcttg

SEQ ID NO: 41085 - DNA, 20 bp, synthetic construct
  misc_feature 1..20: note = chemically synthesized
  source 1..20: mol_type = other DNA
taagcagctaagagtcttgc

SEQ ID NO: 41086 - DNA, 20 bp, synthetic construct
  misc_feature 1..20: note = chemically synthesized
  source 1..20: mol_type = other DNA
aagcagctaagagtcttgca

SEQ ID NO: 41087 - DNA, 20 bp, synthetic construct
  misc_feature 1..20: note = chemically synthesized
  source 1..20: mol_type = other DNA
cagctaagagtcttgcaggg

SEQ ID NO: 41088 - DNA, 20 bp, synthetic construct
  misc_feature 1..20: note = chemically synthesized
  source 1..20: mol_type = other DNA
aagagtcttgcagggtagtg

SEQ ID NO: 41089 - DNA, 20 bp, synthetic construct
  misc_feature 1..20: note = chemically synthesized
  source 1..20: mol_type = other DNA
agagtcttgcagggtagtgt

SEQ ID NO: 41090 - DNA, 20 bp, synthetic construct
  misc_feature 1..20: note = chemically synthesized
  source 1..20: mol_type = other DNA
gagtcttgcagggtagtgta

SEQ ID NO: 41091 - DNA, 20 bp, synthetic construct
  misc_feature 1..20: note = chemically synthesized
  source 1..20: mol_type = other DNA
gcagggtagtgtagggacca

SEQ ID NO: 41092 - DNA, 20 bp, synthetic construct
  misc_feature 1..20: note = chemically synthesized
  source 1..20: mol_type = other DNA
cagggtagtgtagggaccac

SEQ ID NO: 41093 - DNA, 20 bp, synthetic construct
  misc_feature 1..20: note = chemically synthesized
  source 1..20: mol_type = other DNA
agggtagtgtagggaccaca

SEQ ID NO: 41094 - DNA, 20 bp, synthetic construct
  misc_feature 1..20: note = chemically synthesized
  source 1..20: mol_type = other DNA
agtgtagggaccacagggtt

SEQ ID NO: 41095 - DNA, 20 bp, synthetic construct
  misc_feature 1..20: note = chemically synthesized
  source 1..20: mol_type = other DNA
gtgtagggaccacagggtta

SEQ ID NO: 41096 - DNA, 20 bp, synthetic construct
  misc_feature 1..20: note = chemically synthesized
  source 1..20: mol_type = other DNA
tgtagggaccacagggttaa

SEQ ID NO: 41097 - DNA, 20 bp, synthetic construct
  misc_feature 1..20: note = chemically synthesized
  source 1..20: mol_type = other DNA
gtagggaccacagggttaag

SEQ ID NO: 41098 - DNA, 20 bp, synthetic construct
  misc_feature 1..20: note = chemically synthesized
  source 1..20: mol_type = other DNA
tagggaccacagggttaagg

SEQ ID NO: 41099 - DNA, 20 bp, synthetic construct
  misc_feature 1..20: note = chemically synthesized
  source 1..20: mol_type = other DNA
ggaccacagggttaaggggg

SEQ ID NO: 41100 - DNA, 20 bp, synthetic construct
  misc_feature 1..20: note = chemically synthesized
  source 1..20: mol_type = other DNA
ccacagggttaagggggcag

SEQ ID NO: 41101 - DNA, 20 bp, synthetic construct
  misc_feature 1..20: note = chemically synthesized
  source 1..20: mol_type = other DNA
gtagaattatactcccactt

SEQ ID NO: 41102 - DNA, 20 bp, synthetic construct
  misc_feature 1..20: note = chemically synthesized
  source 1..20: mol_type = other DNA
tcaaacaatccatacacaca

SEQ ID NO: 41103 - DNA, 20 bp, synthetic construct
  misc_feature 1..20: note = chemically synthesized
  source 1..20: mol_type = other DNA
atccatacacacacagccct

SEQ ID NO: 41104 - DNA, 20 bp, synthetic construct
  misc_feature 1..20: note = chemically synthesized
  source 1..20: mol_type = other DNA
ttttgtttaaatgtataaat

SEQ ID NO: 41105 - DNA, 20 bp, synthetic construct
  misc_feature 1..20: note = chemically synthesized
  source 1..20: mol_type = other DNA
tgtttaaatgtataaataag

SEQ ID NO: 41106 - DNA, 20 bp, synthetic construct
  misc_feature 1..20: note = chemically synthesized
  source 1..20: mol_type = other DNA
atgtataaataagtggatga

SEQ ID NO: 41107 - DNA, 20 bp, synthetic construct
  misc_feature 1..20: note = chemically synthesized
  source 1..20: mol_type = other DNA
taaataagtggatgaaagaa

SEQ ID NO: 41108 - DNA, 20 bp, synthetic construct
  misc_feature 1..20: note = chemically synthesized
  source 1..20: mol_type = other DNA
taagtggatgaaagaataga

SEQ ID NO: 41109 - DNA, 20 bp, synthetic construct
  misc_feature 1..20: note = chemically synthesized
  source 1..20: mol_type = other DNA
tggatgaaagaatagataga

SEQ ID NO: 41110 - DNA, 20 bp, synthetic construct
  misc_feature 1..20: note = chemically synthesized
  source 1..20: mol_type = other DNA
tgaaagaatagatagataga

SEQ ID NO: 41111 - DNA, 20 bp, synthetic construct
  misc_feature 1..20: note = chemically synthesized
  source 1..20: mol_type = other DNA
agaatagatagatagataga

SEQ ID NO: 41112 - DNA, 20 bp, synthetic construct
  misc_feature 1..20: note = chemically synthesized
  source 1..20: mol_type = other DNA
tagatagatagatagacaga

SEQ ID NO: 41113 - DNA, 20 bp, synthetic construct
  misc_feature 1..20: note = chemically synthesized
  source 1..20: mol_type = other DNA
atagatagacagatagatga

SEQ ID NO: 41114 - DNA, 20 bp, synthetic construct
  misc_feature 1..20: note = chemically synthesized
  source 1..20: mol_type = other DNA
atagacagatagatgataga

SEQ ID NO: 41115 - DNA, 20 bp, synthetic construct
  misc_feature 1..20: note = chemically synthesized
  source 1..20: mol_type = other DNA
agaataaatgcttgccttca

SEQ ID NO: 41116 - DNA, 20 bp, synthetic construct
  misc_feature 1..20: note = chemically synthesized
  source 1..20: mol_type = other DNA
ttgttcaaaatgttcctgtc

SEQ ID NO: 41117 - DNA, 20 bp, synthetic construct
  misc_feature 1..20: note = chemically synthesized
  source 1..20: mol_type = other DNA
aaatgttcctgtccagacca

SEQ ID NO: 41118 - DNA, 20 bp, synthetic construct
  misc_feature 1..20: note = chemically synthesized
  source 1..20: mol_type = other DNA
aaagtaccttgccttcactt

SEQ ID NO: 41119 - DNA, 20 bp, synthetic construct
  misc_feature 1..20: note = chemically synthesized
  source 1..20: mol_type = other DNA
tcacttaagtaatcaattcc

SEQ ID NO: 41120 - DNA, 20 bp, synthetic construct
  misc_feature 1..20: note = chemically synthesized
  source 1..20: mol_type = other DNA
cacttaagtaatcaattcct

SEQ ID NO: 41121 - DNA, 20 bp, synthetic construct
  misc_feature 1..20: note = chemically synthesized
  source 1..20: mol_type = other DNA
taggttatattctgatgtca

SEQ ID NO: 41122 - DNA, 20 bp, synthetic construct
  misc_feature 1..20: note = chemically synthesized
  source 1..20: mol_type = other DNA
aggttatattctgatgtcaa

SEQ ID NO: 41123 - DNA, 20 bp, synthetic construct
  misc_feature 1..20: note = chemically synthesized
  source 1..20: mol_type = other DNA
ttatattctgatgtcaaagg

SEQ ID NO: 41124 - DNA, 20 bp, synthetic construct
  misc_feature 1..20: note = chemically synthesized
  source 1..20: mol_type = other DNA
ctgatgtcaaaggaagtcaa

SEQ ID NO: 41125 - DNA, 20 bp, synthetic construct
  misc_feature 1..20: note = chemically synthesized
  source 1..20: mol_type = other DNA
gacccacaactcatgctttg

SEQ ID NO: 41126 - DNA, 20 bp, synthetic construct
  misc_feature 1..20: note = chemically synthesized
  source 1..20: mol_type = other DNA
actcatgctttgtagatgac

SEQ ID NO: 41127 - DNA, 20 bp, synthetic construct
  misc_feature 1..20: note = chemically synthesized
  source 1..20: mol_type = other DNA
atgactagatcaaaaaattt

SEQ ID NO: 41128 - DNA, 20 bp, synthetic construct
  misc_feature 1..20: note = chemically synthesized
  source 1..20: mol_type = other DNA
aaatttcagccatatcttaa

SEQ ID NO: 41129 - DNA, 20 bp, synthetic construct
  misc_feature 1..20: note = chemically synthesized
  source 1..20: mol_type = other DNA
ttcagccatatcttaacagt

SEQ ID NO: 41130 - DNA, 20 bp, synthetic construct
  misc_feature 1..20: note = chemically synthesized
  source 1..20: mol_type = other DNA
atatcttaacagtgagtgaa

SEQ ID NO: 41131 - DNA, 20 bp, synthetic construct
  misc_feature 1..20: note = chemically synthesized
  source 1..20: mol_type = other DNA
tatcttaacagtgagtgaac

SEQ ID NO: 41132 - DNA, 20 bp, synthetic construct
  misc_feature 1..20: note = chemically synthesized
  source 1..20: mol_type = other DNA
ctcctcttttccctacatct

SEQ ID NO: 41133 - DNA, 20 bp, synthetic construct
  misc_feature 1..20: note = chemically synthesized
  source 1..20: mol_type = other DNA
tttccctacatctgagatcc

SEQ ID NO: 41134 - DNA, 20 bp, synthetic construct
  misc_feature 1..20: note = chemically synthesized
  source 1..20: mol_type = other DNA
catctgagatcccagcttct

SEQ ID NO: 41135 - DNA, 20 bp, synthetic construct
  misc_feature 1..20: note = chemically synthesized
  source 1..20: mol_type = other DNA
aattctcactcttgatgcaa

SEQ ID NO: 41136 - DNA, 20 bp, synthetic construct
  misc_feature 1..20: note = chemically synthesized
  source 1..20: mol_type = other DNA
actcttgatgcaacagacct

SEQ ID NO: 41137 - DNA, 20 bp, synthetic construct
  misc_feature 1..20: note = chemically synthesized
  source 1..20: mol_type = other DNA
cttgatgcaacagaccttgg

SEQ ID NO: 41138 - DNA, 20 bp, synthetic construct
  misc_feature 1..20: note = chemically synthesized
  source 1..20: mol_type = other DNA
caacagaccttggaagcata

SEQ ID NO: 41139 - DNA, 20 bp, synthetic construct
  misc_feature 1..20: note = chemically synthesized
  source 1..20: mol_type = other DNA
aacagaccttggaagcatac

SEQ ID NO: 41140 - DNA, 20 bp, synthetic construct
  misc_feature 1..20: note = chemically synthesized
  source 1..20: mol_type = other DNA
cagaccttggaagcatacag

SEQ ID NO: 41141 - DNA, 20 bp, synthetic construct
  misc_feature 1..20: note = chemically synthesized
  source 1..20: mol_type = other DNA
gaccttggaagcatacagga

SEQ ID NO: 41142 - DNA, 20 bp, synthetic construct
  misc_feature 1..20: note = chemically synthesized
  source 1..20: mol_type = other DNA
gcatacaggagagctgaact

SEQ ID NO: 41143 - DNA, 20 bp, synthetic construct
  misc_feature 1..20: note = chemically synthesized
  source 1..20: mol_type = other DNA
agagctgaacttggtcaaca

SEQ ID NO: 41144 - DNA, 20 bp, synthetic construct
  misc_feature 1..20: note = chemically synthesized
  source 1..20: mol_type = other DNA
gagctgaacttggtcaacaa

SEQ ID NO: 41145 - DNA, 20 bp, synthetic construct
  misc_feature 1..20: note = chemically synthesized
  source 1..20: mol_type = other DNA
gctgaacttggtcaacaaag

SEQ ID NO: 41146 - DNA, 20 bp, synthetic construct
  misc_feature 1..20: note = chemically synthesized
  source 1..20: mol_type = other DNA
acttggtcaacaaaggagaa

SEQ ID NO: 41147 - DNA, 20 bp, synthetic construct
  misc_feature 1..20: note = chemically synthesized
  source 1..20: mol_type = other DNA
aacaaaggagaaaagtttgt

SEQ ID NO: 41148 - DNA, 20 bp, synthetic construct
  misc_feature 1..20: note = chemically synthesized
  source 1..20: mol_type = other DNA
gaaaagtttgttggcctcca

SEQ ID NO: 41149 - DNA, 20 bp, synthetic construct
  misc_feature 1..20: note = chemically synthesized
  source 1..20: mol_type = other DNA
aaaagtttgttggcctccaa

SEQ ID NO: 41150 - DNA, 20 bp, synthetic construct
  misc_feature 1..20: note = chemically synthesized
  source 1..20: mol_type = other DNA
tttgttggcctccaaaggca

SEQ ID NO: 41151 - DNA, 20 bp, synthetic construct
  misc_feature 1..20: note = chemically synthesized
  source 1..20: mol_type = other DNA
aggcacagctcaaacttttc

SEQ ID NO: 41152 - DNA, 20 bp, synthetic construct
  misc_feature 1..20: note = chemically synthesized
  source 1..20: mol_type = other DNA
tcaagccttctctaatctta

SEQ ID NO: 41153 - DNA, 20 bp, synthetic construct
  misc_feature 1..20: note = chemically synthesized
  source 1..20: mol_type = other DNA
caagccttctctaatcttaa

SEQ ID NO: 41154 - DNA, 20 bp, synthetic construct
  misc_feature 1..20: note = chemically synthesized
  source 1..20: mol_type = other DNA
ctctaatcttaaaggtaaac

SEQ ID NO: 41155 - DNA, 20 bp, synthetic construct
  misc_feature 1..20: note = chemically synthesized
  source 1..20: mol_type = other DNA
tctaatcttaaaggtaaaca

SEQ ID NO: 41156 - DNA, 20 bp, synthetic construct
  misc_feature 1..20: note = chemically synthesized
  source 1..20: mol_type = other DNA
ctaatcttaaaggtaaacaa

SEQ ID NO: 41157 - DNA, 20 bp, synthetic construct
  misc_feature 1..20: note = chemically synthesized
  source 1..20: mol_type = other DNA
aacaagggtctcatttcttt

SEQ ID NO: 41158 - DNA, 20 bp, synthetic construct
  misc_feature 1..20: note = chemically synthesized
  source 1..20: mol_type = other DNA
tctcatttctttgagaactt

SEQ ID NO: 41159 - DNA, 20 bp, synthetic construct
  misc_feature 1..20: note = chemically synthesized
  source 1..20: mol_type = other DNA
ctcatttctttgagaacttc

SEQ ID NO: 41160 - DNA, 20 bp, synthetic construct
  misc_feature 1..20: note = chemically synthesized
  source 1..20: mol_type = other DNA
tcatttctttgagaacttca

SEQ ID NO: 41161 - DNA, 20 bp, synthetic construct
  misc_feature 1..20: note = chemically synthesized
  source 1..20: mol_type = other DNA
tttgagaacttcagggaaaa

SEQ ID NO: 41162 - DNA, 20 bp, synthetic construct
  misc_feature 1..20: note = chemically synthesized
  source 1..20: mol_type = other DNA
gaacttcagggaaaatagac

SEQ ID NO: 41163 - DNA, 20 bp, synthetic construct
  misc_feature 1..20: note = chemically synthesized
  source 1..20: mol_type = other DNA
aacttcagggaaaatagaca

SEQ ID NO: 41164 - DNA, 20 bp, synthetic construct
  misc_feature 1..20: note = chemically synthesized
  source 1..20: mol_type = other DNA
aaaatagacaaggacttgcc

SEQ ID NO: 41165 - DNA, 20 bp, synthetic construct
  misc_feature 1..20: note = chemically synthesized
  source 1..20: mol_type = other DNA
aaggacttgcctggtgcttt

SEQ ID NO: 41166 - DNA, 20 bp, synthetic construct
  misc_feature 1..20: note = chemically synthesized
  source 1..20: mol_type = other DNA
gacttgcctggtgcttttgg

SEQ ID NO: 41167 - DNA, 20 bp, synthetic construct
  misc_feature 1..20: note = chemically synthesized
  source 1..20: mol_type = other DNA
acttgcctggtgcttttggt

SEQ ID NO: 41168 - DNA, 20 bp, synthetic construct
  misc_feature 1..20: note = chemically synthesized
  source 1..20: mol_type = other DNA
cttgcctggtgcttttggta

SEQ ID NO: 41169 - DNA, 20 bp, synthetic construct
  misc_feature 1..20: note = chemically synthesized
  source 1..20: mol_type = other DNA
ttgcctggtgcttttggtag

SEQ ID NO: 41170 - DNA, 20 bp, synthetic construct
  misc_feature 1..20: note = chemically synthesized
  source 1..20: mol_type = other DNA
gcctggtgcttttggtaggg

SEQ ID NO: 41171 - DNA, 20 bp, synthetic construct
  misc_feature 1..20: note = chemically synthesized
  source 1..20: mol_type = other DNA
gcttgcactttccccctttc

SEQ ID NO: 41172 - DNA, 20 bp, synthetic construct
  misc_feature 1..20: note = chemically synthesized
  source 1..20: mol_type = other DNA
ttgcactttccccctttctg

SEQ ID NO: 41173 - DNA, 20 bp, synthetic construct
  misc_feature 1..20: note = chemically synthesized
  source 1..20: mol_type = other DNA
tgcactttccccctttctgg

SEQ ID NO: 41174 - DNA, 20 bp, synthetic construct
  misc_feature 1..20: note = chemically synthesized
  source 1..20: mol_type = other DNA
ctggaggaaatatttatccc

SEQ ID NO: 41175 - DNA, 20 bp, synthetic construct
  misc_feature 1..20: note = chemically synthesized
  source 1..20: mol_type = other DNA
tggaggaaatatttatcccc

SEQ ID NO: 41176 - DNA, 20 bp, synthetic construct
  misc_feature 1..20: note = chemically synthesized
  source 1..20: mol_type = other DNA
aggaaatatttatccccagg

SEQ ID NO: 41177 - DNA, 20 bp, synthetic construct
  misc_feature 1..20: note = chemically synthesized
  source 1..20: mol_type = other DNA
aggtagttccctttttgcac

SEQ ID NO: 41178 - DNA, 20 bp, synthetic construct
  misc_feature 1..20: note = chemically synthesized
  source 1..20: mol_type = other DNA
tagttccctttttgcaccag

SEQ ID NO: 41179 - DNA, 20 bp, synthetic construct
  misc_feature 1..20: note = chemically synthesized
  source 1..20: mol_type = other DNA
tttgcaccagtggttctttg

SEQ ID NO: 41180 - DNA, 20 bp, synthetic construct
  misc_feature 1..20: note = chemically synthesized
  source 1..20: mol_type = other DNA
tgcaccagtggttctttgaa

SEQ ID NO: 41181 - DNA, 20 bp, synthetic construct
  misc_feature 1..20: note = chemically synthesized
  source 1..20: mol_type = other DNA
tctttgaagagacttccacc

SEQ ID NO: 41182 - DNA, 20 bp, synthetic construct
  misc_feature 1..20: note = chemically synthesized
  source 1..20: mol_type = other DNA
ctttgaagagacttccacct

SEQ ID NO: 41183 - DNA, 20 bp, synthetic construct
  misc_feature 1..20: note = chemically synthesized
  source 1..20: mol_type = other DNA
aagagacttccacctgggaa

SEQ ID NO: 41184 - DNA, 20 bp, synthetic construct
  misc_feature 1..20: note = chemically synthesized
  source 1..20: mol_type = other DNA
tccacctgggaacagttaaa

SEQ ID NO: 41185 - DNA, 20 bp, synthetic construct
  misc_feature 1..20: note = chemically synthesized
  source 1..20: mol_type = other DNA
gaacagttaaacagcaacta

SEQ ID NO: 41186 - DNA, 20 bp, synthetic construct
  misc_feature 1..20: note = chemically synthesized
  source 1..20: mol_type = other DNA
aacagttaaacagcaactac

SEQ ID NO: 41187 - DNA, 20 bp, synthetic construct
  misc_feature 1..20: note = chemically synthesized
  source 1..20: mol_type = other DNA
acagttaaacagcaactaca

SEQ ID NO: 41188 - DNA, 20 bp, synthetic construct
  misc_feature 1..20: note = chemically synthesized
  source 1..20: mol_type = other DNA
ggccttgaactgcacacttt

SEQ ID NO: 41189 - DNA, 20 bp, synthetic construct
  misc_feature 1..20: note = chemically synthesized
  source 1..20: mol_type = other DNA
tgaactgcacactttcagtc

SEQ ID NO: 41190 - DNA, 20 bp, synthetic construct
  misc_feature 1..20: note = chemically synthesized
  source 1..20: mol_type = other DNA
cactttcagtccggtcctca

SEQ ID NO: 41191 - DNA, 20 bp, synthetic construct
  misc_feature 1..20: note = chemically synthesized
  source 1..20: mol_type = other DNA
gtccggtcctcacagttgaa

SEQ ID NO: 41192 - DNA, 20 bp, synthetic construct
  misc_feature 1..20: note = chemically synthesized
  source 1..20: mol_type = other DNA
cctcacagttgaaaagacct

SEQ ID NO: 41193 - DNA, 20 bp, synthetic construct
  misc_feature 1..20: note = chemically synthesized
  source 1..20: mol_type = other DNA
cctaagcttgtgcctgattt

SEQ ID NO: 41194 - DNA, 20 bp, synthetic construct
  misc_feature 1..20: note = chemically synthesized
  source 1..20: mol_type = other DNA
gtgcctgatttaagcctttt

SEQ ID NO: 41195 - DNA, 20 bp, synthetic construct
  misc_feature 1..20: note = chemically synthesized
  source 1..20: mol_type = other DNA
taatctccctctcaacccta

SEQ ID NO: 41196 - DNA, 20 bp, synthetic construct
  misc_feature 1..20: note = chemically synthesized
  source 1..20: mol_type = other DNA
caaccctacagtcacccatt

SEQ ID NO: 41197 - DNA, 20 bp, synthetic construct
  misc_feature 1..20: note = chemically synthesized
  source 1..20: mol_type = other DNA
gtcacccatttggtatatta

SEQ ID NO: 41198 - DNA, 20 bp, synthetic construct
  misc_feature 1..20: note = chemically synthesized
  source 1..20: mol_type = other DNA
aagatgtgttgtctactgtc

SEQ ID NO: 41199 - DNA, 20 bp, synthetic construct
  misc_feature 1..20: note = chemically synthesized
  source 1..20: mol_type = other DNA
tctactgtctagtatccctc

SEQ ID NO: 41200 - DNA, 20 bp, synthetic construct
  misc_feature 1..20: note = chemically synthesized
  source 1..20: mol_type = other DNA
actgtctagtatccctcaag

SEQ ID NO: 41201 - DNA, 20 bp, synthetic construct
  misc_feature 1..20: note = chemically synthesized
  source 1..20: mol_type = other DNA
tagtatccctcaagtagtgt

SEQ ID NO: 41202 - DNA, 20 bp, synthetic construct
  misc_feature 1..20: note = chemically synthesized
  source 1..20: mol_type = other DNA
agtatccctcaagtagtgtc

SEQ ID NO: 41203 - DNA, 20 bp, synthetic construct
  misc_feature 1..20: note = chemically synthesized
  source 1..20: mol_type = other DNA
cctcaagtagtgtcaggaat

SEQ ID NO: 41204 - DNA, 20 bp, synthetic construct
  misc_feature 1..20: note = chemically synthesized
  source 1..20: mol_type = other DNA
tcaggaattagtcatttaaa

SEQ ID NO: 41205 - DNA, 20 bp, synthetic construct
  misc_feature 1..20: note = chemically synthesized
  source 1..20: mol_type = other DNA
tagtcatttaaatagtctgc

SEQ ID NO: 41206 - DNA, 20 bp, synthetic construct
  misc_feature 1..20: note = chemically synthesized
  source 1..20: mol_type = other DNA
catttaaatagtctgcaagc

SEQ ID NO: 41207 - DNA, 20 bp, synthetic construct
  misc_feature 1..20: note = chemically synthesized
  source 1..20: mol_type = other DNA
atttaaatagtctgcaagcc

SEQ ID NO: 41208 - DNA, 20 bp, synthetic construct
  misc_feature 1..20: note = chemically synthesized
  source 1..20: mol_type = other DNA
ttaaatagtctgcaagccag

SEQ ID NO: 41209 - DNA, 20 bp, synthetic construct
  misc_feature 1..20: note = chemically synthesized
  source 1..20: mol_type = other DNA
aatagtctgcaagccaggag

SEQ ID NO: 41210 - DNA, 20 bp, synthetic construct
  misc_feature 1..20: note = chemically synthesized
  source 1..20: mol_type = other DNA
agtctgcaagccaggagtgg

SEQ ID NO: 41211 - DNA, 20 bp, synthetic construct
  misc_feature 1..20: note = chemically synthesized
  source 1..20: mol_type = other DNA
gtggctcatgtctgtaattc

SEQ ID NO: 41212 - DNA, 20 bp, synthetic construct
  misc_feature 1..20: note = chemically synthesized
  source 1..20: mol_type = other DNA
tgtctgtaattccagcactt

SEQ ID NO: 41213 - DNA, 20 bp, synthetic construct
  misc_feature 1..20: note = chemically synthesized
  source 1..20: mol_type = other DNA
tctgtaattccagcacttga

SEQ ID NO: 41214 - DNA, 20 bp, synthetic construct
  misc_feature 1..20: note = chemically synthesized
  source 1..20: mol_type = other DNA
ctgtaattccagcacttgag

SEQ ID NO: 41215 - DNA, 20 bp, synthetic construct
  misc_feature 1..20: note = chemically synthesized
  source 1..20: mol_type = other DNA
taattccagcacttgagagg

SEQ ID NO: 41216 - DNA, 20 bp, synthetic construct
  misc_feature 1..20: note = chemically synthesized
  source 1..20: mol_type = other DNA
ttccagcacttgagaggtag

SEQ ID NO: 41217 - DNA, 20 bp, synthetic construct
  misc_feature 1..20: note = chemically synthesized
  source 1..20: mol_type = other DNA
cagcacttgagaggtagaag

SEQ ID NO: 41218 - DNA, 20 bp, synthetic construct
  misc_feature 1..20: note = chemically synthesized
  source 1..20: mol_type = other DNA
agcacttgagaggtagaagt

SEQ ID NO: 41219 - DNA, 20 bp, synthetic construct
  misc_feature 1..20: note = chemically synthesized
  source 1..20: mol_type = other DNA
cacttgagaggtagaagtgg

SEQ ID NO: 41220 - DNA, 20 bp, synthetic construct
  misc_feature 1..20: note = chemically synthesized
  source 1..20: mol_type = other DNA
acttgagaggtagaagtggg

SEQ ID NO: 41221 - DNA, 20 bp, synthetic construct
  misc_feature 1..20: note = chemically synthesized
  source 1..20: mol_type = other DNA
tagaagtgggaggactgctt

SEQ ID NO: 41222 - DNA, 20 bp, synthetic construct
  misc_feature 1..20: note = chemically synthesized
  source 1..20: mol_type = other DNA
tgggaggactgcttgagctc

SEQ ID NO: 41223 - DNA, 20 bp, synthetic construct
  misc_feature 1..20: note = chemically synthesized
  source 1..20: mol_type = other DNA
ggaggactgcttgagctcaa

SEQ ID NO: 41224 - DNA, 20 bp, synthetic construct
  misc_feature 1..20: note = chemically synthesized
  source 1..20: mol_type = other DNA
tcaagagtttgatattatcc

SEQ ID NO: 41225 - DNA, 20 bp, synthetic construct
  misc_feature 1..20: note = chemically synthesized
  source 1..20: mol_type = other DNA
tgatattatcctggacaaca

SEQ ID NO: 41226 - DNA, 20 bp, synthetic construct
  misc_feature 1..20: note = chemically synthesized
  source 1..20: mol_type = other DNA
attatcctggacaacatagc

SEQ ID NO: 41227 - DNA, 20 bp, synthetic construct
  misc_feature 1..20: note = chemically synthesized
  source 1..20: mol_type = other DNA
cttaaaaaaaaaaaaaaaat

SEQ ID NO: 41228 - DNA, 20 bp, synthetic construct
  misc_feature 1..20: note = chemically synthesized
  source 1..20: mol_type = other DNA
aaaaaaaaaaaaaaattagc

SEQ ID NO: 41229 - DNA, 20 bp, synthetic construct
  misc_feature 1..20: note = chemically synthesized
  source 1..20: mol_type = other DNA
aaaaaaaaaaaaaattagcc

SEQ ID NO: 41230 - DNA, 20 bp, synthetic construct
  misc_feature 1..20: note = chemically synthesized
  source 1..20: mol_type = other DNA
aggcatgtgatgtacacctg

SEQ ID NO: 41231 - DNA, 20 bp, synthetic construct
  misc_feature 1..20: note = chemically synthesized
  source 1..20: mol_type = other DNA
gtgatgtacacctgtagtcc

SEQ ID NO: 41232 - DNA, 20 bp, synthetic construct
  misc_feature 1..20: note = chemically synthesized
  source 1..20: mol_type = other DNA
cacctgtagtcccagctact

SEQ ID NO: 41233 - DNA, 20 bp, synthetic construct
  misc_feature 1..20: note = chemically synthesized
  source 1..20: mol_type = other DNA
acctgtagtcccagctactc

SEQ ID NO: 41234 - DNA, 20 bp, synthetic construct
  misc_feature 1..20: note = chemically synthesized
  source 1..20: mol_type = other DNA
ctgtagtcccagctactcag

SEQ ID NO: 41235 - DNA, 20 bp, synthetic construct
  misc_feature 1..20: note = chemically synthesized
  source 1..20: mol_type = other DNA
tgtagtcccagctactcagg

SEQ ID NO: 41236 - DNA, 20 bp, synthetic construct
  misc_feature 1..20: note = chemically synthesized
  source 1..20: mol_type = other DNA
agctactcaggaggccgaaa

SEQ ID NO: 41237 - DNA, 20 bp, synthetic construct
  misc_feature 1..20: note = chemically synthesized
  source 1..20: mol_type = other DNA
gctactcaggaggccgaaat

SEQ ID NO: 41238 - DNA, 20 bp, synthetic construct
  misc_feature 1..20: note = chemically synthesized
  source 1..20: mol_type = other DNA
tactcaggaggccgaaatgg

SEQ ID NO: 41239 - DNA, 20 bp, synthetic construct
  misc_feature 1..20: note = chemically synthesized
  source 1..20: mol_type = other DNA
actcaggaggccgaaatggg

SEQ ID NO: 41240 - DNA, 20 bp, synthetic construct
  misc_feature 1..20: note = chemically synthesized
  source 1..20: mol_type = other DNA
ccgaaatgggaggatccctt

SEQ ID NO: 41241 - DNA, 20 bp, synthetic construct
  misc_feature 1..20: note = chemically synthesized
  source 1..20: mol_type = other DNA
atgggaggatcccttgagct

SEQ ID NO: 41242 - DNA, 20 bp, synthetic construct
  misc_feature 1..20: note = chemically synthesized
  source 1..20: mol_type = other DNA
tgggaggatcccttgagctc

SEQ ID NO: 41243 - DNA, 20 bp, synthetic construct
  misc_feature 1..20: note = chemically synthesized
  source 1..20: mol_type = other DNA
ggaggatcccttgagctcag

SEQ ID NO: 41244 - DNA, 20 bp, synthetic construct
  misc_feature 1..20: note = chemically synthesized
  source 1..20: mol_type = other DNA
gaggatcccttgagctcagg

SEQ ID NO: 41245 - DNA, 20 bp, synthetic construct
  misc_feature 1..20: note = chemically synthesized
  source 1..20: mol_type = other DNA
tcccttgagctcaggaggtc

SEQ ID NO: 41246 - DNA, 20 bp, synthetic construct
  misc_feature 1..20: note = chemically synthesized
  source 1..20: mol_type = other DNA
cccttgagctcaggaggtca

SEQ ID NO: 41247 - DNA, 20 bp, synthetic construct
  misc_feature 1..20: note = chemically synthesized
  source 1..20: mol_type = other DNA
agctcaggaggtcaaggctg

SEQ ID NO: 41248 - DNA, 20 bp, synthetic construct
  misc_feature 1..20: note = chemically synthesized
  source 1..20: mol_type = other DNA
caggaggtcaaggctgcagt

SEQ ID NO: 41249 - DNA, 20 bp, synthetic construct
  misc_feature 1..20: note = chemically synthesized
  source 1..20: mol_type = other DNA
atgatcttgccactgcactc

SEQ ID NO: 41250 - DNA, 20 bp, synthetic construct
  misc_feature 1..20: note = chemically synthesized
  source 1..20: mol_type = other DNA
cttgccactgcactccagcc

SEQ ID NO: 41251 - DNA, 20 bp, synthetic construct
  misc_feature 1..20: note = chemically synthesized
  source 1..20: mol_type = other DNA
ccactgcactccagcctgga

SEQ ID NO: 41252 - DNA, 20 bp, synthetic construct
  misc_feature 1..20: note = chemically synthesized
  source 1..20: mol_type = other DNA
ctgcactccagcctggacag

SEQ ID NO: 41253 - DNA, 20 bp, synthetic construct
  misc_feature 1..20: note = chemically synthesized
  source 1..20: mol_type = other DNA
gcactccagcctggacagca

SEQ ID NO: 41254 - DNA, 20 bp, synthetic construct
  misc_feature 1..20: note = chemically synthesized
  source 1..20: mol_type = other DNA
tgaaaccttgcctcacgaaa

SEQ ID NO: 41255 - DNA, 20 bp, synthetic construct
  misc_feature 1..20: note = chemically synthesized
  source 1..20: mol_type = other DNA
ttccttgatgctctaccaca

SEQ ID NO: 41256 - DNA, 20 bp, synthetic construct
  misc_feature 1..20: note = chemically synthesized
  source 1..20: mol_type = other DNA
tccttgatgctctaccacat

SEQ ID NO: 41257 - DNA, 20 bp, synthetic construct
  misc_feature 1..20: note = chemically synthesized
  source 1..20: mol_type = other DNA
gatgctctaccacataggtc

SEQ ID NO: 41258 - DNA, 20 bp, synthetic construct
  misc_feature 1..20: note = chemically synthesized
  source 1..20: mol_type = other DNA
atgctctaccacataggtct

SEQ ID NO: 41259 - DNA, 20 bp, synthetic construct
  misc_feature 1..20: note = chemically synthesized
  source 1..20: mol_type = other DNA
tcattgctgttcataattgt

SEQ ID NO: 41260 - DNA, 20 bp, synthetic construct
  misc_feature 1..20: note = chemically synthesized
  source 1..20: mol_type = other DNA
tgtaatattgatattattcc

SEQ ID NO: 41261 - DNA, 20 bp, synthetic construct
  misc_feature 1..20: note = chemically synthesized
  source 1..20: mol_type = other DNA
atattgatattattcctaga

SEQ ID NO: 41262 - DNA, 20 bp, synthetic construct
  misc_feature 1..20: note = chemically synthesized
  source 1..20: mol_type = other DNA
gatattattcctagaaagct

SEQ ID NO: 41263 - DNA, 20 bp, synthetic construct
  misc_feature 1..20: note = chemically synthesized
  source 1..20: mol_type = other DNA
atattattcctagaaagctg

SEQ ID NO: 41264 - DNA, 20 bp, synthetic construct
  misc_feature 1..20: note = chemically synthesized
  source 1..20: mol_type = other DNA
tcctagaaagctgaggcctc

SEQ ID NO: 41265 - DNA, 20 bp, synthetic construct
  misc_feature 1..20: note = chemically synthesized
  source 1..20: mol_type = other DNA
agatgataacttttattttc

SEQ ID NO: 41266 - DNA, 20 bp, synthetic construct
  misc_feature 1..20: note = chemically synthesized
  source 1..20: mol_type = other DNA
tttattttctggacttgtaa

SEQ ID NO: 41267 - DNA, 20 bp, synthetic construct
  misc_feature 1..20: note = chemically synthesized
  source 1..20: mol_type = other DNA
tcaccatgttgtaactttct

SEQ ID NO: 41268 - DNA, 20 bp, synthetic construct
  misc_feature 1..20: note = chemically synthesized
  source 1..20: mol_type = other DNA
accatgttgtaactttctta

SEQ ID NO: 41269 - DNA, 20 bp, synthetic construct
  misc_feature 1..20: note = chemically synthesized
  source 1..20: mol_type = other DNA
atgttgtaactttcttagag

SEQ ID NO: 41270 - DNA, 20 bp, synthetic construct
  misc_feature 1..20: note = chemically synthesized
  source 1..20: mol_type = other DNA
cttagagtagtaacaatata

SEQ ID NO: 41271 - DNA, 20 bp, synthetic construct
  misc_feature 1..20: note = chemically synthesized
  source 1..20: mol_type = other DNA
taacaatataaagttattgt

SEQ ID NO: 41272 - DNA, 20 bp, synthetic construct
  misc_feature 1..20: note = chemically synthesized
  source 1..20: mol_type = other DNA
attgtgagtttttgcaaaca

SEQ ID NO: 41273 - DNA, 20 bp, synthetic construct
  misc_feature 1..20: note = chemically synthesized
  source 1..20: mol_type = other DNA
agcaaacacaacgacccata

SEQ ID NO: 41274 - DNA, 20 bp, synthetic construct
  misc_feature 1..20: note = chemically synthesized
  source 1..20: mol_type = other DNA
aattgtctattgtcaattta

SEQ ID NO: 41275 - DNA, 20 bp, synthetic construct
  misc_feature 1..20: note = chemically synthesized
  source 1..20: mol_type = other DNA
attgtctattgtcaatttat

SEQ ID NO: 41276 - DNA, 20 bp, synthetic construct
  misc_feature 1..20: note = chemically synthesized
  source 1..20: mol_type = other DNA
ttgtcaatttatgggaaaac

SEQ ID NO: 41277 - DNA, 20 bp, synthetic construct
  misc_feature 1..20: note = chemically synthesized
  source 1..20: mol_type = other DNA
aagtatgtactttttctact

SEQ ID NO: 41278 - DNA, 20 bp, synthetic construct
  misc_feature 1..20: note = chemically synthesized
  source 1..20: mol_type = other DNA
tttctactaagccattgaaa

SEQ ID NO: 41279 - DNA, 20 bp, synthetic construct
  misc_feature 1..20: note = chemically synthesized
  source 1..20: mol_type = other DNA
ttctactaagccattgaaac

SEQ ID NO: 41280 - DNA, 20 bp, synthetic construct
  misc_feature 1..20: note = chemically synthesized
  source 1..20: mol_type = other DNA
agccattgaaacaggaataa

SEQ ID NO: 41281 - DNA, 20 bp, synthetic construct
  misc_feature 1..20: note = chemically synthesized
  source 1..20: mol_type = other DNA
tgaaacaggaataacagaac

SEQ ID NO: 41282 - DNA, 20 bp, synthetic construct
  misc_feature 1..20: note = chemically synthesized
  source 1..20: mol_type = other DNA
gaataacagaacaagattga

SEQ ID NO: 41283 - DNA, 20 bp, synthetic construct
  misc_feature 1..20: note = chemically synthesized
  source 1..20: mol_type = other DNA
tacattttccgaaattactt

SEQ ID NO: 41284 - DNA, 20 bp, synthetic construct
  misc_feature 1..20: note = chemically synthesized
  source 1..20: mol_type = other DNA
aattacttgagtattataca

SEQ ID NO: 41285 - DNA, 20 bp, synthetic construct
  misc_feature 1..20: note = chemically synthesized
  source 1..20: mol_type = other DNA
cttgagtattatacaaagac

SEQ ID NO: 41286 - DNA, 20 bp, synthetic construct
  misc_feature 1..20: note = chemically synthesized
  source 1..20: mol_type = other DNA
attatacaaagacaagcacg

SEQ ID NO: 41287 - DNA, 20 bp, synthetic construct
  misc_feature 1..20: note = chemically synthesized
  source 1..20: mol_type = other DNA
caaagacaagcacgtggacc

SEQ ID NO: 41288 - DNA, 20 bp, synthetic construct
  misc_feature 1..20: note = chemically synthesized
  source 1..20: mol_type = other DNA
aaagacaagcacgtggacct

SEQ ID NO: 41289 - DNA, 20 bp, synthetic construct
  misc_feature 1..20: note = chemically synthesized
  source 1..20: mol_type = other DNA
agacaagcacgtggacctgg

SEQ ID NO: 41290 - DNA, 20 bp, synthetic construct
  misc_feature 1..20: note = chemically synthesized
  source 1..20: mol_type = other DNA
gacaagcacgtggacctggg

SEQ ID NO: 41291 - DNA, 20 bp, synthetic construct
  misc_feature 1..20: note = chemically synthesized
  source 1..20: mol_type = other DNA
caagcacgtggacctgggag

SEQ ID NO: 41292 - DNA, 20 bp, synthetic construct
  misc_feature 1..20: note = chemically synthesized
  source 1..20: mol_type = other DNA
aagcacgtggacctgggagg

SEQ ID NO: 41293 - DNA, 20 bp, synthetic construct
  misc_feature 1..20: note = chemically synthesized
  source 1..20: mol_type = other DNA
agcacgtggacctgggagga

SEQ ID NO: 41294 - DNA, 20 bp, synthetic construct
  misc_feature 1..20: note = chemically synthesized
  source 1..20: mol_type = other DNA
ggagggttattgtccatgac

SEQ ID NO: 41295 - DNA, 20 bp, synthetic construct
  misc_feature 1..20: note = chemically synthesized
  source 1..20: mol_type = other DNA
tattgtccatgactggtgtg

SEQ ID NO: 41296 - DNA, 20 bp, synthetic construct
  misc_feature 1..20: note = chemically synthesized
  source 1..20: mol_type = other DNA
ttgtccatgactggtgtgtg

SEQ ID NO: 41297 - DNA, 20 bp, synthetic construct
  misc_feature 1..20: note = chemically synthesized
  source 1..20: mol_type = other DNA
ctggtgtgtggagacaaatg

SEQ ID NO: 41298 - DNA, 20 bp, synthetic construct
  misc_feature 1..20: note = chemically synthesized
  source 1..20: mol_type = other DNA
tggtgtgtggagacaaatgc

SEQ ID NO: 41299 - DNA, 20 bp, synthetic construct
  misc_feature 1..20: note = chemically synthesized
  source 1..20: mol_type = other DNA
agacaaatgcaggtttataa

SEQ ID NO: 41300 - DNA, 20 bp, synthetic construct
  misc_feature 1..20: note = chemically synthesized
  source 1..20: mol_type = other DNA
aaatgcaggtttataataga

SEQ ID NO: 41301 - DNA, 20 bp, synthetic construct
  misc_feature 1..20: note = chemically synthesized
  source 1..20: mol_type = other DNA
aatgcaggtttataatagat

SEQ ID NO: 41302 - DNA, 20 bp, synthetic construct
  misc_feature 1..20: note = chemically synthesized
  source 1..20: mol_type = other DNA
caggtttataatagatggga

SEQ ID NO: 41303 - DNA, 20 bp, synthetic construct
  misc_feature 1..20: note = chemically synthesized
  source 1..20: mol_type = other DNA
ataatagatgggatggcatc

SEQ ID NO: 41304 - DNA, 20 bp, synthetic construct
  misc_feature 1..20: note = chemically synthesized
  source 1..20: mol_type = other DNA
aatgactttgccatcacttt

SEQ ID NO: 41305 - DNA, 20 bp, synthetic construct
  misc_feature 1..20: note = chemically synthesized
  source 1..20: mol_type = other DNA
tgactttgccatcactttta

SEQ ID NO: 41306 - DNA, 20 bp, synthetic construct
  misc_feature 1..20: note = chemically synthesized
  source 1..20: mol_type = other DNA
actttgccatcacttttaga

SEQ ID NO: 41307 - DNA, 20 bp, synthetic construct
  misc_feature 1..20: note = chemically synthesized
  source 1..20: mol_type = other DNA
catcacttttagagagctct

SEQ ID NO: 41308 - DNA, 20 bp, synthetic construct
  misc_feature 1..20: note = chemically synthesized
  source 1..20: mol_type = other DNA
atcacttttagagagctctt

SEQ ID NO: 41309 - DNA, 20 bp, synthetic construct
  misc_feature 1..20: note = chemically synthesized
  source 1..20: mol_type = other DNA
tcacttttagagagctcttg

SEQ ID NO: 41310 - DNA, 20 bp, synthetic construct
  misc_feature 1..20: note = chemically synthesized
  source 1..20: mol_type = other DNA
tagagagctcttggggaccc

SEQ ID NO: 41311 - DNA, 20 bp, synthetic construct
  misc_feature 1..20: note = chemically synthesized
  source 1..20: mol_type = other DNA
tcttggggaccccagtacac

SEQ ID NO: 41312 - DNA, 20 bp, synthetic construct
  misc_feature 1..20: note = chemically synthesized
  source 1..20: mol_type = other DNA
ttggggaccccagtacacaa

SEQ ID NO: 41313 - DNA, 20 bp, synthetic construct
  misc_feature 1..20: note = chemically synthesized
  source 1..20: mol_type = other DNA
tggggaccccagtacacaag

SEQ ID NO: 41314 - DNA, 20 bp, synthetic construct
  misc_feature 1..20: note = chemically synthesized
  source 1..20: mol_type = other DNA
ggggaccccagtacacaaga

SEQ ID NO: 41315 - DNA, 20 bp, synthetic construct
  misc_feature 1..20: note = chemically synthesized
  source 1..20: mol_type = other DNA
gggaccccagtacacaagag

SEQ ID NO: 41316 - DNA, 20 bp, synthetic construct
  misc_feature 1..20: note = chemically synthesized
  source 1..20: mol_type = other DNA
ccagtacacaagaggggacg

SEQ ID NO: 41317 - DNA, 20 bp, synthetic construct
  misc_feature 1..20: note = chemically synthesized
  source 1..20: mol_type = other DNA
cagtacacaagaggggacgc

SEQ ID NO: 41318 - DNA, 20 bp, synthetic construct
  misc_feature 1..20: note = chemically synthesized
  source 1..20: mol_type = other DNA
agtacacaagaggggacgca

SEQ ID NO: 41319 - DNA, 20 bp, synthetic construct
  misc_feature 1..20: note = chemically synthesized
  source 1..20: mol_type = other DNA
gaggggacgcagggtatatg

SEQ ID NO: 41320 - DNA, 20 bp, synthetic construct
  misc_feature 1..20: note = chemically synthesized
  source 1..20: mol_type = other DNA
agacatctcattctttttct

SEQ ID NO: 41321 - DNA, 20 bp, synthetic construct
  misc_feature 1..20: note = chemically synthesized
  source 1..20: mol_type = other DNA
ctcattctttttcttagtgt

SEQ ID NO: 41322 - DNA, 20 bp, synthetic construct
  misc_feature 1..20: note = chemically synthesized
  source 1..20: mol_type = other DNA
ctttttcttagtgtgagaat

SEQ ID NO: 41323 - DNA, 20 bp, synthetic construct
  misc_feature 1..20: note = chemically synthesized
  source 1..20: mol_type = other DNA
tcttagtgtgagaataagaa

SEQ ID NO: 41324 - DNA, 20 bp, synthetic construct
  misc_feature 1..20: note = chemically synthesized
  source 1..20: mol_type = other DNA
aataagaatagccatgacct

SEQ ID NO: 41325 - DNA, 20 bp, synthetic construct
  misc_feature 1..20: note = chemically synthesized
  source 1..20: mol_type = other DNA
atagccatgacctgagttta

SEQ ID NO: 41326 - DNA, 20 bp, synthetic construct
  misc_feature 1..20: note = chemically synthesized
  source 1..20: mol_type = other DNA
gacctgagtttatagacaat

SEQ ID NO: 41327 - DNA, 20 bp, synthetic construct
  misc_feature 1..20: note = chemically synthesized
  source 1..20: mol_type = other DNA
gcccttttctctctcccact

SEQ ID NO: 41328 - DNA, 20 bp, synthetic construct
  misc_feature 1..20: note = chemically synthesized
  source 1..20: mol_type = other DNA
cttttctctctcccactcag

SEQ ID NO: 41329 - DNA, 20 bp, synthetic construct
  misc_feature 1..20: note = chemically synthesized
  source 1..20: mol_type = other DNA
ctctcccactcagcagctat

SEQ ID NO: 41330 - DNA, 20 bp, synthetic construct
  misc_feature 1..20: note = chemically synthesized
  source 1..20: mol_type = other DNA
cccactcagcagctatgaga

SEQ ID NO: 41331 - DNA, 20 bp, synthetic construct
  misc_feature 1..20: note = chemically synthesized
  source 1..20: mol_type = other DNA
ggcttgccctgcctctctac

SEQ ID NO: 41332 - DNA, 20 bp, synthetic construct
  misc_feature 1..20: note = chemically synthesized
  source 1..20: mol_type = other DNA
gcttgccctgcctctctact

SEQ ID NO: 41333 - DNA, 20 bp, synthetic construct
  misc_feature 1..20: note = chemically synthesized
  source 1..20: mol_type = other DNA
ctactaggctgactcactcc

SEQ ID NO: 41334 - DNA, 20 bp, synthetic construct
  misc_feature 1..20: note = chemically synthesized
  source 1..20: mol_type = other DNA
tactaggctgactcactcca

SEQ ID NO: 41335 - DNA, 20 bp, synthetic construct
  misc_feature 1..20: note = chemically synthesized
  source 1..20: mol_type = other DNA
ggctgactcactccaaggcc

SEQ ID NO: 41336 - DNA, 20 bp, synthetic construct
  misc_feature 1..20: note = chemically synthesized
  source 1..20: mol_type = other DNA
ctcactccaaggcccagcaa

SEQ ID NO: 41337 - DNA, 20 bp, synthetic construct
  misc_feature 1..20: note = chemically synthesized
  source 1..20: mol_type = other DNA
tcactccaaggcccagcaat

SEQ ID NO: 41338 - DNA, 20 bp, synthetic construct
  misc_feature 1..20: note = chemically synthesized
  source 1..20: mol_type = other DNA
ctccaaggcccagcaatggg

SEQ ID NO: 41339 - DNA, 20 bp, synthetic construct
  misc_feature 1..20: note = chemically synthesized
  source 1..20: mol_type = other DNA
tccaaggcccagcaatgggc

SEQ ID NO: 41340 - DNA, 20 bp, synthetic construct
  misc_feature 1..20: note = chemically synthesized
  source 1..20: mol_type = other DNA
ccaaggcccagcaatgggca

SEQ ID NO: 41341 - DNA, 20 bp, synthetic construct
  misc_feature 1..20: note = chemically synthesized
  source 1..20: mol_type = other DNA
agcaatgggcagggctctgt

SEQ ID NO: 41342 - DNA, 20 bp, synthetic construct
  misc_feature 1..20: note = chemically synthesized
  source 1..20: mol_type = other DNA
gcaatgggcagggctctgtc

SEQ ID NO: 41343 - DNA, 20 bp, synthetic construct
  misc_feature 1..20: note = chemically synthesized
  source 1..20: mol_type = other DNA
caatgggcagggctctgtca

SEQ ID NO: 41344 - DNA, 20 bp, synthetic construct
  misc_feature 1..20: note = chemically synthesized
  source 1..20: mol_type = other DNA
gggctctgtcagggctttga

SEQ ID NO: 41345 - DNA, 20 bp, synthetic construct
  misc_feature 1..20: note = chemically synthesized
  source 1..20: mol_type = other DNA
ggctttgatagcactatctg

SEQ ID NO: 41346 - DNA, 20 bp, synthetic construct
  misc_feature 1..20: note = chemically synthesized
  source 1..20: mol_type = other DNA
ctttgatagcactatctgca

SEQ ID NO: 41347 - DNA, 20 bp, synthetic construct
  misc_feature 1..20: note = chemically synthesized
  source 1..20: mol_type = other DNA
gatagcactatctgcagagc

SEQ ID NO: 41348 - DNA, 20 bp, synthetic construct
  misc_feature 1..20: note = chemically synthesized
  source 1..20: mol_type = other DNA
atagcactatctgcagagcc

SEQ ID NO: 41349 - DNA, 20 bp, synthetic construct
  misc_feature 1..20: note = chemically synthesized
  source 1..20: mol_type = other DNA
tagcactatctgcagagcca

SEQ ID NO: 41350 - DNA, 20 bp, synthetic construct
  misc_feature 1..20: note = chemically synthesized
  source 1..20: mol_type = other DNA
ctatctgcagagccagggcc

SEQ ID NO: 41351 - DNA, 20 bp, synthetic construct
  misc_feature 1..20: note = chemically synthesized
  source 1..20: mol_type = other DNA
tctgcagagccagggccgag

SEQ ID NO: 41352 - DNA, 20 bp, synthetic construct
  misc_feature 1..20: note = chemically synthesized
  source 1..20: mol_type = other DNA
ctgcagagccagggccgaga

SEQ ID NO: 41353 - DNA, 20 bp, synthetic construct
  misc_feature 1..20: note = chemically synthesized
  source 1..20: mol_type = other DNA
tgcagagccagggccgagaa

SEQ ID NO: 41354 - DNA, 20 bp, synthetic construct
  misc_feature 1..20: note = chemically synthesized
  source 1..20: mol_type = other DNA
gcagagccagggccgagaag

SEQ ID NO: 41355 - DNA, 20 bp, synthetic construct
  misc_feature 1..20: note = chemically synthesized
  source 1..20: mol_type = other DNA
gagccagggccgagaagggg

SEQ ID NO: 41356 - DNA, 20 bp, synthetic construct
  misc_feature 1..20: note = chemically synthesized
  source 1..20: mol_type = other DNA
ggccgagaaggggtggactc

SEQ ID NO: 41357 - DNA, 20 bp, synthetic construct
  misc_feature 1..20: note = chemically synthesized
  source 1..20: mol_type = other DNA
ccgagaaggggtggactcca

SEQ ID NO: 41358 - DNA, 20 bp, synthetic construct
  misc_feature 1..20: note = chemically synthesized
  source 1..20: mol_type = other DNA
agactctccctcccattccc

SEQ ID NO: 41359 - DNA, 20 bp, synthetic construct
  misc_feature 1..20: note = chemically synthesized
  source 1..20: mol_type = other DNA
ctctccctcccattcccgag

SEQ ID NO: 41360 - DNA, 20 bp, synthetic construct
  misc_feature 1..20: note = chemically synthesized
  source 1..20: mol_type = other DNA
tctccctcccattcccgagc

SEQ ID NO: 41361 - DNA, 20 bp, synthetic construct
  misc_feature 1..20: note = chemically synthesized
  source 1..20: mol_type = other DNA
ctccctcccattcccgagca

SEQ ID NO: 41362 - DNA, 20 bp, synthetic construct
  misc_feature 1..20: note = chemically synthesized
  source 1..20: mol_type = other DNA
aaatgatatatttattttaa

SEQ ID NO: 41363 - DNA, 20 bp, synthetic construct
  misc_feature 1..20: note = chemically synthesized
  source 1..20: mol_type = other DNA
atttattttaaaagaaataa

SEQ ID NO: 41364 - DNA, 20 bp, synthetic construct
  misc_feature 1..20: note = chemically synthesized
  source 1..20: mol_type = other DNA
tttattttaaaagaaataac

SEQ ID NO: 41365 - DNA, 20 bp, synthetic construct
  misc_feature 1..20: note = chemically synthesized
  source 1..20: mol_type = other DNA
tattttaaaagaaataacag

SEQ ID NO: 41366 - DNA, 20 bp, synthetic construct
  misc_feature 1..20: note = chemically synthesized
  source 1..20: mol_type = other DNA
agaaataacaggagactgcc

SEQ ID NO: 41367 - DNA, 20 bp, synthetic construct
  misc_feature 1..20: note = chemically synthesized
  source 1..20: mol_type = other DNA
aacaggagactgcccagccc

SEQ ID NO: 41368 - DNA, 20 bp, synthetic construct
  misc_feature 1..20: note = chemically synthesized
  source 1..20: mol_type = other DNA
gcccagccctggctgtgaca

SEQ ID NO: 41369 - DNA, 20 bp, synthetic construct
  misc_feature 1..20: note = chemically synthesized
  source 1..20: mol_type = other DNA
gctgtgacatggaaactatg

SEQ ID NO: 41370 - DNA, 20 bp, synthetic construct
  misc_feature 1..20: note = chemically synthesized
  source 1..20: mol_type = other DNA
ggaaactatgtagaatattt

SEQ ID NO: 41371 - DNA, 20 bp, synthetic construct
  misc_feature 1..20: note = chemically synthesized
  source 1..20: mol_type = other DNA
gaaactatgtagaatatttt

SEQ ID NO: 41372 - DNA, 20 bp, synthetic construct
  misc_feature 1..20: note = chemically synthesized
  source 1..20: mol_type = other DNA
ccatttttttttccttcttt

SEQ ID NO: 41373 - DNA, 20 bp, synthetic construct
  misc_feature 1..20: note = chemically synthesized
  source 1..20: mol_type = other DNA
ttttttttccttctttcagt

SEQ ID NO: 41374 - DNA, 20 bp, synthetic construct
  misc_feature 1..20: note = chemically synthesized
  source 1..20: mol_type = other DNA
ttttttccttctttcagtta

SEQ ID NO: 41375 - DNA, 20 bp, synthetic construct
  misc_feature 1..20: note = chemically synthesized
  source 1..20: mol_type = other DNA
tttttccttctttcagttag

SEQ ID NO: 41376 - DNA, 20 bp, synthetic construct
  misc_feature 1..20: note = chemically synthesized
  source 1..20: mol_type = other DNA
ccttctttcagttagaggaa

SEQ ID NO: 41377 - DNA, 20 bp, synthetic construct
  misc_feature 1..20: note = chemically synthesized
  source 1..20: mol_type = other DNA
cttctttcagttagaggaaa

SEQ ID NO: 41378 - DNA, 20 bp, synthetic construct
  misc_feature 1..20: note = chemically synthesized
  source 1..20: mol_type = other DNA
ttctttcagttagaggaaaa

SEQ ID NO: 41379 - DNA, 20 bp, synthetic construct
  misc_feature 1..20: note = chemically synthesized
  source 1..20: mol_type = other DNA
tctttcagttagaggaaaag

SEQ ID NO: 41380 - DNA, 20 bp, synthetic construct
  misc_feature 1..20: note = chemically synthesized
  source 1..20: mol_type = other DNA
ggggctcactgcacatacac

SEQ ID NO: 41381 - DNA, 20 bp, synthetic construct
  misc_feature 1..20: note = chemically synthesized
  source 1..20: mol_type = other DNA
ctcactgcacatacactaga

SEQ ID NO: 41382 - DNA, 20 bp, synthetic construct
  misc_feature 1..20: note = chemically synthesized
  source 1..20: mol_type = other DNA
ctgcacatacactagacaga

SEQ ID NO: 41383 - DNA, 20 bp, synthetic construct
  misc_feature 1..20: note = chemically synthesized
  source 1..20: mol_type = other DNA
acatacactagacagaaagt

SEQ ID NO: 41384 - DNA, 20 bp, synthetic construct
  misc_feature 1..20: note = chemically synthesized
  source 1..20: mol_type = other DNA
catacactagacagaaagtc

SEQ ID NO: 41385 - DNA, 20 bp, synthetic construct
  misc_feature 1..20: note = chemically synthesized
  source 1..20: mol_type = other DNA
tacactagacagaaagtcag

SEQ ID NO: 41386 - DNA, 20 bp, synthetic construct
  misc_feature 1..20: note = chemically synthesized
  source 1..20: mol_type = other DNA
aagtcaggagctttgaatcc

SEQ ID NO: 41387 - DNA, 20 bp, synthetic construct
  misc_feature 1..20: note = chemically synthesized
  source 1..20: mol_type = other DNA
gatcatttccatgtcatact

SEQ ID NO: 41388 - DNA, 20 bp, synthetic construct
  misc_feature 1..20: note = chemically synthesized
  source 1..20: mol_type = other DNA
atttccatgtcatactgaga

SEQ ID NO: 41389 - DNA, 20 bp, synthetic construct
  misc_feature 1..20: note = chemically synthesized
  source 1..20: mol_type = other DNA
gaaagtccccacccttctct

SEQ ID NO: 41390 - DNA, 20 bp, synthetic construct
  misc_feature 1..20: note = chemically synthesized
  source 1..20: mol_type = other DNA
ccccacccttctctgagcct

SEQ ID NO: 41391 - DNA, 20 bp, synthetic construct
  misc_feature 1..20: note = chemically synthesized
  source 1..20: mol_type = other DNA
gcctcagtttctctttttat

SEQ ID NO: 41392 - DNA, 20 bp, synthetic construct
  misc_feature 1..20: note = chemically synthesized
  source 1..20: mol_type = other DNA
tcagtttctctttttataag

SEQ ID NO: 41393 - DNA, 20 bp, synthetic construct
  misc_feature 1..20: note = chemically synthesized
  source 1..20: mol_type = other DNA
cagtttctctttttataagt

SEQ ID NO: 41394 - DNA, 20 bp, synthetic construct
  misc_feature 1..20: note = chemically synthesized
  source 1..20: mol_type = other DNA
gtttctctttttataagtag

SEQ ID NO: 41395 - DNA, 20 bp, synthetic construct
  misc_feature 1..20: note = chemically synthesized
  source 1..20: mol_type = other DNA
tctttttataagtaggagtc

SEQ ID NO: 41396 - DNA, 20 bp, synthetic construct
  misc_feature 1..20: note = chemically synthesized
  source 1..20: mol_type = other DNA
tttttataagtaggagtctg

SEQ ID NO: 41397 - DNA, 20 bp, synthetic construct
  misc_feature 1..20: note = chemically synthesized
  source 1..20: mol_type = other DNA
ctggagtaaatgatttccaa

SEQ ID NO: 41398 - DNA, 20 bp, synthetic construct
  misc_feature 1..20: note = chemically synthesized
  source 1..20: mol_type = other DNA
tttccgtttattaaatgcat

SEQ ID NO: 41399 - DNA, 20 bp, synthetic construct
  misc_feature 1..20: note = chemically synthesized
  source 1..20: mol_type = other DNA
gcatgagcttctgttactcc

SEQ ID NO: 41400 - DNA, 20 bp, synthetic construct
  misc_feature 1..20: note = chemically synthesized
  source 1..20: mol_type = other DNA
gcttctgttactccaagact

SEQ ID NO: 41401 - DNA, 20 bp, synthetic construct
  misc_feature 1..20: note = chemically synthesized
  source 1..20: mol_type = other DNA
tctgttactccaagactgag

SEQ ID NO: 41402 - DNA, 20 bp, synthetic construct
  misc_feature 1..20: note = chemically synthesized
  source 1..20: mol_type = other DNA
ctgttactccaagactgaga

SEQ ID NO: 41403 - DNA, 20 bp, synthetic construct
  misc_feature 1..20: note = chemically synthesized
  source 1..20: mol_type = other DNA
ctgagaaggaaattgaacct

SEQ ID NO: 41404 - DNA, 20 bp, synthetic construct
  misc_feature 1..20: note = chemically synthesized
  source 1..20: mol_type = other DNA
tgaacctgagactcattgac

SEQ ID NO: 41405 - DNA, 20 bp, synthetic construct
  misc_feature 1..20: note = chemically synthesized
  source 1..20: mol_type = other DNA
cctgagactcattgactggc

SEQ ID NO: 41406 - DNA, 20 bp, synthetic construct
  misc_feature 1..20: note = chemically synthesized
  source 1..20: mol_type = other DNA
attgactggcaagatgtccc

SEQ ID NO: 41407 - DNA, 20 bp, synthetic construct
  misc_feature 1..20: note = chemically synthesized
  source 1..20: mol_type = other DNA
tgactggcaagatgtcccca

SEQ ID NO: 41408 - DNA, 20 bp, synthetic construct
  misc_feature 1..20: note = chemically synthesized
  source 1..20: mol_type = other DNA
gactggcaagatgtccccag

SEQ ID NO: 41409 - DNA, 20 bp, synthetic construct
  misc_feature 1..20: note = chemically synthesized
  source 1..20: mol_type = other DNA
tgtccccagaggctctcatt

SEQ ID NO: 41410 - DNA, 20 bp, synthetic construct
  misc_feature 1..20: note = chemically synthesized
  source 1..20: mol_type = other DNA
ataaaattctcaccttcacc

SEQ ID NO: 41411 - DNA, 20 bp, synthetic construct
  misc_feature 1..20: note = chemically synthesized
  source 1..20: mol_type = other DNA
taaaattctcaccttcaccc

SEQ ID NO: 41412 - DNA, 20 bp, synthetic construct
  misc_feature 1..20: note = chemically synthesized
  source 1..20: mol_type = other DNA
caccttcacccaggcccact

SEQ ID NO: 41413 - DNA, 20 bp, synthetic construct
  misc_feature 1..20: note = chemically synthesized
  source 1..20: mol_type = other DNA
cacccaggcccactgagtgt

SEQ ID NO: 41414 - DNA, 20 bp, synthetic construct
  misc_feature 1..20: note = chemically synthesized
  source 1..20: mol_type = other DNA
agtgtcagatttgcatgcac

SEQ ID NO: 41415 - DNA, 20 bp, synthetic construct
  misc_feature 1..20: note = chemically synthesized
  source 1..20: mol_type = other DNA
cactagttcacgtgtgtaaa

SEQ ID NO: 41416 - DNA, 20 bp, synthetic construct
  misc_feature 1..20: note = chemically synthesized
  source 1..20: mol_type = other DNA
actagttcacgtgtgtaaaa

SEQ ID NO: 41417 - DNA, 20 bp, synthetic construct
  misc_feature 1..20: note = chemically synthesized
  source 1..20: mol_type = other DNA
tagttcacgtgtgtaaaaag

SEQ ID NO: 41418 - DNA, 20 bp, synthetic construct
  misc_feature 1..20: note = chemically synthesized
  source 1..20: mol_type = other DNA
agttcacgtgtgtaaaaagg

SEQ ID NO: 41419 - DNA, 20 bp, synthetic construct
  misc_feature 1..20: note = chemically synthesized
  source 1..20: mol_type = other DNA
tttgtattctcacatacctt

SEQ ID NO: 41420 - DNA, 20 bp, synthetic construct
  misc_feature 1..20: note = chemically synthesized
  source 1..20: mol_type = other DNA
ttgtattctcacataccttt

SEQ ID NO: 41421 - DNA, 20 bp, synthetic construct
  misc_feature 1..20: note = chemically synthesized
  source 1..20: mol_type = other DNA
attctcacatacctttagga

SEQ ID NO: 41422 - DNA, 20 bp, synthetic construct
  misc_feature 1..20: note = chemically synthesized
  source 1..20: mol_type = other DNA
catacctttaggaaagaact

SEQ ID NO: 41423 - DNA, 20 bp, synthetic construct
  misc_feature 1..20: note = chemically synthesized
  source 1..20: mol_type = other DNA
aacttagcacccttcccaca

SEQ ID NO: 41424 - DNA, 20 bp, synthetic construct
  misc_feature 1..20: note = chemically synthesized
  source 1..20: mol_type = other DNA
gccatcccaataactcattt

SEQ ID NO: 41425 - DNA, 20 bp, synthetic construct
  misc_feature 1..20: note = chemically synthesized
  source 1..20: mol_type = other DNA
ctcaacccttgactttataa

SEQ ID NO: 41426 - DNA, 20 bp, synthetic construct
  misc_feature 1..20: note = chemically synthesized
  source 1..20: mol_type = other DNA
ccttgactttataaaagtct

SEQ ID NO: 41427 - DNA, 20 bp, synthetic construct
  misc_feature 1..20: note = chemically synthesized
  source 1..20: mol_type = other DNA
cttgactttataaaagtctt

SEQ ID NO: 41428 - DNA, 20 bp, synthetic construct
  misc_feature 1..20: note = chemically synthesized
  source 1..20: mol_type = other DNA
gactttataaaagtcttggg

SEQ ID NO: 41429 - DNA, 20 bp, synthetic construct
  misc_feature 1..20: note = chemically synthesized
  source 1..20: mol_type = other DNA
tataaaagtcttgggcagta

SEQ ID NO: 41430 - DNA, 20 bp, synthetic construct
  misc_feature 1..20: note = chemically synthesized
  source 1..20: mol_type = other DNA
taaaagtcttgggcagtata

SEQ ID NO: 41431 - DNA, 20 bp, synthetic construct
  misc_feature 1..20: note = chemically synthesized
  source 1..20: mol_type = other DNA
aagtcttgggcagtatagag

SEQ ID NO: 41432 - DNA, 20 bp, synthetic construct
  misc_feature 1..20: note = chemically synthesized
  source 1..20: mol_type = other DNA
gtcttgggcagtatagagca

SEQ ID NO: 41433 - DNA, 20 bp, synthetic construct
  misc_feature 1..20: note = chemically synthesized
  source 1..20: mol_type = other DNA
ggcagtatagagcagagatt

SEQ ID NO: 41434 - DNA, 20 bp, synthetic construct
  misc_feature 1..20: note = chemically synthesized
  source 1..20: mol_type = other DNA
cagtatagagcagagattaa

SEQ ID NO: 41435 - DNA, 20 bp, synthetic construct
  misc_feature 1..20: note = chemically synthesized
  source 1..20: mol_type = other DNA
tagagcagagattaagagta

SEQ ID NO: 41436 - DNA, 20 bp, synthetic construct
  misc_feature 1..20: note = chemically synthesized
  source 1..20: mol_type = other DNA
gagattaagagtacagatgc

SEQ ID NO: 41437 - DNA, 20 bp, synthetic construct
  misc_feature 1..20: note = chemically synthesized
  source 1..20: mol_type = other DNA
gattaagagtacagatgctg

SEQ ID NO: 41438 - DNA, 20 bp, synthetic construct
  misc_feature 1..20: note = chemically synthesized
  source 1..20: mol_type = other DNA
aagagtacagatgctggagc

SEQ ID NO: 41439 - DNA, 20 bp, synthetic construct
  misc_feature 1..20: note = chemically synthesized
  source 1..20: mol_type = other DNA
atgctggagccagaccacct

SEQ ID NO: 41440 - DNA, 20 bp, synthetic construct
  misc_feature 1..20: note = chemically synthesized
  source 1..20: mol_type = other DNA
agccagaccacctgagtgat

SEQ ID NO: 41441 - DNA, 20 bp, synthetic construct
  misc_feature 1..20: note = chemically synthesized
  source 1..20: mol_type = other DNA
cacctgagtgattagtgact

SEQ ID NO: 41442 - DNA, 20 bp, synthetic construct
  misc_feature 1..20: note = chemically synthesized
  source 1..20: mol_type = other DNA
attagtgactcagtttctct

SEQ ID NO: 41443 - DNA, 20 bp, synthetic construct
  misc_feature 1..20: note = chemically synthesized
  source 1..20: mol_type = other DNA
agtgactcagtttctcttag

SEQ ID NO: 41444 - DNA, 20 bp, synthetic construct
  misc_feature 1..20: note = chemically synthesized
  source 1..20: mol_type = other DNA
ctcttagtagttgtatgact

SEQ ID NO: 41445 - DNA, 20 bp, synthetic construct
  misc_feature 1..20: note = chemically synthesized
  source 1..20: mol_type = other DNA
cagtttcttcatctgtaaaa

SEQ ID NO: 41446 - DNA, 20 bp, synthetic construct
  misc_feature 1..20: note = chemically synthesized
  source 1..20: mol_type = other DNA
gtttcttcatctgtaaaatg

SEQ ID NO: 41447 - DNA, 20 bp, synthetic construct
  misc_feature 1..20: note = chemically synthesized
  source 1..20: mol_type = other DNA
tttcttcatctgtaaaatgg

SEQ ID NO: 41448 - DNA, 20 bp, synthetic construct
  misc_feature 1..20: note = chemically synthesized
  source 1..20: mol_type = other DNA
ttcttcatctgtaaaatgga

SEQ ID NO: 41449 - DNA, 20 bp, synthetic construct
  misc_feature 1..20: note = chemically synthesized
  source 1..20: mol_type = other DNA
aaaatggagggttttttaat

SEQ ID NO: 41450 - DNA, 20 bp, synthetic construct
  misc_feature 1..20: note = chemically synthesized
  source 1..20: mol_type = other DNA
tttttaattagtttgttttt

SEQ ID NO: 41451 - DNA, 20 bp, synthetic construct
  misc_feature 1..20: note = chemically synthesized
  source 1..20: mol_type = other DNA
taattagtttgtttttgaga

SEQ ID NO: 41452 - DNA, 20 bp, synthetic construct
  misc_feature 1..20: note = chemically synthesized
  source 1..20: mol_type = other DNA
aattagtttgtttttgagaa

SEQ ID NO: 41453 - DNA, 20 bp, synthetic construct
  misc_feature 1..20: note = chemically synthesized
  source 1..20: mol_type = other DNA
attagtttgtttttgagaaa

SEQ ID NO: 41454 - DNA, 20 bp, synthetic construct
  misc_feature 1..20: note = chemically synthesized
  source 1..20: mol_type = other DNA
gtctcactctgtcacccaaa

SEQ ID NO: 41455 - DNA, 20 bp, synthetic construct
  misc_feature 1..20: note = chemically synthesized
  source 1..20: mol_type = other DNA
tctcactctgtcacccaaat

SEQ ID NO: 41456 - DNA, 20 bp, synthetic construct
  misc_feature 1..20: note = chemically synthesized
  source 1..20: mol_type = other DNA
tcactctgtcacccaaatgg

SEQ ID NO: 41457 - DNA, 20 bp, synthetic construct
  misc_feature 1..20: note = chemically synthesized
  source 1..20: mol_type = other DNA
ctgtcacccaaatgggagtg

SEQ ID NO: 41458 - DNA, 20 bp, synthetic construct
  misc_feature 1..20: note = chemically synthesized
  source 1..20: mol_type = other DNA
tcacccaaatgggagtgtag

SEQ ID NO: 41459 - DNA, 20 bp, synthetic construct
  misc_feature 1..20: note = chemically synthesized
  source 1..20: mol_type = other DNA
ggagtgtagtggcaaaatct

SEQ ID NO: 41460 - DNA, 20 bp, synthetic construct
  misc_feature 1..20: note = chemically synthesized
  source 1..20: mol_type = other DNA
tcactgcaacttgcacttcc

SEQ ID NO: 41461 - DNA, 20 bp, synthetic construct
  misc_feature 1..20: note = chemically synthesized
  source 1..20: mol_type = other DNA
cactgcaacttgcacttccc

SEQ ID NO: 41462 - DNA, 20 bp, synthetic construct
  misc_feature 1..20: note = chemically synthesized
  source 1..20: mol_type = other DNA
aacttgcacttcccaggctc

SEQ ID NO: 41463 - DNA, 20 bp, synthetic construct
  misc_feature 1..20: note = chemically synthesized
  source 1..20: mol_type = other DNA
ttgcacttcccaggctcaag

SEQ ID NO: 41464 - DNA, 20 bp, synthetic construct
  misc_feature 1..20: note = chemically synthesized
  source 1..20: mol_type = other DNA
tcctcccacctcaacatcct

SEQ ID NO: 41465 - DNA, 20 bp, synthetic construct
  misc_feature 1..20: note = chemically synthesized
  source 1..20: mol_type = other DNA
tcccacctcaacatcctgag

SEQ ID NO: 41466 - DNA, 20 bp, synthetic construct
  misc_feature 1..20: note = chemically synthesized
  source 1..20: mol_type = other DNA
acctcaacatcctgagtagc

SEQ ID NO: 41467 - DNA, 20 bp, synthetic construct
  misc_feature 1..20: note = chemically synthesized
  source 1..20: mol_type = other DNA
atcctgagtagctggaacca

SEQ ID NO: 41468 - DNA, 20 bp, synthetic construct
  misc_feature 1..20: note = chemically synthesized
  source 1..20: mol_type = other DNA
tcctgagtagctggaaccac

SEQ ID NO: 41469 - DNA, 20 bp, synthetic construct
  misc_feature 1..20: note = chemically synthesized
  source 1..20: mol_type = other DNA
tcgctaattttttgtatttt

SEQ ID NO: 41470 - DNA, 20 bp, synthetic construct
  misc_feature 1..20: note = chemically synthesized
  source 1..20: mol_type = other DNA
ctaattttttgtatttttgg

SEQ ID NO: 41471 - DNA, 20 bp, synthetic construct
  misc_feature 1..20: note = chemically synthesized
  source 1..20: mol_type = other DNA
aattttttgtatttttggta

SEQ ID NO: 41472 - DNA, 20 bp, synthetic construct
  misc_feature 1..20: note = chemically synthesized
  source 1..20: mol_type = other DNA
ttttgtatttttggtagaga

SEQ ID NO: 41473 - DNA, 20 bp, synthetic construct
  misc_feature 1..20: note = chemically synthesized
  source 1..20: mol_type = other DNA
tttgtatttttggtagagat

SEQ ID NO: 41474 - DNA, 20 bp, synthetic construct
  misc_feature 1..20: note = chemically synthesized
  source 1..20: mol_type = other DNA
ttgtatttttggtagagatg

SEQ ID NO: 41475 - DNA, 20 bp, synthetic construct
  misc_feature 1..20: note = chemically synthesized
  source 1..20: mol_type = other DNA
atggggtttcacatgttaca

SEQ ID NO: 41476 - DNA, 20 bp, synthetic construct
  misc_feature 1..20: note = chemically synthesized
  source 1..20: mol_type = other DNA
tggggtttcacatgttacac

SEQ ID NO: 41477 - DNA, 20 bp, synthetic construct
  misc_feature 1..20: note = chemically synthesized
  source 1..20: mol_type = other DNA
gtttcacatgttacacagga

SEQ ID NO: 41478 - DNA, 20 bp, synthetic construct
  misc_feature 1..20: note = chemically synthesized
  source 1..20: mol_type = other DNA
catgttacacaggatggtct

SEQ ID NO: 41479 - DNA, 20 bp, synthetic construct
  misc_feature 1..20: note = chemically synthesized
  source 1..20: mol_type = other DNA
cacaggatggtctcagactc

SEQ ID NO: 41480 - DNA, 20 bp, synthetic construct
  misc_feature 1..20: note = chemically synthesized
  source 1..20: mol_type = other DNA
caggatggtctcagactccg

SEQ ID NO: 41481 - DNA, 20 bp, synthetic construct
  misc_feature 1..20: note = chemically synthesized
  source 1..20: mol_type = other DNA
ggtctcagactccggagctc

SEQ ID NO: 41482 - DNA, 20 bp, synthetic construct
  misc_feature 1..20: note = chemically synthesized
  source 1..20: mol_type = other DNA
ctcaagcaatctgcccacct

SEQ ID NO: 41483 - DNA, 20 bp, synthetic construct
  misc_feature 1..20: note = chemically synthesized
  source 1..20: mol_type = other DNA
ctgcccacctcagccttcca

SEQ ID NO: 41484 - DNA, 20 bp, synthetic construct
  misc_feature 1..20: note = chemically synthesized
  source 1..20: mol_type = other DNA
acctcagccttccaaagtgc

SEQ ID NO: 41485 - DNA, 20 bp, synthetic construct
  misc_feature 1..20: note = chemically synthesized
  source 1..20: mol_type = other DNA
cctcagccttccaaagtgct

SEQ ID NO: 41486 - DNA, 20 bp, synthetic construct
  misc_feature 1..20: note = chemically synthesized
  source 1..20: mol_type = other DNA
ttccaaagtgctgggattat

SEQ ID NO: 41487 - DNA, 20 bp, synthetic construct
  misc_feature 1..20: note = chemically synthesized
  source 1..20: mol_type = other DNA
tgggattataagcatgatta

SEQ ID NO: 41488 - DNA, 20 bp, synthetic construct
  misc_feature 1..20: note = chemically synthesized
  source 1..20: mol_type = other DNA
gggattataagcatgattac

SEQ ID NO: 41489 - DNA, 20 bp, synthetic construct
  misc_feature 1..20: note = chemically synthesized
  source 1..20: mol_type = other DNA
gattataagcatgattacag

SEQ ID NO: 41490 - DNA, 20 bp, synthetic construct
  misc_feature 1..20: note = chemically synthesized
  source 1..20: mol_type = other DNA
catgattacaggagttttaa

SEQ ID NO: 41491 - DNA, 20 bp, synthetic construct
  misc_feature 1..20: note = chemically synthesized
  source 1..20: mol_type = other DNA
atgattacaggagttttaac

SEQ ID NO: 41492 - DNA, 20 bp, synthetic construct
  misc_feature 1..20: note = chemically synthesized
  source 1..20: mol_type = other DNA
aggagttttaacaggctcat

SEQ ID NO: 41493 - DNA, 20 bp, synthetic construct
  misc_feature 1..20: note = chemically synthesized
  source 1..20: mol_type = other DNA
aggctcataagattgttctg

SEQ ID NO: 41494 - DNA, 20 bp, synthetic construct
  misc_feature 1..20: note = chemically synthesized
  source 1..20: mol_type = other DNA
ataagattgttctgcagccc

SEQ ID NO: 41495 - DNA, 20 bp, synthetic construct
  misc_feature 1..20: note = chemically synthesized
  source 1..20: mol_type = other DNA
gattgttctgcagcccgagt

SEQ ID NO: 41496 - DNA, 20 bp, synthetic construct
  misc_feature 1..20: note = chemically synthesized
  source 1..20: mol_type = other DNA
cgagtgagttaatacatgca

SEQ ID NO: 41497 - DNA, 20 bp, synthetic construct
  misc_feature 1..20: note = chemically synthesized
  source 1..20: mol_type = other DNA
agtgagttaatacatgcaaa

SEQ ID NO: 41498 - DNA, 20 bp, synthetic construct
  misc_feature 1..20: note = chemically synthesized
  source 1..20: mol_type = other DNA
taatacatgcaaagagttta

SEQ ID NO: 41499 - DNA, 20 bp, synthetic construct
  misc_feature 1..20: note = chemically synthesized
  source 1..20: mol_type = other DNA
tacatgcaaagagtttaaag

SEQ ID NO: 41500 - DNA, 20 bp, synthetic construct
  misc_feature 1..20: note = chemically synthesized
  source 1..20: mol_type = other DNA
cttataaatgctaactactc

SEQ ID NO: 41501 - DNA, 20 bp, synthetic construct
  misc_feature 1..20: note = chemically synthesized
  source 1..20: mol_type = other DNA
actactctagaaatgtttgc

SEQ ID NO: 41502 - DNA, 20 bp, synthetic construct
  misc_feature 1..20: note = chemically synthesized
  source 1..20: mol_type = other DNA
aactgcaatcattcttgctg

SEQ ID NO: 41503 - DNA, 20 bp, synthetic construct
  misc_feature 1..20: note = chemically synthesized
  source 1..20: mol_type = other DNA
actgcaatcattcttgctgc

SEQ ID NO: 41504 - DNA, 20 bp, synthetic construct
  misc_feature 1..20: note = chemically synthesized
  source 1..20: mol_type = other DNA
ttcttgctgcaggtgaaaac

SEQ ID NO: 41505 - DNA, 20 bp, synthetic construct
  misc_feature 1..20: note = chemically synthesized
  source 1..20: mol_type = other DNA
aaaataactgacatttattg

SEQ ID NO: 41506 - DNA, 20 bp, synthetic construct
  misc_feature 1..20: note = chemically synthesized
  source 1..20: mol_type = other DNA
aaataactgacatttattga

SEQ ID NO: 41507 - DNA, 20 bp, synthetic construct
  misc_feature 1..20: note = chemically synthesized
  source 1..20: mol_type = other DNA
tgacatttattgaaggctat

SEQ ID NO: 41508 - DNA, 20 bp, synthetic construct
  misc_feature 1..20: note = chemically synthesized
  source 1..20: mol_type = other DNA
acatttattgaaggctatca

SEQ ID NO: 41509 - DNA, 20 bp, synthetic construct
  misc_feature 1..20: note = chemically synthesized
  source 1..20: mol_type = other DNA
aggctatcagagactgtaat

SEQ ID NO: 41510 - DNA, 20 bp, synthetic construct
  misc_feature 1..20: note = chemically synthesized
  source 1..20: mol_type = other DNA
ttaatcatatttaatactct

SEQ ID NO: 41511 - DNA, 20 bp, synthetic construct
  misc_feature 1..20: note = chemically synthesized
  source 1..20: mol_type = other DNA
ttaatactcttggattcttt

SEQ ID NO: 41512 - DNA, 20 bp, synthetic construct
  misc_feature 1..20: note = chemically synthesized
  source 1..20: mol_type = other DNA
taatactcttggattctttc

SEQ ID NO: 41513 - DNA, 20 bp, synthetic construct
  misc_feature 1..20: note = chemically synthesized
  source 1..20: mol_type = other DNA
tactcttggattctttcagg

SEQ ID NO: 41514 - DNA, 20 bp, synthetic construct
  misc_feature 1..20: note = chemically synthesized
  source 1..20: mol_type = other DNA
ttattatccccattttacta

SEQ ID NO: 41515 - DNA, 20 bp, synthetic construct
  misc_feature 1..20: note = chemically synthesized
  source 1..20: mol_type = other DNA
aactacctctcaacttgctc

SEQ ID NO: 41516 - DNA, 20 bp, synthetic construct
  misc_feature 1..20: note = chemically synthesized
  source 1..20: mol_type = other DNA
cacacacaaacataaactac

SEQ ID NO: 41517 - DNA, 20 bp, synthetic construct
  misc_feature 1..20: note = chemically synthesized
  source 1..20: mol_type = other DNA
aaacataaactactagcaaa

SEQ ID NO: 41518 - DNA, 20 bp, synthetic construct
  misc_feature 1..20: note = chemically synthesized
  source 1..20: mol_type = other DNA
cataaactactagcaaatag

SEQ ID NO: 41519 - DNA, 20 bp, synthetic construct
  misc_feature 1..20: note = chemically synthesized
  source 1..20: mol_type = other DNA
tactagcaaatagtagaatt

SEQ ID NO: 41520 - DNA, 20 bp, synthetic construct
  misc_feature 1..20: note = chemically synthesized
  source 1..20: mol_type = other DNA
caaatagtagaattgagatt

SEQ ID NO: 41521 - DNA, 20 bp, synthetic construct
  misc_feature 1..20: note = chemically synthesized
  source 1..20: mol_type = other DNA
atttattgacatgtacttct

SEQ ID NO: 41522 - DNA, 20 bp, synthetic construct
  misc_feature 1..20: note = chemically synthesized
  source 1..20: mol_type = other DNA
tattgacatgtacttcttgg

SEQ ID NO: 41523 - DNA, 20 bp, synthetic construct
  misc_feature 1..20: note = chemically synthesized
  source 1..20: mol_type = other DNA
cttcttggcagtctgtatgc

SEQ ID NO: 41524 - DNA, 20 bp, synthetic construct
  misc_feature 1..20: note = chemically synthesized
  source 1..20: mol_type = other DNA
gcagtctgtatgctggatgc

SEQ ID NO: 41525 - DNA, 20 bp, synthetic construct
  misc_feature 1..20: note = chemically synthesized
  source 1..20: mol_type = other DNA
cagtctgtatgctggatgct

SEQ ID NO: 41526 - DNA, 20 bp, synthetic construct
  misc_feature 1..20: note = chemically synthesized
  source 1..20: mol_type = other DNA
agtctgtatgctggatgctg

SEQ ID NO: 41527 - DNA, 20 bp, synthetic construct
  misc_feature 1..20: note = chemically synthesized
  source 1..20: mol_type = other DNA
tgctggatgctggggataca

SEQ ID NO: 41528 - DNA, 20 bp, synthetic construct
  misc_feature 1..20: note = chemically synthesized
  source 1..20: mol_type = other DNA
atacaaagatgtttaaattt

SEQ ID NO: 41529 - DNA, 20 bp, synthetic construct
  misc_feature 1..20: note = chemically synthesized
  source 1..20: mol_type = other DNA
agatgtttaaatttaagctc

SEQ ID NO: 41530 - DNA, 20 bp, synthetic construct
  misc_feature 1..20: note = chemically synthesized
  source 1..20: mol_type = other DNA
agctccagtctctgcttcca

SEQ ID NO: 41531 - DNA, 20 bp, synthetic construct
  misc_feature 1..20: note = chemically synthesized
  source 1..20: mol_type = other DNA
gctccagtctctgcttccaa

SEQ ID NO: 41532 - DNA, 20 bp, synthetic construct
  misc_feature 1..20: note = chemically synthesized
  source 1..20: mol_type = other DNA
ctctgcttccaaaggcctcc

SEQ ID NO: 41533 - DNA, 20 bp, synthetic construct
  misc_feature 1..20: note = chemically synthesized
  source 1..20: mol_type = other DNA
tctgcttccaaaggcctccc

SEQ ID NO: 41534 - DNA, 20 bp, synthetic construct
  misc_feature 1..20: note = chemically synthesized
  source 1..20: mol_type = other DNA
ttccaaaggcctcccaggcc

SEQ ID NO: 41535 - DNA, 20 bp, synthetic construct
  misc_feature 1..20: note = chemically synthesized
  source 1..20: mol_type = other DNA
cccaggccaagttatccatt

SEQ ID NO: 41536 - DNA, 20 bp, synthetic construct
  misc_feature 1..20: note = chemically synthesized
  source 1..20: mol_type = other DNA
ggccaagttatccattcaga

SEQ ID NO: 41537 - DNA, 20 bp, synthetic construct
  misc_feature 1..20: note = chemically synthesized
  source 1..20: mol_type = other DNA
tgcattccactgtttttcct

SEQ ID NO: 41538 - DNA, 20 bp, synthetic construct
  misc_feature 1..20: note = chemically synthesized
  source 1..20: mol_type = other DNA
tattcgtctgtgtcctgctc

SEQ ID NO: 41539 - DNA, 20 bp, synthetic construct
  misc_feature 1..20: note = chemically synthesized
  source 1..20: mol_type = other DNA
attcgtctgtgtcctgctct

SEQ ID NO: 41540 - DNA, 20 bp, synthetic construct
  misc_feature 1..20: note = chemically synthesized
  source 1..20: mol_type = other DNA
tgtgtcctgctctgggatga

SEQ ID NO: 41541 - DNA, 20 bp, synthetic construct
  misc_feature 1..20: note = chemically synthesized
  source 1..20: mol_type = other DNA
tagtctgactttcctaacct

SEQ ID NO: 41542 - DNA, 20 bp, synthetic construct
  misc_feature 1..20: note = chemically synthesized
  source 1..20: mol_type = other DNA
gagcctaacatccctgacat

SEQ ID NO: 41543 - DNA, 20 bp, synthetic construct
  misc_feature 1..20: note = chemically synthesized
  source 1..20: mol_type = other DNA
agcctaacatccctgacatc

SEQ ID NO: 41544 - DNA, 20 bp, synthetic construct
  misc_feature 1..20: note = chemically synthesized
  source 1..20: mol_type = other DNA
taacatccctgacatcagga

SEQ ID NO: 41545 - DNA, 20 bp, synthetic construct
  misc_feature 1..20: note = chemically synthesized
  source 1..20: mol_type = other DNA
tcaggaaagactacaccatg

SEQ ID NO: 41546 - DNA, 20 bp, synthetic construct
  misc_feature 1..20: note = chemically synthesized
  source 1..20: mol_type = other DNA
aggaaagactacaccatgtg

SEQ ID NO: 41547 - DNA, 20 bp, synthetic construct
  misc_feature 1..20: note = chemically synthesized
  source 1..20: mol_type = other DNA
aaagactacaccatgtggag

SEQ ID NO: 41548 - DNA, 20 bp, synthetic construct
  misc_feature 1..20: note = chemically synthesized
  source 1..20: mol_type = other DNA
aagactacaccatgtggaga

SEQ ID NO: 41549 - DNA, 20 bp, synthetic construct
  misc_feature 1..20: note = chemically synthesized
  source 1..20: mol_type = other DNA
agactacaccatgtggagaa

SEQ ID NO: 41550 - DNA, 20 bp, synthetic construct
  misc_feature 1..20: note = chemically synthesized
  source 1..20: mol_type = other DNA
gactacaccatgtggagaag

SEQ ID NO: 41551 - DNA, 20 bp, synthetic construct
  misc_feature 1..20: note = chemically synthesized
  source 1..20: mol_type = other DNA
tacaccatgtggagaagggg

SEQ ID NO: 41552 - DNA, 20 bp, synthetic construct
  misc_feature 1..20: note = chemically synthesized
  source 1..20: mol_type = other DNA
accatgtggagaaggggtgg

SEQ ID NO: 41553 - DNA, 20 bp, synthetic construct
  misc_feature 1..20: note = chemically synthesized
  source 1..20: mol_type = other DNA
gttttgattgctgctgtctt

SEQ ID NO: 41554 - DNA, 20 bp, synthetic construct
  misc_feature 1..20: note = chemically synthesized
  source 1..20: mol_type = other DNA
tgattgctgctgtcttcagt

SEQ ID NO: 41555 - DNA, 20 bp, synthetic construct
  misc_feature 1..20: note = chemically synthesized
  source 1..20: mol_type = other DNA
tgctgctgtcttcagttaga

SEQ ID NO: 41556 - DNA, 20 bp, synthetic construct
  misc_feature 1..20: note = chemically synthesized
  source 1..20: mol_type = other DNA
gttagatggttaactttgtg

SEQ ID NO: 41557 - DNA, 20 bp, synthetic construct
  misc_feature 1..20: note = chemically synthesized
  source 1..20: mol_type = other DNA
ctttgtgaagttgaaaactg

SEQ ID NO: 41558 - DNA, 20 bp, synthetic construct
  misc_feature 1..20: note = chemically synthesized
  source 1..20: mol_type = other DNA
agttgaaaactgtggctctc

SEQ ID NO: 41559 - DNA, 20 bp, synthetic construct
  misc_feature 1..20: note = chemically synthesized
  source 1..20: mol_type = other DNA
gtggctctctggttgactgt

SEQ ID NO: 41560 - DNA, 20 bp, synthetic construct
  misc_feature 1..20: note = chemically synthesized
  source 1..20: mol_type = other DNA
ggctctctggttgactgtta

SEQ ID NO: 41561 - DNA, 20 bp, synthetic construct
  misc_feature 1..20: note = chemically synthesized
  source 1..20: mol_type = other DNA
ctggttgactgttagagttc

SEQ ID NO: 41562 - DNA, 20 bp, synthetic construct
  misc_feature 1..20: note = chemically synthesized
  source 1..20: mol_type = other DNA
taacaaatgcatgaatgctt

SEQ ID NO: 41563 - DNA, 20 bp, synthetic construct
  misc_feature 1..20: note = chemically synthesized
  source 1..20: mol_type = other DNA
tgcatgaatgcttcagaata

SEQ ID NO: 41564 - DNA, 20 bp, synthetic construct
  misc_feature 1..20: note = chemically synthesized
  source 1..20: mol_type = other DNA
gcatgaatgcttcagaatat

SEQ ID NO: 41565 - DNA, 20 bp, synthetic construct
  misc_feature 1..20: note = chemically synthesized
  source 1..20: mol_type = other DNA
aatatgggaatattatcttc

SEQ ID NO: 41566 - DNA, 20 bp, synthetic construct
  misc_feature 1..20: note = chemically synthesized
  source 1..20: mol_type = other DNA
gggaatattatcttctggaa

SEQ ID NO: 41567 - DNA, 20 bp, synthetic construct
  misc_feature 1..20: note = chemically synthesized
  source 1..20: mol_type = other DNA
ggaatattatcttctggaat

SEQ ID NO: 41568 - DNA, 20 bp, synthetic construct
  misc_feature 1..20: note = chemically synthesized
  source 1..20: mol_type = other DNA
gaatattatcttctggaata

SEQ ID NO: 41569 - DNA, 20 bp, synthetic construct
  misc_feature 1..20: note = chemically synthesized
  source 1..20: mol_type = other DNA
atcttctggaatagggaatc

SEQ ID NO: 41570 - DNA, 20 bp, synthetic construct
  misc_feature 1..20: note = chemically synthesized
  source 1..20: mol_type = other DNA
tcaagttatattatgtaacc

SEQ ID NO: 41571 - DNA, 20 bp, synthetic construct
  misc_feature 1..20: note = chemically synthesized
  source 1..20: mol_type = other DNA
caagttatattatgtaaccc

SEQ ID NO: 41572 - DNA, 20 bp, synthetic construct
  misc_feature 1..20: note = chemically synthesized
  source 1..20: mol_type = other DNA
tatattatgtaacccaggat

SEQ ID NO: 41573 - DNA, 20 bp, synthetic construct
  misc_feature 1..20: note = chemically synthesized
  source 1..20: mol_type = other DNA
attatgtaacccaggattag

SEQ ID NO: 41574 - DNA, 20 bp, synthetic construct
  misc_feature 1..20: note = chemically synthesized
  source 1..20: mol_type = other DNA
tagaagattcttctgtgtgt

SEQ ID NO: 41575 - DNA, 20 bp, synthetic construct
  misc_feature 1..20: note = chemically synthesized
  source 1..20: mol_type = other DNA
gtaagaatttcataaacatt

SEQ ID NO: 41576 - DNA, 20 bp, synthetic construct
  misc_feature 1..20: note = chemically synthesized
  source 1..20: mol_type = other DNA
ttcataaacattaagctgtc

SEQ ID NO: 41577 - DNA, 20 bp, synthetic construct
  misc_feature 1..20: note = chemically synthesized
  source 1..20: mol_type = other DNA
aacattaagctgtctagcaa

SEQ ID NO: 41578 - DNA, 20 bp, synthetic construct
  misc_feature 1..20: note = chemically synthesized
  source 1..20: mol_type = other DNA
ttaagctgtctagcaaaagc

SEQ ID NO: 41579 - DNA, 20 bp, synthetic construct
  misc_feature 1..20: note = chemically synthesized
  source 1..20: mol_type = other DNA
taagctgtctagcaaaagca

SEQ ID NO: 41580 - DNA, 20 bp, synthetic construct
  misc_feature 1..20: note = chemically synthesized
  source 1..20: mol_type = other DNA
aagctgtctagcaaaagcaa

SEQ ID NO: 41581 - DNA, 20 bp, synthetic construct
  misc_feature 1..20: note = chemically synthesized
  source 1..20: mol_type = other DNA
gtctagcaaaagcaagggct

SEQ ID NO: 41582 - DNA, 20 bp, synthetic construct
  misc_feature 1..20: note = chemically synthesized
  source 1..20: mol_type = other DNA
caagggcttggaaaatctgt

SEQ ID NO: 41583 - DNA, 20 bp, synthetic construct
  misc_feature 1..20: note = chemically synthesized
  source 1..20: mol_type = other DNA
tctgtgagctcctcaccata

SEQ ID NO: 41584 - DNA, 20 bp, synthetic construct
  misc_feature 1..20: note = chemically synthesized
  source 1..20: mol_type = other DNA
tgagctcctcaccatataga

SEQ ID NO: 41585 - DNA, 20 bp, synthetic construct
  misc_feature 1..20: note = chemically synthesized
  source 1..20: mol_type = other DNA
catcattgaataaatcccta

SEQ ID NO: 41586 - DNA, 20 bp, synthetic construct
  misc_feature 1..20: note = chemically synthesized
  source 1..20: mol_type = other DNA
atcattgaataaatccctat

SEQ ID NO: 41587 - DNA, 20 bp, synthetic construct
  misc_feature 1..20: note = chemically synthesized
  source 1..20: mol_type = other DNA
tcattgaataaatccctata

SEQ ID NO: 41588 - DNA, 20 bp, synthetic construct
  misc_feature 1..20: note = chemically synthesized
  source 1..20: mol_type = other DNA
cattgaataaatccctatag

SEQ ID NO: 41589 - DNA, 20 bp, synthetic construct
  misc_feature 1..20: note = chemically synthesized
  source 1..20: mol_type = other DNA
ctataggggatttctaccct

SEQ ID NO: 41590 - DNA, 20 bp, synthetic construct
  misc_feature 1..20: note = chemically synthesized
  source 1..20: mol_type = other DNA
gggatttctaccctgagcaa

SEQ ID NO: 41591 - DNA, 20 bp, synthetic construct
  misc_feature 1..20: note = chemically synthesized
  source 1..20: mol_type = other DNA
ggatttctaccctgagcaaa

SEQ ID NO: 41592 - DNA, 20 bp, synthetic construct
  misc_feature 1..20: note = chemically synthesized
  source 1..20: mol_type = other DNA
ttctaccctgagcaaaaggc

SEQ ID NO: 41593 - DNA, 20 bp, synthetic construct
  misc_feature 1..20: note = chemically synthesized
  source 1..20: mol_type = other DNA
gattaattcccaaactcata

SEQ ID NO: 41594 - DNA, 20 bp, synthetic construct
  misc_feature 1..20: note = chemically synthesized
  source 1..20: mol_type = other DNA
tcccaaactcatatagctct

SEQ ID NO: 41595 - DNA, 20 bp, synthetic construct
  misc_feature 1..20: note = chemically synthesized
  source 1..20: mol_type = other DNA
aaactcatatagctctgaga

SEQ ID NO: 41596 - DNA, 20 bp, synthetic construct
  misc_feature 1..20: note = chemically synthesized
  source 1..20: mol_type = other DNA
catatgcacaacaataaatg

SEQ ID NO: 41597 - DNA, 20 bp, synthetic construct
  misc_feature 1..20: note = chemically synthesized
  source 1..20: mol_type = other DNA
atatgcacaacaataaatgc

SEQ ID NO: 41598 - DNA, 20 bp, synthetic construct
  misc_feature 1..20: note = chemically synthesized
  source 1..20: mol_type = other DNA
cacaacaataaatgcaggcc

SEQ ID NO: 41599 - DNA, 20 bp, synthetic construct
  misc_feature 1..20: note = chemically synthesized
  source 1..20: mol_type = other DNA
acaacaataaatgcaggcct

SEQ ID NO: 41600 - DNA, 20 bp, synthetic construct
  misc_feature 1..20: note = chemically synthesized
  source 1..20: mol_type = other DNA
tgcaggcctaggcatgactg

SEQ ID NO: 41601 - DNA, 20 bp, synthetic construct
  misc_feature 1..20: note = chemically synthesized
  source 1..20: mol_type = other DNA
gcaggcctaggcatgactga

SEQ ID NO: 41602 - DNA, 20 bp, synthetic construct
  misc_feature 1..20: note = chemically synthesized
  source 1..20: mol_type = other DNA
gaaggctctctcataattct

SEQ ID NO: 41603 - DNA, 20 bp, synthetic construct
  misc_feature 1..20: note = chemically synthesized
  source 1..20: mol_type = other DNA
taattcttggttgcatgaat

SEQ ID NO: 41604 - DNA, 20 bp, synthetic construct
  misc_feature 1..20: note = chemically synthesized
  source 1..20: mol_type = other DNA
tgcatgaatcagattatcaa

SEQ ID NO: 41605 - DNA, 20 bp, synthetic construct
  misc_feature 1..20: note = chemically synthesized
  source 1..20: mol_type = other DNA
agattatcaacagaaatgtt

SEQ ID NO: 41606 - DNA, 20 bp, synthetic construct
  misc_feature 1..20: note = chemically synthesized
  source 1..20: mol_type = other DNA
agaaatgttgagacaaacta

SEQ ID NO: 41607 - DNA, 20 bp, synthetic construct
  misc_feature 1..20: note = chemically synthesized
  source 1..20: mol_type = other DNA
gaaatgttgagacaaactat

SEQ ID NO: 41608 - DNA, 20 bp, synthetic construct
  misc_feature 1..20: note = chemically synthesized
  source 1..20: mol_type = other DNA
aaatgttgagacaaactatg

SEQ ID NO: 41609 - DNA, 20 bp, synthetic construct
  misc_feature 1..20: note = chemically synthesized
  source 1..20: mol_type = other DNA
tgttgagacaaactatgggg

SEQ ID NO: 41610 - DNA, 20 bp, synthetic construct
  misc_feature 1..20: note = chemically synthesized
  source 1..20: mol_type = other DNA
tgagacaaactatggggaag

SEQ ID NO: 41611 - DNA, 20 bp, synthetic construct
  misc_feature 1..20: note = chemically synthesized
  source 1..20: mol_type = other DNA
gagacaaactatggggaagc

SEQ ID NO: 41612 - DNA, 20 bp, synthetic construct
  misc_feature 1..20: note = chemically synthesized
  source 1..20: mol_type = other DNA
agacaaactatggggaagca

SEQ ID NO: 41613 - DNA, 20 bp, synthetic construct
  misc_feature 1..20: note = chemically synthesized
  source 1..20: mol_type = other DNA
tatggggaagcagggtatga

SEQ ID NO: 41614 - DNA, 20 bp, synthetic construct
  misc_feature 1..20: note = chemically synthesized
  source 1..20: mol_type = other DNA
tggggaagcagggtatgaaa

SEQ ID NO: 41615 - DNA, 20 bp, synthetic construct
  misc_feature 1..20: note = chemically synthesized
  source 1..20: mol_type = other DNA
tgaaagagctctgaatgaaa

SEQ ID NO: 41616 - DNA, 20 bp, synthetic construct
  misc_feature 1..20: note = chemically synthesized
  source 1..20: mol_type = other DNA
cgcaatgcttcctgcccatt

SEQ ID NO: 41617 - DNA, 20 bp, synthetic construct
  misc_feature 1..20: note = chemically synthesized
  source 1..20: mol_type = other DNA
gcaatgcttcctgcccattc

SEQ ID NO: 41618 - DNA, 20 bp, synthetic construct
  misc_feature 1..20: note = chemically synthesized
  source 1..20: mol_type = other DNA
caatgcttcctgcccattca

SEQ ID NO: 41619 - DNA, 20 bp, synthetic construct
  misc_feature 1..20: note = chemically synthesized
  source 1..20: mol_type = other DNA
ttcctgcccattcagggctc

SEQ ID NO: 41620 - DNA, 20 bp, synthetic construct
  misc_feature 1..20: note = chemically synthesized
  source 1..20: mol_type = other DNA
ccattcagggctccagcatg

SEQ ID NO: 41621 - DNA, 20 bp, synthetic construct
  misc_feature 1..20: note = chemically synthesized
  source 1..20: mol_type = other DNA
ggctccagcatgtagaaatc

SEQ ID NO: 41622 - DNA, 20 bp, synthetic construct
  misc_feature 1..20: note = chemically synthesized
  source 1..20: mol_type = other DNA
gctccagcatgtagaaatct

SEQ ID NO: 41623 - DNA, 20 bp, synthetic construct
  misc_feature 1..20: note = chemically synthesized
  source 1..20: mol_type = other DNA
ctccagcatgtagaaatctg

SEQ ID NO: 41624 - DNA, 20 bp, synthetic construct
  misc_feature 1..20: note = chemically synthesized
  source 1..20: mol_type = other DNA
tagaaatctggggctttgtg

SEQ ID NO: 41625 - DNA, 20 bp, synthetic construct
  misc_feature 1..20: note = chemically synthesized
  source 1..20: mol_type = other DNA
atctggggctttgtgaagac

SEQ ID NO: 41626 - DNA, 20 bp, synthetic construct
  misc_feature 1..20: note = chemically synthesized
  source 1..20: mol_type = other DNA
tgtgaagactggcttaaaat

SEQ ID NO: 41627 - DNA, 20 bp, synthetic construct
  misc_feature 1..20: note = chemically synthesized
  source 1..20: mol_type = other DNA
gaagactggcttaaaatcag

SEQ ID NO: 41628 - DNA, 20 bp, synthetic construct
  misc_feature 1..20: note = chemically synthesized
  source 1..20: mol_type = other DNA
cttaaaatcagaagccccat

SEQ ID NO: 41629 - DNA, 20 bp, synthetic construct
  misc_feature 1..20: note = chemically synthesized
  source 1..20: mol_type = other DNA
aatcagaagccccattggat

SEQ ID NO: 41630 - DNA, 20 bp, synthetic construct
  misc_feature 1..20: note = chemically synthesized
  source 1..20: mol_type = other DNA
tcagaagccccattggataa

SEQ ID NO: 41631 - DNA, 20 bp, synthetic construct
  misc_feature 1..20: note = chemically synthesized
  source 1..20: mol_type = other DNA
gaagccccattggataagag

SEQ ID NO: 41632 - DNA, 20 bp, synthetic construct
  misc_feature 1..20: note = chemically synthesized
  source 1..20: mol_type = other DNA
aagccccattggataagagt

SEQ ID NO: 41633 - DNA, 20 bp, synthetic construct
  misc_feature 1..20: note = chemically synthesized
  source 1..20: mol_type = other DNA
agccccattggataagagta

SEQ ID NO: 41634 - DNA, 20 bp, synthetic construct
  misc_feature 1..20: note = chemically synthesized
  source 1..20: mol_type = other DNA
cccattggataagagtaggg

SEQ ID NO: 41635 - DNA, 20 bp, synthetic construct
  misc_feature 1..20: note = chemically synthesized
  source 1..20: mol_type = other DNA
gataagagtagggaagaacc

SEQ ID NO: 41636 - DNA, 20 bp, synthetic construct
  misc_feature 1..20: note = chemically synthesized
  source 1..20: mol_type = other DNA
taagagtagggaagaaccta

SEQ ID NO: 41637 - DNA, 20 bp, synthetic construct
  misc_feature 1..20: note = chemically synthesized
  source 1..20: mol_type = other DNA
aagaacctagagcctacgct

SEQ ID NO: 41638 - DNA, 20 bp, synthetic construct
  misc_feature 1..20: note = chemically synthesized
  source 1..20: mol_type = other DNA
aacctagagcctacgctgag

SEQ ID NO: 41639 - DNA, 20 bp, synthetic construct
  misc_feature 1..20: note = chemically synthesized
  source 1..20: mol_type = other DNA
acctagagcctacgctgagc

SEQ ID NO: 41640 - DNA, 20 bp, synthetic construct
  misc_feature 1..20: note = chemically synthesized
  source 1..20: mol_type = other DNA
agcaggtttccttcatgtga

SEQ ID NO: 41641 - DNA, 20 bp, synthetic construct
  misc_feature 1..20: note = chemically synthesized
  source 1..20: mol_type = other DNA
gcaggtttccttcatgtgac

SEQ ID NO: 41642 - DNA, 20 bp, synthetic construct
  misc_feature 1..20: note = chemically synthesized
  source 1..20: mol_type = other DNA
caggtttccttcatgtgaca

SEQ ID NO: 41643 - DNA, 20 bp, synthetic construct
  misc_feature 1..20: note = chemically synthesized
  source 1..20: mol_type = other DNA
ggtttccttcatgtgacagg

SEQ ID NO: 41644 - DNA, 20 bp, synthetic construct
  misc_feature 1..20: note = chemically synthesized
  source 1..20: mol_type = other DNA
agcctcctgccccgaacttc

SEQ ID NO: 41645 - DNA, 20 bp, synthetic construct
  misc_feature 1..20: note = chemically synthesized
  source 1..20: mol_type = other DNA
gcctcctgccccgaacttcc

SEQ ID NO: 41646 - DNA, 20 bp, synthetic construct
  misc_feature 1..20: note = chemically synthesized
  source 1..20: mol_type = other DNA
cctcctgccccgaacttcca

SEQ ID NO: 41647 - DNA, 20 bp, synthetic construct
  misc_feature 1..20: note = chemically synthesized
  source 1..20: mol_type = other DNA
acttccagggatcctctctt

SEQ ID NO: 41648 - DNA, 20 bp, synthetic construct
  misc_feature 1..20: note = chemically synthesized
  source 1..20: mol_type = other DNA
ctctcttaagtgtttcctgc

SEQ ID NO: 41649 - DNA, 20 bp, synthetic construct
  misc_feature 1..20: note = chemically synthesized
  source 1..20: mol_type = other DNA
ggaatctcctcacttctatc

SEQ ID NO: 41650 - DNA, 20 bp, synthetic construct
  misc_feature 1..20: note = chemically synthesized
  source 1..20: mol_type = other DNA
tcctcacttctatctggaaa

SEQ ID NO: 41651 - DNA, 20 bp, synthetic construct
  misc_feature 1..20: note = chemically synthesized
  source 1..20: mol_type = other DNA
atctggaaatggtttctcca

SEQ ID NO: 41652 - DNA, 20 bp, synthetic construct
  misc_feature 1..20: note = chemically synthesized
  source 1..20: mol_type = other DNA
gaaatggtttctccacagtc

SEQ ID NO: 41653 - DNA, 20 bp, synthetic construct
  misc_feature 1..20: note = chemically synthesized
  source 1..20: mol_type = other DNA
tttctccacagtccagcccc

SEQ ID NO: 41654 - DNA, 20 bp, synthetic construct
  misc_feature 1..20: note = chemically synthesized
  source 1..20: mol_type = other DNA
tccacagtccagcccctggc

SEQ ID NO: 41655 - DNA, 20 bp, synthetic construct
  misc_feature 1..20: note = chemically synthesized
  source 1..20: mol_type = other DNA
tccagcccctggctagttga

SEQ ID NO: 41656 - DNA, 20 bp, synthetic construct
  misc_feature 1..20: note = chemically synthesized
  source 1..20: mol_type = other DNA
cagcccctggctagttgaaa

SEQ ID NO: 41657 - DNA, 20 bp, synthetic construct
  misc_feature 1..20: note = chemically synthesized
  source 1..20: mol_type = other DNA
agttgaaagagttacccatg

SEQ ID NO: 41658 - DNA, 20 bp, synthetic construct
  misc_feature 1..20: note = chemically synthesized
  source 1..20: mol_type = other DNA
ttgaaagagttacccatgca

SEQ ID NO: 41659 - DNA, 20 bp, synthetic construct
  misc_feature 1..20: note = chemically synthesized
  source 1..20: mol_type = other DNA
tgaaagagttacccatgcag

SEQ ID NO: 41660 - DNA, 20 bp, synthetic construct
  misc_feature 1..20: note = chemically synthesized
  source 1..20: mol_type = other DNA
tacccatgcagaggccctcc

SEQ ID NO: 41661 - DNA, 20 bp, synthetic construct
  misc_feature 1..20: note = chemically synthesized
  source 1..20: mol_type = other DNA
gcagaggccctcctagcatc

SEQ ID NO: 41662 - DNA, 20 bp, synthetic construct
  misc_feature 1..20: note = chemically synthesized
  source 1..20: mol_type = other DNA
agaggccctcctagcatcca

SEQ ID NO: 41663 - DNA, 20 bp, synthetic construct
  misc_feature 1..20: note = chemically synthesized
  source 1..20: mol_type = other DNA
ccctcctagcatccagagac

SEQ ID NO: 41664 - DNA, 20 bp, synthetic construct
  misc_feature 1..20: note = chemically synthesized
  source 1..20: mol_type = other DNA
agcatccagagactagtgct

SEQ ID NO: 41665 - DNA, 20 bp, synthetic construct
  misc_feature 1..20: note = chemically synthesized
  source 1..20: mol_type = other DNA
agtgcttagattcctacttt

SEQ ID NO: 41666 - DNA, 20 bp, synthetic construct
  misc_feature 1..20: note = chemically synthesized
  source 1..20: mol_type = other DNA
tagattcctactttcagcgt

SEQ ID NO: 41667 - DNA, 20 bp, synthetic construct
  misc_feature 1..20: note = chemically synthesized
  source 1..20: mol_type = other DNA
actttcagcgttggacaacc

SEQ ID NO: 41668 - DNA, 20 bp, synthetic construct
  misc_feature 1..20: note = chemically synthesized
  source 1..20: mol_type = other DNA
acaacctggatccacttgcc

SEQ ID NO: 41669 - DNA, 20 bp, synthetic construct
  misc_feature 1..20: note = chemically synthesized
  source 1..20: mol_type = other DNA
acttgcccagtgttcttcct

SEQ ID NO: 41670 - DNA, 20 bp, synthetic construct
  misc_feature 1..20: note = chemically synthesized
  source 1..20: mol_type = other DNA
ttatcttcctgaaccctgct

SEQ ID NO: 41671 - DNA, 20 bp, synthetic construct
  misc_feature 1..20: note = chemically synthesized
  source 1..20: mol_type = other DNA
ccctgctgagatgatctatg

SEQ ID NO: 41672 - DNA, 20 bp, synthetic construct
  misc_feature 1..20: note = chemically synthesized
  source 1..20: mol_type = other DNA
cctgctgagatgatctatgt

SEQ ID NO: 41673 - DNA, 20 bp, synthetic construct
  misc_feature 1..20: note = chemically synthesized
  source 1..20: mol_type = other DNA
ctgctgagatgatctatgtg

SEQ ID NO: 41674 - DNA, 20 bp, synthetic construct
  misc_feature 1..20: note = chemically synthesized
  source 1..20: mol_type = other DNA
gctgagatgatctatgtggg

SEQ ID NO: 41675 - DNA, 20 bp, synthetic construct
  misc_feature 1..20: note = chemically synthesized
  source 1..20: mol_type = other DNA
gatgatctatgtggggagaa

SEQ ID NO: 41676 - DNA, 20 bp, synthetic construct
  misc_feature 1..20: note = chemically synthesized
  source 1..20: mol_type = other DNA
gtggggagaatggcttcttt

SEQ ID NO: 41677 - DNA, 20 bp, synthetic construct
  misc_feature 1..20: note = chemically synthesized
  source 1..20: mol_type = other DNA
ttgagaaacatcttcttcgt

SEQ ID NO: 41678 - DNA, 20 bp, synthetic construct
  misc_feature 1..20: note = chemically synthesized
  source 1..20: mol_type = other DNA
agaaacatcttcttcgttag

SEQ ID NO: 41679 - DNA, 20 bp, synthetic construct
  misc_feature 1..20: note = chemically synthesized
  source 1..20: mol_type = other DNA
ctcattcccactttaatatc

SEQ ID NO: 41680 - DNA, 20 bp, synthetic construct
  misc_feature 1..20: note = chemically synthesized
  source 1..20: mol_type = other DNA
ttaatatccagaatcactat

SEQ ID NO: 41681 - DNA, 20 bp, synthetic construct
  misc_feature 1..20: note = chemically synthesized
  source 1..20: mol_type = other DNA
atatccagaatcactataag

SEQ ID NO: 41682 - DNA, 20 bp, synthetic construct
  misc_feature 1..20: note = chemically synthesized
  source 1..20: mol_type = other DNA
cactataagaagaatataat

SEQ ID NO: 41683 - DNA, 20 bp, synthetic construct
  misc_feature 1..20: note = chemically synthesized
  source 1..20: mol_type = other DNA
ctataagaagaatataataa

SEQ ID NO: 41684 - DNA, 20 bp, synthetic construct
  misc_feature 1..20: note = chemically synthesized
  source 1..20: mol_type = other DNA
tataagaagaatataataag

SEQ ID NO: 41685 - DNA, 20 bp, synthetic construct
  misc_feature 1..20: note = chemically synthesized
  source 1..20: mol_type = other DNA
aagaggaataactcttatta

SEQ ID NO: 41686 - DNA, 20 bp, synthetic construct
  misc_feature 1..20: note = chemically synthesized
  source 1..20: mol_type = other DNA
agaggaataactcttattat

SEQ ID NO: 41687 - DNA, 20 bp, synthetic construct
  misc_feature 1..20: note = chemically synthesized
  source 1..20: mol_type = other DNA
gaataactcttattataggt

SEQ ID NO: 41688 - DNA, 20 bp, synthetic construct
  misc_feature 1..20: note = chemically synthesized
  source 1..20: mol_type = other DNA
aataactcttattataggta

SEQ ID NO: 41689 - DNA, 20 bp, synthetic construct
  misc_feature 1..20: note = chemically synthesized
  source 1..20: mol_type = other DNA
ataactcttattataggtaa

SEQ ID NO: 41690 - DNA, 20 bp, synthetic construct
  misc_feature 1..20: note = chemically synthesized
  source 1..20: mol_type = other DNA
attataggtaagggaaaatt

SEQ ID NO: 41691 - DNA, 20 bp, synthetic construct
  misc_feature 1..20: note = chemically synthesized
  source 1..20: mol_type = other DNA
tataggtaagggaaaattaa

SEQ ID NO: 41692 - DNA, 20 bp, synthetic construct
  misc_feature 1..20: note = chemically synthesized
  source 1..20: mol_type = other DNA
ataggtaagggaaaattaag

SEQ ID NO: 41693 - DNA, 20 bp, synthetic construct
  misc_feature 1..20: note = chemically synthesized
  source 1..20: mol_type = other DNA
aaattaagaggcatacgtga

SEQ ID NO: 41694 - DNA, 20 bp, synthetic construct
  misc_feature 1..20: note = chemically synthesized
  source 1..20: mol_type = other DNA
aattaagaggcatacgtgat

SEQ ID NO: 41695 - DNA, 20 bp, synthetic construct
  misc_feature 1..20: note = chemically synthesized
  source 1..20: mol_type = other DNA
agaggcatacgtgatgggat

SEQ ID NO: 41696 - DNA, 20 bp, synthetic construct
  misc_feature 1..20: note = chemically synthesized
  source 1..20: mol_type = other DNA
gcatacgtgatgggatgagt

SEQ ID NO: 41697 - DNA, 20 bp, synthetic construct
  misc_feature 1..20: note = chemically synthesized
  source 1..20: mol_type = other DNA
atacgtgatgggatgagtaa

SEQ ID NO: 41698 - DNA, 20 bp, synthetic construct
  misc_feature 1..20: note = chemically synthesized
  source 1..20: mol_type = other DNA
acgtgatgggatgagtaaga

SEQ ID NO: 41699 - DNA, 20 bp, synthetic construct
  misc_feature 1..20: note = chemically synthesized
  source 1..20: mol_type = other DNA
cgtgatgggatgagtaagag

SEQ ID NO: 41700 - DNA, 20 bp, synthetic construct
  misc_feature 1..20: note = chemically synthesized
  source 1..20: mol_type = other DNA
tgatgggatgagtaagagag

SEQ ID NO: 41701 - DNA, 20 bp, synthetic construct
  misc_feature 1..20: note = chemically synthesized
  source 1..20: mol_type = other DNA
atgggatgagtaagagagga

SEQ ID NO: 41702 - DNA, 20 bp, synthetic construct
  misc_feature 1..20: note = chemically synthesized
  source 1..20: mol_type = other DNA
tgggatgagtaagagaggag

SEQ ID NO: 41703 - DNA, 20 bp, synthetic construct
  misc_feature 1..20: note = chemically synthesized
  source 1..20: mol_type = other DNA
gggatgagtaagagaggaga

SEQ ID NO: 41704 - DNA, 20 bp, synthetic construct
  misc_feature 1..20: note = chemically synthesized
  source 1..20: mol_type = other DNA
atgagtaagagaggagaggg

SEQ ID NO: 41705 - DNA, 20 bp, synthetic construct
  misc_feature 1..20: note = chemically synthesized
  source 1..20: mol_type = other DNA
tgagtaagagaggagaggga

SEQ ID NO: 41706 - DNA, 20 bp, synthetic construct
  misc_feature 1..20: note = chemically synthesized
  source 1..20: mol_type = other DNA
agaggagagggaaggattaa

SEQ ID NO: 41707 - DNA, 20 bp, synthetic construct
  misc_feature 1..20: note = chemically synthesized
  source 1..20: mol_type = other DNA
aaaatctactactatttgtt

SEQ ID NO: 41708 - DNA, 20 bp, synthetic construct
  misc_feature 1..20: note = chemically synthesized
  source 1..20: mol_type = other DNA
ctatttgttgagacctttta

SEQ ID NO: 41709 - DNA, 20 bp, synthetic construct
  misc_feature 1..20: note = chemically synthesized
  source 1..20: mol_type = other DNA
tatctttattttgccatgac

SEQ ID NO: 41710 - DNA, 20 bp, synthetic construct
  misc_feature 1..20: note = chemically synthesized
  source 1..20: mol_type = other DNA
tattttgccatgacaagact

SEQ ID NO: 41711 - DNA, 20 bp, synthetic construct
  misc_feature 1..20: note = chemically synthesized
  source 1..20: mol_type = other DNA
tgccatgacaagactgagct

SEQ ID NO: 41712 - DNA, 20 bp, synthetic construct
  misc_feature 1..20: note = chemically synthesized
  source 1..20: mol_type = other DNA
catgacaagactgagctcag

SEQ ID NO: 41713 - DNA, 20 bp, synthetic construct
  misc_feature 1..20: note = chemically synthesized
  source 1..20: mol_type = other DNA
tgacaagactgagctcagaa

SEQ ID NO: 41714 - DNA, 20 bp, synthetic construct
  misc_feature 1..20: note = chemically synthesized
  source 1..20: mol_type = other DNA
agactgagctcagaagagtc

SEQ ID NO: 41715 - DNA, 20 bp, synthetic construct
  misc_feature 1..20: note = chemically synthesized
  source 1..20: mol_type = other DNA
gaagagtcaagcatttgcct

SEQ ID NO: 41716 - DNA, 20 bp, synthetic construct
  misc_feature 1..20: note = chemically synthesized
  source 1..20: mol_type = other DNA
aagagtcaagcatttgccta

SEQ ID NO: 41717 - DNA, 20 bp, synthetic construct
  misc_feature 1..20: note = chemically synthesized
  source 1..20: mol_type = other DNA
gtcaagcatttgcctaaggt

SEQ ID NO: 41718 - DNA, 20 bp, synthetic construct
  misc_feature 1..20: note = chemically synthesized
  source 1..20: mol_type = other DNA
ttgcctaaggtcggacatgt

SEQ ID NO: 41719 - DNA, 20 bp, synthetic construct
  misc_feature 1..20: note = chemically synthesized
  source 1..20: mol_type = other DNA
gcctaaggtcggacatgtca

SEQ ID NO: 41720 - DNA, 20 bp, synthetic construct
  misc_feature 1..20: note = chemically synthesized
  source 1..20: mol_type = other DNA
cctaaggtcggacatgtcag

SEQ ID NO: 41721 - DNA, 20 bp, synthetic construct
  misc_feature 1..20: note = chemically synthesized
  source 1..20: mol_type = other DNA
aaggtcggacatgtcagagg

SEQ ID NO: 41722 - DNA, 20 bp, synthetic construct
  misc_feature 1..20: note = chemically synthesized
  source 1..20: mol_type = other DNA
ggacatgtcagaggcagtgc

SEQ ID NO: 41723 - DNA, 20 bp, synthetic construct
  misc_feature 1..20: note = chemically synthesized
  source 1..20: mol_type = other DNA
aggcagtgccagacctatgt

SEQ ID NO: 41724 - DNA, 20 bp, synthetic construct
  misc_feature 1..20: note = chemically synthesized
  source 1..20: mol_type = other DNA
cagacctatgtgagactctg

SEQ ID NO: 41725 - DNA, 20 bp, synthetic construct
  misc_feature 1..20: note = chemically synthesized
  source 1..20: mol_type = other DNA
gactctgcagctactgctca

SEQ ID NO: 41726 - DNA, 20 bp, synthetic construct
  misc_feature 1..20: note = chemically synthesized
  source 1..20: mol_type = other DNA
actctgcagctactgctcat

SEQ ID NO: 41727 - DNA, 20 bp, synthetic construct
  misc_feature 1..20: note = chemically synthesized
  source 1..20: mol_type = other DNA
gggccctgtgctgcactgat

SEQ ID NO: 41728 - DNA, 20 bp, synthetic construct
  misc_feature 1..20: note = chemically synthesized
  source 1..20: mol_type = other DNA
ggccctgtgctgcactgatg

SEQ ID NO: 41729 - DNA, 20 bp, synthetic construct
  misc_feature 1..20: note = chemically synthesized
  source 1..20: mol_type = other DNA
ccctgtgctgcactgatgag

SEQ ID NO: 41730 - DNA, 20 bp, synthetic construct
  misc_feature 1..20: note = chemically synthesized
  source 1..20: mol_type = other DNA
cctgtgctgcactgatgagg

SEQ ID NO: 41731 - DNA, 20 bp, synthetic construct
  misc_feature 1..20: note = chemically synthesized
  source 1..20: mol_type = other DNA
gctgcactgatgaggaggat

SEQ ID NO: 41732 - DNA, 20 bp, synthetic construct
  misc_feature 1..20: note = chemically synthesized
  source 1..20: mol_type = other DNA
cactgatgaggaggatcaga

SEQ ID NO: 41733 - DNA, 20 bp, synthetic construct
  misc_feature 1..20: note = chemically synthesized
  source 1..20: mol_type = other DNA
gatgaggaggatcagatgga

SEQ ID NO: 41734 - DNA, 20 bp, synthetic construct
  misc_feature 1..20: note = chemically synthesized
  source 1..20: mol_type = other DNA
atgaggaggatcagatggat

SEQ ID NO: 41735 - DNA, 20 bp, synthetic construct
  misc_feature 1..20: note = chemically synthesized
  source 1..20: mol_type = other DNA
tgaggaggatcagatggatg

SEQ ID NO: 41736 - DNA, 20 bp, synthetic construct
  misc_feature 1..20: note = chemically synthesized
  source 1..20: mol_type = other DNA
atcagatggatggggcaatg

SEQ ID NO: 41737 - DNA, 20 bp, synthetic construct
  misc_feature 1..20: note = chemically synthesized
  source 1..20: mol_type = other DNA
atggatggggcaatgaagca

SEQ ID NO: 41738 - DNA, 20 bp, synthetic construct
  misc_feature 1..20: note = chemically synthesized
  source 1..20: mol_type = other DNA
tggatggggcaatgaagcaa

SEQ ID NO: 41739 - DNA, 20 bp, synthetic construct
  misc_feature 1..20: note = chemically synthesized
  source 1..20: mol_type = other DNA
gaagcaaaggaatcattctg

SEQ ID NO: 41740 - DNA, 20 bp, synthetic construct
  misc_feature 1..20: note = chemically synthesized
  source 1..20: mol_type = other DNA
aaggaatcattctgtggata

SEQ ID NO: 41741 - DNA, 20 bp, synthetic construct
  misc_feature 1..20: note = chemically synthesized
  source 1..20: mol_type = other DNA
aggaatcattctgtggataa

SEQ ID NO: 41742 - DNA, 20 bp, synthetic construct
  misc_feature 1..20: note = chemically synthesized
  source 1..20: mol_type = other DNA
gaatcattctgtggataaag

SEQ ID NO: 41743 - DNA, 20 bp, synthetic construct
  misc_feature 1..20: note = chemically synthesized
  source 1..20: mol_type = other DNA
cattctgtggataaaggaga

SEQ ID NO: 41744 - DNA, 20 bp, synthetic construct
  misc_feature 1..20: note = chemically synthesized
  source 1..20: mol_type = other DNA
ggataaaggagacagccatg

SEQ ID NO: 41745 - DNA, 20 bp, synthetic construct
  misc_feature 1..20: note = chemically synthesized
  source 1..20: mol_type = other DNA
taaaggagacagccatgaag

SEQ ID NO: 41746 - DNA, 20 bp, synthetic construct
  misc_feature 1..20: note = chemically synthesized
  source 1..20: mol_type = other DNA
gaagtctatgactgtaaatt

SEQ ID NO: 41747 - DNA, 20 bp, synthetic construct
  misc_feature 1..20: note = chemically synthesized
  source 1..20: mol_type = other DNA
aagtctatgactgtaaattt

SEQ ID NO: 41748 - DNA, 20 bp, synthetic construct
  misc_feature 1..20: note = chemically synthesized
  source 1..20: mol_type = other DNA
gtctatgactgtaaatttgg

SEQ ID NO: 41749 - DNA, 20 bp, synthetic construct
  misc_feature 1..20: note = chemically synthesized
  source 1..20: mol_type = other DNA
tatgactgtaaatttgggag

SEQ ID NO: 41750 - DNA, 20 bp, synthetic construct
  misc_feature 1..20: note = chemically synthesized
  source 1..20: mol_type = other DNA
atgactgtaaatttgggagc

SEQ ID NO: 41751 - DNA, 20 bp, synthetic construct
  misc_feature 1..20: note = chemically synthesized
  source 1..20: mol_type = other DNA
gactgtaaatttgggagcag

SEQ ID NO: 41752 - DNA, 20 bp, synthetic construct
  misc_feature 1..20: note = chemically synthesized
  source 1..20: mol_type = other DNA
atttgggagcaggagtctct

SEQ ID NO: 41753 - DNA, 20 bp, synthetic construct
  misc_feature 1..20: note = chemically synthesized
  source 1..20: mol_type = other DNA
tttgggagcaggagtctcta

SEQ ID NO: 41754 - DNA, 20 bp, synthetic construct
  misc_feature 1..20: note = chemically synthesized
  source 1..20: mol_type = other DNA
agcaggagtctctaaggact

SEQ ID NO: 41755 - DNA, 20 bp, synthetic construct
  misc_feature 1..20: note = chemically synthesized
  source 1..20: mol_type = other DNA
tctctaaggacttggatttc

SEQ ID NO: 41756 - DNA, 20 bp, synthetic construct
  misc_feature 1..20: note = chemically synthesized
  source 1..20: mol_type = other DNA
ctctaaggacttggatttca

SEQ ID NO: 41757 - DNA, 20 bp, synthetic construct
  misc_feature 1..20: note = chemically synthesized
  source 1..20: mol_type = other DNA
gatttcaaggaattttgact

SEQ ID NO: 41758 - DNA, 20 bp, synthetic construct
  misc_feature 1..20: note = chemically synthesized
  source 1..20: mol_type = other DNA
aattttgactcagcaaacac

SEQ ID NO: 41759 - DNA, 20 bp, synthetic construct
  misc_feature 1..20: note = chemically synthesized
  source 1..20: mol_type = other DNA
cagcaaacacaagaccctca

SEQ ID NO: 41760 - DNA, 20 bp, synthetic construct
  misc_feature 1..20: note = chemically synthesized
  source 1..20: mol_type = other DNA
gaccctcacggtgactttgc

SEQ ID NO: 41761 - DNA, 20 bp, synthetic construct
  misc_feature 1..20: note = chemically synthesized
  source 1..20: mol_type = other DNA
ctcacggtgactttgcgagc

SEQ ID NO: 41762 - DNA, 20 bp, synthetic construct
  misc_feature 1..20: note = chemically synthesized
  source 1..20: mol_type = other DNA
gactttgcgagctggtgtgc

SEQ ID NO: 41763 - DNA, 20 bp, synthetic construct
  misc_feature 1..20: note = chemically synthesized
  source 1..20: mol_type = other DNA
ggtgtgccagatgtgtctat

SEQ ID NO: 41764 - DNA, 20 bp, synthetic construct
  misc_feature 1..20: note = chemically synthesized
  source 1..20: mol_type = other DNA
tgtgccagatgtgtctatca

SEQ ID NO: 41765 - DNA, 20 bp, synthetic construct
  misc_feature 1..20: note = chemically synthesized
  source 1..20: mol_type = other DNA
gtgccagatgtgtctatcag

SEQ ID NO: 41766 - DNA, 20 bp, synthetic construct
  misc_feature 1..20: note = chemically synthesized
  source 1..20: mol_type = other DNA
gatgtgtctatcagaggttc

SEQ ID NO: 41767 - DNA, 20 bp, synthetic construct
  misc_feature 1..20: note = chemically synthesized
  source 1..20: mol_type = other DNA
atgtgtctatcagaggttcc

SEQ ID NO: 41768 - DNA, 20 bp, synthetic construct
  misc_feature 1..20: note = chemically synthesized
  source 1..20: mol_type = other DNA
tgtgtctatcagaggttcca

SEQ ID NO: 41769 - DNA, 20 bp, synthetic construct
  misc_feature 1..20: note = chemically synthesized
  source 1..20: mol_type = other DNA
tgtctatcagaggttccagg

SEQ ID NO: 41770 - DNA, 20 bp, synthetic construct
  misc_feature 1..20: note = chemically synthesized
  source 1..20: mol_type = other DNA
gtctatcagaggttccaggg

SEQ ID NO: 41771 - DNA, 20 bp, synthetic construct
  misc_feature 1..20: note = chemically synthesized
  source 1..20: mol_type = other DNA
tctatcagaggttccaggga

SEQ ID NO: 41772 - DNA, 20 bp, synthetic construct
  misc_feature 1..20: note = chemically synthesized
  source 1..20: mol_type = other DNA
atcagaggttccagggaggg

SEQ ID NO: 41773 - DNA, 20 bp, synthetic construct
  misc_feature 1..20: note = chemically synthesized
  source 1..20: mol_type = other DNA
tcagaggttccagggagggt

SEQ ID NO: 41774 - DNA, 20 bp, synthetic construct
  misc_feature 1..20: note = chemically synthesized
  source 1..20: mol_type = other DNA
cagaggttccagggagggtg

SEQ ID NO: 41775 - DNA, 20 bp, synthetic construct
  misc_feature 1..20: note = chemically synthesized
  source 1..20: mol_type = other DNA
aggttccagggagggtgggg

SEQ ID NO: 41776 - DNA, 20 bp, synthetic construct
  misc_feature 1..20: note = chemically synthesized
  source 1..20: mol_type = other DNA
ggttccagggagggtggggt

SEQ ID NO: 41777 - DNA, 20 bp, synthetic construct
  misc_feature 1..20: note = chemically synthesized
  source 1..20: mol_type = other DNA
gttccagggagggtggggtg

SEQ ID NO: 41778 - DNA, 20 bp, synthetic construct
  misc_feature 1..20: note = chemically synthesized
  source 1..20: mol_type = other DNA
cagggagggtggggtggggt

SEQ ID NO: 41779 - DNA, 20 bp, synthetic construct
  misc_feature 1..20: note = chemically synthesized
  source 1..20: mol_type = other DNA
agggagggtggggtggggtc

SEQ ID NO: 41780 - DNA, 20 bp, synthetic construct
  misc_feature 1..20: note = chemically synthesized
  source 1..20: mol_type = other DNA
gggagggtggggtggggtca

SEQ ID NO: 41781 - DNA, 20 bp, synthetic construct
  misc_feature 1..20: note = chemically synthesized
  source 1..20: mol_type = other DNA
gggtggggtggggtcagggc

SEQ ID NO: 41782 - DNA, 20 bp, synthetic construct
  misc_feature 1..20: note = chemically synthesized
  source 1..20: mol_type = other DNA
gtggggtcagggctggccac

SEQ ID NO: 41783 - DNA, 20 bp, synthetic construct
  misc_feature 1..20: note = chemically synthesized
  source 1..20: mol_type = other DNA
cagggctggccaccagctat

SEQ ID NO: 41784 - DNA, 20 bp, synthetic construct
  misc_feature 1..20: note = chemically synthesized
  source 1..20: mol_type = other DNA
agggctggccaccagctatc

SEQ ID NO: 41785 - DNA, 20 bp, synthetic construct
  misc_feature 1..20: note = chemically synthesized
  source 1..20: mol_type = other DNA
gggctggccaccagctatca

SEQ ID NO: 41786 - DNA, 20 bp, synthetic construct
  misc_feature 1..20: note = chemically synthesized
  source 1..20: mol_type = other DNA
ggccaccagctatcagggcc

SEQ ID NO: 41787 - DNA, 20 bp, synthetic construct
  misc_feature 1..20: note = chemically synthesized
  source 1..20: mol_type = other DNA
accagctatcagggcccaga

SEQ ID NO: 41788 - DNA, 20 bp, synthetic construct
  misc_feature 1..20: note = chemically synthesized
  source 1..20: mol_type = other DNA
ccagctatcagggcccagat

SEQ ID NO: 41789 - DNA, 20 bp, synthetic construct
  misc_feature 1..20: note = chemically synthesized
  source 1..20: mol_type = other DNA
atcagggcccagatgggtta

SEQ ID NO: 41790 - DNA, 20 bp, synthetic construct
  misc_feature 1..20: note = chemically synthesized
  source 1..20: mol_type = other DNA
tcagggcccagatgggttat

SEQ ID NO: 41791 - DNA, 20 bp, synthetic construct
  misc_feature 1..20: note = chemically synthesized
  source 1..20: mol_type = other DNA
ggcccagatgggttataggc

SEQ ID NO: 41792 - DNA, 20 bp, synthetic construct
  misc_feature 1..20: note = chemically synthesized
  source 1..20: mol_type = other DNA
ccagatgggttataggctgg

SEQ ID NO: 41793 - DNA, 20 bp, synthetic construct
  misc_feature 1..20: note = chemically synthesized
  source 1..20: mol_type = other DNA
cagatgggttataggctggc

SEQ ID NO: 41794 - DNA, 20 bp, synthetic construct
  misc_feature 1..20: note = chemically synthesized
  source 1..20: mol_type = other DNA
gggttataggctggcaggct

SEQ ID NO: 41795 - DNA, 20 bp, synthetic construct
  misc_feature 1..20: note = chemically synthesized
  source 1..20: mol_type = other DNA
tataggctggcaggctcaga

SEQ ID NO: 41796 - DNA, 20 bp, synthetic construct
  misc_feature 1..20: note = chemically synthesized
  source 1..20: mol_type = other DNA
ataggctggcaggctcagat

SEQ ID NO: 41797 - DNA, 20 bp, synthetic construct
  misc_feature 1..20: note = chemically synthesized
  source 1..20: mol_type = other DNA
ggctggcaggctcagatagg

SEQ ID NO: 41798 - DNA, 20 bp, synthetic construct
  misc_feature 1..20: note = chemically synthesized
  source 1..20: mol_type = other DNA
ggcaggctcagataggtggt

SEQ ID NO: 41799 - DNA, 20 bp, synthetic construct
  misc_feature 1..20: note = chemically synthesized
  source 1..20: mol_type = other DNA
gcaggctcagataggtggtt

SEQ ID NO: 41800 - DNA, 20 bp, synthetic construct
  misc_feature 1..20: note = chemically synthesized
  source 1..20: mol_type = other DNA
gctcagataggtggttaggt

SEQ ID NO: 41801 - DNA, 20 bp, synthetic construct
  misc_feature 1..20: note = chemically synthesized
  source 1..20: mol_type = other DNA
ctcagataggtggttaggtc

SEQ ID NO: 41802 - DNA, 20 bp, synthetic construct
  misc_feature 1..20: note = chemically synthesized
  source 1..20: mol_type = other DNA
gataggtggttaggtcaggt

SEQ ID NO: 41803 - DNA, 20 bp, synthetic construct
  misc_feature 1..20: note = chemically synthesized
  source 1..20: mol_type = other DNA
aggtggttaggtcaggttgg

SEQ ID NO: 41804 - DNA, 20 bp, synthetic construct
  misc_feature 1..20: note = chemically synthesized
  source 1..20: mol_type = other DNA
ttaggtcaggttggtggtgc

SEQ ID NO: 41805 - DNA, 20 bp, synthetic construct
  misc_feature 1..20: note = chemically synthesized
  source 1..20: mol_type = other DNA
taggtcaggttggtggtgct

SEQ ID NO: 41806 - DNA, 20 bp, synthetic construct
  misc_feature 1..20: note = chemically synthesized
  source 1..20: mol_type = other DNA
gtcaggttggtggtgctggg

SEQ ID NO: 41807 - DNA, 20 bp, synthetic construct
  misc_feature 1..20: note = chemically synthesized
  source 1..20: mol_type = other DNA
caggttggtggtgctgggtg

SEQ ID NO: 41808 - DNA, 20 bp, synthetic construct
  misc_feature 1..20: note = chemically synthesized
  source 1..20: mol_type = other DNA
tgggtggagtccatgactcc

SEQ ID NO: 41809 - DNA, 20 bp, synthetic construct
  misc_feature 1..20: note = chemically synthesized
  source 1..20: mol_type = other DNA
gggtggagtccatgactccc

SEQ ID NO: 41810 - DNA, 20 bp, synthetic construct
  misc_feature 1..20: note = chemically synthesized
  source 1..20: mol_type = other DNA
gtggagtccatgactcccag

SEQ ID NO: 41811 - DNA, 20 bp, synthetic construct
  misc_feature 1..20: note = chemically synthesized
  source 1..20: mol_type = other DNA
agtccatgactcccaggagc

SEQ ID NO: 41812 - DNA, 20 bp, synthetic construct
  misc_feature 1..20: note = chemically synthesized
  source 1..20: mol_type = other DNA
gtccatgactcccaggagcc

SEQ ID NO: 41813 - DNA, 20 bp, synthetic construct
  misc_feature 1..20: note = chemically synthesized
  source 1..20: mol_type = other DNA
ccatgactcccaggagccag

SEQ ID NO: 41814 - DNA, 20 bp, synthetic construct
  misc_feature 1..20: note = chemically synthesized
  source 1..20: mol_type = other DNA
atgactcccaggagccagga

SEQ ID NO: 41815 - DNA, 20 bp, synthetic construct
  misc_feature 1..20: note = chemically synthesized
  source 1..20: mol_type = other DNA
ctcccaggagccaggagaga

SEQ ID NO: 41816 - DNA, 20 bp, synthetic construct
  misc_feature 1..20: note = chemically synthesized
  source 1..20: mol_type = other DNA
agccaggagagatagaccat

SEQ ID NO: 41817 - DNA, 20 bp, synthetic construct
  misc_feature 1..20: note = chemically synthesized
  source 1..20: mol_type = other DNA
caggagagatagaccatgag

SEQ ID NO: 41818 - DNA, 20 bp, synthetic construct
  misc_feature 1..20: note = chemically synthesized
  source 1..20: mol_type = other DNA
ggagagatagaccatgagta

SEQ ID NO: 41819 - DNA, 20 bp, synthetic construct
  misc_feature 1..20: note = chemically synthesized
  source 1..20: mol_type = other DNA
gagagatagaccatgagtag

SEQ ID NO: 41820 - DNA, 20 bp, synthetic construct
  misc_feature 1..20: note = chemically synthesized
  source 1..20: mol_type = other DNA
agagatagaccatgagtaga

SEQ ID NO: 41821 - DNA, 20 bp, synthetic construct
  misc_feature 1..20: note = chemically synthesized
  source 1..20: mol_type = other DNA
gatagaccatgagtagaggg

SEQ ID NO: 41822 - DNA, 20 bp, synthetic construct
  misc_feature 1..20: note = chemically synthesized
  source 1..20: mol_type = other DNA
ccatgagtagagggcagaca

SEQ ID NO: 41823 - DNA, 20 bp, synthetic construct
  misc_feature 1..20: note = chemically synthesized
  source 1..20: mol_type = other DNA
catgagtagagggcagacat

SEQ ID NO: 41824 - DNA, 20 bp, synthetic construct
  misc_feature 1..20: note = chemically synthesized
  source 1..20: mol_type = other DNA
agtagagggcagacatggga

SEQ ID NO: 41825 - DNA, 20 bp, synthetic construct
  misc_feature 1..20: note = chemically synthesized
  source 1..20: mol_type = other DNA
gtagagggcagacatgggaa

SEQ ID NO: 41826 - DNA, 20 bp, synthetic construct
  misc_feature 1..20: note = chemically synthesized
  source 1..20: mol_type = other DNA
gagggcagacatgggaaagg

SEQ ID NO: 41827 - DNA, 20 bp, synthetic construct
  misc_feature 1..20: note = chemically synthesized
  source 1..20: mol_type = other DNA
agggcagacatgggaaaggt

SEQ ID NO: 41828 - DNA, 20 bp, synthetic construct
  misc_feature 1..20: note = chemically synthesized
  source 1..20: mol_type = other DNA
gggcagacatgggaaaggtg

SEQ ID NO: 41829 - DNA, 20 bp, synthetic construct
  misc_feature 1..20: note = chemically synthesized
  source 1..20: mol_type = other DNA
ggcagacatgggaaaggtgg

SEQ ID NO: 41830 - DNA, 20 bp, synthetic construct
  misc_feature 1..20: note = chemically synthesized
  source 1..20: mol_type = other DNA
cagacatgggaaaggtgggg

SEQ ID NO: 41831 - DNA, 20 bp, synthetic construct
  misc_feature 1..20: note = chemically synthesized
  source 1..20: mol_type = other DNA
agacatgggaaaggtggggg

SEQ ID NO: 41832 - DNA, 20 bp, synthetic construct
  misc_feature 1..20: note = chemically synthesized
  source 1..20: mol_type = other DNA
tgggaaaggtgggggaggca

SEQ ID NO: 41833 - DNA, 20 bp, synthetic construct
  misc_feature 1..20: note = chemically synthesized
  source 1..20: mol_type = other DNA
aaggtgggggaggcacagca

SEQ ID NO: 41834 - DNA, 20 bp, synthetic construct
  misc_feature 1..20: note = chemically synthesized
  source 1..20: mol_type = other DNA
gtgggggaggcacagcatag

SEQ ID NO: 41835 - DNA, 20 bp, synthetic construct
  misc_feature 1..20: note = chemically synthesized
  source 1..20: mol_type = other DNA
tttttcattctactactaca

SEQ ID NO: 41836 - DNA, 20 bp, synthetic construct
  misc_feature 1..20: note = chemically synthesized
  source 1..20: mol_type = other DNA
ttttcattctactactacat

SEQ ID NO: 41837 - DNA, 20 bp, synthetic construct
  misc_feature 1..20: note = chemically synthesized
  source 1..20: mol_type = other DNA
ggactgctcccctatacccc

SEQ ID NO: 41838 - DNA, 20 bp, synthetic construct
  misc_feature 1..20: note = chemically synthesized
  source 1..20: mol_type = other DNA
tgctcccctatacccccagc

SEQ ID NO: 41839 - DNA, 20 bp, synthetic construct
  misc_feature 1..20: note = chemically synthesized
  source 1..20: mol_type = other DNA
gctcccctatacccccagct

SEQ ID NO: 41840 - DNA, 20 bp, synthetic construct
  misc_feature 1..20: note = chemically synthesized
  source 1..20: mol_type = other DNA
ctcccctatacccccagcta

SEQ ID NO: 41841 - DNA, 20 bp, synthetic construct
  misc_feature 1..20: note = chemically synthesized
  source 1..20: mol_type = other DNA
tcccctatacccccagctag

SEQ ID NO: 41842 - DNA, 20 bp, synthetic construct
  misc_feature 1..20: note = chemically synthesized
  source 1..20: mol_type = other DNA
ctatacccccagctaggggc

SEQ ID NO: 41843 - DNA, 20 bp, synthetic construct
  misc_feature 1..20: note = chemically synthesized
  source 1..20: mol_type = other DNA
tgccttgactcctatgtttt

SEQ ID NO: 41844 - DNA, 20 bp, synthetic construct
  misc_feature 1..20: note = chemically synthesized
  source 1..20: mol_type = other DNA
gccttgactcctatgttttc

SEQ ID NO: 41845 - DNA, 20 bp, synthetic construct
  misc_feature 1..20: note = chemically synthesized
  source 1..20: mol_type = other DNA
tttcaggatcatcatctata

SEQ ID NO: 41846 - DNA, 20 bp, synthetic construct
  misc_feature 1..20: note = chemically synthesized
  source 1..20: mol_type = other DNA
aggatcatcatctataaagt

SEQ ID NO: 41847 - DNA, 20 bp, synthetic construct
  misc_feature 1..20: note = chemically synthesized
  source 1..20: mol_type = other DNA
gatcatcatctataaagtaa

SEQ ID NO: 41848 - DNA, 20 bp, synthetic construct
  misc_feature 1..20: note = chemically synthesized
  source 1..20: mol_type = other DNA
taataattgtgtctatctca

SEQ ID NO: 41849 - DNA, 20 bp, synthetic construct
  misc_feature 1..20: note = chemically synthesized
  source 1..20: mol_type = other DNA
aataattgtgtctatctcat

SEQ ID NO: 41850 - DNA, 20 bp, synthetic construct
  misc_feature 1..20: note = chemically synthesized
  source 1..20: mol_type = other DNA
ataattgtgtctatctcata

SEQ ID NO: 41851 - DNA, 20 bp, synthetic construct
  misc_feature 1..20: note = chemically synthesized
  source 1..20: mol_type = other DNA
ctatctcatagggttattat

SEQ ID NO: 41852 - DNA, 20 bp, synthetic construct
  misc_feature 1..20: note = chemically synthesized
  source 1..20: mol_type = other DNA
tatctcatagggttattatg

SEQ ID NO: 41853 - DNA, 20 bp, synthetic construct
  misc_feature 1..20: note = chemically synthesized
  source 1..20: mol_type = other DNA
tagggttattatgaggatca

SEQ ID NO: 41854 - DNA, 20 bp, synthetic construct
  misc_feature 1..20: note = chemically synthesized
  source 1..20: mol_type = other DNA
agggttattatgaggatcaa

SEQ ID NO: 41855 - DNA, 20 bp, synthetic construct
  misc_feature 1..20: note = chemically synthesized
  source 1..20: mol_type = other DNA
ggttattatgaggatcaaag

SEQ ID NO: 41856 - DNA, 20 bp, synthetic construct
  misc_feature 1..20: note = chemically synthesized
  source 1..20: mol_type = other DNA
caaaggagatgcacactctc

SEQ ID NO: 41857 - DNA, 20 bp, synthetic construct
  misc_feature 1..20: note = chemically synthesized
  source 1..20: mol_type = other DNA
gagatgcacactctctggac

SEQ ID NO: 41858 - DNA, 20 bp, synthetic construct
  misc_feature 1..20: note = chemically synthesized
  source 1..20: mol_type = other DNA
atgcacactctctggaccag

SEQ ID NO: 41859 - DNA, 20 bp, synthetic construct
  misc_feature 1..20: note = chemically synthesized
  source 1..20: mol_type = other DNA
tctctggaccagtggcctaa

SEQ ID NO: 41860 - DNA, 20 bp, synthetic construct
  misc_feature 1..20: note = chemically synthesized
  source 1..20: mol_type = other DNA
ggaccagtggcctaacagtt

SEQ ID NO: 41861 - DNA, 20 bp, synthetic construct
  misc_feature 1..20: note = chemically synthesized
  source 1..20: mol_type = other DNA
gaccagtggcctaacagttc

SEQ ID NO: 41862 - DNA, 20 bp, synthetic construct
  misc_feature 1..20: note = chemically synthesized
  source 1..20: mol_type = other DNA
agtggcctaacagttcagga

SEQ ID NO: 41863 - DNA, 20 bp, synthetic construct
  misc_feature 1..20: note = chemically synthesized
  source 1..20: mol_type = other DNA
tggcctaacagttcaggaca

SEQ ID NO: 41864 - DNA, 20 bp, synthetic construct
  misc_feature 1..20: note = chemically synthesized
  source 1..20: mol_type = other DNA
aacagttcaggacagagcta

SEQ ID NO: 41865 - DNA, 20 bp, synthetic construct
  misc_feature 1..20: note = chemically synthesized
  source 1..20: mol_type = other DNA
acagttcaggacagagctat

SEQ ID NO: 41866 - DNA, 20 bp, synthetic construct
  misc_feature 1..20: note = chemically synthesized
  source 1..20: mol_type = other DNA
agctatgggcttcctatgta

SEQ ID NO: 41867 - DNA, 20 bp, synthetic construct
  misc_feature 1..20: note = chemically synthesized
  source 1..20: mol_type = other DNA
gctatgggcttcctatgtat

SEQ ID NO: 41868 - DNA, 20 bp, synthetic construct
  misc_feature 1..20: note = chemically synthesized
  source 1..20: mol_type = other DNA
tgggcttcctatgtatgggt

SEQ ID NO: 41869 - DNA, 20 bp, synthetic construct
  misc_feature 1..20: note = chemically synthesized
  source 1..20: mol_type = other DNA
gcttcctatgtatgggtcag

SEQ ID NO: 41870 - DNA, 20 bp, synthetic construct
  misc_feature 1..20: note = chemically synthesized
  source 1..20: mol_type = other DNA
atgggtcagtggtctcaatg

SEQ ID NO: 41871 - DNA, 20 bp, synthetic construct
  misc_feature 1..20: note = chemically synthesized
  source 1..20: mol_type = other DNA
ggtcagtggtctcaatgtag

SEQ ID NO: 41872 - DNA, 20 bp, synthetic construct
  misc_feature 1..20: note = chemically synthesized
  source 1..20: mol_type = other DNA
gtcagtggtctcaatgtagc

SEQ ID NO: 41873 - DNA, 20 bp, synthetic construct
  misc_feature 1..20: note = chemically synthesized
  source 1..20: mol_type = other DNA
gtggtctcaatgtagcaggc

SEQ ID NO: 41874 - DNA, 20 bp, synthetic construct
  misc_feature 1..20: note = chemically synthesized
  source 1..20: mol_type = other DNA
tcaatgtagcaggcaagttc

SEQ ID NO: 41875 - DNA, 20 bp, synthetic construct
  misc_feature 1..20: note = chemically synthesized
  source 1..20: mol_type = other DNA
atgtagcaggcaagttccag

SEQ ID NO: 41876 - DNA, 20 bp, synthetic construct
  misc_feature 1..20: note = chemically synthesized
  source 1..20: mol_type = other DNA
agcaggcaagttccagaaga

SEQ ID NO: 41877 - DNA, 20 bp, synthetic construct
  misc_feature 1..20: note = chemically synthesized
  source 1..20: mol_type = other DNA
aagatagcatcaaccactgt

SEQ ID NO: 41878 - DNA, 20 bp, synthetic construct
  misc_feature 1..20: note = chemically synthesized
  source 1..20: mol_type = other DNA
gatagcatcaaccactgtta

SEQ ID NO: 41879 - DNA, 20 bp, synthetic construct
  misc_feature 1..20: note = chemically synthesized
  source 1..20: mol_type = other DNA
cactgttagagatatactgc

SEQ ID NO: 41880 - DNA, 20 bp, synthetic construct
  misc_feature 1..20: note = chemically synthesized
  source 1..20: mol_type = other DNA
tagagatatactgccagtct

SEQ ID NO: 41881 - DNA, 20 bp, synthetic construct
  misc_feature 1..20: note = chemically synthesized
  source 1..20: mol_type = other DNA
gagatatactgccagtctca

SEQ ID NO: 41882 - DNA, 20 bp, synthetic construct
  misc_feature 1..20: note = chemically synthesized
  source 1..20: mol_type = other DNA
ctcagagcctgatgttaatt

SEQ ID NO: 41883 - DNA, 20 bp, synthetic construct
  misc_feature 1..20: note = chemically synthesized
  source 1..20: mol_type = other DNA
gcctgatgttaatttagcaa

SEQ ID NO: 41884 - DNA, 20 bp, synthetic construct
  misc_feature 1..20: note = chemically synthesized
  source 1..20: mol_type = other DNA
cctgatgttaatttagcaat

SEQ ID NO: 41885 - DNA, 20 bp, synthetic construct
  misc_feature 1..20: note = chemically synthesized
  source 1..20: mol_type = other DNA
atgttaatttagcaatgggc

SEQ ID NO: 41886 - DNA, 20 bp, synthetic construct
  misc_feature 1..20: note = chemically synthesized
  source 1..20: mol_type = other DNA
tgttaatttagcaatgggct

SEQ ID NO: 41887 - DNA, 20 bp, synthetic construct
  misc_feature 1..20: note = chemically synthesized
  source 1..20: mol_type = other DNA
aatgggctgggaccctcctc

SEQ ID NO: 41888 - DNA, 20 bp, synthetic construct
  misc_feature 1..20: note = chemically synthesized
  source 1..20: mol_type = other DNA
gggctgggaccctcctccag

SEQ ID NO: 41889 - DNA, 20 bp, synthetic construct
  misc_feature 1..20: note = chemically synthesized
  source 1..20: mol_type = other DNA
ctccagtagaaccttctaac

SEQ ID NO: 41890 - DNA, 20 bp, synthetic construct
  misc_feature 1..20: note = chemically synthesized
  source 1..20: mol_type = other DNA
aaccttctaaccagctgctg

SEQ ID NO: 41891 - DNA, 20 bp, synthetic construct
  misc_feature 1..20: note = chemically synthesized
  source 1..20: mol_type = other DNA
ctaaccagctgctgcagtca

SEQ ID NO: 41892 - DNA, 20 bp, synthetic construct
  misc_feature 1..20: note = chemically synthesized
  source 1..20: mol_type = other DNA
gctgcagtcaaagtcgaatg

SEQ ID NO: 41893 - DNA, 20 bp, synthetic construct
  misc_feature 1..20: note = chemically synthesized
  source 1..20: mol_type = other DNA
cagtcaaagtcgaatgcagc

SEQ ID NO: 41894 - DNA, 20 bp, synthetic construct
  misc_feature 1..20: note = chemically synthesized
  source 1..20: mol_type = other DNA
caaagtcgaatgcagctggt

SEQ ID NO: 41895 - DNA, 20 bp, synthetic construct
  misc_feature 1..20: note = chemically synthesized
  source 1..20: mol_type = other DNA
ggttagactttttttaatga

SEQ ID NO: 41896 - DNA, 20 bp, synthetic construct
  misc_feature 1..20: note = chemically synthesized
  source 1..20: mol_type = other DNA
gactttttttaatgaaagct

SEQ ID NO: 41897 - DNA, 20 bp, synthetic construct
  misc_feature 1..20: note = chemically synthesized
  source 1..20: mol_type = other DNA
tgaaagcttagctttcatta

SEQ ID NO: 41898 - DNA, 20 bp, synthetic construct
  misc_feature 1..20: note = chemically synthesized
  source 1..20: mol_type = other DNA
cttagctttcattaaagatt

SEQ ID NO: 41899 - DNA, 20 bp, synthetic construct
  misc_feature 1..20: note = chemically synthesized
  source 1..20: mol_type = other DNA
tcattaaagattaagctcct

SEQ ID NO: 41900 - DNA, 20 bp, synthetic construct
  misc_feature 1..20: note = chemically synthesized
  source 1..20: mol_type = other DNA
ttaaagattaagctcctaag

SEQ ID NO: 41901 - DNA, 20 bp, synthetic construct
  misc_feature 1..20: note = chemically synthesized
  source 1..20: mol_type = other DNA
taaagattaagctcctaagc

SEQ ID NO: 41902 - DNA, 20 bp, synthetic construct
  misc_feature 1..20: note = chemically synthesized
  source 1..20: mol_type = other DNA
aaagattaagctcctaagca

SEQ ID NO: 41903 - DNA, 20 bp, synthetic construct
  misc_feature 1..20: note = chemically synthesized
  source 1..20: mol_type = other DNA
ttaagctcctaagcagggca

SEQ ID NO: 41904 - DNA, 20 bp, synthetic construct
  misc_feature 1..20: note = chemically synthesized
  source 1..20: mol_type = other DNA
gcacagatgaaattgtctaa

SEQ ID NO: 41905 - DNA, 20 bp, synthetic construct
  misc_feature 1..20: note = chemically synthesized
  source 1..20: mol_type = other DNA
ctaaaaaaatctgacttcac

SEQ ID NO: 41906 - DNA, 20 bp, synthetic construct
  misc_feature 1..20: note = chemically synthesized
  source 1..20: mol_type = other DNA
atctgacttcactggaaaca

SEQ ID NO: 41907 - DNA, 20 bp, synthetic construct
  misc_feature 1..20: note = chemically synthesized
  source 1..20: mol_type = other DNA
tgacttcactggaaacatgg

SEQ ID NO: 41908 - DNA, 20 bp, synthetic construct
  misc_feature 1..20: note = chemically synthesized
  source 1..20: mol_type = other DNA
cactggaaacatggaagccc

SEQ ID NO: 41909 - DNA, 20 bp, synthetic construct
  misc_feature 1..20: note = chemically synthesized
  source 1..20: mol_type = other DNA
actggaaacatggaagccca

SEQ ID NO: 41910 - DNA, 20 bp, synthetic construct
  misc_feature 1..20: note = chemically synthesized
  source 1..20: mol_type = other DNA
aagcccaaggttctgaacat

SEQ ID NO: 41911 - DNA, 20 bp, synthetic construct
  misc_feature 1..20: note = chemically synthesized
  source 1..20: mol_type = other DNA
ttctgaacatgagaaatttt

SEQ ID NO: 41912 - DNA, 20 bp, synthetic construct
  misc_feature 1..20: note = chemically synthesized
  source 1..20: mol_type = other DNA
tctgaacatgagaaattttt

SEQ ID NO: 41913 - DNA, 20 bp, synthetic construct
  misc_feature 1..20: note = chemically synthesized
  source 1..20: mol_type = other DNA
gaaatttttaggaatctgca

SEQ ID NO: 41914 - DNA, 20 bp, synthetic construct
  misc_feature 1..20: note = chemically synthesized
  source 1..20: mol_type = other DNA
aaatttttaggaatctgcac

SEQ ID NO: 41915 - DNA, 20 bp, synthetic construct
  misc_feature 1..20: note = chemically synthesized
  source 1..20: mol_type = other DNA
atttttaggaatctgcacag

SEQ ID NO: 41916 - DNA, 20 bp, synthetic construct
  misc_feature 1..20: note = chemically synthesized
  source 1..20: mol_type = other DNA
taggaatctgcacaggagtt

SEQ ID NO: 41917 - DNA, 20 bp, synthetic construct
  misc_feature 1..20: note = chemically synthesized
  source 1..20: mol_type = other DNA
ggaatctgcacaggagttga

SEQ ID NO: 41918 - DNA, 20 bp, synthetic construct
  misc_feature 1..20: note = chemically synthesized
  source 1..20: mol_type = other DNA
gaatctgcacaggagttgag

SEQ ID NO: 41919 - DNA, 20 bp, synthetic construct
  misc_feature 1..20: note = chemically synthesized
  source 1..20: mol_type = other DNA
aatctgcacaggagttgaga

SEQ ID NO: 41920 - DNA, 20 bp, synthetic construct
  misc_feature 1..20: note = chemically synthesized
  source 1..20: mol_type = other DNA
acaggagttgagagggaaac

SEQ ID NO: 41921 - DNA, 20 bp, synthetic construct
  misc_feature 1..20: note = chemically synthesized
  source 1..20: mol_type = other DNA
gagttgagagggaaacaaga

SEQ ID NO: 41922 - DNA, 20 bp, synthetic construct
  misc_feature 1..20: note = chemically synthesized
  source 1..20: mol_type = other DNA
gagagggaaacaagatggtg

SEQ ID NO: 41923 - DNA, 20 bp, synthetic construct
  misc_feature 1..20: note = chemically synthesized
  source 1..20: mol_type = other DNA
agagggaaacaagatggtga

SEQ ID NO: 41924 - DNA, 20 bp, synthetic construct
  misc_feature 1..20: note = chemically synthesized
  source 1..20: mol_type = other DNA
gagggaaacaagatggtgaa

SEQ ID NO: 41925 - DNA, 20 bp, synthetic construct
  misc_feature 1..20: note = chemically synthesized
  source 1..20: mol_type = other DNA
aaacaagatggtgaagggac

SEQ ID NO: 41926 - DNA, 20 bp, synthetic construct
  misc_feature 1..20: note = chemically synthesized
  source 1..20: mol_type = other DNA
gaagggactagaaaccacat

SEQ ID NO: 41927 - DNA, 20 bp, synthetic construct
  misc_feature 1..20: note = chemically synthesized
  source 1..20: mol_type = other DNA
agggactagaaaccacatga

SEQ ID NO: 41928 - DNA, 20 bp, synthetic construct
  misc_feature 1..20: note = chemically synthesized
  source 1..20: mol_type = other DNA
agaaaccacatgagagacac

SEQ ID NO: 41929 - DNA, 20 bp, synthetic construct
  misc_feature 1..20: note = chemically synthesized
  source 1..20: mol_type = other DNA
gaaaccacatgagagacacg

SEQ ID NO: 41930 - DNA, 20 bp, synthetic construct
  misc_feature 1..20: note = chemically synthesized
  source 1..20: mol_type = other DNA
acatgagagacacgaggaaa

SEQ ID NO: 41931 - DNA, 20 bp, synthetic construct
  misc_feature 1..20: note = chemically synthesized
  source 1..20: mol_type = other DNA
agagacacgaggaaatagtg

SEQ ID NO: 41932 - DNA, 20 bp, synthetic construct
  misc_feature 1..20: note = chemically synthesized
  source 1..20: mol_type = other DNA
acgaggaaatagtgtagatt

SEQ ID NO: 41933 - DNA, 20 bp, synthetic construct
  misc_feature 1..20: note = chemically synthesized
  source 1..20: mol_type = other DNA
cgaggaaatagtgtagattt

SEQ ID NO: 41934 - DNA, 20 bp, synthetic construct
  misc_feature 1..20: note = chemically synthesized
  source 1..20: mol_type = other DNA
gaaatagtgtagatttaggc

SEQ ID NO: 41935 - DNA, 20 bp, synthetic construct
  misc_feature 1..20: note = chemically synthesized
  source 1..20: mol_type = other DNA
aatagtgtagatttaggctg

SEQ ID NO: 41936 - DNA, 20 bp, synthetic construct
  misc_feature 1..20: note = chemically synthesized
  source 1..20: mol_type = other DNA
atagtgtagatttaggctgg

SEQ ID NO: 41937 - DNA, 20 bp, synthetic construct
  misc_feature 1..20: note = chemically synthesized
  source 1..20: mol_type = other DNA
tttaggctggaggtaaatga

SEQ ID NO: 41938 - DNA, 20 bp, synthetic construct
  misc_feature 1..20: note = chemically synthesized
  source 1..20: mol_type = other DNA
taggctggaggtaaatgaaa

SEQ ID NO: 41939 - DNA, 20 bp, synthetic construct
  misc_feature 1..20: note = chemically synthesized
  source 1..20: mol_type = other DNA
gctggaggtaaatgaaagag

SEQ ID NO: 41940 - DNA, 20 bp, synthetic construct
  misc_feature 1..20: note = chemically synthesized
  source 1..20: mol_type = other DNA
ggaggtaaatgaaagagaag

SEQ ID NO: 41941 - DNA, 20 bp, synthetic construct
  misc_feature 1..20: note = chemically synthesized
  source 1..20: mol_type = other DNA
gaggtaaatgaaagagaagt

SEQ ID NO: 41942 - DNA, 20 bp, synthetic construct
  misc_feature 1..20: note = chemically synthesized
  source 1..20: mol_type = other DNA
actgaaatctttctatatgt

SEQ ID NO: 41943 - DNA, 20 bp, synthetic construct
  misc_feature 1..20: note = chemically synthesized
  source 1..20: mol_type = other DNA
ctgaaatctttctatatgtc

SEQ ID NO: 41944 - DNA, 20 bp, synthetic construct
  misc_feature 1..20: note = chemically synthesized
  source 1..20: mol_type = other DNA
tttaataatctcattacata

SEQ ID NO: 41945 - DNA, 20 bp, synthetic construct
  misc_feature 1..20: note = chemically synthesized
  source 1..20: mol_type = other DNA
attacatatggtaattctgt

SEQ ID NO: 41946 - DNA, 20 bp, synthetic construct
  misc_feature 1..20: note = chemically synthesized
  source 1..20: mol_type = other DNA
ctataattaatactaatgat

SEQ ID NO: 41947 - DNA, 20 bp, synthetic construct
  misc_feature 1..20: note = chemically synthesized
  source 1..20: mol_type = other DNA
aatgataagtaacacctctt

SEQ ID NO: 41948 - DNA, 20 bp, synthetic construct
  misc_feature 1..20: note = chemically synthesized
  source 1..20: mol_type = other DNA
agtaacacctcttgagtact

SEQ ID NO: 41949 - DNA, 20 bp, synthetic construct
  misc_feature 1..20: note = chemically synthesized
  source 1..20: mol_type = other DNA
cttgagtacttagtatatgc

SEQ ID NO: 41950 - DNA, 20 bp, synthetic construct
  misc_feature 1..20: note = chemically synthesized
  source 1..20: mol_type = other DNA
tatatgctagaatcaaattt

SEQ ID NO: 41951 - DNA, 20 bp, synthetic construct
  misc_feature 1..20: note = chemically synthesized
  source 1..20: mol_type = other DNA
caaatttaagtttatcatat

SEQ ID NO: 41952 - DNA, 20 bp, synthetic construct
  misc_feature 1..20: note = chemically synthesized
  source 1..20: mol_type = other DNA
aaatttaagtttatcatatg

SEQ ID NO: 41953 - DNA, 20 bp, synthetic construct
  misc_feature 1..20: note = chemically synthesized
  source 1..20: mol_type = other DNA
ttaagtttatcatatgaggc

SEQ ID NO: 41954 - DNA, 20 bp, synthetic construct
  misc_feature 1..20: note = chemically synthesized
  source 1..20: mol_type = other DNA
taagtttatcatatgaggcc

SEQ ID NO: 41955 - DNA, 20 bp, synthetic construct
  misc_feature 1..20: note = chemically synthesized
  source 1..20: mol_type = other DNA
ttatcatatgaggccgggca

SEQ ID NO: 41956 - DNA, 20 bp, synthetic construct
  misc_feature 1..20: note = chemically synthesized
  source 1..20: mol_type = other DNA
tcatatgaggccgggcacgg

SEQ ID NO: 41957 - DNA, 20 bp, synthetic construct
  misc_feature 1..20: note = chemically synthesized
  source 1..20: mol_type = other DNA
cgggcacggtggctcatata

SEQ ID NO: 41958 - DNA, 20 bp, synthetic construct
  misc_feature 1..20: note = chemically synthesized
  source 1..20: mol_type = other DNA
gggcacggtggctcatatat

SEQ ID NO: 41959 - DNA, 20 bp, synthetic construct
  misc_feature 1..20: note = chemically synthesized
  source 1..20: mol_type = other DNA
ggattacatgcctgtaatcc

SEQ ID NO: 41960 - DNA, 20 bp, synthetic construct
  misc_feature 1..20: note = chemically synthesized
  source 1..20: mol_type = other DNA
tgcctgtaatcccagcactt

SEQ ID NO: 41961 - DNA, 20 bp, synthetic construct
  misc_feature 1..20: note = chemically synthesized
  source 1..20: mol_type = other DNA
gcctgtaatcccagcacttt

SEQ ID NO: 41962 - DNA, 20 bp, synthetic construct
  misc_feature 1..20: note = chemically synthesized
  source 1..20: mol_type = other DNA
ctgtaatcccagcactttgg

SEQ ID NO: 41963 - DNA, 20 bp, synthetic construct
  misc_feature 1..20: note = chemically synthesized
  source 1..20: mol_type = other DNA
tgtaatcccagcactttggg

SEQ ID NO: 41964 - DNA, 20 bp, synthetic construct
  misc_feature 1..20: note = chemically synthesized
  source 1..20: mol_type = other DNA
tcccagcactttgggaggcc

SEQ ID NO: 41965 - DNA, 20 bp, synthetic construct
  misc_feature 1..20: note = chemically synthesized
  source 1..20: mol_type = other DNA
cccagcactttgggaggcca

SEQ ID NO: 41966 - DNA, 20 bp, synthetic construct
  misc_feature 1..20: note = chemically synthesized
  source 1..20: mol_type = other DNA
ctttgggaggccaaggcaat

SEQ ID NO: 41967 - DNA, 20 bp, synthetic construct
  misc_feature 1..20: note = chemically synthesized
  source 1..20: mol_type = other DNA
ccaaggcaattggatcacct

SEQ ID NO: 41968 - DNA, 20 bp, synthetic construct
  misc_feature 1..20: note = chemically synthesized
  source 1..20: mol_type = other DNA
caaggcaattggatcacctg

SEQ ID NO: 41969 - DNA, 20 bp, synthetic construct
  misc_feature 1..20: note = chemically synthesized
  source 1..20: mol_type = other DNA
gcaattggatcacctgaggt

SEQ ID NO: 41970 - DNA, 20 bp, synthetic construct
  misc_feature 1..20: note = chemically synthesized
  source 1..20: mol_type = other DNA
caattggatcacctgaggtc

SEQ ID NO: 41971 - DNA, 20 bp, synthetic construct
  misc_feature 1..20: note = chemically synthesized
  source 1..20: mol_type = other DNA
attggatcacctgaggtcag

SEQ ID NO: 41972 - DNA, 20 bp, synthetic construct
  misc_feature 1..20: note = chemically synthesized
  source 1..20: mol_type = other DNA
tcacctgaggtcaggagttc

SEQ ID NO: 41973 - DNA, 20 bp, synthetic construct
  misc_feature 1..20: note = chemically synthesized
  source 1..20: mol_type = other DNA
tgaggtcaggagttccagac

SEQ ID NO: 41974 - DNA, 20 bp, synthetic construct
  misc_feature 1..20: note = chemically synthesized
  source 1..20: mol_type = other DNA
tcaggagttccagaccagcc

SEQ ID NO: 41975 - DNA, 20 bp, synthetic construct
  misc_feature 1..20: note = chemically synthesized
  source 1..20: mol_type = other DNA
ccagaccagcctggccaaca

SEQ ID NO: 41976 - DNA, 20 bp, synthetic construct
  misc_feature 1..20: note = chemically synthesized
  source 1..20: mol_type = other DNA
tactaaaaaatacaaaaaat

SEQ ID NO: 41977 - DNA, 20 bp, synthetic construct
  misc_feature 1..20: note = chemically synthesized
  source 1..20: mol_type = other DNA
aaaaaatacaaaaaatcagc

SEQ ID NO: 41978 - DNA, 20 bp, synthetic construct
  misc_feature 1..20: note = chemically synthesized
  source 1..20: mol_type = other DNA
aaaaatacaaaaaatcagcc

SEQ ID NO: 41979 - DNA, 20 bp, synthetic construct
  misc_feature 1..20: note = chemically synthesized
  source 1..20: mol_type = other DNA
tacaaaaaatcagccaggtg

SEQ ID NO: 41980 - DNA, 20 bp, synthetic construct
  misc_feature 1..20: note = chemically synthesized
  source 1..20: mol_type = other DNA
aaaaaatcagccaggtgtgg

SEQ ID NO: 41981 - DNA, 20 bp, synthetic construct
  misc_feature 1..20: note = chemically synthesized
  source 1..20: mol_type = other DNA
gtggcacgcgtctataatcc

SEQ ID NO: 41982 - DNA, 20 bp, synthetic construct
  misc_feature 1..20: note = chemically synthesized
  source 1..20: mol_type = other DNA
cgtctataatcccagctact

SEQ ID NO: 41983 - DNA, 20 bp, synthetic construct
  misc_feature 1..20: note = chemically synthesized
  source 1..20: mol_type = other DNA
gtctataatcccagctactc

SEQ ID NO: 41984 - DNA, 20 bp, synthetic construct
  misc_feature 1..20: note = chemically synthesized
  source 1..20: mol_type = other DNA
ctataatcccagctactcag

SEQ ID NO: 41985 - DNA, 20 bp, synthetic construct
  misc_feature 1..20: note = chemically synthesized
  source 1..20: mol_type = other DNA
tataatcccagctactcagg

SEQ ID NO: 41986 - DNA, 20 bp, synthetic construct
  misc_feature 1..20: note = chemically synthesized
  source 1..20: mol_type = other DNA
tcccagctactcaggaggct

SEQ ID NO: 41987 - DNA, 20 bp, synthetic construct
  misc_feature 1..20: note = chemically synthesized
  source 1..20: mol_type = other DNA
cccagctactcaggaggctg

SEQ ID NO: 41988 - DNA, 20 bp, synthetic construct
  misc_feature 1..20: note = chemically synthesized
  source 1..20: mol_type = other DNA
agctactcaggaggctgagg

SEQ ID NO: 41989 - DNA, 20 bp, synthetic construct
  misc_feature 1..20: note = chemically synthesized
  source 1..20: mol_type = other DNA
gctactcaggaggctgaggc

SEQ ID NO: 41990 - DNA, 20 bp, synthetic construct
  misc_feature 1..20: note = chemically synthesized
  source 1..20: mol_type = other DNA
tactcaggaggctgaggcag

SEQ ID NO: 41991 - DNA, 20 bp, synthetic construct
  misc_feature 1..20: note = chemically synthesized
  source 1..20: mol_type = other DNA
gcaggagaatcacttgaacc

SEQ ID NO: 41992 - DNA, 20 bp, synthetic construct
  misc_feature 1..20: note = chemically synthesized
  source 1..20: mol_type = other DNA
caggagaatcacttgaaccc

SEQ ID NO: 41993 - DNA, 20 bp, synthetic construct
  misc_feature 1..20: note = chemically synthesized
  source 1..20: mol_type = other DNA
ggagaatcacttgaacccag

SEQ ID NO: 41994 - DNA, 20 bp, synthetic construct
  misc_feature 1..20: note = chemically synthesized
  source 1..20: mol_type = other DNA
gagaatcacttgaacccagg

SEQ ID NO: 41995 - DNA, 20 bp, synthetic construct
  misc_feature 1..20: note = chemically synthesized
  source 1..20: mol_type = other DNA
aatcacttgaacccaggagg

SEQ ID NO: 41996 - DNA, 20 bp, synthetic construct
  misc_feature 1..20: note = chemically synthesized
  source 1..20: mol_type = other DNA
tcacttgaacccaggaggtg

SEQ ID NO: 41997 - DNA, 20 bp, synthetic construct
  misc_feature 1..20: note = chemically synthesized
  source 1..20: mol_type = other DNA
cacttgaacccaggaggtgg

SEQ ID NO: 41998 - DNA, 20 bp, synthetic construct
  misc_feature 1..20: note = chemically synthesized
  source 1..20: mol_type = other DNA
aacccaggaggtggaggttg

SEQ ID NO: 41999 - DNA, 20 bp, synthetic construct
  misc_feature 1..20: note = chemically synthesized
  source 1..20: mol_type = other DNA
caggaggtggaggttgcagt

SEQ ID NO: 42000 - DNA, 20 bp, synthetic construct
  misc_feature 1..20: note = chemically synthesized
  source 1..20: mol_type = other DNA
ggtggaggttgcagtgagct

SEQ ID NO: 42001 - DNA, 20 bp, synthetic construct
  misc_feature 1..20: note = chemically synthesized
  source 1..20: mol_type = other DNA
aagattgcaccactgcactc

SEQ ID NO: 42002 - DNA, 20 bp, synthetic construct
  misc_feature 1..20: note = chemically synthesized
  source 1..20: mol_type = other DNA
tgcaccactgcactccagcc

SEQ ID NO: 42003 - DNA, 20 bp, synthetic construct
  misc_feature 1..20: note = chemically synthesized
  source 1..20: mol_type = other DNA
gcaccactgcactccagcct

SEQ ID NO: 42004 - DNA, 20 bp, synthetic construct
  misc_feature 1..20: note = chemically synthesized
  source 1..20: mol_type = other DNA
ctgcactccagcctaggcga

SEQ ID NO: 42005 - DNA, 20 bp, synthetic construct
  misc_feature 1..20: note = chemically synthesized
  source 1..20: mol_type = other DNA
gcactccagcctaggcgaca

SEQ ID NO: 42006 - DNA, 20 bp, synthetic construct
  misc_feature 1..20: note = chemically synthesized
  source 1..20: mol_type = other DNA
tccagcctaggcgacagagt

SEQ ID NO: 42007 - DNA, 20 bp, synthetic construct
  misc_feature 1..20: note = chemically synthesized
  source 1..20: mol_type = other DNA
ctccatctcaaaaaaaaaaa

SEQ ID NO: 42008 - DNA, 20 bp, synthetic construct
  misc_feature 1..20: note = chemically synthesized
  source 1..20: mol_type = other DNA
catctcaaaaaaaaaaaaag

SEQ ID NO: 42009 - DNA, 20 bp, synthetic construct
  misc_feature 1..20: note = chemically synthesized
  source 1..20: mol_type = other DNA
gtttattatatgaattaact

SEQ ID NO: 42010 - DNA, 20 bp, synthetic construct
  misc_feature 1..20: note = chemically synthesized
  source 1..20: mol_type = other DNA
gttttactcacaccaatact

SEQ ID NO: 42011 - DNA, 20 bp, synthetic construct
  misc_feature 1..20: note = chemically synthesized
  source 1..20: mol_type = other DNA
ttactcacaccaatactcag

SEQ ID NO: 42012 - DNA, 20 bp, synthetic construct
  misc_feature 1..20: note = chemically synthesized
  source 1..20: mol_type = other DNA
ctcacaccaatactcagaag

SEQ ID NO: 42013 - DNA, 20 bp, synthetic construct
  misc_feature 1..20: note = chemically synthesized
  source 1..20: mol_type = other DNA
ttattacctcatttattgat

SEQ ID NO: 42014 - DNA, 20 bp, synthetic construct
  misc_feature 1..20: note = chemically synthesized
  source 1..20: mol_type = other DNA
tattacctcatttattgatg

SEQ ID NO: 42015 - DNA, 20 bp, synthetic construct
  misc_feature 1..20: note = chemically synthesized
  source 1..20: mol_type = other DNA
ttacctcatttattgatgag

SEQ ID NO: 42016 - DNA, 20 bp, synthetic construct
  misc_feature 1..20: note = chemically synthesized
  source 1..20: mol_type = other DNA
tgaggagcccaatgtacttg

SEQ ID NO: 42017 - DNA, 20 bp, synthetic construct
  misc_feature 1..20: note = chemically synthesized
  source 1..20: mol_type = other DNA
agcccaatgtacttgtagtg

SEQ ID NO: 42018 - DNA, 20 bp, synthetic construct
  misc_feature 1..20: note = chemically synthesized
  source 1..20: mol_type = other DNA
agtgtagatcaacttattga

SEQ ID NO: 42019 - DNA, 20 bp, synthetic construct
  misc_feature 1..20: note = chemically synthesized
  source 1..20: mol_type = other DNA
gatcaacttattgaaagcac

SEQ ID NO: 42020 - DNA, 20 bp, synthetic construct
  misc_feature 1..20: note = chemically synthesized
  source 1..20: mol_type = other DNA
tattgaaagcacaagctaat

SEQ ID NO: 42021 - DNA, 20 bp, synthetic construct
  misc_feature 1..20: note = chemically synthesized
  source 1..20: mol_type = other DNA
tgaaagcacaagctaataag

SEQ ID NO: 42022 - DNA, 20 bp, synthetic construct
  misc_feature 1..20: note = chemically synthesized
  source 1..20: mol_type = other DNA
caagctaataagtagacaat

SEQ ID NO: 42023 - DNA, 20 bp, synthetic construct
  misc_feature 1..20: note = chemically synthesized
  source 1..20: mol_type = other DNA
ataagtagacaattagtaat

SEQ ID NO: 42024 - DNA, 20 bp, synthetic construct
  misc_feature 1..20: note = chemically synthesized
  source 1..20: mol_type = other DNA
agtagacaattagtaattag

SEQ ID NO: 42025 - DNA, 20 bp, synthetic construct
  misc_feature 1..20: note = chemically synthesized
  source 1..20: mol_type = other DNA
gacaattagtaattagaagt

SEQ ID NO: 42026 - DNA, 20 bp, synthetic construct
  misc_feature 1..20: note = chemically synthesized
  source 1..20: mol_type = other DNA
attagtaattagaagtcaga

SEQ ID NO: 42027 - DNA, 20 bp, synthetic construct
  misc_feature 1..20: note = chemically synthesized
  source 1..20: mol_type = other DNA
aattagaagtcagatggtct

SEQ ID NO: 42028 - DNA, 20 bp, synthetic construct
  misc_feature 1..20: note = chemically synthesized
  source 1..20: mol_type = other DNA
tcctactgtctacattacat

SEQ ID NO: 42029 - DNA, 20 bp, synthetic construct
  misc_feature 1..20: note = chemically synthesized
  source 1..20: mol_type = other DNA
ttacatgagctcttattaac

SEQ ID NO: 42030 - DNA, 20 bp, synthetic construct
  misc_feature 1..20: note = chemically synthesized
  source 1..20: mol_type = other DNA
tacatgagctcttattaact

SEQ ID NO: 42031 - DNA, 20 bp, synthetic construct
  misc_feature 1..20: note = chemically synthesized
  source 1..20: mol_type = other DNA
acatgagctcttattaactg

SEQ ID NO: 42032 - DNA, 20 bp, synthetic construct
  misc_feature 1..20: note = chemically synthesized
  source 1..20: mol_type = other DNA
aactggggactcgaaaatca

SEQ ID NO: 42033 - DNA, 20 bp, synthetic construct
  misc_feature 1..20: note = chemically synthesized
  source 1..20: mol_type = other DNA
agacatgaaataatttgtcc

SEQ ID NO: 42034 - DNA, 20 bp, synthetic construct
  misc_feature 1..20: note = chemically synthesized
  source 1..20: mol_type = other DNA
aaataatttgtccaagctta

SEQ ID NO: 42035 - DNA, 20 bp, synthetic construct
  misc_feature 1..20: note = chemically synthesized
  source 1..20: mol_type = other DNA
tccaagcttacagaaccacc

SEQ ID NO: 42036 - DNA, 20 bp, synthetic construct
  misc_feature 1..20: note = chemically synthesized
  source 1..20: mol_type = other DNA
aagcttacagaaccaccaag

SEQ ID NO: 42037 - DNA, 20 bp, synthetic construct
  misc_feature 1..20: note = chemically synthesized
  source 1..20: mol_type = other DNA
ttacagaaccaccaagtagt

SEQ ID NO: 42038 - DNA, 20 bp, synthetic construct
  misc_feature 1..20: note = chemically synthesized
  source 1..20: mol_type = other DNA
tacagaaccaccaagtagta

SEQ ID NO: 42039 - DNA, 20 bp, synthetic construct
  misc_feature 1..20: note = chemically synthesized
  source 1..20: mol_type = other DNA
gaaccaccaagtagtaaggc

SEQ ID NO: 42040 - DNA, 20 bp, synthetic construct
  misc_feature 1..20: note = chemically synthesized
  source 1..20: mol_type = other DNA
aaccaccaagtagtaaggct

SEQ ID NO: 42041 - DNA, 20 bp, synthetic construct
  misc_feature 1..20: note = chemically synthesized
  source 1..20: mol_type = other DNA
caagtagtaaggctaggatg

SEQ ID NO: 42042 - DNA, 20 bp, synthetic construct
  misc_feature 1..20: note = chemically synthesized
  source 1..20: mol_type = other DNA
gtaaggctaggatgtagacc

SEQ ID NO: 42043 - DNA, 20 bp, synthetic construct
  misc_feature 1..20: note = chemically synthesized
  source 1..20: mol_type = other DNA
acccagttctgctacctctg

SEQ ID NO: 42044 - DNA, 20 bp, synthetic construct
  misc_feature 1..20: note = chemically synthesized
  source 1..20: mol_type = other DNA
agttctgctacctctgaaga

SEQ ID NO: 42045 - DNA, 20 bp, synthetic construct
  misc_feature 1..20: note = chemically synthesized
  source 1..20: mol_type = other DNA
tgaagacagtgttttttcca

SEQ ID NO: 42046 - DNA, 20 bp, synthetic construct
  misc_feature 1..20: note = chemically synthesized
  source 1..20: mol_type = other DNA
tccacagcaaaacacaaact

SEQ ID NO: 42047 - DNA, 20 bp, synthetic construct
  misc_feature 1..20: note = chemically synthesized
  source 1..20: mol_type = other DNA
aaacacaaactcagatattg

SEQ ID NO: 42048 - DNA, 20 bp, synthetic construct
  misc_feature 1..20: note = chemically synthesized
  source 1..20: mol_type = other DNA
aactcagatattgtggatgc

SEQ ID NO: 42049 - DNA, 20 bp, synthetic construct
  misc_feature 1..20: note = chemically synthesized
  source 1..20: mol_type = other DNA
atattgtggatgcgagaaat

SEQ ID NO: 42050 - DNA, 20 bp, synthetic construct
  misc_feature 1..20: note = chemically synthesized
  source 1..20: mol_type = other DNA
ttgtggatgcgagaaattag

SEQ ID NO: 42051 - DNA, 20 bp, synthetic construct
  misc_feature 1..20: note = chemically synthesized
  source 1..20: mol_type = other DNA
tggatgcgagaaattagaag

SEQ ID NO: 42052 - DNA, 20 bp, synthetic construct
  misc_feature 1..20: note = chemically synthesized
  source 1..20: mol_type = other DNA
aagtagatattcctgccctg

SEQ ID NO: 42053 - DNA, 20 bp, synthetic construct
  misc_feature 1..20: note = chemically synthesized
  source 1..20: mol_type = other DNA
tacttttacttcttgtcgat

SEQ ID NO: 42054 - DNA, 20 bp, synthetic construct
  misc_feature 1..20: note = chemically synthesized
  source 1..20: mol_type = other DNA
ttttacttcttgtcgattgg

SEQ ID NO: 42055 - DNA, 20 bp, synthetic construct
  misc_feature 1..20: note = chemically synthesized
  source 1..20: mol_type = other DNA
ttcttgtcgattggaagttg

SEQ ID NO: 42056 - DNA, 20 bp, synthetic construct
  misc_feature 1..20: note = chemically synthesized
  source 1..20: mol_type = other DNA
tcgattggaagttgtggtcc

SEQ ID NO: 42057 - DNA, 20 bp, synthetic construct
  misc_feature 1..20: note = chemically synthesized
  source 1..20: mol_type = other DNA
ggaagttgtggtccaagcca

SEQ ID NO: 42058 - DNA, 20 bp, synthetic construct
  misc_feature 1..20: note = chemically synthesized
  source 1..20: mol_type = other DNA
tgtggtccaagccacagttg

SEQ ID NO: 42059 - DNA, 20 bp, synthetic construct
  misc_feature 1..20: note = chemically synthesized
  source 1..20: mol_type = other DNA
caaccataattgcatttctt

SEQ ID NO: 42060 - DNA, 20 bp, synthetic construct
  misc_feature 1..20: note = chemically synthesized
  source 1..20: mol_type = other DNA
aaccataattgcatttcttc

SEQ ID NO: 42061 - DNA, 20 bp, synthetic construct
  misc_feature 1..20: note = chemically synthesized
  source 1..20: mol_type = other DNA
ataattgcatttcttcagga

SEQ ID NO: 42062 - DNA, 20 bp, synthetic construct
  misc_feature 1..20: note = chemically synthesized
  source 1..20: mol_type = other DNA
gcatttcttcaggaaagttt

SEQ ID NO: 42063 - DNA, 20 bp, synthetic construct
  misc_feature 1..20: note = chemically synthesized
  source 1..20: mol_type = other DNA
catttcttcaggaaagtttg

SEQ ID NO: 42064 - DNA, 20 bp, synthetic construct
  misc_feature 1..20: note = chemically synthesized
  source 1..20: mol_type = other DNA
atttcttcaggaaagtttga

SEQ ID NO: 42065 - DNA, 20 bp, synthetic construct
  misc_feature 1..20: note = chemically synthesized
  source 1..20: mol_type = other DNA
ttcttcaggaaagtttgagg

SEQ ID NO: 42066 - DNA, 20 bp, synthetic construct
  misc_feature 1..20: note = chemically synthesized
  source 1..20: mol_type = other DNA
aggaaagtttgagggagaaa

SEQ ID NO: 42067 - DNA, 20 bp, synthetic construct
  misc_feature 1..20: note = chemically synthesized
  source 1..20: mol_type = other DNA
ggaaagtttgagggagaaaa

SEQ ID NO: 42068 - DNA, 20 bp, synthetic construct
  misc_feature 1..20: note = chemically synthesized
  source 1..20: mol_type = other DNA
gtttgagggagaaaaaggta

SEQ ID NO: 42069 - DNA, 20 bp, synthetic construct
  misc_feature 1..20: note = chemically synthesized
  source 1..20: mol_type = other DNA
gaaaaaggtaaagaaaaatt

SEQ ID NO: 42070 - DNA, 20 bp, synthetic construct
  misc_feature 1..20: note = chemically synthesized
  source 1..20: mol_type = other DNA
gaaaaatttagaaacaactt

SEQ ID NO: 42071 - DNA, 20 bp, synthetic construct
  misc_feature 1..20: note = chemically synthesized
  source 1..20: mol_type = other DNA
ttagaaacaacttcagaata

SEQ ID NO: 42072 - DNA, 20 bp, synthetic construct
  misc_feature 1..20: note = chemically synthesized
  source 1..20: mol_type = other DNA
agaaacaacttcagaataaa

SEQ ID NO: 42073 - DNA, 20 bp, synthetic construct
  misc_feature 1..20: note = chemically synthesized
  source 1..20: mol_type = other DNA
agaataaagagattttctct

SEQ ID NO: 42074 - DNA, 20 bp, synthetic construct
  misc_feature 1..20: note = chemically synthesized
  source 1..20: mol_type = other DNA
gaataaagagattttctctt

SEQ ID NO: 42075 - DNA, 20 bp, synthetic construct
  misc_feature 1..20: note = chemically synthesized
  source 1..20: mol_type = other DNA
agagattttctcttgggtta

SEQ ID NO: 42076 - DNA, 20 bp, synthetic construct
  misc_feature 1..20: note = chemically synthesized
  source 1..20: mol_type = other DNA
agattttctcttgggttaca

SEQ ID NO: 42077 - DNA, 20 bp, synthetic construct
  misc_feature 1..20: note = chemically synthesized
  source 1..20: mol_type = other DNA
attgtcatatgacaaattat

SEQ ID NO: 42078 - DNA, 20 bp, synthetic construct
  misc_feature 1..20: note = chemically synthesized
  source 1..20: mol_type = other DNA
gtcatatgacaaattataag

SEQ ID NO: 42079 - DNA, 20 bp, synthetic construct
  misc_feature 1..20: note = chemically synthesized
  source 1..20: mol_type = other DNA
caaattataagcagacactt

SEQ ID NO: 42080 - DNA, 20 bp, synthetic construct
  misc_feature 1..20: note = chemically synthesized
  source 1..20: mol_type = other DNA
gcagacacttgagaaaactg

SEQ ID NO: 42081 - DNA, 20 bp, synthetic construct
  misc_feature 1..20: note = chemically synthesized
  source 1..20: mol_type = other DNA
cagacacttgagaaaactga

SEQ ID NO: 42082 - DNA, 20 bp, synthetic construct
  misc_feature 1..20: note = chemically synthesized
  source 1..20: mol_type = other DNA
caaattaccctttgacccct

SEQ ID NO: 42083 - DNA, 20 bp, synthetic construct
  misc_feature 1..20: note = chemically synthesized
  source 1..20: mol_type = other DNA
taccctttgaccccttggtc

SEQ ID NO: 42084 - DNA, 20 bp, synthetic construct
  misc_feature 1..20: note = chemically synthesized
  source 1..20: mol_type = other DNA
ccttggtcaagctgcaactt

SEQ ID NO: 42085 - DNA, 20 bp, synthetic construct
  misc_feature 1..20: note = chemically synthesized
  source 1..20: mol_type = other DNA
tcaagctgcaactttggtta

SEQ ID NO: 42086 - DNA, 20 bp, synthetic construct
  misc_feature 1..20: note = chemically synthesized
  source 1..20: mol_type = other DNA
caagctgcaactttggttaa

SEQ ID NO: 42087 - DNA, 20 bp, synthetic construct
  misc_feature 1..20: note = chemically synthesized
  source 1..20: mol_type = other DNA
aagctgcaactttggttaaa

SEQ ID NO: 42088 - DNA, 20 bp, synthetic construct
  misc_feature 1..20: note = chemically synthesized
  source 1..20: mol_type = other DNA
gctgcaactttggttaaagg

SEQ ID NO: 42089 - DNA, 20 bp, synthetic construct
  misc_feature 1..20: note = chemically synthesized
  source 1..20: mol_type = other DNA
aagggagtgtttatgtgtta

SEQ ID NO: 42090 - DNA, 20 bp, synthetic construct
  misc_feature 1..20: note = chemically synthesized
  source 1..20: mol_type = other DNA
atagtgttcatttactcttc

SEQ ID NO: 42091 - DNA, 20 bp, synthetic construct
  misc_feature 1..20: note = chemically synthesized
  source 1..20: mol_type = other DNA
actcttctggtctaacccat

SEQ ID NO: 42092 - DNA, 20 bp, synthetic construct
  misc_feature 1..20: note = chemically synthesized
  source 1..20: mol_type = other DNA
ttggctccgtcttcatcctg

SEQ ID NO: 42093 - DNA, 20 bp, synthetic construct
  misc_feature 1..20: note = chemically synthesized
  source 1..20: mol_type = other DNA
tcttcatcctgcagtgacct

SEQ ID NO: 42094 - DNA, 20 bp, synthetic construct
  misc_feature 1..20: note = chemically synthesized
  source 1..20: mol_type = other DNA
ctgcagtgacctcagtgcct

SEQ ID NO: 42095 - DNA, 20 bp, synthetic construct
  misc_feature 1..20: note = chemically synthesized
  source 1..20: mol_type = other DNA
gaaacatacatatgtttgtc

SEQ ID NO: 42096 - DNA, 20 bp, synthetic construct
  misc_feature 1..20: note = chemically synthesized
  source 1..20: mol_type = other DNA
tacatatgtttgtctagttt

SEQ ID NO: 42097 - DNA, 20 bp, synthetic construct
  misc_feature 1..20: note = chemically synthesized
  source 1..20: mol_type = other DNA
agtttgtgtgaaattctaac

SEQ ID NO: 42098 - DNA, 20 bp, synthetic construct
  misc_feature 1..20: note = chemically synthesized
  source 1..20: mol_type = other DNA
gtgaaattctaactagcgtc

SEQ ID NO: 42099 - DNA, 20 bp, synthetic construct
  misc_feature 1..20: note = chemically synthesized
  source 1..20: mol_type = other DNA
tctaactagcgtcaagaact

SEQ ID NO: 42100 - DNA, 20 bp, synthetic construct
  misc_feature 1..20: note = chemically synthesized
  source 1..20: mol_type = other DNA
ctaactagcgtcaagaactg

SEQ ID NO: 42101 - DNA, 20 bp, synthetic construct
  misc_feature 1..20: note = chemically synthesized
  source 1..20: mol_type = other DNA
taactagcgtcaagaactga

SEQ ID NO: 42102 - DNA, 20 bp, synthetic construct
  misc_feature 1..20: note = chemically synthesized
  source 1..20: mol_type = other DNA
ctgagggccctaaactatgc

SEQ ID NO: 42103 - DNA, 20 bp, synthetic construct
  misc_feature 1..20: note = chemically synthesized
  source 1..20: mol_type = other DNA
tgagggccctaaactatgct

SEQ ID NO: 42104 - DNA, 20 bp, synthetic construct
  misc_feature 1..20: note = chemically synthesized
  source 1..20: mol_type = other DNA
gccctaaactatgctaggaa

SEQ ID NO: 42105 - DNA, 20 bp, synthetic construct
  misc_feature 1..20: note = chemically synthesized
  source 1..20: mol_type = other DNA
ctatgctaggaatagtgctg

SEQ ID NO: 42106 - DNA, 20 bp, synthetic construct
  misc_feature 1..20: note = chemically synthesized
  source 1..20: mol_type = other DNA
atagtgctgtggtgctgtga

SEQ ID NO: 42107 - DNA, 20 bp, synthetic construct
  misc_feature 1..20: note = chemically synthesized
  source 1..20: mol_type = other DNA
tagtgctgtggtgctgtgat

SEQ ID NO: 42108 - DNA, 20 bp, synthetic construct
  misc_feature 1..20: note = chemically synthesized
  source 1..20: mol_type = other DNA
tggtgctgtgataggtacac

SEQ ID NO: 42109 - DNA, 20 bp, synthetic construct
  misc_feature 1..20: note = chemically synthesized
  source 1..20: mol_type = other DNA
gtgataggtacacaagaaat

SEQ ID NO: 42110 - DNA, 20 bp, synthetic construct
  misc_feature 1..20: note = chemically synthesized
  source 1..20: mol_type = other DNA
ataggtacacaagaaatgag

SEQ ID NO: 42111 - DNA, 20 bp, synthetic construct
  misc_feature 1..20: note = chemically synthesized
  source 1..20: mol_type = other DNA
caagaaatgagaagaaactg

SEQ ID NO: 42112 - DNA, 20 bp, synthetic construct
  misc_feature 1..20: note = chemically synthesized
  source 1..20: mol_type = other DNA
ttctctgcatctccctttgc

SEQ ID NO: 42113 - DNA, 20 bp, synthetic construct
  misc_feature 1..20: note = chemically synthesized
  source 1..20: mol_type = other DNA
tctctgcatctccctttgcc

SEQ ID NO: 42114 - DNA, 20 bp, synthetic construct
  misc_feature 1..20: note = chemically synthesized
  source 1..20: mol_type = other DNA
ctttgccgggtctgacaaca

SEQ ID NO: 42115 - DNA, 20 bp, synthetic construct
  misc_feature 1..20: note = chemically synthesized
  source 1..20: mol_type = other DNA
tccccaaattttaccaatgc

SEQ ID NO: 42116 - DNA, 20 bp, synthetic construct
  misc_feature 1..20: note = chemically synthesized
  source 1..20: mol_type = other DNA
ctaactactttaaaatcatt

SEQ ID NO: 42117 - DNA, 20 bp, synthetic construct
  misc_feature 1..20: note = chemically synthesized
  source 1..20: mol_type = other DNA
taactactttaaaatcattt

SEQ ID NO: 42118 - DNA, 20 bp, synthetic construct
  misc_feature 1..20: note = chemically synthesized
  source 1..20: mol_type = other DNA
aactactttaaaatcatttg

SEQ ID NO: 42119 - DNA, 20 bp, synthetic construct
  misc_feature 1..20: note = chemically synthesized
  source 1..20: mol_type = other DNA
ttgtctttctcatctgtaaa

SEQ ID NO: 42120 - DNA, 20 bp, synthetic construct
  misc_feature 1..20: note = chemically synthesized
  source 1..20: mol_type = other DNA
tttctcatctgtaaaaagaa

SEQ ID NO: 42121 - DNA, 20 bp, synthetic construct
  misc_feature 1..20: note = chemically synthesized
  source 1..20: mol_type = other DNA
ctcatctgtaaaaagaatgg

SEQ ID NO: 42122 - DNA, 20 bp, synthetic construct
  misc_feature 1..20: note = chemically synthesized
  source 1..20: mol_type = other DNA
aatggaagaactcattccta

SEQ ID NO: 42123 - DNA, 20 bp, synthetic construct
  misc_feature 1..20: note = chemically synthesized
  source 1..20: mol_type = other DNA
actccctatgtcttccctga

SEQ ID NO: 42124 - DNA, 20 bp, synthetic construct
  misc_feature 1..20: note = chemically synthesized
  source 1..20: mol_type = other DNA
ctccctatgtcttccctgat

SEQ ID NO: 42125 - DNA, 20 bp, synthetic construct
  misc_feature 1..20: note = chemically synthesized
  source 1..20: mol_type = other DNA
ctatgtcttccctgatgggc

SEQ ID NO: 42126 - DNA, 20 bp, synthetic construct
  misc_feature 1..20: note = chemically synthesized
  source 1..20: mol_type = other DNA
atgtcttccctgatgggcta

SEQ ID NO: 42127 - DNA, 20 bp, synthetic construct
  misc_feature 1..20: note = chemically synthesized
  source 1..20: mol_type = other DNA
agttcctctttctcaaaaat

SEQ ID NO: 42128 - DNA, 20 bp, synthetic construct
  misc_feature 1..20: note = chemically synthesized
  source 1..20: mol_type = other DNA
ccattattgtatttccttct

SEQ ID NO: 42129 - DNA, 20 bp, synthetic construct
  misc_feature 1..20: note = chemically synthesized
  source 1..20: mol_type = other DNA
ttgtatttccttctaagcca

SEQ ID NO: 42130 - DNA, 20 bp, synthetic construct
  misc_feature 1..20: note = chemically synthesized
  source 1..20: mol_type = other DNA
tttccttctaagccaaagct

SEQ ID NO: 42131 - DNA, 20 bp, synthetic construct
  misc_feature 1..20: note = chemically synthesized
  source 1..20: mol_type = other DNA
tccttctaagccaaagctca

SEQ ID NO: 42132 - DNA, 20 bp, synthetic construct
  misc_feature 1..20: note = chemically synthesized
  source 1..20: mol_type = other DNA
ccttctaagccaaagctcag

SEQ ID NO: 42133 - DNA, 20 bp, synthetic construct
  misc_feature 1..20: note = chemically synthesized
  source 1..20: mol_type = other DNA
ctcagaggtcttgtattgcc

SEQ ID NO: 42134 - DNA, 20 bp, synthetic construct
  misc_feature 1..20: note = chemically synthesized
  source 1..20: mol_type = other DNA
ttgcccagtgacatgcacac

SEQ ID NO: 42135 - DNA, 20 bp, synthetic construct
  misc_feature 1..20: note = chemically synthesized
  source 1..20: mol_type = other DNA
gtgacatgcacactggtcaa

SEQ ID NO: 42136 - DNA, 20 bp, synthetic construct
  misc_feature 1..20: note = chemically synthesized
  source 1..20: mol_type = other DNA
acatgcacactggtcaaaag

SEQ ID NO: 42137 - DNA, 20 bp, synthetic construct
  misc_feature 1..20: note = chemically synthesized
  source 1..20: mol_type = other DNA
catgcacactggtcaaaagt

SEQ ID NO: 42138 - DNA, 20 bp, synthetic construct
  misc_feature 1..20: note = chemically synthesized
  source 1..20: mol_type = other DNA
acactggtcaaaagtaggct

SEQ ID NO: 42139 - DNA, 20 bp, synthetic construct
  misc_feature 1..20: note = chemically synthesized
  source 1..20: mol_type = other DNA
ctggtcaaaagtaggctaag

SEQ ID NO: 42140 - DNA, 20 bp, synthetic construct
  misc_feature 1..20: note = chemically synthesized
  source 1..20: mol_type = other DNA
gtcaaaagtaggctaagtag

SEQ ID NO: 42141 - DNA, 20 bp, synthetic construct
  misc_feature 1..20: note = chemically synthesized
  source 1..20: mol_type = other DNA
tcaaaagtaggctaagtaga

SEQ ID NO: 42142 - DNA, 20 bp, synthetic construct
  misc_feature 1..20: note = chemically synthesized
  source 1..20: mol_type = other DNA
caaaagtaggctaagtagaa

SEQ ID NO: 42143 - DNA, 20 bp, synthetic construct
  misc_feature 1..20: note = chemically synthesized
  source 1..20: mol_type = other DNA
taagtagaagggtactttca

SEQ ID NO: 42144 - DNA, 20 bp, synthetic construct
  misc_feature 1..20: note = chemically synthesized
  source 1..20: mol_type = other DNA
aagtagaagggtactttcac

SEQ ID NO: 42145 - DNA, 20 bp, synthetic construct
  misc_feature 1..20: note = chemically synthesized
  source 1..20: mol_type = other DNA
gaagggtactttcacaggaa

SEQ ID NO: 42146 - DNA, 20 bp, synthetic construct
  misc_feature 1..20: note = chemically synthesized
  source 1..20: mol_type = other DNA
agggtactttcacaggaaca

SEQ ID NO: 42147 - DNA, 20 bp, synthetic construct
  misc_feature 1..20: note = chemically synthesized
  source 1..20: mol_type = other DNA
ggtactttcacaggaacaga

SEQ ID NO: 42148 - DNA, 20 bp, synthetic construct
  misc_feature 1..20: note = chemically synthesized
  source 1..20: mol_type = other DNA
ttcacaggaacagagagcaa

SEQ ID NO: 42149 - DNA, 20 bp, synthetic construct
  misc_feature 1..20: note = chemically synthesized
  source 1..20: mol_type = other DNA
cacaggaacagagagcaaaa

SEQ ID NO: 42150 - DNA, 20 bp, synthetic construct
  misc_feature 1..20: note = chemically synthesized
  source 1..20: mol_type = other DNA
acaggaacagagagcaaaag

SEQ ID NO: 42151 - DNA, 20 bp, synthetic construct
  misc_feature 1..20: note = chemically synthesized
  source 1..20: mol_type = other DNA
ggaacagagagcaaaagagg

SEQ ID NO: 42152 - DNA, 20 bp, synthetic construct
  misc_feature 1..20: note = chemically synthesized
  source 1..20: mol_type = other DNA
gaacagagagcaaaagaggt

SEQ ID NO: 42153 - DNA, 20 bp, synthetic construct
  misc_feature 1..20: note = chemically synthesized
  source 1..20: mol_type = other DNA
agcaaaagaggtgggtgaat

SEQ ID NO: 42154 - DNA, 20 bp, synthetic construct
  misc_feature 1..20: note = chemically synthesized
  source 1..20: mol_type = other DNA
caaaagaggtgggtgaatga

SEQ ID NO: 42155 - DNA, 20 bp, synthetic construct
  misc_feature 1..20: note = chemically synthesized
  source 1..20: mol_type = other DNA
aaaagaggtgggtgaatgag

SEQ ID NO: 42156 - DNA, 20 bp, synthetic construct
  misc_feature 1..20: note = chemically synthesized
  source 1..20: mol_type = other DNA
aaagaggtgggtgaatgaga

SEQ ID NO: 42157 - DNA, 20 bp, synthetic construct
  misc_feature 1..20: note = chemically synthesized
  source 1..20: mol_type = other DNA
aggtgggtgaatgagagggt

SEQ ID NO: 42158 - DNA, 20 bp, synthetic construct
  misc_feature 1..20: note = chemically synthesized
  source 1..20: mol_type = other DNA
gggtgaatgagagggtaagt

SEQ ID NO: 42159 - DNA, 20 bp, synthetic construct
  misc_feature 1..20: note = chemically synthesized
  source 1..20: mol_type = other DNA
aatgagagggtaagtgagaa

SEQ ID NO: 42160 - DNA, 20 bp, synthetic construct
  misc_feature 1..20: note = chemically synthesized
  source 1..20: mol_type = other DNA
gtaagtgagaaaagacaaat

SEQ ID NO: 42161 - DNA, 20 bp, synthetic construct
  misc_feature 1..20: note = chemically synthesized
  source 1..20: mol_type = other DNA
agtgagaaaagacaaatgag

SEQ ID NO: 42162 - DNA, 20 bp, synthetic construct
  misc_feature 1..20: note = chemically synthesized
  source 1..20: mol_type = other DNA
aatgagaagttacaacatga

SEQ ID NO: 42163 - DNA, 20 bp, synthetic construct
  misc_feature 1..20: note = chemically synthesized
  source 1..20: mol_type = other DNA
cttgttgtctaaatatctcc

SEQ ID NO: 42164 - DNA, 20 bp, synthetic construct
  misc_feature 1..20: note = chemically synthesized
  source 1..20: mol_type = other DNA
ttgttgtctaaatatctcct

SEQ ID NO: 42165 - DNA, 20 bp, synthetic construct
  misc_feature 1..20: note = chemically synthesized
  source 1..20: mol_type = other DNA
tgttgtctaaatatctccta

SEQ ID NO: 42166 - DNA, 20 bp, synthetic construct
  misc_feature 1..20: note = chemically synthesized
  source 1..20: mol_type = other DNA
atctcctagggaattattgt

SEQ ID NO: 42167 - DNA, 20 bp, synthetic construct
  misc_feature 1..20: note = chemically synthesized
  source 1..20: mol_type = other DNA
ctcctagggaattattgtga

SEQ ID NO: 42168 - DNA, 20 bp, synthetic construct
  misc_feature 1..20: note = chemically synthesized
  source 1..20: mol_type = other DNA
tcctagggaattattgtgag

SEQ ID NO: 42169 - DNA, 20 bp, synthetic construct
  misc_feature 1..20: note = chemically synthesized
  source 1..20: mol_type = other DNA
attattgtgagaggtctgaa

SEQ ID NO: 42170 - DNA, 20 bp, synthetic construct
  misc_feature 1..20: note = chemically synthesized
  source 1..20: mol_type = other DNA
tctgaatagtgttgtaaaat

SEQ ID NO: 42171 - DNA, 20 bp, synthetic construct
  misc_feature 1..20: note = chemically synthesized
  source 1..20: mol_type = other DNA
gaatctgctgccaacattaa

SEQ ID NO: 42172 - DNA, 20 bp, synthetic construct
  misc_feature 1..20: note = chemically synthesized
  source 1..20: mol_type = other DNA
tgctgccaacattaacagtc

SEQ ID NO: 42173 - DNA, 20 bp, synthetic construct
  misc_feature 1..20: note = chemically synthesized
  source 1..20: mol_type = other DNA
tgtacctccaattattcttt

SEQ ID NO: 42174 - DNA, 20 bp, synthetic construct
  misc_feature 1..20: note = chemically synthesized
  source 1..20: mol_type = other DNA
gtacctccaattattcttta

SEQ ID NO: 42175 - DNA, 20 bp, synthetic construct
  misc_feature 1..20: note = chemically synthesized
  source 1..20: mol_type = other DNA
cctccaattattctttaagg

SEQ ID NO: 42176 - DNA, 20 bp, synthetic construct
  misc_feature 1..20: note = chemically synthesized
  source 1..20: mol_type = other DNA
aaggtagcatgcaactgtaa

SEQ ID NO: 42177 - DNA, 20 bp, synthetic construct
  misc_feature 1..20: note = chemically synthesized
  source 1..20: mol_type = other DNA
tatttatcataatactgtaa

SEQ ID NO: 42178 - DNA, 20 bp, synthetic construct
  misc_feature 1..20: note = chemically synthesized
  source 1..20: mol_type = other DNA
ctgaatatatactgtgtccc

SEQ ID NO: 42179 - DNA, 20 bp, synthetic construct
  misc_feature 1..20: note = chemically synthesized
  source 1..20: mol_type = other DNA
tctcatcctcataattctat

SEQ ID NO: 42180 - DNA, 20 bp, synthetic construct
  misc_feature 1..20: note = chemically synthesized
  source 1..20: mol_type = other DNA
catattatcatcctatattt

SEQ ID NO: 42181 - DNA, 20 bp, synthetic construct
  misc_feature 1..20: note = chemically synthesized
  source 1..20: mol_type = other DNA
tattatcatcctatatttca

SEQ ID NO: 42182 - DNA, 20 bp, synthetic construct
  misc_feature 1..20: note = chemically synthesized
  source 1..20: mol_type = other DNA
tcctatatttcagagacttc

SEQ ID NO: 42183 - DNA, 20 bp, synthetic construct
  misc_feature 1..20: note = chemically synthesized
  source 1..20: mol_type = other DNA
tatatttcagagacttcaag

SEQ ID NO: 42184 - DNA, 20 bp, synthetic construct
  misc_feature 1..20: note = chemically synthesized
  source 1..20: mol_type = other DNA
ttcagagacttcaagaagtt

SEQ ID NO: 42185 - DNA, 20 bp, synthetic construct
  misc_feature 1..20: note = chemically synthesized
  source 1..20: mol_type = other DNA
agaagttaagcaacttgctc

SEQ ID NO: 42186 - DNA, 20 bp, synthetic construct
  misc_feature 1..20: note = chemically synthesized
  source 1..20: mol_type = other DNA
caacttgctcaagatcatct

SEQ ID NO: 42187 - DNA, 20 bp, synthetic construct
  misc_feature 1..20: note = chemically synthesized
  source 1..20: mol_type = other DNA
cttgctcaagatcatctaag

SEQ ID NO: 42188 - DNA, 20 bp, synthetic construct
  misc_feature 1..20: note = chemically synthesized
  source 1..20: mol_type = other DNA
gctcaagatcatctaagaag

SEQ ID NO: 42189 - DNA, 20 bp, synthetic construct
  misc_feature 1..20: note = chemically synthesized
  source 1..20: mol_type = other DNA
ctcaagatcatctaagaagt

SEQ ID NO: 42190 - DNA, 20 bp, synthetic construct
  misc_feature 1..20: note = chemically synthesized
  source 1..20: mol_type = other DNA
aagatcatctaagaagtagg

SEQ ID NO: 42191 - DNA, 20 bp, synthetic construct
  misc_feature 1..20: note = chemically synthesized
  source 1..20: mol_type = other DNA
taagaagtaggtggtatttc

SEQ ID NO: 42192 - DNA, 20 bp, synthetic construct
  misc_feature 1..20: note = chemically synthesized
  source 1..20: mol_type = other DNA
aagaagtaggtggtatttct

SEQ ID NO: 42193 - DNA, 20 bp, synthetic construct
  misc_feature 1..20: note = chemically synthesized
  source 1..20: mol_type = other DNA
gtggtatttctgggctcatt

SEQ ID NO: 42194 - DNA, 20 bp, synthetic construct
  misc_feature 1..20: note = chemically synthesized
  source 1..20: mol_type = other DNA
tggcccctcctaatctctca

SEQ ID NO: 42195 - DNA, 20 bp, synthetic construct
  misc_feature 1..20: note = chemically synthesized
  source 1..20: mol_type = other DNA
cctaatctctcatggcaaca

SEQ ID NO: 42196 - DNA, 20 bp, synthetic construct
  misc_feature 1..20: note = chemically synthesized
  source 1..20: mol_type = other DNA
catggcaacatggctgccta

SEQ ID NO: 42197 - DNA, 20 bp, synthetic construct
  misc_feature 1..20: note = chemically synthesized
  source 1..20: mol_type = other DNA
tgttgattgccttaattcat

SEQ ID NO: 42198 - DNA, 20 bp, synthetic construct
  misc_feature 1..20: note = chemically synthesized
  source 1..20: mol_type = other DNA
gttgattgccttaattcatc

SEQ ID NO: 42199 - DNA, 20 bp, synthetic construct
  misc_feature 1..20: note = chemically synthesized
  source 1..20: mol_type = other DNA
ttgattgccttaattcatca

SEQ ID NO: 42200 - DNA, 20 bp, synthetic construct
  misc_feature 1..20: note = chemically synthesized
  source 1..20: mol_type = other DNA
ttgccttaattcatcaggga

SEQ ID NO: 42201 - DNA, 20 bp, synthetic construct
  misc_feature 1..20: note = chemically synthesized
  source 1..20: mol_type = other DNA
tgccttaattcatcagggat

SEQ ID NO: 42202 - DNA, 20 bp, synthetic construct
  misc_feature 1..20: note = chemically synthesized
  source 1..20: mol_type = other DNA
ggatgggctcatactcactg

SEQ ID NO: 42203 - DNA, 20 bp, synthetic construct
  misc_feature 1..20: note = chemically synthesized
  source 1..20: mol_type = other DNA
tactcactgcagaccttaac

SEQ ID NO: 42204 - DNA, 20 bp, synthetic construct
  misc_feature 1..20: note = chemically synthesized
  source 1..20: mol_type = other DNA
ttatgtgatctgcctgaccc

SEQ ID NO: 42205 - DNA, 20 bp, synthetic construct
  misc_feature 1..20: note = chemically synthesized
  source 1..20: mol_type = other DNA
tgtgatctgcctgaccctag

SEQ ID NO: 42206 - DNA, 20 bp, synthetic construct
  misc_feature 1..20: note = chemically synthesized
  source 1..20: mol_type = other DNA
agacttatgaaatttctgat

SEQ ID NO: 42207 - DNA, 20 bp, synthetic construct
  misc_feature 1..20: note = chemically synthesized
  source 1..20: mol_type = other DNA
ttatgaaatttctgatgaga

SEQ ID NO: 42208 - DNA, 20 bp, synthetic construct
  misc_feature 1..20: note = chemically synthesized
  source 1..20: mol_type = other DNA
tatgaaatttctgatgagaa

SEQ ID NO: 42209 - DNA, 20 bp, synthetic construct
  misc_feature 1..20: note = chemically synthesized
  source 1..20: mol_type = other DNA
tgaaatttctgatgagaaag

SEQ ID NO: 42210 - DNA, 20 bp, synthetic construct
  misc_feature 1..20: note = chemically synthesized
  source 1..20: mol_type = other DNA
aaatttctgatgagaaagga

SEQ ID NO: 42211 - DNA, 20 bp, synthetic construct
  misc_feature 1..20: note = chemically synthesized
  source 1..20: mol_type = other DNA
atttctgatgagaaaggaga

SEQ ID NO: 42212 - DNA, 20 bp, synthetic construct
  misc_feature 1..20: note = chemically synthesized
  source 1..20: mol_type = other DNA
tttctgatgagaaaggagag

SEQ ID NO: 42213 - DNA, 20 bp, synthetic construct
  misc_feature 1..20: note = chemically synthesized
  source 1..20: mol_type = other DNA
tctgatgagaaaggagagag

SEQ ID NO: 42214 - DNA, 20 bp, synthetic construct
  misc_feature 1..20: note = chemically synthesized
  source 1..20: mol_type = other DNA
atgagaaaggagagaggaga

SEQ ID NO: 42215 - DNA, 20 bp, synthetic construct
  misc_feature 1..20: note = chemically synthesized
  source 1..20: mol_type = other DNA
tgagaaaggagagaggagaa

SEQ ID NO: 42216 - DNA, 20 bp, synthetic construct
  misc_feature 1..20: note = chemically synthesized
  source 1..20: mol_type = other DNA
gaaaggagagaggagaaagg

SEQ ID NO: 42217 - DNA, 20 bp, synthetic construct
  misc_feature 1..20: note = chemically synthesized
  source 1..20: mol_type = other DNA
aaggagagaggagaaaggca

SEQ ID NO: 42218 - DNA, 20 bp, synthetic construct
  misc_feature 1..20: note = chemically synthesized
  source 1..20: mol_type = other DNA
aaggcagagctgactgtgat

SEQ ID NO: 42219 - DNA, 20 bp, synthetic construct
  misc_feature 1..20: note = chemically synthesized
  source 1..20: mol_type = other DNA
gctgactgtgatgagtgatg

SEQ ID NO: 42220 - DNA, 20 bp, synthetic construct
  misc_feature 1..20: note = chemically synthesized
  source 1..20: mol_type = other DNA
ctgactgtgatgagtgatga

SEQ ID NO: 42221 - DNA, 20 bp, synthetic construct
  misc_feature 1..20: note = chemically synthesized
  source 1..20: mol_type = other DNA
gatgaaggtgccttctcatc

SEQ ID NO: 42222 - DNA, 20 bp, synthetic construct
  misc_feature 1..20: note = chemically synthesized
  source 1..20: mol_type = other DNA
atgaaggtgccttctcatct

SEQ ID NO: 42223 - DNA, 20 bp, synthetic construct
  misc_feature 1..20: note = chemically synthesized
  source 1..20: mol_type = other DNA
gtgccttctcatctgggtac

SEQ ID NO: 42224 - DNA, 20 bp, synthetic construct
  misc_feature 1..20: note = chemically synthesized
  source 1..20: mol_type = other DNA
ccttctcatctgggtaccag

SEQ ID NO: 42225 - DNA, 20 bp, synthetic construct
  misc_feature 1..20: note = chemically synthesized
  source 1..20: mol_type = other DNA
cttctcatctgggtaccagt

SEQ ID NO: 42226 - DNA, 20 bp, synthetic construct
  misc_feature 1..20: note = chemically synthesized
  source 1..20: mol_type = other DNA
ttctcatctgggtaccagtg

SEQ ID NO: 42227 - DNA, 20 bp, synthetic construct
  misc_feature 1..20: note = chemically synthesized
  source 1..20: mol_type = other DNA
tgggtaccagtggggcctct

SEQ ID NO: 42228 - DNA, 20 bp, synthetic construct
  misc_feature 1..20: note = chemically synthesized
  source 1..20: mol_type = other DNA
ccagtggggcctctaagact

SEQ ID NO: 42229 - DNA, 20 bp, synthetic construct
  misc_feature 1..20: note = chemically synthesized
  source 1..20: mol_type = other DNA
cactctgtctcactgtgtct

SEQ ID NO: 42230 - DNA, 20 bp, synthetic construct
  misc_feature 1..20: note = chemically synthesized
  source 1..20: mol_type = other DNA
ctgtctcactgtgtcttagc

SEQ ID NO: 42231 - DNA, 20 bp, synthetic construct
  misc_feature 1..20: note = chemically synthesized
  source 1..20: mol_type = other DNA
gtgtcttagccagttcctta

SEQ ID NO: 42232 - DNA, 20 bp, synthetic construct
  misc_feature 1..20: note = chemically synthesized
  source 1..20: mol_type = other DNA
ttccttacagcttgccctga

SEQ ID NO: 42233 - DNA, 20 bp, synthetic construct
  misc_feature 1..20: note = chemically synthesized
  source 1..20: mol_type = other DNA
tccttacagcttgccctgat

SEQ ID NO: 42234 - DNA, 20 bp, synthetic construct
  misc_feature 1..20: note = chemically synthesized
  source 1..20: mol_type = other DNA
cttacagcttgccctgatgg

SEQ ID NO: 42235 - DNA, 20 bp, synthetic construct
  misc_feature 1..20: note = chemically synthesized
  source 1..20: mol_type = other DNA
cagcttgccctgatgggaga

SEQ ID NO: 42236 - DNA, 20 bp, synthetic construct
  misc_feature 1..20: note = chemically synthesized
  source 1..20: mol_type = other DNA
gcttgccctgatgggagata

SEQ ID NO: 42237 - DNA, 20 bp, synthetic construct
  misc_feature 1..20: note = chemically synthesized
  source 1..20: mol_type = other DNA
ccctgatgggagatagagaa

SEQ ID NO: 42238 - DNA, 20 bp, synthetic construct
  misc_feature 1..20: note = chemically synthesized
  source 1..20: mol_type = other DNA
cctgatgggagatagagaat

SEQ ID NO: 42239 - DNA, 20 bp, synthetic construct
  misc_feature 1..20: note = chemically synthesized
  source 1..20: mol_type = other DNA
aaaataaattttcatttctc

SEQ ID NO: 42240 - DNA, 20 bp, synthetic construct
  misc_feature 1..20: note = chemically synthesized
  source 1..20: mol_type = other DNA
aaataaattttcatttctca

SEQ ID NO: 42241 - DNA, 20 bp, synthetic construct
  misc_feature 1..20: note = chemically synthesized
  source 1..20: mol_type = other DNA
ccactctctaaaataatcca

SEQ ID NO: 42242 - DNA, 20 bp, synthetic construct
  misc_feature 1..20: note = chemically synthesized
  source 1..20: mol_type = other DNA
tctctaaaataatccacagt

SEQ ID NO: 42243 - DNA, 20 bp, synthetic construct
  misc_feature 1..20: note = chemically synthesized
  source 1..20: mol_type = other DNA
tctaaaataatccacagtga

SEQ ID NO: 42244 - DNA, 20 bp, synthetic construct
  misc_feature 1..20: note = chemically synthesized
  source 1..20: mol_type = other DNA
ataaatacctctattaaata

SEQ ID NO: 42245 - DNA, 20 bp, synthetic construct
  misc_feature 1..20: note = chemically synthesized
  source 1..20: mol_type = other DNA
tctattaaatatggaaaatc

SEQ ID NO: 42246 - DNA, 20 bp, synthetic construct
  misc_feature 1..20: note = chemically synthesized
  source 1..20: mol_type = other DNA
ctattaaatatggaaaatct

SEQ ID NO: 42247 - DNA, 20 bp, synthetic construct
  misc_feature 1..20: note = chemically synthesized
  source 1..20: mol_type = other DNA
aaatatggaaaatctgggca

SEQ ID NO: 42248 - DNA, 20 bp, synthetic construct
  misc_feature 1..20: note = chemically synthesized
  source 1..20: mol_type = other DNA
gtgtctcacacctgtaatcc

SEQ ID NO: 42249 - DNA, 20 bp, synthetic construct
  misc_feature 1..20: note = chemically synthesized
  source 1..20: mol_type = other DNA
cacctgtaatcccagcactt

SEQ ID NO: 42250 - DNA, 20 bp, synthetic construct
  misc_feature 1..20: note = chemically synthesized
  source 1..20: mol_type = other DNA
acctgtaatcccagcacttt

SEQ ID NO: 42251 - DNA, 20 bp, synthetic construct
  misc_feature 1..20: note = chemically synthesized
  source 1..20: mol_type = other DNA
ctgtaatcccagcactttgg

SEQ ID NO: 42252 - DNA, 20 bp, synthetic construct
  misc_feature 1..20: note = chemically synthesized
  source 1..20: mol_type = other DNA
tgtaatcccagcactttggg

SEQ ID NO: 42253 - DNA, 20 bp, synthetic construct
  misc_feature 1..20: note = chemically synthesized
  source 1..20: mol_type = other DNA
tcccagcactttgggaggct

SEQ ID NO: 42254 - DNA, 20 bp, synthetic construct
  misc_feature 1..20: note = chemically synthesized
  source 1..20: mol_type = other DNA
cccagcactttgggaggctg

SEQ ID NO: 42255 - DNA, 20 bp, synthetic construct
  misc_feature 1..20: note = chemically synthesized
  source 1..20: mol_type = other DNA
agcactttgggaggctgagg

SEQ ID NO: 42256 - DNA, 20 bp, synthetic construct
  misc_feature 1..20: note = chemically synthesized
  source 1..20: mol_type = other DNA
gcactttgggaggctgaggt

SEQ ID NO: 42257 - DNA, 20 bp, synthetic construct
  misc_feature 1..20: note = chemically synthesized
  source 1..20: mol_type = other DNA
ctttgggaggctgaggtggg

SEQ ID NO: 42258 - DNA, 20 bp, synthetic construct
  misc_feature 1..20: note = chemically synthesized
  source 1..20: mol_type = other DNA
gctgaggtgggtggactgct

SEQ ID NO: 42259 - DNA, 20 bp, synthetic construct
  misc_feature 1..20: note = chemically synthesized
  source 1..20: mol_type = other DNA
tgaggtgggtggactgcttg

SEQ ID NO: 42260 - DNA, 20 bp, synthetic construct
  misc_feature 1..20: note = chemically synthesized
  source 1..20: mol_type = other DNA
tgggtggactgcttggagct

SEQ ID NO: 42261 - DNA, 20 bp, synthetic construct
  misc_feature 1..20: note = chemically synthesized
  source 1..20: mol_type = other DNA
gggtggactgcttggagctc

SEQ ID NO: 42262 - DNA, 20 bp, synthetic construct
  misc_feature 1..20: note = chemically synthesized
  source 1..20: mol_type = other DNA
gtggactgcttggagctcag

SEQ ID NO: 42263 - DNA, 20 bp, synthetic construct
  misc_feature 1..20: note = chemically synthesized
  source 1..20: mol_type = other DNA
tgcttggagctcaggagttc

SEQ ID NO: 42264 - DNA, 20 bp, synthetic construct
  misc_feature 1..20: note = chemically synthesized
  source 1..20: mol_type = other DNA
tcaggagttcaagaccatct

SEQ ID NO: 42265 - DNA, 20 bp, synthetic construct
  misc_feature 1..20: note = chemically synthesized
  source 1..20: mol_type = other DNA
caagaccatcttggacaaca

SEQ ID NO: 42266 - DNA, 20 bp, synthetic construct
  misc_feature 1..20: note = chemically synthesized
  source 1..20: mol_type = other DNA
tgataccctgcctctacaaa

SEQ ID NO: 42267 - DNA, 20 bp, synthetic construct
  misc_feature 1..20: note = chemically synthesized
  source 1..20: mol_type = other DNA
tctacaaaaagtacaaaaat

SEQ ID NO: 42268 - DNA, 20 bp, synthetic construct
  misc_feature 1..20: note = chemically synthesized
  source 1..20: mol_type = other DNA
aaaaagtacaaaaattagcc

SEQ ID NO: 42269 - DNA, 20 bp, synthetic construct
  misc_feature 1..20: note = chemically synthesized
  source 1..20: mol_type = other DNA
gtacaaaaattagcctggca

SEQ ID NO: 42270 - DNA, 20 bp, synthetic construct
  misc_feature 1..20: note = chemically synthesized
  source 1..20: mol_type = other DNA
caaaaattagcctggcatgg

SEQ ID NO: 42271 - DNA, 20 bp, synthetic construct
  misc_feature 1..20: note = chemically synthesized
  source 1..20: mol_type = other DNA
gtggtgtgcacctgtaatcc

SEQ ID NO: 42272 - DNA, 20 bp, synthetic construct
  misc_feature 1..20: note = chemically synthesized
  source 1..20: mol_type = other DNA
gcacctgtaatcccagctat

SEQ ID NO: 42273 - DNA, 20 bp, synthetic construct
  misc_feature 1..20: note = chemically synthesized
  source 1..20: mol_type = other DNA
cacctgtaatcccagctatt

SEQ ID NO: 42274 - DNA, 20 bp, synthetic construct
  misc_feature 1..20: note = chemically synthesized
  source 1..20: mol_type = other DNA
acctgtaatcccagctatta

SEQ ID NO: 42275 - DNA, 20 bp, synthetic construct
  misc_feature 1..20: note = chemically synthesized
  source 1..20: mol_type = other DNA
tgtaatcccagctattaggg

SEQ ID NO: 42276 - DNA, 20 bp, synthetic construct
  misc_feature 1..20: note = chemically synthesized
  source 1..20: mol_type = other DNA
tcccagctattagggtggct

SEQ ID NO: 42277 - DNA, 20 bp, synthetic construct
  misc_feature 1..20: note = chemically synthesized
  source 1..20: mol_type = other DNA
cccagctattagggtggctg

SEQ ID NO: 42278 - DNA, 20 bp, synthetic construct
  misc_feature 1..20: note = chemically synthesized
  source 1..20: mol_type = other DNA
agctattagggtggctgagg

SEQ ID NO: 42279 - DNA, 20 bp, synthetic construct
  misc_feature 1..20: note = chemically synthesized
  source 1..20: mol_type = other DNA
gctattagggtggctgaggc

SEQ ID NO: 42280 - DNA, 20 bp, synthetic construct
  misc_feature 1..20: note = chemically synthesized
  source 1..20: mol_type = other DNA
tattagggtggctgaggcag

SEQ ID NO: 42281 - DNA, 20 bp, synthetic construct
  misc_feature 1..20: note = chemically synthesized
  source 1..20: mol_type = other DNA
gcaggagaattgcttgaacc

SEQ ID NO: 42282 - DNA, 20 bp, synthetic construct
  misc_feature 1..20: note = chemically synthesized
  source 1..20: mol_type = other DNA
caggagaattgcttgaaccc

SEQ ID NO: 42283 - DNA, 20 bp, synthetic construct
  misc_feature 1..20: note = chemically synthesized
  source 1..20: mol_type = other DNA
ggagaattgcttgaacccgg

SEQ ID NO: 42284 - DNA, 20 bp, synthetic construct
  misc_feature 1..20: note = chemically synthesized
  source 1..20: mol_type = other DNA
gagaattgcttgaacccggg

SEQ ID NO: 42285 - DNA, 20 bp, synthetic construct
  misc_feature 1..20: note = chemically synthesized
  source 1..20: mol_type = other DNA
aattgcttgaacccgggagg

SEQ ID NO: 42286 - DNA, 20 bp, synthetic construct
  misc_feature 1..20: note = chemically synthesized
  source 1..20: mol_type = other DNA
ttgcttgaacccgggaggcg

SEQ ID NO: 42287 - DNA, 20 bp, synthetic construct
  misc_feature 1..20: note = chemically synthesized
  source 1..20: mol_type = other DNA
tgcttgaacccgggaggcgg

SEQ ID NO: 42288 - DNA, 20 bp, synthetic construct
  misc_feature 1..20: note = chemically synthesized
  source 1..20: mol_type = other DNA
aacccgggaggcggaggttg

SEQ ID NO: 42289 - DNA, 20 bp, synthetic construct
  misc_feature 1..20: note = chemically synthesized
  source 1..20: mol_type = other DNA
cgggaggcggaggttgcagt

SEQ ID NO: 42290 - DNA, 20 bp, synthetic construct
  misc_feature 1..20: note = chemically synthesized
  source 1..20: mol_type = other DNA
ggcggaggttgcagtgagct

SEQ ID NO: 42291 - DNA, 20 bp, synthetic construct
  misc_feature 1..20: note = chemically synthesized
  source 1..20: mol_type = other DNA
gagatcgtgccactgcactc

SEQ ID NO: 42292 - DNA, 20 bp, synthetic construct
  misc_feature 1..20: note = chemically synthesized
  source 1..20: mol_type = other DNA
cgtgccactgcactccagcc

SEQ ID NO: 42293 - DNA, 20 bp, synthetic construct
  misc_feature 1..20: note = chemically synthesized
  source 1..20: mol_type = other DNA
gtgccactgcactccagcct

SEQ ID NO: 42294 - DNA, 20 bp, synthetic construct
  misc_feature 1..20: note = chemically synthesized
  source 1..20: mol_type = other DNA
tgccactgcactccagcctg

SEQ ID NO: 42295 - DNA, 20 bp, synthetic construct
  misc_feature 1..20: note = chemically synthesized
  source 1..20: mol_type = other DNA
gccactgcactccagcctgg

SEQ ID NO: 42296 - DNA, 20 bp, synthetic construct
  misc_feature 1..20: note = chemically synthesized
  source 1..20: mol_type = other DNA
ctgcactccagcctggggga

SEQ ID NO: 42297 - DNA, 20 bp, synthetic construct
  misc_feature 1..20: note = chemically synthesized
  source 1..20: mol_type = other DNA
gcactccagcctgggggaca

SEQ ID NO: 42298 - DNA, 20 bp, synthetic construct
  misc_feature 1..20: note = chemically synthesized
  source 1..20: mol_type = other DNA
attaactgttattttttact

SEQ ID NO: 42299 - DNA, 20 bp, synthetic construct
  misc_feature 1..20: note = chemically synthesized
  source 1..20: mol_type = other DNA
attttttacttggactcttg

SEQ ID NO: 42300 - DNA, 20 bp, synthetic construct
  misc_feature 1..20: note = chemically synthesized
  source 1..20: mol_type = other DNA
ttttttacttggactcttgt

SEQ ID NO: 42301 - DNA, 20 bp, synthetic construct
  misc_feature 1..20: note = chemically synthesized
  source 1..20: mol_type = other DNA
tttttacttggactcttgtg

SEQ ID NO: 42302 - DNA, 20 bp, synthetic construct
  misc_feature 1..20: note = chemically synthesized
  source 1..20: mol_type = other DNA
cttggactcttgtggggaat

SEQ ID NO: 42303 - DNA, 20 bp, synthetic construct
  misc_feature 1..20: note = chemically synthesized
  source 1..20: mol_type = other DNA
tttattcttatttatgattc

SEQ ID NO: 42304 - DNA, 20 bp, synthetic construct
  misc_feature 1..20: note = chemically synthesized
  source 1..20: mol_type = other DNA
tatgattcaagcactgaaaa

SEQ ID NO: 42305 - DNA, 20 bp, synthetic construct
  misc_feature 1..20: note = chemically synthesized
  source 1..20: mol_type = other DNA
caagcactgaaaatagtgtt

SEQ ID NO: 42306 - DNA, 20 bp, synthetic construct
  misc_feature 1..20: note = chemically synthesized
  source 1..20: mol_type = other DNA
tgaaaatagtgtttagcatc

SEQ ID NO: 42307 - DNA, 20 bp, synthetic construct
  misc_feature 1..20: note = chemically synthesized
  source 1..20: mol_type = other DNA
aaatagtgtttagcatccag

SEQ ID NO: 42308 - DNA, 20 bp, synthetic construct
  misc_feature 1..20: note = chemically synthesized
  source 1..20: mol_type = other DNA
aatagtgtttagcatccagc

SEQ ID NO: 42309 - DNA, 20 bp, synthetic construct
  misc_feature 1..20: note = chemically synthesized
  source 1..20: mol_type = other DNA
atgattactatactttttac

SEQ ID NO: 42310 - DNA, 20 bp, synthetic construct
  misc_feature 1..20: note = chemically synthesized
  source 1..20: mol_type = other DNA
tactatactttttacaagct

SEQ ID NO: 42311 - DNA, 20 bp, synthetic construct
  misc_feature 1..20: note = chemically synthesized
  source 1..20: mol_type = other DNA
tcagctccctctatcccttc

SEQ ID NO: 42312 - DNA, 20 bp, synthetic construct
  misc_feature 1..20: note = chemically synthesized
  source 1..20: mol_type = other DNA
atcctcatctctgattaaat

SEQ ID NO: 42313 - DNA, 20 bp, synthetic construct
  misc_feature 1..20: note = chemically synthesized
  source 1..20: mol_type = other DNA
atctctgattaaataagctt

SEQ ID NO: 42314 - DNA, 20 bp, synthetic construct
  misc_feature 1..20: note = chemically synthesized
  source 1..20: mol_type = other DNA
aataagcttcagtttttcct

SEQ ID NO: 42315 - DNA, 20 bp, synthetic construct
  misc_feature 1..20: note = chemically synthesized
  source 1..20: mol_type = other DNA
acatttctgtgtgtctccat

SEQ ID NO: 42316 - DNA, 20 bp, synthetic construct
  misc_feature 1..20: note = chemically synthesized
  source 1..20: mol_type = other DNA
tctccattagtgacctccca

SEQ ID NO: 42317 - DNA, 20 bp, synthetic construct
  misc_feature 1..20: note = chemically synthesized
  source 1..20: mol_type = other DNA
ttagtgacctcccatagtcc

SEQ ID NO: 42318 - DNA, 20 bp, synthetic construct
  misc_feature 1..20: note = chemically synthesized
  source 1..20: mol_type = other DNA
acctcccatagtccaagcat

SEQ ID NO: 42319 - DNA, 20 bp, synthetic construct
  misc_feature 1..20: note = chemically synthesized
  source 1..20: mol_type = other DNA
tcccatagtccaagcatgag

SEQ ID NO: 42320 - DNA, 20 bp, synthetic construct
  misc_feature 1..20: note = chemically synthesized
  source 1..20: mol_type = other DNA
agtccaagcatgagcagttc

SEQ ID NO: 42321 - DNA, 20 bp, synthetic construct
  misc_feature 1..20: note = chemically synthesized
  source 1..20: mol_type = other DNA
caagcatgagcagttctggc

SEQ ID NO: 42322 - DNA, 20 bp, synthetic construct
  misc_feature 1..20: note = chemically synthesized
  source 1..20: mol_type = other DNA
aagcatgagcagttctggcc

SEQ ID NO: 42323 - DNA, 20 bp, synthetic construct
  misc_feature 1..20: note = chemically synthesized
  source 1..20: mol_type = other DNA
agttctggccaggcccctgt

SEQ ID NO: 42324 - DNA, 20 bp, synthetic construct
  misc_feature 1..20: note = chemically synthesized
  source 1..20: mol_type = other DNA
gttctggccaggcccctgtc

SEQ ID NO: 42325 - DNA, 20 bp, synthetic construct
  misc_feature 1..20: note = chemically synthesized
  source 1..20: mol_type = other DNA
ttctggccaggcccctgtcg

SEQ ID NO: 42326 - DNA, 20 bp, synthetic construct
  misc_feature 1..20: note = chemically synthesized
  source 1..20: mol_type = other DNA
ggccaggcccctgtcggggt

SEQ ID NO: 42327 - DNA, 20 bp, synthetic construct
  misc_feature 1..20: note = chemically synthesized
  source 1..20: mol_type = other DNA
agtgccccacccccgccttc

SEQ ID NO: 42328 - DNA, 20 bp, synthetic construct
  misc_feature 1..20: note = chemically synthesized
  source 1..20: mol_type = other DNA
ctggttctgtgtaaccttct

SEQ ID NO: 42329 - DNA, 20 bp, synthetic construct
  misc_feature 1..20: note = chemically synthesized
  source 1..20: mol_type = other DNA
aaccttctaagcaaaccttc

SEQ ID NO: 42330 - DNA, 20 bp, synthetic construct
  misc_feature 1..20: note = chemically synthesized
  source 1..20: mol_type = other DNA
ctaagcaaaccttctggctc

SEQ ID NO: 42331 - DNA, 20 bp, synthetic construct
  misc_feature 1..20: note = chemically synthesized
  source 1..20: mol_type = other DNA
caaaccttctggctcaagca

SEQ ID NO: 42332 - DNA, 20 bp, synthetic construct
  misc_feature 1..20: note = chemically synthesized
  source 1..20: mol_type = other DNA
ggctcaagcacagcaatgct

SEQ ID NO: 42333 - DNA, 20 bp, synthetic construct
  misc_feature 1..20: note = chemically synthesized
  source 1..20: mol_type = other DNA
cagcaatgctgagtcatgat

SEQ ID NO: 42334 - DNA, 20 bp, synthetic construct
  misc_feature 1..20: note = chemically synthesized
  source 1..20: mol_type = other DNA
gagtcatgatgagtcatgct

SEQ ID NO: 42335 - DNA, 20 bp, synthetic construct
  misc_feature 1..20: note = chemically synthesized
  source 1..20: mol_type = other DNA
agtcatgatgagtcatgctg

SEQ ID NO: 42336 - DNA, 20 bp, synthetic construct
  misc_feature 1..20: note = chemically synthesized
  source 1..20: mol_type = other DNA
tgatgagtcatgctgaggct

SEQ ID NO: 42337 - DNA, 20 bp, synthetic construct
  misc_feature 1..20: note = chemically synthesized
  source 1..20: mol_type = other DNA
gatgagtcatgctgaggctt

SEQ ID NO: 42338 - DNA, 20 bp, synthetic construct
  misc_feature 1..20: note = chemically synthesized
  source 1..20: mol_type = other DNA
atgagtcatgctgaggctta

SEQ ID NO: 42339 - DNA, 20 bp, synthetic construct
  misc_feature 1..20: note = chemically synthesized
  source 1..20: mol_type = other DNA
tgaggcttagggtgtgtgcc

SEQ ID NO: 42340 - DNA, 20 bp, synthetic construct
  misc_feature 1..20: note = chemically synthesized
  source 1..20: mol_type = other DNA
ggtgtgtgcccagatgttct

SEQ ID NO: 42341 - DNA, 20 bp, synthetic construct
  misc_feature 1..20: note = chemically synthesized
  source 1..20: mol_type = other DNA
gtgcccagatgttctcagcc

SEQ ID NO: 42342 - DNA, 20 bp, synthetic construct
  misc_feature 1..20: note = chemically synthesized
  source 1..20: mol_type = other DNA
gcccagatgttctcagccta

SEQ ID NO: 42343 - DNA, 20 bp, synthetic construct
  misc_feature 1..20: note = chemically synthesized
  source 1..20: mol_type = other DNA
ctagagtgatgactcctatc

SEQ ID NO: 42344 - DNA, 20 bp, synthetic construct
  misc_feature 1..20: note = chemically synthesized
  source 1..20: mol_type = other DNA
tagagtgatgactcctatct

SEQ ID NO: 42345 - DNA, 20 bp, synthetic construct
  misc_feature 1..20: note = chemically synthesized
  source 1..20: mol_type = other DNA
atgactcctatctgggtccc

SEQ ID NO: 42346 - DNA, 20 bp, synthetic construct
  misc_feature 1..20: note = chemically synthesized
  source 1..20: mol_type = other DNA
actcctatctgggtccccag

SEQ ID NO: 42347 - DNA, 20 bp, synthetic construct
  misc_feature 1..20: note = chemically synthesized
  source 1..20: mol_type = other DNA
ctcctatctgggtccccagc

SEQ ID NO: 42348 - DNA, 20 bp, synthetic construct
  misc_feature 1..20: note = chemically synthesized
  source 1..20: mol_type = other DNA
ggtccccagcaggatgctta

SEQ ID NO: 42349 - DNA, 20 bp, synthetic construct
  misc_feature 1..20: note = chemically synthesized
  source 1..20: mol_type = other DNA
gtccccagcaggatgcttac

SEQ ID NO: 42350 - DNA, 20 bp, synthetic construct
  misc_feature 1..20: note = chemically synthesized
  source 1..20: mol_type = other DNA
tccccagcaggatgcttaca

SEQ ID NO: 42351 - DNA, 20 bp, synthetic construct
  misc_feature 1..20: note = chemically synthesized
  source 1..20: mol_type = other DNA
ccagcaggatgcttacaggg

SEQ ID NO: 42352 - DNA, 20 bp, synthetic construct
  misc_feature 1..20: note = chemically synthesized
  source 1..20: mol_type = other DNA
caggatgcttacagggcaga

SEQ ID NO: 42353 - DNA, 20 bp, synthetic construct
  misc_feature 1..20: note = chemically synthesized
  source 1..20: mol_type = other DNA
acagggcagatggcaaaaaa

SEQ ID NO: 42354 - DNA, 20 bp, synthetic construct
  misc_feature 1..20: note = chemically synthesized
  source 1..20: mol_type = other DNA
cagggcagatggcaaaaaaa

SEQ ID NO: 42355 - DNA, 20 bp, synthetic construct
  misc_feature 1..20: note = chemically synthesized
  source 1..20: mol_type = other DNA
gggcagatggcaaaaaaaag

SEQ ID NO: 42356 - DNA, 20 bp, synthetic construct
  misc_feature 1..20: note = chemically synthesized
  source 1..20: mol_type = other DNA
cagatggcaaaaaaaaggag

SEQ ID NO: 42357 - DNA, 20 bp, synthetic construct
  misc_feature 1..20: note = chemically synthesized
  source 1..20: mol_type = other DNA
gactaaaactccacctcaaa

SEQ ID NO: 42358 - DNA, 20 bp, synthetic construct
  misc_feature 1..20: note = chemically synthesized
  source 1..20: mol_type = other DNA
ccacctcaaacggcatcata

SEQ ID NO: 42359 - DNA, 20 bp, synthetic construct
  misc_feature 1..20: note = chemically synthesized
  source 1..20: mol_type = other DNA
aaacggcatcataaagaaaa

SEQ ID NO: 42360 - DNA, 20 bp, synthetic construct
  misc_feature 1..20: note = chemically synthesized
  source 1..20: mol_type = other DNA
cataaagaaaatggatgcct

SEQ ID NO: 42361 - DNA, 20 bp, synthetic construct
  misc_feature 1..20: note = chemically synthesized
  source 1..20: mol_type = other DNA
aagaaaatggatgcctgaga

SEQ ID NO: 42362 - DNA, 20 bp, synthetic construct
  misc_feature 1..20: note = chemically synthesized
  source 1..20: mol_type = other DNA
agacagaatgtgacatattc

SEQ ID NO: 42363 - DNA, 20 bp, synthetic construct
  misc_feature 1..20: note = chemically synthesized
  source 1..20: mol_type = other DNA
tttgttgttatcaattgcca

SEQ ID NO: 42364 - DNA, 20 bp, synthetic construct
  misc_feature 1..20: note = chemically synthesized
  source 1..20: mol_type = other DNA
atcaattgccatagaatgat

SEQ ID NO: 42365 - DNA, 20 bp, synthetic construct
  misc_feature 1..20: note = chemically synthesized
  source 1..20: mol_type = other DNA
tgaatcaaatatttatcttg

SEQ ID NO: 42366 - DNA, 20 bp, synthetic construct
  misc_feature 1..20: note = chemically synthesized
  source 1..20: mol_type = other DNA
gaatcaaatatttatcttgc

SEQ ID NO: 42367 - DNA, 20 bp, synthetic construct
  misc_feature 1..20: note = chemically synthesized
  source 1..20: mol_type = other DNA
tcaaatatttatcttgcagg

SEQ ID NO: 42368 - DNA, 20 bp, synthetic construct
  misc_feature 1..20: note = chemically synthesized
  source 1..20: mol_type = other DNA
ttgcaggtggcctctatacc

SEQ ID NO: 42369 - DNA, 20 bp, synthetic construct
  misc_feature 1..20: note = chemically synthesized
  source 1..20: mol_type = other DNA
caggtggcctctatacctag

SEQ ID NO: 42370 - DNA, 20 bp, synthetic construct
  misc_feature 1..20: note = chemically synthesized
  source 1..20: mol_type = other DNA
gtggcctctatacctagaag

SEQ ID NO: 42371 - DNA, 20 bp, synthetic construct
  misc_feature 1..20: note = chemically synthesized
  source 1..20: mol_type = other DNA
gcctctatacctagaagcgg

SEQ ID NO: 42372 - DNA, 20 bp, synthetic construct
  misc_feature 1..20: note = chemically synthesized
  source 1..20: mol_type = other DNA
atacctagaagcggcagaat

SEQ ID NO: 42373 - DNA, 20 bp, synthetic construct
  misc_feature 1..20: note = chemically synthesized
  source 1..20: mol_type = other DNA
tacctagaagcggcagaatc

SEQ ID NO: 42374 - DNA, 20 bp, synthetic construct
  misc_feature 1..20: note = chemically synthesized
  source 1..20: mol_type = other DNA
gctttattaatacatgtgta

SEQ ID NO: 42375 - DNA, 20 bp, synthetic construct
  misc_feature 1..20: note = chemically synthesized
  source 1..20: mol_type = other DNA
aatacatgtgtatagatttt

SEQ ID NO: 42376 - DNA, 20 bp, synthetic construct
  misc_feature 1..20: note = chemically synthesized
  source 1..20: mol_type = other DNA
atacatgtgtatagattttt

SEQ ID NO: 42377 - DNA, 20 bp, synthetic construct
  misc_feature 1..20: note = chemically synthesized
  source 1..20: mol_type = other DNA
cacatgtattaatatgaaac

SEQ ID NO: 42378 - DNA, 20 bp, synthetic construct
  misc_feature 1..20: note = chemically synthesized
  source 1..20: mol_type = other DNA
acatgtattaatatgaaaca

SEQ ID NO: 42379 - DNA, 20 bp, synthetic construct
  misc_feature 1..20: note = chemically synthesized
  source 1..20: mol_type = other DNA
attaatatgaaacaaggata

SEQ ID NO: 42380 - DNA, 20 bp, synthetic construct
  misc_feature 1..20: note = chemically synthesized
  source 1..20: mol_type = other DNA
aatatgaaacaaggatatgg

SEQ ID NO: 42381 - DNA, 20 bp, synthetic construct
  misc_feature 1..20: note = chemically synthesized
  source 1..20: mol_type = other DNA
tatgaaacaaggatatggaa

SEQ ID NO: 42382 - DNA, 20 bp, synthetic construct
  misc_feature 1..20: note = chemically synthesized
  source 1..20: mol_type = other DNA
atgaaacaaggatatggaag

SEQ ID NO: 42383 - DNA, 20 bp, synthetic construct
  misc_feature 1..20: note = chemically synthesized
  source 1..20: mol_type = other DNA
aaacaaggatatggaagagg

SEQ ID NO: 42384 - DNA, 20 bp, synthetic construct
  misc_feature 1..20: note = chemically synthesized
  source 1..20: mol_type = other DNA
aacaaggatatggaagagga

SEQ ID NO: 42385 - DNA, 20 bp, synthetic construct
  misc_feature 1..20: note = chemically synthesized
  source 1..20: mol_type = other DNA
ggaagaggaaggcatgaaaa

SEQ ID NO: 42386 - DNA, 20 bp, synthetic construct
  misc_feature 1..20: note = chemically synthesized
  source 1..20: mol_type = other DNA
gaagaggaaggcatgaaaac

SEQ ID NO: 42387 - DNA, 20 bp, synthetic construct
  misc_feature 1..20: note = chemically synthesized
  source 1..20: mol_type = other DNA
ggaaggcatgaaaacaggaa

SEQ ID NO: 42388 - DNA, 20 bp, synthetic construct
  misc_feature 1..20: note = chemically synthesized
  source 1..20: mol_type = other DNA
caaaccttgtttgccatttt

SEQ ID NO: 42389 - DNA, 20 bp, synthetic construct
  misc_feature 1..20: note = chemically synthesized
  source 1..20: mol_type = other DNA
aaaccttgtttgccatttta

SEQ ID NO: 42390 - DNA, 20 bp, synthetic construct
  misc_feature 1..20: note = chemically synthesized
  source 1..20: mol_type = other DNA
ttgccattttaaggcacccc

SEQ ID NO: 42391 - DNA, 20 bp, synthetic construct
  misc_feature 1..20: note = chemically synthesized
  source 1..20: mol_type = other DNA
cattttaaggcacccctgga

SEQ ID NO: 42392 - DNA, 20 bp, synthetic construct
  misc_feature 1..20: note = chemically synthesized
  source 1..20: mol_type = other DNA
ttaaggcacccctggacagc

SEQ ID NO: 42393 - DNA, 20 bp, synthetic construct
  misc_feature 1..20: note = chemically synthesized
  source 1..20: mol_type = other DNA
taaggcacccctggacagct

SEQ ID NO: 42394 - DNA, 20 bp, synthetic construct
  misc_feature 1..20: note = chemically synthesized
  source 1..20: mol_type = other DNA
ggcacccctggacagctagg

SEQ ID NO: 42395 - DNA, 20 bp, synthetic construct
  misc_feature 1..20: note = chemically synthesized
  source 1..20: mol_type = other DNA
cctggacagctaggtggcaa

SEQ ID NO: 42396 - DNA, 20 bp, synthetic construct
  misc_feature 1..20: note = chemically synthesized
  source 1..20: mol_type = other DNA
ctggacagctaggtggcaaa

SEQ ID NO: 42397 - DNA, 20 bp, synthetic construct
  misc_feature 1..20: note = chemically synthesized
  source 1..20: mol_type = other DNA
tggcaaaaggcctgtgctgt

SEQ ID NO: 42398 - DNA, 20 bp, synthetic construct
  misc_feature 1..20: note = chemically synthesized
  source 1..20: mol_type = other DNA
gcaaaaggcctgtgctgtta

SEQ ID NO: 42399 - DNA, 20 bp, synthetic construct
  misc_feature 1..20: note = chemically synthesized
  source 1..20: mol_type = other DNA
caaaaggcctgtgctgttag

SEQ ID NO: 42400 - DNA, 20 bp, synthetic construct
  misc_feature 1..20: note = chemically synthesized
  source 1..20: mol_type = other DNA
agaggacacatgctcacata

SEQ ID NO: 42401 - DNA, 20 bp, synthetic construct
  misc_feature 1..20: note = chemically synthesized
  source 1..20: mol_type = other DNA
gaggacacatgctcacatac

SEQ ID NO: 42402 - DNA, 20 bp, synthetic construct
  misc_feature 1..20: note = chemically synthesized
  source 1..20: mol_type = other DNA
aggacacatgctcacatacg

SEQ ID NO: 42403 - DNA, 20 bp, synthetic construct
  misc_feature 1..20: note = chemically synthesized
  source 1..20: mol_type = other DNA
cacatgctcacatacggggt

SEQ ID NO: 42404 - DNA, 20 bp, synthetic construct
  misc_feature 1..20: note = chemically synthesized
  source 1..20: mol_type = other DNA
atacggggtcagatctgact

SEQ ID NO: 42405 - DNA, 20 bp, synthetic construct
  misc_feature 1..20: note = chemically synthesized
  source 1..20: mol_type = other DNA
tacggggtcagatctgactt

SEQ ID NO: 42406 - DNA, 20 bp, synthetic construct
  misc_feature 1..20: note = chemically synthesized
  source 1..20: mol_type = other DNA
acggggtcagatctgacttg

SEQ ID NO: 42407 - DNA, 20 bp, synthetic construct
  misc_feature 1..20: note = chemically synthesized
  source 1..20: mol_type = other DNA
gatctgacttggggtgctac

SEQ ID NO: 42408 - DNA, 20 bp, synthetic construct
  misc_feature 1..20: note = chemically synthesized
  source 1..20: mol_type = other DNA
atctgacttggggtgctact

SEQ ID NO: 42409 - DNA, 20 bp, synthetic construct
  misc_feature 1..20: note = chemically synthesized
  source 1..20: mol_type = other DNA
tgacttggggtgctactggg

SEQ ID NO: 42410 - DNA, 20 bp, synthetic construct
  misc_feature 1..20: note = chemically synthesized
  source 1..20: mol_type = other DNA
tactgggaagctctcatctt

SEQ ID NO: 42411 - DNA, 20 bp, synthetic construct
  misc_feature 1..20: note = chemically synthesized
  source 1..20: mol_type = other DNA
actgggaagctctcatctta

SEQ ID NO: 42412 - DNA, 20 bp, synthetic construct
  misc_feature 1..20: note = chemically synthesized
  source 1..20: mol_type = other DNA
ctcatcttaaggatacatct

SEQ ID NO: 42413 - DNA, 20 bp, synthetic construct
  misc_feature 1..20: note = chemically synthesized
  source 1..20: mol_type = other DNA
tcatcttaaggatacatctc

SEQ ID NO: 42414 - DNA, 20 bp, synthetic construct
  misc_feature 1..20: note = chemically synthesized
  source 1..20: mol_type = other DNA
cttaaggatacatctcaggc

SEQ ID NO: 42415 - DNA, 20 bp, synthetic construct
  misc_feature 1..20: note = chemically synthesized
  source 1..20: mol_type = other DNA
gatacatctcaggccagtct

SEQ ID NO: 42416 - DNA, 20 bp, synthetic construct
  misc_feature 1..20: note = chemically synthesized
  source 1..20: mol_type = other DNA
tcaggccagtcttggtgcat

SEQ ID NO: 42417 - DNA, 20 bp, synthetic construct
  misc_feature 1..20: note = chemically synthesized
  source 1..20: mol_type = other DNA
caggccagtcttggtgcatt

SEQ ID NO: 42418 - DNA, 20 bp, synthetic construct
  misc_feature 1..20: note = chemically synthesized
  source 1..20: mol_type = other DNA
gccagtcttggtgcattagg

SEQ ID NO: 42419 - DNA, 20 bp, synthetic construct
  misc_feature 1..20: note = chemically synthesized
  source 1..20: mol_type = other DNA
cttggtgcattaggaagatg

SEQ ID NO: 42420 - DNA, 20 bp, synthetic construct
  misc_feature 1..20: note = chemically synthesized
  source 1..20: mol_type = other DNA
ttggtgcattaggaagatgt

SEQ ID NO: 42421 - DNA, 20 bp, synthetic construct
  misc_feature 1..20: note = chemically synthesized
  source 1..20: mol_type = other DNA
atgtaggcaactctgatcct

SEQ ID NO: 42422 - DNA, 20 bp, synthetic construct
  misc_feature 1..20: note = chemically synthesized
  source 1..20: mol_type = other DNA
gtaggcaactctgatcctga

SEQ ID NO: 42423 - DNA, 20 bp, synthetic construct
  misc_feature 1..20: note = chemically synthesized
  source 1..20: mol_type = other DNA
taggcaactctgatcctgag

SEQ ID NO: 42424 - DNA, 20 bp, synthetic construct
  misc_feature 1..20: note = chemically synthesized
  source 1..20: mol_type = other DNA
caactctgatcctgagagga

SEQ ID NO: 42425 - DNA, 20 bp, synthetic construct
  misc_feature 1..20: note = chemically synthesized
  source 1..20: mol_type = other DNA
agaggaaagaaacattcctc

SEQ ID NO: 42426 - DNA, 20 bp, synthetic construct
  misc_feature 1..20: note = chemically synthesized
  source 1..20: mol_type = other DNA
gaggaaagaaacattcctcc

SEQ ID NO: 42427 - DNA, 20 bp, synthetic construct
  misc_feature 1..20: note = chemically synthesized
  source 1..20: mol_type = other DNA
ggaaagaaacattcctccag

SEQ ID NO: 42428 - DNA, 20 bp, synthetic construct
  misc_feature 1..20: note = chemically synthesized
  source 1..20: mol_type = other DNA
aaagaaacattcctccagga

SEQ ID NO: 42429 - DNA, 20 bp, synthetic construct
  misc_feature 1..20: note = chemically synthesized
  source 1..20: mol_type = other DNA
cattcctccaggagagctaa

SEQ ID NO: 42430 - DNA, 20 bp, synthetic construct
  misc_feature 1..20: note = chemically synthesized
  source 1..20: mol_type = other DNA
attcctccaggagagctaaa

SEQ ID NO: 42431 - DNA, 20 bp, synthetic construct
  misc_feature 1..20: note = chemically synthesized
  source 1..20: mol_type = other DNA
ttcctccaggagagctaaaa

SEQ ID NO: 42432 - DNA, 20 bp, synthetic construct
  misc_feature 1..20: note = chemically synthesized
  source 1..20: mol_type = other DNA
gctaaaagggttcacctgtg

SEQ ID NO: 42433 - DNA, 20 bp, synthetic construct
  misc_feature 1..20: note = chemically synthesized
  source 1..20: mol_type = other DNA
ctaaaagggttcacctgtgt

SEQ ID NO: 42434 - DNA, 20 bp, synthetic construct
  misc_feature 1..20: note = chemically synthesized
  source 1..20: mol_type = other DNA
cacctgtgtgggtaactgtg

SEQ ID NO: 42435 - DNA, 20 bp, synthetic construct
  misc_feature 1..20: note = chemically synthesized
  source 1..20: mol_type = other DNA
acctgtgtgggtaactgtga

SEQ ID NO: 42436 - DNA, 20 bp, synthetic construct
  misc_feature 1..20: note = chemically synthesized
  source 1..20: mol_type = other DNA
gggtaactgtgaaggactac

SEQ ID NO: 42437 - DNA, 20 bp, synthetic construct
  misc_feature 1..20: note = chemically synthesized
  source 1..20: mol_type = other DNA
gtaactgtgaaggactacaa

SEQ ID NO: 42438 - DNA, 20 bp, synthetic construct
  misc_feature 1..20: note = chemically synthesized
  source 1..20: mol_type = other DNA
taactgtgaaggactacaag

SEQ ID NO: 42439 - DNA, 20 bp, synthetic construct
  misc_feature 1..20: note = chemically synthesized
  source 1..20: mol_type = other DNA
aagaggatgaaaaacaatga

SEQ ID NO: 42440 - DNA, 20 bp, synthetic construct
  misc_feature 1..20: note = chemically synthesized
  source 1..20: mol_type = other DNA
ggatgaaaaacaatgacaga

SEQ ID NO: 42441 - DNA, 20 bp, synthetic construct
  misc_feature 1..20: note = chemically synthesized
  source 1..20: mol_type = other DNA
acagacagacataatgcttg

SEQ ID NO: 42442 - DNA, 20 bp, synthetic construct
  misc_feature 1..20: note = chemically synthesized
  source 1..20: mol_type = other DNA
cagacagacataatgcttgt

SEQ ID NO: 42443 - DNA, 20 bp, synthetic construct
  misc_feature 1..20: note = chemically synthesized
  source 1..20: mol_type = other DNA
gacagacataatgcttgtgg

SEQ ID NO: 42444 - DNA, 20 bp, synthetic construct
  misc_feature 1..20: note = chemically synthesized
  source 1..20: mol_type = other DNA
aatgcttgtgggagaaaaaa

SEQ ID NO: 42445 - DNA, 20 bp, synthetic construct
  misc_feature 1..20: note = chemically synthesized
  source 1..20: mol_type = other DNA
atgcttgtgggagaaaaaac

SEQ ID NO: 42446 - DNA, 20 bp, synthetic construct
  misc_feature 1..20: note = chemically synthesized
  source 1..20: mol_type = other DNA
gcttgtgggagaaaaaacag

SEQ ID NO: 42447 - DNA, 20 bp, synthetic construct
  misc_feature 1..20: note = chemically synthesized
  source 1..20: mol_type = other DNA
cttgtgggagaaaaaacagg

SEQ ID NO: 42448 - DNA, 20 bp, synthetic construct
  misc_feature 1..20: note = chemically synthesized
  source 1..20: mol_type = other DNA
gggagaaaaaacaggaggtc

SEQ ID NO: 42449 - DNA, 20 bp, synthetic construct
  misc_feature 1..20: note = chemically synthesized
  source 1..20: mol_type = other DNA
ggagaaaaaacaggaggtca

SEQ ID NO: 42450 - DNA, 20 bp, synthetic construct
  misc_feature 1..20: note = chemically synthesized
  source 1..20: mol_type = other DNA
gagaaaaaacaggaggtcaa

SEQ ID NO: 42451 - DNA, 20 bp, synthetic construct
  misc_feature 1..20: note = chemically synthesized
  source 1..20: mol_type = other DNA
agaaaaaacaggaggtcaag

SEQ ID NO: 42452 - DNA, 20 bp, synthetic construct
  misc_feature 1..20: note = chemically synthesized
  source 1..20: mol_type = other DNA
aaaacaggaggtcaagggga

SEQ ID NO: 42453 - DNA, 20 bp, synthetic construct
  misc_feature 1..20: note = chemically synthesized
  source 1..20: mol_type = other DNA
aacaggaggtcaaggggata

SEQ ID NO: 42454 - DNA, 20 bp, synthetic construct
  misc_feature 1..20: note = chemically synthesized
  source 1..20: mol_type = other DNA
aggaggtcaaggggatagag

SEQ ID NO: 42455 - DNA, 20 bp, synthetic construct
  misc_feature 1..20: note = chemically synthesized
  source 1..20: mol_type = other DNA
ggaggtcaaggggatagaga

SEQ ID NO: 42456 - DNA, 20 bp, synthetic construct
  misc_feature 1..20: note = chemically synthesized
  source 1..20: mol_type = other DNA
aaggggatagagaaggcttc

SEQ ID NO: 42457 - DNA, 20 bp, synthetic construct
  misc_feature 1..20: note = chemically synthesized
  source 1..20: mol_type = other DNA
gggatagagaaggcttccag

SEQ ID NO: 42458 - DNA, 20 bp, synthetic construct
  misc_feature 1..20: note = chemically synthesized
  source 1..20: mol_type = other DNA
agagaaggcttccagaagaa

SEQ ID NO: 42459 - DNA, 20 bp, synthetic construct
  misc_feature 1..20: note = chemically synthesized
  source 1..20: mol_type = other DNA
cttccagaagaatggctttg

SEQ ID NO: 42460 - DNA, 20 bp, synthetic construct
  misc_feature 1..20: note = chemically synthesized
  source 1..20: mol_type = other DNA
cagaagaatggctttgaagc

SEQ ID NO: 42461 - DNA, 20 bp, synthetic construct
  misc_feature 1..20: note = chemically synthesized
  source 1..20: mol_type = other DNA
ggctttgaagctggcttctg

SEQ ID NO: 42462 - DNA, 20 bp, synthetic construct
  misc_feature 1..20: note = chemically synthesized
  source 1..20: mol_type = other DNA
gctttgaagctggcttctgt

SEQ ID NO: 42463 - DNA, 20 bp, synthetic construct
  misc_feature 1..20: note = chemically synthesized
  source 1..20: mol_type = other DNA
tttgaagctggcttctgtag

SEQ ID NO: 42464 - DNA, 20 bp, synthetic construct
  misc_feature 1..20: note = chemically synthesized
  source 1..20: mol_type = other DNA
ctggcttctgtaggagttca

SEQ ID NO: 42465 - DNA, 20 bp, synthetic construct
  misc_feature 1..20: note = chemically synthesized
  source 1..20: mol_type = other DNA
gcttctgtaggagttcacag

SEQ ID NO: 42466 - DNA, 20 bp, synthetic construct
  misc_feature 1..20: note = chemically synthesized
  source 1..20: mol_type = other DNA
tgtaggagttcacagtggca

SEQ ID NO: 42467 - DNA, 20 bp, synthetic construct
  misc_feature 1..20: note = chemically synthesized
  source 1..20: mol_type = other DNA
tcacagtggcaaagatgttt

SEQ ID NO: 42468 - DNA, 20 bp, synthetic construct
  misc_feature 1..20: note = chemically synthesized
  source 1..20: mol_type = other DNA
tcagaaatgtgacatgactt

SEQ ID NO: 42469 - DNA, 20 bp, synthetic construct
  misc_feature 1..20: note = chemically synthesized
  source 1..20: mol_type = other DNA
cagaaatgtgacatgactta

SEQ ID NO: 42470 - DNA, 20 bp, synthetic construct
  misc_feature 1..20: note = chemically synthesized
  source 1..20: mol_type = other DNA
gacttaaggaactatacaaa

SEQ ID NO: 42471 - DNA, 20 bp, synthetic construct
  misc_feature 1..20: note = chemically synthesized
  source 1..20: mol_type = other DNA
acttaaggaactatacaaaa

SEQ ID NO: 42472 - DNA, 20 bp, synthetic construct
  misc_feature 1..20: note = chemically synthesized
  source 1..20: mol_type = other DNA
atacaaaaaggaacaaattt

SEQ ID NO: 42473 - DNA, 20 bp, synthetic construct
  misc_feature 1..20: note = chemically synthesized
  source 1..20: mol_type = other DNA
tacaaaaaggaacaaattta

SEQ ID NO: 42474 - DNA, 20 bp, synthetic construct
  misc_feature 1..20: note = chemically synthesized
  source 1..20: mol_type = other DNA
caaaaaggaacaaatttaag

SEQ ID NO: 42475 - DNA, 20 bp, synthetic construct
  misc_feature 1..20: note = chemically synthesized
  source 1..20: mol_type = other DNA
aaaaggaacaaatttaagga

SEQ ID NO: 42476 - DNA, 20 bp, synthetic construct
  misc_feature 1..20: note = chemically synthesized
  source 1..20: mol_type = other DNA
aaaggaacaaatttaaggag

SEQ ID NO: 42477 - DNA, 20 bp, synthetic construct
  misc_feature 1..20: note = chemically synthesized
  source 1..20: mol_type = other DNA
ggaacaaatttaaggagagg

SEQ ID NO: 42478 - DNA, 20 bp, synthetic construct
  misc_feature 1..20: note = chemically synthesized
  source 1..20: mol_type = other DNA
ttaaggagaggcagataaat

SEQ ID NO: 42479 - DNA, 20 bp, synthetic construct
  misc_feature 1..20: note = chemically synthesized
  source 1..20: mol_type = other DNA
aggcagataaattagttcaa

SEQ ID NO: 42480 - DNA, 20 bp, synthetic construct
  misc_feature 1..20: note = chemically synthesized
  source 1..20: mol_type = other DNA
aattagttcaacagacatgc

SEQ ID NO: 42481 - DNA, 20 bp, synthetic construct
  misc_feature 1..20: note = chemically synthesized
  source 1..20: mol_type = other DNA
attagttcaacagacatgca

SEQ ID NO: 42482 - DNA, 20 bp, synthetic construct
  misc_feature 1..20: note = chemically synthesized
  source 1..20: mol_type = other DNA
acagacatgcaaggaatttt

SEQ ID NO: 42483 - DNA, 20 bp, synthetic construct
  misc_feature 1..20: note = chemically synthesized
  source 1..20: mol_type = other DNA
atgaatgttatgtctccact

SEQ ID NO: 42484 - DNA, 20 bp, synthetic construct
  misc_feature 1..20: note = chemically synthesized
  source 1..20: mol_type = other DNA
atgtctccactgagcttctt

SEQ ID NO: 42485 - DNA, 20 bp, synthetic construct
  misc_feature 1..20: note = chemically synthesized
  source 1..20: mol_type = other DNA
tgtctccactgagcttcttg

SEQ ID NO: 42486 - DNA, 20 bp, synthetic construct
  misc_feature 1..20: note = chemically synthesized
  source 1..20: mol_type = other DNA
tccactgagcttcttgaggt

SEQ ID NO: 42487 - DNA, 20 bp, synthetic construct
  misc_feature 1..20: note = chemically synthesized
  source 1..20: mol_type = other DNA
actgagcttcttgaggttag

SEQ ID NO: 42488 - DNA, 20 bp, synthetic construct
  misc_feature 1..20: note = chemically synthesized
  source 1..20: mol_type = other DNA
ttcttgaggttagcagctgt

SEQ ID NO: 42489 - DNA, 20 bp, synthetic construct
  misc_feature 1..20: note = chemically synthesized
  source 1..20: mol_type = other DNA
tcttgaggttagcagctgtg

SEQ ID NO: 42490 - DNA, 20 bp, synthetic construct
  misc_feature 1..20: note = chemically synthesized
  source 1..20: mol_type = other DNA
cttgaggttagcagctgtga

SEQ ID NO: 42491 - DNA, 20 bp, synthetic construct
  misc_feature 1..20: note = chemically synthesized
  source 1..20: mol_type = other DNA
tagcagctgtgagggttttg

SEQ ID NO: 42492 - DNA, 20 bp, synthetic construct
  misc_feature 1..20: note = chemically synthesized
  source 1..20: mol_type = other DNA
agcagctgtgagggttttgc

SEQ ID NO: 42493 - DNA, 20 bp, synthetic construct
  misc_feature 1..20: note = chemically synthesized
  source 1..20: mol_type = other DNA
ctgtgagggttttgcaggcc

SEQ ID NO: 42494 - DNA, 20 bp, synthetic construct
  misc_feature 1..20: note = chemically synthesized
  source 1..20: mol_type = other DNA
tgtgagggttttgcaggccc

SEQ ID NO: 42495 - DNA, 20 bp, synthetic construct
  misc_feature 1..20: note = chemically synthesized
  source 1..20: mol_type = other DNA
tgcaggcccaggacccatta

SEQ ID NO: 42496 - DNA, 20 bp, synthetic construct
  misc_feature 1..20: note = chemically synthesized
  source 1..20: mol_type = other DNA
gcaggcccaggacccattac

SEQ ID NO: 42497 - DNA, 20 bp, synthetic construct
  misc_feature 1..20: note = chemically synthesized
  source 1..20: mol_type = other DNA
gtgaatgaatgacctcttgt

SEQ ID NO: 42498 - DNA, 20 bp, synthetic construct
  misc_feature 1..20: note = chemically synthesized
  source 1..20: mol_type = other DNA
tgacctcttgtcagtctact

SEQ ID NO: 42499 - DNA, 20 bp, synthetic construct
  misc_feature 1..20: note = chemically synthesized
  source 1..20: mol_type = other DNA
gtgaatgaatgatgtcttgt

SEQ ID NO: 42500 - DNA, 20 bp, synthetic construct
  misc_feature 1..20: note = chemically synthesized
  source 1..20: mol_type = other DNA
tgatgtcttgtcagcctact

SEQ ID NO: 42501 - DNA, 20 bp, synthetic construct
  misc_feature 1..20: note = chemically synthesized
  source 1..20: mol_type = other DNA
tcagcctacttggtttcgct

SEQ ID NO: 42502 - DNA, 20 bp, synthetic construct
  misc_feature 1..20: note = chemically synthesized
  source 1..20: mol_type = other DNA
agcctacttggtttcgctaa

SEQ ID NO: 42503 - DNA, 20 bp, synthetic construct
  misc_feature 1..20: note = chemically synthesized
  source 1..20: mol_type = other DNA
acttggtttcgctaagagca

SEQ ID NO: 42504 - DNA, 20 bp, synthetic construct
  misc_feature 1..20: note = chemically synthesized
  source 1..20: mol_type = other DNA
ttggtttcgctaagagcaca

SEQ ID NO: 42505 - DNA, 20 bp, synthetic construct
  misc_feature 1..20: note = chemically synthesized
  source 1..20: mol_type = other DNA
ggtttcgctaagagcacaga

SEQ ID NO: 42506 - DNA, 20 bp, synthetic construct
  misc_feature 1..20: note = chemically synthesized
  source 1..20: mol_type = other DNA
ttcgctaagagcacagagag

SEQ ID NO: 42507 - DNA, 20 bp, synthetic construct
  misc_feature 1..20: note = chemically synthesized
  source 1..20: mol_type = other DNA
aagagcacagagagaagatt

SEQ ID NO: 42508 - DNA, 20 bp, synthetic construct
  misc_feature 1..20: note = chemically synthesized
  source 1..20: mol_type = other DNA
ctatgtaaaaacttcctttt

SEQ ID NO: 42509 - DNA, 20 bp, synthetic construct
  misc_feature 1..20: note = chemically synthesized
  source 1..20: mol_type = other DNA
aaaaacttcctttttggttc

SEQ ID NO: 42510 - DNA, 20 bp, synthetic construct
  misc_feature 1..20: note = chemically synthesized
  source 1..20: mol_type = other DNA
gttcaagtgtatgtttgtga

SEQ ID NO: 42511 - DNA, 20 bp, synthetic construct
  misc_feature 1..20: note = chemically synthesized
  source 1..20: mol_type = other DNA
gtatgtttgtgatagaaatg

SEQ ID NO: 42512 - DNA, 20 bp, synthetic construct
  misc_feature 1..20: note = chemically synthesized
  source 1..20: mol_type = other DNA
gtttgtgatagaaatgaaga

SEQ ID NO: 42513 - DNA, 20 bp, synthetic construct
  misc_feature 1..20: note = chemically synthesized
  source 1..20: mol_type = other DNA
tttgtgatagaaatgaagac

SEQ ID NO: 42514 - DNA, 20 bp, synthetic construct
  misc_feature 1..20: note = chemically synthesized
  source 1..20: mol_type = other DNA
ctaacataaacacaaacatt

SEQ ID NO: 42515 - DNA, 20 bp, synthetic construct
  misc_feature 1..20: note = chemically synthesized
  source 1..20: mol_type = other DNA
cataaacacaaacattaaga

SEQ ID NO: 42516 - DNA, 20 bp, synthetic construct
  misc_feature 1..20: note = chemically synthesized
  source 1..20: mol_type = other DNA
ataaacacaaacattaagaa

SEQ ID NO: 42517 - DNA, 20 bp, synthetic construct
  misc_feature 1..20: note = chemically synthesized
  source 1..20: mol_type = other DNA
taagaaaggaaatcaacctg

SEQ ID NO: 42518 - DNA, 20 bp, synthetic construct
  misc_feature 1..20: note = chemically synthesized
  source 1..20: mol_type = other DNA
agaaaggaaatcaacctgaa

SEQ ID NO: 42519 - DNA, 20 bp, synthetic construct
  misc_feature 1..20: note = chemically synthesized
  source 1..20: mol_type = other DNA
caacctgaagagtatttata

SEQ ID NO: 42520 - DNA, 20 bp, synthetic construct
  misc_feature 1..20: note = chemically synthesized
  source 1..20: mol_type = other DNA
tttatacagataacaaaata

SEQ ID NO: 42521 - DNA, 20 bp, synthetic construct
  misc_feature 1..20: note = chemically synthesized
  source 1..20: mol_type = other DNA
tatacagataacaaaataca

SEQ ID NO: 42522 - DNA, 20 bp, synthetic construct
  misc_feature 1..20: note = chemically synthesized
  source 1..20: mol_type = other DNA
tacagataacaaaatacaga

SEQ ID NO: 42523 - DNA, 20 bp, synthetic construct
  misc_feature 1..20: note = chemically synthesized
  source 1..20: mol_type = other DNA
gataacaaaatacagagagt

SEQ ID NO: 42524 - DNA, 20 bp, synthetic construct
  misc_feature 1..20: note = chemically synthesized
  source 1..20: mol_type = other DNA
agttaaatgtgtaataactg

SEQ ID NO: 42525 - DNA, 20 bp, synthetic construct
  misc_feature 1..20: note = chemically synthesized
  source 1..20: mol_type = other DNA
aatgtgtaataactgtggca

SEQ ID NO: 42526 - DNA, 20 bp, synthetic construct
  misc_feature 1..20: note = chemically synthesized
  source 1..20: mol_type = other DNA
atgtgtaataactgtggcac

SEQ ID NO: 42527 - DNA, 20 bp, synthetic construct
  misc_feature 1..20: note = chemically synthesized
  source 1..20: mol_type = other DNA
gtaataactgtggcacaggc

SEQ ID NO: 42528 - DNA, 20 bp, synthetic construct
  misc_feature 1..20: note = chemically synthesized
  source 1..20: mol_type = other DNA
tgtggcacaggctggaatat

SEQ ID NO: 42529 - DNA, 20 bp, synthetic construct
  misc_feature 1..20: note = chemically synthesized
  source 1..20: mol_type = other DNA
catttaaatcacaaattaat

SEQ ID NO: 42530 - DNA, 20 bp, synthetic construct
  misc_feature 1..20: note = chemically synthesized
  source 1..20: mol_type = other DNA
caaattaattagaaaaaaaa

SEQ ID NO: 42531 - DNA, 20 bp, synthetic construct
  misc_feature 1..20: note = chemically synthesized
  source 1..20: mol_type = other DNA
attaattagaaaaaaaacag

SEQ ID NO: 42532 - DNA, 20 bp, synthetic construct
  misc_feature 1..20: note = chemically synthesized
  source 1..20: mol_type = other DNA
ttaattagaaaaaaaacagt

SEQ ID NO: 42533 - DNA, 20 bp, synthetic construct
  misc_feature 1..20: note = chemically synthesized
  source 1..20: mol_type = other DNA
taattagaaaaaaaacagtg

SEQ ID NO: 42534 - DNA, 20 bp, synthetic construct
  misc_feature 1..20: note = chemically synthesized
  source 1..20: mol_type = other DNA
acagtggggaaaaaattcca

SEQ ID NO: 42535 - DNA, 20 bp, synthetic construct
  misc_feature 1..20: note = chemically synthesized
  source 1..20: mol_type = other DNA
tggggaaaaaattccatgga

SEQ ID NO: 42536 - DNA, 20 bp, synthetic construct
  misc_feature 1..20: note = chemically synthesized
  source 1..20: mol_type = other DNA
ggggaaaaaattccatggat

SEQ ID NO: 42537 - DNA, 20 bp, synthetic construct
  misc_feature 1..20: note = chemically synthesized
  source 1..20: mol_type = other DNA
aaaaattccatggatgggtc

SEQ ID NO: 42538 - DNA, 20 bp, synthetic construct
  misc_feature 1..20: note = chemically synthesized
  source 1..20: mol_type = other DNA
attccatggatgggtctaga

SEQ ID NO: 42539 - DNA, 20 bp, synthetic construct
  misc_feature 1..20: note = chemically synthesized
  source 1..20: mol_type = other DNA
atggatgggtctagaaagac

SEQ ID NO: 42540 - DNA, 20 bp, synthetic construct
  misc_feature 1..20: note = chemically synthesized
  source 1..20: mol_type = other DNA
tagaaagactagcattgttt

SEQ ID NO: 42541 - DNA, 20 bp, synthetic construct
  misc_feature 1..20: note = chemically synthesized
  source 1..20: mol_type = other DNA
agaaagactagcattgtttt

SEQ ID NO: 42542 - DNA, 20 bp, synthetic construct
  misc_feature 1..20: note = chemically synthesized
  source 1..20: mol_type = other DNA
gactagcattgttttaggtt

SEQ ID NO: 42543 - DNA, 20 bp, synthetic construct
  misc_feature 1..20: note = chemically synthesized
  source 1..20: mol_type = other DNA
tagcattgttttaggttgag

SEQ ID NO: 42544 - DNA, 20 bp, synthetic construct
  misc_feature 1..20: note = chemically synthesized
  source 1..20: mol_type = other DNA
cattgttttaggttgagtgg

SEQ ID NO: 42545 - DNA, 20 bp, synthetic construct
  misc_feature 1..20: note = chemically synthesized
  source 1..20: mol_type = other DNA
aggttgagtggcagtgttta

SEQ ID NO: 42546 - DNA, 20 bp, synthetic construct
  misc_feature 1..20: note = chemically synthesized
  source 1..20: mol_type = other DNA
ggttgagtggcagtgtttaa

SEQ ID NO: 42547 - DNA, 20 bp, synthetic construct
  misc_feature 1..20: note = chemically synthesized
  source 1..20: mol_type = other DNA
gttgagtggcagtgtttaaa

SEQ ID NO: 42548 - DNA, 20 bp, synthetic construct
  misc_feature 1..20: note = chemically synthesized
  source 1..20: mol_type = other DNA
cagtgtttaaagggtgatat

SEQ ID NO: 42549 - DNA, 20 bp, synthetic construct
  misc_feature 1..20: note = chemically synthesized
  source 1..20: mol_type = other DNA
cagactaaacttgaaatatg

SEQ ID NO: 42550 - DNA, 20 bp, synthetic construct
  misc_feature 1..20: note = chemically synthesized
  source 1..20: mol_type = other DNA
gaaatatgtggctaaataac

SEQ ID NO: 42551 - DNA, 20 bp, synthetic construct
  misc_feature 1..20: note = chemically synthesized
  source 1..20: mol_type = other DNA
ttattttttcgtatcatgaa

SEQ ID NO: 42552 - DNA, 20 bp, synthetic construct
  misc_feature 1..20: note = chemically synthesized
  source 1..20: mol_type = other DNA
ttttttcgtatcatgaatag

SEQ ID NO: 42553 - DNA, 20 bp, synthetic construct
  misc_feature 1..20: note = chemically synthesized
  source 1..20: mol_type = other DNA
cgtatcatgaatagcagata

SEQ ID NO: 42554 - DNA, 20 bp, synthetic construct
  misc_feature 1..20: note = chemically synthesized
  source 1..20: mol_type = other DNA
gaatagcagatatagcttga

SEQ ID NO: 42555 - DNA, 20 bp, synthetic construct
  misc_feature 1..20: note = chemically synthesized
  source 1..20: mol_type = other DNA
tagcttgatggccccatgct

SEQ ID NO: 42556 - DNA, 20 bp, synthetic construct
  misc_feature 1..20: note = chemically synthesized
  source 1..20: mol_type = other DNA
gaaatccttaatttttgaca

SEQ ID NO: 42557 - DNA, 20 bp, synthetic construct
  misc_feature 1..20: note = chemically synthesized
  source 1..20: mol_type = other DNA
aaatccttaatttttgacaa

SEQ ID NO: 42558 - DNA, 20 bp, synthetic construct
  misc_feature 1..20: note = chemically synthesized
  source 1..20: mol_type = other DNA
aatccttaatttttgacaaa

SEQ ID NO: 42559 - DNA, 20 bp, synthetic construct
  misc_feature 1..20: note = chemically synthesized
  source 1..20: mol_type = other DNA
atccttaatttttgacaaag

SEQ ID NO: 42560 - DNA, 20 bp, synthetic construct
  misc_feature 1..20: note = chemically synthesized
  source 1..20: mol_type = other DNA
tattcattttcattttatat

SEQ ID NO: 42561 - DNA, 20 bp, synthetic construct
  misc_feature 1..20: note = chemically synthesized
  source 1..20: mol_type = other DNA
attcattttcattttatatt

SEQ ID NO: 42562 - DNA, 20 bp, synthetic construct
  misc_feature 1..20: note = chemically synthesized
  source 1..20: mol_type = other DNA
ttttcattttatattgggcc

SEQ ID NO: 42563 - DNA, 20 bp, synthetic construct
  misc_feature 1..20: note = chemically synthesized
  source 1..20: mol_type = other DNA
tattgggcctagaaattatg

SEQ ID NO: 42564 - DNA, 20 bp, synthetic construct
  misc_feature 1..20: note = chemically synthesized
  source 1..20: mol_type = other DNA
gggcctagaaattatgtaga

SEQ ID NO: 42565 - DNA, 20 bp, synthetic construct
  misc_feature 1..20: note = chemically synthesized
  source 1..20: mol_type = other DNA
gaaattatgtagatggtcct

SEQ ID NO: 42566 - DNA, 20 bp, synthetic construct
  misc_feature 1..20: note = chemically synthesized
  source 1..20: mol_type = other DNA
aaattatgtagatggtcctg

SEQ ID NO: 42567 - DNA, 20 bp, synthetic construct
  misc_feature 1..20: note = chemically synthesized
  source 1..20: mol_type = other DNA
atgtagatggtcctgaggaa

SEQ ID NO: 42568 - DNA, 20 bp, synthetic construct
  misc_feature 1..20: note = chemically synthesized
  source 1..20: mol_type = other DNA
tggtcctgaggaaaagttta

SEQ ID NO: 42569 - DNA, 20 bp, synthetic construct
  misc_feature 1..20: note = chemically synthesized
  source 1..20: mol_type = other DNA
gtctatttctctctctaaca

SEQ ID NO: 42570 - DNA, 20 bp, synthetic construct
  misc_feature 1..20: note = chemically synthesized
  source 1..20: mol_type = other DNA
tctctctctaacatagttgt

SEQ ID NO: 42571 - DNA, 20 bp, synthetic construct
  misc_feature 1..20: note = chemically synthesized
  source 1..20: mol_type = other DNA
atagttgtcagcacaatgcc

SEQ ID NO: 42572 - DNA, 20 bp, synthetic construct
  misc_feature 1..20: note = chemically synthesized
  source 1..20: mol_type = other DNA
tagttgtcagcacaatgcct

SEQ ID NO: 42573 - DNA, 20 bp, synthetic construct
  misc_feature 1..20: note = chemically synthesized
  source 1..20: mol_type = other DNA
tcagcacaatgcctaggcta

SEQ ID NO: 42574 - DNA, 20 bp, synthetic construct
  misc_feature 1..20: note = chemically synthesized
  source 1..20: mol_type = other DNA
cagcacaatgcctaggctat

SEQ ID NO: 42575 - DNA, 20 bp, synthetic construct
  misc_feature 1..20: note = chemically synthesized
  source 1..20: mol_type = other DNA
cacaatgcctaggctatagg

SEQ ID NO: 42576 - DNA, 20 bp, synthetic construct
  misc_feature 1..20: note = chemically synthesized
  source 1..20: mol_type = other DNA
taggctataggaagtactca

SEQ ID NO: 42577 - DNA, 20 bp, synthetic construct
  misc_feature 1..20: note = chemically synthesized
  source 1..20: mol_type = other DNA
ttcttattcaattctacaca

SEQ ID NO: 42578 - DNA, 20 bp, synthetic construct
  misc_feature 1..20: note = chemically synthesized
  source 1..20: mol_type = other DNA
cttattcaattctacacatg

SEQ ID NO: 42579 - DNA, 20 bp, synthetic construct
  misc_feature 1..20: note = chemically synthesized
  source 1..20: mol_type = other DNA
ttattcaattctacacatgg

SEQ ID NO: 42580 - DNA, 20 bp, synthetic construct
  misc_feature 1..20: note = chemically synthesized
  source 1..20: mol_type = other DNA
cacatggaggaaaaactcat

SEQ ID NO: 42581 - DNA, 20 bp, synthetic construct
  misc_feature 1..20: note = chemically synthesized
  source 1..20: mol_type = other DNA
acatggaggaaaaactcatc

SEQ ID NO: 42582 - DNA, 20 bp, synthetic construct
  misc_feature 1..20: note = chemically synthesized
  source 1..20: mol_type = other DNA
catggaggaaaaactcatca

SEQ ID NO: 42583 - DNA, 20 bp, synthetic construct
  misc_feature 1..20: note = chemically synthesized
  source 1..20: mol_type = other DNA
gaggaaaaactcatcaggga

SEQ ID NO: 42584 - DNA, 20 bp, synthetic construct
  misc_feature 1..20: note = chemically synthesized
  source 1..20: mol_type = other DNA
ggaaaaactcatcagggatg

SEQ ID NO: 42585 - DNA, 20 bp, synthetic construct
  misc_feature 1..20: note = chemically synthesized
  source 1..20: mol_type = other DNA
gaaaaactcatcagggatgg

SEQ ID NO: 42586 - DNA, 20 bp, synthetic construct
  misc_feature 1..20: note = chemically synthesized
  source 1..20: mol_type = other DNA
agggatggaggcacgcctct

SEQ ID NO: 42587 - DNA, 20 bp, synthetic construct
  misc_feature 1..20: note = chemically synthesized
  source 1..20: mol_type = other DNA
gggatggaggcacgcctcta

SEQ ID NO: 42588 - DNA, 20 bp, synthetic construct
  misc_feature 1..20: note = chemically synthesized
  source 1..20: mol_type = other DNA
atggaggcacgcctctaagg

SEQ ID NO: 42589 - DNA, 20 bp, synthetic construct
  misc_feature 1..20: note = chemically synthesized
  source 1..20: mol_type = other DNA
tggaggcacgcctctaagga

SEQ ID NO: 42590 - DNA, 20 bp, synthetic construct
  misc_feature 1..20: note = chemically synthesized
  source 1..20: mol_type = other DNA
aggcacgcctctaaggaagg

SEQ ID NO: 42591 - DNA, 20 bp, synthetic construct
  misc_feature 1..20: note = chemically synthesized
  source 1..20: mol_type = other DNA
ggcacgcctctaaggaaggc

SEQ ID NO: 42592 - DNA, 20 bp, synthetic construct
  misc_feature 1..20: note = chemically synthesized
  source 1..20: mol_type = other DNA
gcctctaaggaaggcaggtg

SEQ ID NO: 42593 - DNA, 20 bp, synthetic construct
  misc_feature 1..20: note = chemically synthesized
  source 1..20: mol_type = other DNA
ggaaggcaggtgtggctctg

SEQ ID NO: 42594 - DNA, 20 bp, synthetic construct
  misc_feature 1..20: note = chemically synthesized
  source 1..20: mol_type = other DNA
gtgtggctctgcagtgtgat

SEQ ID NO: 42595 - DNA, 20 bp, synthetic construct
  misc_feature 1..20: note = chemically synthesized
  source 1..20: mol_type = other DNA
tgtggctctgcagtgtgatt

SEQ ID NO: 42596 - DNA, 20 bp, synthetic construct
  misc_feature 1..20: note = chemically synthesized
  source 1..20: mol_type = other DNA
gcagtgtgattgggtacttg

SEQ ID NO: 42597 - DNA, 20 bp, synthetic construct
  misc_feature 1..20: note = chemically synthesized
  source 1..20: mol_type = other DNA
cagtgtgattgggtacttgc

SEQ ID NO: 42598 - DNA, 20 bp, synthetic construct
  misc_feature 1..20: note = chemically synthesized
  source 1..20: mol_type = other DNA
gattgggtacttgcaggacg

SEQ ID NO: 42599 - DNA, 20 bp, synthetic construct
  misc_feature 1..20: note = chemically synthesized
  source 1..20: mol_type = other DNA
attgggtacttgcaggacga

SEQ ID NO: 42600 - DNA, 20 bp, synthetic construct
  misc_feature 1..20: note = chemically synthesized
  source 1..20: mol_type = other DNA
ttgggtacttgcaggacgaa

SEQ ID NO: 42601 - DNA, 20 bp, synthetic construct
  misc_feature 1..20: note = chemically synthesized
  source 1..20: mol_type = other DNA
ggtacttgcaggacgaaggg

SEQ ID NO: 42602 - DNA, 20 bp, synthetic construct
  misc_feature 1..20: note = chemically synthesized
  source 1..20: mol_type = other DNA
gtacttgcaggacgaagggt

SEQ ID NO: 42603 - DNA, 20 bp, synthetic construct
  misc_feature 1..20: note = chemically synthesized
  source 1..20: mol_type = other DNA
tacttgcaggacgaagggtg

SEQ ID NO: 42604 - DNA, 20 bp, synthetic construct
  misc_feature 1..20: note = chemically synthesized
  source 1..20: mol_type = other DNA
ttgcaggacgaagggtgggg

SEQ ID NO: 42605 - DNA, 20 bp, synthetic construct
  misc_feature 1..20: note = chemically synthesized
  source 1..20: mol_type = other DNA
tgcaggacgaagggtggggt

SEQ ID NO: 42606 - DNA, 20 bp, synthetic construct
  misc_feature 1..20: note = chemically synthesized
  source 1..20: mol_type = other DNA
caggacgaagggtggggtgg

SEQ ID NO: 42607 - DNA, 20 bp, synthetic construct
  misc_feature 1..20: note = chemically synthesized
  source 1..20: mol_type = other DNA
gacgaagggtggggtgggag

SEQ ID NO: 42608 - DNA, 20 bp, synthetic construct
  misc_feature 1..20: note = chemically synthesized
  source 1..20: mol_type = other DNA
agtggctaaccttccattcc

SEQ ID NO: 42609 - DNA, 20 bp, synthetic construct
  misc_feature 1..20: note = chemically synthesized
  source 1..20: mol_type = other DNA
ctaaccttccattcctagtg

SEQ ID NO: 42610 - DNA, 20 bp, synthetic construct
  misc_feature 1..20: note = chemically synthesized
  source 1..20: mol_type = other DNA
aaccttccattcctagtgca

SEQ ID NO: 42611 - DNA, 20 bp, synthetic construct
  misc_feature 1..20: note = chemically synthesized
  source 1..20: mol_type = other DNA
accttccattcctagtgcag

SEQ ID NO: 42612 - DNA, 20 bp, synthetic construct
  misc_feature 1..20: note = chemically synthesized
  source 1..20: mol_type = other DNA
cattcctagtgcagaggtca

SEQ ID NO: 42613 - DNA, 20 bp, synthetic construct
  misc_feature 1..20: note = chemically synthesized
  source 1..20: mol_type = other DNA
gcctaaacatcaaattcctt

SEQ ID NO: 42614 - DNA, 20 bp, synthetic construct
  misc_feature 1..20: note = chemically synthesized
  source 1..20: mol_type = other DNA
cctaaacatcaaattccttg

SEQ ID NO: 42615 - DNA, 20 bp, synthetic construct
  misc_feature 1..20: note = chemically synthesized
  source 1..20: mol_type = other DNA
acatcaaattccttgaggtg

SEQ ID NO: 42616 - DNA, 20 bp, synthetic construct
  misc_feature 1..20: note = chemically synthesized
  source 1..20: mol_type = other DNA
tcaaattccttgaggtgcgg

SEQ ID NO: 42617 - DNA, 20 bp, synthetic construct
  misc_feature 1..20: note = chemically synthesized
  source 1..20: mol_type = other DNA
gtggctcactcctgtaatca

SEQ ID NO: 42618 - DNA, 20 bp, synthetic construct
  misc_feature 1..20: note = chemically synthesized
  source 1..20: mol_type = other DNA
gctcactcctgtaatcacag

SEQ ID NO: 42619 - DNA, 20 bp, synthetic construct
  misc_feature 1..20: note = chemically synthesized
  source 1..20: mol_type = other DNA
ctcctgtaatcacagcagtt

SEQ ID NO: 42620 - DNA, 20 bp, synthetic construct
  misc_feature 1..20: note = chemically synthesized
  source 1..20: mol_type = other DNA
tcctgtaatcacagcagttt

SEQ ID NO: 42621 - DNA, 20 bp, synthetic construct
  misc_feature 1..20: note = chemically synthesized
  source 1..20: mol_type = other DNA
tcacagcagtttgggacgcc

SEQ ID NO: 42622 - DNA, 20 bp, synthetic construct
  misc_feature 1..20: note = chemically synthesized
  source 1..20: mol_type = other DNA
cacagcagtttgggacgcca

SEQ ID NO: 42623 - DNA, 20 bp, synthetic construct
  misc_feature 1..20: note = chemically synthesized
  source 1..20: mol_type = other DNA
agcagtttgggacgccaagg

SEQ ID NO: 42624 - DNA, 20 bp, synthetic construct
  misc_feature 1..20: note = chemically synthesized
  source 1..20: mol_type = other DNA
gcagtttgggacgccaaggt

SEQ ID NO: 42625 - DNA, 20 bp, synthetic construct
  misc_feature 1..20: note = chemically synthesized
  source 1..20: mol_type = other DNA
gtttgggacgccaaggtggg

SEQ ID NO: 42626 - DNA, 20 bp, synthetic construct
  misc_feature 1..20: note = chemically synthesized
  source 1..20: mol_type = other DNA
ccaaggtgggcagatcactt

SEQ ID NO: 42627 - DNA, 20 bp, synthetic construct
  misc_feature 1..20: note = chemically synthesized
  source 1..20: mol_type = other DNA
caaggtgggcagatcacttg

SEQ ID NO: 42628 - DNA, 20 bp, synthetic construct
  misc_feature 1..20: note = chemically synthesized
  source 1..20: mol_type = other DNA
gtgggcagatcacttgaggt

SEQ ID NO: 42629 - DNA, 20 bp, synthetic construct
  misc_feature 1..20: note = chemically synthesized
  source 1..20: mol_type = other DNA
tgggcagatcacttgaggtc

SEQ ID NO: 42630 - DNA, 20 bp, synthetic construct
  misc_feature 1..20: note = chemically synthesized
  source 1..20: mol_type = other DNA
ggcagatcacttgaggtcag

SEQ ID NO: 42631 - DNA, 20 bp, synthetic construct
  misc_feature 1..20: note = chemically synthesized
  source 1..20: mol_type = other DNA
gatcacttgaggtcaggagt

SEQ ID NO: 42632 - DNA, 20 bp, synthetic construct
  misc_feature 1..20: note = chemically synthesized
  source 1..20: mol_type = other DNA
tgaggtcaggagttggacac

SEQ ID NO: 42633 - DNA, 20 bp, synthetic construct
  misc_feature 1..20: note = chemically synthesized
  source 1..20: mol_type = other DNA
tcaggagttggacaccagcc

SEQ ID NO: 42634 - DNA, 20 bp, synthetic construct
  misc_feature 1..20: note = chemically synthesized
  source 1..20: mol_type = other DNA
ggacaccagcccagccaaca

SEQ ID NO: 42635 - DNA, 20 bp, synthetic construct
  misc_feature 1..20: note = chemically synthesized
  source 1..20: mol_type = other DNA
ccagccaacatagtgaaacc

SEQ ID NO: 42636 - DNA, 20 bp, synthetic construct
  misc_feature 1..20: note = chemically synthesized
  source 1..20: mol_type = other DNA
ctgcttaaaaatataaaaat

SEQ ID NO: 42637 - DNA, 20 bp, synthetic construct
  misc_feature 1..20: note = chemically synthesized
  source 1..20: mol_type = other DNA
ttaaaaatataaaaattagc

SEQ ID NO: 42638 - DNA, 20 bp, synthetic construct
  misc_feature 1..20: note = chemically synthesized
  source 1..20: mol_type = other DNA
atataaaaattagctggacg

SEQ ID NO: 42639 - DNA, 20 bp, synthetic construct
  misc_feature 1..20: note = chemically synthesized
  source 1..20: mol_type = other DNA
aaattagctggacgtggtga

SEQ ID NO: 42640 - DNA, 20 bp, synthetic construct
  misc_feature 1..20: note = chemically synthesized
  source 1..20: mol_type = other DNA
aattagctggacgtggtgac

SEQ ID NO: 42641 - DNA, 20 bp, synthetic construct
  misc_feature 1..20: note = chemically synthesized
  source 1..20: mol_type = other DNA
ttagctggacgtggtgacgg

SEQ ID NO: 42642 - DNA, 20 bp, synthetic construct
  misc_feature 1..20: note = chemically synthesized
  source 1..20: mol_type = other DNA
gagcctgtaatccaactact

SEQ ID NO: 42643 - DNA, 20 bp, synthetic construct
  misc_feature 1..20: note = chemically synthesized
  source 1..20: mol_type = other DNA
agcctgtaatccaactactt

SEQ ID NO: 42644 - DNA, 20 bp, synthetic construct
  misc_feature 1..20: note = chemically synthesized
  source 1..20: mol_type = other DNA
cctgtaatccaactacttgg

SEQ ID NO: 42645 - DNA, 20 bp, synthetic construct
  misc_feature 1..20: note = chemically synthesized
  source 1..20: mol_type = other DNA
ctgtaatccaactacttggg

SEQ ID NO: 42646 - DNA, 20 bp, synthetic construct
  misc_feature 1..20: note = chemically synthesized
  source 1..20: mol_type = other DNA
atccaactacttgggaggct

SEQ ID NO: 42647 - DNA, 20 bp, synthetic construct
  misc_feature 1..20: note = chemically synthesized
  source 1..20: mol_type = other DNA
tccaactacttgggaggctg

SEQ ID NO: 42648 - DNA, 20 bp, synthetic construct
  misc_feature 1..20: note = chemically synthesized
  source 1..20: mol_type = other DNA
aactacttgggaggctgagg

SEQ ID NO: 42649 - DNA, 20 bp, synthetic construct
  misc_feature 1..20: note = chemically synthesized
  source 1..20: mol_type = other DNA
actacttgggaggctgaggc

SEQ ID NO: 42650 - DNA, 20 bp, synthetic construct
  misc_feature 1..20: note = chemically synthesized
  source 1..20: mol_type = other DNA
tacttgggaggctgaggcag

SEQ ID NO: 42651 - DNA, 20 bp, synthetic construct
  misc_feature 1..20: note = chemically synthesized
  source 1..20: mol_type = other DNA
ggcaggagaatcgcttgaac

SEQ ID NO: 42652 - DNA, 20 bp, synthetic construct
  misc_feature 1..20: note = chemically synthesized
  source 1..20: mol_type = other DNA
gcaggagaatcgcttgaacc

SEQ ID NO: 42653 - DNA, 20 bp, synthetic construct
  misc_feature 1..20: note = chemically synthesized
  source 1..20: mol_type = other DNA
caggagaatcgcttgaaccg

SEQ ID NO: 42654 - DNA, 20 bp, synthetic construct
  misc_feature 1..20: note = chemically synthesized
  source 1..20: mol_type = other DNA
ggagaatcgcttgaaccggg

SEQ ID NO: 42655 - DNA, 20 bp, synthetic construct
  misc_feature 1..20: note = chemically synthesized
  source 1..20: mol_type = other DNA
gagaatcgcttgaaccgggg

SEQ ID NO: 42656 - DNA, 20 bp, synthetic construct
  misc_feature 1..20: note = chemically synthesized
  source 1..20: mol_type = other DNA
aatcgcttgaaccggggagg

SEQ ID NO: 42657 - DNA, 20 bp, synthetic construct
  misc_feature 1..20: note = chemically synthesized
  source 1..20: mol_type = other DNA
tcgcttgaaccggggaggtg

SEQ ID NO: 42658 - DNA, 20 bp, synthetic construct
  misc_feature 1..20: note = chemically synthesized
  source 1..20: mol_type = other DNA
ggggaggtggagtttgcact

SEQ ID NO: 42659 - DNA, 20 bp, synthetic construct
  misc_feature 1..20: note = chemically synthesized
  source 1..20: mol_type = other DNA
gaggtggagtttgcactgag

SEQ ID NO: 42660 - DNA, 20 bp, synthetic construct
  misc_feature 1..20: note = chemically synthesized
  source 1..20: mol_type = other DNA
ggtggagtttgcactgagca

SEQ ID NO: 42661 - DNA, 20 bp, synthetic construct
  misc_feature 1..20: note = chemically synthesized
  source 1..20: mol_type = other DNA
gagatcatgccattgcactc

SEQ ID NO: 42662 - DNA, 20 bp, synthetic construct
  misc_feature 1..20: note = chemically synthesized
  source 1..20: mol_type = other DNA
tgccattgcactccagcctc

SEQ ID NO: 42663 - DNA, 20 bp, synthetic construct
  misc_feature 1..20: note = chemically synthesized
  source 1..20: mol_type = other DNA
ccattgcactccagcctcca

SEQ ID NO: 42664 - DNA, 20 bp, synthetic construct
  misc_feature 1..20: note = chemically synthesized
  source 1..20: mol_type = other DNA
tgcactccagcctccagagc

SEQ ID NO: 42665 - DNA, 20 bp, synthetic construct
  misc_feature 1..20: note = chemically synthesized
  source 1..20: mol_type = other DNA
ccagagcgagactctgtcta

SEQ ID NO: 42666 - DNA, 20 bp, synthetic construct
  misc_feature 1..20: note = chemically synthesized
  source 1..20: mol_type = other DNA
catcaaattccctgaccgaa

SEQ ID NO: 42667 - DNA, 20 bp, synthetic construct
  misc_feature 1..20: note = chemically synthesized
  source 1..20: mol_type = other DNA
tctaccattttccctcctta

SEQ ID NO: 42668 - DNA, 20 bp, synthetic construct
  misc_feature 1..20: note = chemically synthesized
  source 1..20: mol_type = other DNA
aagaaactgtgaacttcctt

SEQ ID NO: 42669 - DNA, 20 bp, synthetic construct
  misc_feature 1..20: note = chemically synthesized
  source 1..20: mol_type = other DNA
aactgtgaacttccttcagc

SEQ ID NO: 42670 - DNA, 20 bp, synthetic construct
  misc_feature 1..20: note = chemically synthesized
  source 1..20: mol_type = other DNA
ctgtgaacttccttcagcta

SEQ ID NO: 42671 - DNA, 20 bp, synthetic construct
  misc_feature 1..20: note = chemically synthesized
  source 1..20: mol_type = other DNA
tgtgaacttccttcagctag

SEQ ID NO: 42672 - DNA, 20 bp, synthetic construct
  misc_feature 1..20: note = chemically synthesized
  source 1..20: mol_type = other DNA
gtgaacttccttcagctaga

SEQ ID NO: 42673 - DNA, 20 bp, synthetic construct
  misc_feature 1..20: note = chemically synthesized
  source 1..20: mol_type = other DNA
tgaacttccttcagctagag

SEQ ID NO: 42674 - DNA, 20 bp, synthetic construct
  misc_feature 1..20: note = chemically synthesized
  source 1..20: mol_type = other DNA
ttccttcagctagaggggcc

SEQ ID NO: 42675 - DNA, 20 bp, synthetic construct
  misc_feature 1..20: note = chemically synthesized
  source 1..20: mol_type = other DNA
tcagctagaggggcctggct

SEQ ID NO: 42676 - DNA, 20 bp, synthetic construct
  misc_feature 1..20: note = chemically synthesized
  source 1..20: mol_type = other DNA
gctagaggggcctggctcag

SEQ ID NO: 42677 - DNA, 20 bp, synthetic construct
  misc_feature 1..20: note = chemically synthesized
  source 1..20: mol_type = other DNA
gggcctggctcagaagcctc

SEQ ID NO: 42678 - DNA, 20 bp, synthetic construct
  misc_feature 1..20: note = chemically synthesized
  source 1..20: mol_type = other DNA
ctggctcagaagcctctggt

SEQ ID NO: 42679 - DNA, 20 bp, synthetic construct
  misc_feature 1..20: note = chemically synthesized
  source 1..20: mol_type = other DNA
gaagcctctggtcagcatcc

SEQ ID NO: 42680 - DNA, 20 bp, synthetic construct
  misc_feature 1..20: note = chemically synthesized
  source 1..20: mol_type = other DNA
agaaatacttgatgtcactt

SEQ ID NO: 42681 - DNA, 20 bp, synthetic construct
  misc_feature 1..20: note = chemically synthesized
  source 1..20: mol_type = other DNA
acttgatgtcactttggcta

SEQ ID NO: 42682 - DNA, 20 bp, synthetic construct
  misc_feature 1..20: note = chemically synthesized
  source 1..20: mol_type = other DNA
cttgatgtcactttggctaa

SEQ ID NO: 42683 - DNA, 20 bp, synthetic construct
  misc_feature 1..20: note = chemically synthesized
  source 1..20: mol_type = other DNA
ttggctaaaggtatgatgtg

SEQ ID NO: 42684 - DNA, 20 bp, synthetic construct
  misc_feature 1..20: note = chemically synthesized
  source 1..20: mol_type = other DNA
taaaggtatgatgtgtagac

SEQ ID NO: 42685 - DNA, 20 bp, synthetic construct
  misc_feature 1..20: note = chemically synthesized
  source 1..20: mol_type = other DNA
tatgatgtgtagacaagctc

SEQ ID NO: 42686 - DNA, 20 bp, synthetic construct
  misc_feature 1..20: note = chemically synthesized
  source 1..20: mol_type = other DNA
tgatgtgtagacaagctcca

SEQ ID NO: 42687 - DNA, 20 bp, synthetic construct
  misc_feature 1..20: note = chemically synthesized
  source 1..20: mol_type = other DNA
gtgtagacaagctccagaga

SEQ ID NO: 42688 - DNA, 20 bp, synthetic construct
  misc_feature 1..20: note = chemically synthesized
  source 1..20: mol_type = other DNA
catttccatatccacccacc

SEQ ID NO: 42689 - DNA, 20 bp, synthetic construct
  misc_feature 1..20: note = chemically synthesized
  source 1..20: mol_type = other DNA
cacccagctttccaatttta

SEQ ID NO: 42690 - DNA, 20 bp, synthetic construct
  misc_feature 1..20: note = chemically synthesized
  source 1..20: mol_type = other DNA
ccaattttaaagccaattct

SEQ ID NO: 42691 - DNA, 20 bp, synthetic construct
  misc_feature 1..20: note = chemically synthesized
  source 1..20: mol_type = other DNA
caattttaaagccaattctg

SEQ ID NO: 42692 - DNA, 20 bp, synthetic construct
  misc_feature 1..20: note = chemically synthesized
  source 1..20: mol_type = other DNA
ttttaaagccaattctgagg

SEQ ID NO: 42693 - DNA, 20 bp, synthetic construct
  misc_feature 1..20: note = chemically synthesized
  source 1..20: mol_type = other DNA
ttaaagccaattctgaggta

SEQ ID NO: 42694 - DNA, 20 bp, synthetic construct
  misc_feature 1..20: note = chemically synthesized
  source 1..20: mol_type = other DNA
ccttgacaaaattcaaccca

SEQ ID NO: 42695 - DNA, 20 bp, synthetic construct
  misc_feature 1..20: note = chemically synthesized
  source 1..20: mol_type = other DNA
acccaaagactcactttgcc

SEQ ID NO: 42696 - DNA, 20 bp, synthetic construct
  misc_feature 1..20: note = chemically synthesized
  source 1..20: mol_type = other DNA
cttactctgacatatactca

SEQ ID NO: 42697 - DNA, 20 bp, synthetic construct
  misc_feature 1..20: note = chemically synthesized
  source 1..20: mol_type = other DNA
ctctgacatatactcacagc

SEQ ID NO: 42698 - DNA, 20 bp, synthetic construct
  misc_feature 1..20: note = chemically synthesized
  source 1..20: mol_type = other DNA
atatactcacagccagaaat

SEQ ID NO: 42699 - DNA, 20 bp, synthetic construct
  misc_feature 1..20: note = chemically synthesized
  source 1..20: mol_type = other DNA
agccagaaattagcatgcac

SEQ ID NO: 42700 - DNA, 20 bp, synthetic construct
  misc_feature 1..20: note = chemically synthesized
  source 1..20: mol_type = other DNA
ccagaaattagcatgcacta

SEQ ID NO: 42701 - DNA, 20 bp, synthetic construct
  misc_feature 1..20: note = chemically synthesized
  source 1..20: mol_type = other DNA
gcatgcactagagtgtgcat

SEQ ID NO: 42702 - DNA, 20 bp, synthetic construct
  misc_feature 1..20: note = chemically synthesized
  source 1..20: mol_type = other DNA
accaattccatattctctgt

SEQ ID NO: 42703 - DNA, 20 bp, synthetic construct
  misc_feature 1..20: note = chemically synthesized
  source 1..20: mol_type = other DNA
tctctgtcagaaaatcctgt

SEQ ID NO: 42704 - DNA, 20 bp, synthetic construct
  misc_feature 1..20: note = chemically synthesized
  source 1..20: mol_type = other DNA
atcctgttggtttttcgtga

SEQ ID NO: 42705 - DNA, 20 bp, synthetic construct
  misc_feature 1..20: note = chemically synthesized
  source 1..20: mol_type = other DNA
tcctgttggtttttcgtgaa

SEQ ID NO: 42706 - DNA, 20 bp, synthetic construct
  misc_feature 1..20: note = chemically synthesized
  source 1..20: mol_type = other DNA
ttttcgtgaaaggatgtttt

SEQ ID NO: 42707 - DNA, 20 bp, synthetic construct
  misc_feature 1..20: note = chemically synthesized
  source 1..20: mol_type = other DNA
ttcgtgaaaggatgttttca

SEQ ID NO: 42708 - DNA, 20 bp, synthetic construct
  misc_feature 1..20: note = chemically synthesized
  source 1..20: mol_type = other DNA
tcgtgaaaggatgttttcag

SEQ ID NO: 42709 - DNA, 20 bp, synthetic construct
  misc_feature 1..20: note = chemically synthesized
  source 1..20: mol_type = other DNA
cacctccaatgctaccactc

SEQ ID NO: 42710 - DNA, 20 bp, synthetic construct
  misc_feature 1..20: note = chemically synthesized
  source 1..20: mol_type = other DNA
caatgctaccactctggtct

SEQ ID NO: 42711 - DNA, 20 bp, synthetic construct
  misc_feature 1..20: note = chemically synthesized
  source 1..20: mol_type = other DNA
tgtcaccaccacctaaatta

SEQ ID NO: 42712 - DNA, 20 bp, synthetic construct
  misc_feature 1..20: note = chemically synthesized
  source 1..20: mol_type = other DNA
tcccaatatactatccaaat

SEQ ID NO: 42713 - DNA, 20 bp, synthetic construct
  misc_feature 1..20: note = chemically synthesized
  source 1..20: mol_type = other DNA
aattagtcttttcaaaatgt

SEQ ID NO: 42714 - DNA, 20 bp, synthetic construct
  misc_feature 1..20: note = chemically synthesized
  source 1..20: mol_type = other DNA
ttcaaaatgtaagtcatata

SEQ ID NO: 42715 - DNA, 20 bp, synthetic construct
  misc_feature 1..20: note = chemically synthesized
  source 1..20: mol_type = other DNA
tatggtcacctctttgttca

SEQ ID NO: 42716 - DNA, 20 bp, synthetic construct
  misc_feature 1..20: note = chemically synthesized
  source 1..20: mol_type = other DNA
ctttgttcaaagtcttctga

SEQ ID NO: 42717 - DNA, 20 bp, synthetic construct
  misc_feature 1..20: note = chemically synthesized
  source 1..20: mol_type = other DNA
atccttacaattctctacaa

SEQ ID NO: 42718 - DNA, 20 bp, synthetic construct
  misc_feature 1..20: note = chemically synthesized
  source 1..20: mol_type = other DNA
tgcatatattatgtttatta

SEQ ID NO: 42719 - DNA, 20 bp, synthetic construct
  misc_feature 1..20: note = chemically synthesized
  source 1..20: mol_type = other DNA
ttattacagatacatatata

SEQ ID NO: 42720 - DNA, 20 bp, synthetic construct
  misc_feature 1..20: note = chemically synthesized
  source 1..20: mol_type = other DNA
tatatttatgtgtatgtgtg

SEQ ID NO: 42721 - DNA, 20 bp, synthetic construct
  misc_feature 1..20: note = chemically synthesized
  source 1..20: mol_type = other DNA
tatttatgtgtatgtgtgta

SEQ ID NO: 42722 - DNA, 20 bp, synthetic construct
  misc_feature 1..20: note = chemically synthesized
  source 1..20: mol_type = other DNA
tttcttacaactctatgatg

SEQ ID NO: 42723 - DNA, 20 bp, synthetic construct
  misc_feature 1..20: note = chemically synthesized
  source 1..20: mol_type = other DNA
ttcttacaactctatgatgt

SEQ ID NO: 42724 - DNA, 20 bp, synthetic construct
  misc_feature 1..20: note = chemically synthesized
  source 1..20: mol_type = other DNA
ctctatgatgtaggtattat

SEQ ID NO: 42725 - DNA, 20 bp, synthetic construct
  misc_feature 1..20: note = chemically synthesized
  source 1..20: mol_type = other DNA
gtgtcccaaattttataatt

SEQ ID NO: 42726 - DNA, 20 bp, synthetic construct
  misc_feature 1..20: note = chemically synthesized
  source 1..20: mol_type = other DNA
tgtcccaaattttataattt

SEQ ID NO: 42727 - DNA, 20 bp, synthetic construct
  misc_feature 1..20: note = chemically synthesized
  source 1..20: mol_type = other DNA
caccgaatctcatcctacat

SEQ ID NO: 42728 - DNA, 20 bp, synthetic construct
  misc_feature 1..20: note = chemically synthesized
  source 1..20: mol_type = other DNA
tgatattccttgaaaattct

SEQ ID NO: 42729 - DNA, 20 bp, synthetic construct
  misc_feature 1..20: note = chemically synthesized
  source 1..20: mol_type = other DNA
ttctaagcatcttacatctt

SEQ ID NO: 42730 - DNA, 20 bp, synthetic construct
  misc_feature 1..20: note = chemically synthesized
  source 1..20: mol_type = other DNA
tctaagcatcttacatcttt

SEQ ID NO: 42731 - DNA, 20 bp, synthetic construct
  misc_feature 1..20: note = chemically synthesized
  source 1..20: mol_type = other DNA
ctaagcatcttacatcttta

SEQ ID NO: 42732 - DNA, 20 bp, synthetic construct
  misc_feature 1..20: note = chemically synthesized
  source 1..20: mol_type = other DNA
atgccctaaatatttaatca

SEQ ID NO: 42733 - DNA, 20 bp, synthetic construct
  misc_feature 1..20: note = chemically synthesized
  source 1..20: mol_type = other DNA
taatcatagtttcatataaa

SEQ ID NO: 42734 - DNA, 20 bp, synthetic construct
  misc_feature 1..20: note = chemically synthesized
  source 1..20: mol_type = other DNA
aatcatagtttcatataaat

SEQ ID NO: 42735 - DNA, 20 bp, synthetic construct
  misc_feature 1..20: note = chemically synthesized
  source 1..20: mol_type = other DNA
aatgggttcctcatcatcta

SEQ ID NO: 42736 - DNA, 20 bp, synthetic construct
  misc_feature 1..20: note = chemically synthesized
  source 1..20: mol_type = other DNA
atgggttcctcatcatctat

SEQ ID NO: 42737 - DNA, 20 bp, synthetic construct
  misc_feature 1..20: note = chemically synthesized
  source 1..20: mol_type = other DNA
atcatctatgggtactctct

SEQ ID NO: 42738 - DNA, 20 bp, synthetic construct
  misc_feature 1..20: note = chemically synthesized
  source 1..20: mol_type = other DNA
tcatctatgggtactctctc

SEQ ID NO: 42739 - DNA, 20 bp, synthetic construct
  misc_feature 1..20: note = chemically synthesized
  source 1..20: mol_type = other DNA
tctctcaggtgttaacttta

SEQ ID NO: 42740 - DNA, 20 bp, synthetic construct
  misc_feature 1..20: note = chemically synthesized
  source 1..20: mol_type = other DNA
tcaggtgttaactttatagt

SEQ ID NO: 42741 - DNA, 20 bp, synthetic construct
  misc_feature 1..20: note = chemically synthesized
  source 1..20: mol_type = other DNA
caggtgttaactttatagtg

SEQ ID NO: 42742 - DNA, 20 bp, synthetic construct
  misc_feature 1..20: note = chemically synthesized
  source 1..20: mol_type = other DNA
ctttcctgccatactactta

SEQ ID NO: 42743 - DNA, 20 bp, synthetic construct
  misc_feature 1..20: note = chemically synthesized
  source 1..20: mol_type = other DNA
tcctgccatactacttaaag

SEQ ID NO: 42744 - DNA, 20 bp, synthetic construct
  misc_feature 1..20: note = chemically synthesized
  source 1..20: mol_type = other DNA
accctgtcctaatcacactc

SEQ ID NO: 42745 - DNA, 20 bp, synthetic construct
  misc_feature 1..20: note = chemically synthesized
  source 1..20: mol_type = other DNA
tcacactctggccttcattt

SEQ ID NO: 42746 - DNA, 20 bp, synthetic construct
  misc_feature 1..20: note = chemically synthesized
  source 1..20: mol_type = other DNA
cagttttttttttttctcca

SEQ ID NO: 42747 - DNA, 20 bp, synthetic construct
  misc_feature 1..20: note = chemically synthesized
  source 1..20: mol_type = other DNA
tccatagcacctaatctcat

SEQ ID NO: 42748 - DNA, 20 bp, synthetic construct
  misc_feature 1..20: note = chemically synthesized
  source 1..20: mol_type = other DNA
tcatttgcttatttaatgtc

SEQ ID NO: 42749 - DNA, 20 bp, synthetic construct
  misc_feature 1..20: note = chemically synthesized
  source 1..20: mol_type = other DNA
gtcaagctctttccactatc

SEQ ID NO: 42750 - DNA, 20 bp, synthetic construct
  misc_feature 1..20: note = chemically synthesized
  source 1..20: mol_type = other DNA
cactatcaagtccatgaaaa

SEQ ID NO: 42751 - DNA, 20 bp, synthetic construct
  misc_feature 1..20: note = chemically synthesized
  source 1..20: mol_type = other DNA
actatcaagtccatgaaaac

SEQ ID NO: 42752 - DNA, 20 bp, synthetic construct
  misc_feature 1..20: note = chemically synthesized
  source 1..20: mol_type = other DNA
ctgtttttgtgctgtattct

SEQ ID NO: 42753 - DNA, 20 bp, synthetic construct
  misc_feature 1..20: note = chemically synthesized
  source 1..20: mol_type = other DNA
acaattttgaatgaatgaat

SEQ ID NO: 42754 - DNA, 20 bp, synthetic construct
  misc_feature 1..20: note = chemically synthesized
  source 1..20: mol_type = other DNA
attttgaatgaatgaatgag

SEQ ID NO: 42755 - DNA, 20 bp, synthetic construct
  misc_feature 1..20: note = chemically synthesized
  source 1..20: mol_type = other DNA
acatatacaactataattaa

SEQ ID NO: 42756 - DNA, 20 bp, synthetic construct
  misc_feature 1..20: note = chemically synthesized
  source 1..20: mol_type = other DNA
catatacaactataattaaa

SEQ ID NO: 42757 - DNA, 20 bp, synthetic construct
  misc_feature 1..20: note = chemically synthesized
  source 1..20: mol_type = other DNA
tccactgctatgcacacaca

SEQ ID NO: 42758 - DNA, 20 bp, synthetic construct
  misc_feature 1..20: note = chemically synthesized
  source 1..20: mol_type = other DNA
ctatgcacacacaaagaaat

SEQ ID NO: 42759 - DNA, 20 bp, synthetic construct
  misc_feature 1..20: note = chemically synthesized
  source 1..20: mol_type = other DNA
tgcacacacaaagaaatcag

SEQ ID NO: 42760 - DNA, 20 bp, synthetic construct
  misc_feature 1..20: note = chemically synthesized
  source 1..20: mol_type = other DNA
cacacacaaagaaatcagtg

SEQ ID NO: 42761 - DNA, 20 bp, synthetic construct
  misc_feature 1..20: note = chemically synthesized
  source 1..20: mol_type = other DNA
acacaaagaaatcagtggag

SEQ ID NO: 42762 - DNA, 20 bp, synthetic construct
  misc_feature 1..20: note = chemically synthesized
  source 1..20: mol_type = other DNA
acaaagaaatcagtggagta

SEQ ID NO: 42763 - DNA, 20 bp, synthetic construct
  misc_feature 1..20: note = chemically synthesized
  source 1..20: mol_type = other DNA
agaaatcagtggagtagagc

SEQ ID NO: 42764 - DNA, 20 bp, synthetic construct
  misc_feature 1..20: note = chemically synthesized
  source 1..20: mol_type = other DNA
aatcagtggagtagagctgg

SEQ ID NO: 42765 - DNA, 20 bp, synthetic construct
  misc_feature 1..20: note = chemically synthesized
  source 1..20: mol_type = other DNA
ggagtagagctggaagtgct

SEQ ID NO: 42766 - DNA, 20 bp, synthetic construct
  misc_feature 1..20: note = chemically synthesized
  source 1..20: mol_type = other DNA
ctggaagtgctaagcctgca

SEQ ID NO: 42767 - DNA, 20 bp, synthetic construct
  misc_feature 1..20: note = chemically synthesized
  source 1..20: mol_type = other DNA
ggaagtgctaagcctgcata

SEQ ID NO: 42768 - DNA, 20 bp, synthetic construct
  misc_feature 1..20: note = chemically synthesized
  source 1..20: mol_type = other DNA
gtgctaagcctgcatagagc

SEQ ID NO: 42769 - DNA, 20 bp, synthetic construct
  misc_feature 1..20: note = chemically synthesized
  source 1..20: mol_type = other DNA
taagcctgcatagagctagt

SEQ ID NO: 42770 - DNA, 20 bp, synthetic construct
  misc_feature 1..20: note = chemically synthesized
  source 1..20: mol_type = other DNA
tagagctagttagccctccg

SEQ ID NO: 42771 - DNA, 20 bp, synthetic construct
  misc_feature 1..20: note = chemically synthesized
  source 1..20: mol_type = other DNA
agagctagttagccctccgc

SEQ ID NO: 42772 - DNA, 20 bp, synthetic construct
  misc_feature 1..20: note = chemically synthesized
  source 1..20: mol_type = other DNA
gctagttagccctccgcagg

SEQ ID NO: 42773 - DNA, 20 bp, synthetic construct
  misc_feature 1..20: note = chemically synthesized
  source 1..20: mol_type = other DNA
tagttagccctccgcaggca

SEQ ID NO: 42774 - DNA, 20 bp, synthetic construct
  misc_feature 1..20: note = chemically synthesized
  source 1..20: mol_type = other DNA
ctccgcaggcagagccttga

SEQ ID NO: 42775 - DNA, 20 bp, synthetic construct
  misc_feature 1..20: note = chemically synthesized
  source 1..20: mol_type = other DNA
tccgcaggcagagccttgat

SEQ ID NO: 42776 - DNA, 20 bp, synthetic construct
  misc_feature 1..20: note = chemically synthesized
  source 1..20: mol_type = other DNA
agagccttgatgggattact

SEQ ID NO: 42777 - DNA, 20 bp, synthetic construct
  misc_feature 1..20: note = chemically synthesized
  source 1..20: mol_type = other DNA
ttgatgggattactgagttc

SEQ ID NO: 42778 - DNA, 20 bp, synthetic construct
  misc_feature 1..20: note = chemically synthesized
  source 1..20: mol_type = other DNA
ggattactgagttctagaat

SEQ ID NO: 42779 - DNA, 20 bp, synthetic construct
  misc_feature 1..20: note = chemically synthesized
  source 1..20: mol_type = other DNA
aattggactcatttgttttg

SEQ ID NO: 42780 - DNA, 20 bp, synthetic construct
  misc_feature 1..20: note = chemically synthesized
  source 1..20: mol_type = other DNA
attggactcatttgttttgt

SEQ ID NO: 42781 - DNA, 20 bp, synthetic construct
  misc_feature 1..20: note = chemically synthesized
  source 1..20: mol_type = other DNA
actcatttgttttgtaggct

SEQ ID NO: 42782 - DNA, 20 bp, synthetic construct
  misc_feature 1..20: note = chemically synthesized
  source 1..20: mol_type = other DNA
acttgttctgaccaaaataa

SEQ ID NO: 42783 - DNA, 20 bp, synthetic construct
  misc_feature 1..20: note = chemically synthesized
  source 1..20: mol_type = other DNA
cttgttctgaccaaaataaa

SEQ ID NO: 42784 - DNA, 20 bp, synthetic construct
  misc_feature 1..20: note = chemically synthesized
  source 1..20: mol_type = other DNA
gaccaaaataaaaggctcaa

SEQ ID NO: 42785 - DNA, 20 bp, synthetic construct
  misc_feature 1..20: note = chemically synthesized
  source 1..20: mol_type = other DNA
caaaagatgaatatcgaaac

SEQ ID NO: 42786 - DNA, 20 bp, synthetic construct
  misc_feature 1..20: note = chemically synthesized
  source 1..20: mol_type = other DNA
aaaagatgaatatcgaaacc

SEQ ID NO: 42787 - DNA, 20 bp, synthetic construct
  misc_feature 1..20: note = chemically synthesized
  source 1..20: mol_type = other DNA
aaagatgaatatcgaaacca

SEQ ID NO: 42788 - DNA, 20 bp, synthetic construct
  misc_feature 1..20: note = chemically synthesized
  source 1..20: mol_type = other DNA
aaccagggtgttttttacac

SEQ ID NO: 42789 - DNA, 20 bp, synthetic construct
  misc_feature 1..20: note = chemically synthesized
  source 1..20: mol_type = other DNA
tttacactggaatttataac

SEQ ID NO: 42790 - DNA, 20 bp, synthetic construct
  misc_feature 1..20: note = chemically synthesized
  source 1..20: mol_type = other DNA
tacactggaatttataacta

SEQ ID NO: 42791 - DNA, 20 bp, synthetic construct
  misc_feature 1..20: note = chemically synthesized
  source 1..20: mol_type = other DNA
tagagcactcatgtttatgt

SEQ ID NO: 42792 - DNA, 20 bp, synthetic construct
  misc_feature 1..20: note = chemically synthesized
  source 1..20: mol_type = other DNA
taagcaattaattgtttcat

SEQ ID NO: 42793 - DNA, 20 bp, synthetic construct
  misc_feature 1..20: note = chemically synthesized
  source 1..20: mol_type = other DNA
caattaattgtttcatcagt

SEQ ID NO: 42794 - DNA, 20 bp, synthetic construct
  misc_feature 1..20: note = chemically synthesized
  source 1..20: mol_type = other DNA
aattaattgtttcatcagtc

SEQ ID NO: 42795 - DNA, 20 bp, synthetic construct
  misc_feature 1..20: note = chemically synthesized
  source 1..20: mol_type = other DNA
ttgtttcatcagtcaggtaa

SEQ ID NO: 42796 - DNA, 20 bp, synthetic construct
  misc_feature 1..20: note = chemically synthesized
  source 1..20: mol_type = other DNA
tcatcagtcaggtaaaagta

SEQ ID NO: 42797 - DNA, 20 bp, synthetic construct
  misc_feature 1..20: note = chemically synthesized
  source 1..20: mol_type = other DNA
aagtaaagaaaaactgtgcc

SEQ ID NO: 42798 - DNA, 20 bp, synthetic construct
  misc_feature 1..20: note = chemically synthesized
  source 1..20: mol_type = other DNA
agtaaagaaaaactgtgcca

SEQ ID NO: 42799 - DNA, 20 bp, synthetic construct
  misc_feature 1..20: note = chemically synthesized
  source 1..20: mol_type = other DNA
aaagaaaaactgtgccaagg

SEQ ID NO: 42800 - DNA, 20 bp, synthetic construct
  misc_feature 1..20: note = chemically synthesized
  source 1..20: mol_type = other DNA
aagaaaaactgtgccaaggc

SEQ ID NO: 42801 - DNA, 20 bp, synthetic construct
  misc_feature 1..20: note = chemically synthesized
  source 1..20: mol_type = other DNA
aaaaactgtgccaaggcagg

SEQ ID NO: 42802 - DNA, 20 bp, synthetic construct
  misc_feature 1..20: note = chemically synthesized
  source 1..20: mol_type = other DNA
cctaatgcaatatgccacta

SEQ ID NO: 42803 - DNA, 20 bp, synthetic construct
  misc_feature 1..20: note = chemically synthesized
  source 1..20: mol_type = other DNA
ctaaagtaaacattatttca

SEQ ID NO: 42804 - DNA, 20 bp, synthetic construct
  misc_feature 1..20: note = chemically synthesized
  source 1..20: mol_type = other DNA
taaagtaaacattatttcat

SEQ ID NO: 42805 - DNA, 20 bp, synthetic construct
  misc_feature 1..20: note = chemically synthesized
  source 1..20: mol_type = other DNA
aaacattatttcataggtgt

SEQ ID NO: 42806 - DNA, 20 bp, synthetic construct
  misc_feature 1..20: note = chemically synthesized
  source 1..20: mol_type = other DNA
tatttcataggtgtcagata

SEQ ID NO: 42807 - DNA, 20 bp, synthetic construct
  misc_feature 1..20: note = chemically synthesized
  source 1..20: mol_type = other DNA
ggcttattcatccatcttca

SEQ ID NO: 42808 - DNA, 20 bp, synthetic construct
  misc_feature 1..20: note = chemically synthesized
  source 1..20: mol_type = other DNA
gcttattcatccatcttcat

SEQ ID NO: 42809 - DNA, 20 bp, synthetic construct
  misc_feature 1..20: note = chemically synthesized
  source 1..20: mol_type = other DNA
tattcatccatcttcatggg

SEQ ID NO: 42810 - DNA, 20 bp, synthetic construct
  misc_feature 1..20: note = chemically synthesized
  source 1..20: mol_type = other DNA
attcatccatcttcatggga

SEQ ID NO: 42811 - DNA, 20 bp, synthetic construct
  misc_feature 1..20: note = chemically synthesized
  source 1..20: mol_type = other DNA
atccatcttcatgggaagga

SEQ ID NO: 42812 - DNA, 20 bp, synthetic construct
  misc_feature 1..20: note = chemically synthesized
  source 1..20: mol_type = other DNA
cttcatgggaaggatggcct

SEQ ID NO: 42813 - DNA, 20 bp, synthetic construct
  misc_feature 1..20: note = chemically synthesized
  source 1..20: mol_type = other DNA
tgggaaggatggccttggcc

SEQ ID NO: 42814 - DNA, 20 bp, synthetic construct
  misc_feature 1..20: note = chemically synthesized
  source 1..20: mol_type = other DNA
gatggccttggcctggacat

SEQ ID NO: 42815 - DNA, 20 bp, synthetic construct
  misc_feature 1..20: note = chemically synthesized
  source 1..20: mol_type = other DNA
cctggacatcagtgttatgt

SEQ ID NO: 42816 - DNA, 20 bp, synthetic construct
  misc_feature 1..20: note = chemically synthesized
  source 1..20: mol_type = other DNA
ctggacatcagtgttatgtg

SEQ ID NO: 42817 - DNA, 20 bp, synthetic construct
  misc_feature 1..20: note = chemically synthesized
  source 1..20: mol_type = other DNA
tgtgaggttcaaaacacctc

SEQ ID NO: 42818 - DNA, 20 bp, synthetic construct
  misc_feature 1..20: note = chemically synthesized
  source 1..20: mol_type = other DNA
gtgaggttcaaaacacctct

SEQ ID NO: 42819 - DNA, 20 bp, synthetic construct
  misc_feature 1..20: note = chemically synthesized
  source 1..20: mol_type = other DNA
tcaaaacacctctaggctat

SEQ ID NO: 42820 - DNA, 20 bp, synthetic construct
  misc_feature 1..20: note = chemically synthesized
  source 1..20: mol_type = other DNA
caaaacacctctaggctata

SEQ ID NO: 42821 - DNA, 20 bp, synthetic construct
  misc_feature 1..20: note = chemically synthesized
  source 1..20: mol_type = other DNA
acctctaggctataaggcaa

SEQ ID NO: 42822 - DNA, 20 bp, synthetic construct
  misc_feature 1..20: note = chemically synthesized
  source 1..20: mol_type = other DNA
ctctaggctataaggcaaca

SEQ ID NO: 42823 - DNA, 20 bp, synthetic construct
  misc_feature 1..20: note = chemically synthesized
  source 1..20: mol_type = other DNA
tttttttttctgtgctttcc

SEQ ID NO: 42824 - DNA, 20 bp, synthetic construct
  misc_feature 1..20: note = chemically synthesized
  source 1..20: mol_type = other DNA
ctgtccaaatctctaatgat

SEQ ID NO: 42825 - DNA, 20 bp, synthetic construct
  misc_feature 1..20: note = chemically synthesized
  source 1..20: mol_type = other DNA
taagcatacttctattcaat

SEQ ID NO: 42826 - DNA, 20 bp, synthetic construct
  misc_feature 1..20: note = chemically synthesized
  source 1..20: mol_type = other DNA
attcaatgagaatattctgt

SEQ ID NO: 42827 - DNA, 20 bp, synthetic construct
  misc_feature 1..20: note = chemically synthesized
  source 1..20: mol_type = other DNA
gagaatattctgtaagatta

SEQ ID NO: 42828 - DNA, 20 bp, synthetic construct
  misc_feature 1..20: note = chemically synthesized
  source 1..20: mol_type = other DNA
tattctgtaagattatagtt

SEQ ID NO: 42829 - DNA, 20 bp, synthetic construct
  misc_feature 1..20: note = chemically synthesized
  source 1..20: mol_type = other DNA
aagattatagttaagaattg

SEQ ID NO: 42830 - DNA, 20 bp, synthetic construct
  misc_feature 1..20: note = chemically synthesized
  source 1..20: mol_type = other DNA
agattatagttaagaattgt

SEQ ID NO: 42831 - DNA, 20 bp, synthetic construct
  misc_feature 1..20: note = chemically synthesized
  source 1..20: mol_type = other DNA
attatagttaagaattgtgg

SEQ ID NO: 42832 - DNA, 20 bp, synthetic construct
  misc_feature 1..20: note = chemically synthesized
  source 1..20: mol_type = other DNA
gggagccattccgtctctta

SEQ ID NO: 42833 - DNA, 20 bp, synthetic construct
  misc_feature 1..20: note = chemically synthesized
  source 1..20: mol_type = other DNA
cgtctcttatagttaaattt

SEQ ID NO: 42834 - DNA, 20 bp, synthetic construct
  misc_feature 1..20: note = chemically synthesized
  source 1..20: mol_type = other DNA
ctgtttttttaatatgcttt

SEQ ID NO: 42835 - DNA, 20 bp, synthetic construct
  misc_feature 1..20: note = chemically synthesized
  source 1..20: mol_type = other DNA
ttttaatatgctttaagttc

SEQ ID NO: 42836 - DNA, 20 bp, synthetic construct
  misc_feature 1..20: note = chemically synthesized
  source 1..20: mol_type = other DNA
tttaatatgctttaagttct

SEQ ID NO: 42837 - DNA, 20 bp, synthetic construct
  misc_feature 1..20: note = chemically synthesized
  source 1..20: mol_type = other DNA
ttaatatgctttaagttctg

SEQ ID NO: 42838 - DNA, 20 bp, synthetic construct
  misc_feature 1..20: note = chemically synthesized
  source 1..20: mol_type = other DNA
gttctggggtacatgtgcca

SEQ ID NO: 42839 - DNA, 20 bp, synthetic construct
  misc_feature 1..20: note = chemically synthesized
  source 1..20: mol_type = other DNA
ctggggtacatgtgccatgg

SEQ ID NO: 42840 - DNA, 20 bp, synthetic construct
  misc_feature 1..20: note = chemically synthesized
  source 1..20: mol_type = other DNA
catcaacccgtcatctacat

SEQ ID NO: 42841 - DNA, 20 bp, synthetic construct
  misc_feature 1..20: note = chemically synthesized
  source 1..20: mol_type = other DNA
atcaacccgtcatctacatt

SEQ ID NO: 42842 - DNA, 20 bp, synthetic construct
  misc_feature 1..20: note = chemically synthesized
  source 1..20: mol_type = other DNA
tcctaatgctatccttcccc

SEQ ID NO: 42843 - DNA, 20 bp, synthetic construct
  misc_feature 1..20: note = chemically synthesized
  source 1..20: mol_type = other DNA
ccctagccccccacccccaa

SEQ ID NO: 42844 - DNA, 20 bp, synthetic construct
  misc_feature 1..20: note = chemically synthesized
  source 1..20: mol_type = other DNA
cctagccccccacccccaac

SEQ ID NO: 42845 - DNA, 20 bp, synthetic construct
  misc_feature 1..20: note = chemically synthesized
  source 1..20: mol_type = other DNA
cccccacccccaacaggccc

SEQ ID NO: 42846 - DNA, 20 bp, synthetic construct
  misc_feature 1..20: note = chemically synthesized
  source 1..20: mol_type = other DNA
tgttcccctccctgtgtcca

SEQ ID NO: 42847 - DNA, 20 bp, synthetic construct
  misc_feature 1..20: note = chemically synthesized
  source 1..20: mol_type = other DNA
tccctgtgtccatggatcac

SEQ ID NO: 42848 - DNA, 20 bp, synthetic construct
  misc_feature 1..20: note = chemically synthesized
  source 1..20: mol_type = other DNA
ttgtttttttttttttttta

SEQ ID NO: 42849 - DNA, 20 bp, synthetic construct
  misc_feature 1..20: note = chemically synthesized
  source 1..20: mol_type = other DNA
tttttttttttttaaagtct

SEQ ID NO: 42850 - DNA, 20 bp, synthetic construct
  misc_feature 1..20: note = chemically synthesized
  source 1..20: mol_type = other DNA
taaagtctcagttaaatttt

SEQ ID NO: 42851 - DNA, 20 bp, synthetic construct
  misc_feature 1..20: note = chemically synthesized
  source 1..20: mol_type = other DNA
tggaatgtaatttattttcc

SEQ ID NO: 42852 - DNA, 20 bp, synthetic construct
  misc_feature 1..20: note = chemically synthesized
  source 1..20: mol_type = other DNA
aatttattttcctggtatcc

SEQ ID NO: 42853 - DNA, 20 bp, synthetic construct
  misc_feature 1..20: note = chemically synthesized
  source 1..20: mol_type = other DNA
atttattttcctggtatcct

SEQ ID NO: 42854 - DNA, 20 bp, synthetic construct
  misc_feature 1..20: note = chemically synthesized
  source 1..20: mol_type = other DNA
cctggtatcctaggacttgc

SEQ ID NO: 42855 - DNA, 20 bp, synthetic construct
  misc_feature 1..20: note = chemically synthesized
  source 1..20: mol_type = other DNA
cctaggacttgcaagttatc

SEQ ID NO: 42856 - DNA, 20 bp, synthetic construct
  misc_feature 1..20: note = chemically synthesized
  source 1..20: mol_type = other DNA
tgcaagttatctggtcactt

SEQ ID NO: 42857 - DNA, 20 bp, synthetic construct
  misc_feature 1..20: note = chemically synthesized
  source 1..20: mol_type = other DNA
aacacacataacatatttat

SEQ ID NO: 42858 - DNA, 20 bp, synthetic construct
  misc_feature 1..20: note = chemically synthesized
  source 1..20: mol_type = other DNA
acacacataacatatttatc

SEQ ID NO: 42859 - DNA, 20 bp, synthetic construct
  misc_feature 1..20: note = chemically synthesized
  source 1..20: mol_type = other DNA
catatttatcgggcatttct

SEQ ID NO: 42860 - DNA, 20 bp, synthetic construct
  misc_feature 1..20: note = chemically synthesized
  source 1..20: mol_type = other DNA
tttctgagcaactaatcatg

SEQ ID NO: 42861 - DNA, 20 bp, synthetic construct
  misc_feature 1..20: note = chemically synthesized
  source 1..20: mol_type = other DNA
ttctgagcaactaatcatgc

SEQ ID NO: 42862 - DNA, 20 bp, synthetic construct
  misc_feature 1..20: note = chemically synthesized
  source 1..20: mol_type = other DNA
gactctcaaacactaaccta

SEQ ID NO: 42863 - DNA, 20 bp, synthetic construct
  misc_feature 1..20: note = chemically synthesized
  source 1..20: mol_type = other DNA
tttctatgtatctacttgtg

SEQ ID NO: 42864 - DNA, 20 bp, synthetic construct
  misc_feature 1..20: note = chemically synthesized
  source 1..20: mol_type = other DNA
tatctacttgtgtagaaacc

SEQ ID NO: 42865 - DNA, 20 bp, synthetic construct
  misc_feature 1..20: note = chemically synthesized
  source 1..20: mol_type = other DNA
acttgtgtagaaaccaagcg

SEQ ID NO: 42866 - DNA, 20 bp, synthetic construct
  misc_feature 1..20: note = chemically synthesized
  source 1..20: mol_type = other DNA
cttgtgtagaaaccaagcgt

SEQ ID NO: 42867 - DNA, 20 bp, synthetic construct
  misc_feature 1..20: note = chemically synthesized
  source 1..20: mol_type = other DNA
ttgtgtagaaaccaagcgtg

SEQ ID NO: 42868 - DNA, 20 bp, synthetic construct
  misc_feature 1..20: note = chemically synthesized
  source 1..20: mol_type = other DNA
agaaaccaagcgtggggact

SEQ ID NO: 42869 - DNA, 20 bp, synthetic construct
  misc_feature 1..20: note = chemically synthesized
  source 1..20: mol_type = other DNA
aaccaagcgtggggactgag

SEQ ID NO: 42870 - DNA, 20 bp, synthetic construct
  misc_feature 1..20: note = chemically synthesized
  source 1..20: mol_type = other DNA
accaagcgtggggactgaga

SEQ ID NO: 42871 - DNA, 20 bp, synthetic construct
  misc_feature 1..20: note = chemically synthesized
  source 1..20: mol_type = other DNA
cgtggggactgagaaggcaa

SEQ ID NO: 42872 - DNA, 20 bp, synthetic construct
  misc_feature 1..20: note = chemically synthesized
  source 1..20: mol_type = other DNA
ggggactgagaaggcaatag

SEQ ID NO: 42873 - DNA, 20 bp, synthetic construct
  misc_feature 1..20: note = chemically synthesized
  source 1..20: mol_type = other DNA
gggactgagaaggcaatagc

SEQ ID NO: 42874 - DNA, 20 bp, synthetic construct
  misc_feature 1..20: note = chemically synthesized
  source 1..20: mol_type = other DNA
gactgagaaggcaatagcag

SEQ ID NO: 42875 - DNA, 20 bp, synthetic construct
  misc_feature 1..20: note = chemically synthesized
  source 1..20: mol_type = other DNA
attctgactctcactgcctt

SEQ ID NO: 42876 - DNA, 20 bp, synthetic construct
  misc_feature 1..20: note = chemically synthesized
  source 1..20: mol_type = other DNA
tgactctcactgcctttagc

SEQ ID NO: 42877 - DNA, 20 bp, synthetic construct
  misc_feature 1..20: note = chemically synthesized
  source 1..20: mol_type = other DNA
gactctcactgcctttagct

SEQ ID NO: 42878 - DNA, 20 bp, synthetic construct
  misc_feature 1..20: note = chemically synthesized
  source 1..20: mol_type = other DNA
gctaggcccctccctcatca

SEQ ID NO: 42879 - DNA, 20 bp, synthetic construct
  misc_feature 1..20: note = chemically synthesized
  source 1..20: mol_type = other DNA
gcccctccctcatcacagct

SEQ ID NO: 42880 - DNA, 20 bp, synthetic construct
  misc_feature 1..20: note = chemically synthesized
  source 1..20: mol_type = other DNA
tccctcatcacagctcagca

SEQ ID NO: 42881 - DNA, 20 bp, synthetic construct
  misc_feature 1..20: note = chemically synthesized
  source 1..20: mol_type = other DNA
tcacagctcagcatagtcct

SEQ ID NO: 42882 - DNA, 20 bp, synthetic construct
  misc_feature 1..20: note = chemically synthesized
  source 1..20: mol_type = other DNA
ctcttatctatatccacaca

SEQ ID NO: 42883 - DNA, 20 bp, synthetic construct
  misc_feature 1..20: note = chemically synthesized
  source 1..20: mol_type = other DNA
acacagtttctgacgctgcc

SEQ ID NO: 42884 - DNA, 20 bp, synthetic construct
  misc_feature 1..20: note = chemically synthesized
  source 1..20: mol_type = other DNA
tgcccagctatcaccatccc

SEQ ID NO: 42885 - DNA, 20 bp, synthetic construct
  misc_feature 1..20: note = chemically synthesized
  source 1..20: mol_type = other DNA
ctatcaccatcccaagtcta

SEQ ID NO: 42886 - DNA, 20 bp, synthetic construct
  misc_feature 1..20: note = chemically synthesized
  source 1..20: mol_type = other DNA
aagtctaaagaaaaaaataa

SEQ ID NO: 42887 - DNA, 20 bp, synthetic construct
  misc_feature 1..20: note = chemically synthesized
  source 1..20: mol_type = other DNA
agtctaaagaaaaaaataat

SEQ ID NO: 42888 - DNA, 20 bp, synthetic construct
  misc_feature 1..20: note = chemically synthesized
  source 1..20: mol_type = other DNA
gtttgcccatctctgttgat

SEQ ID NO: 42889 - DNA, 20 bp, synthetic construct
  misc_feature 1..20: note = chemically synthesized
  source 1..20: mol_type = other DNA
aaaacaaaacaaaataaaat

SEQ ID NO: 42890 - DNA, 20 bp, synthetic construct
  misc_feature 1..20: note = chemically synthesized
  source 1..20: mol_type = other DNA
acaaaataaaataagcccct

SEQ ID NO: 42891 - DNA, 20 bp, synthetic construct
  misc_feature 1..20: note = chemically synthesized
  source 1..20: mol_type = other DNA
aaaataagcccctaagctcc

SEQ ID NO: 42892 - DNA, 20 bp, synthetic construct
  misc_feature 1..20: note = chemically synthesized
  source 1..20: mol_type = other DNA
cccagaaaacatgactaaac

SEQ ID NO: 42893 - DNA, 20 bp, synthetic construct
  misc_feature 1..20: note = chemically synthesized
  source 1..20: mol_type = other DNA
gaaaacatgactaaaccagc

SEQ ID NO: 42894 - DNA, 20 bp, synthetic construct
  misc_feature 1..20: note = chemically synthesized
  source 1..20: mol_type = other DNA
aacatgactaaaccagcaag

SEQ ID NO: 42895 - DNA, 20 bp, synthetic construct
  misc_feature 1..20: note = chemically synthesized
  source 1..20: mol_type = other DNA
atgactaaaccagcaagaag

SEQ ID NO: 42896 - DNA, 20 bp, synthetic construct
  misc_feature 1..20: note = chemically synthesized
  source 1..20: mol_type = other DNA
gcaagaagaagaaaatacaa

SEQ ID NO: 42897 - DNA, 20 bp, synthetic construct
  misc_feature 1..20: note = chemically synthesized
  source 1..20: mol_type = other DNA
caagaagaagaaaatacaat

SEQ ID NO: 42898 - DNA, 20 bp, synthetic construct
  misc_feature 1..20: note = chemically synthesized
  source 1..20: mol_type = other DNA
agaaaatacaataggtatat

SEQ ID NO: 42899 - DNA, 20 bp, synthetic construct
  misc_feature 1..20: note = chemically synthesized
  source 1..20: mol_type = other DNA
gaaaatacaataggtatatg

SEQ ID NO: 42900 - DNA, 20 bp, synthetic construct
  misc_feature 1..20: note = chemically synthesized
  source 1..20: mol_type = other DNA
aaatacaataggtatatgag

SEQ ID NO: 42901 - DNA, 20 bp, synthetic construct
  misc_feature 1..20: note = chemically synthesized
  source 1..20: mol_type = other DNA
caataggtatatgaggagac

SEQ ID NO: 42902 - DNA, 20 bp, synthetic construct
  misc_feature 1..20: note = chemically synthesized
  source 1..20: mol_type = other DNA
tatgaggagactggtgacac

SEQ ID NO: 42903 - DNA, 20 bp, synthetic construct
  misc_feature 1..20: note = chemically synthesized
  source 1..20: mol_type = other DNA
ggtgacactagtgtctgaat

SEQ ID NO: 42904 - DNA, 20 bp, synthetic construct
  misc_feature 1..20: note = chemically synthesized
  source 1..20: mol_type = other DNA
gtgacactagtgtctgaatg

SEQ ID NO: 42905 - DNA, 20 bp, synthetic construct
  misc_feature 1..20: note = chemically synthesized
  source 1..20: mol_type = other DNA
ctagtgtctgaatgaggctt

SEQ ID NO: 42906 - DNA, 20 bp, synthetic construct
  misc_feature 1..20: note = chemically synthesized
  source 1..20: mol_type = other DNA
gtctgaatgaggcttgagta

SEQ ID NO: 42907 - DNA, 20 bp, synthetic construct
  misc_feature 1..20: note = chemically synthesized
  source 1..20: mol_type = other DNA
aatgaggcttgagtacagaa

SEQ ID NO: 42908 - DNA, 20 bp, synthetic construct
  misc_feature 1..20: note = chemically synthesized
  source 1..20: mol_type = other DNA
tgaggcttgagtacagaaaa

SEQ ID NO: 42909 - DNA, 20 bp, synthetic construct
  misc_feature 1..20: note = chemically synthesized
  source 1..20: mol_type = other DNA
gaggcttgagtacagaaaag

SEQ ID NO: 42910 - DNA, 20 bp, synthetic construct
  misc_feature 1..20: note = chemically synthesized
  source 1..20: mol_type = other DNA
tgagtacagaaaagaggctc

SEQ ID NO: 42911 - DNA, 20 bp, synthetic construct
  misc_feature 1..20: note = chemically synthesized
  source 1..20: mol_type = other DNA
gtacagaaaagaggctctag

SEQ ID NO: 42912 - DNA, 20 bp, synthetic construct
  misc_feature 1..20: note = chemically synthesized
  source 1..20: mol_type = other DNA
gaaaagaggctctagcagca

SEQ ID NO: 42913 - DNA, 20 bp, synthetic construct
  misc_feature 1..20: note = chemically synthesized
  source 1..20: mol_type = other DNA
aagaggctctagcagcatag

SEQ ID NO: 42914 - DNA, 20 bp, synthetic construct
  misc_feature 1..20: note = chemically synthesized
  source 1..20: mol_type = other DNA
gctctagcagcatagtggtt

SEQ ID NO: 42915 - DNA, 20 bp, synthetic construct
  misc_feature 1..20: note = chemically synthesized
  source 1..20: mol_type = other DNA
tctagcagcatagtggttta

SEQ ID NO: 42916 - DNA, 20 bp, synthetic construct
  misc_feature 1..20: note = chemically synthesized
  source 1..20: mol_type = other DNA
ctagcagcatagtggtttag

SEQ ID NO: 42917 - DNA, 20 bp, synthetic construct
  misc_feature 1..20: note = chemically synthesized
  source 1..20: mol_type = other DNA
agcagcatagtggtttagag

SEQ ID NO: 42918 - DNA, 20 bp, synthetic construct
  misc_feature 1..20: note = chemically synthesized
  source 1..20: mol_type = other DNA
ggagatgtttctttccttca

SEQ ID NO: 42919 - DNA, 20 bp, synthetic construct
  misc_feature 1..20: note = chemically synthesized
  source 1..20: mol_type = other DNA
tctttccttcacagatgcct

SEQ ID NO: 42920 - DNA, 20 bp, synthetic construct
  misc_feature 1..20: note = chemically synthesized
  source 1..20: mol_type = other DNA
acagatgccttagcctcaat

SEQ ID NO: 42921 - DNA, 20 bp, synthetic construct
  misc_feature 1..20: note = chemically synthesized
  source 1..20: mol_type = other DNA
ccttagcctcaataagcttg

SEQ ID NO: 42922 - DNA, 20 bp, synthetic construct
  misc_feature 1..20: note = chemically synthesized
  source 1..20: mol_type = other DNA
cctcaataagcttgcggttg

SEQ ID NO: 42923 - DNA, 20 bp, synthetic construct
  misc_feature 1..20: note = chemically synthesized
  source 1..20: mol_type = other DNA
caataagcttgcggttgtgg

SEQ ID NO: 42924 - DNA, 20 bp, synthetic construct
  misc_feature 1..20: note = chemically synthesized
  source 1..20: mol_type = other DNA
cggttgtggaagtttacttt

SEQ ID NO: 42925 - DNA, 20 bp, synthetic construct
  misc_feature 1..20: note = chemically synthesized
  source 1..20: mol_type = other DNA
actttcagaacaaactcctg

SEQ ID NO: 42926 - DNA, 20 bp, synthetic construct
  misc_feature 1..20: note = chemically synthesized
  source 1..20: mol_type = other DNA
ctttcagaacaaactcctgt

SEQ ID NO: 42927 - DNA, 20 bp, synthetic construct
  misc_feature 1..20: note = chemically synthesized
  source 1..20: mol_type = other DNA
tttcagaacaaactcctgtg

SEQ ID NO: 42928 - DNA, 20 bp, synthetic construct
  misc_feature 1..20: note = chemically synthesized
  source 1..20: mol_type = other DNA
agaacaaactcctgtggggc

SEQ ID NO: 42929 - DNA, 20 bp, synthetic construct
  misc_feature 1..20: note = chemically synthesized
  source 1..20: mol_type = other DNA
tgtggggctagaattattga

SEQ ID NO: 42930 - DNA, 20 bp, synthetic construct
  misc_feature 1..20: note = chemically synthesized
  source 1..20: mol_type = other DNA
ctagaattattgatggctaa

SEQ ID NO: 42931 - DNA, 20 bp, synthetic construct
  misc_feature 1..20: note = chemically synthesized
  source 1..20: mol_type = other DNA
gaattattgatggctaaaag

SEQ ID NO: 42932 - DNA, 20 bp, synthetic construct
  misc_feature 1..20: note = chemically synthesized
  source 1..20: mol_type = other DNA
attgatggctaaaagaagcc

SEQ ID NO: 42933 - DNA, 20 bp, synthetic construct
  misc_feature 1..20: note = chemically synthesized
  source 1..20: mol_type = other DNA
ttgatggctaaaagaagccc

SEQ ID NO: 42934 - DNA, 20 bp, synthetic construct
  misc_feature 1..20: note = chemically synthesized
  source 1..20: mol_type = other DNA
tgatggctaaaagaagcccg

SEQ ID NO: 42935 - DNA, 20 bp, synthetic construct
  misc_feature 1..20: note = chemically synthesized
  source 1..20: mol_type = other DNA
gatggctaaaagaagcccgg

SEQ ID NO: 42936 - DNA, 20 bp, synthetic construct
  misc_feature 1..20: note = chemically synthesized
  source 1..20: mol_type = other DNA
tggctaaaagaagcccgggg

SEQ ID NO: 42937 - DNA, 20 bp, synthetic construct
  misc_feature 1..20: note = chemically synthesized
  source 1..20: mol_type = other DNA
ggctaaaagaagcccggggg

SEQ ID NO: 42938 - DNA, 20 bp, synthetic construct
  misc_feature 1..20: note = chemically synthesized
  source 1..20: mol_type = other DNA
gctaaaagaagcccggggga

SEQ ID NO: 42939 - DNA, 20 bp, synthetic construct
  misc_feature 1..20: note = chemically synthesized
  source 1..20: mol_type = other DNA
cgggggagggaaaaatcatt

SEQ ID NO: 42940 - DNA, 20 bp, synthetic construct
  misc_feature 1..20: note = chemically synthesized
  source 1..20: mol_type = other DNA
tcattcagcatcctcaccct

SEQ ID NO: 42941 - DNA, 20 bp, synthetic construct
  misc_feature 1..20: note = chemically synthesized
  source 1..20: mol_type = other DNA
tcacccttagtgacacaaaa

SEQ ID NO: 42942 - DNA, 20 bp, synthetic construct
  misc_feature 1..20: note = chemically synthesized
  source 1..20: mol_type = other DNA
acccttagtgacacaaaaca

SEQ ID NO: 42943 - DNA, 20 bp, synthetic construct
  misc_feature 1..20: note = chemically synthesized
  source 1..20: mol_type = other DNA
cccttagtgacacaaaacag

SEQ ID NO: 42944 - DNA, 20 bp, synthetic construct
  misc_feature 1..20: note = chemically synthesized
  source 1..20: mol_type = other DNA
ccttagtgacacaaaacaga

SEQ ID NO: 42945 - DNA, 20 bp, synthetic construct
  misc_feature 1..20: note = chemically synthesized
  source 1..20: mol_type = other DNA
cttagtgacacaaaacagag

SEQ ID NO: 42946 - DNA, 20 bp, synthetic construct
  misc_feature 1..20: note = chemically synthesized
  source 1..20: mol_type = other DNA
ttagtgacacaaaacagagg

SEQ ID NO: 42947 - DNA, 20 bp, synthetic construct
  misc_feature 1..20: note = chemically synthesized
  source 1..20: mol_type = other DNA
gacacaaaacagagggggcc

SEQ ID NO: 42948 - DNA, 20 bp, synthetic construct
  misc_feature 1..20: note = chemically synthesized
  source 1..20: mol_type = other DNA
ttttccatatttcctcatga

SEQ ID NO: 42949 - DNA, 20 bp, synthetic construct
  misc_feature 1..20: note = chemically synthesized
  source 1..20: mol_type = other DNA
gatggatgatctcgttaatg

SEQ ID NO: 42950 - DNA, 20 bp, synthetic construct
  misc_feature 1..20: note = chemically synthesized
  source 1..20: mol_type = other DNA
atggatgatctcgttaatga

SEQ ID NO: 42951 - DNA, 20 bp, synthetic construct
  misc_feature 1..20: note = chemically synthesized
  source 1..20: mol_type = other DNA
gatgatctcgttaatgaagg

SEQ ID NO: 42952 - DNA, 20 bp, synthetic construct
  misc_feature 1..20: note = chemically synthesized
  source 1..20: mol_type = other DNA
gttaatgaaggtggtctgac

SEQ ID NO: 42953 - DNA, 20 bp, synthetic construct
  misc_feature 1..20: note = chemically synthesized
  source 1..20: mol_type = other DNA
gatcattgcttcttccattt

SEQ ID NO: 42954 - DNA, 20 bp, synthetic construct
  misc_feature 1..20: note = chemically synthesized
  source 1..20: mol_type = other DNA
cttgctcacttgccaatcct

SEQ ID NO: 42955 - DNA, 20 bp, synthetic construct
  misc_feature 1..20: note = chemically synthesized
  source 1..20: mol_type = other DNA
tcctcagttttaaccttctc

SEQ ID NO: 42956 - DNA, 20 bp, synthetic construct
  misc_feature 1..20: note = chemically synthesized
  source 1..20: mol_type = other DNA
ctcagttttaaccttctcca

SEQ ID NO: 42957 - DNA, 20 bp, synthetic construct
  misc_feature 1..20: note = chemically synthesized
  source 1..20: mol_type = other DNA
agaaatacacattttttatt

SEQ ID NO: 42958 - DNA, 20 bp, synthetic construct
  misc_feature 1..20: note = chemically synthesized
  source 1..20: mol_type = other DNA
gaaatacacattttttattc

SEQ ID NO: 42959 - DNA, 20 bp, synthetic construct
  misc_feature 1..20: note = chemically synthesized
  source 1..20: mol_type = other DNA
tcaggaaacatactatgtta

SEQ ID NO: 42960 - DNA, 20 bp, synthetic construct
  misc_feature 1..20: note = chemically synthesized
  source 1..20: mol_type = other DNA
gtttcaatactaaataatca

SEQ ID NO: 42961 - DNA, 20 bp, synthetic construct
  misc_feature 1..20: note = chemically synthesized
  source 1..20: mol_type = other DNA
actaaataatcaaagtactg

SEQ ID NO: 42962 - DNA, 20 bp, synthetic construct
  misc_feature 1..20: note = chemically synthesized
  source 1..20: mol_type = other DNA
aataatcaaagtactgaaga

SEQ ID NO: 42963 - DNA, 20 bp, synthetic construct
  misc_feature 1..20: note = chemically synthesized
  source 1..20: mol_type = other DNA
agtactgaagatagcatgca

SEQ ID NO: 42964 - DNA, 20 bp, synthetic construct
  misc_feature 1..20: note = chemically synthesized
  source 1..20: mol_type = other DNA
gtactgaagatagcatgcat

SEQ ID NO: 42965 - DNA, 20 bp, synthetic construct
  misc_feature 1..20: note = chemically synthesized
  source 1..20: mol_type = other DNA
tgaagatagcatgcataggc

SEQ ID NO: 42966 - DNA, 20 bp, synthetic construct
  misc_feature 1..20: note = chemically synthesized
  source 1..20: mol_type = other DNA
tagcatgcataggcaagaaa

SEQ ID NO: 42967 - DNA, 20 bp, synthetic construct
  misc_feature 1..20: note = chemically synthesized
  source 1..20: mol_type = other DNA
cataggcaagaaaaagtcct

SEQ ID NO: 42968 - DNA, 20 bp, synthetic construct
  misc_feature 1..20: note = chemically synthesized
  source 1..20: mol_type = other DNA
gctttatgttgctgttgttt

SEQ ID NO: 42969 - DNA, 20 bp, synthetic construct
  misc_feature 1..20: note = chemically synthesized
  source 1..20: mol_type = other DNA
tgttgtttcagaatttaaaa

SEQ ID NO: 42970 - DNA, 20 bp, synthetic construct
  misc_feature 1..20: note = chemically synthesized
  source 1..20: mol_type = other DNA
agaatttaaaaaagatcacc

SEQ ID NO: 42971 - DNA, 20 bp, synthetic construct
  misc_feature 1..20: note = chemically synthesized
  source 1..20: mol_type = other DNA
ttaaaaaagatcaccaagtc

SEQ ID NO: 42972 - DNA, 20 bp, synthetic construct
  misc_feature 1..20: note = chemically synthesized
  source 1..20: mol_type = other DNA
taaaaaagatcaccaagtca

SEQ ID NO: 42973 - DNA, 20 bp, synthetic construct
  misc_feature 1..20: note = chemically synthesized
  source 1..20: mol_type = other DNA
tcaccaagtcaaggacttct

SEQ ID NO: 42974 - DNA, 20 bp, synthetic construct
  misc_feature 1..20: note = chemically synthesized
  source 1..20: mol_type = other DNA
agtcaaggacttctcagttc

SEQ ID NO: 42975 - DNA, 20 bp, synthetic construct
  misc_feature 1..20: note = chemically synthesized
  source 1..20: mol_type = other DNA
ggacttctcagttctagcac

SEQ ID NO: 42976 - DNA, 20 bp, synthetic construct
  misc_feature 1..20: note = chemically synthesized
  source 1..20: mol_type = other DNA
acttctcagttctagcacta

SEQ ID NO: 42977 - DNA, 20 bp, synthetic construct
  misc_feature 1..20: note = chemically synthesized
  source 1..20: mol_type = other DNA
cttctcagttctagcactag

SEQ ID NO: 42978 - DNA, 20 bp, synthetic construct
  misc_feature 1..20: note = chemically synthesized
  source 1..20: mol_type = other DNA
ctcagttctagcactagagg

SEQ ID NO: 42979 - DNA, 20 bp, synthetic construct
  misc_feature 1..20: note = chemically synthesized
  source 1..20: mol_type = other DNA
tagcactagaggtggaatct

SEQ ID NO: 42980 - DNA, 20 bp, synthetic construct
  misc_feature 1..20: note = chemically synthesized
  source 1..20: mol_type = other DNA
gtggaatcttagcatataat

SEQ ID NO: 42981 - DNA, 20 bp, synthetic construct
  misc_feature 1..20: note = chemically synthesized
  source 1..20: mol_type = other DNA
ggaatcttagcatataatca

SEQ ID NO: 42982 - DNA, 20 bp, synthetic construct
  misc_feature 1..20: note = chemically synthesized
  source 1..20: mol_type = other DNA
gaatcttagcatataatcag

SEQ ID NO: 42983 - DNA, 20 bp, synthetic construct
  misc_feature 1..20: note = chemically synthesized
  source 1..20: mol_type = other DNA
cagaggtttttcaaaatttc

SEQ ID NO: 42984 - DNA, 20 bp, synthetic construct
  misc_feature 1..20: note = chemically synthesized
  source 1..20: mol_type = other DNA
ttttcaaaatttctagacat

SEQ ID NO: 42985 - DNA, 20 bp, synthetic construct
  misc_feature 1..20: note = chemically synthesized
  source 1..20: mol_type = other DNA
atttctagacataagattca

SEQ ID NO: 42986 - DNA, 20 bp, synthetic construct
  misc_feature 1..20: note = chemically synthesized
  source 1..20: mol_type = other DNA
tcaaagccctgcacttaaaa

SEQ ID NO: 42987 - DNA, 20 bp, synthetic construct
  misc_feature 1..20: note = chemically synthesized
  source 1..20: mol_type = other DNA
taactctttatataaattga

SEQ ID NO: 42988 - DNA, 20 bp, synthetic construct
  misc_feature 1..20: note = chemically synthesized
  source 1..20: mol_type = other DNA
aagcacattctgaactactt

SEQ ID NO: 42989 - DNA, 20 bp, synthetic construct
  misc_feature 1..20: note = chemically synthesized
  source 1..20: mol_type = other DNA
gcacattctgaactacttca

SEQ ID NO: 42990 - DNA, 20 bp, synthetic construct
  misc_feature 1..20: note = chemically synthesized
  source 1..20: mol_type = other DNA
ttgttttatttctatgttct

SEQ ID NO: 42991 - DNA, 20 bp, synthetic construct
  misc_feature 1..20: note = chemically synthesized
  source 1..20: mol_type = other DNA
ttcttagttcataaatacat

SEQ ID NO: 42992 - DNA, 20 bp, synthetic construct
  misc_feature 1..20: note = chemically synthesized
  source 1..20: mol_type = other DNA
tcttagttcataaatacatt

SEQ ID NO: 42993 - DNA, 20 bp, synthetic construct
  misc_feature 1..20: note = chemically synthesized
  source 1..20: mol_type = other DNA
caatttaattaaaaaaaccc

SEQ ID NO: 42994 - DNA, 20 bp, synthetic construct
  misc_feature 1..20: note = chemically synthesized
  source 1..20: mol_type = other DNA
aaaaaaacccaagaatttct

SEQ ID NO: 42995 - DNA, 20 bp, synthetic construct
  misc_feature 1..20: note = chemically synthesized
  source 1..20: mol_type = other DNA
tttaatcatgaaaataaatg

SEQ ID NO: 42996 - DNA, 20 bp, synthetic construct
  misc_feature 1..20: note = chemically synthesized
  source 1..20: mol_type = other DNA
ttaatcatgaaaataaatga

SEQ ID NO: 42997 - DNA, 20 bp, synthetic construct
  misc_feature 1..20: note = chemically synthesized
  source 1..20: mol_type = other DNA
gaaggcatctttacttactc

SEQ ID NO: 42998 - DNA, 20 bp, synthetic construct
  misc_feature 1..20: note = chemically synthesized
  source 1..20: mol_type = other DNA
aaggcatctttacttactca

SEQ ID NO: 42999 - DNA, 20 bp, synthetic construct
  misc_feature 1..20: note = chemically synthesized
  source 1..20: mol_type = other DNA
ttacttactcaaggtcccaa

SEQ ID NO: 43000 - DNA, 20 bp, synthetic construct
  misc_feature 1..20: note = chemically synthesized
  source 1..20: mol_type = other DNA
tacttactcaaggtcccaaa

SEQ ID NO: 43001 - DNA, 20 bp, synthetic construct
  misc_feature 1..20: note = chemically synthesized
  source 1..20: mol_type = other DNA
ctcaaggtcccaaaaggtca

SEQ ID NO: 43002 - DNA, 20 bp, synthetic construct
  misc_feature 1..20: note = chemically synthesized
  source 1..20: mol_type = other DNA
tcccaaaaggtcaaagaaac

SEQ ID NO: 43003 - DNA, 20 bp, synthetic construct
  misc_feature 1..20: note = chemically synthesized
  source 1..20: mol_type = other DNA
cccaaaaggtcaaagaaacc

SEQ ID NO: 43004 - DNA, 20 bp, synthetic construct
  misc_feature 1..20: note = chemically synthesized
  source 1..20: mol_type = other DNA
aaaggtcaaagaaaccagga

SEQ ID NO: 43005 - DNA, 20 bp, synthetic construct
  misc_feature 1..20: note = chemically synthesized
  source 1..20: mol_type = other DNA
tcaaagaaaccaggaaagta

SEQ ID NO: 43006 - DNA, 20 bp, synthetic construct
  misc_feature 1..20: note = chemically synthesized
  source 1..20: mol_type = other DNA
aggaaagtaaagctatattt

SEQ ID NO: 43007 - DNA, 20 bp, synthetic construct
  misc_feature 1..20: note = chemically synthesized
  source 1..20: mol_type = other DNA
aaagtaaagctatatttcag

SEQ ID NO: 43008 - DNA, 20 bp, synthetic construct
  misc_feature 1..20: note = chemically synthesized
  source 1..20: mol_type = other DNA
agctatatttcagcggaaaa

SEQ ID NO: 43009 - DNA, 20 bp, synthetic construct
  misc_feature 1..20: note = chemically synthesized
  source 1..20: mol_type = other DNA
gctatatttcagcggaaaat

SEQ ID NO: 43010 - DNA, 20 bp, synthetic construct
  misc_feature 1..20: note = chemically synthesized
  source 1..20: mol_type = other DNA
gcggaaaatgggatatttat

SEQ ID NO: 43011 - DNA, 20 bp, synthetic construct
  misc_feature 1..20: note = chemically synthesized
  source 1..20: mol_type = other DNA
gggatatttatgagttttct

SEQ ID NO: 43012 - DNA, 20 bp, synthetic construct
  misc_feature 1..20: note = chemically synthesized
  source 1..20: mol_type = other DNA
ttatgagttttctaagttga

SEQ ID NO: 43013 - DNA, 20 bp, synthetic construct
  misc_feature 1..20: note = chemically synthesized
  source 1..20: mol_type = other DNA
ttttctaagttgacagactc

SEQ ID NO: 43014 - DNA, 20 bp, synthetic construct
  misc_feature 1..20: note = chemically synthesized
  source 1..20: mol_type = other DNA
cagactcaagttttaacctt

SEQ ID NO: 43015 - DNA, 20 bp, synthetic construct
  misc_feature 1..20: note = chemically synthesized
  source 1..20: mol_type = other DNA
aaccttcagtgcccatcatg

SEQ ID NO: 43016 - DNA, 20 bp, synthetic construct
  misc_feature 1..20: note = chemically synthesized
  source 1..20: mol_type = other DNA
accttcagtgcccatcatgt

SEQ ID NO: 43017 - DNA, 20 bp, synthetic construct
  misc_feature 1..20: note = chemically synthesized
  source 1..20: mol_type = other DNA
tcagtgcccatcatgtagga

SEQ ID NO: 43018 - DNA, 20 bp, synthetic construct
  misc_feature 1..20: note = chemically synthesized
  source 1..20: mol_type = other DNA
gcccatcatgtaggaaagtg

SEQ ID NO: 43019 - DNA, 20 bp, synthetic construct
  misc_feature 1..20: note = chemically synthesized
  source 1..20: mol_type = other DNA
gtaggaaagtgtggcataac

SEQ ID NO: 43020 - DNA, 20 bp, synthetic construct
  misc_feature 1..20: note = chemically synthesized
  source 1..20: mol_type = other DNA
gtggcataactggctgattc

SEQ ID NO: 43021 - DNA, 20 bp, synthetic construct
  misc_feature 1..20: note = chemically synthesized
  source 1..20: mol_type = other DNA
tctactcctttttcccatta

SEQ ID NO: 43022 - DNA, 20 bp, synthetic construct
  misc_feature 1..20: note = chemically synthesized
  source 1..20: mol_type = other DNA
cctgcttaattaacattcac

SEQ ID NO: 43023 - DNA, 20 bp, synthetic construct
  misc_feature 1..20: note = chemically synthesized
  source 1..20: mol_type = other DNA
ttaacattcacaagtaactc

SEQ ID NO: 43024 - DNA, 20 bp, synthetic construct
  misc_feature 1..20: note = chemically synthesized
  source 1..20: mol_type = other DNA
aagtaactctggttgtactt

SEQ ID NO: 43025 - DNA, 20 bp, synthetic construct
  misc_feature 1..20: note = chemically synthesized
  source 1..20: mol_type = other DNA
agtaactctggttgtacttt

SEQ ID NO: 43026 - DNA, 20 bp, synthetic construct
  misc_feature 1..20: note = chemically synthesized
  source 1..20: mol_type = other DNA
ctctggttgtactttaggca

SEQ ID NO: 43027 - DNA, 20 bp, synthetic construct
  misc_feature 1..20: note = chemically synthesized
  source 1..20: mol_type = other DNA
tggttgtactttaggcacag

SEQ ID NO: 43028 - DNA, 20 bp, synthetic construct
  misc_feature 1..20: note = chemically synthesized
  source 1..20: mol_type = other DNA
ctttaggcacagtggctccc

SEQ ID NO: 43029 - DNA, 20 bp, synthetic construct
  misc_feature 1..20: note = chemically synthesized
  source 1..20: mol_type = other DNA
tttaggcacagtggctcccg

SEQ ID NO: 43030 - DNA, 20 bp, synthetic construct
  misc_feature 1..20: note = chemically synthesized
  source 1..20: mol_type = other DNA
ggcacagtggctcccgaggt

SEQ ID NO: 43031 - DNA, 20 bp, synthetic construct
  misc_feature 1..20: note = chemically synthesized
  source 1..20: mol_type = other DNA
tcccgaggtcagtcacacaa

SEQ ID NO: 43032 - DNA, 20 bp, synthetic construct
  misc_feature 1..20: note = chemically synthesized
  source 1..20: mol_type = other DNA
cccgaggtcagtcacacaat

SEQ ID NO: 43033 - DNA, 20 bp, synthetic construct
  misc_feature 1..20: note = chemically synthesized
  source 1..20: mol_type = other DNA
caataggatgtctgtgctcc

SEQ ID NO: 43034 - DNA, 20 bp, synthetic construct
  misc_feature 1..20: note = chemically synthesized
  source 1..20: mol_type = other DNA
atgtctgtgctccaagttgc

SEQ ID NO: 43035 - DNA, 20 bp, synthetic construct
  misc_feature 1..20: note = chemically synthesized
  source 1..20: mol_type = other DNA
gtctgtgctccaagttgcca

SEQ ID NO: 43036 - DNA, 20 bp, synthetic construct
  misc_feature 1..20: note = chemically synthesized
  source 1..20: mol_type = other DNA
ctgtgctccaagttgccaga

SEQ ID NO: 43037 - DNA, 20 bp, synthetic construct
  misc_feature 1..20: note = chemically synthesized
  source 1..20: mol_type = other DNA
gtgctccaagttgccagaga

SEQ ID NO: 43038 - DNA, 20 bp, synthetic construct
  misc_feature 1..20: note = chemically synthesized
  source 1..20: mol_type = other DNA
gctccaagttgccagagaga

SEQ ID NO: 43039 - DNA, 20 bp, synthetic construct
  misc_feature 1..20: note = chemically synthesized
  source 1..20: mol_type = other DNA
cagagagagagattactctt

SEQ ID NO: 43040 - DNA, 20 bp, synthetic construct
  misc_feature 1..20: note = chemically synthesized
  source 1..20: mol_type = other DNA
gagagattactcttgagaat

SEQ ID NO: 43041 - DNA, 20 bp, synthetic construct
  misc_feature 1..20: note = chemically synthesized
  source 1..20: mol_type = other DNA
ttactcttgagaatgagcct

SEQ ID NO: 43042 - DNA, 20 bp, synthetic construct
  misc_feature 1..20: note = chemically synthesized
  source 1..20: mol_type = other DNA
ttgagaatgagcctcagccc

SEQ ID NO: 43043 - DNA, 20 bp, synthetic construct
  misc_feature 1..20: note = chemically synthesized
  source 1..20: mol_type = other DNA
aactcacctgcaaacttcgt

SEQ ID NO: 43044 - DNA, 20 bp, synthetic construct
  misc_feature 1..20: note = chemically synthesized
  source 1..20: mol_type = other DNA
ctcacctgcaaacttcgtga

SEQ ID NO: 43045 - DNA, 20 bp, synthetic construct
  misc_feature 1..20: note = chemically synthesized
  source 1..20: mol_type = other DNA
ctgcaaacttcgtgagagat

SEQ ID NO: 43046 - DNA, 20 bp, synthetic construct
  misc_feature 1..20: note = chemically synthesized
  source 1..20: mol_type = other DNA
tgcaaacttcgtgagagatg

SEQ ID NO: 43047 - DNA, 20 bp, synthetic construct
  misc_feature 1..20: note = chemically synthesized
  source 1..20: mol_type = other DNA
aaacttcgtgagagatgagg

SEQ ID NO: 43048 - DNA, 20 bp, synthetic construct
  misc_feature 1..20: note = chemically synthesized
  source 1..20: mol_type = other DNA
acttcgtgagagatgaggca

SEQ ID NO: 43049 - DNA, 20 bp, synthetic construct
  misc_feature 1..20: note = chemically synthesized
  source 1..20: mol_type = other DNA
cttcgtgagagatgaggcag

SEQ ID NO: 43050 - DNA, 20 bp, synthetic construct
  misc_feature 1..20: note = chemically synthesized
  source 1..20: mol_type = other DNA
gaggcagaggtacactacga

SEQ ID NO: 43051 - DNA, 20 bp, synthetic construct
  misc_feature 1..20: note = chemically synthesized
  source 1..20: mol_type = other DNA
gaggtacactacgaaagcaa

SEQ ID NO: 43052 - DNA, 20 bp, synthetic construct
  misc_feature 1..20: note = chemically synthesized
  source 1..20: mol_type = other DNA
tacactacgaaagcaacagt

SEQ ID NO: 43053 - DNA, 20 bp, synthetic construct
  misc_feature 1..20: note = chemically synthesized
  source 1..20: mol_type = other DNA
actacgaaagcaacagttag

SEQ ID NO: 43054 - DNA, 20 bp, synthetic construct
  misc_feature 1..20: note = chemically synthesized
  source 1..20: mol_type = other DNA
acagttagaagctaaatgat

SEQ ID NO: 43055 - DNA, 20 bp, synthetic construct
  misc_feature 1..20: note = chemically synthesized
  source 1..20: mol_type = other DNA
agctaaatgatgagaacaca

SEQ ID NO: 43056 - DNA, 20 bp, synthetic construct
  misc_feature 1..20: note = chemically synthesized
  source 1..20: mol_type = other DNA
gatgagaacacatggactca

SEQ ID NO: 43057 - DNA, 20 bp, synthetic construct
  misc_feature 1..20: note = chemically synthesized
  source 1..20: mol_type = other DNA
tgagaacacatggactcata

SEQ ID NO: 43058 - DNA, 20 bp, synthetic construct
  misc_feature 1..20: note = chemically synthesized
  source 1..20: mol_type = other DNA
gagaacacatggactcatag

SEQ ID NO: 43059 - DNA, 20 bp, synthetic construct
  misc_feature 1..20: note = chemically synthesized
  source 1..20: mol_type = other DNA
agaacacatggactcataga

SEQ ID NO: 43060 - DNA, 20 bp, synthetic construct
  misc_feature 1..20: note = chemically synthesized
  source 1..20: mol_type = other DNA
tagagggaaacaacgcatac

SEQ ID NO: 43061 - DNA, 20 bp, synthetic construct
  misc_feature 1..20: note = chemically synthesized
  source 1..20: mol_type = other DNA
agagggaaacaacgcatact

SEQ ID NO: 43062 - DNA, 20 bp, synthetic construct
  misc_feature 1..20: note = chemically synthesized
  source 1..20: mol_type = other DNA
gagggaaacaacgcatactg

SEQ ID NO: 43063 - DNA, 20 bp, synthetic construct
  misc_feature 1..20: note = chemically synthesized
  source 1..20: mol_type = other DNA
caacgcatactggggcctat

SEQ ID NO: 43064 - DNA, 20 bp, synthetic construct
  misc_feature 1..20: note = chemically synthesized
  source 1..20: mol_type = other DNA
acgcatactggggcctatca

SEQ ID NO: 43065 - DNA, 20 bp, synthetic construct
  misc_feature 1..20: note = chemically synthesized
  source 1..20: mol_type = other DNA
cgcatactggggcctatcag

SEQ ID NO: 43066 - DNA, 20 bp, synthetic construct
  misc_feature 1..20: note = chemically synthesized
  source 1..20: mol_type = other DNA
gcatactggggcctatcaga

SEQ ID NO: 43067 - DNA, 20 bp, synthetic construct
  misc_feature 1..20: note = chemically synthesized
  source 1..20: mol_type = other DNA
tactggggcctatcagaggg

SEQ ID NO: 43068 - DNA, 20 bp, synthetic construct
  misc_feature 1..20: note = chemically synthesized
  source 1..20: mol_type = other DNA
ctggggcctatcagagggtg

SEQ ID NO: 43069 - DNA, 20 bp, synthetic construct
  misc_feature 1..20: note = chemically synthesized
  source 1..20: mol_type = other DNA
tggggcctatcagagggtgg

SEQ ID NO: 43070 - DNA, 20 bp, synthetic construct
  misc_feature 1..20: note = chemically synthesized
  source 1..20: mol_type = other DNA
ggggcctatcagagggtgga

SEQ ID NO: 43071 - DNA, 20 bp, synthetic construct
  misc_feature 1..20: note = chemically synthesized
  source 1..20: mol_type = other DNA
cctatcagagggtggagggt

SEQ ID NO: 43072 - DNA, 20 bp, synthetic construct
  misc_feature 1..20: note = chemically synthesized
  source 1..20: mol_type = other DNA
tatcagagggtggagggtga

SEQ ID NO: 43073 - DNA, 20 bp, synthetic construct
  misc_feature 1..20: note = chemically synthesized
  source 1..20: mol_type = other DNA
cagagggtggagggtgagag

SEQ ID NO: 43074 - DNA, 20 bp, synthetic construct
  misc_feature 1..20: note = chemically synthesized
  source 1..20: mol_type = other DNA
agagggtggagggtgagaga

SEQ ID NO: 43075 - DNA, 20 bp, synthetic construct
  misc_feature 1..20: note = chemically synthesized
  source 1..20: mol_type = other DNA
agggtggagggtgagagaag

SEQ ID NO: 43076 - DNA, 20 bp, synthetic construct
  misc_feature 1..20: note = chemically synthesized
  source 1..20: mol_type = other DNA
ggtggagggtgagagaagga

SEQ ID NO: 43077 - DNA, 20 bp, synthetic construct
  misc_feature 1..20: note = chemically synthesized
  source 1..20: mol_type = other DNA
gtggagggtgagagaaggag

SEQ ID NO: 43078 - DNA, 20 bp, synthetic construct
  misc_feature 1..20: note = chemically synthesized
  source 1..20: mol_type = other DNA
gggtgagagaaggagaggat

SEQ ID NO: 43079 - DNA, 20 bp, synthetic construct
  misc_feature 1..20: note = chemically synthesized
  source 1..20: mol_type = other DNA
ggtgagagaaggagaggatc

SEQ ID NO: 43080 - DNA, 20 bp, synthetic construct
  misc_feature 1..20: note = chemically synthesized
  source 1..20: mol_type = other DNA
ggatcaggaaaaatcactaa

SEQ ID NO: 43081 - DNA, 20 bp, synthetic construct
  misc_feature 1..20: note = chemically synthesized
  source 1..20: mol_type = other DNA
aaaaatcactaatggatgct

SEQ ID NO: 43082 - DNA, 20 bp, synthetic construct
  misc_feature 1..20: note = chemically synthesized
  source 1..20: mol_type = other DNA
ggatgctaagcgtaatacct

SEQ ID NO: 43083 - DNA, 20 bp, synthetic construct
  misc_feature 1..20: note = chemically synthesized
  source 1..20: mol_type = other DNA
aagcgtaatacctgagtgat

SEQ ID NO: 43084 - DNA, 20 bp, synthetic construct
  misc_feature 1..20: note = chemically synthesized
  source 1..20: mol_type = other DNA
tacccctgaacttaaaataa

SEQ ID NO: 43085 - DNA, 20 bp, synthetic construct
  misc_feature 1..20: note = chemically synthesized
  source 1..20: mol_type = other DNA
ttaaaataaaagttgaaaac

SEQ ID NO: 43086 - DNA, 20 bp, synthetic construct
  misc_feature 1..20: note = chemically synthesized
  source 1..20: mol_type = other DNA
aataaaagttgaaaacaaga

SEQ ID NO: 43087 - DNA, 20 bp, synthetic construct
  misc_feature 1..20: note = chemically synthesized
  source 1..20: mol_type = other DNA
agttgaaaacaagaaagcaa

SEQ ID NO: 43088 - DNA, 20 bp, synthetic construct
  misc_feature 1..20: note = chemically synthesized
  source 1..20: mol_type = other DNA
aacagtttgaacacttgtta

SEQ ID NO: 43089 - DNA, 20 bp, synthetic construct
  misc_feature 1..20: note = chemically synthesized
  source 1..20: mol_type = other DNA
ctcattctttacaattacac

SEQ ID NO: 43090 - DNA, 20 bp, synthetic construct
  misc_feature 1..20: note = chemically synthesized
  source 1..20: mol_type = other DNA
tttacaattacactagaaaa

SEQ ID NO: 43091 - DNA, 20 bp, synthetic construct
  misc_feature 1..20: note = chemically synthesized
  source 1..20: mol_type = other DNA
attacactagaaaatagcca

SEQ ID NO: 43092 - DNA, 20 bp, synthetic construct
  misc_feature 1..20: note = chemically synthesized
  source 1..20: mol_type = other DNA
ttacactagaaaatagccac

SEQ ID NO: 43093 - DNA, 20 bp, synthetic construct
  misc_feature 1..20: note = chemically synthesized
  source 1..20: mol_type = other DNA
aatagccacaggcttcctgc

SEQ ID NO: 43094 - DNA, 20 bp, synthetic construct
  misc_feature 1..20: note = chemically synthesized
  source 1..20: mol_type = other DNA
atagccacaggcttcctgca

SEQ ID NO: 43095 - DNA, 20 bp, synthetic construct
  misc_feature 1..20: note = chemically synthesized
  source 1..20: mol_type = other DNA
gccacaggcttcctgcaagg

SEQ ID NO: 43096 - DNA, 20 bp, synthetic construct
  misc_feature 1..20: note = chemically synthesized
  source 1..20: mol_type = other DNA
ggcttcctgcaaggcagcca

SEQ ID NO: 43097 - DNA, 20 bp, synthetic construct
  misc_feature 1..20: note = chemically synthesized
  source 1..20: mol_type = other DNA
atttatgacttgtgatatcc

SEQ ID NO: 43098 - DNA, 20 bp, synthetic construct
  misc_feature 1..20: note = chemically synthesized
  source 1..20: mol_type = other DNA
tgtgatatccaagtcattcc

SEQ ID NO: 43099 - DNA, 20 bp, synthetic construct
  misc_feature 1..20: note = chemically synthesized
  source 1..20: mol_type = other DNA
gcaaaatctaacacaaaatc

SEQ ID NO: 43100 - DNA, 20 bp, synthetic construct
  misc_feature 1..20: note = chemically synthesized
  source 1..20: mol_type = other DNA
aaatctaacacaaaatctag

SEQ ID NO: 43101 - DNA, 20 bp, synthetic construct
  misc_feature 1..20: note = chemically synthesized
  source 1..20: mol_type = other DNA
cttacatctatttttgttct

SEQ ID NO: 43102 - DNA, 20 bp, synthetic construct
  misc_feature 1..20: note = chemically synthesized
  source 1..20: mol_type = other DNA
ctatttttgttctgagaata

SEQ ID NO: 43103 - DNA, 20 bp, synthetic construct
  misc_feature 1..20: note = chemically synthesized
  source 1..20: mol_type = other DNA
ttgttctgagaatatagatt

SEQ ID NO: 43104 - DNA, 20 bp, synthetic construct
  misc_feature 1..20: note = chemically synthesized
  source 1..20: mol_type = other DNA
atatagatttagatacataa

SEQ ID NO: 43105 - DNA, 20 bp, synthetic construct
  misc_feature 1..20: note = chemically synthesized
  source 1..20: mol_type = other DNA
tagatttagatacataatgg

SEQ ID NO: 43106 - DNA, 20 bp, synthetic construct
  misc_feature 1..20: note = chemically synthesized
  source 1..20: mol_type = other DNA
atttagatacataatggaag

SEQ ID NO: 43107 - DNA, 20 bp, synthetic construct
  misc_feature 1..20: note = chemically synthesized
  source 1..20: mol_type = other DNA
aagcagaataatttaaaatc

SEQ ID NO: 43108 - DNA, 20 bp, synthetic construct
  misc_feature 1..20: note = chemically synthesized
  source 1..20: mol_type = other DNA
aatttaaaatctggctaatt

SEQ ID NO: 43109 - DNA, 20 bp, synthetic construct
  misc_feature 1..20: note = chemically synthesized
  source 1..20: mol_type = other DNA
tctggctaatttagaatcct

SEQ ID NO: 43110 - DNA, 20 bp, synthetic construct
  misc_feature 1..20: note = chemically synthesized
  source 1..20: mol_type = other DNA
ggctaatttagaatcctaag

SEQ ID NO: 43111 - DNA, 20 bp, synthetic construct
  misc_feature 1..20: note = chemically synthesized
  source 1..20: mol_type = other DNA
ctaagcagctcttttcctat

SEQ ID NO: 43112 - DNA, 20 bp, synthetic construct
  misc_feature 1..20: note = chemically synthesized
  source 1..20: mol_type = other DNA
agcagctcttttcctatcag

SEQ ID NO: 43113 - DNA, 20 bp, synthetic construct
  misc_feature 1..20: note = chemically synthesized
  source 1..20: mol_type = other DNA
ttttcctatcagtggtttac

SEQ ID NO: 43114 - DNA, 20 bp, synthetic construct
  misc_feature 1..20: note = chemically synthesized
  source 1..20: mol_type = other DNA
ctattttaaaaataaaaata

SEQ ID NO: 43115 - DNA, 20 bp, synthetic construct
  misc_feature 1..20: note = chemically synthesized
  source 1..20: mol_type = other DNA
tttaaaaataaaaataaagt

SEQ ID NO: 43116 - DNA, 20 bp, synthetic construct
  misc_feature 1..20: note = chemically synthesized
  source 1..20: mol_type = other DNA
aaaataaagtaagttatttg

SEQ ID NO: 43117 - DNA, 20 bp, synthetic construct
  misc_feature 1..20: note = chemically synthesized
  source 1..20: mol_type = other DNA
aaagtaagttatttgtggta

SEQ ID NO: 43118 - DNA, 20 bp, synthetic construct
  misc_feature 1..20: note = chemically synthesized
  source 1..20: mol_type = other DNA
gtggtaaagaatattcatta

SEQ ID NO: 43119 - DNA, 20 bp, synthetic construct
  misc_feature 1..20: note = chemically synthesized
  source 1..20: mol_type = other DNA
tcattaaagtatttatttct

SEQ ID NO: 43120 - DNA, 20 bp, synthetic construct
  misc_feature 1..20: note = chemically synthesized
  source 1..20: mol_type = other DNA
ataataccatgaaaaacatt

SEQ ID NO: 43121 - DNA, 20 bp, synthetic construct
  misc_feature 1..20: note = chemically synthesized
  source 1..20: mol_type = other DNA
accatgaaaaacattcagtg

SEQ ID NO: 43122 - DNA, 20 bp, synthetic construct
  misc_feature 1..20: note = chemically synthesized
  source 1..20: mol_type = other DNA
gaaaaacattcagtgaagtg

SEQ ID NO: 43123 - DNA, 20 bp, synthetic construct
  misc_feature 1..20: note = chemically synthesized
  source 1..20: mol_type = other DNA
aaaaacattcagtgaagtga

SEQ ID NO: 43124 - DNA, 20 bp, synthetic construct
  misc_feature 1..20: note = chemically synthesized
  source 1..20: mol_type = other DNA
aaaacattcagtgaagtgaa

SEQ ID NO: 43125 - DNA, 20 bp, synthetic construct
  misc_feature 1..20: note = chemically synthesized
  source 1..20: mol_type = other DNA
aagggcctactttacttaac

SEQ ID NO: 43126 - DNA, 20 bp, synthetic construct
  misc_feature 1..20: note = chemically synthesized
  source 1..20: mol_type = other DNA
tatataatttttcatactaa

SEQ ID NO: 43127 - DNA, 20 bp, synthetic construct
  misc_feature 1..20: note = chemically synthesized
  source 1..20: mol_type = other DNA
ttttcatactaatagcatct

SEQ ID NO: 43128 - DNA, 20 bp, synthetic construct
  misc_feature 1..20: note = chemically synthesized
  source 1..20: mol_type = other DNA
atactaatagcatctaagaa

SEQ ID NO: 43129 - DNA, 20 bp, synthetic construct
  misc_feature 1..20: note = chemically synthesized
  source 1..20: mol_type = other DNA
cagtacaatatttgactctt

SEQ ID NO: 43130 - DNA, 20 bp, synthetic construct
  misc_feature 1..20: note = chemically synthesized
  source 1..20: mol_type = other DNA
agtacaatatttgactcttc

SEQ ID NO: 43131 - DNA, 20 bp, synthetic construct
  misc_feature 1..20: note = chemically synthesized
  source 1..20: mol_type = other DNA
gttaaacatatgtcataaat

SEQ ID NO: 43132 - DNA, 20 bp, synthetic construct
  misc_feature 1..20: note = chemically synthesized
  source 1..20: mol_type = other DNA
aacatatgtcataaattagc

SEQ ID NO: 43133 - DNA, 20 bp, synthetic construct
  misc_feature 1..20: note = chemically synthesized
  source 1..20: mol_type = other DNA
tatgtcataaattagccaga

SEQ ID NO: 43134 - DNA, 20 bp, synthetic construct
  misc_feature 1..20: note = chemically synthesized
  source 1..20: mol_type = other DNA
taaattagccagaaagattt

SEQ ID NO: 43135 - DNA, 20 bp, synthetic construct
  misc_feature 1..20: note = chemically synthesized
  source 1..20: mol_type = other DNA
agaaagatttaagaaaatat

SEQ ID NO: 43136 - DNA, 20 bp, synthetic construct
  misc_feature 1..20: note = chemically synthesized
  source 1..20: mol_type = other DNA
ggatgtttccttgtttaaat

SEQ ID NO: 43137 - DNA, 20 bp, synthetic construct
  misc_feature 1..20: note = chemically synthesized
  source 1..20: mol_type = other DNA
gatgtttccttgtttaaatt

SEQ ID NO: 43138 - DNA, 20 bp, synthetic construct
  misc_feature 1..20: note = chemically synthesized
  source 1..20: mol_type = other DNA
tgtttaaattaggcatctta

SEQ ID NO: 43139 - DNA, 20 bp, synthetic construct
  misc_feature 1..20: note = chemically synthesized
  source 1..20: mol_type = other DNA
attaggcatcttacagtttt

SEQ ID NO: 43140 - DNA, 20 bp, synthetic construct
  misc_feature 1..20: note = chemically synthesized
  source 1..20: mol_type = other DNA
acagtttttagaatcctgca

SEQ ID NO: 43141 - DNA, 20 bp, synthetic construct
  misc_feature 1..20: note = chemically synthesized
  source 1..20: mol_type = other DNA
tagaatcctgcatagaactt

SEQ ID NO: 43142 - DNA, 20 bp, synthetic construct
  misc_feature 1..20: note = chemically synthesized
  source 1..20: mol_type = other DNA
ttaagaaattacaaatgcta

SEQ ID NO: 43143 - DNA, 20 bp, synthetic construct
  misc_feature 1..20: note = chemically synthesized
  source 1..20: mol_type = other DNA
aatgctaaagcaaacccaaa

SEQ ID NO: 43144 - DNA, 20 bp, synthetic construct
  misc_feature 1..20: note = chemically synthesized
  source 1..20: mol_type = other DNA
atgctaaagcaaacccaaac

SEQ ID NO: 43145 - DNA, 20 bp, synthetic construct
  misc_feature 1..20: note = chemically synthesized
  source 1..20: mol_type = other DNA
ctaaagcaaacccaaacagg

SEQ ID NO: 43146 - DNA, 20 bp, synthetic construct
  misc_feature 1..20: note = chemically synthesized
  source 1..20: mol_type = other DNA
taaagcaaacccaaacaggc

SEQ ID NO: 43147 - DNA, 20 bp, synthetic construct
  misc_feature 1..20: note = chemically synthesized
  source 1..20: mol_type = other DNA
gaattaatcttcatcgaatt

SEQ ID NO: 43148 - DNA, 20 bp, synthetic construct
  misc_feature 1..20: note = chemically synthesized
  source 1..20: mol_type = other DNA
aattaatcttcatcgaattt

SEQ ID NO: 43149 - DNA, 20 bp, synthetic construct
  misc_feature 1..20: note = chemically synthesized
  source 1..20: mol_type = other DNA
atttgggtgtttctttctaa

SEQ ID NO: 43150 - DNA, 20 bp, synthetic construct
  misc_feature 1..20: note = chemically synthesized
  source 1..20: mol_type = other DNA
cctttatacttaaatgtctt

SEQ ID NO: 43151 - DNA, 20 bp, synthetic construct
  misc_feature 1..20: note = chemically synthesized
  source 1..20: mol_type = other DNA
taaatgtcttaagacataca

SEQ ID NO: 43152 - DNA, 20 bp, synthetic construct
  misc_feature 1..20: note = chemically synthesized
  source 1..20: mol_type = other DNA
ttttactaattttaattata

SEQ ID NO: 43153 - DNA, 20 bp, synthetic construct
  misc_feature 1..20: note = chemically synthesized
  source 1..20: mol_type = other DNA
ctaatctttctgatctatcc

SEQ ID NO: 43154 - DNA, 20 bp, synthetic construct
  misc_feature 1..20: note = chemically synthesized
  source 1..20: mol_type = other DNA
tctttctgatctatcctgga

SEQ ID NO: 43155 - DNA, 20 bp, synthetic construct
  misc_feature 1..20: note = chemically synthesized
  source 1..20: mol_type = other DNA
acacttatctctctgaactt

SEQ ID NO: 43156 - DNA, 20 bp, synthetic construct
  misc_feature 1..20: note = chemically synthesized
  source 1..20: mol_type = other DNA
cacttatctctctgaacttt

SEQ ID NO: 43157 - DNA, 20 bp, synthetic construct
  misc_feature 1..20: note = chemically synthesized
  source 1..20: mol_type = other DNA
tgaactttgggcttttaata

SEQ ID NO: 43158 - DNA, 20 bp, synthetic construct
  misc_feature 1..20: note = chemically synthesized
  source 1..20: mol_type = other DNA
gaactttgggcttttaatat

SEQ ID NO: 43159 - DNA, 20 bp, synthetic construct
  misc_feature 1..20: note = chemically synthesized
  source 1..20: mol_type = other DNA
tttgggcttttaatatagga

SEQ ID NO: 43160 - DNA, 20 bp, synthetic construct
  misc_feature 1..20: note = chemically synthesized
  source 1..20: mol_type = other DNA
gcttttaatataggaaagaa

SEQ ID NO: 43161 - DNA, 20 bp, synthetic construct
  misc_feature 1..20: note = chemically synthesized
  source 1..20: mol_type = other DNA
aagcaataatccatttttca

SEQ ID NO: 43162 - DNA, 20 bp, synthetic construct
  misc_feature 1..20: note = chemically synthesized
  source 1..20: mol_type = other DNA
caaataaaatgcttaaaaat

SEQ ID NO: 43163 - DNA, 20 bp, synthetic construct
  misc_feature 1..20: note = chemically synthesized
  source 1..20: mol_type = other DNA
ataaaatgcttaaaaatgag

SEQ ID NO: 43164 - DNA, 20 bp, synthetic construct
  misc_feature 1..20: note = chemically synthesized
  source 1..20: mol_type = other DNA
taaaatgcttaaaaatgagc

SEQ ID NO: 43165 - DNA, 20 bp, synthetic construct
  misc_feature 1..20: note = chemically synthesized
  source 1..20: mol_type = other DNA
tgcttaaaaatgagcaggtg

SEQ ID NO: 43166 - DNA, 20 bp, synthetic construct
  misc_feature 1..20: note = chemically synthesized
  source 1..20: mol_type = other DNA
gcaatttatcttgaaccaac

SEQ ID NO: 43167 - DNA, 20 bp, synthetic construct
  misc_feature 1..20: note = chemically synthesized
  source 1..20: mol_type = other DNA
tcttgaaccaacaagcatcg

SEQ ID NO: 43168 - DNA, 20 bp, synthetic construct
  misc_feature 1..20: note = chemically synthesized
  source 1..20: mol_type = other DNA
acaagcatcgaagcaataat

SEQ ID NO: 43169 - DNA, 20 bp, synthetic construct
  misc_feature 1..20: note = chemically synthesized
  source 1..20: mol_type = other DNA
agcaataatgagactgcccg

SEQ ID NO: 43170 - DNA, 20 bp, synthetic construct
  misc_feature 1..20: note = chemically synthesized
  source 1..20: mol_type = other DNA
ccgcagcctacctgacttct

SEQ ID NO: 43171 - DNA, 20 bp, synthetic construct
  misc_feature 1..20: note = chemically synthesized
  source 1..20: mol_type = other DNA
agcctacctgacttctgagt

SEQ ID NO: 43172 - DNA, 20 bp, synthetic construct
  misc_feature 1..20: note = chemically synthesized
  source 1..20: mol_type = other DNA
gcctacctgacttctgagtc

SEQ ID NO: 43173 - DNA, 20 bp, synthetic construct
  misc_feature 1..20: note = chemically synthesized
  source 1..20: mol_type = other DNA
acttctgagtcaggatttat

SEQ ID NO: 43174 - DNA, 20 bp, synthetic construct
  misc_feature 1..20: note = chemically synthesized
  source 1..20: mol_type = other DNA
gatttataagccttgttact

SEQ ID NO: 43175 - DNA, 20 bp, synthetic construct
  misc_feature 1..20: note = chemically synthesized
  source 1..20: mol_type = other DNA
ttgttactgagacacaaacc

SEQ ID NO: 43176 - DNA, 20 bp, synthetic construct
  misc_feature 1..20: note = chemically synthesized
  source 1..20: mol_type = other DNA
tgttactgagacacaaacct

SEQ ID NO: 43177 - DNA, 20 bp, synthetic construct
  misc_feature 1..20: note = chemically synthesized
  source 1..20: mol_type = other DNA
caatgctataacctttcttg

SEQ ID NO: 43178 - DNA, 20 bp, synthetic construct
  misc_feature 1..20: note = chemically synthesized
  source 1..20: mol_type = other DNA
aagctcctccctaccacctt

SEQ ID NO: 43179 - DNA, 20 bp, synthetic construct
  misc_feature 1..20: note = chemically synthesized
  source 1..20: mol_type = other DNA
tccctaccacctttagccat

SEQ ID NO: 43180 - DNA, 20 bp, synthetic construct
  misc_feature 1..20: note = chemically synthesized
  source 1..20: mol_type = other DNA
ccctaccacctttagccata

SEQ ID NO: 43181 - DNA, 20 bp, synthetic construct
  misc_feature 1..20: note = chemically synthesized
  source 1..20: mol_type = other DNA
cctttagccataaggaaaca

SEQ ID NO: 43182 - DNA, 20 bp, synthetic construct
  misc_feature 1..20: note = chemically synthesized
  source 1..20: mol_type = other DNA
agccataaggaaacatggaa

SEQ ID NO: 43183 - DNA, 20 bp, synthetic construct
  misc_feature 1..20: note = chemically synthesized
  source 1..20: mol_type = other DNA
gccataaggaaacatggaat

SEQ ID NO: 43184 - DNA, 20 bp, synthetic construct
  misc_feature 1..20: note = chemically synthesized
  source 1..20: mol_type = other DNA
taaggaaacatggaatgggt

SEQ ID NO: 43185 - DNA, 20 bp, synthetic construct
  misc_feature 1..20: note = chemically synthesized
  source 1..20: mol_type = other DNA
catggaatgggtcagatccc

SEQ ID NO: 43186 - DNA, 20 bp, synthetic construct
  misc_feature 1..20: note = chemically synthesized
  source 1..20: mol_type = other DNA
tgggtcagatccctggatgc

SEQ ID NO: 43187 - DNA, 20 bp, synthetic construct
  misc_feature 1..20: note = chemically synthesized
  source 1..20: mol_type = other DNA
tcagatccctggatgcaagc

SEQ ID NO: 43188 - DNA, 20 bp, synthetic construct
  misc_feature 1..20: note = chemically synthesized
  source 1..20: mol_type = other DNA
cagatccctggatgcaagcc

SEQ ID NO: 43189 - DNA, 20 bp, synthetic construct
  misc_feature 1..20: note = chemically synthesized
  source 1..20: mol_type = other DNA
ccctggatgcaagccaggtc

SEQ ID NO: 43190 - DNA, 20 bp, synthetic construct
  misc_feature 1..20: note = chemically synthesized
  source 1..20: mol_type = other DNA
gcaagccaggtctggaacca

SEQ ID NO: 43191 - DNA, 20 bp, synthetic construct
  misc_feature 1..20: note = chemically synthesized
  source 1..20: mol_type = other DNA
caagccaggtctggaaccat

SEQ ID NO: 43192 - DNA, 20 bp, synthetic construct
  misc_feature 1..20: note = chemically synthesized
  source 1..20: mol_type = other DNA
gccaggtctggaaccatagg

SEQ ID NO: 43193 - DNA, 20 bp, synthetic construct
  misc_feature 1..20: note = chemically synthesized
  source 1..20: mol_type = other DNA
ggtctggaaccataggcagt

SEQ ID NO: 43194 - DNA, 20 bp, synthetic construct
  misc_feature 1..20: note = chemically synthesized
  source 1..20: mol_type = other DNA
gtctggaaccataggcagta

SEQ ID NO: 43195 - DNA, 20 bp, synthetic construct
  misc_feature 1..20: note = chemically synthesized
  source 1..20: mol_type = other DNA
ctggaaccataggcagtaag

SEQ ID NO: 43196 - DNA, 20 bp, synthetic construct
  misc_feature 1..20: note = chemically synthesized
  source 1..20: mol_type = other DNA
ggaaccataggcagtaagga

SEQ ID NO: 43197 - DNA, 20 bp, synthetic construct
  misc_feature 1..20: note = chemically synthesized
  source 1..20: mol_type = other DNA
accataggcagtaaggagag

SEQ ID NO: 43198 - DNA, 20 bp, synthetic construct
  misc_feature 1..20: note = chemically synthesized
  source 1..20: mol_type = other DNA
agtaaggagagaagaaaatg

SEQ ID NO: 43199 - DNA, 20 bp, synthetic construct
  misc_feature 1..20: note = chemically synthesized
  source 1..20: mol_type = other DNA
gtaaggagagaagaaaatgt

SEQ ID NO: 43200 - DNA, 20 bp, synthetic construct
  misc_feature 1..20: note = chemically synthesized
  source 1..20: mol_type = other DNA
gaaaatgtgggctctgcaac

SEQ ID NO: 43201 - DNA, 20 bp, synthetic construct
  misc_feature 1..20: note = chemically synthesized
  source 1..20: mol_type = other DNA
tgggctctgcaactggctcc

SEQ ID NO: 43202 - DNA, 20 bp, synthetic construct
  misc_feature 1..20: note = chemically synthesized
  source 1..20: mol_type = other DNA
gggctctgcaactggctccg

SEQ ID NO: 43203 - DNA, 20 bp, synthetic construct
  misc_feature 1..20: note = chemically synthesized
  source 1..20: mol_type = other DNA
ggctctgcaactggctccga

SEQ ID NO: 43204 - DNA, 20 bp, synthetic construct
  misc_feature 1..20: note = chemically synthesized
  source 1..20: mol_type = other DNA
ctctgcaactggctccgagg

SEQ ID NO: 43205 - DNA, 20 bp, synthetic construct
  misc_feature 1..20: note = chemically synthesized
  source 1..20: mol_type = other DNA
tgcaactggctccgagggag

SEQ ID NO: 43206 - DNA, 20 bp, synthetic construct
  misc_feature 1..20: note = chemically synthesized
  source 1..20: mol_type = other DNA
gcaactggctccgagggagc

SEQ ID NO: 43207 - DNA, 20 bp, synthetic construct
  misc_feature 1..20: note = chemically synthesized
  source 1..20: mol_type = other DNA
aactggctccgagggagcag

SEQ ID NO: 43208 - DNA, 20 bp, synthetic construct
  misc_feature 1..20: note = chemically synthesized
  source 1..20: mol_type = other DNA
ctggctccgagggagcagga

SEQ ID NO: 43209 - DNA, 20 bp, synthetic construct
  misc_feature 1..20: note = chemically synthesized
  source 1..20: mol_type = other DNA
tggctccgagggagcaggag

SEQ ID NO: 43210 - DNA, 20 bp, synthetic construct
  misc_feature 1..20: note = chemically synthesized
  source 1..20: mol_type = other DNA
caaccccatactctgaatct

SEQ ID NO: 43211 - DNA, 20 bp, synthetic construct
  misc_feature 1..20: note = chemically synthesized
  source 1..20: mol_type = other DNA
accccatactctgaatctaa

SEQ ID NO: 43212 - DNA, 20 bp, synthetic construct
  misc_feature 1..20: note = chemically synthesized
  source 1..20: mol_type = other DNA
ccatactctgaatctaagag

SEQ ID NO: 43213 - DNA, 20 bp, synthetic construct
  misc_feature 1..20: note = chemically synthesized
  source 1..20: mol_type = other DNA
ctctgaatctaagagaagac

SEQ ID NO: 43214 - DNA, 20 bp, synthetic construct
  misc_feature 1..20: note = chemically synthesized
  source 1..20: mol_type = other DNA
actggtgtccatactctgaa

SEQ ID NO: 43215 - DNA, 20 bp, synthetic construct
  misc_feature 1..20: note = chemically synthesized
  source 1..20: mol_type = other DNA
ctggtgtccatactctgaat

SEQ ID NO: 43216 - DNA, 20 bp, synthetic construct
  misc_feature 1..20: note = chemically synthesized
  source 1..20: mol_type = other DNA
gtgtccatactctgaatggg

SEQ ID NO: 43217 - DNA, 20 bp, synthetic construct
  misc_feature 1..20: note = chemically synthesized
  source 1..20: mol_type = other DNA
actctgaatgggaagaatga

SEQ ID NO: 43218 - DNA, 20 bp, synthetic construct
  misc_feature 1..20: note = chemically synthesized
  source 1..20: mol_type = other DNA
ctctgaatgggaagaatgat

SEQ ID NO: 43219 - DNA, 20 bp, synthetic construct
  misc_feature 1..20: note = chemically synthesized
  source 1..20: mol_type = other DNA
aagaatgatgggattaccca

SEQ ID NO: 43220 - DNA, 20 bp, synthetic construct
  misc_feature 1..20: note = chemically synthesized
  source 1..20: mol_type = other DNA
agaatgatgggattacccat

SEQ ID NO: 43221 - DNA, 20 bp, synthetic construct
  misc_feature 1..20: note = chemically synthesized
  source 1..20: mol_type = other DNA
gaatgatgggattacccata

SEQ ID NO: 43222 - DNA, 20 bp, synthetic construct
  misc_feature 1..20: note = chemically synthesized
  source 1..20: mol_type = other DNA
attacccatagggcttgttt

SEQ ID NO: 43223 - DNA, 20 bp, synthetic construct
  misc_feature 1..20: note = chemically synthesized
  source 1..20: mol_type = other DNA
ttacccatagggcttgtttt

SEQ ID NO: 43224 - DNA, 20 bp, synthetic construct
  misc_feature 1..20: note = chemically synthesized
  source 1..20: mol_type = other DNA
tacccatagggcttgtttta

SEQ ID NO: 43225 - DNA, 20 bp, synthetic construct
  misc_feature 1..20: note = chemically synthesized
  source 1..20: mol_type = other DNA
cccatagggcttgttttagg

SEQ ID NO: 43226 - DNA, 20 bp, synthetic construct
  misc_feature 1..20: note = chemically synthesized
  source 1..20: mol_type = other DNA
aaacctgttctccaaactct

SEQ ID NO: 43227 - DNA, 20 bp, synthetic construct
  misc_feature 1..20: note = chemically synthesized
  source 1..20: mol_type = other DNA
ttctccaaactcttggcctt

SEQ ID NO: 43228 - DNA, 20 bp, synthetic construct
  misc_feature 1..20: note = chemically synthesized
  source 1..20: mol_type = other DNA
actcttggccttgagatacc

SEQ ID NO: 43229 - DNA, 20 bp, synthetic construct
  misc_feature 1..20: note = chemically synthesized
  source 1..20: mol_type = other DNA
gatacctggtccttattcct

SEQ ID NO: 43230 - DNA, 20 bp, synthetic construct
  misc_feature 1..20: note = chemically synthesized
  source 1..20: mol_type = other DNA
ggtccttattccttggactt

SEQ ID NO: 43231 - DNA, 20 bp, synthetic construct
  misc_feature 1..20: note = chemically synthesized
  source 1..20: mol_type = other DNA
aatgtctgaccctcacattc

SEQ ID NO: 43232 - DNA, 20 bp, synthetic construct
  misc_feature 1..20: note = chemically synthesized
  source 1..20: mol_type = other DNA
gaccctcacattcaagttct

SEQ ID NO: 43233 - DNA, 20 bp, synthetic construct
  misc_feature 1..20: note = chemically synthesized
  source 1..20: mol_type = other DNA
accctcacattcaagttctg

SEQ ID NO: 43234 - DNA, 20 bp, synthetic construct
  misc_feature 1..20: note = chemically synthesized
  source 1..20: mol_type = other DNA
ctcacattcaagttctgagg

SEQ ID NO: 43235 - DNA, 20 bp, synthetic construct
  misc_feature 1..20: note = chemically synthesized
  source 1..20: mol_type = other DNA
tcacattcaagttctgagga

SEQ ID NO: 43236 - DNA, 20 bp, synthetic construct
  misc_feature 1..20: note = chemically synthesized
  source 1..20: mol_type = other DNA
cacattcaagttctgaggaa

SEQ ID NO: 43237 - DNA, 20 bp, synthetic construct
  misc_feature 1..20: note = chemically synthesized
  source 1..20: mol_type = other DNA
gggccactgccttcatactg

SEQ ID NO: 43238 - DNA, 20 bp, synthetic construct
  misc_feature 1..20: note = chemically synthesized
  source 1..20: mol_type = other DNA
gccttcatactgtggatctg

SEQ ID NO: 43239 - DNA, 20 bp, synthetic construct
  misc_feature 1..20: note = chemically synthesized
  source 1..20: mol_type = other DNA
gcaaattccccctgaaaacc

SEQ ID NO: 43240 - DNA, 20 bp, synthetic construct
  misc_feature 1..20: note = chemically synthesized
  source 1..20: mol_type = other DNA
aaattccccctgaaaaccca

SEQ ID NO: 43241 - DNA, 20 bp, synthetic construct
  misc_feature 1..20: note = chemically synthesized
  source 1..20: mol_type = other DNA
acccagagctgtatcttaat

SEQ ID NO: 43242 - DNA, 20 bp, synthetic construct
  misc_feature 1..20: note = chemically synthesized
  source 1..20: mol_type = other DNA
ctcaacgactgttcttctct

SEQ ID NO: 43243 - DNA, 20 bp, synthetic construct
  misc_feature 1..20: note = chemically synthesized
  source 1..20: mol_type = other DNA
aacgactgttcttctctgag

SEQ ID NO: 43244 - DNA, 20 bp, synthetic construct
  misc_feature 1..20: note = chemically synthesized
  source 1..20: mol_type = other DNA
ctgttcttctctgagtagcc

SEQ ID NO: 43245 - DNA, 20 bp, synthetic construct
  misc_feature 1..20: note = chemically synthesized
  source 1..20: mol_type = other DNA
cttctctgagtagccaagct

SEQ ID NO: 43246 - DNA, 20 bp, synthetic construct
  misc_feature 1..20: note = chemically synthesized
  source 1..20: mol_type = other DNA
ctgagtagccaagctcagct

SEQ ID NO: 43247 - DNA, 20 bp, synthetic construct
  misc_feature 1..20: note = chemically synthesized
  source 1..20: mol_type = other DNA
agccaagctcagcttggttc

SEQ ID NO: 43248 - DNA, 20 bp, synthetic construct
  misc_feature 1..20: note = chemically synthesized
  source 1..20: mol_type = other DNA
ctcagcttggttcaagctac

SEQ ID NO: 43249 - DNA, 20 bp, synthetic construct
  misc_feature 1..20: note = chemically synthesized
  source 1..20: mol_type = other DNA
agcttggttcaagctacaag

SEQ ID NO: 43250 - DNA, 20 bp, synthetic construct
  misc_feature 1..20: note = chemically synthesized
  source 1..20: mol_type = other DNA
ggttcaagctacaagcagct

SEQ ID NO: 43251 - DNA, 20 bp, synthetic construct
  misc_feature 1..20: note = chemically synthesized
  source 1..20: mol_type = other DNA
cagctgagctgctttttgtc

SEQ ID NO: 43252 - DNA, 20 bp, synthetic construct
  misc_feature 1..20: note = chemically synthesized
  source 1..20: mol_type = other DNA
tagtcattgttcttttattt

SEQ ID NO: 43253 - DNA, 20 bp, synthetic construct
  misc_feature 1..20: note = chemically synthesized
  source 1..20: mol_type = other DNA
tcattgttcttttatttcag

SEQ ID NO: 43254 - DNA, 20 bp, synthetic construct
  misc_feature 1..20: note = chemically synthesized
  source 1..20: mol_type = other DNA
aaatacgttctttccaaacc

SEQ ID NO: 43255 - DNA, 20 bp, synthetic construct
  misc_feature 1..20: note = chemically synthesized
  source 1..20: mol_type = other DNA
aatacgttctttccaaacct

SEQ ID NO: 43256 - DNA, 20 bp, synthetic construct
  misc_feature 1..20: note = chemically synthesized
  source 1..20: mol_type = other DNA
aacctaggatcttgtcttcc

SEQ ID NO: 43257 - DNA, 20 bp, synthetic construct
  misc_feature 1..20: note = chemically synthesized
  source 1..20: mol_type = other DNA
acctaggatcttgtcttcct

SEQ ID NO: 43258 - DNA, 20 bp, synthetic construct
  misc_feature 1..20: note = chemically synthesized
  source 1..20: mol_type = other DNA
ctaggctatatattttgtcc

SEQ ID NO: 43259 - DNA, 20 bp, synthetic construct
  misc_feature 1..20: note = chemically synthesized
  source 1..20: mol_type = other DNA
taggctatatattttgtccc

SEQ ID NO: 43260 - DNA, 20 bp, synthetic construct
  misc_feature 1..20: note = chemically synthesized
  source 1..20: mol_type = other DNA
gctatatattttgtcccagg

SEQ ID NO: 43261 - DNA, 20 bp, synthetic construct
  misc_feature 1..20: note = chemically synthesized
  source 1..20: mol_type = other DNA
tgtcccaggaagtcttaatc

SEQ ID NO: 43262 - DNA, 20 bp, synthetic construct
  misc_feature 1..20: note = chemically synthesized
  source 1..20: mol_type = other DNA
gtcccaggaagtcttaatct

SEQ ID NO: 43263 - DNA, 20 bp, synthetic construct
  misc_feature 1..20: note = chemically synthesized
  source 1..20: mol_type = other DNA
tcccaggaagtcttaatctg

SEQ ID NO: 43264 - DNA, 20 bp, synthetic construct
  misc_feature 1..20: note = chemically synthesized
  source 1..20: mol_type = other DNA
aagtcttaatctggggtcca

SEQ ID NO: 43265 - DNA, 20 bp, synthetic construct
  misc_feature 1..20: note = chemically synthesized
  source 1..20: mol_type = other DNA
atctggggtccacagaacac

SEQ ID NO: 43266 - DNA, 20 bp, synthetic construct
  misc_feature 1..20: note = chemically synthesized
  source 1..20: mol_type = other DNA
tctggggtccacagaacact

SEQ ID NO: 43267 - DNA, 20 bp, synthetic construct
  misc_feature 1..20: note = chemically synthesized
  source 1..20: mol_type = other DNA
ctggggtccacagaacacta

SEQ ID NO: 43268 - DNA, 20 bp, synthetic construct
  misc_feature 1..20: note = chemically synthesized
  source 1..20: mol_type = other DNA
tggggtccacagaacactag

SEQ ID NO: 43269 - DNA, 20 bp, synthetic construct
  misc_feature 1..20: note = chemically synthesized
  source 1..20: mol_type = other DNA
ggggtccacagaacactagg

SEQ ID NO: 43270 - DNA, 20 bp, synthetic construct
  misc_feature 1..20: note = chemically synthesized
  source 1..20: mol_type = other DNA
tccacagaacactagggggc

SEQ ID NO: 43271 - DNA, 20 bp, synthetic construct
  misc_feature 1..20: note = chemically synthesized
  source 1..20: mol_type = other DNA
agaacactagggggctggtg

SEQ ID NO: 43272 - DNA, 20 bp, synthetic construct
  misc_feature 1..20: note = chemically synthesized
  source 1..20: mol_type = other DNA
tagggggctggtgaagttta

SEQ ID NO: 43273 - DNA, 20 bp, synthetic construct
  misc_feature 1..20: note = chemically synthesized
  source 1..20: mol_type = other DNA
acttacatgtaactgaaatt

SEQ ID NO: 43274 - DNA, 20 bp, synthetic construct
  misc_feature 1..20: note = chemically synthesized
  source 1..20: mol_type = other DNA
tttcttctactttgaatgca

SEQ ID NO: 43275 - DNA, 20 bp, synthetic construct
  misc_feature 1..20: note = chemically synthesized
  source 1..20: mol_type = other DNA
ttcttctactttgaatgcaa

SEQ ID NO: 43276 - DNA, 20 bp, synthetic construct
  misc_feature 1..20: note = chemically synthesized
  source 1..20: mol_type = other DNA
tttgaatgcaaaggacaaac

SEQ ID NO: 43277 - DNA, 20 bp, synthetic construct
  misc_feature 1..20: note = chemically synthesized
  source 1..20: mol_type = other DNA
acaaactagaatgacatcat

SEQ ID NO: 43278 - DNA, 20 bp, synthetic construct
  misc_feature 1..20: note = chemically synthesized
  source 1..20: mol_type = other DNA
catcatcagtacctattgca

SEQ ID NO: 43279 - DNA, 20 bp, synthetic construct
  misc_feature 1..20: note = chemically synthesized
  source 1..20: mol_type = other DNA
gtacctattgcatagttata

SEQ ID NO: 43280 - DNA, 20 bp, synthetic construct
  misc_feature 1..20: note = chemically synthesized
  source 1..20: mol_type = other DNA
acctattgcatagttataaa

SEQ ID NO: 43281 - DNA, 20 bp, synthetic construct
  misc_feature 1..20: note = chemically synthesized
  source 1..20: mol_type = other DNA
atagttataaagagaaacca

SEQ ID NO: 43282 - DNA, 20 bp, synthetic construct
  misc_feature 1..20: note = chemically synthesized
  source 1..20: mol_type = other DNA
gatattttcatactacacca

SEQ ID NO: 43283 - DNA, 20 bp, synthetic construct
  misc_feature 1..20: note = chemically synthesized
  source 1..20: mol_type = other DNA
atattttcatactacaccat

SEQ ID NO: 43284 - DNA, 20 bp, synthetic construct
  misc_feature 1..20: note = chemically synthesized
  source 1..20: mol_type = other DNA
atactacaccataggtattg

SEQ ID NO: 43285 - DNA, 20 bp, synthetic construct
  misc_feature 1..20: note = chemically synthesized
  source 1..20: mol_type = other DNA
ttttgtttttgtttttgttt

SEQ ID NO: 43286 - DNA, 20 bp, synthetic construct
  misc_feature 1..20: note = chemically synthesized
  source 1..20: mol_type = other DNA
gtttttgtttttgtttgaga

SEQ ID NO: 43287 - DNA, 20 bp, synthetic construct
  misc_feature 1..20: note = chemically synthesized
  source 1..20: mol_type = other DNA
ttttgtttttgtttgagatg

SEQ ID NO: 43288 - DNA, 20 bp, synthetic construct
  misc_feature 1..20: note = chemically synthesized
  source 1..20: mol_type = other DNA
ggagtttcgctcttattgcc

SEQ ID NO: 43289 - DNA, 20 bp, synthetic construct
  misc_feature 1..20: note = chemically synthesized
  source 1..20: mol_type = other DNA
gagtttcgctcttattgccc

SEQ ID NO: 43290 - DNA, 20 bp, synthetic construct
  misc_feature 1..20: note = chemically synthesized
  source 1..20: mol_type = other DNA
ttcgctcttattgcccaggc

SEQ ID NO: 43291 - DNA, 20 bp, synthetic construct
  misc_feature 1..20: note = chemically synthesized
  source 1..20: mol_type = other DNA
cgctcttattgcccaggctg

SEQ ID NO: 43292 - DNA, 20 bp, synthetic construct
  misc_feature 1..20: note = chemically synthesized
  source 1..20: mol_type = other DNA
ttattgcccaggctggagtg

SEQ ID NO: 43293 - DNA, 20 bp, synthetic construct
  misc_feature 1..20: note = chemically synthesized
  source 1..20: mol_type = other DNA
ttgcccaggctggagtgcag

SEQ ID NO: 43294 - DNA, 20 bp, synthetic construct
  misc_feature 1..20: note = chemically synthesized
  source 1..20: mol_type = other DNA
ggagtgcagtggcatgattt

SEQ ID NO: 43295 - DNA, 20 bp, synthetic construct
  misc_feature 1..20: note = chemically synthesized
  source 1..20: mol_type = other DNA
aacctccccttcctgcattc

SEQ ID NO: 43296 - DNA, 20 bp, synthetic construct
  misc_feature 1..20: note = chemically synthesized
  source 1..20: mol_type = other DNA
ttcaagcaattctcctgcct

SEQ ID NO: 43297 - DNA, 20 bp, synthetic construct
  misc_feature 1..20: note = chemically synthesized
  source 1..20: mol_type = other DNA
ttctcctgccttggcctcct

SEQ ID NO: 43298 - DNA, 20 bp, synthetic construct
  misc_feature 1..20: note = chemically synthesized
  source 1..20: mol_type = other DNA
tcctgccttggcctcctgag

SEQ ID NO: 43299 - DNA, 20 bp, synthetic construct
  misc_feature 1..20: note = chemically synthesized
  source 1..20: mol_type = other DNA
gccttggcctcctgagtagc

SEQ ID NO: 43300 - DNA, 20 bp, synthetic construct
  misc_feature 1..20: note = chemically synthesized
  source 1..20: mol_type = other DNA
ccttggcctcctgagtagct

SEQ ID NO: 43301 - DNA, 20 bp, synthetic construct
  misc_feature 1..20: note = chemically synthesized
  source 1..20: mol_type = other DNA
cttggcctcctgagtagctg

SEQ ID NO: 43302 - DNA, 20 bp, synthetic construct
  misc_feature 1..20: note = chemically synthesized
  source 1..20: mol_type = other DNA
tcctgagtagctggggatta

SEQ ID NO: 43303 - DNA, 20 bp, synthetic construct
  misc_feature 1..20: note = chemically synthesized
  source 1..20: mol_type = other DNA
cctgagtagctggggattac

SEQ ID NO: 43304 - DNA, 20 bp, synthetic construct
  misc_feature 1..20: note = chemically synthesized
  source 1..20: mol_type = other DNA
acaggcacctgccaccatgc

SEQ ID NO: 43305 - DNA, 20 bp, synthetic construct
  misc_feature 1..20: note = chemically synthesized
  source 1..20: mol_type = other DNA
cagtctaatttttgtatttt

SEQ ID NO: 43306 - DNA, 20 bp, synthetic construct
  misc_feature 1..20: note = chemically synthesized
  source 1..20: mol_type = other DNA
tctaatttttgtatttttag

SEQ ID NO: 43307 - DNA, 20 bp, synthetic construct
  misc_feature 1..20: note = chemically synthesized
  source 1..20: mol_type = other DNA
taatttttgtatttttagta

SEQ ID NO: 43308 - DNA, 20 bp, synthetic construct
  misc_feature 1..20: note = chemically synthesized
  source 1..20: mol_type = other DNA
ttttgtatttttagtagaga

SEQ ID NO: 43309 - DNA, 20 bp, synthetic construct
  misc_feature 1..20: note = chemically synthesized
  source 1..20: mol_type = other DNA
tttgtatttttagtagagat

SEQ ID NO: 43310 - DNA, 20 bp, synthetic construct
  misc_feature 1..20: note = chemically synthesized
  source 1..20: mol_type = other DNA
ttgtatttttagtagagatg

SEQ ID NO: 43311 - DNA, 20 bp, synthetic construct
  misc_feature 1..20: note = chemically synthesized
  source 1..20: mol_type = other DNA
gagatggggtttcgccatgt

SEQ ID NO: 43312 - DNA, 20 bp, synthetic construct
  misc_feature 1..20: note = chemically synthesized
  source 1..20: mol_type = other DNA
tggggtttcgccatgttggc

SEQ ID NO: 43313 - DNA, 20 bp, synthetic construct
  misc_feature 1..20: note = chemically synthesized
  source 1..20: mol_type = other DNA
ggggtttcgccatgttggcc

SEQ ID NO: 43314 - DNA, 20 bp, synthetic construct
  misc_feature 1..20: note = chemically synthesized
  source 1..20: mol_type = other DNA
tttcgccatgttggccaggc

SEQ ID NO: 43315 - DNA, 20 bp, synthetic construct
  misc_feature 1..20: note = chemically synthesized
  source 1..20: mol_type = other DNA
tggtcttgaactcctgacct

SEQ ID NO: 43316 - DNA, 20 bp, synthetic construct
  misc_feature 1..20: note = chemically synthesized
  source 1..20: mol_type = other DNA
ctcagatgatctgcccgcct

SEQ ID NO: 43317 - DNA, 20 bp, synthetic construct
  misc_feature 1..20: note = chemically synthesized
  source 1..20: mol_type = other DNA
ctgcccgccttggcctcctg

SEQ ID NO: 43318 - DNA, 20 bp, synthetic construct
  misc_feature 1..20: note = chemically synthesized
  source 1..20: mol_type = other DNA
gccttggcctcctgaagtgc

SEQ ID NO: 43319 - DNA, 20 bp, synthetic construct
  misc_feature 1..20: note = chemically synthesized
  source 1..20: mol_type = other DNA
ccttggcctcctgaagtgct

SEQ ID NO: 43320 - DNA, 20 bp, synthetic construct
  misc_feature 1..20: note = chemically synthesized
  source 1..20: mol_type = other DNA
ctcctgaagtgctgggatta

SEQ ID NO: 43321 - DNA, 20 bp, synthetic construct
  misc_feature 1..20: note = chemically synthesized
  source 1..20: mol_type = other DNA
tcctgaagtgctgggattat

SEQ ID NO: 43322 - DNA, 20 bp, synthetic construct
  misc_feature 1..20: note = chemically synthesized
  source 1..20: mol_type = other DNA
agtgctgggattataggtgt

SEQ ID NO: 43323 - DNA, 20 bp, synthetic construct
  misc_feature 1..20: note = chemically synthesized
  source 1..20: mol_type = other DNA
taggtgtgagccaccacgcc

SEQ ID NO: 43324 - DNA, 20 bp, synthetic construct
  misc_feature 1..20: note = chemically synthesized
  source 1..20: mol_type = other DNA
ccaccacgcctggcccattg

SEQ ID NO: 43325 - DNA, 20 bp, synthetic construct
  misc_feature 1..20: note = chemically synthesized
  source 1..20: mol_type = other DNA
catttatctgcatcactact

SEQ ID NO: 43326 - DNA, 20 bp, synthetic construct
  misc_feature 1..20: note = chemically synthesized
  source 1..20: mol_type = other DNA
tgcatcactacttggatctt

SEQ ID NO: 43327 - DNA, 20 bp, synthetic construct
  misc_feature 1..20: note = chemically synthesized
  source 1..20: mol_type = other DNA
gcatcactacttggatctta

SEQ ID NO: 43328 - DNA, 20 bp, synthetic construct
  misc_feature 1..20: note = chemically synthesized
  source 1..20: mol_type = other DNA
tcactacttggatcttaagg

SEQ ID NO: 43329 - DNA, 20 bp, synthetic construct
  misc_feature 1..20: note = chemically synthesized
  source 1..20: mol_type = other DNA
cttggatcttaaggtagctg

SEQ ID NO: 43330 - DNA, 20 bp, synthetic construct
  misc_feature 1..20: note = chemically synthesized
  source 1..20: mol_type = other DNA
ggtagctgtagacccaatcc

SEQ ID NO: 43331 - DNA, 20 bp, synthetic construct
  misc_feature 1..20: note = chemically synthesized
  source 1..20: mol_type = other DNA
ctagatctaatgctttcata

SEQ ID NO: 43332 - DNA, 20 bp, synthetic construct
  misc_feature 1..20: note = chemically synthesized
  source 1..20: mol_type = other DNA
gatctaatgctttcataaag

SEQ ID NO: 43333 - DNA, 20 bp, synthetic construct
  misc_feature 1..20: note = chemically synthesized
  source 1..20: mol_type = other DNA
gatgtctgataatgatattt

SEQ ID NO: 43334 - DNA, 20 bp, synthetic construct
  misc_feature 1..20: note = chemically synthesized
  source 1..20: mol_type = other DNA
tatttcagtgtaattaaact

SEQ ID NO: 43335 - DNA, 20 bp, synthetic construct
  misc_feature 1..20: note = chemically synthesized
  source 1..20: mol_type = other DNA
gcaataaaaacatatttttt

SEQ ID NO: 43336 - DNA, 20 bp, synthetic construct
  misc_feature 1..20: note = chemically synthesized
  source 1..20: mol_type = other DNA
acatatttttttagcactta

SEQ ID NO: 43337 - DNA, 20 bp, synthetic construct
  misc_feature 1..20: note = chemically synthesized
  source 1..20: mol_type = other DNA
gcacttacagtctgccaaac

SEQ ID NO: 43338 - DNA, 20 bp, synthetic construct
  misc_feature 1..20: note = chemically synthesized
  source 1..20: mol_type = other DNA
actggcctgtgacacaaaaa

SEQ ID NO: 43339 - DNA, 20 bp, synthetic construct
  misc_feature 1..20: note = chemically synthesized
  source 1..20: mol_type = other DNA
cctgtgacacaaaaaaagtt

SEQ ID NO: 43340 - DNA, 20 bp, synthetic construct
  misc_feature 1..20: note = chemically synthesized
  source 1..20: mol_type = other DNA
ctgtgacacaaaaaaagttt

SEQ ID NO: 43341 - DNA, 20 bp, synthetic construct
  misc_feature 1..20: note = chemically synthesized
  source 1..20: mol_type = other DNA
aaaaaaagtttaggaattcc

SEQ ID NO: 43342 - DNA, 20 bp, synthetic construct
  misc_feature 1..20: note = chemically synthesized
  source 1..20: mol_type = other DNA
attcctggttttgtctgtgt

SEQ ID NO: 43343 - DNA, 20 bp, synthetic construct
  misc_feature 1..20: note = chemically synthesized
  source 1..20: mol_type = other DNA
gttttgtctgtgttagccaa

SEQ ID NO: 43344 - DNA, 20 bp, synthetic construct
  misc_feature 1..20: note = chemically synthesized
  source 1..20: mol_type = other DNA
tgtctgtgttagccaatggt

SEQ ID NO: 43345 - DNA, 20 bp, synthetic construct
  misc_feature 1..20: note = chemically synthesized
  source 1..20: mol_type = other DNA
caatggttagaatatatgct

SEQ ID NO: 43346 - DNA, 20 bp, synthetic construct
  misc_feature 1..20: note = chemically synthesized
  source 1..20: mol_type = other DNA
ggttagaatatatgctcaga

SEQ ID NO: 43347 - DNA, 20 bp, synthetic construct
  misc_feature 1..20: note = chemically synthesized
  source 1..20: mol_type = other DNA
tatgctcagaaagataccat

SEQ ID NO: 43348 - DNA, 20 bp, synthetic construct
  misc_feature 1..20: note = chemically synthesized
  source 1..20: mol_type = other DNA
agaaagataccattggttaa

SEQ ID NO: 43349 - DNA, 20 bp, synthetic construct
  misc_feature 1..20: note = chemically synthesized
  source 1..20: mol_type = other DNA
taccattggttaatagctaa

SEQ ID NO: 43350 - DNA, 20 bp, synthetic construct
  misc_feature 1..20: note = chemically synthesized
  source 1..20: mol_type = other DNA
ggttaatagctaaaagaaaa

SEQ ID NO: 43351 - DNA, 20 bp, synthetic construct
  misc_feature 1..20: note = chemically synthesized
  source 1..20: mol_type = other DNA
ttaatagctaaaagaaaatg

SEQ ID NO: 43352 - DNA, 20 bp, synthetic construct
  misc_feature 1..20: note = chemically synthesized
  source 1..20: mol_type = other DNA
atagctaaaagaaaatggag

SEQ ID NO: 43353 - DNA, 20 bp, synthetic construct
  misc_feature 1..20: note = chemically synthesized
  source 1..20: mol_type = other DNA
aagaaaatggagtagaaatt

SEQ ID NO: 43354 - DNA, 20 bp, synthetic construct
  misc_feature 1..20: note = chemically synthesized
  source 1..20: mol_type = other DNA
aaaatggagtagaaattcag

SEQ ID NO: 43355 - DNA, 20 bp, synthetic construct
  misc_feature 1..20: note = chemically synthesized
  source 1..20: mol_type = other DNA
ggagtagaaattcagtggcc

SEQ ID NO: 43356 - DNA, 20 bp, synthetic construct
  misc_feature 1..20: note = chemically synthesized
  source 1..20: mol_type = other DNA
ggcctggaataataacaatt

SEQ ID NO: 43357 - DNA, 20 bp, synthetic construct
  misc_feature 1..20: note = chemically synthesized
  source 1..20: mol_type = other DNA
gcctggaataataacaattt

SEQ ID NO: 43358 - DNA, 20 bp, synthetic construct
  misc_feature 1..20: note = chemically synthesized
  source 1..20: mol_type = other DNA
tggaataataacaatttggg

SEQ ID NO: 43359 - DNA, 20 bp, synthetic construct
  misc_feature 1..20: note = chemically synthesized
  source 1..20: mol_type = other DNA
taacaatttgggcagtcatt

SEQ ID NO: 43360 - DNA, 20 bp, synthetic construct
  misc_feature 1..20: note = chemically synthesized
  source 1..20: mol_type = other DNA
aatttgggcagtcattaagt

SEQ ID NO: 43361 - DNA, 20 bp, synthetic construct
  misc_feature 1..20: note = chemically synthesized
  source 1..20: mol_type = other DNA
atttgggcagtcattaagtc

SEQ ID NO: 43362 - DNA, 20 bp, synthetic construct
  misc_feature 1..20: note = chemically synthesized
  source 1..20: mol_type = other DNA
ggcagtcattaagtcaggtg

SEQ ID NO: 43363 - DNA, 20 bp, synthetic construct
  misc_feature 1..20: note = chemically synthesized
  source 1..20: mol_type = other DNA
ttaagtcaggtgaagacttc

SEQ ID NO: 43364 - DNA, 20 bp, synthetic construct
  misc_feature 1..20: note = chemically synthesized
  source 1..20: mol_type = other DNA
ggtgaagacttctggaatca

SEQ ID NO: 43365 - DNA, 20 bp, synthetic construct
  misc_feature 1..20: note = chemically synthesized
  source 1..20: mol_type = other DNA
gtgaagacttctggaatcat

SEQ ID NO: 43366 - DNA, 20 bp, synthetic construct
  misc_feature 1..20: note = chemically synthesized
  source 1..20: mol_type = other DNA
gaagacttctggaatcatgg

SEQ ID NO: 43367 - DNA, 20 bp, synthetic construct
  misc_feature 1..20: note = chemically synthesized
  source 1..20: mol_type = other DNA
cttctggaatcatgggagaa

SEQ ID NO: 43368 - DNA, 20 bp, synthetic construct
  misc_feature 1..20: note = chemically synthesized
  source 1..20: mol_type = other DNA
tggaatcatgggagaaaagc

SEQ ID NO: 43369 - DNA, 20 bp, synthetic construct
  misc_feature 1..20: note = chemically synthesized
  source 1..20: mol_type = other DNA
ggaatcatgggagaaaagca

SEQ ID NO: 43370 - DNA, 20 bp, synthetic construct
  misc_feature 1..20: note = chemically synthesized
  source 1..20: mol_type = other DNA
gaatcatgggagaaaagcaa

SEQ ID NO: 43371 - DNA, 20 bp, synthetic construct
  misc_feature 1..20: note = chemically synthesized
  source 1..20: mol_type = other DNA
atcatgggagaaaagcaagg

SEQ ID NO: 43372 - DNA, 20 bp, synthetic construct
  misc_feature 1..20: note = chemically synthesized
  source 1..20: mol_type = other DNA
gagacattcttacttgccac

SEQ ID NO: 43373 - DNA, 20 bp, synthetic construct
  misc_feature 1..20: note = chemically synthesized
  source 1..20: mol_type = other DNA
tttttttttatcacaaacat

SEQ ID NO: 43374 - DNA, 20 bp, synthetic construct
  misc_feature 1..20: note = chemically synthesized
  source 1..20: mol_type = other DNA
agaaaatataataaataaca

SEQ ID NO: 43375 - DNA, 20 bp, synthetic construct
  misc_feature 1..20: note = chemically synthesized
  source 1..20: mol_type = other DNA
aatataataaataacaaagt

SEQ ID NO: 43376 - DNA, 20 bp, synthetic construct
  misc_feature 1..20: note = chemically synthesized
  source 1..20: mol_type = other DNA
atataataaataacaaagtc

SEQ ID NO: 43377 - DNA, 20 bp, synthetic construct
  misc_feature 1..20: note = chemically synthesized
  source 1..20: mol_type = other DNA
taaataacaaagtcaggtta

SEQ ID NO: 43378 - DNA, 20 bp, synthetic construct
  misc_feature 1..20: note = chemically synthesized
  source 1..20: mol_type = other DNA
ataacaaagtcaggttatag

SEQ ID NO: 43379 - DNA, 20 bp, synthetic construct
  misc_feature 1..20: note = chemically synthesized
  source 1..20: mol_type = other DNA
aacaaagtcaggttatagaa

SEQ ID NO: 43380 - DNA, 20 bp, synthetic construct
  misc_feature 1..20: note = chemically synthesized
  source 1..20: mol_type = other DNA
caaagtcaggttatagaaga

SEQ ID NO: 43381 - DNA, 20 bp, synthetic construct
  misc_feature 1..20: note = chemically synthesized
  source 1..20: mol_type = other DNA
atagaagagagaaacgctct

SEQ ID NO: 43382 - DNA, 20 bp, synthetic construct
  misc_feature 1..20: note = chemically synthesized
  source 1..20: mol_type = other DNA
agaaacgctcttagtaaact

SEQ ID NO: 43383 - DNA, 20 bp, synthetic construct
  misc_feature 1..20: note = chemically synthesized
  source 1..20: mol_type = other DNA
ctcttagtaaacttggaata

SEQ ID NO: 43384 - DNA, 20 bp, synthetic construct
  misc_feature 1..20: note = chemically synthesized
  source 1..20: mol_type = other DNA
cttggaatatggaatcccca

SEQ ID NO: 43385 - DNA, 20 bp, synthetic construct
  misc_feature 1..20: note = chemically synthesized
  source 1..20: mol_type = other DNA
ttggaatatggaatccccaa

SEQ ID NO: 43386 - DNA, 20 bp, synthetic construct
  misc_feature 1..20: note = chemically synthesized
  source 1..20: mol_type = other DNA
atccccaaaggcacttgact

SEQ ID NO: 43387 - DNA, 20 bp, synthetic construct
  misc_feature 1..20: note = chemically synthesized
  source 1..20: mol_type = other DNA
tccccaaaggcacttgactt

SEQ ID NO: 43388 - DNA, 20 bp, synthetic construct
  misc_feature 1..20: note = chemically synthesized
  source 1..20: mol_type = other DNA
cccaaaggcacttgacttgg

SEQ ID NO: 43389 - DNA, 20 bp, synthetic construct
  misc_feature 1..20: note = chemically synthesized
  source 1..20: mol_type = other DNA
aaggcacttgacttgggaga

SEQ ID NO: 43390 - DNA, 20 bp, synthetic construct
  misc_feature 1..20: note = chemically synthesized
  source 1..20: mol_type = other DNA
aggcacttgacttgggagac

SEQ ID NO: 43391 - DNA, 20 bp, synthetic construct
  misc_feature 1..20: note = chemically synthesized
  source 1..20: mol_type = other DNA
gcacttgacttgggagacag

SEQ ID NO: 43392 - DNA, 20 bp, synthetic construct
  misc_feature 1..20: note = chemically synthesized
  source 1..20: mol_type = other DNA
gagacaggagccatactgct

SEQ ID NO: 43393 - DNA, 20 bp, synthetic construct
  misc_feature 1..20: note = chemically synthesized
  source 1..20: mol_type = other DNA
agccatactgctaagtgaaa

SEQ ID NO: 43394 - DNA, 20 bp, synthetic construct
  misc_feature 1..20: note = chemically synthesized
  source 1..20: mol_type = other DNA
actgctaagtgaaaaagacg

SEQ ID NO: 43395 - DNA, 20 bp, synthetic construct
  misc_feature 1..20: note = chemically synthesized
  source 1..20: mol_type = other DNA
tgaaaaagacgaagaacctc

SEQ ID NO: 43396 - DNA, 20 bp, synthetic construct
  misc_feature 1..20: note = chemically synthesized
  source 1..20: mol_type = other DNA
gaaaaagacgaagaacctct

SEQ ID NO: 43397 - DNA, 20 bp, synthetic construct
  misc_feature 1..20: note = chemically synthesized
  source 1..20: mol_type = other DNA
aaaaagacgaagaacctcta

SEQ ID NO: 43398 - DNA, 20 bp, synthetic construct
  misc_feature 1..20: note = chemically synthesized
  source 1..20: mol_type = other DNA
acctctagggcctgaacata

SEQ ID NO: 43399 - DNA, 20 bp, synthetic construct
  misc_feature 1..20: note = chemically synthesized
  source 1..20: mol_type = other DNA
cctctagggcctgaacatac

SEQ ID NO: 43400 - DNA, 20 bp, synthetic construct
  misc_feature 1..20: note = chemically synthesized
  source 1..20: mol_type = other DNA
cctgaacatacaggaaattg

SEQ ID NO: 43401 - DNA, 20 bp, synthetic construct
  misc_feature 1..20: note = chemically synthesized
  source 1..20: mol_type = other DNA
ctgaacatacaggaaattgt

SEQ ID NO: 43402 - DNA, 20 bp, synthetic construct
  misc_feature 1..20: note = chemically synthesized
  source 1..20: mol_type = other DNA
catacaggaaattgtaggaa

SEQ ID NO: 43403 - DNA, 20 bp, synthetic construct
  misc_feature 1..20: note = chemically synthesized
  source 1..20: mol_type = other DNA
attgtaggaacagaaattcc

SEQ ID NO: 43404 - DNA, 20 bp, synthetic construct
  misc_feature 1..20: note = chemically synthesized
  source 1..20: mol_type = other DNA
ggaacagaaattcctagatc

SEQ ID NO: 43405 - DNA, 20 bp, synthetic construct
  misc_feature 1..20: note = chemically synthesized
  source 1..20: mol_type = other DNA
acagaaattcctagatctgg

SEQ ID NO: 43406 - DNA, 20 bp, synthetic construct
  misc_feature 1..20: note = chemically synthesized
  source 1..20: mol_type = other DNA
cagaaattcctagatctggt

SEQ ID NO: 43407 - DNA, 20 bp, synthetic construct
  misc_feature 1..20: note = chemically synthesized
  source 1..20: mol_type = other DNA
agaaattcctagatctggtg

SEQ ID NO: 43408 - DNA, 20 bp, synthetic construct
  misc_feature 1..20: note = chemically synthesized
  source 1..20: mol_type = other DNA
attcctagatctggtggggc

SEQ ID NO: 43409 - DNA, 20 bp, synthetic construct
  misc_feature 1..20: note = chemically synthesized
  source 1..20: mol_type = other DNA
ttcctagatctggtggggca

SEQ ID NO: 43410 - DNA, 20 bp, synthetic construct
  misc_feature 1..20: note = chemically synthesized
  source 1..20: mol_type = other DNA
tcctagatctggtggggcaa

SEQ ID NO: 43411 - DNA, 20 bp, synthetic construct
  misc_feature 1..20: note = chemically synthesized
  source 1..20: mol_type = other DNA
cctagatctggtggggcaag

SEQ ID NO: 43412 - DNA, 20 bp, synthetic construct
  misc_feature 1..20: note = chemically synthesized
  source 1..20: mol_type = other DNA
tagatctggtggggcaaggg

SEQ ID NO: 43413 - DNA, 20 bp, synthetic construct
  misc_feature 1..20: note = chemically synthesized
  source 1..20: mol_type = other DNA
tggtggggcaaggggagcca

SEQ ID NO: 43414 - DNA, 20 bp, synthetic construct
  misc_feature 1..20: note = chemically synthesized
  source 1..20: mol_type = other DNA
ggtggggcaaggggagccat

SEQ ID NO: 43415 - DNA, 20 bp, synthetic construct
  misc_feature 1..20: note = chemically synthesized
  source 1..20: mol_type = other DNA
tggggcaaggggagccatag

SEQ ID NO: 43416 - DNA, 20 bp, synthetic construct
  misc_feature 1..20: note = chemically synthesized
  source 1..20: mol_type = other DNA
gcaaggggagccataggaga

SEQ ID NO: 43417 - DNA, 20 bp, synthetic construct
  misc_feature 1..20: note = chemically synthesized
  source 1..20: mol_type = other DNA
ggagccataggagaaagaaa

SEQ ID NO: 43418 - DNA, 20 bp, synthetic construct
  misc_feature 1..20: note = chemically synthesized
  source 1..20: mol_type = other DNA
gccataggagaaagaaatgg

SEQ ID NO: 43419 - DNA, 20 bp, synthetic construct
  misc_feature 1..20: note = chemically synthesized
  source 1..20: mol_type = other DNA
ggagaaagaaatggtagaaa

SEQ ID NO: 43420 - DNA, 20 bp, synthetic construct
  misc_feature 1..20: note = chemically synthesized
  source 1..20: mol_type = other DNA
aaagaaatggtagaaatgga

SEQ ID NO: 43421 - DNA, 20 bp, synthetic construct
  misc_feature 1..20: note = chemically synthesized
  source 1..20: mol_type = other DNA
agaaatggtagaaatggatg

SEQ ID NO: 43422 - DNA, 20 bp, synthetic construct
  misc_feature 1..20: note = chemically synthesized
  source 1..20: mol_type = other DNA
atggtagaaatggatggaga

SEQ ID NO: 43423 - DNA, 20 bp, synthetic construct
  misc_feature 1..20: note = chemically synthesized
  source 1..20: mol_type = other DNA
ggtagaaatggatggagacg

SEQ ID NO: 43424 - DNA, 20 bp, synthetic construct
  misc_feature 1..20: note = chemically synthesized
  source 1..20: mol_type = other DNA
gtagaaatggatggagacgg

SEQ ID NO: 43425 - DNA, 20 bp, synthetic construct
  misc_feature 1..20: note = chemically synthesized
  source 1..20: mol_type = other DNA
gaaatggatggagacggagg

SEQ ID NO: 43426 - DNA, 20 bp, synthetic construct
  misc_feature 1..20: note = chemically synthesized
  source 1..20: mol_type = other DNA
aatggatggagacggaggca

SEQ ID NO: 43427 - DNA, 20 bp, synthetic construct
  misc_feature 1..20: note = chemically synthesized
  source 1..20: mol_type = other DNA
atggatggagacggaggcag

SEQ ID NO: 43428 - DNA, 20 bp, synthetic construct
  misc_feature 1..20: note = chemically synthesized
  source 1..20: mol_type = other DNA
gatggagacggaggcagagg

SEQ ID NO: 43429 - DNA, 20 bp, synthetic construct
  misc_feature 1..20: note = chemically synthesized
  source 1..20: mol_type = other DNA
atggagacggaggcagaggt

SEQ ID NO: 43430 - DNA, 20 bp, synthetic construct
  misc_feature 1..20: note = chemically synthesized
  source 1..20: mol_type = other DNA
gagacggaggcagaggtggg

SEQ ID NO: 43431 - DNA, 20 bp, synthetic construct
  misc_feature 1..20: note = chemically synthesized
  source 1..20: mol_type = other DNA
ggcagaggtgggcagatcat

SEQ ID NO: 43432 - DNA, 20 bp, synthetic construct
  misc_feature 1..20: note = chemically synthesized
  source 1..20: mol_type = other DNA
gcagaggtgggcagatcatg

SEQ ID NO: 43433 - DNA, 20 bp, synthetic construct
  misc_feature 1..20: note = chemically synthesized
  source 1..20: mol_type = other DNA
ggtgggcagatcatgaggtc

SEQ ID NO: 43434 - DNA, 20 bp, synthetic construct
  misc_feature 1..20: note = chemically synthesized
  source 1..20: mol_type = other DNA
tgggcagatcatgaggtcaa

SEQ ID NO: 43435 - DNA, 20 bp, synthetic construct
  misc_feature 1..20: note = chemically synthesized
  source 1..20: mol_type = other DNA
gatcatgaggtcaagagatc

SEQ ID NO: 43436 - DNA, 20 bp, synthetic construct
  misc_feature 1..20: note = chemically synthesized
  source 1..20: mol_type = other DNA
tcaagagatcgagaccatcc

SEQ ID NO: 43437 - DNA, 20 bp, synthetic construct
  misc_feature 1..20: note = chemically synthesized
  source 1..20: mol_type = other DNA
cgagaccatcctggcaaaca

SEQ ID NO: 43438 - DNA, 20 bp, synthetic construct
  misc_feature 1..20: note = chemically synthesized
  source 1..20: mol_type = other DNA
tctactaaaaataaaaaaat

SEQ ID NO: 43439 - DNA, 20 bp, synthetic construct
  misc_feature 1..20: note = chemically synthesized
  source 1..20: mol_type = other DNA
ctaaaaataaaaaaattagc

SEQ ID NO: 43440 - DNA, 20 bp, synthetic construct
  misc_feature 1..20: note = chemically synthesized
  source 1..20: mol_type = other DNA
taaaaataaaaaaattagct

SEQ ID NO: 43441 - DNA, 20 bp, synthetic construct
  misc_feature 1..20: note = chemically synthesized
  source 1..20: mol_type = other DNA
ataaaaaaattagctgggca

SEQ ID NO: 43442 - DNA, 20 bp, synthetic construct
  misc_feature 1..20: note = chemically synthesized
  source 1..20: mol_type = other DNA
aaaaaattagctgggcatgg

SEQ ID NO: 43443 - DNA, 20 bp, synthetic construct
  misc_feature 1..20: note = chemically synthesized
  source 1..20: mol_type = other DNA
ggcatggtggcatgcgcctg

SEQ ID NO: 43444 - DNA, 20 bp, synthetic construct
  misc_feature 1..20: note = chemically synthesized
  source 1..20: mol_type = other DNA
gtggcatgcgcctgtagtcc

SEQ ID NO: 43445 - DNA, 20 bp, synthetic construct
  misc_feature 1..20: note = chemically synthesized
  source 1..20: mol_type = other DNA
cgcctgtagtcccagctgct

SEQ ID NO: 43446 - DNA, 20 bp, synthetic construct
  misc_feature 1..20: note = chemically synthesized
  source 1..20: mol_type = other DNA
gcctgtagtcccagctgctc

SEQ ID NO: 43447 - DNA, 20 bp, synthetic construct
  misc_feature 1..20: note = chemically synthesized
  source 1..20: mol_type = other DNA
ctgtagtcccagctgctcgg

SEQ ID NO: 43448 - DNA, 20 bp, synthetic construct
  misc_feature 1..20: note = chemically synthesized
  source 1..20: mol_type = other DNA
tgtagtcccagctgctcggg

SEQ ID NO: 43449 - DNA, 20 bp, synthetic construct
  misc_feature 1..20: note = chemically synthesized
  source 1..20: mol_type = other DNA
tcccagctgctcgggaggct

SEQ ID NO: 43450 - DNA, 20 bp, synthetic construct
  misc_feature 1..20: note = chemically synthesized
  source 1..20: mol_type = other DNA
cccagctgctcgggaggctg

SEQ ID NO: 43451 - DNA, 20 bp, synthetic construct
  misc_feature 1..20: note = chemically synthesized
  source 1..20: mol_type = other DNA
agctgctcgggaggctgagg

SEQ ID NO: 43452 - DNA, 20 bp, synthetic construct
  misc_feature 1..20: note = chemically synthesized
  source 1..20: mol_type = other DNA
gctgctcgggaggctgaggc

SEQ ID NO: 43453 - DNA, 20 bp, synthetic construct
  misc_feature 1..20: note = chemically synthesized
  source 1..20: mol_type = other DNA
tgctcgggaggctgaggcag

SEQ ID NO: 43454 - DNA, 20 bp, synthetic construct
  misc_feature 1..20: note = chemically synthesized
  source 1..20: mol_type = other DNA
gcaggagaatcgtttgaacc

SEQ ID NO: 43455 - DNA, 20 bp, synthetic construct
  misc_feature 1..20: note = chemically synthesized
  source 1..20: mol_type = other DNA
caggagaatcgtttgaaccc

SEQ ID NO: 43456 - DNA, 20 bp, synthetic construct
  misc_feature 1..20: note = chemically synthesized
  source 1..20: mol_type = other DNA
ggagaatcgtttgaacccag

SEQ ID NO: 43457 - DNA, 20 bp, synthetic construct
  misc_feature 1..20: note = chemically synthesized
  source 1..20: mol_type = other DNA
gagaatcgtttgaacccagg

SEQ ID NO: 43458 - DNA, 20 bp, synthetic construct
  misc_feature 1..20: note = chemically synthesized
  source 1..20: mol_type = other DNA
tcgtttgaacccaggaggcg

SEQ ID NO: 43459 - DNA, 20 bp, synthetic construct
  misc_feature 1..20: note = chemically synthesized
  source 1..20: mol_type = other DNA
cgtttgaacccaggaggcga

SEQ ID NO: 43460 - DNA, 20 bp, synthetic construct
  misc_feature 1..20: note = chemically synthesized
  source 1..20: mol_type = other DNA
aacccaggaggcgaaggttg

SEQ ID NO: 43461 - DNA, 20 bp, synthetic construct
  misc_feature 1..20: note = chemically synthesized
  source 1..20: mol_type = other DNA
caggaggcgaaggttgcagt

SEQ ID NO: 43462 - DNA, 20 bp, synthetic construct
  misc_feature 1..20: note = chemically synthesized
  source 1..20: mol_type = other DNA
ggcgaaggttgcagtgagct

SEQ ID NO: 43463 - DNA, 20 bp, synthetic construct
  misc_feature 1..20: note = chemically synthesized
  source 1..20: mol_type = other DNA
aaggttgcagtgagctgaga

SEQ ID NO: 43464 - DNA, 20 bp, synthetic construct
  misc_feature 1..20: note = chemically synthesized
  source 1..20: mol_type = other DNA
gagatagtgccattgcactc

SEQ ID NO: 43465 - DNA, 20 bp, synthetic construct
  misc_feature 1..20: note = chemically synthesized
  source 1..20: mol_type = other DNA
agtgccattgcactccagtc

SEQ ID NO: 43466 - DNA, 20 bp, synthetic construct
  misc_feature 1..20: note = chemically synthesized
  source 1..20: mol_type = other DNA
attgcactccagtctggcaa

SEQ ID NO: 43467 - DNA, 20 bp, synthetic construct
  misc_feature 1..20: note = chemically synthesized
  source 1..20: mol_type = other DNA
tgcactccagtctggcaaca

SEQ ID NO: 43468 - DNA, 20 bp, synthetic construct
  misc_feature 1..20: note = chemically synthesized
  source 1..20: mol_type = other DNA
ctccagtctggcaacagagt

SEQ ID NO: 43469 - DNA, 20 bp, synthetic construct
  misc_feature 1..20: note = chemically synthesized
  source 1..20: mol_type = other DNA
cgtctcaaaaaaaaaaaaaa

SEQ ID NO: 43470 - DNA, 20 bp, synthetic construct
  misc_feature 1..20: note = chemically synthesized
  source 1..20: mol_type = other DNA
tcaaaaaaaaaaaaaaaaga

SEQ ID NO: 43471 - DNA, 20 bp, synthetic construct
  misc_feature 1..20: note = chemically synthesized
  source 1..20: mol_type = other DNA
aaaaaaaaaaaaaagaaaga

SEQ ID NO: 43472 - DNA, 20 bp, synthetic construct
  misc_feature 1..20: note = chemically synthesized
  source 1..20: mol_type = other DNA
aaaaaaaaagaaagaaagaa

SEQ ID NO: 43473 - DNA, 20 bp, synthetic construct
  misc_feature 1..20: note = chemically synthesized
  source 1..20: mol_type = other DNA
aaagaaagaaagaaaagaaa

SEQ ID NO: 43474 - DNA, 20 bp, synthetic construct
  misc_feature 1..20: note = chemically synthesized
  source 1..20: mol_type = other DNA
gaaagaaaagaaaaagaaaa

SEQ ID NO: 43475 - DNA, 20 bp, synthetic construct
  misc_feature 1..20: note = chemically synthesized
  source 1..20: mol_type = other DNA
aagaaaaaagaaaaaataaa

SEQ ID NO: 43476 - DNA, 20 bp, synthetic construct
  misc_feature 1..20: note = chemically synthesized
  source 1..20: mol_type = other DNA
aaagaaaaaataaatggatg

SEQ ID NO: 43477 - DNA, 20 bp, synthetic construct
  misc_feature 1..20: note = chemically synthesized
  source 1..20: mol_type = other DNA
aaaataaatggatgtagaac

SEQ ID NO: 43478 - DNA, 20 bp, synthetic construct
  misc_feature 1..20: note = chemically synthesized
  source 1..20: mol_type = other DNA
taaatggatgtagaacaagc

SEQ ID NO: 43479 - DNA, 20 bp, synthetic construct
  misc_feature 1..20: note = chemically synthesized
  source 1..20: mol_type = other DNA
atggatgtagaacaagccag

SEQ ID NO: 43480 - DNA, 20 bp, synthetic construct
  misc_feature 1..20: note = chemically synthesized
  source 1..20: mol_type = other DNA
tggatgtagaacaagccaga

SEQ ID NO: 43481 - DNA, 20 bp, synthetic construct
  misc_feature 1..20: note = chemically synthesized
  source 1..20: mol_type = other DNA
gatgtagaacaagccagaag

SEQ ID NO: 43482 - DNA, 20 bp, synthetic construct
  misc_feature 1..20: note = chemically synthesized
  source 1..20: mol_type = other DNA
atgtagaacaagccagaagg

SEQ ID NO: 43483 - DNA, 20 bp, synthetic construct
  misc_feature 1..20: note = chemically synthesized
  source 1..20: mol_type = other DNA
aacaagccagaaggaggaac

SEQ ID NO: 43484 - DNA, 20 bp, synthetic construct
  misc_feature 1..20: note = chemically synthesized
  source 1..20: mol_type = other DNA
acaagccagaaggaggaact

SEQ ID NO: 43485 - DNA, 20 bp, synthetic construct
  misc_feature 1..20: note = chemically synthesized
  source 1..20: mol_type = other DNA
gccagaaggaggaactgggc

SEQ ID NO: 43486 - DNA, 20 bp, synthetic construct
  misc_feature 1..20: note = chemically synthesized
  source 1..20: mol_type = other DNA
ccagaaggaggaactgggct

SEQ ID NO: 43487 - DNA, 20 bp, synthetic construct
  misc_feature 1..20: note = chemically synthesized
  source 1..20: mol_type = other DNA
cagaaggaggaactgggctg

SEQ ID NO: 43488 - DNA, 20 bp, synthetic construct
  misc_feature 1..20: note = chemically synthesized
  source 1..20: mol_type = other DNA
aggaactgggctggggcaat

SEQ ID NO: 43489 - DNA, 20 bp, synthetic construct
  misc_feature 1..20: note = chemically synthesized
  source 1..20: mol_type = other DNA
gggctggggcaatgagatta

SEQ ID NO: 43490 - DNA, 20 bp, synthetic construct
  misc_feature 1..20: note = chemically synthesized
  source 1..20: mol_type = other DNA
caatgagattatggtgatgt

SEQ ID NO: 43491 - DNA, 20 bp, synthetic construct
  misc_feature 1..20: note = chemically synthesized
  source 1..20: mol_type = other DNA
aatgagattatggtgatgta

SEQ ID NO: 43492 - DNA, 20 bp, synthetic construct
  misc_feature 1..20: note = chemically synthesized
  source 1..20: mol_type = other DNA
atgagattatggtgatgtaa

SEQ ID NO: 43493 - DNA, 20 bp, synthetic construct
  misc_feature 1..20: note = chemically synthesized
  source 1..20: mol_type = other DNA
ggtgatgtaagggactttta

SEQ ID NO: 43494 - DNA, 20 bp, synthetic construct
  misc_feature 1..20: note = chemically synthesized
  source 1..20: mol_type = other DNA
ttttatagaattaacaatgc

SEQ ID NO: 43495 - DNA, 20 bp, synthetic construct
  misc_feature 1..20: note = chemically synthesized
  source 1..20: mol_type = other DNA
attaacaatgctggaatttg

SEQ ID NO: 43496 - DNA, 20 bp, synthetic construct
  misc_feature 1..20: note = chemically synthesized
  source 1..20: mol_type = other DNA
cattacttctgtcacattga

SEQ ID NO: 43497 - DNA, 20 bp, synthetic construct
  misc_feature 1..20: note = chemically synthesized
  source 1..20: mol_type = other DNA
attccttgattctaaaatat

SEQ ID NO: 43498 - DNA, 20 bp, synthetic construct
  misc_feature 1..20: note = chemically synthesized
  source 1..20: mol_type = other DNA
ttccttgattctaaaatatg

SEQ ID NO: 43499 - DNA, 20 bp, synthetic construct
  misc_feature 1..20: note = chemically synthesized
  source 1..20: mol_type = other DNA
aaatatgaggataatgacaa

SEQ ID NO: 43500 - DNA, 20 bp, synthetic construct
  misc_feature 1..20: note = chemically synthesized
  source 1..20: mol_type = other DNA
gataatgacaatggtattat

SEQ ID NO: 43501 - DNA, 20 bp, synthetic construct
  misc_feature 1..20: note = chemically synthesized
  source 1..20: mol_type = other DNA
ataatgacaatggtattata

SEQ ID NO: 43502 - DNA, 20 bp, synthetic construct
  misc_feature 1..20: note = chemically synthesized
  source 1..20: mol_type = other DNA
taatgacaatggtattataa

SEQ ID NO: 43503 - DNA, 20 bp, synthetic construct
  misc_feature 1..20: note = chemically synthesized
  source 1..20: mol_type = other DNA
tgacaatggtattataaggg

SEQ ID NO: 43504 - DNA, 20 bp, synthetic construct
  misc_feature 1..20: note = chemically synthesized
  source 1..20: mol_type = other DNA
tggtattataagggcagatt

SEQ ID NO: 43505 - DNA, 20 bp, synthetic construct
  misc_feature 1..20: note = chemically synthesized
  source 1..20: mol_type = other DNA
taagggcagattaagtgata

SEQ ID NO: 43506 - DNA, 20 bp, synthetic construct
  misc_feature 1..20: note = chemically synthesized
  source 1..20: mol_type = other DNA
cagattaagtgatatagcat

SEQ ID NO: 43507 - DNA, 20 bp, synthetic construct
  misc_feature 1..20: note = chemically synthesized
  source 1..20: mol_type = other DNA
atagcatgagcaatattctt

SEQ ID NO: 43508 - DNA, 20 bp, synthetic construct
  misc_feature 1..20: note = chemically synthesized
  source 1..20: mol_type = other DNA
tagcatgagcaatattcttc

SEQ ID NO: 43509 - DNA, 20 bp, synthetic construct
  misc_feature 1..20: note = chemically synthesized
  source 1..20: mol_type = other DNA
agcaatattcttcaggcaca

SEQ ID NO: 43510 - DNA, 20 bp, synthetic construct
  misc_feature 1..20: note = chemically synthesized
  source 1..20: mol_type = other DNA
acactgtaaatcccaacttc

SEQ ID NO: 43511 - DNA, 20 bp, synthetic construct
  misc_feature 1..20: note = chemically synthesized
  source 1..20: mol_type = other DNA
taaatcccaacttccagttt

SEQ ID NO: 43512 - DNA, 20 bp, synthetic construct
  misc_feature 1..20: note = chemically synthesized
  source 1..20: mol_type = other DNA
cttccagtttcagctctacc

SEQ ID NO: 43513 - DNA, 20 bp, synthetic construct
  misc_feature 1..20: note = chemically synthesized
  source 1..20: mol_type = other DNA
agtttcagctctaccaagta

SEQ ID NO: 43514 - DNA, 20 bp, synthetic construct
  misc_feature 1..20: note = chemically synthesized
  source 1..20: mol_type = other DNA
tttcagctctaccaagtaaa

SEQ ID NO: 43515 - DNA, 20 bp, synthetic construct
  misc_feature 1..20: note = chemically synthesized
  source 1..20: mol_type = other DNA
agctctaccaagtaaagagc

SEQ ID NO: 43516 - DNA, 20 bp, synthetic construct
  misc_feature 1..20: note = chemically synthesized
  source 1..20: mol_type = other DNA
ctaccaagtaaagagctagc

SEQ ID NO: 43517 - DNA, 20 bp, synthetic construct
  misc_feature 1..20: note = chemically synthesized
  source 1..20: mol_type = other DNA
gagctagcaagtcatcaaaa

SEQ ID NO: 43518 - DNA, 20 bp, synthetic construct
  misc_feature 1..20: note = chemically synthesized
  source 1..20: mol_type = other DNA
agctagcaagtcatcaaaat

SEQ ID NO: 43519 - DNA, 20 bp, synthetic construct
  misc_feature 1..20: note = chemically synthesized
  source 1..20: mol_type = other DNA
gctagcaagtcatcaaaatg

SEQ ID NO: 43520 - DNA, 20 bp, synthetic construct
  misc_feature 1..20: note = chemically synthesized
  source 1..20: mol_type = other DNA
gtcatcaaaatggggacata

SEQ ID NO: 43521 - DNA, 20 bp, synthetic construct
  misc_feature 1..20: note = chemically synthesized
  source 1..20: mol_type = other DNA
ggggacatacagaaaaaaaa

SEQ ID NO: 43522 - DNA, 20 bp, synthetic construct
  misc_feature 1..20: note = chemically synthesized
  source 1..20: mol_type = other DNA
gggacatacagaaaaaaaaa

SEQ ID NO: 43523 - DNA, 20 bp, synthetic construct
  misc_feature 1..20: note = chemically synthesized
  source 1..20: mol_type = other DNA
acagaaaaaaaaaaggacac

SEQ ID NO: 43524 - DNA, 20 bp, synthetic construct
  misc_feature 1..20: note = chemically synthesized
  source 1..20: mol_type = other DNA
agaaaaaaaaaaggacacta

SEQ ID NO: 43525 - DNA, 20 bp, synthetic construct
  misc_feature 1..20: note = chemically synthesized
  source 1..20: mol_type = other DNA
gaaaaaaaaaaggacactag

SEQ ID NO: 43526 - DNA, 20 bp, synthetic construct
  misc_feature 1..20: note = chemically synthesized
  source 1..20: mol_type = other DNA
gaataatataccctgactcc

SEQ ID NO: 43527 - DNA, 20 bp, synthetic construct
  misc_feature 1..20: note = chemically synthesized
  source 1..20: mol_type = other DNA
ctctgtttgatgacaaattc

SEQ ID NO: 43528 - DNA, 20 bp, synthetic construct
  misc_feature 1..20: note = chemically synthesized
  source 1..20: mol_type = other DNA
attctggctttaaataattt

SEQ ID NO: 43529 - DNA, 20 bp, synthetic construct
  misc_feature 1..20: note = chemically synthesized
  source 1..20: mol_type = other DNA
ttctggctttaaataatttt

SEQ ID NO: 43530 - DNA, 20 bp, synthetic construct
  misc_feature 1..20: note = chemically synthesized
  source 1..20: mol_type = other DNA
tttaaataattttaggattt

SEQ ID NO: 43531 - DNA, 20 bp, synthetic construct
  misc_feature 1..20: note = chemically synthesized
  source 1..20: mol_type = other DNA
ttaaataattttaggatttt

SEQ ID NO: 43532 - DNA, 20 bp, synthetic construct
  misc_feature 1..20: note = chemically synthesized
  source 1..20: mol_type = other DNA
ttttaggattttaggcttct

SEQ ID NO: 43533 - DNA, 20 bp, synthetic construct
  misc_feature 1..20: note = chemically synthesized
  source 1..20: mol_type = other DNA
aggcttctcagctcccttcc

SEQ ID NO: 43534 - DNA, 20 bp, synthetic construct
  misc_feature 1..20: note = chemically synthesized
  source 1..20: mol_type = other DNA
ttctcagctcccttcccagt

SEQ ID NO: 43535 - DNA, 20 bp, synthetic construct
  misc_feature 1..20: note = chemically synthesized
  source 1..20: mol_type = other DNA
tcagctcccttcccagtgag

SEQ ID NO: 43536 - DNA, 20 bp, synthetic construct
  misc_feature 1..20: note = chemically synthesized
  source 1..20: mol_type = other DNA
cccttcccagtgagaagtat

SEQ ID NO: 43537 - DNA, 20 bp, synthetic construct
  misc_feature 1..20: note = chemically synthesized
  source 1..20: mol_type = other DNA
ttcccagtgagaagtataag

SEQ ID NO: 43538 - DNA, 20 bp, synthetic construct
  misc_feature 1..20: note = chemically synthesized
  source 1..20: mol_type = other DNA
tcccagtgagaagtataagc

SEQ ID NO: 43539 - DNA, 20 bp, synthetic construct
  misc_feature 1..20: note = chemically synthesized
  source 1..20: mol_type = other DNA
agtgagaagtataagcagga

SEQ ID NO: 43540 - DNA, 20 bp, synthetic construct
  misc_feature 1..20: note = chemically synthesized
  source 1..20: mol_type = other DNA
agaagtataagcaggacaga

SEQ ID NO: 43541 - DNA, 20 bp, synthetic construct
  misc_feature 1..20: note = chemically synthesized
  source 1..20: mol_type = other DNA
gaagtataagcaggacagac

SEQ ID NO: 43542 - DNA, 20 bp, synthetic construct
  misc_feature 1..20: note = chemically synthesized
  source 1..20: mol_type = other DNA
tataagcaggacagacaggc

SEQ ID NO: 43543 - DNA, 20 bp, synthetic construct
  misc_feature 1..20: note = chemically synthesized
  source 1..20: mol_type = other DNA
agcaggacagacaggcaagc

SEQ ID NO: 43544 - DNA, 20 bp, synthetic construct
  misc_feature 1..20: note = chemically synthesized
  source 1..20: mol_type = other DNA
aggacagacaggcaagcaag

SEQ ID NO: 43545 - DNA, 20 bp, synthetic construct
  misc_feature 1..20: note = chemically synthesized
  source 1..20: mol_type = other DNA
gacagacaggcaagcaagaa

SEQ ID NO: 43546 - DNA, 20 bp, synthetic construct
  misc_feature 1..20: note = chemically synthesized
  source 1..20: mol_type = other DNA
cagacaggcaagcaagaaga

SEQ ID NO: 43547 - DNA, 20 bp, synthetic construct
  misc_feature 1..20: note = chemically synthesized
  source 1..20: mol_type = other DNA
ggcaagcaagaagagagccc

SEQ ID NO: 43548 - DNA, 20 bp, synthetic construct
  misc_feature 1..20: note = chemically synthesized
  source 1..20: mol_type = other DNA
gcaagcaagaagagagcccc

SEQ ID NO: 43549 - DNA, 20 bp, synthetic construct
  misc_feature 1..20: note = chemically synthesized
  source 1..20: mol_type = other DNA
agccccaggcaatactcaca

SEQ ID NO: 43550 - DNA, 20 bp, synthetic construct
  misc_feature 1..20: note = chemically synthesized
  source 1..20: mol_type = other DNA
cccaggcaatactcacaaag

SEQ ID NO: 43551 - DNA, 20 bp, synthetic construct
  misc_feature 1..20: note = chemically synthesized
  source 1..20: mol_type = other DNA
aaagtagccaatgtcccctg

SEQ ID NO: 43552 - DNA, 20 bp, synthetic construct
  misc_feature 1..20: note = chemically synthesized
  source 1..20: mol_type = other DNA
gccaatgtcccctgtggtca

SEQ ID NO: 43553 - DNA, 20 bp, synthetic construct
  misc_feature 1..20: note = chemically synthesized
  source 1..20: mol_type = other DNA
caatgtcccctgtggtcata

SEQ ID NO: 43554 - DNA, 20 bp, synthetic construct
  misc_feature 1..20: note = chemically synthesized
  source 1..20: mol_type = other DNA
tgtggtcatagagaaatgaa

SEQ ID NO: 43555 - DNA, 20 bp, synthetic construct
  misc_feature 1..20: note = chemically synthesized
  source 1..20: mol_type = other DNA
tggtcatagagaaatgaaaa

SEQ ID NO: 43556 - DNA, 20 bp, synthetic construct
  misc_feature 1..20: note = chemically synthesized
  source 1..20: mol_type = other DNA
gtcatagagaaatgaaaaga

SEQ ID NO: 43557 - DNA, 20 bp, synthetic construct
  misc_feature 1..20: note = chemically synthesized
  source 1..20: mol_type = other DNA
catagagaaatgaaaagaga

SEQ ID NO: 43558 - DNA, 20 bp, synthetic construct
  misc_feature 1..20: note = chemically synthesized
  source 1..20: mol_type = other DNA
atagagaaatgaaaagagag

SEQ ID NO: 43559 - DNA, 20 bp, synthetic construct
  misc_feature 1..20: note = chemically synthesized
  source 1..20: mol_type = other DNA
tgaaaagagagaggattctc

SEQ ID NO: 43560 - DNA, 20 bp, synthetic construct
  misc_feature 1..20: note = chemically synthesized
  source 1..20: mol_type = other DNA
aaagagagaggattctctgg

SEQ ID NO: 43561 - DNA, 20 bp, synthetic construct
  misc_feature 1..20: note = chemically synthesized
  source 1..20: mol_type = other DNA
agaggattctctggaagcac

SEQ ID NO: 43562 - DNA, 20 bp, synthetic construct
  misc_feature 1..20: note = chemically synthesized
  source 1..20: mol_type = other DNA
tcttttctgtctgtcctctc

SEQ ID NO: 43563 - DNA, 20 bp, synthetic construct
  misc_feature 1..20: note = chemically synthesized
  source 1..20: mol_type = other DNA
cttttctgtctgtcctctct

SEQ ID NO: 43564 - DNA, 20 bp, synthetic construct
  misc_feature 1..20: note = chemically synthesized
  source 1..20: mol_type = other DNA
ttttctgtctgtcctctcta

SEQ ID NO: 43565 - DNA, 20 bp, synthetic construct
  misc_feature 1..20: note = chemically synthesized
  source 1..20: mol_type = other DNA
cctctctagggaatcacccc

SEQ ID NO: 43566 - DNA, 20 bp, synthetic construct
  misc_feature 1..20: note = chemically synthesized
  source 1..20: mol_type = other DNA
ctctctagggaatcacccca

SEQ ID NO: 43567 - DNA, 20 bp, synthetic construct
  misc_feature 1..20: note = chemically synthesized
  source 1..20: mol_type = other DNA
caccccaaggtactgtactt

SEQ ID NO: 43568 - DNA, 20 bp, synthetic construct
  misc_feature 1..20: note = chemically synthesized
  source 1..20: mol_type = other DNA
accccaaggtactgtacttt

SEQ ID NO: 43569 - DNA, 20 bp, synthetic construct
  misc_feature 1..20: note = chemically synthesized
  source 1..20: mol_type = other DNA
aggtactgtactttgggatt

SEQ ID NO: 43570 - DNA, 20 bp, synthetic construct
  misc_feature 1..20: note = chemically synthesized
  source 1..20: mol_type = other DNA
ggtactgtactttgggatta

SEQ ID NO: 43571 - DNA, 20 bp, synthetic construct
  misc_feature 1..20: note = chemically synthesized
  source 1..20: mol_type = other DNA
gtactttgggattaaggctt

SEQ ID NO: 43572 - DNA, 20 bp, synthetic construct
  misc_feature 1..20: note = chemically synthesized
  source 1..20: mol_type = other DNA
ttaaggctttagtcccactg

SEQ ID NO: 43573 - DNA, 20 bp, synthetic construct
  misc_feature 1..20: note = chemically synthesized
  source 1..20: mol_type = other DNA
ggactacttgctattctgtt

SEQ ID NO: 43574 - DNA, 20 bp, synthetic construct
  misc_feature 1..20: note = chemically synthesized
  source 1..20: mol_type = other DNA
ttgctattctgttcagtttc

SEQ ID NO: 43575 - DNA, 20 bp, synthetic construct
  misc_feature 1..20: note = chemically synthesized
  source 1..20: mol_type = other DNA
ctattctgttcagtttctag

SEQ ID NO: 43576 - DNA, 20 bp, synthetic construct
  misc_feature 1..20: note = chemically synthesized
  source 1..20: mol_type = other DNA
tattctgttcagtttctaga

SEQ ID NO: 43577 - DNA, 20 bp, synthetic construct
  misc_feature 1..20: note = chemically synthesized
  source 1..20: mol_type = other DNA
tttctagaaggaactatgta

SEQ ID NO: 43578 - DNA, 20 bp, synthetic construct
  misc_feature 1..20: note = chemically synthesized
  source 1..20: mol_type = other DNA
atgtacggtttttgtctccc

SEQ ID NO: 43579 - DNA, 20 bp, synthetic construct
  misc_feature 1..20: note = chemically synthesized
  source 1..20: mol_type = other DNA
gtacggtttttgtctcccta

SEQ ID NO: 43580 - DNA, 20 bp, synthetic construct
  misc_feature 1..20: note = chemically synthesized
  source 1..20: mol_type = other DNA
tttgtctccctagagaaact

SEQ ID NO: 43581 - DNA, 20 bp, synthetic construct
  misc_feature 1..20: note = chemically synthesized
  source 1..20: mol_type = other DNA
ttgtctccctagagaaacta

SEQ ID NO: 43582 - DNA, 20 bp, synthetic construct
  misc_feature 1..20: note = chemically synthesized
  source 1..20: mol_type = other DNA
tccctagagaaactaaggta

SEQ ID NO: 43583 - DNA, 20 bp, synthetic construct
  misc_feature 1..20: note = chemically synthesized
  source 1..20: mol_type = other DNA
ctagagaaactaaggtacag

SEQ ID NO: 43584 - DNA, 20 bp, synthetic construct
  misc_feature 1..20: note = chemically synthesized
  source 1..20: mol_type = other DNA
ttgtttacaatgcactcctt

SEQ ID NO: 43585 - DNA, 20 bp, synthetic construct
  misc_feature 1..20: note = chemically synthesized
  source 1..20: mol_type = other DNA
gtttacaatgcactccttaa

SEQ ID NO: 43586 - DNA, 20 bp, synthetic construct
  misc_feature 1..20: note = chemically synthesized
  source 1..20: mol_type = other DNA
ttacaatgcactccttaaga

SEQ ID NO: 43587 - DNA, 20 bp, synthetic construct
  misc_feature 1..20: note = chemically synthesized
  source 1..20: mol_type = other DNA
aatgcactccttaagagagc

SEQ ID NO: 43588 - DNA, 20 bp, synthetic construct
  misc_feature 1..20: note = chemically synthesized
  source 1..20: mol_type = other DNA
ctccttaagagagctagaac

SEQ ID NO: 43589 - DNA, 20 bp, synthetic construct
  misc_feature 1..20: note = chemically synthesized
  source 1..20: mol_type = other DNA
tccttaagagagctagaact

SEQ ID NO: 43590 - DNA, 20 bp, synthetic construct
  misc_feature 1..20: note = chemically synthesized
  source 1..20: mol_type = other DNA
taagagagctagaactgggt

SEQ ID NO: 43591 - DNA, 20 bp, synthetic construct
  misc_feature 1..20: note = chemically synthesized
  source 1..20: mol_type = other DNA
tgggtgagattctgttttaa

SEQ ID NO: 43592 - DNA, 20 bp, synthetic construct
  misc_feature 1..20: note = chemically synthesized
  source 1..20: mol_type = other DNA
cagctttattttcttttcct

SEQ ID NO: 43593 - DNA, 20 bp, synthetic construct
  misc_feature 1..20: note = chemically synthesized
  source 1..20: mol_type = other DNA
ttgtcactgtcaccaccttt

SEQ ID NO: 43594 - DNA, 20 bp, synthetic construct
  misc_feature 1..20: note = chemically synthesized
  source 1..20: mol_type = other DNA
tgtcactgtcaccaccttta

SEQ ID NO: 43595 - DNA, 20 bp, synthetic construct
  misc_feature 1..20: note = chemically synthesized
  source 1..20: mol_type = other DNA
ggcaaatgttaaatgcgctt

SEQ ID NO: 43596 - DNA, 20 bp, synthetic construct
  misc_feature 1..20: note = chemically synthesized
  source 1..20: mol_type = other DNA
gaaactttttttcctatttt

SEQ ID NO: 43597 - DNA, 20 bp, synthetic construct
  misc_feature 1..20: note = chemically synthesized
  source 1..20: mol_type = other DNA
tgagatttgctcctttatat

SEQ ID NO: 43598 - DNA, 20 bp, synthetic construct
  misc_feature 1..20: note = chemically synthesized
  source 1..20: mol_type = other DNA
gagatttgctcctttatatg

SEQ ID NO: 43599 - DNA, 20 bp, synthetic construct
  misc_feature 1..20: note = chemically synthesized
  source 1..20: mol_type = other DNA
tcctttatatgaggctttct

SEQ ID NO: 43600 - DNA, 20 bp, synthetic construct
  misc_feature 1..20: note = chemically synthesized
  source 1..20: mol_type = other DNA
tatatgaggctttcttggaa

SEQ ID NO: 43601 - DNA, 20 bp, synthetic construct
  misc_feature 1..20: note = chemically synthesized
  source 1..20: mol_type = other DNA
atatgaggctttcttggaaa

SEQ ID NO: 43602 - DNA, 20 bp, synthetic construct
  misc_feature 1..20: note = chemically synthesized
  source 1..20: mol_type = other DNA
atgaggctttcttggaaaag

SEQ ID NO: 43603 - DNA, 20 bp, synthetic construct
  misc_feature 1..20: note = chemically synthesized
  source 1..20: mol_type = other DNA
gctttcttggaaaaggagaa

SEQ ID NO: 43604 - DNA, 20 bp, synthetic construct
  misc_feature 1..20: note = chemically synthesized
  source 1..20: mol_type = other DNA
ctttcttggaaaaggagaat

SEQ ID NO: 43605 - DNA, 20 bp, synthetic construct
  misc_feature 1..20: note = chemically synthesized
  source 1..20: mol_type = other DNA
ttcttggaaaaggagaatgg

SEQ ID NO: 43606 - DNA, 20 bp, synthetic construct
  misc_feature 1..20: note = chemically synthesized
  source 1..20: mol_type = other DNA
cttggaaaaggagaatggga

SEQ ID NO: 43607 - DNA, 20 bp, synthetic construct
  misc_feature 1..20: note = chemically synthesized
  source 1..20: mol_type = other DNA
gaaaaggagaatgggagaga

SEQ ID NO: 43608 - DNA, 20 bp, synthetic construct
  misc_feature 1..20: note = chemically synthesized
  source 1..20: mol_type = other DNA
gggagagatggatatcattt

SEQ ID NO: 43609 - DNA, 20 bp, synthetic construct
  misc_feature 1..20: note = chemically synthesized
  source 1..20: mol_type = other DNA
agagatggatatcattttgg

SEQ ID NO: 43610 - DNA, 20 bp, synthetic construct
  misc_feature 1..20: note = chemically synthesized
  source 1..20: mol_type = other DNA
tatcattttggaagatgatg

SEQ ID NO: 43611 - DNA, 20 bp, synthetic construct
  misc_feature 1..20: note = chemically synthesized
  source 1..20: mol_type = other DNA
tcattttggaagatgatgaa

SEQ ID NO: 43612 - DNA, 20 bp, synthetic construct
  misc_feature 1..20: note = chemically synthesized
  source 1..20: mol_type = other DNA
cattttggaagatgatgaag

SEQ ID NO: 43613 - DNA, 20 bp, synthetic construct
  misc_feature 1..20: note = chemically synthesized
  source 1..20: mol_type = other DNA
attttggaagatgatgaaga

SEQ ID NO: 43614 - DNA, 20 bp, synthetic construct
  misc_feature 1..20: note = chemically synthesized
  source 1..20: mol_type = other DNA
agatgatgaagagggtaaaa

SEQ ID NO: 43615 - DNA, 20 bp, synthetic construct
  misc_feature 1..20: note = chemically synthesized
  source 1..20: mol_type = other DNA
gatgatgaagagggtaaaaa

SEQ ID NO: 43616 - DNA, 20 bp, synthetic construct
  misc_feature 1..20: note = chemically synthesized
  source 1..20: mol_type = other DNA
atgatgaagagggtaaaaaa

SEQ ID NO: 43617 - DNA, 20 bp, synthetic construct
  misc_feature 1..20: note = chemically synthesized
  source 1..20: mol_type = other DNA
tgatgaagagggtaaaaaag

SEQ ID NO: 43618 - DNA, 20 bp, synthetic construct
  misc_feature 1..20: note = chemically synthesized
  source 1..20: mol_type = other DNA
agggtaaaaaaggggacaaa

SEQ ID NO: 43619 - DNA, 20 bp, synthetic construct
  misc_feature 1..20: note = chemically synthesized
  source 1..20: mol_type = other DNA
acaaatggaaatttgtgttg

SEQ ID NO: 43620 - DNA, 20 bp, synthetic construct
  misc_feature 1..20: note = chemically synthesized
  source 1..20: mol_type = other DNA
atggaaatttgtgttgcaga

SEQ ID NO: 43621 - DNA, 20 bp, synthetic construct
  misc_feature 1..20: note = chemically synthesized
  source 1..20: mol_type = other DNA
aatttgtgttgcagatagat

SEQ ID NO: 43622 - DNA, 20 bp, synthetic construct
  misc_feature 1..20: note = chemically synthesized
  source 1..20: mol_type = other DNA
atttgtgttgcagatagatg

SEQ ID NO: 43623 - DNA, 20 bp, synthetic construct
  misc_feature 1..20: note = chemically synthesized
  source 1..20: mol_type = other DNA
ttgtgttgcagatagatgag

SEQ ID NO: 43624 - DNA, 20 bp, synthetic construct
  misc_feature 1..20: note = chemically synthesized
  source 1..20: mol_type = other DNA
tagatgaggagccaacaaaa

SEQ ID NO: 43625 - DNA, 20 bp, synthetic construct
  misc_feature 1..20: note = chemically synthesized
  source 1..20: mol_type = other DNA
gatgaggagccaacaaaaaa

SEQ ID NO: 43626 - DNA, 20 bp, synthetic construct
  misc_feature 1..20: note = chemically synthesized
  source 1..20: mol_type = other DNA
gagccaacaaaaaagagcct

SEQ ID NO: 43627 - DNA, 20 bp, synthetic construct
  misc_feature 1..20: note = chemically synthesized
  source 1..20: mol_type = other DNA
agccaacaaaaaagagcctc

SEQ ID NO: 43628 - DNA, 20 bp, synthetic construct
  misc_feature 1..20: note = chemically synthesized
  source 1..20: mol_type = other DNA
caaaaaagagcctcaggatc

SEQ ID NO: 43629 - DNA, 20 bp, synthetic construct
  misc_feature 1..20: note = chemically synthesized
  source 1..20: mol_type = other DNA
agcacacattatcacaaact

SEQ ID NO: 43630 - DNA, 20 bp, synthetic construct
  misc_feature 1..20: note = chemically synthesized
  source 1..20: mol_type = other DNA
ccatcactgctgaccctctc

SEQ ID NO: 43631 - DNA, 20 bp, synthetic construct
  misc_feature 1..20: note = chemically synthesized
  source 1..20: mol_type = other DNA
ccggacctgactccacccct

SEQ ID NO: 43632 - DNA, 20 bp, synthetic construct
  misc_feature 1..20: note = chemically synthesized
  source 1..20: mol_type = other DNA
cggacctgactccacccctg

SEQ ID NO: 43633 - DNA, 20 bp, synthetic construct
  misc_feature 1..20: note = chemically synthesized
  source 1..20: mol_type = other DNA
ggacctgactccacccctga

SEQ ID NO: 43634 - DNA, 20 bp, synthetic construct
  misc_feature 1..20: note = chemically synthesized
  source 1..20: mol_type = other DNA
gactccacccctgagggaca

SEQ ID NO: 43635 - DNA, 20 bp, synthetic construct
  misc_feature 1..20: note = chemically synthesized
  source 1..20: mol_type = other DNA
actccacccctgagggacac

SEQ ID NO: 43636 - DNA, 20 bp, synthetic construct
  misc_feature 1..20: note = chemically synthesized
  source 1..20: mol_type = other DNA
cacccctgagggacacaggt

SEQ ID NO: 43637 - DNA, 20 bp, synthetic construct
  misc_feature 1..20: note = chemically synthesized
  source 1..20: mol_type = other DNA
agccttgaccaatgactttt

SEQ ID NO: 43638 - DNA, 20 bp, synthetic construct
  misc_feature 1..20: note = chemically synthesized
  source 1..20: mol_type = other DNA
ccaatgacttttaagtacca

SEQ ID NO: 43639 - DNA, 20 bp, synthetic construct
  misc_feature 1..20: note = chemically synthesized
  source 1..20: mol_type = other DNA
aatgacttttaagtaccatg

SEQ ID NO: 43640 - DNA, 20 bp, synthetic construct
  misc_feature 1..20: note = chemically synthesized
  source 1..20: mol_type = other DNA
cttttaagtaccatggagaa

SEQ ID NO: 43641 - DNA, 20 bp, synthetic construct
  misc_feature 1..20: note = chemically synthesized
  source 1..20: mol_type = other DNA
ttttaagtaccatggagaac

SEQ ID NO: 43642 - DNA, 20 bp, synthetic construct
  misc_feature 1..20: note = chemically synthesized
  source 1..20: mol_type = other DNA
tttaagtaccatggagaaca

SEQ ID NO: 43643 - DNA, 20 bp, synthetic construct
  misc_feature 1..20: note = chemically synthesized
  source 1..20: mol_type = other DNA
ttaagtaccatggagaacag

SEQ ID NO: 43644 - DNA, 20 bp, synthetic construct
  misc_feature 1..20: note = chemically synthesized
  source 1..20: mol_type = other DNA
taagtaccatggagaacagg

SEQ ID NO: 43645 - DNA, 20 bp, synthetic construct
  misc_feature 1..20: note = chemically synthesized
  source 1..20: mol_type = other DNA
taccatggagaacagggggc

SEQ ID NO: 43646 - DNA, 20 bp, synthetic construct
  misc_feature 1..20: note = chemically synthesized
  source 1..20: mol_type = other DNA
agaacagggggccagaactt

SEQ ID NO: 43647 - DNA, 20 bp, synthetic construct
  misc_feature 1..20: note = chemically synthesized
  source 1..20: mol_type = other DNA
acagggggccagaacttcgg

SEQ ID NO: 43648 - DNA, 20 bp, synthetic construct
  misc_feature 1..20: note = chemically synthesized
  source 1..20: mol_type = other DNA
gggccagaacttcggcagta

SEQ ID NO: 43649 - DNA, 20 bp, synthetic construct
  misc_feature 1..20: note = chemically synthesized
  source 1..20: mol_type = other DNA
acttcggcagtaaagaataa

SEQ ID NO: 43650 - DNA, 20 bp, synthetic construct
  misc_feature 1..20: note = chemically synthesized
  source 1..20: mol_type = other DNA
cttcggcagtaaagaataaa

SEQ ID NO: 43651 - DNA, 20 bp, synthetic construct
  misc_feature 1..20: note = chemically synthesized
  source 1..20: mol_type = other DNA
ggcagtaaagaataaaaggc

SEQ ID NO: 43652 - DNA, 20 bp, synthetic construct
  misc_feature 1..20: note = chemically synthesized
  source 1..20: mol_type = other DNA
gtaaagaataaaaggccaga

SEQ ID NO: 43653 - DNA, 20 bp, synthetic construct
  misc_feature 1..20: note = chemically synthesized
  source 1..20: mol_type = other DNA
aaagaataaaaggccagaca

SEQ ID NO: 43654 - DNA, 20 bp, synthetic construct
  misc_feature 1..20: note = chemically synthesized
  source 1..20: mol_type = other DNA
agaataaaaggccagacaga

SEQ ID NO: 43655 - DNA, 20 bp, synthetic construct
  misc_feature 1..20: note = chemically synthesized
  source 1..20: mol_type = other DNA
gaataaaaggccagacagag

SEQ ID NO: 43656 - DNA, 20 bp, synthetic construct
  misc_feature 1..20: note = chemically synthesized
  source 1..20: mol_type = other DNA
taaaaggccagacagagagg

SEQ ID NO: 43657 - DNA, 20 bp, synthetic construct
  misc_feature 1..20: note = chemically synthesized
  source 1..20: mol_type = other DNA
aaggccagacagagaggcag

SEQ ID NO: 43658 - DNA, 20 bp, synthetic construct
  misc_feature 1..20: note = chemically synthesized
  source 1..20: mol_type = other DNA
gcacatatctgcttccgaca

SEQ ID NO: 43659 - DNA, 20 bp, synthetic construct
  misc_feature 1..20: note = chemically synthesized
  source 1..20: mol_type = other DNA
tccgacacagctgcaatcac

SEQ ID NO: 43660 - DNA, 20 bp, synthetic construct
  misc_feature 1..20: note = chemically synthesized
  source 1..20: mol_type = other DNA
acacagctgcaatcactagc

SEQ ID NO: 43661 - DNA, 20 bp, synthetic construct
  misc_feature 1..20: note = chemically synthesized
  source 1..20: mol_type = other DNA
tgcaatcactagcaagctct

SEQ ID NO: 43662 - DNA, 20 bp, synthetic construct
  misc_feature 1..20: note = chemically synthesized
  source 1..20: mol_type = other DNA
gcaatcactagcaagctctc

SEQ ID NO: 43663 - DNA, 20 bp, synthetic construct
  misc_feature 1..20: note = chemically synthesized
  source 1..20: mol_type = other DNA
cactagcaagctctcaggcc

SEQ ID NO: 43664 - DNA, 20 bp, synthetic construct
  misc_feature 1..20: note = chemically synthesized
  source 1..20: mol_type = other DNA
agctctcaggcctggcatca

SEQ ID NO: 43665 - DNA, 20 bp, synthetic construct
  misc_feature 1..20: note = chemically synthesized
  source 1..20: mol_type = other DNA
tcatggtgcattttactgct

SEQ ID NO: 43666 - DNA, 20 bp, synthetic construct
  misc_feature 1..20: note = chemically synthesized
  source 1..20: mol_type = other DNA
catggtgcattttactgctg

SEQ ID NO: 43667 - DNA, 20 bp, synthetic construct
  misc_feature 1..20: note = chemically synthesized
  source 1..20: mol_type = other DNA
tggtgcattttactgctgag

SEQ ID NO: 43668 - DNA, 20 bp, synthetic construct
  misc_feature 1..20: note = chemically synthesized
  source 1..20: mol_type = other DNA
tgcattttactgctgaggag

SEQ ID NO: 43669 - DNA, 20 bp, synthetic construct
  misc_feature 1..20: note = chemically synthesized
  source 1..20: mol_type = other DNA
gcattttactgctgaggaga

SEQ ID NO: 43670 - DNA, 20 bp, synthetic construct
  misc_feature 1..20: note = chemically synthesized
  source 1..20: mol_type = other DNA
gaggagaaggctgccgtcac

SEQ ID NO: 43671 - DNA, 20 bp, synthetic construct
  misc_feature 1..20: note = chemically synthesized
  source 1..20: mol_type = other DNA
aggctgccgtcactagcctg

SEQ ID NO: 43672 - DNA, 20 bp, synthetic construct
  misc_feature 1..20: note = chemically synthesized
  source 1..20: mol_type = other DNA
gctgccgtcactagcctgtg

SEQ ID NO: 43673 - DNA, 20 bp, synthetic construct
  misc_feature 1..20: note = chemically synthesized
  source 1..20: mol_type = other DNA
ccgtcactagcctgtggagc

SEQ ID NO: 43674 - DNA, 20 bp, synthetic construct
  misc_feature 1..20: note = chemically synthesized
  source 1..20: mol_type = other DNA
cctgtggagcaagatgaatg

SEQ ID NO: 43675 - DNA, 20 bp, synthetic construct
  misc_feature 1..20: note = chemically synthesized
  source 1..20: mol_type = other DNA
gtggagcaagatgaatgtgg

SEQ ID NO: 43676 - DNA, 20 bp, synthetic construct
  misc_feature 1..20: note = chemically synthesized
  source 1..20: mol_type = other DNA
ggagcaagatgaatgtggaa

SEQ ID NO: 43677 - DNA, 20 bp, synthetic construct
  misc_feature 1..20: note = chemically synthesized
  source 1..20: mol_type = other DNA
gagcaagatgaatgtggaag

SEQ ID NO: 43678 - DNA, 20 bp, synthetic construct
  misc_feature 1..20: note = chemically synthesized
  source 1..20: mol_type = other DNA
aagatgaatgtggaagaggc

SEQ ID NO: 43679 - DNA, 20 bp, synthetic construct
  misc_feature 1..20: note = chemically synthesized
  source 1..20: mol_type = other DNA
gatgaatgtggaagaggctg

SEQ ID NO: 43680 - DNA, 20 bp, synthetic construct
  misc_feature 1..20: note = chemically synthesized
  source 1..20: mol_type = other DNA
atgaatgtggaagaggctgg

SEQ ID NO: 43681 - DNA, 20 bp, synthetic construct
  misc_feature 1..20: note = chemically synthesized
  source 1..20: mol_type = other DNA
tgtggaagaggctggaggtg

SEQ ID NO: 43682 - DNA, 20 bp, synthetic construct
  misc_feature 1..20: note = chemically synthesized
  source 1..20: mol_type = other DNA
agaggctggaggtgaagcct

SEQ ID NO: 43683 - DNA, 20 bp, synthetic construct
  misc_feature 1..20: note = chemically synthesized
  source 1..20: mol_type = other DNA
gaggctggaggtgaagcctt

SEQ ID NO: 43684 - DNA, 20 bp, synthetic construct
  misc_feature 1..20: note = chemically synthesized
  source 1..20: mol_type = other DNA
gctggaggtgaagccttggg

SEQ ID NO: 43685 - DNA, 20 bp, synthetic construct
  misc_feature 1..20: note = chemically synthesized
  source 1..20: mol_type = other DNA
ctggaggtgaagccttgggc

SEQ ID NO: 43686 - DNA, 20 bp, synthetic construct
  misc_feature 1..20: note = chemically synthesized
  source 1..20: mol_type = other DNA
aggtgaagccttgggcaggt

SEQ ID NO: 43687 - DNA, 20 bp, synthetic construct
  misc_feature 1..20: note = chemically synthesized
  source 1..20: mol_type = other DNA
agccttgggcaggtaagcat

SEQ ID NO: 43688 - DNA, 20 bp, synthetic construct
  misc_feature 1..20: note = chemically synthesized
  source 1..20: mol_type = other DNA
aagcattggttctcaatgca

SEQ ID NO: 43689 - DNA, 20 bp, synthetic construct
  misc_feature 1..20: note = chemically synthesized
  source 1..20: mol_type = other DNA
agcattggttctcaatgcat

SEQ ID NO: 43690 - DNA, 20 bp, synthetic construct
  misc_feature 1..20: note = chemically synthesized
  source 1..20: mol_type = other DNA
gttctcaatgcatgggaatg

SEQ ID NO: 43691 - DNA, 20 bp, synthetic construct
  misc_feature 1..20: note = chemically synthesized
  source 1..20: mol_type = other DNA
ttctcaatgcatgggaatga

SEQ ID NO: 43692 - DNA, 20 bp, synthetic construct
  misc_feature 1..20: note = chemically synthesized
  source 1..20: mol_type = other DNA
tctcaatgcatgggaatgaa

SEQ ID NO: 43693 - DNA, 20 bp, synthetic construct
  misc_feature 1..20: note = chemically synthesized
  source 1..20: mol_type = other DNA
atgaagggtgaatattaccc

SEQ ID NO: 43694 - DNA, 20 bp, synthetic construct
  misc_feature 1..20: note = chemically synthesized
  source 1..20: mol_type = other DNA
agggtgaatattaccctagc

SEQ ID NO: 43695 - DNA, 20 bp, synthetic construct
  misc_feature 1..20: note = chemically synthesized
  source 1..20: mol_type = other DNA
tattaccctagcaagttgat

SEQ ID NO: 43696 - DNA, 20 bp, synthetic construct
  misc_feature 1..20: note = chemically synthesized
  source 1..20: mol_type = other DNA
attaccctagcaagttgatt

SEQ ID NO: 43697 - DNA, 20 bp, synthetic construct
  misc_feature 1..20: note = chemically synthesized
  source 1..20: mol_type = other DNA
ccctagcaagttgattggga

SEQ ID NO: 43698 - DNA, 20 bp, synthetic construct
  misc_feature 1..20: note = chemically synthesized
  source 1..20: mol_type = other DNA
agttgattgggaaagtcctc

SEQ ID NO: 43699 - DNA, 20 bp, synthetic construct
  misc_feature 1..20: note = chemically synthesized
  source 1..20: mol_type = other DNA
ctctaattttgtatctgata

SEQ ID NO: 43700 - DNA, 20 bp, synthetic construct
  misc_feature 1..20: note = chemically synthesized
  source 1..20: mol_type = other DNA
tctgatatggtgtcatttca

SEQ ID NO: 43701 - DNA, 20 bp, synthetic construct
  misc_feature 1..20: note = chemically synthesized
  source 1..20: mol_type = other DNA
gactcctcgttgtttacccc

SEQ ID NO: 43702 - DNA, 20 bp, synthetic construct
  misc_feature 1..20: note = chemically synthesized
  source 1..20: mol_type = other DNA
tcgttgtttacccctggacc

SEQ ID NO: 43703 - DNA, 20 bp, synthetic construct
  misc_feature 1..20: note = chemically synthesized
  source 1..20: mol_type = other DNA
gttgtttacccctggaccca

SEQ ID NO: 43704 - DNA, 20 bp, synthetic construct
  misc_feature 1..20: note = chemically synthesized
  source 1..20: mol_type = other DNA
tggacccagagattttttga

SEQ ID NO: 43705 - DNA, 20 bp, synthetic construct
  misc_feature 1..20: note = chemically synthesized
  source 1..20: mol_type = other DNA
cagagattttttgacagctt

SEQ ID NO: 43706 - DNA, 20 bp, synthetic construct
  misc_feature 1..20: note = chemically synthesized
  source 1..20: mol_type = other DNA
gtcgtctccctctgccatcc

SEQ ID NO: 43707 - DNA, 20 bp, synthetic construct
  misc_feature 1..20: note = chemically synthesized
  source 1..20: mol_type = other DNA
tcgtctccctctgccatcct

SEQ ID NO: 43708 - DNA, 20 bp, synthetic construct
  misc_feature 1..20: note = chemically synthesized
  source 1..20: mol_type = other DNA
ctgccatcctgggcaacccc

SEQ ID NO: 43709 - DNA, 20 bp, synthetic construct
  misc_feature 1..20: note = chemically synthesized
  source 1..20: mol_type = other DNA
tgccatcctgggcaacccca

SEQ ID NO: 43710 - DNA, 20 bp, synthetic construct
  misc_feature 1..20: note = chemically synthesized
  source 1..20: mol_type = other DNA
tcctgggcaaccccaaggtc

SEQ ID NO: 43711 - DNA, 20 bp, synthetic construct
  misc_feature 1..20: note = chemically synthesized
  source 1..20: mol_type = other DNA
cctgggcaaccccaaggtca

SEQ ID NO: 43712 - DNA, 20 bp, synthetic construct
  misc_feature 1..20: note = chemically synthesized
  source 1..20: mol_type = other DNA
aaccccaaggtcaaggccca

SEQ ID NO: 43713 - DNA, 20 bp, synthetic construct
  misc_feature 1..20: note = chemically synthesized
  source 1..20: mol_type = other DNA
ccaaggtcaaggcccatggc

SEQ ID NO: 43714 - DNA, 20 bp, synthetic construct
  misc_feature 1..20: note = chemically synthesized
  source 1..20: mol_type = other DNA
aggtcaaggcccatggcaag

SEQ ID NO: 43715 - DNA, 20 bp, synthetic construct
  misc_feature 1..20: note = chemically synthesized
  source 1..20: mol_type = other DNA
ggtcaaggcccatggcaaga

SEQ ID NO: 43716 - DNA, 20 bp, synthetic construct
  misc_feature 1..20: note = chemically synthesized
  source 1..20: mol_type = other DNA
aagaaggtgctgacttcctt

SEQ ID NO: 43717 - DNA, 20 bp, synthetic construct
  misc_feature 1..20: note = chemically synthesized
  source 1..20: mol_type = other DNA
gaaggtgctgacttcctttg

SEQ ID NO: 43718 - DNA, 20 bp, synthetic construct
  misc_feature 1..20: note = chemically synthesized
  source 1..20: mol_type = other DNA
tggagatgctattaaaaaca

SEQ ID NO: 43719 - DNA, 20 bp, synthetic construct
  misc_feature 1..20: note = chemically synthesized
  source 1..20: mol_type = other DNA
ttaaaaacatggacaacctc

SEQ ID NO: 43720 - DNA, 20 bp, synthetic construct
  misc_feature 1..20: note = chemically synthesized
  source 1..20: mol_type = other DNA
acctcaagcccgcctttgct

SEQ ID NO: 43721 - DNA, 20 bp, synthetic construct
  misc_feature 1..20: note = chemically synthesized
  source 1..20: mol_type = other DNA
aagcccgcctttgctaagct

SEQ ID NO: 43722 - DNA, 20 bp, synthetic construct
  misc_feature 1..20: note = chemically synthesized
  source 1..20: mol_type = other DNA
ccgcctttgctaagctgagt

SEQ ID NO: 43723 - DNA, 20 bp, synthetic construct
  misc_feature 1..20: note = chemically synthesized
  source 1..20: mol_type = other DNA
tgagtgagctgcactgtgac

SEQ ID NO: 43724 - DNA, 20 bp, synthetic construct
  misc_feature 1..20: note = chemically synthesized
  source 1..20: mol_type = other DNA
gcactgtgacaagctgcatg

SEQ ID NO: 43725 - DNA, 20 bp, synthetic construct
  misc_feature 1..20: note = chemically synthesized
  source 1..20: mol_type = other DNA
acaagctgcatgtggatcct

SEQ ID NO: 43726 - DNA, 20 bp, synthetic construct
  misc_feature 1..20: note = chemically synthesized
  source 1..20: mol_type = other DNA
atgtggatcctgagaacttc

SEQ ID NO: 43727 - DNA, 20 bp, synthetic construct
  misc_feature 1..20: note = chemically synthesized
  source 1..20: mol_type = other DNA
tgtggatcctgagaacttca

SEQ ID NO: 43728 - DNA, 20 bp, synthetic construct
  misc_feature 1..20: note = chemically synthesized
  source 1..20: mol_type = other DNA
gatcctgagaacttcaaggt

SEQ ID NO: 43729 - DNA, 20 bp, synthetic construct
  misc_feature 1..20: note = chemically synthesized
  source 1..20: mol_type = other DNA
tgagaacttcaaggtgagtt

SEQ ID NO: 43730 - DNA, 20 bp, synthetic construct
  misc_feature 1..20: note = chemically synthesized
  source 1..20: mol_type = other DNA
gagaacttcaaggtgagttc

SEQ ID NO: 43731 - DNA, 20 bp, synthetic construct
  misc_feature 1..20: note = chemically synthesized
  source 1..20: mol_type = other DNA
ttcaaggtgagttcaggtgc

SEQ ID NO: 43732 - DNA, 20 bp, synthetic construct
  misc_feature 1..20: note = chemically synthesized
  source 1..20: mol_type = other DNA
gtgctggtgatgtgattttt

SEQ ID NO: 43733 - DNA, 20 bp, synthetic construct
  misc_feature 1..20: note = chemically synthesized
  source 1..20: mol_type = other DNA
ttatattttgacattaattg

SEQ ID NO: 43734 - DNA, 20 bp, synthetic construct
  misc_feature 1..20: note = chemically synthesized
  source 1..20: mol_type = other DNA
attgaagctcataatcttat

SEQ ID NO: 43735 - DNA, 20 bp, synthetic construct
  misc_feature 1..20: note = chemically synthesized
  source 1..20: mol_type = other DNA
aagctcataatcttattgga

SEQ ID NO: 43736 - DNA, 20 bp, synthetic construct
  misc_feature 1..20: note = chemically synthesized
  source 1..20: mol_type = other DNA
tcttattggaaagaccaaca

SEQ ID NO: 43737 - DNA, 20 bp, synthetic construct
  misc_feature 1..20: note = chemically synthesized
  source 1..20: mol_type = other DNA
ggaaagaccaacaaagatct

SEQ ID NO: 43738 - DNA, 20 bp, synthetic construct
  misc_feature 1..20: note = chemically synthesized
  source 1..20: mol_type = other DNA
aacaaagatctcagaaatca

SEQ ID NO: 43739 - DNA, 20 bp, synthetic construct
  misc_feature 1..20: note = chemically synthesized
  source 1..20: mol_type = other DNA
acaaagatctcagaaatcat

SEQ ID NO: 43740 - DNA, 20 bp, synthetic construct
  misc_feature 1..20: note = chemically synthesized
  source 1..20: mol_type = other DNA
gatctcagaaatcatgggtc

SEQ ID NO: 43741 - DNA, 20 bp, synthetic construct
  misc_feature 1..20: note = chemically synthesized
  source 1..20: mol_type = other DNA
tcatgggtcgagcttgatgt

SEQ ID NO: 43742 - DNA, 20 bp, synthetic construct
  misc_feature 1..20: note = chemically synthesized
  source 1..20: mol_type = other DNA
ggtcgagcttgatgttagaa

SEQ ID NO: 43743 - DNA, 20 bp, synthetic construct
  misc_feature 1..20: note = chemically synthesized
  source 1..20: mol_type = other DNA
cgagcttgatgttagaacag

SEQ ID NO: 43744 - DNA, 20 bp, synthetic construct
  misc_feature 1..20: note = chemically synthesized
  source 1..20: mol_type = other DNA
atgttagaacagcagacttc

SEQ ID NO: 43745 - DNA, 20 bp, synthetic construct
  misc_feature 1..20: note = chemically synthesized
  source 1..20: mol_type = other DNA
tagaacagcagacttctagt

SEQ ID NO: 43746 - DNA, 20 bp, synthetic construct
  misc_feature 1..20: note = chemically synthesized
  source 1..20: mol_type = other DNA
taaccaaaacttacatgatt

SEQ ID NO: 43747 - DNA, 20 bp, synthetic construct
  misc_feature 1..20: note = chemically synthesized
  source 1..20: mol_type = other DNA
aaacttacatgattcagaac

SEQ ID NO: 43748 - DNA, 20 bp, synthetic construct
  misc_feature 1..20: note = chemically synthesized
  source 1..20: mol_type = other DNA
acatgattcagaactagtga

SEQ ID NO: 43749 - DNA, 20 bp, synthetic construct
  misc_feature 1..20: note = chemically synthesized
  source 1..20: mol_type = other DNA
attcagaactagtgacagta

SEQ ID NO: 43750 - DNA, 20 bp, synthetic construct
  misc_feature 1..20: note = chemically synthesized
  source 1..20: mol_type = other DNA
ttcagaactagtgacagtaa

SEQ ID NO: 43751 - DNA, 20 bp, synthetic construct
  misc_feature 1..20: note = chemically synthesized
  source 1..20: mol_type = other DNA
tgacagtaaaggactactaa

SEQ ID NO: 43752 - DNA, 20 bp, synthetic construct
  misc_feature 1..20: note = chemically synthesized
  source 1..20: mol_type = other DNA
ggactactaacagcctgaat

SEQ ID NO: 43753 - DNA, 20 bp, synthetic construct
  misc_feature 1..20: note = chemically synthesized
  source 1..20: mol_type = other DNA
cctgaattggcttaactttt

SEQ ID NO: 43754 - DNA, 20 bp, synthetic construct
  misc_feature 1..20: note = chemically synthesized
  source 1..20: mol_type = other DNA
ctgaattggcttaacttttc

SEQ ID NO: 43755 - DNA, 20 bp, synthetic construct
  misc_feature 1..20: note = chemically synthesized
  source 1..20: mol_type = other DNA
aacttttcaggaaatcttgc

SEQ ID NO: 43756 - DNA, 20 bp, synthetic construct
  misc_feature 1..20: note = chemically synthesized
  source 1..20: mol_type = other DNA
agaacttgatgtgtttatcc

SEQ ID NO: 43757 - DNA, 20 bp, synthetic construct
  misc_feature 1..20: note = chemically synthesized
  source 1..20: mol_type = other DNA
aacttgatgtgtttatccca

SEQ ID NO: 43758 - DNA, 20 bp, synthetic construct
  misc_feature 1..20: note = chemically synthesized
  source 1..20: mol_type = other DNA
tatcccagagaattgtatta

SEQ ID NO: 43759 - DNA, 20 bp, synthetic construct
  misc_feature 1..20: note = chemically synthesized
  source 1..20: mol_type = other DNA
agaattgtattatagaattg

SEQ ID NO: 43760 - DNA, 20 bp, synthetic construct
  misc_feature 1..20: note = chemically synthesized
  source 1..20: mol_type = other DNA
atagaattgtagacttgtga

SEQ ID NO: 43761 - DNA, 20 bp, synthetic construct
  misc_feature 1..20: note = chemically synthesized
  source 1..20: mol_type = other DNA
gaattgtagacttgtgaaag

SEQ ID NO: 43762 - DNA, 20 bp, synthetic construct
  misc_feature 1..20: note = chemically synthesized
  source 1..20: mol_type = other DNA
tgtgaaagaagaatgaaatt

SEQ ID NO: 43763 - DNA, 20 bp, synthetic construct
  misc_feature 1..20: note = chemically synthesized
  source 1..20: mol_type = other DNA
gaagaatgaaatttggcttt

SEQ ID NO: 43764 - DNA, 20 bp, synthetic construct
  misc_feature 1..20: note = chemically synthesized
  source 1..20: mol_type = other DNA
gaatgaaatttggcttttgg

SEQ ID NO: 43765 - DNA, 20 bp, synthetic construct
  misc_feature 1..20: note = chemically synthesized
  source 1..20: mol_type = other DNA
atttggcttttggtagatga

SEQ ID NO: 43766 - DNA, 20 bp, synthetic construct
  misc_feature 1..20: note = chemically synthesized
  source 1..20: mol_type = other DNA
ggtagatgaaagtccatttc

SEQ ID NO: 43767 - DNA, 20 bp, synthetic construct
  misc_feature 1..20: note = chemically synthesized
  source 1..20: mol_type = other DNA
gtagatgaaagtccatttca

SEQ ID NO: 43768 - DNA, 20 bp, synthetic construct
  misc_feature 1..20: note = chemically synthesized
  source 1..20: mol_type = other DNA
gaaagtccatttcaaggaaa

SEQ ID NO: 43769 - DNA, 20 bp, synthetic construct
  misc_feature 1..20: note = chemically synthesized
  source 1..20: mol_type = other DNA
tagaaatgccttattttatg

SEQ ID NO: 43770 - DNA, 20 bp, synthetic construct
  misc_feature 1..20: note = chemically synthesized
  source 1..20: mol_type = other DNA
agaaatgccttattttatgt

SEQ ID NO: 43771 - DNA, 20 bp, synthetic construct
  misc_feature 1..20: note = chemically synthesized
  source 1..20: mol_type = other DNA
ttatgtgggtcatgataatt

SEQ ID NO: 43772 - DNA, 20 bp, synthetic construct
  misc_feature 1..20: note = chemically synthesized
  source 1..20: mol_type = other DNA
tatgtgggtcatgataattg

SEQ ID NO: 43773 - DNA, 20 bp, synthetic construct
  misc_feature 1..20: note = chemically synthesized
  source 1..20: mol_type = other DNA
gggtcatgataattgaggtt

SEQ ID NO: 43774 - DNA, 20 bp, synthetic construct
  misc_feature 1..20: note = chemically synthesized
  source 1..20: mol_type = other DNA
catgataattgaggtttaga

SEQ ID NO: 43775 - DNA, 20 bp, synthetic construct
  misc_feature 1..20: note = chemically synthesized
  source 1..20: mol_type = other DNA
tgataattgaggtttagaaa

SEQ ID NO: 43776 - DNA, 20 bp, synthetic construct
  misc_feature 1..20: note = chemically synthesized
  source 1..20: mol_type = other DNA
gatttttgcaaaaaaaataa

SEQ ID NO: 43777 - DNA, 20 bp, synthetic construct
  misc_feature 1..20: note = chemically synthesized
  source 1..20: mol_type = other DNA
aaaaataaaagatttgctca

SEQ ID NO: 43778 - DNA, 20 bp, synthetic construct
  misc_feature 1..20: note = chemically synthesized
  source 1..20: mol_type = other DNA
agatttgctcaaagaaaaat

SEQ ID NO: 43779 - DNA, 20 bp, synthetic construct
  misc_feature 1..20: note = chemically synthesized
  source 1..20: mol_type = other DNA
aaatatgttaaatttcccat

SEQ ID NO: 43780 - DNA, 20 bp, synthetic construct
  misc_feature 1..20: note = chemically synthesized
  source 1..20: mol_type = other DNA
ttcccatcagtattgtgacc

SEQ ID NO: 43781 - DNA, 20 bp, synthetic construct
  misc_feature 1..20: note = chemically synthesized
  source 1..20: mol_type = other DNA
atcagtattgtgaccaagtg

SEQ ID NO: 43782 - DNA, 20 bp, synthetic construct
  misc_feature 1..20: note = chemically synthesized
  source 1..20: mol_type = other DNA
tcagtattgtgaccaagtga

SEQ ID NO: 43783 - DNA, 20 bp, synthetic construct
  misc_feature 1..20: note = chemically synthesized
  source 1..20: mol_type = other DNA
aggcttgtttccgaatttgt

SEQ ID NO: 43784 - DNA, 20 bp, synthetic construct
  misc_feature 1..20: note = chemically synthesized
  source 1..20: mol_type = other DNA
ggcttgtttccgaatttgtt

SEQ ID NO: 43785 - DNA, 20 bp, synthetic construct
  misc_feature 1..20: note = chemically synthesized
  source 1..20: mol_type = other DNA
gcttgtttccgaatttgttg

SEQ ID NO: 43786 - DNA, 20 bp, synthetic construct
  misc_feature 1..20: note = chemically synthesized
  source 1..20: mol_type = other DNA
ggggattttaaactcccgct

SEQ ID NO: 43787 - DNA, 20 bp, synthetic construct
  misc_feature 1..20: note = chemically synthesized
  source 1..20: mol_type = other DNA
actcccgctgagaactcttg

SEQ ID NO: 43788 - DNA, 20 bp, synthetic construct
  misc_feature 1..20: note = chemically synthesized
  source 1..20: mol_type = other DNA
cattctacatttacaaaaat

SEQ ID NO: 43789 - DNA, 20 bp, synthetic construct
  misc_feature 1..20: note = chemically synthesized
  source 1..20: mol_type = other DNA
aaaaattagacaattgctta

SEQ ID NO: 43790 - DNA, 20 bp, synthetic construct
  misc_feature 1..20: note = chemically synthesized
  source 1..20: mol_type = other DNA
gacaattgcttaaagaaaaa

SEQ ID NO: 43791 - DNA, 20 bp, synthetic construct
  misc_feature 1..20: note = chemically synthesized
  source 1..20: mol_type = other DNA
acaattgcttaaagaaaaac

SEQ ID NO: 43792 - DNA, 20 bp, synthetic construct
  misc_feature 1..20: note = chemically synthesized
  source 1..20: mol_type = other DNA
caattgcttaaagaaaaaca

SEQ ID NO: 43793 - DNA, 20 bp, synthetic construct
  misc_feature 1..20: note = chemically synthesized
  source 1..20: mol_type = other DNA
attgcttaaagaaaaacagg

SEQ ID NO: 43794 - DNA, 20 bp, synthetic construct
  misc_feature 1..20: note = chemically synthesized
  source 1..20: mol_type = other DNA
tgcttaaagaaaaacaggga

SEQ ID NO: 43795 - DNA, 20 bp, synthetic construct
  misc_feature 1..20: note = chemically synthesized
  source 1..20: mol_type = other DNA
cttaaagaaaaacagggaga

SEQ ID NO: 43796 - DNA, 20 bp, synthetic construct
  misc_feature 1..20: note = chemically synthesized
  source 1..20: mol_type = other DNA
ttaaagaaaaacagggagag

SEQ ID NO: 43797 - DNA, 20 bp, synthetic construct
  misc_feature 1..20: note = chemically synthesized
  source 1..20: mol_type = other DNA
taaagaaaaacagggagaga

SEQ ID NO: 43798 - DNA, 20 bp, synthetic construct
  misc_feature 1..20: note = chemically synthesized
  source 1..20: mol_type = other DNA
gagagggaacccaataatac

SEQ ID NO: 43799 - DNA, 20 bp, synthetic construct
  misc_feature 1..20: note = chemically synthesized
  source 1..20: mol_type = other DNA
acccaataatactggtaaaa

SEQ ID NO: 43800 - DNA, 20 bp, synthetic construct
  misc_feature 1..20: note = chemically synthesized
  source 1..20: mol_type = other DNA
cccaataatactggtaaaat

SEQ ID NO: 43801 - DNA, 20 bp, synthetic construct
  misc_feature 1..20: note = chemically synthesized
  source 1..20: mol_type = other DNA
ccaataatactggtaaaatg

SEQ ID NO: 43802 - DNA, 20 bp, synthetic construct
  misc_feature 1..20: note = chemically synthesized
  source 1..20: mol_type = other DNA
ataatactggtaaaatgggg

SEQ ID NO: 43803 - DNA, 20 bp, synthetic construct
  misc_feature 1..20: note = chemically synthesized
  source 1..20: mol_type = other DNA
taatactggtaaaatgggga

SEQ ID NO: 43804 - DNA, 20 bp, synthetic construct
  misc_feature 1..20: note = chemically synthesized
  source 1..20: mol_type = other DNA
aatactggtaaaatggggaa

SEQ ID NO: 43805 - DNA, 20 bp, synthetic construct
  misc_feature 1..20: note = chemically synthesized
  source 1..20: mol_type = other DNA
atactggtaaaatggggaag

SEQ ID NO: 43806 - DNA, 20 bp, synthetic construct
  misc_feature 1..20: note = chemically synthesized
  source 1..20: mol_type = other DNA
tactggtaaaatggggaagg

SEQ ID NO: 43807 - DNA, 20 bp, synthetic construct
  misc_feature 1..20: note = chemically synthesized
  source 1..20: mol_type = other DNA
ggtaaaatggggaagggggt

SEQ ID NO: 43808 - DNA, 20 bp, synthetic construct
  misc_feature 1..20: note = chemically synthesized
  source 1..20: mol_type = other DNA
gtaaaatggggaagggggtg

SEQ ID NO: 43809 - DNA, 20 bp, synthetic construct
  misc_feature 1..20: note = chemically synthesized
  source 1..20: mol_type = other DNA
taaaatggggaagggggtga

SEQ ID NO: 43810 - DNA, 20 bp, synthetic construct
  misc_feature 1..20: note = chemically synthesized
  source 1..20: mol_type = other DNA
tggggaagggggtgagggtg

SEQ ID NO: 43811 - DNA, 20 bp, synthetic construct
  misc_feature 1..20: note = chemically synthesized
  source 1..20: mol_type = other DNA
ggggaagggggtgagggtgt

SEQ ID NO: 43812 - DNA, 20 bp, synthetic construct
  misc_feature 1..20: note = chemically synthesized
  source 1..20: mol_type = other DNA
gaagggggtgagggtgtagg

SEQ ID NO: 43813 - DNA, 20 bp, synthetic construct
  misc_feature 1..20: note = chemically synthesized
  source 1..20: mol_type = other DNA
aagggggtgagggtgtaggt

SEQ ID NO: 43814 - DNA, 20 bp, synthetic construct
  misc_feature 1..20: note = chemically synthesized
  source 1..20: mol_type = other DNA
ggggtgagggtgtaggtagg

SEQ ID NO: 43815 - DNA, 20 bp, synthetic construct
  misc_feature 1..20: note = chemically synthesized
  source 1..20: mol_type = other DNA
ggtaggtagaatgttgaatg

SEQ ID NO: 43816 - DNA, 20 bp, synthetic construct
  misc_feature 1..20: note = chemically synthesized
  source 1..20: mol_type = other DNA
gtaggtagaatgttgaatgt

SEQ ID NO: 43817 - DNA, 20 bp, synthetic construct
  misc_feature 1..20: note = chemically synthesized
  source 1..20: mol_type = other DNA
taggtagaatgttgaatgta

SEQ ID NO: 43818 - DNA, 20 bp, synthetic construct
  misc_feature 1..20: note = chemically synthesized
  source 1..20: mol_type = other DNA
aatgttgaatgtagggctca

SEQ ID NO: 43819 - DNA, 20 bp, synthetic construct
  misc_feature 1..20: note = chemically synthesized
  source 1..20: mol_type = other DNA
catagaataaaattgaacct

SEQ ID NO: 43820 - DNA, 20 bp, synthetic construct
  misc_feature 1..20: note = chemically synthesized
  source 1..20: mol_type = other DNA
ctaagctcatctgaattttt

SEQ ID NO: 43821 - DNA, 20 bp, synthetic construct
  misc_feature 1..20: note = chemically synthesized
  source 1..20: mol_type = other DNA
taagctcatctgaatttttt

SEQ ID NO: 43822 - DNA, 20 bp, synthetic construct
  misc_feature 1..20: note = chemically synthesized
  source 1..20: mol_type = other DNA
gctcatctgaattttttggg

SEQ ID NO: 43823 - DNA, 20 bp, synthetic construct
  misc_feature 1..20: note = chemically synthesized
  source 1..20: mol_type = other DNA
ctcatctgaattttttgggt

SEQ ID NO: 43824 - DNA, 20 bp, synthetic construct
  misc_feature 1..20: note = chemically synthesized
  source 1..20: mol_type = other DNA
ttttgggtgggcacaaacct

SEQ ID NO: 43825 - DNA, 20 bp, synthetic construct
  misc_feature 1..20: note = chemically synthesized
  source 1..20: mol_type = other DNA
ggtgggcacaaaccttggaa

SEQ ID NO: 43826 - DNA, 20 bp, synthetic construct
  misc_feature 1..20: note = chemically synthesized
  source 1..20: mol_type = other DNA
cacaaaccttggaacagttt

SEQ ID NO: 43827 - DNA, 20 bp, synthetic construct
  misc_feature 1..20: note = chemically synthesized
  source 1..20: mol_type = other DNA
acaaaccttggaacagtttg

SEQ ID NO: 43828 - DNA, 20 bp, synthetic construct
  misc_feature 1..20: note = chemically synthesized
  source 1..20: mol_type = other DNA
accttggaacagtttgaggt

SEQ ID NO: 43829 - DNA, 20 bp, synthetic construct
  misc_feature 1..20: note = chemically synthesized
  source 1..20: mol_type = other DNA
ccttggaacagtttgaggtc

SEQ ID NO: 43830 - DNA, 20 bp, synthetic construct
  misc_feature 1..20: note = chemically synthesized
  source 1..20: mol_type = other DNA
cttggaacagtttgaggtca

SEQ ID NO: 43831 - DNA, 20 bp, synthetic construct
  misc_feature 1..20: note = chemically synthesized
  source 1..20: mol_type = other DNA
agtttgaggtcagggttgtc

SEQ ID NO: 43832 - DNA, 20 bp, synthetic construct
  misc_feature 1..20: note = chemically synthesized
  source 1..20: mol_type = other DNA
gtttgaggtcagggttgtct

SEQ ID NO: 43833 - DNA, 20 bp, synthetic construct
  misc_feature 1..20: note = chemically synthesized
  source 1..20: mol_type = other DNA
gtcagggttgtctaggaatg

SEQ ID NO: 43834 - DNA, 20 bp, synthetic construct
  misc_feature 1..20: note = chemically synthesized
  source 1..20: mol_type = other DNA
tcagggttgtctaggaatgt

SEQ ID NO: 43835 - DNA, 20 bp, synthetic construct
  misc_feature 1..20: note = chemically synthesized
  source 1..20: mol_type = other DNA
tgtctaggaatgtaggtata

SEQ ID NO: 43836 - DNA, 20 bp, synthetic construct
  misc_feature 1..20: note = chemically synthesized
  source 1..20: mol_type = other DNA
tgtttgtttgttttttcatc

SEQ ID NO: 43837 - DNA, 20 bp, synthetic construct
  misc_feature 1..20: note = chemically synthesized
  source 1..20: mol_type = other DNA
ttttttcatcaagttgtttt

SEQ ID NO: 43838 - DNA, 20 bp, synthetic construct
  misc_feature 1..20: note = chemically synthesized
  source 1..20: mol_type = other DNA
ttattttgtcttttgcctaa

SEQ ID NO: 43839 - DNA, 20 bp, synthetic construct
  misc_feature 1..20: note = chemically synthesized
  source 1..20: mol_type = other DNA
gtcttttgcctaacagctcc

SEQ ID NO: 43840 - DNA, 20 bp, synthetic construct
  misc_feature 1..20: note = chemically synthesized
  source 1..20: mol_type = other DNA
tcttttgcctaacagctcct

SEQ ID NO: 43841 - DNA, 20 bp, synthetic construct
  misc_feature 1..20: note = chemically synthesized
  source 1..20: mol_type = other DNA
acagctcctgggtaacgtga

SEQ ID NO: 43842 - DNA, 20 bp, synthetic construct
  misc_feature 1..20: note = chemically synthesized
  source 1..20: mol_type = other DNA
taacgtgatggtgattattc

SEQ ID NO: 43843 - DNA, 20 bp, synthetic construct
  misc_feature 1..20: note = chemically synthesized
  source 1..20: mol_type = other DNA
attattctggctactcactt

SEQ ID NO: 43844 - DNA, 20 bp, synthetic construct
  misc_feature 1..20: note = chemically synthesized
  source 1..20: mol_type = other DNA
ttctggctactcactttggc

SEQ ID NO: 43845 - DNA, 20 bp, synthetic construct
  misc_feature 1..20: note = chemically synthesized
  source 1..20: mol_type = other DNA
tctggctactcactttggca

SEQ ID NO: 43846 - DNA, 20 bp, synthetic construct
  misc_feature 1..20: note = chemically synthesized
  source 1..20: mol_type = other DNA
tggctactcactttggcaag

SEQ ID NO: 43847 - DNA, 20 bp, synthetic construct
  misc_feature 1..20: note = chemically synthesized
  source 1..20: mol_type = other DNA
tggcaaggagttcacccctg

SEQ ID NO: 43848 - DNA, 20 bp, synthetic construct
  misc_feature 1..20: note = chemically synthesized
  source 1..20: mol_type = other DNA
aggagttcacccctgaagtg

SEQ ID NO: 43849 - DNA, 20 bp, synthetic construct
  misc_feature 1..20: note = chemically synthesized
  source 1..20: mol_type = other DNA
ggagttcacccctgaagtgc

SEQ ID NO: 43850 - DNA, 20 bp, synthetic construct
  misc_feature 1..20: note = chemically synthesized
  source 1..20: mol_type = other DNA
cccctgaagtgcaggctgcc

SEQ ID NO: 43851 - DNA, 20 bp, synthetic construct
  misc_feature 1..20: note = chemically synthesized
  source 1..20: mol_type = other DNA
ctgaagtgcaggctgcctgg

SEQ ID NO: 43852 - DNA, 20 bp, synthetic construct
  misc_feature 1..20: note = chemically synthesized
  source 1..20: mol_type = other DNA
aagtgcaggctgcctggcag

SEQ ID NO: 43853 - DNA, 20 bp, synthetic construct
  misc_feature 1..20: note = chemically synthesized
  source 1..20: mol_type = other DNA
gcaggctgcctggcagaagc

SEQ ID NO: 43854 - DNA, 20 bp, synthetic construct
  misc_feature 1..20: note = chemically synthesized
  source 1..20: mol_type = other DNA
gtctgctgtcgccattgccc

SEQ ID NO: 43855 - DNA, 20 bp, synthetic construct
  misc_feature 1..20: note = chemically synthesized
  source 1..20: mol_type = other DNA
tcgccattgccctggcccat

SEQ ID NO: 43856 - DNA, 20 bp, synthetic construct
  misc_feature 1..20: note = chemically synthesized
  source 1..20: mol_type = other DNA
cctggcccataagtaccact

SEQ ID NO: 43857 - DNA, 20 bp, synthetic construct
  misc_feature 1..20: note = chemically synthesized
  source 1..20: mol_type = other DNA
agtaccactgagttctcttc

SEQ ID NO: 43858 - DNA, 20 bp, synthetic construct
  misc_feature 1..20: note = chemically synthesized
  source 1..20: mol_type = other DNA
ctgagttctcttccagtttg

SEQ ID NO: 43859 - DNA, 20 bp, synthetic construct
  misc_feature 1..20: note = chemically synthesized
  source 1..20: mol_type = other DNA
tgagttctcttccagtttgc

SEQ ID NO: 43860 - DNA, 20 bp, synthetic construct
  misc_feature 1..20: note = chemically synthesized
  source 1..20: mol_type = other DNA
tgacaccctccttctgcaca

SEQ ID NO: 43861 - DNA, 20 bp, synthetic construct
  misc_feature 1..20: note = chemically synthesized
  source 1..20: mol_type = other DNA
gacaccctccttctgcacat

SEQ ID NO: 43862 - DNA, 20 bp, synthetic construct
  misc_feature 1..20: note = chemically synthesized
  source 1..20: mol_type = other DNA
acaccctccttctgcacatg

SEQ ID NO: 43863 - DNA, 20 bp, synthetic construct
  misc_feature 1..20: note = chemically synthesized
  source 1..20: mol_type = other DNA
ctccttctgcacatggggac

SEQ ID NO: 43864 - DNA, 20 bp, synthetic construct
  misc_feature 1..20: note = chemically synthesized
  source 1..20: mol_type = other DNA
tccttctgcacatggggact

SEQ ID NO: 43865 - DNA, 20 bp, synthetic construct
  misc_feature 1..20: note = chemically synthesized
  source 1..20: mol_type = other DNA
ctgcacatggggactgggct

SEQ ID NO: 43866 - DNA, 20 bp, synthetic construct
  misc_feature 1..20: note = chemically synthesized
  source 1..20: mol_type = other DNA
tggggactgggcttggcctt

SEQ ID NO: 43867 - DNA, 20 bp, synthetic construct
  misc_feature 1..20: note = chemically synthesized
  source 1..20: mol_type = other DNA
gggactgggcttggccttga

SEQ ID NO: 43868 - DNA, 20 bp, synthetic construct
  misc_feature 1..20: note = chemically synthesized
  source 1..20: mol_type = other DNA
ctgggcttggccttgagaga

SEQ ID NO: 43869 - DNA, 20 bp, synthetic construct
  misc_feature 1..20: note = chemically synthesized
  source 1..20: mol_type = other DNA
agaaagccttctgtttaata

SEQ ID NO: 43870 - DNA, 20 bp, synthetic construct
  misc_feature 1..20: note = chemically synthesized
  source 1..20: mol_type = other DNA
ttaataaagtacattttctt

SEQ ID NO: 43871 - DNA, 20 bp, synthetic construct
  misc_feature 1..20: note = chemically synthesized
  source 1..20: mol_type = other DNA
atcttttactcttgtgttaa

SEQ ID NO: 43872 - DNA, 20 bp, synthetic construct
  misc_feature 1..20: note = chemically synthesized
  source 1..20: mol_type = other DNA
tcttttactcttgtgttaaa

SEQ ID NO: 43873 - DNA, 20 bp, synthetic construct
  misc_feature 1..20: note = chemically synthesized
  source 1..20: mol_type = other DNA
actcttgtgttaaaaggaaa

SEQ ID NO: 43874 - DNA, 20 bp, synthetic construct
  misc_feature 1..20: note = chemically synthesized
  source 1..20: mol_type = other DNA
ttaaaaggaaaaagtgttca

SEQ ID NO: 43875 - DNA, 20 bp, synthetic construct
  misc_feature 1..20: note = chemically synthesized
  source 1..20: mol_type = other DNA
taaaaggaaaaagtgttcat

SEQ ID NO: 43876 - DNA, 20 bp, synthetic construct
  misc_feature 1..20: note = chemically synthesized
  source 1..20: mol_type = other DNA
ggaaaaagtgttcatgggct

SEQ ID NO: 43877 - DNA, 20 bp, synthetic construct
  misc_feature 1..20: note = chemically synthesized
  source 1..20: mol_type = other DNA
gaaaaagtgttcatgggctg

SEQ ID NO: 43878 - DNA, 20 bp, synthetic construct
  misc_feature 1..20: note = chemically synthesized
  source 1..20: mol_type = other DNA
aaaaagtgttcatgggctga

SEQ ID NO: 43879 - DNA, 20 bp, synthetic construct
  misc_feature 1..20: note = chemically synthesized
  source 1..20: mol_type = other DNA
agtgttcatgggctgaggga

SEQ ID NO: 43880 - DNA, 20 bp, synthetic construct
  misc_feature 1..20: note = chemically synthesized
  source 1..20: mol_type = other DNA
tgttcatgggctgagggatg

SEQ ID NO: 43881 - DNA, 20 bp, synthetic construct
  misc_feature 1..20: note = chemically synthesized
  source 1..20: mol_type = other DNA
ttcatgggctgagggatgga

SEQ ID NO: 43882 - DNA, 20 bp, synthetic construct
  misc_feature 1..20: note = chemically synthesized
  source 1..20: mol_type = other DNA
ctgagggatggagagaaaca

SEQ ID NO: 43883 - DNA, 20 bp, synthetic construct
  misc_feature 1..20: note = chemically synthesized
  source 1..20: mol_type = other DNA
tgagggatggagagaaacat

SEQ ID NO: 43884 - DNA, 20 bp, synthetic construct
  misc_feature 1..20: note = chemically synthesized
  source 1..20: mol_type = other DNA
gggatggagagaaacatagg

SEQ ID NO: 43885 - DNA, 20 bp, synthetic construct
  misc_feature 1..20: note = chemically synthesized
  source 1..20: mol_type = other DNA
agagaaacataggaagaacc

SEQ ID NO: 43886 - DNA, 20 bp, synthetic construct
  misc_feature 1..20: note = chemically synthesized
  source 1..20: mol_type = other DNA
agaaacataggaagaaccaa

SEQ ID NO: 43887 - DNA, 20 bp, synthetic construct
  misc_feature 1..20: note = chemically synthesized
  source 1..20: mol_type = other DNA
gaagaaccaagagcttcctt

SEQ ID NO: 43888 - DNA, 20 bp, synthetic construct
  misc_feature 1..20: note = chemically synthesized
  source 1..20: mol_type = other DNA
gagcttccttaagaaatgta

SEQ ID NO: 43889 - DNA, 20 bp, synthetic construct
  misc_feature 1..20: note = chemically synthesized
  source 1..20: mol_type = other DNA
agcttccttaagaaatgtat

SEQ ID NO: 43890 - DNA, 20 bp, synthetic construct
  misc_feature 1..20: note = chemically synthesized
  source 1..20: mol_type = other DNA
gcttccttaagaaatgtatg

SEQ ID NO: 43891 - DNA, 20 bp, synthetic construct
  misc_feature 1..20: note = chemically synthesized
  source 1..20: mol_type = other DNA
cttccttaagaaatgtatgg

SEQ ID NO: 43892 - DNA, 20 bp, synthetic construct
  misc_feature 1..20: note = chemically synthesized
  source 1..20: mol_type = other DNA
gggggcttgtaaaattaatg

SEQ ID NO: 43893 - DNA, 20 bp, synthetic construct
  misc_feature 1..20: note = chemically synthesized
  source 1..20: mol_type = other DNA
taaaattaatgtggatgtta

SEQ ID NO: 43894 - DNA, 20 bp, synthetic construct
  misc_feature 1..20: note = chemically synthesized
  source 1..20: mol_type = other DNA
aaaattaatgtggatgttat

SEQ ID NO: 43895 - DNA, 20 bp, synthetic construct
  misc_feature 1..20: note = chemically synthesized
  source 1..20: mol_type = other DNA
aattaatgtggatgttatgg

SEQ ID NO: 43896 - DNA, 20 bp, synthetic construct
  misc_feature 1..20: note = chemically synthesized
  source 1..20: mol_type = other DNA
tggatgttatgggagaattc

SEQ ID NO: 43897 - DNA, 20 bp, synthetic construct
  misc_feature 1..20: note = chemically synthesized
  source 1..20: mol_type = other DNA
ggatgttatgggagaattcc

SEQ ID NO: 43898 - DNA, 20 bp, synthetic construct
  misc_feature 1..20: note = chemically synthesized
  source 1..20: mol_type = other DNA
tgggagaattccaggattcc

SEQ ID NO: 43899 - DNA, 20 bp, synthetic construct
  misc_feature 1..20: note = chemically synthesized
  source 1..20: mol_type = other DNA
gggagaattccaggattcca

SEQ ID NO: 43900 - DNA, 20 bp, synthetic construct
  misc_feature 1..20: note = chemically synthesized
  source 1..20: mol_type = other DNA
gagaattccaggattccaag

SEQ ID NO: 43901 - DNA, 20 bp, synthetic construct
  misc_feature 1..20: note = chemically synthesized
  source 1..20: mol_type = other DNA
agaattccaggattccaagg

SEQ ID NO: 43902 - DNA, 20 bp, synthetic construct
  misc_feature 1..20: note = chemically synthesized
  source 1..20: mol_type = other DNA
ttccaaggaggatgatatga

SEQ ID NO: 43903 - DNA, 20 bp, synthetic construct
  misc_feature 1..20: note = chemically synthesized
  source 1..20: mol_type = other DNA
ccaaggaggatgatatgatg

SEQ ID NO: 43904 - DNA, 20 bp, synthetic construct
  misc_feature 1..20: note = chemically synthesized
  source 1..20: mol_type = other DNA
tgatggagaaaaatctttat

SEQ ID NO: 43905 - DNA, 20 bp, synthetic construct
  misc_feature 1..20: note = chemically synthesized
  source 1..20: mol_type = other DNA
gatggagaaaaatctttatc

SEQ ID NO: 43906 - DNA, 20 bp, synthetic construct
  misc_feature 1..20: note = chemically synthesized
  source 1..20: mol_type = other DNA
atggagaaaaatctttatcg

SEQ ID NO: 43907 - DNA, 20 bp, synthetic construct
  misc_feature 1..20: note = chemically synthesized
  source 1..20: mol_type = other DNA
gagaaaaatctttatcgggg

SEQ ID NO: 43908 - DNA, 20 bp, synthetic construct
  misc_feature 1..20: note = chemically synthesized
  source 1..20: mol_type = other DNA
agaaaaatctttatcggggt

SEQ ID NO: 43909 - DNA, 20 bp, synthetic construct
  misc_feature 1..20: note = chemically synthesized
  source 1..20: mol_type = other DNA
tctttatcggggtgggaaaa

SEQ ID NO: 43910 - DNA, 20 bp, synthetic construct
  misc_feature 1..20: note = chemically synthesized
  source 1..20: mol_type = other DNA
gggtgggaaaatggttaatt

SEQ ID NO: 43911 - DNA, 20 bp, synthetic construct
  misc_feature 1..20: note = chemically synthesized
  source 1..20: mol_type = other DNA
tgggaaaatggttaattaag

SEQ ID NO: 43912 - DNA, 20 bp, synthetic construct
  misc_feature 1..20: note = chemically synthesized
  source 1..20: mol_type = other DNA
aaaatggttaattaagtgga

SEQ ID NO: 43913 - DNA, 20 bp, synthetic construct
  misc_feature 1..20: note = chemically synthesized
  source 1..20: mol_type = other DNA
aatggttaattaagtggaca

SEQ ID NO: 43914 - DNA, 20 bp, synthetic construct
  misc_feature 1..20: note = chemically synthesized
  source 1..20: mol_type = other DNA
attaagtggacagagactcc

SEQ ID NO: 43915 - DNA, 20 bp, synthetic construct
  misc_feature 1..20: note = chemically synthesized
  source 1..20: mol_type = other DNA
ttaagtggacagagactcct

SEQ ID NO: 43916 - DNA, 20 bp, synthetic construct
  misc_feature 1..20: note = chemically synthesized
  source 1..20: mol_type = other DNA
agtggacagagactcctagg

SEQ ID NO: 43917 - DNA, 20 bp, synthetic construct
  misc_feature 1..20: note = chemically synthesized
  source 1..20: mol_type = other DNA
ctaggcagtttttactgcac

SEQ ID NO: 43918 - DNA, 20 bp, synthetic construct
  misc_feature 1..20: note = chemically synthesized
  source 1..20: mol_type = other DNA
taggcagtttttactgcacc

SEQ ID NO: 43919 - DNA, 20 bp, synthetic construct
  misc_feature 1..20: note = chemically synthesized
  source 1..20: mol_type = other DNA
aggcagtttttactgcaccg

SEQ ID NO: 43920 - DNA, 20 bp, synthetic construct
  misc_feature 1..20: note = chemically synthesized
  source 1..20: mol_type = other DNA
agtttttactgcaccgggga

SEQ ID NO: 43921 - DNA, 20 bp, synthetic construct
  misc_feature 1..20: note = chemically synthesized
  source 1..20: mol_type = other DNA
ttttactgcaccggggaaag

SEQ ID NO: 43922 - DNA, 20 bp, synthetic construct
  misc_feature 1..20: note = chemically synthesized
  source 1..20: mol_type = other DNA
tttactgcaccggggaaaga

SEQ ID NO: 43923 - DNA, 20 bp, synthetic construct
  misc_feature 1..20: note = chemically synthesized
  source 1..20: mol_type = other DNA
tactgcaccggggaaagaag

SEQ ID NO: 43924 - DNA, 20 bp, synthetic construct
  misc_feature 1..20: note = chemically synthesized
  source 1..20: mol_type = other DNA
ccggggaaagaaggagctgt

SEQ ID NO: 43925 - DNA, 20 bp, synthetic construct
  misc_feature 1..20: note = chemically synthesized
  source 1..20: mol_type = other DNA
gggaaagaaggagctgttag

SEQ ID NO: 43926 - DNA, 20 bp, synthetic construct
  misc_feature 1..20: note = chemically synthesized
  source 1..20: mol_type = other DNA
aggagctgttagtggtacct

SEQ ID NO: 43927 - DNA, 20 bp, synthetic construct
  misc_feature 1..20: note = chemically synthesized
  source 1..20: mol_type = other DNA
gctgttagtggtacctgaga

SEQ ID NO: 43928 - DNA, 20 bp, synthetic construct
  misc_feature 1..20: note = chemically synthesized
  source 1..20: mol_type = other DNA
gttagtggtacctgagaaag

SEQ ID NO: 43929 - DNA, 20 bp, synthetic construct
  misc_feature 1..20: note = chemically synthesized
  source 1..20: mol_type = other DNA
tacctgagaaagcagatttg

SEQ ID NO: 43930 - DNA, 20 bp, synthetic construct
  misc_feature 1..20: note = chemically synthesized
  source 1..20: mol_type = other DNA
caaaacaaaacaaaacttca

SEQ ID NO: 43931 - DNA, 20 bp, synthetic construct
  misc_feature 1..20: note = chemically synthesized
  source 1..20: mol_type = other DNA
acaaaacttcatagatatcc

SEQ ID NO: 43932 - DNA, 20 bp, synthetic construct
  misc_feature 1..20: note = chemically synthesized
  source 1..20: mol_type = other DNA
cttcatagatatccaagata

SEQ ID NO: 43933 - DNA, 20 bp, synthetic construct
  misc_feature 1..20: note = chemically synthesized
  source 1..20: mol_type = other DNA
ttcatagatatccaagatat

SEQ ID NO: 43934 - DNA, 20 bp, synthetic construct
  misc_feature 1..20: note = chemically synthesized
  source 1..20: mol_type = other DNA
tagatatccaagatataggc

SEQ ID NO: 43935 - DNA, 20 bp, synthetic construct
  misc_feature 1..20: note = chemically synthesized
  source 1..20: mol_type = other DNA
ttactcttatttacattttg

SEQ ID NO: 43936 - DNA, 20 bp, synthetic construct
  misc_feature 1..20: note = chemically synthesized
  source 1..20: mol_type = other DNA
ctcttatttacattttgaag

SEQ ID NO: 43937 - DNA, 20 bp, synthetic construct
  misc_feature 1..20: note = chemically synthesized
  source 1..20: mol_type = other DNA
tatttacattttgaagtagc

SEQ ID NO: 43938 - DNA, 20 bp, synthetic construct
  misc_feature 1..20: note = chemically synthesized
  source 1..20: mol_type = other DNA
catgttttatgaaattgatt

SEQ ID NO: 43939 - DNA, 20 bp, synthetic construct
  misc_feature 1..20: note = chemically synthesized
  source 1..20: mol_type = other DNA
tgttttatgaaattgatttg

SEQ ID NO: 43940 - DNA, 20 bp, synthetic construct
  misc_feature 1..20: note = chemically synthesized
  source 1..20: mol_type = other DNA
tatgaaattgatttggagat

SEQ ID NO: 43941 - DNA, 20 bp, synthetic construct
  misc_feature 1..20: note = chemically synthesized
  source 1..20: mol_type = other DNA
aattgatttggagataagat

SEQ ID NO: 43942 - DNA, 20 bp, synthetic construct
  misc_feature 1..20: note = chemically synthesized
  source 1..20: mol_type = other DNA
agatgagtgtgtatcaacaa

SEQ ID NO: 43943 - DNA, 20 bp, synthetic construct
  misc_feature 1..20: note = chemically synthesized
  source 1..20: mol_type = other DNA
aatagcctgctctttccatg

SEQ ID NO: 43944 - DNA, 20 bp, synthetic construct
  misc_feature 1..20: note = chemically synthesized
  source 1..20: mol_type = other DNA
atagcctgctctttccatga

SEQ ID NO: 43945 - DNA, 20 bp, synthetic construct
  misc_feature 1..20: note = chemically synthesized
  source 1..20: mol_type = other DNA
tgaaggattccattatttca

SEQ ID NO: 43946 - DNA, 20 bp, synthetic construct
  misc_feature 1..20: note = chemically synthesized
  source 1..20: mol_type = other DNA
gaaggattccattatttcat

SEQ ID NO: 43947 - DNA, 20 bp, synthetic construct
  misc_feature 1..20: note = chemically synthesized
  source 1..20: mol_type = other DNA
gattccattatttcatgggt

SEQ ID NO: 43948 - DNA, 20 bp, synthetic construct
  misc_feature 1..20: note = chemically synthesized
  source 1..20: mol_type = other DNA
attatttcatgggttagctg

SEQ ID NO: 43949 - DNA, 20 bp, synthetic construct
  misc_feature 1..20: note = chemically synthesized
  source 1..20: mol_type = other DNA
ttcatgggttagctgaagct

SEQ ID NO: 43950 - DNA, 20 bp, synthetic construct
  misc_feature 1..20: note = chemically synthesized
  source 1..20: mol_type = other DNA
cattgtgcattatcttctga

SEQ ID NO: 43951 - DNA, 20 bp, synthetic construct
  misc_feature 1..20: note = chemically synthesized
  source 1..20: mol_type = other DNA
atgtaacatgcactaaaata

SEQ ID NO: 43952 - DNA, 20 bp, synthetic construct
  misc_feature 1..20: note = chemically synthesized
  source 1..20: mol_type = other DNA
aacatgcactaaaataaagt

SEQ ID NO: 43953 - DNA, 20 bp, synthetic construct
  misc_feature 1..20: note = chemically synthesized
  source 1..20: mol_type = other DNA
catgcactaaaataaagtta

SEQ ID NO: 43954 - DNA, 20 bp, synthetic construct
  misc_feature 1..20: note = chemically synthesized
  source 1..20: mol_type = other DNA
cactaaaataaagttagagt

SEQ ID NO: 43955 - DNA, 20 bp, synthetic construct
  misc_feature 1..20: note = chemically synthesized
  source 1..20: mol_type = other DNA
actaaaataaagttagagtt

SEQ ID NO: 43956 - DNA, 20 bp, synthetic construct
  misc_feature 1..20: note = chemically synthesized
  source 1..20: mol_type = other DNA
taaagttagagttaggacct

SEQ ID NO: 43957 - DNA, 20 bp, synthetic construct
  misc_feature 1..20: note = chemically synthesized
  source 1..20: mol_type = other DNA
agttagagttaggacctgag

SEQ ID NO: 43958 - DNA, 20 bp, synthetic construct
  misc_feature 1..20: note = chemically synthesized
  source 1..20: mol_type = other DNA
gttagagttaggacctgagt

SEQ ID NO: 43959 - DNA, 20 bp, synthetic construct
  misc_feature 1..20: note = chemically synthesized
  source 1..20: mol_type = other DNA
gagttaggacctgagtggga

SEQ ID NO: 43960 - DNA, 20 bp, synthetic construct
  misc_feature 1..20: note = chemically synthesized
  source 1..20: mol_type = other DNA
gacctgagtgggaaagtttt

SEQ ID NO: 43961 - DNA, 20 bp, synthetic construct
  misc_feature 1..20: note = chemically synthesized
  source 1..20: mol_type = other DNA
cctgagtgggaaagtttttg

SEQ ID NO: 43962 - DNA, 20 bp, synthetic construct
  misc_feature 1..20: note = chemically synthesized
  source 1..20: mol_type = other DNA
tgagtgggaaagtttttgga

SEQ ID NO: 43963 - DNA, 20 bp, synthetic construct
  misc_feature 1..20: note = chemically synthesized
  source 1..20: mol_type = other DNA
agtttttggagagtgtgatg

SEQ ID NO: 43964 - DNA, 20 bp, synthetic construct
  misc_feature 1..20: note = chemically synthesized
  source 1..20: mol_type = other DNA
agtgtgatgaagactttccg

SEQ ID NO: 43965 - DNA, 20 bp, synthetic construct
  misc_feature 1..20: note = chemically synthesized
  source 1..20: mol_type = other DNA
gtgtgatgaagactttccgt

SEQ ID NO: 43966 - DNA, 20 bp, synthetic construct
  misc_feature 1..20: note = chemically synthesized
  source 1..20: mol_type = other DNA
gtgatgaagactttccgtgg

SEQ ID NO: 43967 - DNA, 20 bp, synthetic construct
  misc_feature 1..20: note = chemically synthesized
  source 1..20: mol_type = other DNA
tgaagactttccgtgggaga

SEQ ID NO: 43968 - DNA, 20 bp, synthetic construct
  misc_feature 1..20: note = chemically synthesized
  source 1..20: mol_type = other DNA
tgggagatagaatactaata

SEQ ID NO: 43969 - DNA, 20 bp, synthetic construct
  misc_feature 1..20: note = chemically synthesized
  source 1..20: mol_type = other DNA
gggagatagaatactaataa

SEQ ID NO: 43970 - DNA, 20 bp, synthetic construct
  misc_feature 1..20: note = chemically synthesized
  source 1..20: mol_type = other DNA
aaaggcttaaattctaaaac

SEQ ID NO: 43971 - DNA, 20 bp, synthetic construct
  misc_feature 1..20: note = chemically synthesized
  source 1..20: mol_type = other DNA
gcttaaattctaaaaccagc

SEQ ID NO: 43972 - DNA, 20 bp, synthetic construct
  misc_feature 1..20: note = chemically synthesized
  source 1..20: mol_type = other DNA
aaattctaaaaccagcaagc

SEQ ID NO: 43973 - DNA, 20 bp, synthetic construct
  misc_feature 1..20: note = chemically synthesized
  source 1..20: mol_type = other DNA
aattctaaaaccagcaagct

SEQ ID NO: 43974 - DNA, 20 bp, synthetic construct
  misc_feature 1..20: note = chemically synthesized
  source 1..20: mol_type = other DNA
attctaaaaccagcaagcta

SEQ ID NO: 43975 - DNA, 20 bp, synthetic construct
  misc_feature 1..20: note = chemically synthesized
  source 1..20: mol_type = other DNA
cttcgtgacttgcatgaaac

SEQ ID NO: 43976 - DNA, 20 bp, synthetic construct
  misc_feature 1..20: note = chemically synthesized
  source 1..20: mol_type = other DNA
cttgcatgaaactggctctc

SEQ ID NO: 43977 - DNA, 20 bp, synthetic construct
  misc_feature 1..20: note = chemically synthesized
  source 1..20: mol_type = other DNA
gcatgaaactggctctctgg

SEQ ID NO: 43978 - DNA, 20 bp, synthetic construct
  misc_feature 1..20: note = chemically synthesized
  source 1..20: mol_type = other DNA
tgaaactggctctctggaag

SEQ ID NO: 43979 - DNA, 20 bp, synthetic construct
  misc_feature 1..20: note = chemically synthesized
  source 1..20: mol_type = other DNA
aactggctctctggaagtag

SEQ ID NO: 43980 - DNA, 20 bp, synthetic construct
  misc_feature 1..20: note = chemically synthesized
  source 1..20: mol_type = other DNA
actggctctctggaagtaga

SEQ ID NO: 43981 - DNA, 20 bp, synthetic construct
  misc_feature 1..20: note = chemically synthesized
  source 1..20: mol_type = other DNA
ctggctctctggaagtagaa

SEQ ID NO: 43982 - DNA, 20 bp, synthetic construct
  misc_feature 1..20: note = chemically synthesized
  source 1..20: mol_type = other DNA
ggctctctggaagtagaagg

SEQ ID NO: 43983 - DNA, 20 bp, synthetic construct
  misc_feature 1..20: note = chemically synthesized
  source 1..20: mol_type = other DNA
ctctctggaagtagaaggga

SEQ ID NO: 43984 - DNA, 20 bp, synthetic construct
  misc_feature 1..20: note = chemically synthesized
  source 1..20: mol_type = other DNA
ctggaagtagaagggagagt

SEQ ID NO: 43985 - DNA, 20 bp, synthetic construct
  misc_feature 1..20: note = chemically synthesized
  source 1..20: mol_type = other DNA
aagggagagtaagacatacg

SEQ ID NO: 43986 - DNA, 20 bp, synthetic construct
  misc_feature 1..20: note = chemically synthesized
  source 1..20: mol_type = other DNA
gggagagtaagacatacgta

SEQ ID NO: 43987 - DNA, 20 bp, synthetic construct
  misc_feature 1..20: note = chemically synthesized
  source 1..20: mol_type = other DNA
ggagagtaagacatacgtag

SEQ ID NO: 43988 - DNA, 20 bp, synthetic construct
  misc_feature 1..20: note = chemically synthesized
  source 1..20: mol_type = other DNA
gtaagacatacgtagaggac

SEQ ID NO: 43989 - DNA, 20 bp, synthetic construct
  misc_feature 1..20: note = chemically synthesized
  source 1..20: mol_type = other DNA
taagacatacgtagaggact

SEQ ID NO: 43990 - DNA, 20 bp, synthetic construct
  misc_feature 1..20: note = chemically synthesized
  source 1..20: mol_type = other DNA
acatacgtagaggactagga

SEQ ID NO: 43991 - DNA, 20 bp, synthetic construct
  misc_feature 1..20: note = chemically synthesized
  source 1..20: mol_type = other DNA
cgtagaggactaggaaagac

SEQ ID NO: 43992 - DNA, 20 bp, synthetic construct
  misc_feature 1..20: note = chemically synthesized
  source 1..20: mol_type = other DNA
gaggactaggaaagaccaga

SEQ ID NO: 43993 - DNA, 20 bp, synthetic construct
  misc_feature 1..20: note = chemically synthesized
  source 1..20: mol_type = other DNA
ctaggaaagaccagatagta

SEQ ID NO: 43994 - DNA, 20 bp, synthetic construct
  misc_feature 1..20: note = chemically synthesized
  source 1..20: mol_type = other DNA
taggaaagaccagatagtac

SEQ ID NO: 43995 - DNA, 20 bp, synthetic construct
  misc_feature 1..20: note = chemically synthesized
  source 1..20: mol_type = other DNA
aggaaagaccagatagtaca

SEQ ID NO: 43996 - DNA, 20 bp, synthetic construct
  misc_feature 1..20: note = chemically synthesized
  source 1..20: mol_type = other DNA
agaccagatagtacagggcc

SEQ ID NO: 43997 - DNA, 20 bp, synthetic construct
  misc_feature 1..20: note = chemically synthesized
  source 1..20: mol_type = other DNA
gggcctggctacaaaaatac

SEQ ID NO: 43998 - DNA, 20 bp, synthetic construct
  misc_feature 1..20: note = chemically synthesized
  source 1..20: mol_type = other DNA
ctattgcaatactaaacgat

SEQ ID NO: 43999 - DNA, 20 bp, synthetic construct
  misc_feature 1..20: note = chemically synthesized
  source 1..20: mol_type = other DNA
caatactaaacgataagcat

SEQ ID NO: 44000 - DNA, 20 bp, synthetic construct
  misc_feature 1..20: note = chemically synthesized
  source 1..20: mol_type = other DNA
aatactaaacgataagcatt

SEQ ID NO: 44001 - DNA, 20 bp, synthetic construct
  misc_feature 1..20: note = chemically synthesized
  source 1..20: mol_type = other DNA
acgataagcattaggatgtt

SEQ ID NO: 44002 - DNA, 20 bp, synthetic construct
  misc_feature 1..20: note = chemically synthesized
  source 1..20: mol_type = other DNA
cattaggatgttaagtgact

SEQ ID NO: 44003 - DNA, 20 bp, synthetic construct
  misc_feature 1..20: note = chemically synthesized
  source 1..20: mol_type = other DNA
attaggatgttaagtgactc

SEQ ID NO: 44004 - DNA, 20 bp, synthetic construct
  misc_feature 1..20: note = chemically synthesized
  source 1..20: mol_type = other DNA
tgttaagtgactcaggaaat

SEQ ID NO: 44005 - DNA, 20 bp, synthetic construct
  misc_feature 1..20: note = chemically synthesized
  source 1..20: mol_type = other DNA
tgactcaggaaataagattt

SEQ ID NO: 44006 - DNA, 20 bp, synthetic construct
  misc_feature 1..20: note = chemically synthesized
  source 1..20: mol_type = other DNA
gactcaggaaataagatttt

SEQ ID NO: 44007 - DNA, 20 bp, synthetic construct
  misc_feature 1..20: note = chemically synthesized
  source 1..20: mol_type = other DNA
ggaaataagattttgggaaa

SEQ ID NO: 44008 - DNA, 20 bp, synthetic construct
  misc_feature 1..20: note = chemically synthesized
  source 1..20: mol_type = other DNA
atctgcttatgtgcacaaaa

SEQ ID NO: 44009 - DNA, 20 bp, synthetic construct
  misc_feature 1..20: note = chemically synthesized
  source 1..20: mol_type = other DNA
tatgtgcacaaaatggattc

SEQ ID NO: 44010 - DNA, 20 bp, synthetic construct
  misc_feature 1..20: note = chemically synthesized
  source 1..20: mol_type = other DNA
acaaaatggattcaagtttg

SEQ ID NO: 44011 - DNA, 20 bp, synthetic construct
  misc_feature 1..20: note = chemically synthesized
  source 1..20: mol_type = other DNA
tttgcagataaaataaaata

SEQ ID NO: 44012 - DNA, 20 bp, synthetic construct
  misc_feature 1..20: note = chemically synthesized
  source 1..20: mol_type = other DNA
taaaatatggatgatgattc

SEQ ID NO: 44013 - DNA, 20 bp, synthetic construct
  misc_feature 1..20: note = chemically synthesized
  source 1..20: mol_type = other DNA
aaaatatggatgatgattca

SEQ ID NO: 44014 - DNA, 20 bp, synthetic construct
  misc_feature 1..20: note = chemically synthesized
  source 1..20: mol_type = other DNA
aaatatggatgatgattcaa

SEQ ID NO: 44015 - DNA, 20 bp, synthetic construct
  misc_feature 1..20: note = chemically synthesized
  source 1..20: mol_type = other DNA
aatatggatgatgattcaag

SEQ ID NO: 44016 - DNA, 20 bp, synthetic construct
  misc_feature 1..20: note = chemically synthesized
  source 1..20: mol_type = other DNA
tggatgatgattcaagggga

SEQ ID NO: 44017 - DNA, 20 bp, synthetic construct
  misc_feature 1..20: note = chemically synthesized
  source 1..20: mol_type = other DNA
attcaaggggacagatacaa

SEQ ID NO: 44018 - DNA, 20 bp, synthetic construct
  misc_feature 1..20: note = chemically synthesized
  source 1..20: mol_type = other DNA
agatacaatggttcaaaccc

SEQ ID NO: 44019 - DNA, 20 bp, synthetic construct
  misc_feature 1..20: note = chemically synthesized
  source 1..20: mol_type = other DNA
atacaatggttcaaacccaa

SEQ ID NO: 44020 - DNA, 20 bp, synthetic construct
  misc_feature 1..20: note = chemically synthesized
  source 1..20: mol_type = other DNA
tacaatggttcaaacccaag

SEQ ID NO: 44021 - DNA, 20 bp, synthetic construct
  misc_feature 1..20: note = chemically synthesized
  source 1..20: mol_type = other DNA
caatggttcaaacccaagag

SEQ ID NO: 44022 - DNA, 20 bp, synthetic construct
  misc_feature 1..20: note = chemically synthesized
  source 1..20: mol_type = other DNA
tggttcaaacccaagaggag

SEQ ID NO: 44023 - DNA, 20 bp, synthetic construct
  misc_feature 1..20: note = chemically synthesized
  source 1..20: mol_type = other DNA
tcaaacccaagaggagcagt

SEQ ID NO: 44024 - DNA, 20 bp, synthetic construct
  misc_feature 1..20: note = chemically synthesized
  source 1..20: mol_type = other DNA
caagaggagcagtgagtctg

SEQ ID NO: 44025 - DNA, 20 bp, synthetic construct
  misc_feature 1..20: note = chemically synthesized
  source 1..20: mol_type = other DNA
cagtgagtctgtggaatttg

SEQ ID NO: 44026 - DNA, 20 bp, synthetic construct
  misc_feature 1..20: note = chemically synthesized
  source 1..20: mol_type = other DNA
agtgagtctgtggaatttga

SEQ ID NO: 44027 - DNA, 20 bp, synthetic construct
  misc_feature 1..20: note = chemically synthesized
  source 1..20: mol_type = other DNA
agtctgtggaatttgaagga

SEQ ID NO: 44028 - DNA, 20 bp, synthetic construct
  misc_feature 1..20: note = chemically synthesized
  source 1..20: mol_type = other DNA
tggaatttgaaggatggaca

SEQ ID NO: 44029 - DNA, 20 bp, synthetic construct
  misc_feature 1..20: note = chemically synthesized
  source 1..20: mol_type = other DNA
ggaatttgaaggatggacaa

SEQ ID NO: 44030 - DNA, 20 bp, synthetic construct
  misc_feature 1..20: note = chemically synthesized
  source 1..20: mol_type = other DNA
atttgaaggatggacaaagg

SEQ ID NO: 44031 - DNA, 20 bp, synthetic construct
  misc_feature 1..20: note = chemically synthesized
  source 1..20: mol_type = other DNA
tttgaaggatggacaaaggt

SEQ ID NO: 44032 - DNA, 20 bp, synthetic construct
  misc_feature 1..20: note = chemically synthesized
  source 1..20: mol_type = other DNA
ttgaaggatggacaaaggtg

SEQ ID NO: 44033 - DNA, 20 bp, synthetic construct
  misc_feature 1..20: note = chemically synthesized
  source 1..20: mol_type = other DNA
aggatggacaaaggtggggt

SEQ ID NO: 44034 - DNA, 20 bp, synthetic construct
  misc_feature 1..20: note = chemically synthesized
  source 1..20: mol_type = other DNA
tggacaaaggtggggtgaga

SEQ ID NO: 44035 - DNA, 20 bp, synthetic construct
  misc_feature 1..20: note = chemically synthesized
  source 1..20: mol_type = other DNA
aaggtggggtgagaaagaca

SEQ ID NO: 44036 - DNA, 20 bp, synthetic construct
  misc_feature 1..20: note = chemically synthesized
  source 1..20: mol_type = other DNA
acatagtattcgactgactg

SEQ ID NO: 44037 - DNA, 20 bp, synthetic construct
  misc_feature 1..20: note = chemically synthesized
  source 1..20: mol_type = other DNA
catagtattcgactgactgt

SEQ ID NO: 44038 - DNA, 20 bp, synthetic construct
  misc_feature 1..20: note = chemically synthesized
  source 1..20: mol_type = other DNA
tagtattcgactgactgtgg

SEQ ID NO: 44039 - DNA, 20 bp, synthetic construct
  misc_feature 1..20: note = chemically synthesized
  source 1..20: mol_type = other DNA
ttcgactgactgtgggagat

SEQ ID NO: 44040 - DNA, 20 bp, synthetic construct
  misc_feature 1..20: note = chemically synthesized
  source 1..20: mol_type = other DNA
gactgactgtgggagatgag

SEQ ID NO: 44041 - DNA, 20 bp, synthetic construct
  misc_feature 1..20: note = chemically synthesized
  source 1..20: mol_type = other DNA
actgactgtgggagatgaga

SEQ ID NO: 44042 - DNA, 20 bp, synthetic construct
  misc_feature 1..20: note = chemically synthesized
  source 1..20: mol_type = other DNA
gactgtgggagatgagaagg

SEQ ID NO: 44043 - DNA, 20 bp, synthetic construct
  misc_feature 1..20: note = chemically synthesized
  source 1..20: mol_type = other DNA
tgtgggagatgagaaggaag

SEQ ID NO: 44044 - DNA, 20 bp, synthetic construct
  misc_feature 1..20: note = chemically synthesized
  source 1..20: mol_type = other DNA
gtgggagatgagaaggaaga

SEQ ID NO: 44045 - DNA, 20 bp, synthetic construct
  misc_feature 1..20: note = chemically synthesized
  source 1..20: mol_type = other DNA
gggagatgagaaggaagaag

SEQ ID NO: 44046 - DNA, 20 bp, synthetic construct
  misc_feature 1..20: note = chemically synthesized
  source 1..20: mol_type = other DNA
ggagatgagaaggaagaagg

SEQ ID NO: 44047 - DNA, 20 bp, synthetic construct
  misc_feature 1..20: note = chemically synthesized
  source 1..20: mol_type = other DNA
aggaggtgataaatgactga

SEQ ID NO: 44048 - DNA, 20 bp, synthetic construct
  misc_feature 1..20: note = chemically synthesized
  source 1..20: mol_type = other DNA
gataaatgactgaaagctcc

SEQ ID NO: 44049 - DNA, 20 bp, synthetic construct
  misc_feature 1..20: note = chemically synthesized
  source 1..20: mol_type = other DNA
atgactgaaagctcccagac

SEQ ID NO: 44050 - DNA, 20 bp, synthetic construct
  misc_feature 1..20: note = chemically synthesized
  source 1..20: mol_type = other DNA
tgaaagctcccagactggtg

SEQ ID NO: 44051 - DNA, 20 bp, synthetic construct
  misc_feature 1..20: note = chemically synthesized
  source 1..20: mol_type = other DNA
tcccagactggtgaagataa

SEQ ID NO: 44052 - DNA, 20 bp, synthetic construct
  misc_feature 1..20: note = chemically synthesized
  source 1..20: mol_type = other DNA
cccagactggtgaagataac

SEQ ID NO: 44053 - DNA, 20 bp, synthetic construct
  misc_feature 1..20: note = chemically synthesized
  source 1..20: mol_type = other DNA
cagactggtgaagataacag

SEQ ID NO: 44054 - DNA, 20 bp, synthetic construct
  misc_feature 1..20: note = chemically synthesized
  source 1..20: mol_type = other DNA
agactggtgaagataacagg

SEQ ID NO: 44055 - DNA, 20 bp, synthetic construct
  misc_feature 1..20: note = chemically synthesized
  source 1..20: mol_type = other DNA
gaggaaaccatgcactgacc

SEQ ID NO: 44056 - DNA, 20 bp, synthetic construct
  misc_feature 1..20: note = chemically synthesized
  source 1..20: mol_type = other DNA
cctggtgactctcatgtgtg

SEQ ID NO: 44057 - DNA, 20 bp, synthetic construct
  misc_feature 1..20: note = chemically synthesized
  source 1..20: mol_type = other DNA
ctggtgactctcatgtgtga

SEQ ID NO: 44058 - DNA, 20 bp, synthetic construct
  misc_feature 1..20: note = chemically synthesized
  source 1..20: mol_type = other DNA
tggtgactctcatgtgtgaa

SEQ ID NO: 44059 - DNA, 20 bp, synthetic construct
  misc_feature 1..20: note = chemically synthesized
  source 1..20: mol_type = other DNA
tgactctcatgtgtgaaggg

SEQ ID NO: 44060 - DNA, 20 bp, synthetic construct
  misc_feature 1..20: note = chemically synthesized
  source 1..20: mol_type = other DNA
actctcatgtgtgaagggta

SEQ ID NO: 44061 - DNA, 20 bp, synthetic construct
  misc_feature 1..20: note = chemically synthesized
  source 1..20: mol_type = other DNA
ctctcatgtgtgaagggtag

SEQ ID NO: 44062 - DNA, 20 bp, synthetic construct
  misc_feature 1..20: note = chemically synthesized
  source 1..20: mol_type = other DNA
tctcatgtgtgaagggtaga

SEQ ID NO: 44063 - DNA, 20 bp, synthetic construct
  misc_feature 1..20: note = chemically synthesized
  source 1..20: mol_type = other DNA
gaagggtagagggatattaa

SEQ ID NO: 44064 - DNA, 20 bp, synthetic construct
  misc_feature 1..20: note = chemically synthesized
  source 1..20: mol_type = other DNA
atattaacagatttactttt

SEQ ID NO: 44065 - DNA, 20 bp, synthetic construct
  misc_feature 1..20: note = chemically synthesized
  source 1..20: mol_type = other DNA
tattaacagatttacttttt

SEQ ID NO: 44066 - DNA, 20 bp, synthetic construct
  misc_feature 1..20: note = chemically synthesized
  source 1..20: mol_type = other DNA
taacagatttactttttagg

SEQ ID NO: 44067 - DNA, 20 bp, synthetic construct
  misc_feature 1..20: note = chemically synthesized
  source 1..20: mol_type = other DNA
atttactttttaggaagtgc

SEQ ID NO: 44068 - DNA, 20 bp, synthetic construct
  misc_feature 1..20: note = chemically synthesized
  source 1..20: mol_type = other DNA
ctttttaggaagtgctagat

SEQ ID NO: 44069 - DNA, 20 bp, synthetic construct
  misc_feature 1..20: note = chemically synthesized
  source 1..20: mol_type = other DNA
ttaggaagtgctagattggt

SEQ ID NO: 44070 - DNA, 20 bp, synthetic construct
  misc_feature 1..20: note = chemically synthesized
  source 1..20: mol_type = other DNA
taggaagtgctagattggtc

SEQ ID NO: 44071 - DNA, 20 bp, synthetic construct
  misc_feature 1..20: note = chemically synthesized
  source 1..20: mol_type = other DNA
aggaagtgctagattggtca

SEQ ID NO: 44072 - DNA, 20 bp, synthetic construct
  misc_feature 1..20: note = chemically synthesized
  source 1..20: mol_type = other DNA
gaagtgctagattggtcagg

SEQ ID NO: 44073 - DNA, 20 bp, synthetic construct
  misc_feature 1..20: note = chemically synthesized
  source 1..20: mol_type = other DNA
ggtcagggagttttgacctt

SEQ ID NO: 44074 - DNA, 20 bp, synthetic construct
  misc_feature 1..20: note = chemically synthesized
  source 1..20: mol_type = other DNA
gtcagggagttttgaccttc

SEQ ID NO: 44075 - DNA, 20 bp, synthetic construct
  misc_feature 1..20: note = chemically synthesized
  source 1..20: mol_type = other DNA
ggtcttgtgtctttcatatc

SEQ ID NO: 44076 - DNA, 20 bp, synthetic construct
  misc_feature 1..20: note = chemically synthesized
  source 1..20: mol_type = other DNA
gtcttgtgtctttcatatca

SEQ ID NO: 44077 - DNA, 20 bp, synthetic construct
  misc_feature 1..20: note = chemically synthesized
  source 1..20: mol_type = other DNA
aaggaacctttgcattttcc

SEQ ID NO: 44078 - DNA, 20 bp, synthetic construct
  misc_feature 1..20: note = chemically synthesized
  source 1..20: mol_type = other DNA
aacctttgcattttccaagt

SEQ ID NO: 44079 - DNA, 20 bp, synthetic construct
  misc_feature 1..20: note = chemically synthesized
  source 1..20: mol_type = other DNA
cctttgcattttccaagtta

SEQ ID NO: 44080 - DNA, 20 bp, synthetic construct
  misc_feature 1..20: note = chemically synthesized
  source 1..20: mol_type = other DNA
caagttagagtgccatattt

SEQ ID NO: 44081 - DNA, 20 bp, synthetic construct
  misc_feature 1..20: note = chemically synthesized
  source 1..20: mol_type = other DNA
tttggcaaatataactttat

SEQ ID NO: 44082 - DNA, 20 bp, synthetic construct
  misc_feature 1..20: note = chemically synthesized
  source 1..20: mol_type = other DNA
taactttattagtaatttta

SEQ ID NO: 44083 - DNA, 20 bp, synthetic construct
  misc_feature 1..20: note = chemically synthesized
  source 1..20: mol_type = other DNA
tatagtgctctcacattgat

SEQ ID NO: 44084 - DNA, 20 bp, synthetic construct
  misc_feature 1..20: note = chemically synthesized
  source 1..20: mol_type = other DNA
ctgtgaattacttttgaatt

SEQ ID NO: 44085 - DNA, 20 bp, synthetic construct
  misc_feature 1..20: note = chemically synthesized
  source 1..20: mol_type = other DNA
tgaatttggctgtatatatc

SEQ ID NO: 44086 - DNA, 20 bp, synthetic construct
  misc_feature 1..20: note = chemically synthesized
  source 1..20: mol_type = other DNA
ggctgtatatatccagaata

SEQ ID NO: 44087 - DNA, 20 bp, synthetic construct
  misc_feature 1..20: note = chemically synthesized
  source 1..20: mol_type = other DNA
gctgtatatatccagaatat

SEQ ID NO: 44088 - DNA, 20 bp, synthetic construct
  misc_feature 1..20: note = chemically synthesized
  source 1..20: mol_type = other DNA
tgtatatatccagaatatgg

SEQ ID NO: 44089 - DNA, 20 bp, synthetic construct
  misc_feature 1..20: note = chemically synthesized
  source 1..20: mol_type = other DNA
tatatatccagaatatggga

SEQ ID NO: 44090 - DNA, 20 bp, synthetic construct
  misc_feature 1..20: note = chemically synthesized
  source 1..20: mol_type = other DNA
tatatccagaatatgggaga

SEQ ID NO: 44091 - DNA, 20 bp, synthetic construct
  misc_feature 1..20: note = chemically synthesized
  source 1..20: mol_type = other DNA
agagagacaaataattattg

SEQ ID NO: 44092 - DNA, 20 bp, synthetic construct
  misc_feature 1..20: note = chemically synthesized
  source 1..20: mol_type = other DNA
acaaataattattgtagttg

SEQ ID NO: 44093 - DNA, 20 bp, synthetic construct
  misc_feature 1..20: note = chemically synthesized
  source 1..20: mol_type = other DNA
caaataattattgtagttgc

SEQ ID NO: 44094 - DNA, 20 bp, synthetic construct
  misc_feature 1..20: note = chemically synthesized
  source 1..20: mol_type = other DNA
ttgcaggctatcaacaatac

SEQ ID NO: 44095 - DNA, 20 bp, synthetic construct
  misc_feature 1..20: note = chemically synthesized
  source 1..20: mol_type = other DNA
tcaacaatactggtctctct

SEQ ID NO: 44096 - DNA, 20 bp, synthetic construct
  misc_feature 1..20: note = chemically synthesized
  source 1..20: mol_type = other DNA
cctttcaatatgcccataaa

SEQ ID NO: 44097 - DNA, 20 bp, synthetic construct
  misc_feature 1..20: note = chemically synthesized
  source 1..20: mol_type = other DNA
tttcaatatgcccataaaca

SEQ ID NO: 44098 - DNA, 20 bp, synthetic construct
  misc_feature 1..20: note = chemically synthesized
  source 1..20: mol_type = other DNA
atgcccataaacagagtaaa

SEQ ID NO: 44099 - DNA, 20 bp, synthetic construct
  misc_feature 1..20: note = chemically synthesized
  source 1..20: mol_type = other DNA
tgcccataaacagagtaaac

SEQ ID NO: 44100 - DNA, 20 bp, synthetic construct
  misc_feature 1..20: note = chemically synthesized
  source 1..20: mol_type = other DNA
gcccataaacagagtaaaca

SEQ ID NO: 44101 - DNA, 20 bp, synthetic construct
  misc_feature 1..20: note = chemically synthesized
  source 1..20: mol_type = other DNA
gagtaaacagggattattca

SEQ ID NO: 44102 - DNA, 20 bp, synthetic construct
  misc_feature 1..20: note = chemically synthesized
  source 1..20: mol_type = other DNA
tggcactaaatattttcacc

SEQ ID NO: 44103 - DNA, 20 bp, synthetic construct
  misc_feature 1..20: note = chemically synthesized
  source 1..20: mol_type = other DNA
actaaatattttcacctagt

SEQ ID NO: 44104 - DNA, 20 bp, synthetic construct
  misc_feature 1..20: note = chemically synthesized
  source 1..20: mol_type = other DNA
tcacctagtcagtcaacaaa

SEQ ID NO: 44105 - DNA, 20 bp, synthetic construct
  misc_feature 1..20: note = chemically synthesized
  source 1..20: mol_type = other DNA
cacctagtcagtcaacaaat

SEQ ID NO: 44106 - DNA, 20 bp, synthetic construct
  misc_feature 1..20: note = chemically synthesized
  source 1..20: mol_type = other DNA
cctagtcagtcaacaaatgg

SEQ ID NO: 44107 - DNA, 20 bp, synthetic construct
  misc_feature 1..20: note = chemically synthesized
  source 1..20: mol_type = other DNA
tacatatttttatatattta

SEQ ID NO: 44108 - DNA, 20 bp, synthetic construct
  misc_feature 1..20: note = chemically synthesized
  source 1..20: mol_type = other DNA
acatatttttatatatttat

SEQ ID NO: 44109 - DNA, 20 bp, synthetic construct
  misc_feature 1..20: note = chemically synthesized
  source 1..20: mol_type = other DNA
catatttttatatatttatg

SEQ ID NO: 44110 - DNA, 20 bp, synthetic construct
  misc_feature 1..20: note = chemically synthesized
  source 1..20: mol_type = other DNA
acatgtgatacttacatgcc

SEQ ID NO: 44111 - DNA, 20 bp, synthetic construct
  misc_feature 1..20: note = chemically synthesized
  source 1..20: mol_type = other DNA
gcctagaacatgtgatgatt

SEQ ID NO: 44112 - DNA, 20 bp, synthetic construct
  misc_feature 1..20: note = chemically synthesized
  source 1..20: mol_type = other DNA
gaacatgtgatgattaagtc

SEQ ID NO: 44113 - DNA, 20 bp, synthetic construct
  misc_feature 1..20: note = chemically synthesized
  source 1..20: mol_type = other DNA
gatgattaagtctagatatt

SEQ ID NO: 44114 - DNA, 20 bp, synthetic construct
  misc_feature 1..20: note = chemically synthesized
  source 1..20: mol_type = other DNA
atgattaagtctagatattt

SEQ ID NO: 44115 - DNA, 20 bp, synthetic construct
  misc_feature 1..20: note = chemically synthesized
  source 1..20: mol_type = other DNA
tttaggatatccattgcttt

SEQ ID NO: 44116 - DNA, 20 bp, synthetic construct
  misc_feature 1..20: note = chemically synthesized
  source 1..20: mol_type = other DNA
atttatcatttctatgtatt

SEQ ID NO: 44117 - DNA, 20 bp, synthetic construct
  misc_feature 1..20: note = chemically synthesized
  source 1..20: mol_type = other DNA
aaatttcaaatcctcatttc

SEQ ID NO: 44118 - DNA, 20 bp, synthetic construct
  misc_feature 1..20: note = chemically synthesized
  source 1..20: mol_type = other DNA
attttgaaatatataataaa

SEQ ID NO: 44119 - DNA, 20 bp, synthetic construct
  misc_feature 1..20: note = chemically synthesized
  source 1..20: mol_type = other DNA
taataaatagtaattaacta

SEQ ID NO: 44120 - DNA, 20 bp, synthetic construct
  misc_feature 1..20: note = chemically synthesized
  source 1..20: mol_type = other DNA
tactcaaatatcaaacatta

SEQ ID NO: 44121 - DNA, 20 bp, synthetic construct
  misc_feature 1..20: note = chemically synthesized
  source 1..20: mol_type = other DNA
atacacactcacactttttc

SEQ ID NO: 44122 - DNA, 20 bp, synthetic construct
  misc_feature 1..20: note = chemically synthesized
  source 1..20: mol_type = other DNA
attctactctctaccaccat

SEQ ID NO: 44123 - DNA, 20 bp, synthetic construct
  misc_feature 1..20: note = chemically synthesized
  source 1..20: mol_type = other DNA
caccatgagacccacttttt

SEQ ID NO: 44124 - DNA, 20 bp, synthetic construct
  misc_feature 1..20: note = chemically synthesized
  source 1..20: mol_type = other DNA
acccacttttttagctccca

SEQ ID NO: 44125 - DNA, 20 bp, synthetic construct
  misc_feature 1..20: note = chemically synthesized
  source 1..20: mol_type = other DNA
gatatttgactttctgtatc

SEQ ID NO: 44126 - DNA, 20 bp, synthetic construct
  misc_feature 1..20: note = chemically synthesized
  source 1..20: mol_type = other DNA
tattttattatctatctctt

SEQ ID NO: 44127 - DNA, 20 bp, synthetic construct
  misc_feature 1..20: note = chemically synthesized
  source 1..20: mol_type = other DNA
atctatctctttggcatacc

SEQ ID NO: 44128 - DNA, 20 bp, synthetic construct
  misc_feature 1..20: note = chemically synthesized
  source 1..20: mol_type = other DNA
ctatctctttggcataccaa

SEQ ID NO: 44129 - DNA, 20 bp, synthetic construct
  misc_feature 1..20: note = chemically synthesized
  source 1..20: mol_type = other DNA
agtttgtttttgttctgctt

SEQ ID NO: 44130 - DNA, 20 bp, synthetic construct
  misc_feature 1..20: note = chemically synthesized
  source 1..20: mol_type = other DNA
gtttgtttttgttctgcttc

SEQ ID NO: 44131 - DNA, 20 bp, synthetic construct
  misc_feature 1..20: note = chemically synthesized
  source 1..20: mol_type = other DNA
tttgtttttgttctgcttca

SEQ ID NO: 44132 - DNA, 20 bp, synthetic construct
  misc_feature 1..20: note = chemically synthesized
  source 1..20: mol_type = other DNA
tcaattaacataatgacctc

SEQ ID NO: 44133 - DNA, 20 bp, synthetic construct
  misc_feature 1..20: note = chemically synthesized
  source 1..20: mol_type = other DNA
tccatgttgctacaaatgac

SEQ ID NO: 44134 - DNA, 20 bp, synthetic construct
  misc_feature 1..20: note = chemically synthesized
  source 1..20: mol_type = other DNA
caagatttcattctttttca

SEQ ID NO: 44135 - DNA, 20 bp, synthetic construct
  misc_feature 1..20: note = chemically synthesized
  source 1..20: mol_type = other DNA
cattctttttcatggcaaaa

SEQ ID NO: 44136 - DNA, 20 bp, synthetic construct
  misc_feature 1..20: note = chemically synthesized
  source 1..20: mol_type = other DNA
ttaatccgttcatctgttga

SEQ ID NO: 44137 - DNA, 20 bp, synthetic construct
  misc_feature 1..20: note = chemically synthesized
  source 1..20: mol_type = other DNA
ttcatctgttgatagacact

SEQ ID NO: 44138 - DNA, 20 bp, synthetic construct
  misc_feature 1..20: note = chemically synthesized
  source 1..20: mol_type = other DNA
tcatctgttgatagacactt

SEQ ID NO: 44139 - DNA, 20 bp, synthetic construct
  misc_feature 1..20: note = chemically synthesized
  source 1..20: mol_type = other DNA
caaaccttaactattgtgaa

SEQ ID NO: 44140 - DNA, 20 bp, synthetic construct
  misc_feature 1..20: note = chemically synthesized
  source 1..20: mol_type = other DNA
aatagtgcttcaataaacat

SEQ ID NO: 44141 - DNA, 20 bp, synthetic construct
  misc_feature 1..20: note = chemically synthesized
  source 1..20: mol_type = other DNA
catgagtgtaatgtgtccat

SEQ ID NO: 44142 - DNA, 20 bp, synthetic construct
  misc_feature 1..20: note = chemically synthesized
  source 1..20: mol_type = other DNA
tatactgatttcctttcttt

SEQ ID NO: 44143 - DNA, 20 bp, synthetic construct
  misc_feature 1..20: note = chemically synthesized
  source 1..20: mol_type = other DNA
tcttttggataaataaccac

SEQ ID NO: 44144 - DNA, 20 bp, synthetic construct
  misc_feature 1..20: note = chemically synthesized
  source 1..20: mol_type = other DNA
ttggataaataaccactagt

SEQ ID NO: 44145 - DNA, 20 bp, synthetic construct
  misc_feature 1..20: note = chemically synthesized
  source 1..20: mol_type = other DNA
ataaccactagtgagattgc

SEQ ID NO: 44146 - DNA, 20 bp, synthetic construct
  misc_feature 1..20: note = chemically synthesized
  source 1..20: mol_type = other DNA
gagattgctggattgtatga

SEQ ID NO: 44147 - DNA, 20 bp, synthetic construct
  misc_feature 1..20: note = chemically synthesized
  source 1..20: mol_type = other DNA
ttgtatgatagttctgtttt

SEQ ID NO: 44148 - DNA, 20 bp, synthetic construct
  misc_feature 1..20: note = chemically synthesized
  source 1..20: mol_type = other DNA
agttctgtttttagtttact

SEQ ID NO: 44149 - DNA, 20 bp, synthetic construct
  misc_feature 1..20: note = chemically synthesized
  source 1..20: mol_type = other DNA
cttcatactgttttccataa

SEQ ID NO: 44150 - DNA, 20 bp, synthetic construct
  misc_feature 1..20: note = chemically synthesized
  source 1..20: mol_type = other DNA
ctattttacattcccaccaa

SEQ ID NO: 44151 - DNA, 20 bp, synthetic construct
  misc_feature 1..20: note = chemically synthesized
  source 1..20: mol_type = other DNA
cattcccaccaacagtgtgt

SEQ ID NO: 44152 - DNA, 20 bp, synthetic construct
  misc_feature 1..20: note = chemically synthesized
  source 1..20: mol_type = other DNA
cccaccaacagtgtgtaaga

SEQ ID NO: 44153 - DNA, 20 bp, synthetic construct
  misc_feature 1..20: note = chemically synthesized
  source 1..20: mol_type = other DNA
caccaacagtgtgtaagaaa

SEQ ID NO: 44154 - DNA, 20 bp, synthetic construct
  misc_feature 1..20: note = chemically synthesized
  source 1..20: mol_type = other DNA
ccttttctccatatcctcac

SEQ ID NO: 44155 - DNA, 20 bp, synthetic construct
  misc_feature 1..20: note = chemically synthesized
  source 1..20: mol_type = other DNA
cttttctccatatcctcaca

SEQ ID NO: 44156 - DNA, 20 bp, synthetic construct
  misc_feature 1..20: note = chemically synthesized
  source 1..20: mol_type = other DNA
ttttttgtcttttttgttaa

SEQ ID NO: 44157 - DNA, 20 bp, synthetic construct
  misc_feature 1..20: note = chemically synthesized
  source 1..20: mol_type = other DNA
ttgttaatagccgttttaac

SEQ ID NO: 44158 - DNA, 20 bp, synthetic construct
  misc_feature 1..20: note = chemically synthesized
  source 1..20: mol_type = other DNA
gttaatagccgttttaacta

SEQ ID NO: 44159 - DNA, 20 bp, synthetic construct
  misc_feature 1..20: note = chemically synthesized
  source 1..20: mol_type = other DNA
atagccgttttaactagagt

SEQ ID NO: 44160 - DNA, 20 bp, synthetic construct
  misc_feature 1..20: note = chemically synthesized
  source 1..20: mol_type = other DNA
gccgttttaactagagtaag

SEQ ID NO: 44161 - DNA, 20 bp, synthetic construct
  misc_feature 1..20: note = chemically synthesized
  source 1..20: mol_type = other DNA
agtaagtagatatctcattg

SEQ ID NO: 44162 - DNA, 20 bp, synthetic construct
  misc_feature 1..20: note = chemically synthesized
  source 1..20: mol_type = other DNA
atttgcatttccctgatcat

SEQ ID NO: 44163 - DNA, 20 bp, synthetic construct
  misc_feature 1..20: note = chemically synthesized
  source 1..20: mol_type = other DNA
ccctgatcattagtgatgtt

SEQ ID NO: 44164 - DNA, 20 bp, synthetic construct
  misc_feature 1..20: note = chemically synthesized
  source 1..20: mol_type = other DNA
gaattttttcatatgtttgt

SEQ ID NO: 44165 - DNA, 20 bp, synthetic construct
  misc_feature 1..20: note = chemically synthesized
  source 1..20: mol_type = other DNA
tcatttgtatatctttttct

SEQ ID NO: 44166 - DNA, 20 bp, synthetic construct
  misc_feature 1..20: note = chemically synthesized
  source 1..20: mol_type = other DNA
gaattgtctgttcatgtcct

SEQ ID NO: 44167 - DNA, 20 bp, synthetic construct
  misc_feature 1..20: note = chemically synthesized
  source 1..20: mol_type = other DNA
gtccttagcctactttttat

SEQ ID NO: 44168 - DNA, 20 bp, synthetic construct
  misc_feature 1..20: note = chemically synthesized
  source 1..20: mol_type = other DNA
tccttagcctactttttatt

SEQ ID NO: 44169 - DNA, 20 bp, synthetic construct
  misc_feature 1..20: note = chemically synthesized
  source 1..20: mol_type = other DNA
taatctatttgtgttcattt

SEQ ID NO: 44170 - DNA, 20 bp, synthetic construct
  misc_feature 1..20: note = chemically synthesized
  source 1..20: mol_type = other DNA
atctatttgtgttcatttta

SEQ ID NO: 44171 - DNA, 20 bp, synthetic construct
  misc_feature 1..20: note = chemically synthesized
  source 1..20: mol_type = other DNA
tttgtgttcattttagagcc

SEQ ID NO: 44172 - DNA, 20 bp, synthetic construct
  misc_feature 1..20: note = chemically synthesized
  source 1..20: mol_type = other DNA
cctggatattattcttttgt

SEQ ID NO: 44173 - DNA, 20 bp, synthetic construct
  misc_feature 1..20: note = chemically synthesized
  source 1..20: mol_type = other DNA
ttattcttttgtcagatgta

SEQ ID NO: 44174 - DNA, 20 bp, synthetic construct
  misc_feature 1..20: note = chemically synthesized
  source 1..20: mol_type = other DNA
tgtcagatgtatagattgtg

SEQ ID NO: 44175 - DNA, 20 bp, synthetic construct
  misc_feature 1..20: note = chemically synthesized
  source 1..20: mol_type = other DNA
gaagattttctcccactctg

SEQ ID NO: 44176 - DNA, 20 bp, synthetic construct
  misc_feature 1..20: note = chemically synthesized
  source 1..20: mol_type = other DNA
aagattttctcccactctgt

SEQ ID NO: 44177 - DNA, 20 bp, synthetic construct
  misc_feature 1..20: note = chemically synthesized
  source 1..20: mol_type = other DNA
tgggttgtctgtttattctg

SEQ ID NO: 44178 - DNA, 20 bp, synthetic construct
  misc_feature 1..20: note = chemically synthesized
  source 1..20: mol_type = other DNA
ctcttccttttgccatgcaa

SEQ ID NO: 44179 - DNA, 20 bp, synthetic construct
  misc_feature 1..20: note = chemically synthesized
  source 1..20: mol_type = other DNA
tttgccatgcaaaagctctt

SEQ ID NO: 44180 - DNA, 20 bp, synthetic construct
  misc_feature 1..20: note = chemically synthesized
  source 1..20: mol_type = other DNA
aaaagctctttagtttaatt

SEQ ID NO: 44181 - DNA, 20 bp, synthetic construct
  misc_feature 1..20: note = chemically synthesized
  source 1..20: mol_type = other DNA
tctttagtttaatttagtcc

SEQ ID NO: 44182 - DNA, 20 bp, synthetic construct
  misc_feature 1..20: note = chemically synthesized
  source 1..20: mol_type = other DNA
tgtatttgcatttgtgttct

SEQ ID NO: 44183 - DNA, 20 bp, synthetic construct
  misc_feature 1..20: note = chemically synthesized
  source 1..20: mol_type = other DNA
tggtcatgaaatcctttcct

SEQ ID NO: 44184 - DNA, 20 bp, synthetic construct
  misc_feature 1..20: note = chemically synthesized
  source 1..20: mol_type = other DNA
tcctttcctaagccaatgtg

SEQ ID NO: 44185 - DNA, 20 bp, synthetic construct
  misc_feature 1..20: note = chemically synthesized
  source 1..20: mol_type = other DNA
tttcctaagccaatgtgtag

SEQ ID NO: 44186 - DNA, 20 bp, synthetic construct
  misc_feature 1..20: note = chemically synthesized
  source 1..20: mol_type = other DNA
ttcctaagccaatgtgtaga

SEQ ID NO: 44187 - DNA, 20 bp, synthetic construct
  misc_feature 1..20: note = chemically synthesized
  source 1..20: mol_type = other DNA
tcctaagccaatgtgtagaa

SEQ ID NO: 44188 - DNA, 20 bp, synthetic construct
  misc_feature 1..20: note = chemically synthesized
  source 1..20: mol_type = other DNA
gtttttccgatgttattttc

SEQ ID NO: 44189 - DNA, 20 bp, synthetic construct
  misc_feature 1..20: note = chemically synthesized
  source 1..20: mol_type = other DNA
gttattttctagaattgtta

SEQ ID NO: 44190 - DNA, 20 bp, synthetic construct
  misc_feature 1..20: note = chemically synthesized
  source 1..20: mol_type = other DNA
ttctagaattgttacagttt

SEQ ID NO: 44191 - DNA, 20 bp, synthetic construct
  misc_feature 1..20: note = chemically synthesized
  source 1..20: mol_type = other DNA
tctagaattgttacagtttc

SEQ ID NO: 44192 - DNA, 20 bp, synthetic construct
  misc_feature 1..20: note = chemically synthesized
  source 1..20: mol_type = other DNA
ctagaattgttacagtttca

SEQ ID NO: 44193 - DNA, 20 bp, synthetic construct
  misc_feature 1..20: note = chemically synthesized
  source 1..20: mol_type = other DNA
attgttacagtttcagggct

SEQ ID NO: 44194 - DNA, 20 bp, synthetic construct
  misc_feature 1..20: note = chemically synthesized
  source 1..20: mol_type = other DNA
cagtttcagggcttagattt

SEQ ID NO: 44195 - DNA, 20 bp, synthetic construct
  misc_feature 1..20: note = chemically synthesized
  source 1..20: mol_type = other DNA
ttaagtccttgatccatctt

SEQ ID NO: 44196 - DNA, 20 bp, synthetic construct
  misc_feature 1..20: note = chemically synthesized
  source 1..20: mol_type = other DNA
tcttgagttgatttttgtat

SEQ ID NO: 44197 - DNA, 20 bp, synthetic construct
  misc_feature 1..20: note = chemically synthesized
  source 1..20: mol_type = other DNA
cttgagttgatttttgtata

SEQ ID NO: 44198 - DNA, 20 bp, synthetic construct
  misc_feature 1..20: note = chemically synthesized
  source 1..20: mol_type = other DNA
agttgatttttgtataaggt

SEQ ID NO: 44199 - DNA, 20 bp, synthetic construct
  misc_feature 1..20: note = chemically synthesized
  source 1..20: mol_type = other DNA
ttgatttttgtataaggtga

SEQ ID NO: 44200 - DNA, 20 bp, synthetic construct
  misc_feature 1..20: note = chemically synthesized
  source 1..20: mol_type = other DNA
tttgtataaggtgagagatg

SEQ ID NO: 44201 - DNA, 20 bp, synthetic construct
  misc_feature 1..20: note = chemically synthesized
  source 1..20: mol_type = other DNA
taaggtgagagatgaagatc

SEQ ID NO: 44202 - DNA, 20 bp, synthetic construct
  misc_feature 1..20: note = chemically synthesized
  source 1..20: mol_type = other DNA
cagtttcattctcctacatg

SEQ ID NO: 44203 - DNA, 20 bp, synthetic construct
  misc_feature 1..20: note = chemically synthesized
  source 1..20: mol_type = other DNA
ttctcctacatgtagcttgc

SEQ ID NO: 44204 - DNA, 20 bp, synthetic construct
  misc_feature 1..20: note = chemically synthesized
  source 1..20: mol_type = other DNA
tccccgcaccatttgttgaa

SEQ ID NO: 44205 - DNA, 20 bp, synthetic construct
  misc_feature 1..20: note = chemically synthesized
  source 1..20: mol_type = other DNA
ccccgcaccatttgttgaat

SEQ ID NO: 44206 - DNA, 20 bp, synthetic construct
  misc_feature 1..20: note = chemically synthesized
  source 1..20: mol_type = other DNA
cccgcaccatttgttgaata

SEQ ID NO: 44207 - DNA, 20 bp, synthetic construct
  misc_feature 1..20: note = chemically synthesized
  source 1..20: mol_type = other DNA
tgtttttgtttgctttgtca

SEQ ID NO: 44208 - DNA, 20 bp, synthetic construct
  misc_feature 1..20: note = chemically synthesized
  source 1..20: mol_type = other DNA
ttgtttgctttgtcaaagat

SEQ ID NO: 44209 - DNA, 20 bp, synthetic construct
  misc_feature 1..20: note = chemically synthesized
  source 1..20: mol_type = other DNA
ttgctttgtcaaagatcagt

SEQ ID NO: 44210 - DNA, 20 bp, synthetic construct
  misc_feature 1..20: note = chemically synthesized
  source 1..20: mol_type = other DNA
gtcaaagatcagttggatgt

SEQ ID NO: 44211 - DNA, 20 bp, synthetic construct
  misc_feature 1..20: note = chemically synthesized
  source 1..20: mol_type = other DNA
tcagttggatgtaagtattt

SEQ ID NO: 44212 - DNA, 20 bp, synthetic construct
  misc_feature 1..20: note = chemically synthesized
  source 1..20: mol_type = other DNA
taagtatttgagtttatttc

SEQ ID NO: 44213 - DNA, 20 bp, synthetic construct
  misc_feature 1..20: note = chemically synthesized
  source 1..20: mol_type = other DNA
aagtatttgagtttatttct

SEQ ID NO: 44214 - DNA, 20 bp, synthetic construct
  misc_feature 1..20: note = chemically synthesized
  source 1..20: mol_type = other DNA
ggttctctattctgttccat

SEQ ID NO: 44215 - DNA, 20 bp, synthetic construct
  misc_feature 1..20: note = chemically synthesized
  source 1..20: mol_type = other DNA
cgatgtgcctatttgtacac

SEQ ID NO: 44216 - DNA, 20 bp, synthetic construct
  misc_feature 1..20: note = chemically synthesized
  source 1..20: mol_type = other DNA
acaccagcatcatgctgttt

SEQ ID NO: 44217 - DNA, 20 bp, synthetic construct
  misc_feature 1..20: note = chemically synthesized
  source 1..20: mol_type = other DNA
tcatgctgttttggtgacta

SEQ ID NO: 44218 - DNA, 20 bp, synthetic construct
  misc_feature 1..20: note = chemically synthesized
  source 1..20: mol_type = other DNA
gtgactatggccttattgta

SEQ ID NO: 44219 - DNA, 20 bp, synthetic construct
  misc_feature 1..20: note = chemically synthesized
  source 1..20: mol_type = other DNA
cttattgtatagtttgaaat

SEQ ID NO: 44220 - DNA, 20 bp, synthetic construct
  misc_feature 1..20: note = chemically synthesized
  source 1..20: mol_type = other DNA
ttattgtatagtttgaaatg

SEQ ID NO: 44221 - DNA, 20 bp, synthetic construct
  misc_feature 1..20: note = chemically synthesized
  source 1..20: mol_type = other DNA
atgaggtaatgtaatgcctt

SEQ ID NO: 44222 - DNA, 20 bp, synthetic construct
  misc_feature 1..20: note = chemically synthesized
  source 1..20: mol_type = other DNA
ttcagatttgttcttttttt

SEQ ID NO: 44223 - DNA, 20 bp, synthetic construct
  misc_feature 1..20: note = chemically synthesized
  source 1..20: mol_type = other DNA
ttttagacttgcttgtttat

SEQ ID NO: 44224 - DNA, 20 bp, synthetic construct
  misc_feature 1..20: note = chemically synthesized
  source 1..20: mol_type = other DNA
tttagacttgcttgtttatt

SEQ ID NO: 44225 - DNA, 20 bp, synthetic construct
  misc_feature 1..20: note = chemically synthesized
  source 1..20: mol_type = other DNA
ttgtttattgggctcttttt

SEQ ID NO: 44226 - DNA, 20 bp, synthetic construct
  misc_feature 1..20: note = chemically synthesized
  source 1..20: mol_type = other DNA
gggctcttttttggttccat

SEQ ID NO: 44227 - DNA, 20 bp, synthetic construct
  misc_feature 1..20: note = chemically synthesized
  source 1..20: mol_type = other DNA
ttttggttccataagaattt

SEQ ID NO: 44228 - DNA, 20 bp, synthetic construct
  misc_feature 1..20: note = chemically synthesized
  source 1..20: mol_type = other DNA
tttggttccataagaatttt

SEQ ID NO: 44229 - DNA, 20 bp, synthetic construct
  misc_feature 1..20: note = chemically synthesized
  source 1..20: mol_type = other DNA
aattttaggattgttttttc

SEQ ID NO: 44230 - DNA, 20 bp, synthetic construct
  misc_feature 1..20: note = chemically synthesized
  source 1..20: mol_type = other DNA
ttgttttttctagttctgtg

SEQ ID NO: 44231 - DNA, 20 bp, synthetic construct
  misc_feature 1..20: note = chemically synthesized
  source 1..20: mol_type = other DNA
tctagttctgtgaagactaa

SEQ ID NO: 44232 - DNA, 20 bp, synthetic construct
  misc_feature 1..20: note = chemically synthesized
  source 1..20: mol_type = other DNA
agttctgtgaagactaatgg

SEQ ID NO: 44233 - DNA, 20 bp, synthetic construct
  misc_feature 1..20: note = chemically synthesized
  source 1..20: mol_type = other DNA
gactaatggtggtattttga

SEQ ID NO: 44234 - DNA, 20 bp, synthetic construct
  misc_feature 1..20: note = chemically synthesized
  source 1..20: mol_type = other DNA
actaatggtggtattttgat

SEQ ID NO: 44235 - DNA, 20 bp, synthetic construct
  misc_feature 1..20: note = chemically synthesized
  source 1..20: mol_type = other DNA
tgggaattgcaatgaatttg

SEQ ID NO: 44236 - DNA, 20 bp, synthetic construct
  misc_feature 1..20: note = chemically synthesized
  source 1..20: mol_type = other DNA
gggaattgcaatgaatttgt

SEQ ID NO: 44237 - DNA, 20 bp, synthetic construct
  misc_feature 1..20: note = chemically synthesized
  source 1..20: mol_type = other DNA
atgaatttgtaggttgcttc

SEQ ID NO: 44238 - DNA, 20 bp, synthetic construct
  misc_feature 1..20: note = chemically synthesized
  source 1..20: mol_type = other DNA
gtaggttgcttctggcatta

SEQ ID NO: 44239 - DNA, 20 bp, synthetic construct
  misc_feature 1..20: note = chemically synthesized
  source 1..20: mol_type = other DNA
tattgattctacccatctat

SEQ ID NO: 44240 - DNA, 20 bp, synthetic construct
  misc_feature 1..20: note = chemically synthesized
  source 1..20: mol_type = other DNA
attctacccatctatgagaa

SEQ ID NO: 44241 - DNA, 20 bp, synthetic construct
  misc_feature 1..20: note = chemically synthesized
  source 1..20: mol_type = other DNA
gtgtcttatatgattacttt

SEQ ID NO: 44242 - DNA, 20 bp, synthetic construct
  misc_feature 1..20: note = chemically synthesized
  source 1..20: mol_type = other DNA
ttactttcagccgtgttttg

SEQ ID NO: 44243 - DNA, 20 bp, synthetic construct
  misc_feature 1..20: note = chemically synthesized
  source 1..20: mol_type = other DNA
gtgttttgtagttttccttg

SEQ ID NO: 44244 - DNA, 20 bp, synthetic construct
  misc_feature 1..20: note = chemically synthesized
  source 1..20: mol_type = other DNA
gtagatgtctttcacctcct

SEQ ID NO: 44245 - DNA, 20 bp, synthetic construct
  misc_feature 1..20: note = chemically synthesized
  source 1..20: mol_type = other DNA
atgtctttcacctccttggt

SEQ ID NO: 44246 - DNA, 20 bp, synthetic construct
  misc_feature 1..20: note = chemically synthesized
  source 1..20: mol_type = other DNA
tgtctttcacctccttggtt

SEQ ID NO: 44247 - DNA, 20 bp, synthetic construct
  misc_feature 1..20: note = chemically synthesized
  source 1..20: mol_type = other DNA
ttggttaggtatatattcct

SEQ ID NO: 44248 - DNA, 20 bp, synthetic construct
  misc_feature 1..20: note = chemically synthesized
  source 1..20: mol_type = other DNA
ttgttttgttttgttttttg

SEQ ID NO: 44249 - DNA, 20 bp, synthetic construct
  misc_feature 1..20: note = chemically synthesized
  source 1..20: mol_type = other DNA
gttttttgcagctattgtaa

SEQ ID NO: 44250 - DNA, 20 bp, synthetic construct
  misc_feature 1..20: note = chemically synthesized
  source 1..20: mol_type = other DNA
ttttttgcagctattgtaaa

SEQ ID NO: 44251 - DNA, 20 bp, synthetic construct
  misc_feature 1..20: note = chemically synthesized
  source 1..20: mol_type = other DNA
tttttgcagctattgtaaaa

SEQ ID NO: 44252 - DNA, 20 bp, synthetic construct
  misc_feature 1..20: note = chemically synthesized
  source 1..20: mol_type = other DNA
ttttgcagctattgtaaaag

SEQ ID NO: 44253 - DNA, 20 bp, synthetic construct
  misc_feature 1..20: note = chemically synthesized
  source 1..20: mol_type = other DNA
cagctattgtaaaaggggtt

SEQ ID NO: 44254 - DNA, 20 bp, synthetic construct
  misc_feature 1..20: note = chemically synthesized
  source 1..20: mol_type = other DNA
tgagttcttgattttattct

SEQ ID NO: 44255 - DNA, 20 bp, synthetic construct
  misc_feature 1..20: note = chemically synthesized
  source 1..20: mol_type = other DNA
tcttgattttattctcagct

SEQ ID NO: 44256 - DNA, 20 bp, synthetic construct
  misc_feature 1..20: note = chemically synthesized
  source 1..20: mol_type = other DNA
attctcagcttggtcattgc

SEQ ID NO: 44257 - DNA, 20 bp, synthetic construct
  misc_feature 1..20: note = chemically synthesized
  source 1..20: mol_type = other DNA
cttggtcattgctggtatgt

SEQ ID NO: 44258 - DNA, 20 bp, synthetic construct
  misc_feature 1..20: note = chemically synthesized
  source 1..20: mol_type = other DNA
gtcattgctggtatgtaaga

SEQ ID NO: 44259 - DNA, 20 bp, synthetic construct
  misc_feature 1..20: note = chemically synthesized
  source 1..20: mol_type = other DNA
tatgtaagaaagcaactcat

SEQ ID NO: 44260 - DNA, 20 bp, synthetic construct
  misc_feature 1..20: note = chemically synthesized
  source 1..20: mol_type = other DNA
gtgtacgttaattttgtatc

SEQ ID NO: 44261 - DNA, 20 bp, synthetic construct
  misc_feature 1..20: note = chemically synthesized
  source 1..20: mol_type = other DNA
actttgctgaattattttat

SEQ ID NO: 44262 - DNA, 20 bp, synthetic construct
  misc_feature 1..20: note = chemically synthesized
  source 1..20: mol_type = other DNA
ctgaattattttatcagttc

SEQ ID NO: 44263 - DNA, 20 bp, synthetic construct
  misc_feature 1..20: note = chemically synthesized
  source 1..20: mol_type = other DNA
tgaattattttatcagttct

SEQ ID NO: 44264 - DNA, 20 bp, synthetic construct
  misc_feature 1..20: note = chemically synthesized
  source 1..20: mol_type = other DNA
gaattattttatcagttcta

SEQ ID NO: 44265 - DNA, 20 bp, synthetic construct
  misc_feature 1..20: note = chemically synthesized
  source 1..20: mol_type = other DNA
aattattttatcagttctag

SEQ ID NO: 44266 - DNA, 20 bp, synthetic construct
  misc_feature 1..20: note = chemically synthesized
  source 1..20: mol_type = other DNA
attattttatcagttctagg

SEQ ID NO: 44267 - DNA, 20 bp, synthetic construct
  misc_feature 1..20: note = chemically synthesized
  source 1..20: mol_type = other DNA
ttatcagttctagggggttt

SEQ ID NO: 44268 - DNA, 20 bp, synthetic construct
  misc_feature 1..20: note = chemically synthesized
  source 1..20: mol_type = other DNA
atcagttctagggggttttg

SEQ ID NO: 44269 - DNA, 20 bp, synthetic construct
  misc_feature 1..20: note = chemically synthesized
  source 1..20: mol_type = other DNA
tcagttctagggggttttgg

SEQ ID NO: 44270 - DNA, 20 bp, synthetic construct
  misc_feature 1..20: note = chemically synthesized
  source 1..20: mol_type = other DNA
agttctagggggttttggag

SEQ ID NO: 44271 - DNA, 20 bp, synthetic construct
  misc_feature 1..20: note = chemically synthesized
  source 1..20: mol_type = other DNA
gggggttttggaggagtctt

SEQ ID NO: 44272 - DNA, 20 bp, synthetic construct
  misc_feature 1..20: note = chemically synthesized
  source 1..20: mol_type = other DNA
gggttttggaggagtcttta

SEQ ID NO: 44273 - DNA, 20 bp, synthetic construct
  misc_feature 1..20: note = chemically synthesized
  source 1..20: mol_type = other DNA
tacatacacaatcatatcat

SEQ ID NO: 44274 - DNA, 20 bp, synthetic construct
  misc_feature 1..20: note = chemically synthesized
  source 1..20: mol_type = other DNA
acaatcatatcatcagcaaa

SEQ ID NO: 44275 - DNA, 20 bp, synthetic construct
  misc_feature 1..20: note = chemically synthesized
  source 1..20: mol_type = other DNA
atatcatcagcaaacagtga

SEQ ID NO: 44276 - DNA, 20 bp, synthetic construct
  misc_feature 1..20: note = chemically synthesized
  source 1..20: mol_type = other DNA
tgactttctctttaacaatt

SEQ ID NO: 44277 - DNA, 20 bp, synthetic construct
  misc_feature 1..20: note = chemically synthesized
  source 1..20: mol_type = other DNA
tcttgtctgattgctcttgc

SEQ ID NO: 44278 - DNA, 20 bp, synthetic construct
  misc_feature 1..20: note = chemically synthesized
  source 1..20: mol_type = other DNA
cttgtctgattgctcttgct

SEQ ID NO: 44279 - DNA, 20 bp, synthetic construct
  misc_feature 1..20: note = chemically synthesized
  source 1..20: mol_type = other DNA
attgctcttgctaggacttc

SEQ ID NO: 44280 - DNA, 20 bp, synthetic construct
  misc_feature 1..20: note = chemically synthesized
  source 1..20: mol_type = other DNA
ggacttccagtaatatgtta

SEQ ID NO: 44281 - DNA, 20 bp, synthetic construct
  misc_feature 1..20: note = chemically synthesized
  source 1..20: mol_type = other DNA
acttccagtaatatgttaaa

SEQ ID NO: 44282 - DNA, 20 bp, synthetic construct
  misc_feature 1..20: note = chemically synthesized
  source 1..20: mol_type = other DNA
tccagtaatatgttaaagag

SEQ ID NO: 44283 - DNA, 20 bp, synthetic construct
  misc_feature 1..20: note = chemically synthesized
  source 1..20: mol_type = other DNA
agtaatatgttaaagagaag

SEQ ID NO: 44284 - DNA, 20 bp, synthetic construct
  misc_feature 1..20: note = chemically synthesized
  source 1..20: mol_type = other DNA
atatgttaaagagaagtggt

SEQ ID NO: 44285 - DNA, 20 bp, synthetic construct
  misc_feature 1..20: note = chemically synthesized
  source 1..20: mol_type = other DNA
atgttaaagagaagtggtga

SEQ ID NO: 44286 - DNA, 20 bp, synthetic construct
  misc_feature 1..20: note = chemically synthesized
  source 1..20: mol_type = other DNA
ttaaagagaagtggtgagag

SEQ ID NO: 44287 - DNA, 20 bp, synthetic construct
  misc_feature 1..20: note = chemically synthesized
  source 1..20: mol_type = other DNA
taaagagaagtggtgagagt

SEQ ID NO: 44288 - DNA, 20 bp, synthetic construct
  misc_feature 1..20: note = chemically synthesized
  source 1..20: mol_type = other DNA
tgggtatccttgtctcattc

SEQ ID NO: 44289 - DNA, 20 bp, synthetic construct
  misc_feature 1..20: note = chemically synthesized
  source 1..20: mol_type = other DNA
ccttgtctcattccagtttt

SEQ ID NO: 44290 - DNA, 20 bp, synthetic construct
  misc_feature 1..20: note = chemically synthesized
  source 1..20: mol_type = other DNA
gtctcattccagttttcaga

SEQ ID NO: 44291 - DNA, 20 bp, synthetic construct
  misc_feature 1..20: note = chemically synthesized
  source 1..20: mol_type = other DNA
tttcccattcaatataatgt

SEQ ID NO: 44292 - DNA, 20 bp, synthetic construct
  misc_feature 1..20: note = chemically synthesized
  source 1..20: mol_type = other DNA
tgttggctgtgtgtttacca

SEQ ID NO: 44293 - DNA, 20 bp, synthetic construct
  misc_feature 1..20: note = chemically synthesized
  source 1..20: mol_type = other DNA
ggctgtgtgtttaccatagc

SEQ ID NO: 44294 - DNA, 20 bp, synthetic construct
  misc_feature 1..20: note = chemically synthesized
  source 1..20: mol_type = other DNA
tagctggcttttattacatt

SEQ ID NO: 44295 - DNA, 20 bp, synthetic construct
  misc_feature 1..20: note = chemically synthesized
  source 1..20: mol_type = other DNA
agctggcttttattacattg

SEQ ID NO: 44296 - DNA, 20 bp, synthetic construct
  misc_feature 1..20: note = chemically synthesized
  source 1..20: mol_type = other DNA
ctttgtaaaccgattttgct

SEQ ID NO: 44297 - DNA, 20 bp, synthetic construct
  misc_feature 1..20: note = chemically synthesized
  source 1..20: mol_type = other DNA
aaaccgattttgctgagttt

SEQ ID NO: 44298 - DNA, 20 bp, synthetic construct
  misc_feature 1..20: note = chemically synthesized
  source 1..20: mol_type = other DNA
tttgctgagttttagtcata

SEQ ID NO: 44299 - DNA, 20 bp, synthetic construct
  misc_feature 1..20: note = chemically synthesized
  source 1..20: mol_type = other DNA
atgttgaattttgttgaatg

SEQ ID NO: 44300 - DNA, 20 bp, synthetic construct
  misc_feature 1..20: note = chemically synthesized
  source 1..20: mol_type = other DNA
tttgttgaatgcagtttctg

SEQ ID NO: 44301 - DNA, 20 bp, synthetic construct
  misc_feature 1..20: note = chemically synthesized
  source 1..20: mol_type = other DNA
atgcagtttctgtggctatt

SEQ ID NO: 44302 - DNA, 20 bp, synthetic construct
  misc_feature 1..20: note = chemically synthesized
  source 1..20: mol_type = other DNA
gcatgaaacccacttgatca

SEQ ID NO: 44303 - DNA, 20 bp, synthetic construct
  misc_feature 1..20: note = chemically synthesized
  source 1..20: mol_type = other DNA
catgaaacccacttgatcat

SEQ ID NO: 44304 - DNA, 20 bp, synthetic construct
  misc_feature 1..20: note = chemically synthesized
  source 1..20: mol_type = other DNA
catgggttttgatatgctgt

SEQ ID NO: 44305 - DNA, 20 bp, synthetic construct
  misc_feature 1..20: note = chemically synthesized
  source 1..20: mol_type = other DNA
gatatgctgtcggatgctat

SEQ ID NO: 44306 - DNA, 20 bp, synthetic construct
  misc_feature 1..20: note = chemically synthesized
  source 1..20: mol_type = other DNA
tgctgtcggatgctattagc

SEQ ID NO: 44307 - DNA, 20 bp, synthetic construct
  misc_feature 1..20: note = chemically synthesized
  source 1..20: mol_type = other DNA
ctattagctagtattttgtc

SEQ ID NO: 44308 - DNA, 20 bp, synthetic construct
  misc_feature 1..20: note = chemically synthesized
  source 1..20: mol_type = other DNA
tattagctagtattttgtca

SEQ ID NO: 44309 - DNA, 20 bp, synthetic construct
  misc_feature 1..20: note = chemically synthesized
  source 1..20: mol_type = other DNA
tagtattttgtcaaggatgt

SEQ ID NO: 44310 - DNA, 20 bp, synthetic construct
  misc_feature 1..20: note = chemically synthesized
  source 1..20: mol_type = other DNA
atgttggcatctatgttcat

SEQ ID NO: 44311 - DNA, 20 bp, synthetic construct
  misc_feature 1..20: note = chemically synthesized
  source 1..20: mol_type = other DNA
tgttggcatctatgttcatc

SEQ ID NO: 44312 - DNA, 20 bp, synthetic construct
  misc_feature 1..20: note = chemically synthesized
  source 1..20: mol_type = other DNA
gttggcatctatgttcatca

SEQ ID NO: 44313 - DNA, 20 bp, synthetic construct
  misc_feature 1..20: note = chemically synthesized
  source 1..20: mol_type = other DNA
tcatcagggatattgatctg

SEQ ID NO: 44314 - DNA, 20 bp, synthetic construct
  misc_feature 1..20: note = chemically synthesized
  source 1..20: mol_type = other DNA
tctgtagtgttttttttttt

SEQ ID NO: 44315 - DNA, 20 bp, synthetic construct
  misc_feature 1..20: note = chemically synthesized
  source 1..20: mol_type = other DNA
tttttggttatgttctttcc

SEQ ID NO: 44316 - DNA, 20 bp, synthetic construct
  misc_feature 1..20: note = chemically synthesized
  source 1..20: mol_type = other DNA
gttatgttctttcccagttt

SEQ ID NO: 44317 - DNA, 20 bp, synthetic construct
  misc_feature 1..20: note = chemically synthesized
  source 1..20: mol_type = other DNA
tctttcccagttttggtatt

SEQ ID NO: 44318 - DNA, 20 bp, synthetic construct
  misc_feature 1..20: note = chemically synthesized
  source 1..20: mol_type = other DNA
ctttcccagttttggtatta

SEQ ID NO: 44319 - DNA, 20 bp, synthetic construct
  misc_feature 1..20: note = chemically synthesized
  source 1..20: mol_type = other DNA
ttttggtattaaggtgatac

SEQ ID NO: 44320 - DNA, 20 bp, synthetic construct
  misc_feature 1..20: note = chemically synthesized
  source 1..20: mol_type = other DNA
ttaaggtgatactggcttca

SEQ ID NO: 44321 - DNA, 20 bp, synthetic construct
  misc_feature 1..20: note = chemically synthesized
  source 1..20: mol_type = other DNA
actggcttcatagaatgatt

SEQ ID NO: 44322 - DNA, 20 bp, synthetic construct
  misc_feature 1..20: note = chemically synthesized
  source 1..20: mol_type = other DNA
ctggcttcatagaatgattt

SEQ ID NO: 44323 - DNA, 20 bp, synthetic construct
  misc_feature 1..20: note = chemically synthesized
  source 1..20: mol_type = other DNA
tggcttcatagaatgattta

SEQ ID NO: 44324 - DNA, 20 bp, synthetic construct
  misc_feature 1..20: note = chemically synthesized
  source 1..20: mol_type = other DNA
gcttcatagaatgatttagg

SEQ ID NO: 44325 - DNA, 20 bp, synthetic construct
  misc_feature 1..20: note = chemically synthesized
  source 1..20: mol_type = other DNA
cttcatagaatgatttaggg

SEQ ID NO: 44326 - DNA, 20 bp, synthetic construct
  misc_feature 1..20: note = chemically synthesized
  source 1..20: mol_type = other DNA
ttctctctttctctatcttg

SEQ ID NO: 44327 - DNA, 20 bp, synthetic construct
  misc_feature 1..20: note = chemically synthesized
  source 1..20: mol_type = other DNA
atcttgtagaatactgtcaa

SEQ ID NO: 44328 - DNA, 20 bp, synthetic construct
  misc_feature 1..20: note = chemically synthesized
  source 1..20: mol_type = other DNA
tcttgtagaatactgtcaat

SEQ ID NO: 44329 - DNA, 20 bp, synthetic construct
  misc_feature 1..20: note = chemically synthesized
  source 1..20: mol_type = other DNA
tagaatactgtcaataggat

SEQ ID NO: 44330 - DNA, 20 bp, synthetic construct
  misc_feature 1..20: note = chemically synthesized
  source 1..20: mol_type = other DNA
tcaattcttctttgaatgtc

SEQ ID NO: 44331 - DNA, 20 bp, synthetic construct
  misc_feature 1..20: note = chemically synthesized
  source 1..20: mol_type = other DNA
attcttctttgaatgtctgg

SEQ ID NO: 44332 - DNA, 20 bp, synthetic construct
  misc_feature 1..20: note = chemically synthesized
  source 1..20: mol_type = other DNA
tttgaatgtctggtagaatt

SEQ ID NO: 44333 - DNA, 20 bp, synthetic construct
  misc_feature 1..20: note = chemically synthesized
  source 1..20: mol_type = other DNA
aattcagctgtgaatctatc

SEQ ID NO: 44334 - DNA, 20 bp, synthetic construct
  misc_feature 1..20: note = chemically synthesized
  source 1..20: mol_type = other DNA
gctgtgaatctatctggtcc

SEQ ID NO: 44335 - DNA, 20 bp, synthetic construct
  misc_feature 1..20: note = chemically synthesized
  source 1..20: mol_type = other DNA
gtcctggacttttttgttgt

SEQ ID NO: 44336 - DNA, 20 bp, synthetic construct
  misc_feature 1..20: note = chemically synthesized
  source 1..20: mol_type = other DNA
gtaaatttttattatcattt

SEQ ID NO: 44337 - DNA, 20 bp, synthetic construct
  misc_feature 1..20: note = chemically synthesized
  source 1..20: mol_type = other DNA
tcagtcttgctgcttattac

SEQ ID NO: 44338 - DNA, 20 bp, synthetic construct
  misc_feature 1..20: note = chemically synthesized
  source 1..20: mol_type = other DNA
ctgcttattactggtctgtt

SEQ ID NO: 44339 - DNA, 20 bp, synthetic construct
  misc_feature 1..20: note = chemically synthesized
  source 1..20: mol_type = other DNA
tgcttattactggtctgttc

SEQ ID NO: 44340 - DNA, 20 bp, synthetic construct
  misc_feature 1..20: note = chemically synthesized
  source 1..20: mol_type = other DNA
gcttattactggtctgttca

SEQ ID NO: 44341 - DNA, 20 bp, synthetic construct
  misc_feature 1..20: note = chemically synthesized
  source 1..20: mol_type = other DNA
tatctaattcttcctgactt

SEQ ID NO: 44342 - DNA, 20 bp, synthetic construct
  misc_feature 1..20: note = chemically synthesized
  source 1..20: mol_type = other DNA
taattcttcctgacttaagc

SEQ ID NO: 44343 - DNA, 20 bp, synthetic construct
  misc_feature 1..20: note = chemically synthesized
  source 1..20: mol_type = other DNA
attcttcctgacttaagcta

SEQ ID NO: 44344 - DNA, 20 bp, synthetic construct
  misc_feature 1..20: note = chemically synthesized
  source 1..20: mol_type = other DNA
gctagagccctgtatctttc

SEQ ID NO: 44345 - DNA, 20 bp, synthetic construct
  misc_feature 1..20: note = chemically synthesized
  source 1..20: mol_type = other DNA
ctagagccctgtatctttcc

SEQ ID NO: 44346 - DNA, 20 bp, synthetic construct
  misc_feature 1..20: note = chemically synthesized
  source 1..20: mol_type = other DNA
aggaattcgaacgtctcctt

SEQ ID NO: 44347 - DNA, 20 bp, synthetic construct
  misc_feature 1..20: note = chemically synthesized
  source 1..20: mol_type = other DNA
ggaattcgaacgtctccttt

SEQ ID NO: 44348 - DNA, 20 bp, synthetic construct
  misc_feature 1..20: note = chemically synthesized
  source 1..20: mol_type = other DNA
aacgtctcctttaggttttc

SEQ ID NO: 44349 - DNA, 20 bp, synthetic construct
  misc_feature 1..20: note = chemically synthesized
  source 1..20: mol_type = other DNA
ttttctagtttatgcatgta

SEQ ID NO: 44350 - DNA, 20 bp, synthetic construct
  misc_feature 1..20: note = chemically synthesized
  source 1..20: mol_type = other DNA
tttctagtttatgcatgtaa

SEQ ID NO: 44351 - DNA, 20 bp, synthetic construct
  misc_feature 1..20: note = chemically synthesized
  source 1..20: mol_type = other DNA
tatgcatgtaaaggtgttca

SEQ ID NO: 44352 - DNA, 20 bp, synthetic construct
  misc_feature 1..20: note = chemically synthesized
  source 1..20: mol_type = other DNA
gcatgtaaaggtgttcatag

SEQ ID NO: 44353 - DNA, 20 bp, synthetic construct
  misc_feature 1..20: note = chemically synthesized
  source 1..20: mol_type = other DNA
aataatcttttgtatttctg

SEQ ID NO: 44354 - DNA, 20 bp, synthetic construct
  misc_feature 1..20: note = chemically synthesized
  source 1..20: mol_type = other DNA
cttttgtatttctgtggtat

SEQ ID NO: 44355 - DNA, 20 bp, synthetic construct
  misc_feature 1..20: note = chemically synthesized
  source 1..20: mol_type = other DNA
tatttctgtggtatcagtaa

SEQ ID NO: 44356 - DNA, 20 bp, synthetic construct
  misc_feature 1..20: note = chemically synthesized
  source 1..20: mol_type = other DNA
ctcctgttttgtttctaatt

SEQ ID NO: 44357 - DNA, 20 bp, synthetic construct
  misc_feature 1..20: note = chemically synthesized
  source 1..20: mol_type = other DNA
gcacttctctcctcttttct

SEQ ID NO: 44358 - DNA, 20 bp, synthetic construct
  misc_feature 1..20: note = chemically synthesized
  source 1..20: mol_type = other DNA
ttcttggttaatcttgctaa

SEQ ID NO: 44359 - DNA, 20 bp, synthetic construct
  misc_feature 1..20: note = chemically synthesized
  source 1..20: mol_type = other DNA
taatcttgctaatggtctat

SEQ ID NO: 44360 - DNA, 20 bp, synthetic construct
  misc_feature 1..20: note = chemically synthesized
  source 1..20: mol_type = other DNA
cagttttatttatcttttca

SEQ ID NO: 44361 - DNA, 20 bp, synthetic construct
  misc_feature 1..20: note = chemically synthesized
  source 1..20: mol_type = other DNA
tatttatcttttcaaagaac

SEQ ID NO: 44362 - DNA, 20 bp, synthetic construct
  misc_feature 1..20: note = chemically synthesized
  source 1..20: mol_type = other DNA
aaccagctttttatttcatt

SEQ ID NO: 44363 - DNA, 20 bp, synthetic construct
  misc_feature 1..20: note = chemically synthesized
  source 1..20: mol_type = other DNA
ttagcttttgtatttttttg

SEQ ID NO: 44364 - DNA, 20 bp, synthetic construct
  misc_feature 1..20: note = chemically synthesized
  source 1..20: mol_type = other DNA
gcagttgttttaatttcatt

SEQ ID NO: 44365 - DNA, 20 bp, synthetic construct
  misc_feature 1..20: note = chemically synthesized
  source 1..20: mol_type = other DNA
atttagttctcctcttatct

SEQ ID NO: 44366 - DNA, 20 bp, synthetic construct
  misc_feature 1..20: note = chemically synthesized
  source 1..20: mol_type = other DNA
agttattccctttcttttgc

SEQ ID NO: 44367 - DNA, 20 bp, synthetic construct
  misc_feature 1..20: note = chemically synthesized
  source 1..20: mol_type = other DNA
gttattccctttcttttgct

SEQ ID NO: 44368 - DNA, 20 bp, synthetic construct
  misc_feature 1..20: note = chemically synthesized
  source 1..20: mol_type = other DNA
ccctttcttttgctgggttt

SEQ ID NO: 44369 - DNA, 20 bp, synthetic construct
  misc_feature 1..20: note = chemically synthesized
  source 1..20: mol_type = other DNA
tctgtttgtttttgtttctc

SEQ ID NO: 44370 - DNA, 20 bp, synthetic construct
  misc_feature 1..20: note = chemically synthesized
  source 1..20: mol_type = other DNA
tttgtttctctagtttcttg

SEQ ID NO: 44371 - DNA, 20 bp, synthetic construct
  misc_feature 1..20: note = chemically synthesized
  source 1..20: mol_type = other DNA
attgtctgtctgtcctcttt

SEQ ID NO: 44372 - DNA, 20 bp, synthetic construct
  misc_feature 1..20: note = chemically synthesized
  source 1..20: mol_type = other DNA
gactctttgacatcgacatt

SEQ ID NO: 44373 - DNA, 20 bp, synthetic construct
  misc_feature 1..20: note = chemically synthesized
  source 1..20: mol_type = other DNA
actctttgacatcgacattt

SEQ ID NO: 44374 - DNA, 20 bp, synthetic construct
  misc_feature 1..20: note = chemically synthesized
  source 1..20: mol_type = other DNA
ctctttgacatcgacattta

SEQ ID NO: 44375 - DNA, 20 bp, synthetic construct
  misc_feature 1..20: note = chemically synthesized
  source 1..20: mol_type = other DNA
agggctgtgaactttccttt

SEQ ID NO: 44376 - DNA, 20 bp, synthetic construct
  misc_feature 1..20: note = chemically synthesized
  source 1..20: mol_type = other DNA
gcaccatctttgctgtatcc

SEQ ID NO: 44377 - DNA, 20 bp, synthetic construct
  misc_feature 1..20: note = chemically synthesized
  source 1..20: mol_type = other DNA
accatctttgctgtatccta

SEQ ID NO: 44378 - DNA, 20 bp, synthetic construct
  misc_feature 1..20: note = chemically synthesized
  source 1..20: mol_type = other DNA
ccatctttgctgtatcctag

SEQ ID NO: 44379 - DNA, 20 bp, synthetic construct
  misc_feature 1..20: note = chemically synthesized
  source 1..20: mol_type = other DNA
ctgtatcctagaggttttga

SEQ ID NO: 44380 - DNA, 20 bp, synthetic construct
  misc_feature 1..20: note = chemically synthesized
  source 1..20: mol_type = other DNA
tgtatcctagaggttttgat

SEQ ID NO: 44381 - DNA, 20 bp, synthetic construct
  misc_feature 1..20: note = chemically synthesized
  source 1..20: mol_type = other DNA
ataggttgtgtcactattgt

SEQ ID NO: 44382 - DNA, 20 bp, synthetic construct
  misc_feature 1..20: note = chemically synthesized
  source 1..20: mol_type = other DNA
gttgtgtcactattgtcggt

SEQ ID NO: 44383 - DNA, 20 bp, synthetic construct
  misc_feature 1..20: note = chemically synthesized
  source 1..20: mol_type = other DNA
tcactattgtcggtcagttc

SEQ ID NO: 44384 - DNA, 20 bp, synthetic construct
  misc_feature 1..20: note = chemically synthesized
  source 1..20: mol_type = other DNA
tgttgttcttattatacttt

SEQ ID NO: 44385 - DNA, 20 bp, synthetic construct
  misc_feature 1..20: note = chemically synthesized
  source 1..20: mol_type = other DNA
tcttattatactttaagttc

SEQ ID NO: 44386 - DNA, 20 bp, synthetic construct
  misc_feature 1..20: note = chemically synthesized
  source 1..20: mol_type = other DNA
cttattatactttaagttct

SEQ ID NO: 44387 - DNA, 20 bp, synthetic construct
  misc_feature 1..20: note = chemically synthesized
  source 1..20: mol_type = other DNA
taagttctgggatacatgtg

SEQ ID NO: 44388 - DNA, 20 bp, synthetic construct
  misc_feature 1..20: note = chemically synthesized
  source 1..20: mol_type = other DNA
ggatacatgtgcagaatgtg

SEQ ID NO: 44389 - DNA, 20 bp, synthetic construct
  misc_feature 1..20: note = chemically synthesized
  source 1..20: mol_type = other DNA
gatacatgtgcagaatgtgc

SEQ ID NO: 44390 - DNA, 20 bp, synthetic construct
  misc_feature 1..20: note = chemically synthesized
  source 1..20: mol_type = other DNA
gaatgtgcaggtttgttaca

SEQ ID NO: 44391 - DNA, 20 bp, synthetic construct
  misc_feature 1..20: note = chemically synthesized
  source 1..20: mol_type = other DNA
aatgtgcaggtttgttacat

SEQ ID NO: 44392 - DNA, 20 bp, synthetic construct
  misc_feature 1..20: note = chemically synthesized
  source 1..20: mol_type = other DNA
gcaggtttgttacataggta

SEQ ID NO: 44393 - DNA, 20 bp, synthetic construct
  misc_feature 1..20: note = chemically synthesized
  source 1..20: mol_type = other DNA
acataggtatagatgtgcca

SEQ ID NO: 44394 - DNA, 20 bp, synthetic construct
  misc_feature 1..20: note = chemically synthesized
  source 1..20: mol_type = other DNA
taggtatagatgtgccatgg

SEQ ID NO: 44395 - DNA, 20 bp, synthetic construct
  misc_feature 1..20: note = chemically synthesized
  source 1..20: mol_type = other DNA
catcaacctgtcatctacat

SEQ ID NO: 44396 - DNA, 20 bp, synthetic construct
  misc_feature 1..20: note = chemically synthesized
  source 1..20: mol_type = other DNA
atcaacctgtcatctacatt

SEQ ID NO: 44397 - DNA, 20 bp, synthetic construct
  misc_feature 1..20: note = chemically synthesized
  source 1..20: mol_type = other DNA
ctaaccccctcaccccccga

SEQ ID NO: 44398 - DNA, 20 bp, synthetic construct
  misc_feature 1..20: note = chemically synthesized
  source 1..20: mol_type = other DNA
taaccccctcaccccccgac

SEQ ID NO: 44399 - DNA, 20 bp, synthetic construct
  misc_feature 1..20: note = chemically synthesized
  source 1..20: mol_type = other DNA
cctcaccccccgacaggccc

SEQ ID NO: 44400 - DNA, 20 bp, synthetic construct
  misc_feature 1..20: note = chemically synthesized
  source 1..20: mol_type = other DNA
attgttcaactcccacttat

SEQ ID NO: 44401 - DNA, 20 bp, synthetic construct
  misc_feature 1..20: note = chemically synthesized
  source 1..20: mol_type = other DNA
ttcaactcccacttatgagt

SEQ ID NO: 44402 - DNA, 20 bp, synthetic construct
  misc_feature 1..20: note = chemically synthesized
  source 1..20: mol_type = other DNA
cacttatgagtgagaacgtg

SEQ ID NO: 44403 - DNA, 20 bp, synthetic construct
  misc_feature 1..20: note = chemically synthesized
  source 1..20: mol_type = other DNA
gagtgagaacgtgtggtgtt

SEQ ID NO: 44404 - DNA, 20 bp, synthetic construct
  misc_feature 1..20: note = chemically synthesized
  source 1..20: mol_type = other DNA
tggtttctctgttcctgtgt

SEQ ID NO: 44405 - DNA, 20 bp, synthetic construct
  misc_feature 1..20: note = chemically synthesized
  source 1..20: mol_type = other DNA
tgttcctgtgttagtttgct

SEQ ID NO: 44406 - DNA, 20 bp, synthetic construct
  misc_feature 1..20: note = chemically synthesized
  source 1..20: mol_type = other DNA
tgttagtttgctcagaatga

SEQ ID NO: 44407 - DNA, 20 bp, synthetic construct
  misc_feature 1..20: note = chemically synthesized
  source 1..20: mol_type = other DNA
ccttcatccatgtccctgca

SEQ ID NO: 44408 - DNA, 20 bp, synthetic construct
  misc_feature 1..20: note = chemically synthesized
  source 1..20: mol_type = other DNA
acatgaactcatcattttta

SEQ ID NO: 44409 - DNA, 20 bp, synthetic construct
  misc_feature 1..20: note = chemically synthesized
  source 1..20: mol_type = other DNA
tcatcatttttatggctgca

SEQ ID NO: 44410 - DNA, 20 bp, synthetic construct
  misc_feature 1..20: note = chemically synthesized
  source 1..20: mol_type = other DNA
tatggctgcatagtattcca

SEQ ID NO: 44411 - DNA, 20 bp, synthetic construct
  misc_feature 1..20: note = chemically synthesized
  source 1..20: mol_type = other DNA
tttatccattatatcgctga

SEQ ID NO: 44412 - DNA, 20 bp, synthetic construct
  misc_feature 1..20: note = chemically synthesized
  source 1..20: mol_type = other DNA
ttatatcgctgatggccatt

SEQ ID NO: 44413 - DNA, 20 bp, synthetic construct
  misc_feature 1..20: note = chemically synthesized
  source 1..20: mol_type = other DNA
tatatcgctgatggccattt

SEQ ID NO: 44414 - DNA, 20 bp, synthetic construct
  misc_feature 1..20: note = chemically synthesized
  source 1..20: mol_type = other DNA
tcgctgatggccatttgggt

SEQ ID NO: 44415 - DNA, 20 bp, synthetic construct
  misc_feature 1..20: note = chemically synthesized
  source 1..20: mol_type = other DNA
tggccatttgggttggttcc

SEQ ID NO: 44416 - DNA, 20 bp, synthetic construct
  misc_feature 1..20: note = chemically synthesized
  source 1..20: mol_type = other DNA
caagtctttgctattgtgaa

SEQ ID NO: 44417 - DNA, 20 bp, synthetic construct
  misc_feature 1..20: note = chemically synthesized
  source 1..20: mol_type = other DNA
tacgtgtgcacgtgtcttta

SEQ ID NO: 44418 - DNA, 20 bp, synthetic construct
  misc_feature 1..20: note = chemically synthesized
  source 1..20: mol_type = other DNA
gtgtgcacgtgtctttatag

SEQ ID NO: 44419 - DNA, 20 bp, synthetic construct
  misc_feature 1..20: note = chemically synthesized
  source 1..20: mol_type = other DNA
tagaatgatttctaattctt

SEQ ID NO: 44420 - DNA, 20 bp, synthetic construct
  misc_feature 1..20: note = chemically synthesized
  source 1..20: mol_type = other DNA
agaatgatttctaattcttt

SEQ ID NO: 44421 - DNA, 20 bp, synthetic construct
  misc_feature 1..20: note = chemically synthesized
  source 1..20: mol_type = other DNA
taattctttgggtatatacc

SEQ ID NO: 44422 - DNA, 20 bp, synthetic construct
  misc_feature 1..20: note = chemically synthesized
  source 1..20: mol_type = other DNA
tttgggtatatacccagtaa

SEQ ID NO: 44423 - DNA, 20 bp, synthetic construct
  misc_feature 1..20: note = chemically synthesized
  source 1..20: mol_type = other DNA
ttgggtatatacccagtaat

SEQ ID NO: 44424 - DNA, 20 bp, synthetic construct
  misc_feature 1..20: note = chemically synthesized
  source 1..20: mol_type = other DNA
atacccagtaatgggattgc

SEQ ID NO: 44425 - DNA, 20 bp, synthetic construct
  misc_feature 1..20: note = chemically synthesized
  source 1..20: mol_type = other DNA
tacccagtaatgggattgct

SEQ ID NO: 44426 - DNA, 20 bp, synthetic construct
  misc_feature 1..20: note = chemically synthesized
  source 1..20: mol_type = other DNA
aatgggattgctgggtcaaa

SEQ ID NO: 44427 - DNA, 20 bp, synthetic construct
  misc_feature 1..20: note = chemically synthesized
  source 1..20: mol_type = other DNA
gctgggtcaaacagtatttc

SEQ ID NO: 44428 - DNA, 20 bp, synthetic construct
  misc_feature 1..20: note = chemically synthesized
  source 1..20: mol_type = other DNA
tcaaacagtatttctggttc

SEQ ID NO: 44429 - DNA, 20 bp, synthetic construct
  misc_feature 1..20: note = chemically synthesized
  source 1..20: mol_type = other DNA
atttctggttctagatcctt

SEQ ID NO: 44430 - DNA, 20 bp, synthetic construct
  misc_feature 1..20: note = chemically synthesized
  source 1..20: mol_type = other DNA
tttctggttctagatccttg

SEQ ID NO: 44431 - DNA, 20 bp, synthetic construct
  misc_feature 1..20: note = chemically synthesized
  source 1..20: mol_type = other DNA
cgccacactgtcttccacaa

SEQ ID NO: 44432 - DNA, 20 bp, synthetic construct
  misc_feature 1..20: note = chemically synthesized
  source 1..20: mol_type = other DNA
ctaatttacacacccatcaa

SEQ ID NO: 44433 - DNA, 20 bp, synthetic construct
  misc_feature 1..20: note = chemically synthesized
  source 1..20: mol_type = other DNA
ctattcttccacatcctctc

SEQ ID NO: 44434 - DNA, 20 bp, synthetic construct
  misc_feature 1..20: note = chemically synthesized
  source 1..20: mol_type = other DNA
ttaataattgccattctaac

SEQ ID NO: 44435 - DNA, 20 bp, synthetic construct
  misc_feature 1..20: note = chemically synthesized
  source 1..20: mol_type = other DNA
attgccattctaactggcat

SEQ ID NO: 44436 - DNA, 20 bp, synthetic construct
  misc_feature 1..20: note = chemically synthesized
  source 1..20: mol_type = other DNA
ccattctaactggcatgaga

SEQ ID NO: 44437 - DNA, 20 bp, synthetic construct
  misc_feature 1..20: note = chemically synthesized
  source 1..20: mol_type = other DNA
catgagatggtatctcattg

SEQ ID NO: 44438 - DNA, 20 bp, synthetic construct
  misc_feature 1..20: note = chemically synthesized
  source 1..20: mol_type = other DNA
atttgcatttctctaatgac

SEQ ID NO: 44439 - DNA, 20 bp, synthetic construct
  misc_feature 1..20: note = chemically synthesized
  source 1..20: mol_type = other DNA
ctctaatgaccagtgatgat

SEQ ID NO: 44440 - DNA, 20 bp, synthetic construct
  misc_feature 1..20: note = chemically synthesized
  source 1..20: mol_type = other DNA
gcttcttttcatgtgtttct

SEQ ID NO: 44441 - DNA, 20 bp, synthetic construct
  misc_feature 1..20: note = chemically synthesized
  source 1..20: mol_type = other DNA
ggccacataaatgacttctt

SEQ ID NO: 44442 - DNA, 20 bp, synthetic construct
  misc_feature 1..20: note = chemically synthesized
  source 1..20: mol_type = other DNA
ccacataaatgacttcttta

SEQ ID NO: 44443 - DNA, 20 bp, synthetic construct
  misc_feature 1..20: note = chemically synthesized
  source 1..20: mol_type = other DNA
cataaatgacttctttagag

SEQ ID NO: 44444 - DNA, 20 bp, synthetic construct
  misc_feature 1..20: note = chemically synthesized
  source 1..20: mol_type = other DNA
atcctttgtccactttttga

SEQ ID NO: 44445 - DNA, 20 bp, synthetic construct
  misc_feature 1..20: note = chemically synthesized
  source 1..20: mol_type = other DNA
tcctttgtccactttttgat

SEQ ID NO: 44446 - DNA, 20 bp, synthetic construct
  misc_feature 1..20: note = chemically synthesized
  source 1..20: mol_type = other DNA
cctttgtccactttttgatg

SEQ ID NO: 44447 - DNA, 20 bp, synthetic construct
  misc_feature 1..20: note = chemically synthesized
  source 1..20: mol_type = other DNA
ccactttttgatggggtcgt

SEQ ID NO: 44448 - DNA, 20 bp, synthetic construct
  misc_feature 1..20: note = chemically synthesized
  source 1..20: mol_type = other DNA
cactttttgatggggtcgtt

SEQ ID NO: 44449 - DNA, 20 bp, synthetic construct
  misc_feature 1..20: note = chemically synthesized
  source 1..20: mol_type = other DNA
tttttcttgtaaatttgttg

SEQ ID NO: 44450 - DNA, 20 bp, synthetic construct
  misc_feature 1..20: note = chemically synthesized
  source 1..20: mol_type = other DNA
aaatttgttgaagttctttg

SEQ ID NO: 44451 - DNA, 20 bp, synthetic construct
  misc_feature 1..20: note = chemically synthesized
  source 1..20: mol_type = other DNA
ttgaagttctttgtagattt

SEQ ID NO: 44452 - DNA, 20 bp, synthetic construct
  misc_feature 1..20: note = chemically synthesized
  source 1..20: mol_type = other DNA
tctttgtagattttggatgt

SEQ ID NO: 44453 - DNA, 20 bp, synthetic construct
  misc_feature 1..20: note = chemically synthesized
  source 1..20: mol_type = other DNA
tttggatgttagccctttgt

SEQ ID NO: 44454 - DNA, 20 bp, synthetic construct
  misc_feature 1..20: note = chemically synthesized
  source 1..20: mol_type = other DNA
gatgttagccctttgtcaga

SEQ ID NO: 44455 - DNA, 20 bp, synthetic construct
  misc_feature 1..20: note = chemically synthesized
  source 1..20: mol_type = other DNA
ttagccctttgtcagatgga

SEQ ID NO: 44456 - DNA, 20 bp, synthetic construct
  misc_feature 1..20: note = chemically synthesized
  source 1..20: mol_type = other DNA
aaaaattttctcccattctg

SEQ ID NO: 44457 - DNA, 20 bp, synthetic construct
  misc_feature 1..20: note = chemically synthesized
  source 1..20: mol_type = other DNA
aaaattttctcccattctgt

SEQ ID NO: 44458 - DNA, 20 bp, synthetic construct
  misc_feature 1..20: note = chemically synthesized
  source 1..20: mol_type = other DNA
ttgcctgttcactctgatga

SEQ ID NO: 44459 - DNA, 20 bp, synthetic construct
  misc_feature 1..20: note = chemically synthesized
  source 1..20: mol_type = other DNA
gatgatagtcttttgctgtg

SEQ ID NO: 44460 - DNA, 20 bp, synthetic construct
  misc_feature 1..20: note = chemically synthesized
  source 1..20: mol_type = other DNA
gatagtcttttgctgtgcag

SEQ ID NO: 44461 - DNA, 20 bp, synthetic construct
  misc_feature 1..20: note = chemically synthesized
  source 1..20: mol_type = other DNA
tttgctgtgcagaagctctt

SEQ ID NO: 44462 - DNA, 20 bp, synthetic construct
  misc_feature 1..20: note = chemically synthesized
  source 1..20: mol_type = other DNA
cagaagctctttagtttaat

SEQ ID NO: 44463 - DNA, 20 bp, synthetic construct
  misc_feature 1..20: note = chemically synthesized
  source 1..20: mol_type = other DNA
tagatcccatatgtcaattt

SEQ ID NO: 44464 - DNA, 20 bp, synthetic construct
  misc_feature 1..20: note = chemically synthesized
  source 1..20: mol_type = other DNA
tgtcattgcttttgatgttt

SEQ ID NO: 44465 - DNA, 20 bp, synthetic construct
  misc_feature 1..20: note = chemically synthesized
  source 1..20: mol_type = other DNA
gcccatgcctatgtcctgaa

SEQ ID NO: 44466 - DNA, 20 bp, synthetic construct
  misc_feature 1..20: note = chemically synthesized
  source 1..20: mol_type = other DNA
atgtcctgaatggtattgcc

SEQ ID NO: 44467 - DNA, 20 bp, synthetic construct
  misc_feature 1..20: note = chemically synthesized
  source 1..20: mol_type = other DNA
tgtcctgaatggtattgcct

SEQ ID NO: 44468 - DNA, 20 bp, synthetic construct
  misc_feature 1..20: note = chemically synthesized
  source 1..20: mol_type = other DNA
gtattgcctaggttatcttc

SEQ ID NO: 44469 - DNA, 20 bp, synthetic construct
  misc_feature 1..20: note = chemically synthesized
  source 1..20: mol_type = other DNA
tattgcctaggttatcttct

SEQ ID NO: 44470 - DNA, 20 bp, synthetic construct
  misc_feature 1..20: note = chemically synthesized
  source 1..20: mol_type = other DNA
gttatcttctaggattttta

SEQ ID NO: 44471 - DNA, 20 bp, synthetic construct
  misc_feature 1..20: note = chemically synthesized
  source 1..20: mol_type = other DNA
ttctaggatttttatggttt

SEQ ID NO: 44472 - DNA, 20 bp, synthetic construct
  misc_feature 1..20: note = chemically synthesized
  source 1..20: mol_type = other DNA
tctaggatttttatggtttt

SEQ ID NO: 44473 - DNA, 20 bp, synthetic construct
  misc_feature 1..20: note = chemically synthesized
  source 1..20: mol_type = other DNA
tggttttaggttgcacattt

SEQ ID NO: 44474 - DNA, 20 bp, synthetic construct
  misc_feature 1..20: note = chemically synthesized
  source 1..20: mol_type = other DNA
ttaagtctttaatccacctt

SEQ ID NO: 44475 - DNA, 20 bp, synthetic construct
  misc_feature 1..20: note = chemically synthesized
  source 1..20: mol_type = other DNA
ccttgagttaatttttgtat

SEQ ID NO: 44476 - DNA, 20 bp, synthetic construct
  misc_feature 1..20: note = chemically synthesized
  source 1..20: mol_type = other DNA
cttgagttaatttttgtata

SEQ ID NO: 44477 - DNA, 20 bp, synthetic construct
  misc_feature 1..20: note = chemically synthesized
  source 1..20: mol_type = other DNA
ttaatttttgtataaggtgt

SEQ ID NO: 44478 - DNA, 20 bp, synthetic construct
  misc_feature 1..20: note = chemically synthesized
  source 1..20: mol_type = other DNA
taatttttgtataaggtgta

SEQ ID NO: 44479 - DNA, 20 bp, synthetic construct
  misc_feature 1..20: note = chemically synthesized
  source 1..20: mol_type = other DNA
tttttgtataaggtgtaagg

SEQ ID NO: 44480 - DNA, 20 bp, synthetic construct
  misc_feature 1..20: note = chemically synthesized
  source 1..20: mol_type = other DNA
ttttgtataaggtgtaagga

SEQ ID NO: 44481 - DNA, 20 bp, synthetic construct
  misc_feature 1..20: note = chemically synthesized
  source 1..20: mol_type = other DNA
tttgtataaggtgtaaggaa

SEQ ID NO: 44482 - DNA, 20 bp, synthetic construct
  misc_feature 1..20: note = chemically synthesized
  source 1..20: mol_type = other DNA
ttgtataaggtgtaaggaag

SEQ ID NO: 44483 - DNA, 20 bp, synthetic construct
  misc_feature 1..20: note = chemically synthesized
  source 1..20: mol_type = other DNA
taaggtgtaaggaaggggta

SEQ ID NO: 44484 - DNA, 20 bp, synthetic construct
  misc_feature 1..20: note = chemically synthesized
  source 1..20: mol_type = other DNA
gtaaggaaggggtacagttt

SEQ ID NO: 44485 - DNA, 20 bp, synthetic construct
  misc_feature 1..20: note = chemically synthesized
  source 1..20: mol_type = other DNA
ttcagttttatgcatattgc

SEQ ID NO: 44486 - DNA, 20 bp, synthetic construct
  misc_feature 1..20: note = chemically synthesized
  source 1..20: mol_type = other DNA
gttttatgcatattgctagc

SEQ ID NO: 44487 - DNA, 20 bp, synthetic construct
  misc_feature 1..20: note = chemically synthesized
  source 1..20: mol_type = other DNA
atattgctagccagtttttc

SEQ ID NO: 44488 - DNA, 20 bp, synthetic construct
  misc_feature 1..20: note = chemically synthesized
  source 1..20: mol_type = other DNA
ttccagcaccatttattaaa

SEQ ID NO: 44489 - DNA, 20 bp, synthetic construct
  misc_feature 1..20: note = chemically synthesized
  source 1..20: mol_type = other DNA
tccagcaccatttattaaat

SEQ ID NO: 44490 - DNA, 20 bp, synthetic construct
  misc_feature 1..20: note = chemically synthesized
  source 1..20: mol_type = other DNA
ccagcaccatttattaaata

SEQ ID NO: 44491 - DNA, 20 bp, synthetic construct
  misc_feature 1..20: note = chemically synthesized
  source 1..20: mol_type = other DNA
tgcttttgtgatgtttgtca

SEQ ID NO: 44492 - DNA, 20 bp, synthetic construct
  misc_feature 1..20: note = chemically synthesized
  source 1..20: mol_type = other DNA
ttgtgatgtttgtcaaagat

SEQ ID NO: 44493 - DNA, 20 bp, synthetic construct
  misc_feature 1..20: note = chemically synthesized
  source 1..20: mol_type = other DNA
gatgtttgtcaaagatcaga

SEQ ID NO: 44494 - DNA, 20 bp, synthetic construct
  misc_feature 1..20: note = chemically synthesized
  source 1..20: mol_type = other DNA
tgtcaaagatcagatggtcg

SEQ ID NO: 44495 - DNA, 20 bp, synthetic construct
  misc_feature 1..20: note = chemically synthesized
  source 1..20: mol_type = other DNA
atcagatggtcgtagatgtg

SEQ ID NO: 44496 - DNA, 20 bp, synthetic construct
  misc_feature 1..20: note = chemically synthesized
  source 1..20: mol_type = other DNA
agatgtgtggcattatttct

SEQ ID NO: 44497 - DNA, 20 bp, synthetic construct
  misc_feature 1..20: note = chemically synthesized
  source 1..20: mol_type = other DNA
gatgtgtggcattatttctg

SEQ ID NO: 44498 - DNA, 20 bp, synthetic construct
  misc_feature 1..20: note = chemically synthesized
  source 1..20: mol_type = other DNA
aggcttctgttctgttccac

SEQ ID NO: 44499 - DNA, 20 bp, synthetic construct
  misc_feature 1..20: note = chemically synthesized
  source 1..20: mol_type = other DNA
actggtctatatatctgttt

SEQ ID NO: 44500 - DNA, 20 bp, synthetic construct
  misc_feature 1..20: note = chemically synthesized
  source 1..20: mol_type = other DNA
ctatatatctgttttggtac

SEQ ID NO: 44501 - DNA, 20 bp, synthetic construct
  misc_feature 1..20: note = chemically synthesized
  source 1..20: mol_type = other DNA
ccatgctgtttttgttactg

SEQ ID NO: 44502 - DNA, 20 bp, synthetic construct
  misc_feature 1..20: note = chemically synthesized
  source 1..20: mol_type = other DNA
tttttgttactgtagccttg

SEQ ID NO: 44503 - DNA, 20 bp, synthetic construct
  misc_feature 1..20: note = chemically synthesized
  source 1..20: mol_type = other DNA
gttactgtagccttgtagta

SEQ ID NO: 44504 - DNA, 20 bp, synthetic construct
  misc_feature 1..20: note = chemically synthesized
  source 1..20: mol_type = other DNA
tagccttgtagtatagtttg

SEQ ID NO: 44505 - DNA, 20 bp, synthetic construct
  misc_feature 1..20: note = chemically synthesized
  source 1..20: mol_type = other DNA
cttgtagtatagtttgaagt

SEQ ID NO: 44506 - DNA, 20 bp, synthetic construct
  misc_feature 1..20: note = chemically synthesized
  source 1..20: mol_type = other DNA
ttgtagtatagtttgaagtc

SEQ ID NO: 44507 - DNA, 20 bp, synthetic construct
  misc_feature 1..20: note = chemically synthesized
  source 1..20: mol_type = other DNA
tagtatagtttgaagtcagg

SEQ ID NO: 44508 - DNA, 20 bp, synthetic construct
  misc_feature 1..20: note = chemically synthesized
  source 1..20: mol_type = other DNA
gtcaggtagcatcatgcctc

SEQ ID NO: 44509 - DNA, 20 bp, synthetic construct
  misc_feature 1..20: note = chemically synthesized
  source 1..20: mol_type = other DNA
ccagctttgttctttttgtt

SEQ ID NO: 44510 - DNA, 20 bp, synthetic construct
  misc_feature 1..20: note = chemically synthesized
  source 1..20: mol_type = other DNA
cagctttgttctttttgttt

SEQ ID NO: 44511 - DNA, 20 bp, synthetic construct
  misc_feature 1..20: note = chemically synthesized
  source 1..20: mol_type = other DNA
ctttttgtttaggattgtct

SEQ ID NO: 44512 - DNA, 20 bp, synthetic construct
  misc_feature 1..20: note = chemically synthesized
  source 1..20: mol_type = other DNA
ttaggattgtcttggctata

SEQ ID NO: 44513 - DNA, 20 bp, synthetic construct
  misc_feature 1..20: note = chemically synthesized
  source 1..20: mol_type = other DNA
taggattgtcttggctatat

SEQ ID NO: 44514 - DNA, 20 bp, synthetic construct
  misc_feature 1..20: note = chemically synthesized
  source 1..20: mol_type = other DNA
ttgattccatatgacattta

SEQ ID NO: 44515 - DNA, 20 bp, synthetic construct
  misc_feature 1..20: note = chemically synthesized
  source 1..20: mol_type = other DNA
attccatatgacatttaaag

SEQ ID NO: 44516 - DNA, 20 bp, synthetic construct
  misc_feature 1..20: note = chemically synthesized
  source 1..20: mol_type = other DNA
tttttctaattctttgaaaa

SEQ ID NO: 44517 - DNA, 20 bp, synthetic construct
  misc_feature 1..20: note = chemically synthesized
  source 1..20: mol_type = other DNA
tctaattctttgaaaaaagt

SEQ ID NO: 44518 - DNA, 20 bp, synthetic construct
  misc_feature 1..20: note = chemically synthesized
  source 1..20: mol_type = other DNA
aattctttgaaaaaagtcag

SEQ ID NO: 44519 - DNA, 20 bp, synthetic construct
  misc_feature 1..20: note = chemically synthesized
  source 1..20: mol_type = other DNA
tctttgaaaaaagtcagtgg

SEQ ID NO: 44520 - DNA, 20 bp, synthetic construct
  misc_feature 1..20: note = chemically synthesized
  source 1..20: mol_type = other DNA
aaaagtcagtggtagcttga

SEQ ID NO: 44521 - DNA, 20 bp, synthetic construct
  misc_feature 1..20: note = chemically synthesized
  source 1..20: mol_type = other DNA
aaagtcagtggtagcttgat

SEQ ID NO: 44522 - DNA, 20 bp, synthetic construct
  misc_feature 1..20: note = chemically synthesized
  source 1..20: mol_type = other DNA
aagtcagtggtagcttgatg

SEQ ID NO: 44523 - DNA, 20 bp, synthetic construct
  misc_feature 1..20: note = chemically synthesized
  source 1..20: mol_type = other DNA
cagtggtagcttgatgggga

SEQ ID NO: 44524 - DNA, 20 bp, synthetic construct
  misc_feature 1..20: note = chemically synthesized
  source 1..20: mol_type = other DNA
attgaatctataaattactt

SEQ ID NO: 44525 - DNA, 20 bp, synthetic construct
  misc_feature 1..20: note = chemically synthesized
  source 1..20: mol_type = other DNA
ttgaatctataaattacttt

SEQ ID NO: 44526 - DNA, 20 bp, synthetic construct
  misc_feature 1..20: note = chemically synthesized
  source 1..20: mol_type = other DNA
aatctataaattactttggg

SEQ ID NO: 44527 - DNA, 20 bp, synthetic construct
  misc_feature 1..20: note = chemically synthesized
  source 1..20: mol_type = other DNA
ataaattactttgggcagta

SEQ ID NO: 44528 - DNA, 20 bp, synthetic construct
  misc_feature 1..20: note = chemically synthesized
  source 1..20: mol_type = other DNA
tgggcagtatggccatttta

SEQ ID NO: 44529 - DNA, 20 bp, synthetic construct
  misc_feature 1..20: note = chemically synthesized
  source 1..20: mol_type = other DNA
tattgattctttctatctat

SEQ ID NO: 44530 - DNA, 20 bp, synthetic construct
  misc_feature 1..20: note = chemically synthesized
  source 1..20: mol_type = other DNA
attctttctatctatgagca

SEQ ID NO: 44531 - DNA, 20 bp, synthetic construct
  misc_feature 1..20: note = chemically synthesized
  source 1..20: mol_type = other DNA
gtgtcctctcttatttcctt

SEQ ID NO: 44532 - DNA, 20 bp, synthetic construct
  misc_feature 1..20: note = chemically synthesized
  source 1..20: mol_type = other DNA
tcctctcttatttccttgag

SEQ ID NO: 44533 - DNA, 20 bp, synthetic construct
  misc_feature 1..20: note = chemically synthesized
  source 1..20: mol_type = other DNA
ctcttatttccttgagcagt

SEQ ID NO: 44534 - DNA, 20 bp, synthetic construct
  misc_feature 1..20: note = chemically synthesized
  source 1..20: mol_type = other DNA
ttatttccttgagcagtgag

SEQ ID NO: 44535 - DNA, 20 bp, synthetic construct
  misc_feature 1..20: note = chemically synthesized
  source 1..20: mol_type = other DNA
cttgagcagtgagtggtttg

SEQ ID NO: 44536 - DNA, 20 bp, synthetic construct
  misc_feature 1..20: note = chemically synthesized
  source 1..20: mol_type = other DNA
gtggtttgtagctctccttg

SEQ ID NO: 44537 - DNA, 20 bp, synthetic construct
  misc_feature 1..20: note = chemically synthesized
  source 1..20: mol_type = other DNA
ggtttgtagctctccttgaa

SEQ ID NO: 44538 - DNA, 20 bp, synthetic construct
  misc_feature 1..20: note = chemically synthesized
  source 1..20: mol_type = other DNA
gtttgtagctctccttgaag

SEQ ID NO: 44539 - DNA, 20 bp, synthetic construct
  misc_feature 1..20: note = chemically synthesized
  source 1..20: mol_type = other DNA
aagaggttcttcacatccct

SEQ ID NO: 44540 - DNA, 20 bp, synthetic construct
  misc_feature 1..20: note = chemically synthesized
  source 1..20: mol_type = other DNA
aggttcttcacatcccttag

SEQ ID NO: 44541 - DNA, 20 bp, synthetic construct
  misc_feature 1..20: note = chemically synthesized
  source 1..20: mol_type = other DNA
tcccttagaagttgtatttc

SEQ ID NO: 44542 - DNA, 20 bp, synthetic construct
  misc_feature 1..20: note = chemically synthesized
  source 1..20: mol_type = other DNA
cccttagaagttgtatttct

SEQ ID NO: 44543 - DNA, 20 bp, synthetic construct
  misc_feature 1..20: note = chemically synthesized
  source 1..20: mol_type = other DNA
attttattttattctctttg

SEQ ID NO: 44544 - DNA, 20 bp, synthetic construct
  misc_feature 1..20: note = chemically synthesized
  source 1..20: mol_type = other DNA
ctctttgcagcaattgtgaa

SEQ ID NO: 44545 - DNA, 20 bp, synthetic construct
  misc_feature 1..20: note = chemically synthesized
  source 1..20: mol_type = other DNA
tctttgcagcaattgtgaat

SEQ ID NO: 44546 - DNA, 20 bp, synthetic construct
  misc_feature 1..20: note = chemically synthesized
  source 1..20: mol_type = other DNA
tttgcagcaattgtgaatgg

SEQ ID NO: 44547 - DNA, 20 bp, synthetic construct
  misc_feature 1..20: note = chemically synthesized
  source 1..20: mol_type = other DNA
atgggagttcacccatgatt

SEQ ID NO: 44548 - DNA, 20 bp, synthetic construct
  misc_feature 1..20: note = chemically synthesized
  source 1..20: mol_type = other DNA
gctctctgcttgtctattat

SEQ ID NO: 44549 - DNA, 20 bp, synthetic construct
  misc_feature 1..20: note = chemically synthesized
  source 1..20: mol_type = other DNA
gcttgtctattattggtgta

SEQ ID NO: 44550 - DNA, 20 bp, synthetic construct
  misc_feature 1..20: note = chemically synthesized
  source 1..20: mol_type = other DNA
cttgtctattattggtgtat

SEQ ID NO: 44551 - DNA, 20 bp, synthetic construct
  misc_feature 1..20: note = chemically synthesized
  source 1..20: mol_type = other DNA
gcacactgattttgtatctt

SEQ ID NO: 44552 - DNA, 20 bp, synthetic construct
  misc_feature 1..20: note = chemically synthesized
  source 1..20: mol_type = other DNA
tgtatcttgagactttgctg

SEQ ID NO: 44553 - DNA, 20 bp, synthetic construct
  misc_feature 1..20: note = chemically synthesized
  source 1..20: mol_type = other DNA
actttgctgaagctgtttat

SEQ ID NO: 44554 - DNA, 20 bp, synthetic construct
  misc_feature 1..20: note = chemically synthesized
  source 1..20: mol_type = other DNA
ctgaagctgtttatcagctt

SEQ ID NO: 44555 - DNA, 20 bp, synthetic construct
  misc_feature 1..20: note = chemically synthesized
  source 1..20: mol_type = other DNA
tgtttatcagcttaagattt

SEQ ID NO: 44556 - DNA, 20 bp, synthetic construct
  misc_feature 1..20: note = chemically synthesized
  source 1..20: mol_type = other DNA
gtttatcagcttaagatttt

SEQ ID NO: 44557 - DNA, 20 bp, synthetic construct
  misc_feature 1..20: note = chemically synthesized
  source 1..20: mol_type = other DNA
tcagcttaagattttgggct

SEQ ID NO: 44558 - DNA, 20 bp, synthetic construct
  misc_feature 1..20: note = chemically synthesized
  source 1..20: mol_type = other DNA
aagattttgggctgagatga

SEQ ID NO: 44559 - DNA, 20 bp, synthetic construct
  misc_feature 1..20: note = chemically synthesized
  source 1..20: mol_type = other DNA
agattttgggctgagatgac

SEQ ID NO: 44560 - DNA, 20 bp, synthetic construct
  misc_feature 1..20: note = chemically synthesized
  source 1..20: mol_type = other DNA
gattttgggctgagatgaca

SEQ ID NO: 44561 - DNA, 20 bp, synthetic construct
  misc_feature 1..20: note = chemically synthesized
  source 1..20: mol_type = other DNA
acaatcatgtcatctgcaaa

SEQ ID NO: 44562 - DNA, 20 bp, synthetic construct
  misc_feature 1..20: note = chemically synthesized
  source 1..20: mol_type = other DNA
aatcatgtcatctgcaaaca

SEQ ID NO: 44563 - DNA, 20 bp, synthetic construct
  misc_feature 1..20: note = chemically synthesized
  source 1..20: mol_type = other DNA
tttctcttgcctgattgtcc

SEQ ID NO: 44564 - DNA, 20 bp, synthetic construct
  misc_feature 1..20: note = chemically synthesized
  source 1..20: mol_type = other DNA
tcttgcctgattgtcctggc

SEQ ID NO: 44565 - DNA, 20 bp, synthetic construct
  misc_feature 1..20: note = chemically synthesized
  source 1..20: mol_type = other DNA
agaacttccaatactatgtt

SEQ ID NO: 44566 - DNA, 20 bp, synthetic construct
  misc_feature 1..20: note = chemically synthesized
  source 1..20: mol_type = other DNA
cttccaatactatgttgagt

SEQ ID NO: 44567 - DNA, 20 bp, synthetic construct
  misc_feature 1..20: note = chemically synthesized
  source 1..20: mol_type = other DNA
tccaatactatgttgagtaa

SEQ ID NO: 44568 - DNA, 20 bp, synthetic construct
  misc_feature 1..20: note = chemically synthesized
  source 1..20: mol_type = other DNA
aatactatgttgagtaagag

SEQ ID NO: 44569 - DNA, 20 bp, synthetic construct
  misc_feature 1..20: note = chemically synthesized
  source 1..20: mol_type = other DNA
ctatgttgagtaagagtggc

SEQ ID NO: 44570 - DNA, 20 bp, synthetic construct
  misc_feature 1..20: note = chemically synthesized
  source 1..20: mol_type = other DNA
atgttgagtaagagtggcga

SEQ ID NO: 44571 - DNA, 20 bp, synthetic construct
  misc_feature 1..20: note = chemically synthesized
  source 1..20: mol_type = other DNA
tgttgagtaagagtggcgag

SEQ ID NO: 44572 - DNA, 20 bp, synthetic construct
  misc_feature 1..20: note = chemically synthesized
  source 1..20: mol_type = other DNA
gttgagtaagagtggcgaga

SEQ ID NO: 44573 - DNA, 20 bp, synthetic construct
  misc_feature 1..20: note = chemically synthesized
  source 1..20: mol_type = other DNA
agggcatccttgtcttgtgc

SEQ ID NO: 44574 - DNA, 20 bp, synthetic construct
  misc_feature 1..20: note = chemically synthesized
  source 1..20: mol_type = other DNA
ttgtcttgtgccggttttca

SEQ ID NO: 44575 - DNA, 20 bp, synthetic construct
  misc_feature 1..20: note = chemically synthesized
  source 1..20: mol_type = other DNA
ttgttgacccaatgatcatt

SEQ ID NO: 44576 - DNA, 20 bp, synthetic construct
  misc_feature 1..20: note = chemically synthesized
  source 1..20: mol_type = other DNA
tgttgacccaatgatcattc

SEQ ID NO: 44577 - DNA, 20 bp, synthetic construct
  misc_feature 1..20: note = chemically synthesized
  source 1..20: mol_type = other DNA
ttgacccaatgatcattcag

SEQ ID NO: 44578 - DNA, 20 bp, synthetic construct
  misc_feature 1..20: note = chemically synthesized
  source 1..20: mol_type = other DNA
acccaatgatcattcaggag

SEQ ID NO: 44579 - DNA, 20 bp, synthetic construct
  misc_feature 1..20: note = chemically synthesized
  source 1..20: mol_type = other DNA
cccaatgatcattcaggagc

SEQ ID NO: 44580 - DNA, 20 bp, synthetic construct
  misc_feature 1..20: note = chemically synthesized
  source 1..20: mol_type = other DNA
ttaatttccctgtatttgca

SEQ ID NO: 44581 - DNA, 20 bp, synthetic construct
  misc_feature 1..20: note = chemically synthesized
  source 1..20: mol_type = other DNA
cctgtatttgcatggttttg

SEQ ID NO: 44582 - DNA, 20 bp, synthetic construct
  misc_feature 1..20: note = chemically synthesized
  source 1..20: mol_type = other DNA
ctgtatttgcatggttttga

SEQ ID NO: 44583 - DNA, 20 bp, synthetic construct
  misc_feature 1..20: note = chemically synthesized
  source 1..20: mol_type = other DNA
ggttttgaaggttccttttg

SEQ ID NO: 44584 - DNA, 20 bp, synthetic construct
  misc_feature 1..20: note = chemically synthesized
  source 1..20: mol_type = other DNA
tttccaattttattctactg

SEQ ID NO: 44585 - DNA, 20 bp, synthetic construct
  misc_feature 1..20: note = chemically synthesized
  source 1..20: mol_type = other DNA
attttattctactgtggtct

SEQ ID NO: 44586 - DNA, 20 bp, synthetic construct
  misc_feature 1..20: note = chemically synthesized
  source 1..20: mol_type = other DNA
tttattctactgtggtctga

SEQ ID NO: 44587 - DNA, 20 bp, synthetic construct
  misc_feature 1..20: note = chemically synthesized
  source 1..20: mol_type = other DNA
tattctactgtggtctgaga

SEQ ID NO: 44588 - DNA, 20 bp, synthetic construct
  misc_feature 1..20: note = chemically synthesized
  source 1..20: mol_type = other DNA
tcaatttttaaaaatttatt

SEQ ID NO: 44589 - DNA, 20 bp, synthetic construct
  misc_feature 1..20: note = chemically synthesized
  source 1..20: mol_type = other DNA
caatttttaaaaatttattg

SEQ ID NO: 44590 - DNA, 20 bp, synthetic construct
  misc_feature 1..20: note = chemically synthesized
  source 1..20: mol_type = other DNA
atttattgaggcttgttttg

SEQ ID NO: 44591 - DNA, 20 bp, synthetic construct
  misc_feature 1..20: note = chemically synthesized
  source 1..20: mol_type = other DNA
ttgttttgtggcatatcata

SEQ ID NO: 44592 - DNA, 20 bp, synthetic construct
  misc_feature 1..20: note = chemically synthesized
  source 1..20: mol_type = other DNA
gcatatcatatggcctatct

SEQ ID NO: 44593 - DNA, 20 bp, synthetic construct
  misc_feature 1..20: note = chemically synthesized
  source 1..20: mol_type = other DNA
atatcatatggcctatcttg

SEQ ID NO: 44594 - DNA, 20 bp, synthetic construct
  misc_feature 1..20: note = chemically synthesized
  source 1..20: mol_type = other DNA
catatggcctatcttggaga

SEQ ID NO: 44595 - DNA, 20 bp, synthetic construct
  misc_feature 1..20: note = chemically synthesized
  source 1..20: mol_type = other DNA
aagttccatgtgctgatgaa

SEQ ID NO: 44596 - DNA, 20 bp, synthetic construct
  misc_feature 1..20: note = chemically synthesized
  source 1..20: mol_type = other DNA
tgaatagaatgtgtattctg

SEQ ID NO: 44597 - DNA, 20 bp, synthetic construct
  misc_feature 1..20: note = chemically synthesized
  source 1..20: mol_type = other DNA
aatgtgtattctgcagttgt

SEQ ID NO: 44598 - DNA, 20 bp, synthetic construct
  misc_feature 1..20: note = chemically synthesized
  source 1..20: mol_type = other DNA
atgtgtattctgcagttgtt

SEQ ID NO: 44599 - DNA, 20 bp, synthetic construct
  misc_feature 1..20: note = chemically synthesized
  source 1..20: mol_type = other DNA
tgtattctgcagttgttggg

SEQ ID NO: 44600 - DNA, 20 bp, synthetic construct
  misc_feature 1..20: note = chemically synthesized
  source 1..20: mol_type = other DNA
atgtcctgtaaatatctgtt

SEQ ID NO: 44601 - DNA, 20 bp, synthetic construct
  misc_feature 1..20: note = chemically synthesized
  source 1..20: mol_type = other DNA
ttaaatccattgtttctttg

SEQ ID NO: 44602 - DNA, 20 bp, synthetic construct
  misc_feature 1..20: note = chemically synthesized
  source 1..20: mol_type = other DNA
gactgtcttgatgacctgcc

SEQ ID NO: 44603 - DNA, 20 bp, synthetic construct
  misc_feature 1..20: note = chemically synthesized
  source 1..20: mol_type = other DNA
tcttgatgacctgcctagtg

SEQ ID NO: 44604 - DNA, 20 bp, synthetic construct
  misc_feature 1..20: note = chemically synthesized
  source 1..20: mol_type = other DNA
gatgacctgcctagtgcagt

SEQ ID NO: 44605 - DNA, 20 bp, synthetic construct
  misc_feature 1..20: note = chemically synthesized
  source 1..20: mol_type = other DNA
gacctgcctagtgcagtcag

SEQ ID NO: 44606 - DNA, 20 bp, synthetic construct
  misc_feature 1..20: note = chemically synthesized
  source 1..20: mol_type = other DNA
cctgcctagtgcagtcagtg

SEQ ID NO: 44607 - DNA, 20 bp, synthetic construct
  misc_feature 1..20: note = chemically synthesized
  source 1..20: mol_type = other DNA
gtgcagtcagtggagtattg

SEQ ID NO: 44608 - DNA, 20 bp, synthetic construct
  misc_feature 1..20: note = chemically synthesized
  source 1..20: mol_type = other DNA
actattattatgttgctgtc

SEQ ID NO: 44609 - DNA, 20 bp, synthetic construct
  misc_feature 1..20: note = chemically synthesized
  source 1..20: mol_type = other DNA
tattatgttgctgtctagtc

SEQ ID NO: 44610 - DNA, 20 bp, synthetic construct
  misc_feature 1..20: note = chemically synthesized
  source 1..20: mol_type = other DNA
tatgttgctgtctagtctag

SEQ ID NO: 44611 - DNA, 20 bp, synthetic construct
  misc_feature 1..20: note = chemically synthesized
  source 1..20: mol_type = other DNA
tagtaattgttttataaatt

SEQ ID NO: 44612 - DNA, 20 bp, synthetic construct
  misc_feature 1..20: note = chemically synthesized
  source 1..20: mol_type = other DNA
agtaattgttttataaattt

SEQ ID NO: 44613 - DNA, 20 bp, synthetic construct
  misc_feature 1..20: note = chemically synthesized
  source 1..20: mol_type = other DNA
ttttataaatttgggatctc

SEQ ID NO: 44614 - DNA, 20 bp, synthetic construct
  misc_feature 1..20: note = chemically synthesized
  source 1..20: mol_type = other DNA
aaatttgggatctccagtat

SEQ ID NO: 44615 - DNA, 20 bp, synthetic construct
  misc_feature 1..20: note = chemically synthesized
  source 1..20: mol_type = other DNA
gtattagatgcatatatatt

SEQ ID NO: 44616 - DNA, 20 bp, synthetic construct
  misc_feature 1..20: note = chemically synthesized
  source 1..20: mol_type = other DNA
gaattgtaatattctcccat

SEQ ID NO: 44617 - DNA, 20 bp, synthetic construct
  misc_feature 1..20: note = chemically synthesized
  source 1..20: mol_type = other DNA
gtaatattctcccattggac

SEQ ID NO: 44618 - DNA, 20 bp, synthetic construct
  misc_feature 1..20: note = chemically synthesized
  source 1..20: mol_type = other DNA
taatattctcccattggaca

SEQ ID NO: 44619 - DNA, 20 bp, synthetic construct
  misc_feature 1..20: note = chemically synthesized
  source 1..20: mol_type = other DNA
aatattctcccattggacaa

SEQ ID NO: 44620 - DNA, 20 bp, synthetic construct
  misc_feature 1..20: note = chemically synthesized
  source 1..20: mol_type = other DNA
ttttaactgctgtttcttta

SEQ ID NO: 44621 - DNA, 20 bp, synthetic construct
  misc_feature 1..20: note = chemically synthesized
  source 1..20: mol_type = other DNA
aagtttgttttgtctgacat

SEQ ID NO: 44622 - DNA, 20 bp, synthetic construct
  misc_feature 1..20: note = chemically synthesized
  source 1..20: mol_type = other DNA
tgttttgtctgacataagaa

SEQ ID NO: 44623 - DNA, 20 bp, synthetic construct
  misc_feature 1..20: note = chemically synthesized
  source 1..20: mol_type = other DNA
tgacataagaatagctgctt

SEQ ID NO: 44624 - DNA, 20 bp, synthetic construct
  misc_feature 1..20: note = chemically synthesized
  source 1..20: mol_type = other DNA
tagctgctttggctcgcttt

SEQ ID NO: 44625 - DNA, 20 bp, synthetic construct
  misc_feature 1..20: note = chemically synthesized
  source 1..20: mol_type = other DNA
gcttttggtgtccatttgtg

SEQ ID NO: 44626 - DNA, 20 bp, synthetic construct
  misc_feature 1..20: note = chemically synthesized
  source 1..20: mol_type = other DNA
attttccacccctttacctt

SEQ ID NO: 44627 - DNA, 20 bp, synthetic construct
  misc_feature 1..20: note = chemically synthesized
  source 1..20: mol_type = other DNA
cctttaccttaagtttatgt

SEQ ID NO: 44628 - DNA, 20 bp, synthetic construct
  misc_feature 1..20: note = chemically synthesized
  source 1..20: mol_type = other DNA
ttatgtgagtccttatgtgt

SEQ ID NO: 44629 - DNA, 20 bp, synthetic construct
  misc_feature 1..20: note = chemically synthesized
  source 1..20: mol_type = other DNA
tatgtgagtccttatgtgtt

SEQ ID NO: 44630 - DNA, 20 bp, synthetic construct
  misc_feature 1..20: note = chemically synthesized
  source 1..20: mol_type = other DNA
tgagtccttatgtgttaggt

SEQ ID NO: 44631 - DNA, 20 bp, synthetic construct
  misc_feature 1..20: note = chemically synthesized
  source 1..20: mol_type = other DNA
tgtgttaggtgagtctcctg

SEQ ID NO: 44632 - DNA, 20 bp, synthetic construct
  misc_feature 1..20: note = chemically synthesized
  source 1..20: mol_type = other DNA
gtgttaggtgagtctcctga

SEQ ID NO: 44633 - DNA, 20 bp, synthetic construct
  misc_feature 1..20: note = chemically synthesized
  source 1..20: mol_type = other DNA
ttaggtgagtctcctgaagg

SEQ ID NO: 44634 - DNA, 20 bp, synthetic construct
  misc_feature 1..20: note = chemically synthesized
  source 1..20: mol_type = other DNA
ggtgagtctcctgaaggcgg

SEQ ID NO: 44635 - DNA, 20 bp, synthetic construct
  misc_feature 1..20: note = chemically synthesized
  source 1..20: mol_type = other DNA
tcctgaaggcggcagataac

SEQ ID NO: 44636 - DNA, 20 bp, synthetic construct
  misc_feature 1..20: note = chemically synthesized
  source 1..20: mol_type = other DNA
gaaggcggcagataactggt

SEQ ID NO: 44637 - DNA, 20 bp, synthetic construct
  misc_feature 1..20: note = chemically synthesized
  source 1..20: mol_type = other DNA
tctgcaattctgtatctttt

SEQ ID NO: 44638 - DNA, 20 bp, synthetic construct
  misc_feature 1..20: note = chemically synthesized
  source 1..20: mol_type = other DNA
gcaattctgtatcttttaag

SEQ ID NO: 44639 - DNA, 20 bp, synthetic construct
  misc_feature 1..20: note = chemically synthesized
  source 1..20: mol_type = other DNA
aattctgtatcttttaagtg

SEQ ID NO: 44640 - DNA, 20 bp, synthetic construct
  misc_feature 1..20: note = chemically synthesized
  source 1..20: mol_type = other DNA
tatcttttaagtggagcatt

SEQ ID NO: 44641 - DNA, 20 bp, synthetic construct
  misc_feature 1..20: note = chemically synthesized
  source 1..20: mol_type = other DNA
agtccatttacattcaacat

SEQ ID NO: 44642 - DNA, 20 bp, synthetic construct
  misc_feature 1..20: note = chemically synthesized
  source 1..20: mol_type = other DNA
ttacattcaacatcagtatt

SEQ ID NO: 44643 - DNA, 20 bp, synthetic construct
  misc_feature 1..20: note = chemically synthesized
  source 1..20: mol_type = other DNA
tacattcaacatcagtattg

SEQ ID NO: 44644 - DNA, 20 bp, synthetic construct
  misc_feature 1..20: note = chemically synthesized
  source 1..20: mol_type = other DNA
caacatcagtattgaggtgt

SEQ ID NO: 44645 - DNA, 20 bp, synthetic construct
  misc_feature 1..20: note = chemically synthesized
  source 1..20: mol_type = other DNA
aacatcagtattgaggtgtg

SEQ ID NO: 44646 - DNA, 20 bp, synthetic construct
  misc_feature 1..20: note = chemically synthesized
  source 1..20: mol_type = other DNA
aggtactattccattcttcg

SEQ ID NO: 44647 - DNA, 20 bp, synthetic construct
  misc_feature 1..20: note = chemically synthesized
  source 1..20: mol_type = other DNA
tttttgttgtatatgtccta

SEQ ID NO: 44648 - DNA, 20 bp, synthetic construct
  misc_feature 1..20: note = chemically synthesized
  source 1..20: mol_type = other DNA
ttttgttgtatatgtcctat

SEQ ID NO: 44649 - DNA, 20 bp, synthetic construct
  misc_feature 1..20: note = chemically synthesized
  source 1..20: mol_type = other DNA
cctatgggatttatgcttta

SEQ ID NO: 44650 - DNA, 20 bp, synthetic construct
  misc_feature 1..20: note = chemically synthesized
  source 1..20: mol_type = other DNA
tatgggatttatgctttaaa

SEQ ID NO: 44651 - DNA, 20 bp, synthetic construct
  misc_feature 1..20: note = chemically synthesized
  source 1..20: mol_type = other DNA
atgggatttatgctttaaag

SEQ ID NO: 44652 - DNA, 20 bp, synthetic construct
  misc_feature 1..20: note = chemically synthesized
  source 1..20: mol_type = other DNA
gttctgttttgatgtgcttc

SEQ ID NO: 44653 - DNA, 20 bp, synthetic construct
  misc_feature 1..20: note = chemically synthesized
  source 1..20: mol_type = other DNA
ttctgttttgatgtgcttcc

SEQ ID NO: 44654 - DNA, 20 bp, synthetic construct
  misc_feature 1..20: note = chemically synthesized
  source 1..20: mol_type = other DNA
tctgttttgatgtgcttcca

SEQ ID NO: 44655 - DNA, 20 bp, synthetic construct
  misc_feature 1..20: note = chemically synthesized
  source 1..20: mol_type = other DNA
gtgcttccagggtttatttc

SEQ ID NO: 44656 - DNA, 20 bp, synthetic construct
  misc_feature 1..20: note = chemically synthesized
  source 1..20: mol_type = other DNA
ccagggtttatttcaagatt

SEQ ID NO: 44657 - DNA, 20 bp, synthetic construct
  misc_feature 1..20: note = chemically synthesized
  source 1..20: mol_type = other DNA
agggtttatttcaagattta

SEQ ID NO: 44658 - DNA, 20 bp, synthetic construct
  misc_feature 1..20: note = chemically synthesized
  source 1..20: mol_type = other DNA
agatttagagctccttttat

SEQ ID NO: 44659 - DNA, 20 bp, synthetic construct
  misc_feature 1..20: note = chemically synthesized
  source 1..20: mol_type = other DNA
gctccttttatcagttcttg

SEQ ID NO: 44660 - DNA, 20 bp, synthetic construct
  misc_feature 1..20: note = chemically synthesized
  source 1..20: mol_type = other DNA
tttatcagttcttgtagtgt

SEQ ID NO: 44661 - DNA, 20 bp, synthetic construct
  misc_feature 1..20: note = chemically synthesized
  source 1..20: mol_type = other DNA
cagttcttgtagtgttggct

SEQ ID NO: 44662 - DNA, 20 bp, synthetic construct
  misc_feature 1..20: note = chemically synthesized
  source 1..20: mol_type = other DNA
ttcttgtagtgttggcttgg

SEQ ID NO: 44663 - DNA, 20 bp, synthetic construct
  misc_feature 1..20: note = chemically synthesized
  source 1..20: mol_type = other DNA
ttggtagtgccgaattctct

SEQ ID NO: 44664 - DNA, 20 bp, synthetic construct
  misc_feature 1..20: note = chemically synthesized
  source 1..20: mol_type = other DNA
gtgtattttcttcatttgtg

SEQ ID NO: 44665 - DNA, 20 bp, synthetic construct
  misc_feature 1..20: note = chemically synthesized
  source 1..20: mol_type = other DNA
ttttcttcatttgtgaagct

SEQ ID NO: 44666 - DNA, 20 bp, synthetic construct
  misc_feature 1..20: note = chemically synthesized
  source 1..20: mol_type = other DNA
tttgtgaagcttagtttcac

SEQ ID NO: 44667 - DNA, 20 bp, synthetic construct
  misc_feature 1..20: note = chemically synthesized
  source 1..20: mol_type = other DNA
ttcactggatataaaattct

SEQ ID NO: 44668 - DNA, 20 bp, synthetic construct
  misc_feature 1..20: note = chemically synthesized
  source 1..20: mol_type = other DNA
ggctgataattgttttgttt

SEQ ID NO: 44669 - DNA, 20 bp, synthetic construct
  misc_feature 1..20: note = chemically synthesized
  source 1..20: mol_type = other DNA
tgataattgttttgtttaag

SEQ ID NO: 44670 - DNA, 20 bp, synthetic construct
  misc_feature 1..20: note = chemically synthesized
  source 1..20: mol_type = other DNA
gataattgttttgtttaaga

SEQ ID NO: 44671 - DNA, 20 bp, synthetic construct
  misc_feature 1..20: note = chemically synthesized
  source 1..20: mol_type = other DNA
tgttttgtttaagaaggctg

SEQ ID NO: 44672 - DNA, 20 bp, synthetic construct
  misc_feature 1..20: note = chemically synthesized
  source 1..20: mol_type = other DNA
ttgtttaagaaggctgaaga

SEQ ID NO: 44673 - DNA, 20 bp, synthetic construct
  misc_feature 1..20: note = chemically synthesized
  source 1..20: mol_type = other DNA
tgtttaagaaggctgaagat

SEQ ID NO: 44674 - DNA, 20 bp, synthetic construct
  misc_feature 1..20: note = chemically synthesized
  source 1..20: mol_type = other DNA
gtttaagaaggctgaagata

SEQ ID NO: 44675 - DNA, 20 bp, synthetic construct
  misc_feature 1..20: note = chemically synthesized
  source 1..20: mol_type = other DNA
gatagggccatattcacttc

SEQ ID NO: 44676 - DNA, 20 bp, synthetic construct
  misc_feature 1..20: note = chemically synthesized
  source 1..20: mol_type = other DNA
atattcacttctagctttta

SEQ ID NO: 44677 - DNA, 20 bp, synthetic construct
  misc_feature 1..20: note = chemically synthesized
  source 1..20: mol_type = other DNA
tagcttttacggtttctgct

SEQ ID NO: 44678 - DNA, 20 bp, synthetic construct
  misc_feature 1..20: note = chemically synthesized
  source 1..20: mol_type = other DNA
gaaatctgctgttaatctga

SEQ ID NO: 44679 - DNA, 20 bp, synthetic construct
  misc_feature 1..20: note = chemically synthesized
  source 1..20: mol_type = other DNA
aaatctgctgttaatctgat

SEQ ID NO: 44680 - DNA, 20 bp, synthetic construct
  misc_feature 1..20: note = chemically synthesized
  source 1..20: mol_type = other DNA
atctgataggttttctttca

SEQ ID NO: 44681 - DNA, 20 bp, synthetic construct
  misc_feature 1..20: note = chemically synthesized
  source 1..20: mol_type = other DNA
tctgataggttttctttcat

SEQ ID NO: 44682 - DNA, 20 bp, synthetic construct
  misc_feature 1..20: note = chemically synthesized
  source 1..20: mol_type = other DNA
gttttctttcataggttacc

SEQ ID NO: 44683 - DNA, 20 bp, synthetic construct
  misc_feature 1..20: note = chemically synthesized
  source 1..20: mol_type = other DNA
ttctttcataggttacctgg

SEQ ID NO: 44684 - DNA, 20 bp, synthetic construct
  misc_feature 1..20: note = chemically synthesized
  source 1..20: mol_type = other DNA
tacctggtagtttcacctca

SEQ ID NO: 44685 - DNA, 20 bp, synthetic construct
  misc_feature 1..20: note = chemically synthesized
  source 1..20: mol_type = other DNA
agtttcacctcacagctctt

SEQ ID NO: 44686 - DNA, 20 bp, synthetic construct
  misc_feature 1..20: note = chemically synthesized
  source 1..20: mol_type = other DNA
cttaagattctctttgtctt

SEQ ID NO: 44687 - DNA, 20 bp, synthetic construct
  misc_feature 1..20: note = chemically synthesized
  source 1..20: mol_type = other DNA
tctttgtctttagataactt

SEQ ID NO: 44688 - DNA, 20 bp, synthetic construct
  misc_feature 1..20: note = chemically synthesized
  source 1..20: mol_type = other DNA
tactctgatgacaatgtacc

SEQ ID NO: 44689 - DNA, 20 bp, synthetic construct
  misc_feature 1..20: note = chemically synthesized
  source 1..20: mol_type = other DNA
actctgatgacaatgtacct

SEQ ID NO: 44690 - DNA, 20 bp, synthetic construct
  misc_feature 1..20: note = chemically synthesized
  source 1..20: mol_type = other DNA
tatttttgcaatgaatttcc

SEQ ID NO: 44691 - DNA, 20 bp, synthetic construct
  misc_feature 1..20: note = chemically synthesized
  source 1..20: mol_type = other DNA
atttttgcaatgaatttccc

SEQ ID NO: 44692 - DNA, 20 bp, synthetic construct
  misc_feature 1..20: note = chemically synthesized
  source 1..20: mol_type = other DNA
gaatttcccaggtgtttatt

SEQ ID NO: 44693 - DNA, 20 bp, synthetic construct
  misc_feature 1..20: note = chemically synthesized
  source 1..20: mol_type = other DNA
tttattgagcttcttgtatt

SEQ ID NO: 44694 - DNA, 20 bp, synthetic construct
  misc_feature 1..20: note = chemically synthesized
  source 1..20: mol_type = other DNA
gcttcttgtatttggatatc

SEQ ID NO: 44695 - DNA, 20 bp, synthetic construct
  misc_feature 1..20: note = chemically synthesized
  source 1..20: mol_type = other DNA
cttcttgtatttggatatct

SEQ ID NO: 44696 - DNA, 20 bp, synthetic construct
  misc_feature 1..20: note = chemically synthesized
  source 1..20: mol_type = other DNA
tatttggatatctaggtctc

SEQ ID NO: 44697 - DNA, 20 bp, synthetic construct
  misc_feature 1..20: note = chemically synthesized
  source 1..20: mol_type = other DNA
tggatatctaggtctctagc

SEQ ID NO: 44698 - DNA, 20 bp, synthetic construct
  misc_feature 1..20: note = chemically synthesized
  source 1..20: mol_type = other DNA
ggatatctaggtctctagca

SEQ ID NO: 44699 - DNA, 20 bp, synthetic construct
  misc_feature 1..20: note = chemically synthesized
  source 1..20: mol_type = other DNA
tatctaggtctctagcaagg

SEQ ID NO: 44700 - DNA, 20 bp, synthetic construct
  misc_feature 1..20: note = chemically synthesized
  source 1..20: mol_type = other DNA
atctaggtctctagcaaggt

SEQ ID NO: 44701 - DNA, 20 bp, synthetic construct
  misc_feature 1..20: note = chemically synthesized
  source 1..20: mol_type = other DNA
tctaggtctctagcaaggtg

SEQ ID NO: 44702 - DNA, 20 bp, synthetic construct
  misc_feature 1..20: note = chemically synthesized
  source 1..20: mol_type = other DNA
ctaggtctctagcaaggtgg

SEQ ID NO: 44703 - DNA, 20 bp, synthetic construct
  misc_feature 1..20: note = chemically synthesized
  source 1..20: mol_type = other DNA
ggtctctagcaaggtggggg

SEQ ID NO: 44704 - DNA, 20 bp, synthetic construct
  misc_feature 1..20: note = chemically synthesized
  source 1..20: mol_type = other DNA
gttttccttgattatttccc

SEQ ID NO: 44705 - DNA, 20 bp, synthetic construct
  misc_feature 1..20: note = chemically synthesized
  source 1..20: mol_type = other DNA
ccttgattatttccctggat

SEQ ID NO: 44706 - DNA, 20 bp, synthetic construct
  misc_feature 1..20: note = chemically synthesized
  source 1..20: mol_type = other DNA
ggataagttttccaaacttt

SEQ ID NO: 44707 - DNA, 20 bp, synthetic construct
  misc_feature 1..20: note = chemically synthesized
  source 1..20: mol_type = other DNA
tttagatttctcttctttct

SEQ ID NO: 44708 - DNA, 20 bp, synthetic construct
  misc_feature 1..20: note = chemically synthesized
  source 1..20: mol_type = other DNA
ttagatttctcttctttctc

SEQ ID NO: 44709 - DNA, 20 bp, synthetic construct
  misc_feature 1..20: note = chemically synthesized
  source 1..20: mol_type = other DNA
tcaggaatgctgattattct

SEQ ID NO: 44710 - DNA, 20 bp, synthetic construct
  misc_feature 1..20: note = chemically synthesized
  source 1..20: mol_type = other DNA
caggaatgctgattattctt

SEQ ID NO: 44711 - DNA, 20 bp, synthetic construct
  misc_feature 1..20: note = chemically synthesized
  source 1..20: mol_type = other DNA
ttgattgtttaacataatcc

SEQ ID NO: 44712 - DNA, 20 bp, synthetic construct
  misc_feature 1..20: note = chemically synthesized
  source 1..20: mol_type = other DNA
taacataatcccagatttct

SEQ ID NO: 44713 - DNA, 20 bp, synthetic construct
  misc_feature 1..20: note = chemically synthesized
  source 1..20: mol_type = other DNA
acataatcccagatttcttg

SEQ ID NO: 44714 - DNA, 20 bp, synthetic construct
  misc_feature 1..20: note = chemically synthesized
  source 1..20: mol_type = other DNA
cataatcccagatttcttgg

SEQ ID NO: 44715 - DNA, 20 bp, synthetic construct
  misc_feature 1..20: note = chemically synthesized
  source 1..20: mol_type = other DNA
tcttttttctttgtctttgt

SEQ ID NO: 44716 - DNA, 20 bp, synthetic construct
  misc_feature 1..20: note = chemically synthesized
  source 1..20: mol_type = other DNA
tttctttgtctttgttggat

SEQ ID NO: 44717 - DNA, 20 bp, synthetic construct
  misc_feature 1..20: note = chemically synthesized
  source 1..20: mol_type = other DNA
ttctttgtctttgttggatt

SEQ ID NO: 44718 - DNA, 20 bp, synthetic construct
  misc_feature 1..20: note = chemically synthesized
  source 1..20: mol_type = other DNA
aattcaaaaactttgtcttc

SEQ ID NO: 44719 - DNA, 20 bp, synthetic construct
  misc_feature 1..20: note = chemically synthesized
  source 1..20: mol_type = other DNA
agctctgaatttcttctgct

SEQ ID NO: 44720 - DNA, 20 bp, synthetic construct
  misc_feature 1..20: note = chemically synthesized
  source 1..20: mol_type = other DNA
tctgcttggattctattgct

SEQ ID NO: 44721 - DNA, 20 bp, synthetic construct
  misc_feature 1..20: note = chemically synthesized
  source 1..20: mol_type = other DNA
attctattgctgagactttc

SEQ ID NO: 44722 - DNA, 20 bp, synthetic construct
  misc_feature 1..20: note = chemically synthesized
  source 1..20: mol_type = other DNA
tctattgctgagactttcta

SEQ ID NO: 44723 - DNA, 20 bp, synthetic construct
  misc_feature 1..20: note = chemically synthesized
  source 1..20: mol_type = other DNA
agagcattttgcatttctat

SEQ ID NO: 44724 - DNA, 20 bp, synthetic construct
  misc_feature 1..20: note = chemically synthesized
  source 1..20: mol_type = other DNA
cattcatccattgtttcctg

SEQ ID NO: 44725 - DNA, 20 bp, synthetic construct
  misc_feature 1..20: note = chemically synthesized
  source 1..20: mol_type = other DNA
ttatgctatctctttaactg

SEQ ID NO: 44726 - DNA, 20 bp, synthetic construct
  misc_feature 1..20: note = chemically synthesized
  source 1..20: mol_type = other DNA
catttcttgtatcatatttt

SEQ ID NO: 44727 - DNA, 20 bp, synthetic construct
  misc_feature 1..20: note = chemically synthesized
  source 1..20: mol_type = other DNA
atttttggtttttttaaaat

SEQ ID NO: 44728 - DNA, 20 bp, synthetic construct
  misc_feature 1..20: note = chemically synthesized
  source 1..20: mol_type = other DNA
aaattggacttcaccttcct

SEQ ID NO: 44729 - DNA, 20 bp, synthetic construct
  misc_feature 1..20: note = chemically synthesized
  source 1..20: mol_type = other DNA
tcctcggatgcctccttgat

SEQ ID NO: 44730 - DNA, 20 bp, synthetic construct
  misc_feature 1..20: note = chemically synthesized
  source 1..20: mol_type = other DNA
tgaccttctgaattattttt

SEQ ID NO: 44731 - DNA, 20 bp, synthetic construct
  misc_feature 1..20: note = chemically synthesized
  source 1..20: mol_type = other DNA
gaccttctgaattatttttc

SEQ ID NO: 44732 - DNA, 20 bp, synthetic construct
  misc_feature 1..20: note = chemically synthesized
  source 1..20: mol_type = other DNA
gaattatttttcaggtaaat

SEQ ID NO: 44733 - DNA, 20 bp, synthetic construct
  misc_feature 1..20: note = chemically synthesized
  source 1..20: mol_type = other DNA
aattatttttcaggtaaatc

SEQ ID NO: 44734 - DNA, 20 bp, synthetic construct
  misc_feature 1..20: note = chemically synthesized
  source 1..20: mol_type = other DNA
attatttttcaggtaaatca

SEQ ID NO: 44735 - DNA, 20 bp, synthetic construct
  misc_feature 1..20: note = chemically synthesized
  source 1..20: mol_type = other DNA
gtaaatcagggatttcttct

SEQ ID NO: 44736 - DNA, 20 bp, synthetic construct
  misc_feature 1..20: note = chemically synthesized
  source 1..20: mol_type = other DNA
tcagggatttcttcttggtt

SEQ ID NO: 44737 - DNA, 20 bp, synthetic construct
  misc_feature 1..20: note = chemically synthesized
  source 1..20: mol_type = other DNA
tcttggtttggatgcattgc

SEQ ID NO: 44738 - DNA, 20 bp, synthetic construct
  misc_feature 1..20: note = chemically synthesized
  source 1..20: mol_type = other DNA
ggtttggatgcattgctggt

SEQ ID NO: 44739 - DNA, 20 bp, synthetic construct
  misc_feature 1..20: note = chemically synthesized
  source 1..20: mol_type = other DNA
tggatgcattgctggtgagc

SEQ ID NO: 44740 - DNA, 20 bp, synthetic construct
  misc_feature 1..20: note = chemically synthesized
  source 1..20: mol_type = other DNA
ggtgagctagtatgattttt

SEQ ID NO: 44741 - DNA, 20 bp, synthetic construct
  misc_feature 1..20: note = chemically synthesized
  source 1..20: mol_type = other DNA
gtgagctagtatgatttttt

SEQ ID NO: 44742 - DNA, 20 bp, synthetic construct
  misc_feature 1..20: note = chemically synthesized
  source 1..20: mol_type = other DNA
tgagctagtatgattttttg

SEQ ID NO: 44743 - DNA, 20 bp, synthetic construct
  misc_feature 1..20: note = chemically synthesized
  source 1..20: mol_type = other DNA
gagctagtatgattttttgg

SEQ ID NO: 44744 - DNA, 20 bp, synthetic construct
  misc_feature 1..20: note = chemically synthesized
  source 1..20: mol_type = other DNA
agctagtatgattttttggg

SEQ ID NO: 44745 - DNA, 20 bp, synthetic construct
  misc_feature 1..20: note = chemically synthesized
  source 1..20: mol_type = other DNA
tgattttttggggggtgtta

SEQ ID NO: 44746 - DNA, 20 bp, synthetic construct
  misc_feature 1..20: note = chemically synthesized
  source 1..20: mol_type = other DNA
aaccttgtttttcatattac

SEQ ID NO: 44747 - DNA, 20 bp, synthetic construct
  misc_feature 1..20: note = chemically synthesized
  source 1..20: mol_type = other DNA
ccttgtttttcatattacca

SEQ ID NO: 44748 - DNA, 20 bp, synthetic construct
  misc_feature 1..20: note = chemically synthesized
  source 1..20: mol_type = other DNA
gtttttcatattaccagagt

SEQ ID NO: 44749 - DNA, 20 bp, synthetic construct
  misc_feature 1..20: note = chemically synthesized
  source 1..20: mol_type = other DNA
tattaccagagttagttttc

SEQ ID NO: 44750 - DNA, 20 bp, synthetic construct
  misc_feature 1..20: note = chemically synthesized
  source 1..20: mol_type = other DNA
ttttctggttccttctcact

SEQ ID NO: 44751 - DNA, 20 bp, synthetic construct
  misc_feature 1..20: note = chemically synthesized
  source 1..20: mol_type = other DNA
tttctggttccttctcactt

SEQ ID NO: 44752 - DNA, 20 bp, synthetic construct
  misc_feature 1..20: note = chemically synthesized
  source 1..20: mol_type = other DNA
ctggttccttctcacttggg

SEQ ID NO: 44753 - DNA, 20 bp, synthetic construct
  misc_feature 1..20: note = chemically synthesized
  source 1..20: mol_type = other DNA
tggttccttctcacttgggt

SEQ ID NO: 44754 - DNA, 20 bp, synthetic construct
  misc_feature 1..20: note = chemically synthesized
  source 1..20: mol_type = other DNA
ctcacttgggtaggctctgt

SEQ ID NO: 44755 - DNA, 20 bp, synthetic construct
  misc_feature 1..20: note = chemically synthesized
  source 1..20: mol_type = other DNA
cacttgggtaggctctgtca

SEQ ID NO: 44756 - DNA, 20 bp, synthetic construct
  misc_feature 1..20: note = chemically synthesized
  source 1..20: mol_type = other DNA
acttgggtaggctctgtcag

SEQ ID NO: 44757 - DNA, 20 bp, synthetic construct
  misc_feature 1..20: note = chemically synthesized
  source 1..20: mol_type = other DNA
cttgggtaggctctgtcaga

SEQ ID NO: 44758 - DNA, 20 bp, synthetic construct
  misc_feature 1..20: note = chemically synthesized
  source 1..20: mol_type = other DNA
ggtaggctctgtcagaggga

SEQ ID NO: 44759 - DNA, 20 bp, synthetic construct
  misc_feature 1..20: note = chemically synthesized
  source 1..20: mol_type = other DNA
gctctgtcagagggaaagtc

SEQ ID NO: 44760 - DNA, 20 bp, synthetic construct
  misc_feature 1..20: note = chemically synthesized
  source 1..20: mol_type = other DNA
ctctgtcagagggaaagtct

SEQ ID NO: 44761 - DNA, 20 bp, synthetic construct
  misc_feature 1..20: note = chemically synthesized
  source 1..20: mol_type = other DNA
agagggaaagtctaggcctc

SEQ ID NO: 44762 - DNA, 20 bp, synthetic construct
  misc_feature 1..20: note = chemically synthesized
  source 1..20: mol_type = other DNA
gagggaaagtctaggcctca

SEQ ID NO: 44763 - DNA, 20 bp, synthetic construct
  misc_feature 1..20: note = chemically synthesized
  source 1..20: mol_type = other DNA
aaagtctaggcctcaaggct

SEQ ID NO: 44764 - DNA, 20 bp, synthetic construct
  misc_feature 1..20: note = chemically synthesized
  source 1..20: mol_type = other DNA
ggctgagacttttgtcccat

SEQ ID NO: 44765 - DNA, 20 bp, synthetic construct
  misc_feature 1..20: note = chemically synthesized
  source 1..20: mol_type = other DNA
gctgagacttttgtcccatg

SEQ ID NO: 44766 - DNA, 20 bp, synthetic construct
  misc_feature 1..20: note = chemically synthesized
  source 1..20: mol_type = other DNA
catgaggtgttcccttgatg

SEQ ID NO: 44767 - DNA, 20 bp, synthetic construct
  misc_feature 1..20: note = chemically synthesized
  source 1..20: mol_type = other DNA
ggtgttcccttgatgtagca

SEQ ID NO: 44768 - DNA, 20 bp, synthetic construct
  misc_feature 1..20: note = chemically synthesized
  source 1..20: mol_type = other DNA
tagcacagtcccccttttcc

SEQ ID NO: 44769 - DNA, 20 bp, synthetic construct
  misc_feature 1..20: note = chemically synthesized
  source 1..20: mol_type = other DNA
agcacagtcccccttttcct

SEQ ID NO: 44770 - DNA, 20 bp, synthetic construct
  misc_feature 1..20: note = chemically synthesized
  source 1..20: mol_type = other DNA
agtcccccttttcctaggcg

SEQ ID NO: 44771 - DNA, 20 bp, synthetic construct
  misc_feature 1..20: note = chemically synthesized
  source 1..20: mol_type = other DNA
gtcccccttttcctaggcgt

SEQ ID NO: 44772 - DNA, 20 bp, synthetic construct
  misc_feature 1..20: note = chemically synthesized
  source 1..20: mol_type = other DNA
tcccccttttcctaggcgtg

SEQ ID NO: 44773 - DNA, 20 bp, synthetic construct
  misc_feature 1..20: note = chemically synthesized
  source 1..20: mol_type = other DNA
tcctaggcgtggggcttcct

SEQ ID NO: 44774 - DNA, 20 bp, synthetic construct
  misc_feature 1..20: note = chemically synthesized
  source 1..20: mol_type = other DNA
ctaggcgtggggcttcctga

SEQ ID NO: 44775 - DNA, 20 bp, synthetic construct
  misc_feature 1..20: note = chemically synthesized
  source 1..20: mol_type = other DNA
gcttcctgagagccgaactg

SEQ ID NO: 44776 - DNA, 20 bp, synthetic construct
  misc_feature 1..20: note = chemically synthesized
  source 1..20: mol_type = other DNA
agtgattgttatctctcttc

SEQ ID NO: 44777 - DNA, 20 bp, synthetic construct
  misc_feature 1..20: note = chemically synthesized
  source 1..20: mol_type = other DNA
tgttatctctcttctggatc

SEQ ID NO: 44778 - DNA, 20 bp, synthetic construct
  misc_feature 1..20: note = chemically synthesized
  source 1..20: mol_type = other DNA
ttctggatctagccacccat

SEQ ID NO: 44779 - DNA, 20 bp, synthetic construct
  misc_feature 1..20: note = chemically synthesized
  source 1..20: mol_type = other DNA
tctggatctagccacccatc

SEQ ID NO: 44780 - DNA, 20 bp, synthetic construct
  misc_feature 1..20: note = chemically synthesized
  source 1..20: mol_type = other DNA
tagccacccatcaggtctac

SEQ ID NO: 44781 - DNA, 20 bp, synthetic construct
  misc_feature 1..20: note = chemically synthesized
  source 1..20: mol_type = other DNA
ccatcaggtctaccagactc

SEQ ID NO: 44782 - DNA, 20 bp, synthetic construct
  misc_feature 1..20: note = chemically synthesized
  source 1..20: mol_type = other DNA
catcaggtctaccagactcc

SEQ ID NO: 44783 - DNA, 20 bp, synthetic construct
  misc_feature 1..20: note = chemically synthesized
  source 1..20: mol_type = other DNA
aggtctaccagactccaggc

SEQ ID NO: 44784 - DNA, 20 bp, synthetic construct
  misc_feature 1..20: note = chemically synthesized
  source 1..20: mol_type = other DNA
accagactccaggctggtac

SEQ ID NO: 44785 - DNA, 20 bp, synthetic construct
  misc_feature 1..20: note = chemically synthesized
  source 1..20: mol_type = other DNA
ccagactccaggctggtact

SEQ ID NO: 44786 - DNA, 20 bp, synthetic construct
  misc_feature 1..20: note = chemically synthesized
  source 1..20: mol_type = other DNA
cagactccaggctggtactg

SEQ ID NO: 44787 - DNA, 20 bp, synthetic construct
  misc_feature 1..20: note = chemically synthesized
  source 1..20: mol_type = other DNA
ggtactggggtttgtctgca

SEQ ID NO: 44788 - DNA, 20 bp, synthetic construct
  misc_feature 1..20: note = chemically synthesized
  source 1..20: mol_type = other DNA
tactggggtttgtctgcaca

SEQ ID NO: 44789 - DNA, 20 bp, synthetic construct
  misc_feature 1..20: note = chemically synthesized
  source 1..20: mol_type = other DNA
cttgtgacgtgaaccatctg

SEQ ID NO: 44790 - DNA, 20 bp, synthetic construct
  misc_feature 1..20: note = chemically synthesized
  source 1..20: mol_type = other DNA
ttgtgacgtgaaccatctgt

SEQ ID NO: 44791 - DNA, 20 bp, synthetic construct
  misc_feature 1..20: note = chemically synthesized
  source 1..20: mol_type = other DNA
tgaaccatctgtgggtctct

SEQ ID NO: 44792 - DNA, 20 bp, synthetic construct
  misc_feature 1..20: note = chemically synthesized
  source 1..20: mol_type = other DNA
atctgtgggtctctcagcca

SEQ ID NO: 44793 - DNA, 20 bp, synthetic construct
  misc_feature 1..20: note = chemically synthesized
  source 1..20: mol_type = other DNA
gatacaaccacctgctccaa

SEQ ID NO: 44794 - DNA, 20 bp, synthetic construct
  misc_feature 1..20: note = chemically synthesized
  source 1..20: mol_type = other DNA
tacaaccacctgctccaatg

SEQ ID NO: 44795 - DNA, 20 bp, synthetic construct
  misc_feature 1..20: note = chemically synthesized
  source 1..20: mol_type = other DNA
acaaccacctgctccaatgg

SEQ ID NO: 44796 - DNA, 20 bp, synthetic construct
  misc_feature 1..20: note = chemically synthesized
  source 1..20: mol_type = other DNA
accacctgctccaatggagg

SEQ ID NO: 44797 - DNA, 20 bp, synthetic construct
  misc_feature 1..20: note = chemically synthesized
  source 1..20: mol_type = other DNA
acctgctccaatggaggtgg

SEQ ID NO: 44798 - DNA, 20 bp, synthetic construct
  misc_feature 1..20: note = chemically synthesized
  source 1..20: mol_type = other DNA
ctgctccaatggaggtggca

SEQ ID NO: 44799 - DNA, 20 bp, synthetic construct
  misc_feature 1..20: note = chemically synthesized
  source 1..20: mol_type = other DNA
tgctccaatggaggtggcag

SEQ ID NO: 44800 - DNA, 20 bp, synthetic construct
  misc_feature 1..20: note = chemically synthesized
  source 1..20: mol_type = other DNA
ggaggtggcagaggatgaaa

SEQ ID NO: 44801 - DNA, 20 bp, synthetic construct
  misc_feature 1..20: note = chemically synthesized
  source 1..20: mol_type = other DNA
gaggatgaaatggactctgt

SEQ ID NO: 44802 - DNA, 20 bp, synthetic construct
  misc_feature 1..20: note = chemically synthesized
  source 1..20: mol_type = other DNA
aggatgaaatggactctgtg

SEQ ID NO: 44803 - DNA, 20 bp, synthetic construct
  misc_feature 1..20: note = chemically synthesized
  source 1..20: mol_type = other DNA
ggatgaaatggactctgtga

SEQ ID NO: 44804 - DNA, 20 bp, synthetic construct
  misc_feature 1..20: note = chemically synthesized
  source 1..20: mol_type = other DNA
tctgtgagggtccttacttt

SEQ ID NO: 44805 - DNA, 20 bp, synthetic construct
  misc_feature 1..20: note = chemically synthesized
  source 1..20: mol_type = other DNA
tcaatgcactatttttgtgc

SEQ ID NO: 44806 - DNA, 20 bp, synthetic construct
  misc_feature 1..20: note = chemically synthesized
  source 1..20: mol_type = other DNA
tgcactatttttgtgctggt

SEQ ID NO: 44807 - DNA, 20 bp, synthetic construct
  misc_feature 1..20: note = chemically synthesized
  source 1..20: mol_type = other DNA
tgtgctggttggcctcctgc

SEQ ID NO: 44808 - DNA, 20 bp, synthetic construct
  misc_feature 1..20: note = chemically synthesized
  source 1..20: mol_type = other DNA
gtgctggttggcctcctgcc

SEQ ID NO: 44809 - DNA, 20 bp, synthetic construct
  misc_feature 1..20: note = chemically synthesized
  source 1..20: mol_type = other DNA
gctggttggcctcctgccag

SEQ ID NO: 44810 - DNA, 20 bp, synthetic construct
  misc_feature 1..20: note = chemically synthesized
  source 1..20: mol_type = other DNA
ctggttggcctcctgccagg

SEQ ID NO: 44811 - DNA, 20 bp, synthetic construct
  misc_feature 1..20: note = chemically synthesized
  source 1..20: mol_type = other DNA
gttggcctcctgccaggagg

SEQ ID NO: 44812 - DNA, 20 bp, synthetic construct
  misc_feature 1..20: note = chemically synthesized
  source 1..20: mol_type = other DNA
tgccaggaggtggcactttc

SEQ ID NO: 44813 - DNA, 20 bp, synthetic construct
  misc_feature 1..20: note = chemically synthesized
  source 1..20: mol_type = other DNA
aggaggtggcactttctaga

SEQ ID NO: 44814 - DNA, 20 bp, synthetic construct
  misc_feature 1..20: note = chemically synthesized
  source 1..20: mol_type = other DNA
tggcactttctagaaagcat

SEQ ID NO: 44815 - DNA, 20 bp, synthetic construct
  misc_feature 1..20: note = chemically synthesized
  source 1..20: mol_type = other DNA
cactttctagaaagcatcag

SEQ ID NO: 44816 - DNA, 20 bp, synthetic construct
  misc_feature 1..20: note = chemically synthesized
  source 1..20: mol_type = other DNA
ctttctagaaagcatcagca

SEQ ID NO: 44817 - DNA, 20 bp, synthetic construct
  misc_feature 1..20: note = chemically synthesized
  source 1..20: mol_type = other DNA
tttctagaaagcatcagcag

SEQ ID NO: 44818 - DNA, 20 bp, synthetic construct
  misc_feature 1..20: note = chemically synthesized
  source 1..20: mol_type = other DNA
ctagaaagcatcagcagagg

SEQ ID NO: 44819 - DNA, 20 bp, synthetic construct
  misc_feature 1..20: note = chemically synthesized
  source 1..20: mol_type = other DNA
aaagcatcagcagaggcagt

SEQ ID NO: 44820 - DNA, 20 bp, synthetic construct
  misc_feature 1..20: note = chemically synthesized
  source 1..20: mol_type = other DNA
aagcatcagcagaggcagtc

SEQ ID NO: 44821 - DNA, 20 bp, synthetic construct
  misc_feature 1..20: note = chemically synthesized
  source 1..20: mol_type = other DNA
catcagcagaggcagtcagg

SEQ ID NO: 44822 - DNA, 20 bp, synthetic construct
  misc_feature 1..20: note = chemically synthesized
  source 1..20: mol_type = other DNA
cagcagaggcagtcaggtgg

SEQ ID NO: 44823 - DNA, 20 bp, synthetic construct
  misc_feature 1..20: note = chemically synthesized
  source 1..20: mol_type = other DNA
cagaggcagtcaggtggtgg

SEQ ID NO: 44824 - DNA, 20 bp, synthetic construct
  misc_feature 1..20: note = chemically synthesized
  source 1..20: mol_type = other DNA
ggcagtcaggtggtggtggc

SEQ ID NO: 44825 - DNA, 20 bp, synthetic construct
  misc_feature 1..20: note = chemically synthesized
  source 1..20: mol_type = other DNA
gcagtcaggtggtggtggct

SEQ ID NO: 44826 - DNA, 20 bp, synthetic construct
  misc_feature 1..20: note = chemically synthesized
  source 1..20: mol_type = other DNA
cagtcaggtggtggtggctg

SEQ ID NO: 44827 - DNA, 20 bp, synthetic construct
  misc_feature 1..20: note = chemically synthesized
  source 1..20: mol_type = other DNA
agtcaggtggtggtggctgg

SEQ ID NO: 44828 - DNA, 20 bp, synthetic construct
  misc_feature 1..20: note = chemically synthesized
  source 1..20: mol_type = other DNA
gtcaggtggtggtggctggg

SEQ ID NO: 44829 - DNA, 20 bp, synthetic construct
  misc_feature 1..20: note = chemically synthesized
  source 1..20: mol_type = other DNA
tcaggtggtggtggctgggg

SEQ ID NO: 44830 - DNA, 20 bp, synthetic construct
  misc_feature 1..20: note = chemically synthesized
  source 1..20: mol_type = other DNA
gtggtggtggctgggggggc

SEQ ID NO: 44831 - DNA, 20 bp, synthetic construct
  misc_feature 1..20: note = chemically synthesized
  source 1..20: mol_type = other DNA
tggtggtggctgggggggct

SEQ ID NO: 44832 - DNA, 20 bp, synthetic construct
  misc_feature 1..20: note = chemically synthesized
  source 1..20: mol_type = other DNA
ggtggtggctgggggggctg

SEQ ID NO: 44833 - DNA, 20 bp, synthetic construct
  misc_feature 1..20: note = chemically synthesized
  source 1..20: mol_type = other DNA
ctgggggggctggggcaccc

SEQ ID NO: 44834 - DNA, 20 bp, synthetic construct
  misc_feature 1..20: note = chemically synthesized
  source 1..20: mol_type = other DNA
tggggcaccctagaactccc

SEQ ID NO: 44835 - DNA, 20 bp, synthetic construct
  misc_feature 1..20: note = chemically synthesized
  source 1..20: mol_type = other DNA
gaatatatgccctttgtctt

SEQ ID NO: 44836 - DNA, 20 bp, synthetic construct
  misc_feature 1..20: note = chemically synthesized
  source 1..20: mol_type = other DNA
tgccctttgtcttcagctac

SEQ ID NO: 44837 - DNA, 20 bp, synthetic construct
  misc_feature 1..20: note = chemically synthesized
  source 1..20: mol_type = other DNA
gccctttgtcttcagctacc

SEQ ID NO: 44838 - DNA, 20 bp, synthetic construct
  misc_feature 1..20: note = chemically synthesized
  source 1..20: mol_type = other DNA
ccctttgtcttcagctacca

SEQ ID NO: 44839 - DNA, 20 bp, synthetic construct
  misc_feature 1..20: note = chemically synthesized
  source 1..20: mol_type = other DNA
ttgtcttcagctaccagggt

SEQ ID NO: 44840 - DNA, 20 bp, synthetic construct
  misc_feature 1..20: note = chemically synthesized
  source 1..20: mol_type = other DNA
cttcagctaccagggtgagt

SEQ ID NO: 44841 - DNA, 20 bp, synthetic construct
  misc_feature 1..20: note = chemically synthesized
  source 1..20: mol_type = other DNA
ttcagctaccagggtgagta

SEQ ID NO: 44842 - DNA, 20 bp, synthetic construct
  misc_feature 1..20: note = chemically synthesized
  source 1..20: mol_type = other DNA
agctaccagggtgagtaagg

SEQ ID NO: 44843 - DNA, 20 bp, synthetic construct
  misc_feature 1..20: note = chemically synthesized
  source 1..20: mol_type = other DNA
gctaccagggtgagtaagga

SEQ ID NO: 44844 - DNA, 20 bp, synthetic construct
  misc_feature 1..20: note = chemically synthesized
  source 1..20: mol_type = other DNA
ggtgagtaaggaaggaccat

SEQ ID NO: 44845 - DNA, 20 bp, synthetic construct
  misc_feature 1..20: note = chemically synthesized
  source 1..20: mol_type = other DNA
gtgagtaaggaaggaccatc

SEQ ID NO: 44846 - DNA, 20 bp, synthetic construct
  misc_feature 1..20: note = chemically synthesized
  source 1..20: mol_type = other DNA
agtaaggaaggaccatcagg

SEQ ID NO: 44847 - DNA, 20 bp, synthetic construct
  misc_feature 1..20: note = chemically synthesized
  source 1..20: mol_type = other DNA
gtaaggaaggaccatcaggt

SEQ ID NO: 44848 - DNA, 20 bp, synthetic construct
  misc_feature 1..20: note = chemically synthesized
  source 1..20: mol_type = other DNA
taaggaaggaccatcaggtg

SEQ ID NO: 44849 - DNA, 20 bp, synthetic construct
  misc_feature 1..20: note = chemically synthesized
  source 1..20: mol_type = other DNA
aaggaaggaccatcaggtgg

SEQ ID NO: 44850 - DNA, 20 bp, synthetic construct
  misc_feature 1..20: note = chemically synthesized
  source 1..20: mol_type = other DNA
gaaggaccatcaggtggggg

SEQ ID NO: 44851 - DNA, 20 bp, synthetic construct
  misc_feature 1..20: note = chemically synthesized
  source 1..20: mol_type = other DNA
aaggaccatcaggtgggggc

SEQ ID NO: 44852 - DNA, 20 bp, synthetic construct
  misc_feature 1..20: note = chemically synthesized
  source 1..20: mol_type = other DNA
ccatcaggtgggggcaggac

SEQ ID NO: 44853 - DNA, 20 bp, synthetic construct
  misc_feature 1..20: note = chemically synthesized
  source 1..20: mol_type = other DNA
gggcaggactagtcgtgtct

SEQ ID NO: 44854 - DNA, 20 bp, synthetic construct
  misc_feature 1..20: note = chemically synthesized
  source 1..20: mol_type = other DNA
ggactagtcgtgtctgagct

SEQ ID NO: 44855 - DNA, 20 bp, synthetic construct
  misc_feature 1..20: note = chemically synthesized
  source 1..20: mol_type = other DNA
actagtcgtgtctgagctca

SEQ ID NO: 44856 - DNA, 20 bp, synthetic construct
  misc_feature 1..20: note = chemically synthesized
  source 1..20: mol_type = other DNA
gtctgagctcagagtctcct

SEQ ID NO: 44857 - DNA, 20 bp, synthetic construct
  misc_feature 1..20: note = chemically synthesized
  source 1..20: mol_type = other DNA
tctgagctcagagtctcctt

SEQ ID NO: 44858 - DNA, 20 bp, synthetic construct
  misc_feature 1..20: note = chemically synthesized
  source 1..20: mol_type = other DNA
gagctcagagtctccttggg

SEQ ID NO: 44859 - DNA, 20 bp, synthetic construct
  misc_feature 1..20: note = chemically synthesized
  source 1..20: mol_type = other DNA
agctcagagtctccttgggc

SEQ ID NO: 44860 - DNA, 20 bp, synthetic construct
  misc_feature 1..20: note = chemically synthesized
  source 1..20: mol_type = other DNA
tccttgggcaggtctttctg

SEQ ID NO: 44861 - DNA, 20 bp, synthetic construct
  misc_feature 1..20: note = chemically synthesized
  source 1..20: mol_type = other DNA
aggtctttctgtggctactg

SEQ ID NO: 44862 - DNA, 20 bp, synthetic construct
  misc_feature 1..20: note = chemically synthesized
  source 1..20: mol_type = other DNA
ggtctttctgtggctactgt

SEQ ID NO: 44863 - DNA, 20 bp, synthetic construct
  misc_feature 1..20: note = chemically synthesized
  source 1..20: mol_type = other DNA
tctttctgtggctactgtgg

SEQ ID NO: 44864 - DNA, 20 bp, synthetic construct
  misc_feature 1..20: note = chemically synthesized
  source 1..20: mol_type = other DNA
ctttctgtggctactgtggg

SEQ ID NO: 44865 - DNA, 20 bp, synthetic construct
  misc_feature 1..20: note = chemically synthesized
  source 1..20: mol_type = other DNA
ctgtggctactgtgggagga

SEQ ID NO: 44866 - DNA, 20 bp, synthetic construct
  misc_feature 1..20: note = chemically synthesized
  source 1..20: mol_type = other DNA
tgtggctactgtgggaggat

SEQ ID NO: 44867 - DNA, 20 bp, synthetic construct
  misc_feature 1..20: note = chemically synthesized
  source 1..20: mol_type = other DNA
gtggctactgtgggaggatg

SEQ ID NO: 44868 - DNA, 20 bp, synthetic construct
  misc_feature 1..20: note = chemically synthesized
  source 1..20: mol_type = other DNA
tggctactgtgggaggatgg

SEQ ID NO: 44869 - DNA, 20 bp, synthetic construct
  misc_feature 1..20: note = chemically synthesized
  source 1..20: mol_type = other DNA
actgtgggaggatgggggtg

SEQ ID NO: 44870 - DNA, 20 bp, synthetic construct
  misc_feature 1..20: note = chemically synthesized
  source 1..20: mol_type = other DNA
gaggatgggggtgtagtttc

SEQ ID NO: 44871 - DNA, 20 bp, synthetic construct
  misc_feature 1..20: note = chemically synthesized
  source 1..20: mol_type = other DNA
aggatgggggtgtagtttcc

SEQ ID NO: 44872 - DNA, 20 bp, synthetic construct
  misc_feature 1..20: note = chemically synthesized
  source 1..20: mol_type = other DNA
gggtgtagtttccaggtcaa

SEQ ID NO: 44873 - DNA, 20 bp, synthetic construct
  misc_feature 1..20: note = chemically synthesized
  source 1..20: mol_type = other DNA
ggtcaatggatttatgttcc

SEQ ID NO: 44874 - DNA, 20 bp, synthetic construct
  misc_feature 1..20: note = chemically synthesized
  source 1..20: mol_type = other DNA
gtcaatggatttatgttcct

SEQ ID NO: 44875 - DNA, 20 bp, synthetic construct
  misc_feature 1..20: note = chemically synthesized
  source 1..20: mol_type = other DNA
ttatgttcctaggacaatta

SEQ ID NO: 44876 - DNA, 20 bp, synthetic construct
  misc_feature 1..20: note = chemically synthesized
  source 1..20: mol_type = other DNA
gctgcctctgctgtgtcatg

SEQ ID NO: 44877 - DNA, 20 bp, synthetic construct
  misc_feature 1..20: note = chemically synthesized
  source 1..20: mol_type = other DNA
ctgcctctgctgtgtcatgc

SEQ ID NO: 44878 - DNA, 20 bp, synthetic construct
  misc_feature 1..20: note = chemically synthesized
  source 1..20: mol_type = other DNA
tgctgtgtcatgcaggtcat

SEQ ID NO: 44879 - DNA, 20 bp, synthetic construct
  misc_feature 1..20: note = chemically synthesized
  source 1..20: mol_type = other DNA
gctgtgtcatgcaggtcatc

SEQ ID NO: 44880 - DNA, 20 bp, synthetic construct
  misc_feature 1..20: note = chemically synthesized
  source 1..20: mol_type = other DNA
tgtcatgcaggtcatcagga

SEQ ID NO: 44881 - DNA, 20 bp, synthetic construct
  misc_feature 1..20: note = chemically synthesized
  source 1..20: mol_type = other DNA
catgcaggtcatcaggaaag

SEQ ID NO: 44882 - DNA, 20 bp, synthetic construct
  misc_feature 1..20: note = chemically synthesized
  source 1..20: mol_type = other DNA
atgcaggtcatcaggaaagt

SEQ ID NO: 44883 - DNA, 20 bp, synthetic construct
  misc_feature 1..20: note = chemically synthesized
  source 1..20: mol_type = other DNA
tgcaggtcatcaggaaagtg

SEQ ID NO: 44884 - DNA, 20 bp, synthetic construct
  misc_feature 1..20: note = chemically synthesized
  source 1..20: mol_type = other DNA
gcaggtcatcaggaaagtgg

SEQ ID NO: 44885 - DNA, 20 bp, synthetic construct
  misc_feature 1..20: note = chemically synthesized
  source 1..20: mol_type = other DNA
gtcatcaggaaagtggggga

SEQ ID NO: 44886 - DNA, 20 bp, synthetic construct
  misc_feature 1..20: note = chemically synthesized
  source 1..20: mol_type = other DNA
tcaggaaagtgggggaaagc

SEQ ID NO: 44887 - DNA, 20 bp, synthetic construct
  misc_feature 1..20: note = chemically synthesized
  source 1..20: mol_type = other DNA
ggaaagtgggggaaagcaag

SEQ ID NO: 44888 - DNA, 20 bp, synthetic construct
  misc_feature 1..20: note = chemically synthesized
  source 1..20: mol_type = other DNA
aagcagtcacgtgacttgcc

SEQ ID NO: 44889 - DNA, 20 bp, synthetic construct
  misc_feature 1..20: note = chemically synthesized
  source 1..20: mol_type = other DNA
ccagctcccatgcaactcaa

SEQ ID NO: 44890 - DNA, 20 bp, synthetic construct
  misc_feature 1..20: note = chemically synthesized
  source 1..20: mol_type = other DNA
cagctcccatgcaactcaaa

SEQ ID NO: 44891 - DNA, 20 bp, synthetic construct
  misc_feature 1..20: note = chemically synthesized
  source 1..20: mol_type = other DNA
tcccatgcaactcaaaaggt

SEQ ID NO: 44892 - DNA, 20 bp, synthetic construct
  misc_feature 1..20: note = chemically synthesized
  source 1..20: mol_type = other DNA
caaaaggttggtctcacttc

SEQ ID NO: 44893 - DNA, 20 bp, synthetic construct
  misc_feature 1..20: note = chemically synthesized
  source 1..20: mol_type = other DNA
gcgtgcaccctcccccgcaa

SEQ ID NO: 44894 - DNA, 20 bp, synthetic construct
  misc_feature 1..20: note = chemically synthesized
  source 1..20: mol_type = other DNA
gcaccgaatctgtttccatg

SEQ ID NO: 44895 - DNA, 20 bp, synthetic construct
  misc_feature 1..20: note = chemically synthesized
  source 1..20: mol_type = other DNA
cgaatctgtttccatgcagt

SEQ ID NO: 44896 - DNA, 20 bp, synthetic construct
  misc_feature 1..20: note = chemically synthesized
  source 1..20: mol_type = other DNA
tctgtttccatgcagtcagt

SEQ ID NO: 44897 - DNA, 20 bp, synthetic construct
  misc_feature 1..20: note = chemically synthesized
  source 1..20: mol_type = other DNA
tttccatgcagtcagtgagc

SEQ ID NO: 44898 - DNA, 20 bp, synthetic construct
  misc_feature 1..20: note = chemically synthesized
  source 1..20: mol_type = other DNA
ttccatgcagtcagtgagca

SEQ ID NO: 44899 - DNA, 20 bp, synthetic construct
  misc_feature 1..20: note = chemically synthesized
  source 1..20: mol_type = other DNA
tgcagtcagtgagcaaggct

SEQ ID NO: 44900 - DNA, 20 bp, synthetic construct
  misc_feature 1..20: note = chemically synthesized
  source 1..20: mol_type = other DNA
gcaaggctgagaacttgccc

SEQ ID NO: 44901 - DNA, 20 bp, synthetic construct
  misc_feature 1..20: note = chemically synthesized
  source 1..20: mol_type = other DNA
caaggctgagaacttgcccc

SEQ ID NO: 44902 - DNA, 20 bp, synthetic construct
  misc_feature 1..20: note = chemically synthesized
  source 1..20: mol_type = other DNA
gagaacttgccccaggctac

SEQ ID NO: 44903 - DNA, 20 bp, synthetic construct
  misc_feature 1..20: note = chemically synthesized
  source 1..20: mol_type = other DNA
aggctaccagctgcgaaacc

SEQ ID NO: 44904 - DNA, 20 bp, synthetic construct
  misc_feature 1..20: note = chemically synthesized
  source 1..20: mol_type = other DNA
ctaccagctgcgaaaccaag

SEQ ID NO: 44905 - DNA, 20 bp, synthetic construct
  misc_feature 1..20: note = chemically synthesized
  source 1..20: mol_type = other DNA
taccagctgcgaaaccaagt

SEQ ID NO: 44906 - DNA, 20 bp, synthetic construct
  misc_feature 1..20: note = chemically synthesized
  source 1..20: mol_type = other DNA
accagctgcgaaaccaagta

SEQ ID NO: 44907 - DNA, 20 bp, synthetic construct
  misc_feature 1..20: note = chemically synthesized
  source 1..20: mol_type = other DNA
gggctgtcctacttccctgc

SEQ ID NO: 44908 - DNA, 20 bp, synthetic construct
  misc_feature 1..20: note = chemically synthesized
  source 1..20: mol_type = other DNA
ctgtcctacttccctgccag

SEQ ID NO: 44909 - DNA, 20 bp, synthetic construct
  misc_feature 1..20: note = chemically synthesized
  source 1..20: mol_type = other DNA
gtcctacttccctgccagtg

SEQ ID NO: 44910 - DNA, 20 bp, synthetic construct
  misc_feature 1..20: note = chemically synthesized
  source 1..20: mol_type = other DNA
ccaccaacccccccactgcc

SEQ ID NO: 44911 - DNA, 20 bp, synthetic construct
  misc_feature 1..20: note = chemically synthesized
  source 1..20: mol_type = other DNA
cccccccactgcccagcccc

SEQ ID NO: 44912 - DNA, 20 bp, synthetic construct
  misc_feature 1..20: note = chemically synthesized
  source 1..20: mol_type = other DNA
cactgcccagcccctagatc

SEQ ID NO: 44913 - DNA, 20 bp, synthetic construct
  misc_feature 1..20: note = chemically synthesized
  source 1..20: mol_type = other DNA
gcccagcccctagatctggc

SEQ ID NO: 44914 - DNA, 20 bp, synthetic construct
  misc_feature 1..20: note = chemically synthesized
  source 1..20: mol_type = other DNA
cccagcccctagatctggcc

SEQ ID NO: 44915 - DNA, 20 bp, synthetic construct
  misc_feature 1..20: note = chemically synthesized
  source 1..20: mol_type = other DNA
agcccctagatctggccagg

SEQ ID NO: 44916 - DNA, 20 bp, synthetic construct
  misc_feature 1..20: note = chemically synthesized
  source 1..20: mol_type = other DNA
cccctagatctggccaggtg

SEQ ID NO: 44917 - DNA, 20 bp, synthetic construct
  misc_feature 1..20: note = chemically synthesized
  source 1..20: mol_type = other DNA
tttttcctgtcatcttttcc

SEQ ID NO: 44918 - DNA, 20 bp, synthetic construct
  misc_feature 1..20: note = chemically synthesized
  source 1..20: mol_type = other DNA
tcatcttttcccagttcctc

SEQ ID NO: 44919 - DNA, 20 bp, synthetic construct
  misc_feature 1..20: note = chemically synthesized
  source 1..20: mol_type = other DNA
tcttttcccagttcctctgg

SEQ ID NO: 44920 - DNA, 20 bp, synthetic construct
  misc_feature 1..20: note = chemically synthesized
  source 1..20: mol_type = other DNA
ccctcccaaatgacccctgt

SEQ ID NO: 44921 - DNA, 20 bp, synthetic construct
  misc_feature 1..20: note = chemically synthesized
  source 1..20: mol_type = other DNA
cctcccaaatgacccctgtg

SEQ ID NO: 44922 - DNA, 20 bp, synthetic construct
  misc_feature 1..20: note = chemically synthesized
  source 1..20: mol_type = other DNA
ccaaatgacccctgtgaggc

SEQ ID NO: 44923 - DNA, 20 bp, synthetic construct
  misc_feature 1..20: note = chemically synthesized
  source 1..20: mol_type = other DNA
caaatgacccctgtgaggca

SEQ ID NO: 44924 - DNA, 20 bp, synthetic construct
  misc_feature 1..20: note = chemically synthesized
  source 1..20: mol_type = other DNA
atgacccctgtgaggcaagg

SEQ ID NO: 44925 - DNA, 20 bp, synthetic construct
  misc_feature 1..20: note = chemically synthesized
  source 1..20: mol_type = other DNA
cctgtgaggcaaggcagaaa

SEQ ID NO: 44926 - DNA, 20 bp, synthetic construct
  misc_feature 1..20: note = chemically synthesized
  source 1..20: mol_type = other DNA
gcaaggcagaaatggcttcc

SEQ ID NO: 44927 - DNA, 20 bp, synthetic construct
  misc_feature 1..20: note = chemically synthesized
  source 1..20: mol_type = other DNA
caaggcagaaatggcttcct

SEQ ID NO: 44928 - DNA, 20 bp, synthetic construct
  misc_feature 1..20: note = chemically synthesized
  source 1..20: mol_type = other DNA
aaggcagaaatggcttccta

SEQ ID NO: 44929 - DNA, 20 bp, synthetic construct
  misc_feature 1..20: note = chemically synthesized
  source 1..20: mol_type = other DNA
aggcagaaatggcttcctag

SEQ ID NO: 44930 - DNA, 20 bp, synthetic construct
  misc_feature 1..20: note = chemically synthesized
  source 1..20: mol_type = other DNA
aaatggcttcctaggggacc

SEQ ID NO: 44931 - DNA, 20 bp, synthetic construct
  misc_feature 1..20: note = chemically synthesized
  source 1..20: mol_type = other DNA
atggcttcctaggggaccca

SEQ ID NO: 44932 - DNA, 20 bp, synthetic construct
  misc_feature 1..20: note = chemically synthesized
  source 1..20: mol_type = other DNA
ggcttcctaggggacccaga

SEQ ID NO: 44933 - DNA, 20 bp, synthetic construct
  misc_feature 1..20: note = chemically synthesized
  source 1..20: mol_type = other DNA
taggggacccagagagccca

SEQ ID NO: 44934 - DNA, 20 bp, synthetic construct
  misc_feature 1..20: note = chemically synthesized
  source 1..20: mol_type = other DNA
aggggacccagagagcccac

SEQ ID NO: 44935 - DNA, 20 bp, synthetic construct
  misc_feature 1..20: note = chemically synthesized
  source 1..20: mol_type = other DNA
ggggacccagagagcccaca

SEQ ID NO: 44936 - DNA, 20 bp, synthetic construct
  misc_feature 1..20: note = chemically synthesized
  source 1..20: mol_type = other DNA
ctctacccctgtattttgct

SEQ ID NO: 44937 - DNA, 20 bp, synthetic construct
  misc_feature 1..20: note = chemically synthesized
  source 1..20: mol_type = other DNA
cttggccctctaaattgact

SEQ ID NO: 44938 - DNA, 20 bp, synthetic construct
  misc_feature 1..20: note = chemically synthesized
  source 1..20: mol_type = other DNA
cctctaaattgactcagctc

SEQ ID NO: 44939 - DNA, 20 bp, synthetic construct
  misc_feature 1..20: note = chemically synthesized
  source 1..20: mol_type = other DNA
ctctaaattgactcagctcc

SEQ ID NO: 44940 - DNA, 20 bp, synthetic construct
  misc_feature 1..20: note = chemically synthesized
  source 1..20: mol_type = other DNA
aaattgactcagctccaggt

SEQ ID NO: 44941 - DNA, 20 bp, synthetic construct
  misc_feature 1..20: note = chemically synthesized
  source 1..20: mol_type = other DNA
aattgactcagctccaggta

SEQ ID NO: 44942 - DNA, 20 bp, synthetic construct
  misc_feature 1..20: note = chemically synthesized
  source 1..20: mol_type = other DNA
gactcagctccaggtaaggt

SEQ ID NO: 44943 - DNA, 20 bp, synthetic construct
  misc_feature 1..20: note = chemically synthesized
  source 1..20: mol_type = other DNA
aaggtcagaatcttctcctg

SEQ ID NO: 44944 - DNA, 20 bp, synthetic construct
  misc_feature 1..20: note = chemically synthesized
  source 1..20: mol_type = other DNA
cagaatcttctcctgtggtc

SEQ ID NO: 44945 - DNA, 20 bp, synthetic construct
  misc_feature 1..20: note = chemically synthesized
  source 1..20: mol_type = other DNA
tctcctgtggtctagatctt

SEQ ID NO: 44946 - DNA, 20 bp, synthetic construct
  misc_feature 1..20: note = chemically synthesized
  source 1..20: mol_type = other DNA
ctcctgtggtctagatcttc

SEQ ID NO: 44947 - DNA, 20 bp, synthetic construct
  misc_feature 1..20: note = chemically synthesized
  source 1..20: mol_type = other DNA
gtctagatcttcaggttccc

SEQ ID NO: 44948 - DNA, 20 bp, synthetic construct
  misc_feature 1..20: note = chemically synthesized
  source 1..20: mol_type = other DNA
agatcttcaggttccccagt

SEQ ID NO: 44949 - DNA, 20 bp, synthetic construct
  misc_feature 1..20: note = chemically synthesized
  source 1..20: mol_type = other DNA
gatcttcaggttccccagtg

SEQ ID NO: 44950 - DNA, 20 bp, synthetic construct
  misc_feature 1..20: note = chemically synthesized
  source 1..20: mol_type = other DNA
ccccagtgaggatgtgtgtt

SEQ ID NO: 44951 - DNA, 20 bp, synthetic construct
  misc_feature 1..20: note = chemically synthesized
  source 1..20: mol_type = other DNA
cccagtgaggatgtgtgttt

SEQ ID NO: 44952 - DNA, 20 bp, synthetic construct
  misc_feature 1..20: note = chemically synthesized
  source 1..20: mol_type = other DNA
ccagtgaggatgtgtgtttg

SEQ ID NO: 44953 - DNA, 20 bp, synthetic construct
  misc_feature 1..20: note = chemically synthesized
  source 1..20: mol_type = other DNA
cagtgaggatgtgtgtttgg

SEQ ID NO: 44954 - DNA, 20 bp, synthetic construct
  misc_feature 1..20: note = chemically synthesized
  source 1..20: mol_type = other DNA
tgaggatgtgtgtttggggg

SEQ ID NO: 44955 - DNA, 20 bp, synthetic construct
  misc_feature 1..20: note = chemically synthesized
  source 1..20: mol_type = other DNA
gatgtgtgtttgggggtaga

SEQ ID NO: 44956 - DNA, 20 bp, synthetic construct
  misc_feature 1..20: note = chemically synthesized
  source 1..20: mol_type = other DNA
gtcccccttttccacttcca

SEQ ID NO: 44957 - DNA, 20 bp, synthetic construct
  misc_feature 1..20: note = chemically synthesized
  source 1..20: mol_type = other DNA
ccttttccacttccacagtt

SEQ ID NO: 44958 - DNA, 20 bp, synthetic construct
  misc_feature 1..20: note = chemically synthesized
  source 1..20: mol_type = other DNA
cttttccacttccacagttt

SEQ ID NO: 44959 - DNA, 20 bp, synthetic construct
  misc_feature 1..20: note = chemically synthesized
  source 1..20: mol_type = other DNA
gtttgggcactcacaatatt

SEQ ID NO: 44960 - DNA, 20 bp, synthetic construct
  misc_feature 1..20: note = chemically synthesized
  source 1..20: mol_type = other DNA
tttgggcactcacaatattt

SEQ ID NO: 44961 - DNA, 20 bp, synthetic construct
  misc_feature 1..20: note = chemically synthesized
  source 1..20: mol_type = other DNA
ttgggcactcacaatatttg

SEQ ID NO: 44962 - DNA, 20 bp, synthetic construct
  misc_feature 1..20: note = chemically synthesized
  source 1..20: mol_type = other DNA
acaatatttggggtgtttcc

SEQ ID NO: 44963 - DNA, 20 bp, synthetic construct
  misc_feature 1..20: note = chemically synthesized
  source 1..20: mol_type = other DNA
caatatttggggtgtttccc

SEQ ID NO: 44964 - DNA, 20 bp, synthetic construct
  misc_feature 1..20: note = chemically synthesized
  source 1..20: mol_type = other DNA
ggggtgtttcccgggtcctg

SEQ ID NO: 44965 - DNA, 20 bp, synthetic construct
  misc_feature 1..20: note = chemically synthesized
  source 1..20: mol_type = other DNA
gggtgtttcccgggtcctgc

SEQ ID NO: 44966 - DNA, 20 bp, synthetic construct
  misc_feature 1..20: note = chemically synthesized
  source 1..20: mol_type = other DNA
gtgtttcccgggtcctgcag

SEQ ID NO: 44967 - DNA, 20 bp, synthetic construct
  misc_feature 1..20: note = chemically synthesized
  source 1..20: mol_type = other DNA
caggagcaatctgcttcttt

SEQ ID NO: 44968 - DNA, 20 bp, synthetic construct
  misc_feature 1..20: note = chemically synthesized
  source 1..20: mol_type = other DNA
ggagcaatctgcttctttca

SEQ ID NO: 44969 - DNA, 20 bp, synthetic construct
  misc_feature 1..20: note = chemically synthesized
  source 1..20: mol_type = other DNA
gagcaatctgcttctttcag

SEQ ID NO: 44970 - DNA, 20 bp, synthetic construct
  misc_feature 1..20: note = chemically synthesized
  source 1..20: mol_type = other DNA
agcaatctgcttctttcaga

SEQ ID NO: 44971 - DNA, 20 bp, synthetic construct
  misc_feature 1..20: note = chemically synthesized
  source 1..20: mol_type = other DNA
agagggtgtgtgcgttctct

SEQ ID NO: 44972 - DNA, 20 bp, synthetic construct
  misc_feature 1..20: note = chemically synthesized
  source 1..20: mol_type = other DNA
gctttcttgatttatttctg

SEQ ID NO: 44973 - DNA, 20 bp, synthetic construct
  misc_feature 1..20: note = chemically synthesized
  source 1..20: mol_type = other DNA
ctttcttgatttatttctgc

SEQ ID NO: 44974 - DNA, 20 bp, synthetic construct
  misc_feature 1..20: note = chemically synthesized
  source 1..20: mol_type = other DNA
tcttgatttatttctgcagg

SEQ ID NO: 44975 - DNA, 20 bp, synthetic construct
  misc_feature 1..20: note = chemically synthesized
  source 1..20: mol_type = other DNA
tctgcaaaaaaaattcctga

SEQ ID NO: 44976 - DNA, 20 bp, synthetic construct
  misc_feature 1..20: note = chemically synthesized
  source 1..20: mol_type = other DNA
ctgcaaaaaaaattcctgat

SEQ ID NO: 44977 - DNA, 20 bp, synthetic construct
  misc_feature 1..20: note = chemically synthesized
  source 1..20: mol_type = other DNA
gcaaaaaaaattcctgatgg

SEQ ID NO: 44978 - DNA, 20 bp, synthetic construct
  misc_feature 1..20: note = chemically synthesized
  source 1..20: mol_type = other DNA
acatgctgctctgtgcatcc

SEQ ID NO: 44979 - DNA, 20 bp, synthetic construct
  misc_feature 1..20: note = chemically synthesized
  source 1..20: mol_type = other DNA
tgctgctctgtgcatccgag

SEQ ID NO: 44980 - DNA, 20 bp, synthetic construct
  misc_feature 1..20: note = chemically synthesized
  source 1..20: mol_type = other DNA
gctgctctgtgcatccgagt

SEQ ID NO: 44981 - DNA, 20 bp, synthetic construct
  misc_feature 1..20: note = chemically synthesized
  source 1..20: mol_type = other DNA
tgctctgtgcatccgagtgg

SEQ ID NO: 44982 - DNA, 20 bp, synthetic construct
  misc_feature 1..20: note = chemically synthesized
  source 1..20: mol_type = other DNA
gccatcaccctctaatttgt

SEQ ID NO: 44983 - DNA, 20 bp, synthetic construct
  misc_feature 1..20: note = chemically synthesized
  source 1..20: mol_type = other DNA
ctatactgccctttgatatc

SEQ ID NO: 44984 - DNA, 20 bp, synthetic construct
  misc_feature 1..20: note = chemically synthesized
  source 1..20: mol_type = other DNA
tatactgccctttgatatca

SEQ ID NO: 44985 - DNA, 20 bp, synthetic construct
  misc_feature 1..20: note = chemically synthesized
  source 1..20: mol_type = other DNA
ccctttgatatcaaggaatc

SEQ ID NO: 44986 - DNA, 20 bp, synthetic construct
  misc_feature 1..20: note = chemically synthesized
  source 1..20: mol_type = other DNA
cctttgatatcaaggaatca

SEQ ID NO: 44987 - DNA, 20 bp, synthetic construct
  misc_feature 1..20: note = chemically synthesized
  source 1..20: mol_type = other DNA
ggaatcaaggacgtgatgtt

SEQ ID NO: 44988 - DNA, 20 bp, synthetic construct
  misc_feature 1..20: note = chemically synthesized
  source 1..20: mol_type = other DNA
gaatcaaggacgtgatgttg

SEQ ID NO: 44989 - DNA, 20 bp, synthetic construct
  misc_feature 1..20: note = chemically synthesized
  source 1..20: mol_type = other DNA
aatcaaggacgtgatgttga

SEQ ID NO: 44990 - DNA, 20 bp, synthetic construct
  misc_feature 1..20: note = chemically synthesized
  source 1..20: mol_type = other DNA
atcaaggacgtgatgttgag

SEQ ID NO: 44991 - DNA, 20 bp, synthetic construct
  misc_feature 1..20: note = chemically synthesized
  source 1..20: mol_type = other DNA
aaggacgtgatgttgagggg

SEQ ID NO: 44992 - DNA, 20 bp, synthetic construct
  misc_feature 1..20: note = chemically synthesized
  source 1..20: mol_type = other DNA
aggacgtgatgttgaggggt

SEQ ID NO: 44993 - DNA, 20 bp, synthetic construct
  misc_feature 1..20: note = chemically synthesized
  source 1..20: mol_type = other DNA
acgtgatgttgaggggtggg

SEQ ID NO: 44994 - DNA, 20 bp, synthetic construct
  misc_feature 1..20: note = chemically synthesized
  source 1..20: mol_type = other DNA
tgatgttgaggggtgggcag

SEQ ID NO: 44995 - DNA, 20 bp, synthetic construct
  misc_feature 1..20: note = chemically synthesized
  source 1..20: mol_type = other DNA
tggatacactctttacccct

SEQ ID NO: 44996 - DNA, 20 bp, synthetic construct
  misc_feature 1..20: note = chemically synthesized
  source 1..20: mol_type = other DNA
ggatacactctttacccctt

SEQ ID NO: 44997 - DNA, 20 bp, synthetic construct
  misc_feature 1..20: note = chemically synthesized
  source 1..20: mol_type = other DNA
gatacactctttacccctta

SEQ ID NO: 44998 - DNA, 20 bp, synthetic construct
  misc_feature 1..20: note = chemically synthesized
  source 1..20: mol_type = other DNA
tacactctttaccccttagg

SEQ ID NO: 44999 - DNA, 20 bp, synthetic construct
  misc_feature 1..20: note = chemically synthesized
  source 1..20: mol_type = other DNA
accccttagggagctatatc

SEQ ID NO: 45000 - DNA, 20 bp, synthetic construct
  misc_feature 1..20: note = chemically synthesized
  source 1..20: mol_type = other DNA
tagggagctatatctagatt

SEQ ID NO: 45001 - DNA, 20 bp, synthetic construct
  misc_feature 1..20: note = chemically synthesized
  source 1..20: mol_type = other DNA
gatttagatattgccaattc

SEQ ID NO: 45002 - DNA, 20 bp, synthetic construct
  misc_feature 1..20: note = chemically synthesized
  source 1..20: mol_type = other DNA
attcaagataacttaattga

SEQ ID NO: 45003 - DNA, 20 bp, synthetic construct
  misc_feature 1..20: note = chemically synthesized
  source 1..20: mol_type = other DNA
cacacacacatctgcatgac

SEQ ID NO: 45004 - DNA, 20 bp, synthetic construct
  misc_feature 1..20: note = chemically synthesized
  source 1..20: mol_type = other DNA
ctgcatgacaagatttttaa

SEQ ID NO: 45005 - DNA, 20 bp, synthetic construct
  misc_feature 1..20: note = chemically synthesized
  source 1..20: mol_type = other DNA
acaagatttttaatagttga

SEQ ID NO: 45006 - DNA, 20 bp, synthetic construct
  misc_feature 1..20: note = chemically synthesized
  source 1..20: mol_type = other DNA
gaataactaataattgtcca

SEQ ID NO: 45007 - DNA, 20 bp, synthetic construct
  misc_feature 1..20: note = chemically synthesized
  source 1..20: mol_type = other DNA
aataactaataattgtccac

SEQ ID NO: 45008 - DNA, 20 bp, synthetic construct
  misc_feature 1..20: note = chemically synthesized
  source 1..20: mol_type = other DNA
aataattgtccacaggcaat

SEQ ID NO: 45009 - DNA, 20 bp, synthetic construct
  misc_feature 1..20: note = chemically synthesized
  source 1..20: mol_type = other DNA
ataattgtccacaggcaata

SEQ ID NO: 45010 - DNA, 20 bp, synthetic construct
  misc_feature 1..20: note = chemically synthesized
  source 1..20: mol_type = other DNA
taattgtccacaggcaataa

SEQ ID NO: 45011 - DNA, 20 bp, synthetic construct
  misc_feature 1..20: note = chemically synthesized
  source 1..20: mol_type = other DNA
acaggcaataagggcttttt

SEQ ID NO: 45012 - DNA, 20 bp, synthetic construct
  misc_feature 1..20: note = chemically synthesized
  source 1..20: mol_type = other DNA
taagggctttttaagcaaaa

SEQ ID NO: 45013 - DNA, 20 bp, synthetic construct
  misc_feature 1..20: note = chemically synthesized
  source 1..20: mol_type = other DNA
agcaaaacagttgtgataaa

SEQ ID NO: 45014 - DNA, 20 bp, synthetic construct
  misc_feature 1..20: note = chemically synthesized
  source 1..20: mol_type = other DNA
gcaaaacagttgtgataaac

SEQ ID NO: 45015 - DNA, 20 bp, synthetic construct
  misc_feature 1..20: note = chemically synthesized
  source 1..20: mol_type = other DNA
tgtgataaacaggtcattct

SEQ ID NO: 45016 - DNA, 20 bp, synthetic construct
  misc_feature 1..20: note = chemically synthesized
  source 1..20: mol_type = other DNA
taaacaggtcattcttagaa

SEQ ID NO: 45017 - DNA, 20 bp, synthetic construct
  misc_feature 1..20: note = chemically synthesized
  source 1..20: mol_type = other DNA
tcattcttagaatagtaatc

SEQ ID NO: 45018 - DNA, 20 bp, synthetic construct
  misc_feature 1..20: note = chemically synthesized
  source 1..20: mol_type = other DNA
tagaatagtaatccagccaa

SEQ ID NO: 45019 - DNA, 20 bp, synthetic construct
  misc_feature 1..20: note = chemically synthesized
  source 1..20: mol_type = other DNA
tagtaatccagccaatagta

SEQ ID NO: 45020 - DNA, 20 bp, synthetic construct
  misc_feature 1..20: note = chemically synthesized
  source 1..20: mol_type = other DNA
agtaatccagccaatagtac

SEQ ID NO: 45021 - DNA, 20 bp, synthetic construct
  misc_feature 1..20: note = chemically synthesized
  source 1..20: mol_type = other DNA
agccaatagtacaggttgct

SEQ ID NO: 45022 - DNA, 20 bp, synthetic construct
  misc_feature 1..20: note = chemically synthesized
  source 1..20: mol_type = other DNA
ccaatagtacaggttgctta

SEQ ID NO: 45023 - DNA, 20 bp, synthetic construct
  misc_feature 1..20: note = chemically synthesized
  source 1..20: mol_type = other DNA
cttagagattatgtcattac

SEQ ID NO: 45024 - DNA, 20 bp, synthetic construct
  misc_feature 1..20: note = chemically synthesized
  source 1..20: mol_type = other DNA
tagagattatgtcattacca

SEQ ID NO: 45025 - DNA, 20 bp, synthetic construct
  misc_feature 1..20: note = chemically synthesized
  source 1..20: mol_type = other DNA
ccagagttaaaattctataa

SEQ ID NO: 45026 - DNA, 20 bp, synthetic construct
  misc_feature 1..20: note = chemically synthesized
  source 1..20: mol_type = other DNA
gcttctcactccctaccact

SEQ ID NO: 45027 - DNA, 20 bp, synthetic construct
  misc_feature 1..20: note = chemically synthesized
  source 1..20: mol_type = other DNA
cttctcactccctaccactg

SEQ ID NO: 45028 - DNA, 20 bp, synthetic construct
  misc_feature 1..20: note = chemically synthesized
  source 1..20: mol_type = other DNA
cactccctaccactgaggac

SEQ ID NO: 45029 - DNA, 20 bp, synthetic construct
  misc_feature 1..20: note = chemically synthesized
  source 1..20: mol_type = other DNA
tgaggacaagtttatgtcct

SEQ ID NO: 45030 - DNA, 20 bp, synthetic construct
  misc_feature 1..20: note = chemically synthesized
  source 1..20: mol_type = other DNA
gaggacaagtttatgtcctt

SEQ ID NO: 45031 - DNA, 20 bp, synthetic construct
  misc_feature 1..20: note = chemically synthesized
  source 1..20: mol_type = other DNA
ttctccactttacatatcaa

SEQ ID NO: 45032 - DNA, 20 bp, synthetic construct
  misc_feature 1..20: note = chemically synthesized
  source 1..20: mol_type = other DNA
actttacatatcaacggcac

SEQ ID NO: 45033 - DNA, 20 bp, synthetic construct
  misc_feature 1..20: note = chemically synthesized
  source 1..20: mol_type = other DNA
tggttctttatctaactctc

SEQ ID NO: 45034 - DNA, 20 bp, synthetic construct
  misc_feature 1..20: note = chemically synthesized
  source 1..20: mol_type = other DNA
ctttatctaactctctggca

SEQ ID NO: 45035 - DNA, 20 bp, synthetic construct
  misc_feature 1..20: note = chemically synthesized
  source 1..20: mol_type = other DNA
tatctaactctctggcacag

SEQ ID NO: 45036 - DNA, 20 bp, synthetic construct
  misc_feature 1..20: note = chemically synthesized
  source 1..20: mol_type = other DNA
atctaactctctggcacagc

SEQ ID NO: 45037 - DNA, 20 bp, synthetic construct
  misc_feature 1..20: note = chemically synthesized
  source 1..20: mol_type = other DNA
ctaactctctggcacagcag

SEQ ID NO: 45038 - DNA, 20 bp, synthetic construct
  misc_feature 1..20: note = chemically synthesized
  source 1..20: mol_type = other DNA
gagtttgttttcttctgctt

SEQ ID NO: 45039 - DNA, 20 bp, synthetic construct
  misc_feature 1..20: note = chemically synthesized
  source 1..20: mol_type = other DNA
gtttgttttcttctgcttca

SEQ ID NO: 45040 - DNA, 20 bp, synthetic construct
  misc_feature 1..20: note = chemically synthesized
  source 1..20: mol_type = other DNA
gagctttgaatttactattt

SEQ ID NO: 45041 - DNA, 20 bp, synthetic construct
  misc_feature 1..20: note = chemically synthesized
  source 1..20: mol_type = other DNA
ttcagcttctaaactttatt

SEQ ID NO: 45042 - DNA, 20 bp, synthetic construct
  misc_feature 1..20: note = chemically synthesized
  source 1..20: mol_type = other DNA
tatttggcaatgccttccca

SEQ ID NO: 45043 - DNA, 20 bp, synthetic construct
  misc_feature 1..20: note = chemically synthesized
  source 1..20: mol_type = other DNA
ttggcaatgccttcccatgg

SEQ ID NO: 45044 - DNA, 20 bp, synthetic construct
  misc_feature 1..20: note = chemically synthesized
  source 1..20: mol_type = other DNA
tttctccttaatttcattct

SEQ ID NO: 45045 - DNA, 20 bp, synthetic construct
  misc_feature 1..20: note = chemically synthesized
  source 1..20: mol_type = other DNA
aattttatgtatgttctacc

SEQ ID NO: 45046 - DNA, 20 bp, synthetic construct
  misc_feature 1..20: note = chemically synthesized
  source 1..20: mol_type = other DNA
tctacctagattataatctt

SEQ ID NO: 45047 - DNA, 20 bp, synthetic construct
  misc_feature 1..20: note = chemically synthesized
  source 1..20: mol_type = other DNA
tacctagattataatcttca

SEQ ID NO: 45048 - DNA, 20 bp, synthetic construct
  misc_feature 1..20: note = chemically synthesized
  source 1..20: mol_type = other DNA
acctagattataatcttcag

SEQ ID NO: 45049 - DNA, 20 bp, synthetic construct
  misc_feature 1..20: note = chemically synthesized
  source 1..20: mol_type = other DNA
agattataatcttcagagga

SEQ ID NO: 45050 - DNA, 20 bp, synthetic construct
  misc_feature 1..20: note = chemically synthesized
  source 1..20: mol_type = other DNA
aaattatgacatttatttaa

SEQ ID NO: 45051 - DNA, 20 bp, synthetic construct
  misc_feature 1..20: note = chemically synthesized
  source 1..20: mol_type = other DNA
aacaaatgtttgaaaataca

SEQ ID NO: 45052 - DNA, 20 bp, synthetic construct
  misc_feature 1..20: note = chemically synthesized
  source 1..20: mol_type = other DNA
acaaatgtttgaaaatacat

SEQ ID NO: 45053 - DNA, 20 bp, synthetic construct
  misc_feature 1..20: note = chemically synthesized
  source 1..20: mol_type = other DNA
atgtttgaaaatacatggga

SEQ ID NO: 45054 - DNA, 20 bp, synthetic construct
  misc_feature 1..20: note = chemically synthesized
  source 1..20: mol_type = other DNA
cacttgaaattgcttgtgta

SEQ ID NO: 45055 - DNA, 20 bp, synthetic construct
  misc_feature 1..20: note = chemically synthesized
  source 1..20: mol_type = other DNA
aaattgcttgtgtaaagaaa

SEQ ID NO: 45056 - DNA, 20 bp, synthetic construct
  misc_feature 1..20: note = chemically synthesized
  source 1..20: mol_type = other DNA
gtgtaaagaaacagttttat

SEQ ID NO: 45057 - DNA, 20 bp, synthetic construct
  misc_feature 1..20: note = chemically synthesized
  source 1..20: mol_type = other DNA
aaagaaacagttttatcagt

SEQ ID NO: 45058 - DNA, 20 bp, synthetic construct
  misc_feature 1..20: note = chemically synthesized
  source 1..20: mol_type = other DNA
aagaaacagttttatcagtt

SEQ ID NO: 45059 - DNA, 20 bp, synthetic construct
  misc_feature 1..20: note = chemically synthesized
  source 1..20: mol_type = other DNA
agttaggatttaatcaatgt

SEQ ID NO: 45060 - DNA, 20 bp, synthetic construct
  misc_feature 1..20: note = chemically synthesized
  source 1..20: mol_type = other DNA
taggatttaatcaatgtcag

SEQ ID NO: 45061 - DNA, 20 bp, synthetic construct
  misc_feature 1..20: note = chemically synthesized
  source 1..20: mol_type = other DNA
caatgtcagaagcaatgata

SEQ ID NO: 45062 - DNA, 20 bp, synthetic construct
  misc_feature 1..20: note = chemically synthesized
  source 1..20: mol_type = other DNA
aatgtcagaagcaatgatat

SEQ ID NO: 45063 - DNA, 20 bp, synthetic construct
  misc_feature 1..20: note = chemically synthesized
  source 1..20: mol_type = other DNA
gcaatgatataggaaaaatc

SEQ ID NO: 45064 - DNA, 20 bp, synthetic construct
  misc_feature 1..20: note = chemically synthesized
  source 1..20: mol_type = other DNA
caatgatataggaaaaatcg

SEQ ID NO: 45065 - DNA, 20 bp, synthetic construct
  misc_feature 1..20: note = chemically synthesized
  source 1..20: mol_type = other DNA
tataggaaaaatcgaggaat

SEQ ID NO: 45066 - DNA, 20 bp, synthetic construct
  misc_feature 1..20: note = chemically synthesized
  source 1..20: mol_type = other DNA
ggaaaaatcgaggaataaga

SEQ ID NO: 45067 - DNA, 20 bp, synthetic construct
  misc_feature 1..20: note = chemically synthesized
  source 1..20: mol_type = other DNA
atcgaggaataagacagtta

SEQ ID NO: 45068 - DNA, 20 bp, synthetic construct
  misc_feature 1..20: note = chemically synthesized
  source 1..20: mol_type = other DNA
ggaataagacagttatggat

SEQ ID NO: 45069 - DNA, 20 bp, synthetic construct
  misc_feature 1..20: note = chemically synthesized
  source 1..20: mol_type = other DNA
gaataagacagttatggata

SEQ ID NO: 45070 - DNA, 20 bp, synthetic construct
  misc_feature 1..20: note = chemically synthesized
  source 1..20: mol_type = other DNA
ataagacagttatggataag

SEQ ID NO: 45071 - DNA, 20 bp, synthetic construct
  misc_feature 1..20: note = chemically synthesized
  source 1..20: mol_type = other DNA
agaaatcaacaaactcttaa

SEQ ID NO: 45072 - DNA, 20 bp, synthetic construct
  misc_feature 1..20: note = chemically synthesized
  source 1..20: mol_type = other DNA
cttaaaagatattgcctcaa

SEQ ID NO: 45073 - DNA, 20 bp, synthetic construct
  misc_feature 1..20: note = chemically synthesized
  source 1..20: mol_type = other DNA
agatattgcctcaaaagcat

SEQ ID NO: 45074 - DNA, 20 bp, synthetic construct
  misc_feature 1..20: note = chemically synthesized
  source 1..20: mol_type = other DNA
atattgcctcaaaagcataa

SEQ ID NO: 45075 - DNA, 20 bp, synthetic construct
  misc_feature 1..20: note = chemically synthesized
  source 1..20: mol_type = other DNA
tattgcctcaaaagcataag

SEQ ID NO: 45076 - DNA, 20 bp, synthetic construct
  misc_feature 1..20: note = chemically synthesized
  source 1..20: mol_type = other DNA
tcaaaagcataagaggaaat

SEQ ID NO: 45077 - DNA, 20 bp, synthetic construct
  misc_feature 1..20: note = chemically synthesized
  source 1..20: mol_type = other DNA
caaaagcataagaggaaata

SEQ ID NO: 45078 - DNA, 20 bp, synthetic construct
  misc_feature 1..20: note = chemically synthesized
  source 1..20: mol_type = other DNA
aaaagcataagaggaaataa

SEQ ID NO: 45079 - DNA, 20 bp, synthetic construct
  misc_feature 1..20: note = chemically synthesized
  source 1..20: mol_type = other DNA
aagggtttatacatgacttt

SEQ ID NO: 45080 - DNA, 20 bp, synthetic construct
  misc_feature 1..20: note = chemically synthesized
  source 1..20: mol_type = other DNA
tgacttttagaacactgcct

SEQ ID NO: 45081 - DNA, 20 bp, synthetic construct
  misc_feature 1..20: note = chemically synthesized
  source 1..20: mol_type = other DNA
tagaacactgccttggtttt

SEQ ID NO: 45082 - DNA, 20 bp, synthetic construct
  misc_feature 1..20: note = chemically synthesized
  source 1..20: mol_type = other DNA
tgccttggtttttggataaa

SEQ ID NO: 45083 - DNA, 20 bp, synthetic construct
  misc_feature 1..20: note = chemically synthesized
  source 1..20: mol_type = other DNA
gccttggtttttggataaat

SEQ ID NO: 45084 - DNA, 20 bp, synthetic construct
  misc_feature 1..20: note = chemically synthesized
  source 1..20: mol_type = other DNA
ccttggtttttggataaatg

SEQ ID NO: 45085 - DNA, 20 bp, synthetic construct
  misc_feature 1..20: note = chemically synthesized
  source 1..20: mol_type = other DNA
tggtttttggataaatgggg

SEQ ID NO: 45086 - DNA, 20 bp, synthetic construct
  misc_feature 1..20: note = chemically synthesized
  source 1..20: mol_type = other DNA
atggggaagttgtttgaaaa

SEQ ID NO: 45087 - DNA, 20 bp, synthetic construct
  misc_feature 1..20: note = chemically synthesized
  source 1..20: mol_type = other DNA
tggggaagttgtttgaaaac

SEQ ID NO: 45088 - DNA, 20 bp, synthetic construct
  misc_feature 1..20: note = chemically synthesized
  source 1..20: mol_type = other DNA
gggaagttgtttgaaaacag

SEQ ID NO: 45089 - DNA, 20 bp, synthetic construct
  misc_feature 1..20: note = chemically synthesized
  source 1..20: mol_type = other DNA
ggaagttgtttgaaaacagg

SEQ ID NO: 45090 - DNA, 20 bp, synthetic construct
  misc_feature 1..20: note = chemically synthesized
  source 1..20: mol_type = other DNA
gaagttgtttgaaaacagga

SEQ ID NO: 45091 - DNA, 20 bp, synthetic construct
  misc_feature 1..20: note = chemically synthesized
  source 1..20: mol_type = other DNA
tttgaaaacaggagggatcc

SEQ ID NO: 45092 - DNA, 20 bp, synthetic construct
  misc_feature 1..20: note = chemically synthesized
  source 1..20: mol_type = other DNA
gagggatcctagatattcct

SEQ ID NO: 45093 - DNA, 20 bp, synthetic construct
  misc_feature 1..20: note = chemically synthesized
  source 1..20: mol_type = other DNA
tcctagatattccttagtct

SEQ ID NO: 45094 - DNA, 20 bp, synthetic construct
  misc_feature 1..20: note = chemically synthesized
  source 1..20: mol_type = other DNA
cctagatattccttagtctg

SEQ ID NO: 45095 - DNA, 20 bp, synthetic construct
  misc_feature 1..20: note = chemically synthesized
  source 1..20: mol_type = other DNA
tagatattccttagtctgag

SEQ ID NO: 45096 - DNA, 20 bp, synthetic construct
  misc_feature 1..20: note = chemically synthesized
  source 1..20: mol_type = other DNA
agatattccttagtctgagg

SEQ ID NO: 45097 - DNA, 20 bp, synthetic construct
  misc_feature 1..20: note = chemically synthesized
  source 1..20: mol_type = other DNA
atattccttagtctgaggag

SEQ ID NO: 45098 - DNA, 20 bp, synthetic construct
  misc_feature 1..20: note = chemically synthesized
  source 1..20: mol_type = other DNA
tagtctgaggaggagcaatt

SEQ ID NO: 45099 - DNA, 20 bp, synthetic construct
  misc_feature 1..20: note = chemically synthesized
  source 1..20: mol_type = other DNA
gcaattaagattcacttgtt

SEQ ID NO: 45100 - DNA, 20 bp, synthetic construct
  misc_feature 1..20: note = chemically synthesized
  source 1..20: mol_type = other DNA
aattaagattcacttgttta

SEQ ID NO: 45101 - DNA, 20 bp, synthetic construct
  misc_feature 1..20: note = chemically synthesized
  source 1..20: mol_type = other DNA
attaagattcacttgtttag

SEQ ID NO: 45102 - DNA, 20 bp, synthetic construct
  misc_feature 1..20: note = chemically synthesized
  source 1..20: mol_type = other DNA
agattcacttgtttagaggc

SEQ ID NO: 45103 - DNA, 20 bp, synthetic construct
  misc_feature 1..20: note = chemically synthesized
  source 1..20: mol_type = other DNA
gattcacttgtttagaggct

SEQ ID NO: 45104 - DNA, 20 bp, synthetic construct
  misc_feature 1..20: note = chemically synthesized
  source 1..20: mol_type = other DNA
ttcacttgtttagaggctgg

SEQ ID NO: 45105 - DNA, 20 bp, synthetic construct
  misc_feature 1..20: note = chemically synthesized
  source 1..20: mol_type = other DNA
acttgtttagaggctgggag

SEQ ID NO: 45106 - DNA, 20 bp, synthetic construct
  misc_feature 1..20: note = chemically synthesized
  source 1..20: mol_type = other DNA
tgtttagaggctgggagtgg

SEQ ID NO: 45107 - DNA, 20 bp, synthetic construct
  misc_feature 1..20: note = chemically synthesized
  source 1..20: mol_type = other DNA
gtggctcacgcctgtaatcc

SEQ ID NO: 45108 - DNA, 20 bp, synthetic construct
  misc_feature 1..20: note = chemically synthesized
  source 1..20: mol_type = other DNA
cgcctgtaatcccagaattt

SEQ ID NO: 45109 - DNA, 20 bp, synthetic construct
  misc_feature 1..20: note = chemically synthesized
  source 1..20: mol_type = other DNA
gcctgtaatcccagaatttt

SEQ ID NO: 45110 - DNA, 20 bp, synthetic construct
  misc_feature 1..20: note = chemically synthesized
  source 1..20: mol_type = other DNA
ctgtaatcccagaattttgg

SEQ ID NO: 45111 - DNA, 20 bp, synthetic construct
  misc_feature 1..20: note = chemically synthesized
  source 1..20: mol_type = other DNA
tgtaatcccagaattttggg

SEQ ID NO: 45112 - DNA, 20 bp, synthetic construct
  misc_feature 1..20: note = chemically synthesized
  source 1..20: mol_type = other DNA
tcccagaattttgggaggcc

SEQ ID NO: 45113 - DNA, 20 bp, synthetic construct
  misc_feature 1..20: note = chemically synthesized
  source 1..20: mol_type = other DNA
cccagaattttgggaggcca

SEQ ID NO: 45114 - DNA, 20 bp, synthetic construct
  misc_feature 1..20: note = chemically synthesized
  source 1..20: mol_type = other DNA
agaattttgggaggccaagg

SEQ ID NO: 45115 - DNA, 20 bp, synthetic construct
  misc_feature 1..20: note = chemically synthesized
  source 1..20: mol_type = other DNA
gaattttgggaggccaaggc

SEQ ID NO: 45116 - DNA, 20 bp, synthetic construct
  misc_feature 1..20: note = chemically synthesized
  source 1..20: mol_type = other DNA
ttttgggaggccaaggcagg

SEQ ID NO: 45117 - DNA, 20 bp, synthetic construct
  misc_feature 1..20: note = chemically synthesized
  source 1..20: mol_type = other DNA
ccaaggcaggcagatcacct

SEQ ID NO: 45118 - DNA, 20 bp, synthetic construct
  misc_feature 1..20: note = chemically synthesized
  source 1..20: mol_type = other DNA
caaggcaggcagatcacctg

SEQ ID NO: 45119 - DNA, 20 bp, synthetic construct
  misc_feature 1..20: note = chemically synthesized
  source 1..20: mol_type = other DNA
caggcagatcacctgaggtc

SEQ ID NO: 45120 - DNA, 20 bp, synthetic construct
  misc_feature 1..20: note = chemically synthesized
  source 1..20: mol_type = other DNA
ggcagatcacctgaggtcaa

SEQ ID NO: 45121 - DNA, 20 bp, synthetic construct
  misc_feature 1..20: note = chemically synthesized
  source 1..20: mol_type = other DNA
tcacctgaggtcaagagttc

SEQ ID NO: 45122 - DNA, 20 bp, synthetic construct
  misc_feature 1..20: note = chemically synthesized
  source 1..20: mol_type = other DNA
tcaagagttcaagaccaacc

SEQ ID NO: 45123 - DNA, 20 bp, synthetic construct
  misc_feature 1..20: note = chemically synthesized
  source 1..20: mol_type = other DNA
caagaccaacctggccaaca

SEQ ID NO: 45124 - DNA, 20 bp, synthetic construct
  misc_feature 1..20: note = chemically synthesized
  source 1..20: mol_type = other DNA
ctctacaaaaatacaaaaat

SEQ ID NO: 45125 - DNA, 20 bp, synthetic construct
  misc_feature 1..20: note = chemically synthesized
  source 1..20: mol_type = other DNA
acaaaaatacaaaaattaga

SEQ ID NO: 45126 - DNA, 20 bp, synthetic construct
  misc_feature 1..20: note = chemically synthesized
  source 1..20: mol_type = other DNA
caaaaatacaaaaattagac

SEQ ID NO: 45127 - DNA, 20 bp, synthetic construct
  misc_feature 1..20: note = chemically synthesized
  source 1..20: mol_type = other DNA
caaaaattagacaggcatga

SEQ ID NO: 45128 - DNA, 20 bp, synthetic construct
  misc_feature 1..20: note = chemically synthesized
  source 1..20: mol_type = other DNA
aattagacaggcatgatggc

SEQ ID NO: 45129 - DNA, 20 bp, synthetic construct
  misc_feature 1..20: note = chemically synthesized
  source 1..20: mol_type = other DNA
atggcaagtgcctgtaatcc

SEQ ID NO: 45130 - DNA, 20 bp, synthetic construct
  misc_feature 1..20: note = chemically synthesized
  source 1..20: mol_type = other DNA
tgcctgtaatcccagctact

SEQ ID NO: 45131 - DNA, 20 bp, synthetic construct
  misc_feature 1..20: note = chemically synthesized
  source 1..20: mol_type = other DNA
gcctgtaatcccagctactt

SEQ ID NO: 45132 - DNA, 20 bp, synthetic construct
  misc_feature 1..20: note = chemically synthesized
  source 1..20: mol_type = other DNA
ctgtaatcccagctacttgg

SEQ ID NO: 45133 - DNA, 20 bp, synthetic construct
  misc_feature 1..20: note = chemically synthesized
  source 1..20: mol_type = other DNA
tgtaatcccagctacttggg

SEQ ID NO: 45134 - DNA, 20 bp, synthetic construct
  misc_feature 1..20: note = chemically synthesized
  source 1..20: mol_type = other DNA
tcccagctacttgggaggct

SEQ ID NO: 45135 - DNA, 20 bp, synthetic construct
  misc_feature 1..20: note = chemically synthesized
  source 1..20: mol_type = other DNA
cccagctacttgggaggctg

SEQ ID NO: 45136 - DNA, 20 bp, synthetic construct
  misc_feature 1..20: note = chemically synthesized
  source 1..20: mol_type = other DNA
agctacttgggaggctgagg

SEQ ID NO: 45137 - DNA, 20 bp, synthetic construct
  misc_feature 1..20: note = chemically synthesized
  source 1..20: mol_type = other DNA
gctacttgggaggctgagga

SEQ ID NO: 45138 - DNA, 20 bp, synthetic construct
  misc_feature 1..20: note = chemically synthesized
  source 1..20: mol_type = other DNA
tacttgggaggctgaggaag

SEQ ID NO: 45139 - DNA, 20 bp, synthetic construct
  misc_feature 1..20: note = chemically synthesized
  source 1..20: mol_type = other DNA
gaaggagaattgcttgaacc

SEQ ID NO: 45140 - DNA, 20 bp, synthetic construct
  misc_feature 1..20: note = chemically synthesized
  source 1..20: mol_type = other DNA
ggagaattgcttgaacctgg

SEQ ID NO: 45141 - DNA, 20 bp, synthetic construct
  misc_feature 1..20: note = chemically synthesized
  source 1..20: mol_type = other DNA
gagaattgcttgaacctgga

SEQ ID NO: 45142 - DNA, 20 bp, synthetic construct
  misc_feature 1..20: note = chemically synthesized
  source 1..20: mol_type = other DNA
aattgcttgaacctggaagg

SEQ ID NO: 45143 - DNA, 20 bp, synthetic construct
  misc_feature 1..20: note = chemically synthesized
  source 1..20: mol_type = other DNA
attgcttgaacctggaaggc

SEQ ID NO: 45144 - DNA, 20 bp, synthetic construct
  misc_feature 1..20: note = chemically synthesized
  source 1..20: mol_type = other DNA
tgcttgaacctggaaggcag

SEQ ID NO: 45145 - DNA, 20 bp, synthetic construct
  misc_feature 1..20: note = chemically synthesized
  source 1..20: mol_type = other DNA
aacctggaaggcaggagttg

SEQ ID NO: 45146 - DNA, 20 bp, synthetic construct
  misc_feature 1..20: note = chemically synthesized
  source 1..20: mol_type = other DNA
tggaaggcaggagttgcagt

SEQ ID NO: 45147 - DNA, 20 bp, synthetic construct
  misc_feature 1..20: note = chemically synthesized
  source 1..20: mol_type = other DNA
ggcaggagttgcagtgagcc

SEQ ID NO: 45148 - DNA, 20 bp, synthetic construct
  misc_feature 1..20: note = chemically synthesized
  source 1..20: mol_type = other DNA
gagatcataccactgcactc

SEQ ID NO: 45149 - DNA, 20 bp, synthetic construct
  misc_feature 1..20: note = chemically synthesized
  source 1..20: mol_type = other DNA
cataccactgcactccagcc

SEQ ID NO: 45150 - DNA, 20 bp, synthetic construct
  misc_feature 1..20: note = chemically synthesized
  source 1..20: mol_type = other DNA
ataccactgcactccagcct

SEQ ID NO: 45151 - DNA, 20 bp, synthetic construct
  misc_feature 1..20: note = chemically synthesized
  source 1..20: mol_type = other DNA
ctgcactccagcctgggtga

SEQ ID NO: 45152 - DNA, 20 bp, synthetic construct
  misc_feature 1..20: note = chemically synthesized
  source 1..20: mol_type = other DNA
tccagcctgggtgacagaac

SEQ ID NO: 45153 - DNA, 20 bp, synthetic construct
  misc_feature 1..20: note = chemically synthesized
  source 1..20: mol_type = other DNA
actctgtctcaaaaaaaaaa

SEQ ID NO: 45154 - DNA, 20 bp, synthetic construct
  misc_feature 1..20: note = chemically synthesized
  source 1..20: mol_type = other DNA
tctgtctcaaaaaaaaaaaa

SEQ ID NO: 45155 - DNA, 20 bp, synthetic construct
  misc_feature 1..20: note = chemically synthesized
  source 1..20: mol_type = other DNA
tgtctcaaaaaaaaaaaaga

SEQ ID NO: 45156 - DNA, 20 bp, synthetic construct
  misc_feature 1..20: note = chemically synthesized
  source 1..20: mol_type = other DNA
aaaaaaaaagagagattcaa

SEQ ID NO: 45157 - DNA, 20 bp, synthetic construct
  misc_feature 1..20: note = chemically synthesized
  source 1..20: mol_type = other DNA
attcaaaagattcacttgtt

SEQ ID NO: 45158 - DNA, 20 bp, synthetic construct
  misc_feature 1..20: note = chemically synthesized
  source 1..20: mol_type = other DNA
ttcaaaagattcacttgttt

SEQ ID NO: 45159 - DNA, 20 bp, synthetic construct
  misc_feature 1..20: note = chemically synthesized
  source 1..20: mol_type = other DNA
agattcacttgtttaggcct

SEQ ID NO: 45160 - DNA, 20 bp, synthetic construct
  misc_feature 1..20: note = chemically synthesized
  source 1..20: mol_type = other DNA
ttcacttgtttaggccttag

SEQ ID NO: 45161 - DNA, 20 bp, synthetic construct
  misc_feature 1..20: note = chemically synthesized
  source 1..20: mol_type = other DNA
tcacttgtttaggccttagc

SEQ ID NO: 45162 - DNA, 20 bp, synthetic construct
  misc_feature 1..20: note = chemically synthesized
  source 1..20: mol_type = other DNA
tgtttaggccttagcgggct

SEQ ID NO: 45163 - DNA, 20 bp, synthetic construct
  misc_feature 1..20: note = chemically synthesized
  source 1..20: mol_type = other DNA
gccttagcgggcttagacac

SEQ ID NO: 45164 - DNA, 20 bp, synthetic construct
  misc_feature 1..20: note = chemically synthesized
  source 1..20: mol_type = other DNA
cagtctctgacacattctta

SEQ ID NO: 45165 - DNA, 20 bp, synthetic construct
  misc_feature 1..20: note = chemically synthesized
  source 1..20: mol_type = other DNA
agtctctgacacattcttaa

SEQ ID NO: 45166 - DNA, 20 bp, synthetic construct
  misc_feature 1..20: note = chemically synthesized
  source 1..20: mol_type = other DNA
tctgacacattcttaaaggt

SEQ ID NO: 45167 - DNA, 20 bp, synthetic construct
  misc_feature 1..20: note = chemically synthesized
  source 1..20: mol_type = other DNA
ctgacacattcttaaaggtc

SEQ ID NO: 45168 - DNA, 20 bp, synthetic construct
  misc_feature 1..20: note = chemically synthesized
  source 1..20: mol_type = other DNA
taaaggtcaggctctacaaa

SEQ ID NO: 45169 - DNA, 20 bp, synthetic construct
  misc_feature 1..20: note = chemically synthesized
  source 1..20: mol_type = other DNA
ctctacaaatggaacccaac

SEQ ID NO: 45170 - DNA, 20 bp, synthetic construct
  misc_feature 1..20: note = chemically synthesized
  source 1..20: mol_type = other DNA
atggaacccaaccagactct

SEQ ID NO: 45171 - DNA, 20 bp, synthetic construct
  misc_feature 1..20: note = chemically synthesized
  source 1..20: mol_type = other DNA
cccaaccagactctcagata

SEQ ID NO: 45172 - DNA, 20 bp, synthetic construct
  misc_feature 1..20: note = chemically synthesized
  source 1..20: mol_type = other DNA
cagactctcagatatggcca

SEQ ID NO: 45173 - DNA, 20 bp, synthetic construct
  misc_feature 1..20: note = chemically synthesized
  source 1..20: mol_type = other DNA
atctatacacacccatctca

SEQ ID NO: 45174 - DNA, 20 bp, synthetic construct
  misc_feature 1..20: note = chemically synthesized
  source 1..20: mol_type = other DNA
ctcacagatcccctatctta

SEQ ID NO: 45175 - DNA, 20 bp, synthetic construct
  misc_feature 1..20: note = chemically synthesized
  source 1..20: mol_type = other DNA
cacagatcccctatcttaaa

SEQ ID NO: 45176 - DNA, 20 bp, synthetic construct
  misc_feature 1..20: note = chemically synthesized
  source 1..20: mol_type = other DNA
atcttaaagagaccctaatt

SEQ ID NO: 45177 - DNA, 20 bp, synthetic construct
  misc_feature 1..20: note = chemically synthesized
  source 1..20: mol_type = other DNA
tcttaaagagaccctaattt

SEQ ID NO: 45178 - DNA, 20 bp, synthetic construct
  misc_feature 1..20: note = chemically synthesized
  source 1..20: mol_type = other DNA
accctaatttgggttcacct

SEQ ID NO: 45179 - DNA, 20 bp, synthetic construct
  misc_feature 1..20: note = chemically synthesized
  source 1..20: mol_type = other DNA
tcagtctctataatctgtac

SEQ ID NO: 45180 - DNA, 20 bp, synthetic construct
  misc_feature 1..20: note = chemically synthesized
  source 1..20: mol_type = other DNA
aaatctttctcacccatcct

SEQ ID NO: 45181 - DNA, 20 bp, synthetic construct
  misc_feature 1..20: note = chemically synthesized
  source 1..20: mol_type = other DNA
ttctcacccatccttagatt

SEQ ID NO: 45182 - DNA, 20 bp, synthetic construct
  misc_feature 1..20: note = chemically synthesized
  source 1..20: mol_type = other DNA
ctcacccatccttagattga

SEQ ID NO: 45183 - DNA, 20 bp, synthetic construct
  misc_feature 1..20: note = chemically synthesized
  source 1..20: mol_type = other DNA
acccatccttagattgagag

SEQ ID NO: 45184 - DNA, 20 bp, synthetic construct
  misc_feature 1..20: note = chemically synthesized
  source 1..20: mol_type = other DNA
gaagtcacttattattatgt

SEQ ID NO: 45185 - DNA, 20 bp, synthetic construct
  misc_feature 1..20: note = chemically synthesized
  source 1..20: mol_type = other DNA
cttattattatgtgagtaac

SEQ ID NO: 45186 - DNA, 20 bp, synthetic construct
  misc_feature 1..20: note = chemically synthesized
  source 1..20: mol_type = other DNA
attattatgtgagtaactgg

SEQ ID NO: 45187 - DNA, 20 bp, synthetic construct
  misc_feature 1..20: note = chemically synthesized
  source 1..20: mol_type = other DNA
agtaactggaagatactgat

SEQ ID NO: 45188 - DNA, 20 bp, synthetic construct
  misc_feature 1..20: note = chemically synthesized
  source 1..20: mol_type = other DNA
aacttttattttaacttcca

SEQ ID NO: 45189 - DNA, 20 bp, synthetic construct
  misc_feature 1..20: note = chemically synthesized
  source 1..20: mol_type = other DNA
tattttaacttccaaagaac

SEQ ID NO: 45190 - DNA, 20 bp, synthetic construct
  misc_feature 1..20: note = chemically synthesized
  source 1..20: mol_type = other DNA
aagaacaagtgcaatatgtg

SEQ ID NO: 45191 - DNA, 20 bp, synthetic construct
  misc_feature 1..20: note = chemically synthesized
  source 1..20: mol_type = other DNA
atatgtgcagctttgttgcg

SEQ ID NO: 45192 - DNA, 20 bp, synthetic construct
  misc_feature 1..20: note = chemically synthesized
  source 1..20: mol_type = other DNA
tatgtgcagctttgttgcgc

SEQ ID NO: 45193 - DNA, 20 bp, synthetic construct
  misc_feature 1..20: note = chemically synthesized
  source 1..20: mol_type = other DNA
caggtcaacatgtatctttc

SEQ ID NO: 45194 - DNA, 20 bp, synthetic construct
  misc_feature 1..20: note = chemically synthesized
  source 1..20: mol_type = other DNA
catgtatctttctggtcttt

SEQ ID NO: 45195 - DNA, 20 bp, synthetic construct
  misc_feature 1..20: note = chemically synthesized
  source 1..20: mol_type = other DNA
ttttagccgcctaacacttt

SEQ ID NO: 45196 - DNA, 20 bp, synthetic construct
  misc_feature 1..20: note = chemically synthesized
  source 1..20: mol_type = other DNA
tagccgcctaacactttgag

SEQ ID NO: 45197 - DNA, 20 bp, synthetic construct
  misc_feature 1..20: note = chemically synthesized
  source 1..20: mol_type = other DNA
ctaacactttgagcagatat

SEQ ID NO: 45198 - DNA, 20 bp, synthetic construct
  misc_feature 1..20: note = chemically synthesized
  source 1..20: mol_type = other DNA
gagcagatataagccttaca

SEQ ID NO: 45199 - DNA, 20 bp, synthetic construct
  misc_feature 1..20: note = chemically synthesized
  source 1..20: mol_type = other DNA
agcagatataagccttacac

SEQ ID NO: 45200 - DNA, 20 bp, synthetic construct
  misc_feature 1..20: note = chemically synthesized
  source 1..20: mol_type = other DNA
aagccttacacaggattatg

SEQ ID NO: 45201 - DNA, 20 bp, synthetic construct
  misc_feature 1..20: note = chemically synthesized
  source 1..20: mol_type = other DNA
cacaggattatgaagtctga

SEQ ID NO: 45202 - DNA, 20 bp, synthetic construct
  misc_feature 1..20: note = chemically synthesized
  source 1..20: mol_type = other DNA
acaggattatgaagtctgaa

SEQ ID NO: 45203 - DNA, 20 bp, synthetic construct
  misc_feature 1..20: note = chemically synthesized
  source 1..20: mol_type = other DNA
tataattcctatcaacctga

SEQ ID NO: 45204 - DNA, 20 bp, synthetic construct
  misc_feature 1..20: note = chemically synthesized
  source 1..20: mol_type = other DNA
ataattcctatcaacctgat

SEQ ID NO: 45205 - DNA, 20 bp, synthetic construct
  misc_feature 1..20: note = chemically synthesized
  source 1..20: mol_type = other DNA
ttcctatcaacctgataggt

SEQ ID NO: 45206 - DNA, 20 bp, synthetic construct
  misc_feature 1..20: note = chemically synthesized
  source 1..20: mol_type = other DNA
tcctatcaacctgataggtt

SEQ ID NO: 45207 - DNA, 20 bp, synthetic construct
  misc_feature 1..20: note = chemically synthesized
  source 1..20: mol_type = other DNA
cctatcaacctgataggtta

SEQ ID NO: 45208 - DNA, 20 bp, synthetic construct
  misc_feature 1..20: note = chemically synthesized
  source 1..20: mol_type = other DNA
ctatcaacctgataggttag

SEQ ID NO: 45209 - DNA, 20 bp, synthetic construct
  misc_feature 1..20: note = chemically synthesized
  source 1..20: mol_type = other DNA
tcaacctgataggttagggg

SEQ ID NO: 45210 - DNA, 20 bp, synthetic construct
  misc_feature 1..20: note = chemically synthesized
  source 1..20: mol_type = other DNA
caacctgataggttagggga

SEQ ID NO: 45211 - DNA, 20 bp, synthetic construct
  misc_feature 1..20: note = chemically synthesized
  source 1..20: mol_type = other DNA
cctgataggttaggggaagg

SEQ ID NO: 45212 - DNA, 20 bp, synthetic construct
  misc_feature 1..20: note = chemically synthesized
  source 1..20: mol_type = other DNA
tgataggttaggggaaggta

SEQ ID NO: 45213 - DNA, 20 bp, synthetic construct
  misc_feature 1..20: note = chemically synthesized
  source 1..20: mol_type = other DNA
aggtagagctctcctccaat

SEQ ID NO: 45214 - DNA, 20 bp, synthetic construct
  misc_feature 1..20: note = chemically synthesized
  source 1..20: mol_type = other DNA
agagctctcctccaataagc

SEQ ID NO: 45215 - DNA, 20 bp, synthetic construct
  misc_feature 1..20: note = chemically synthesized
  source 1..20: mol_type = other DNA
cctccaataagccagatttc

SEQ ID NO: 45216 - DNA, 20 bp, synthetic construct
  misc_feature 1..20: note = chemically synthesized
  source 1..20: mol_type = other DNA
tccaataagccagatttcca

SEQ ID NO: 45217 - DNA, 20 bp, synthetic construct
  misc_feature 1..20: note = chemically synthesized
  source 1..20: mol_type = other DNA
ttctgacgtcataatctacc

SEQ ID NO: 45218 - DNA, 20 bp, synthetic construct
  misc_feature 1..20: note = chemically synthesized
  source 1..20: mol_type = other DNA
tctgacgtcataatctacca

SEQ ID NO: 45219 - DNA, 20 bp, synthetic construct
  misc_feature 1..20: note = chemically synthesized
  source 1..20: mol_type = other DNA
gtcataatctaccaaggtca

SEQ ID NO: 45220 - DNA, 20 bp, synthetic construct
  misc_feature 1..20: note = chemically synthesized
  source 1..20: mol_type = other DNA
atctaccaaggtcatggatc

SEQ ID NO: 45221 - DNA, 20 bp, synthetic construct
  misc_feature 1..20: note = chemically synthesized
  source 1..20: mol_type = other DNA
ccaaggtcatggatcgagtt

SEQ ID NO: 45222 - DNA, 20 bp, synthetic construct
  misc_feature 1..20: note = chemically synthesized
  source 1..20: mol_type = other DNA
aaggtcatggatcgagttca

SEQ ID NO: 45223 - DNA, 20 bp, synthetic construct
  misc_feature 1..20: note = chemically synthesized
  source 1..20: mol_type = other DNA
cgagttcagagaaaaaacaa

SEQ ID NO: 45224 - DNA, 20 bp, synthetic construct
  misc_feature 1..20: note = chemically synthesized
  source 1..20: mol_type = other DNA
accaaaaaataaaaatccca

SEQ ID NO: 45225 - DNA, 20 bp, synthetic construct
  misc_feature 1..20: note = chemically synthesized
  source 1..20: mol_type = other DNA
aaaatcccaaagaaaaaata

SEQ ID NO: 45226 - DNA, 20 bp, synthetic construct
  misc_feature 1..20: note = chemically synthesized
  source 1..20: mol_type = other DNA
agaaaaaataaagaaaaaaa

SEQ ID NO: 45227 - DNA, 20 bp, synthetic construct
  misc_feature 1..20: note = chemically synthesized
  source 1..20: mol_type = other DNA
tgaatacttcctgccatgtt

SEQ ID NO: 45228 - DNA, 20 bp, synthetic construct
  misc_feature 1..20: note = chemically synthesized
  source 1..20: mol_type = other DNA
atacttcctgccatgttaag

SEQ ID NO: 45229 - DNA, 20 bp, synthetic construct
  misc_feature 1..20: note = chemically synthesized
  source 1..20: mol_type = other DNA
atgttaagtggccaatatgt

SEQ ID NO: 45230 - DNA, 20 bp, synthetic construct
  misc_feature 1..20: note = chemically synthesized
  source 1..20: mol_type = other DNA
agtggccaatatgtcagaaa

SEQ ID NO: 45231 - DNA, 20 bp, synthetic construct
  misc_feature 1..20: note = chemically synthesized
  source 1..20: mol_type = other DNA
aatatgtcagaaacagcact

SEQ ID NO: 45232 - DNA, 20 bp, synthetic construct
  misc_feature 1..20: note = chemically synthesized
  source 1..20: mol_type = other DNA
tcagaaacagcactgagtta

SEQ ID NO: 45233 - DNA, 20 bp, synthetic construct
  misc_feature 1..20: note = chemically synthesized
  source 1..20: mol_type = other DNA
acagcactgagttacagata

SEQ ID NO: 45234 - DNA, 20 bp, synthetic construct
  misc_feature 1..20: note = chemically synthesized
  source 1..20: mol_type = other DNA
agataaagatgtctaaacta

SEQ ID NO: 45235 - DNA, 20 bp, synthetic construct
  misc_feature 1..20: note = chemically synthesized
  source 1..20: mol_type = other DNA
tctaaactacagtgacatcc

SEQ ID NO: 45236 - DNA, 20 bp, synthetic construct
  misc_feature 1..20: note = chemically synthesized
  source 1..20: mol_type = other DNA
cagtgacatcccagctgtca

SEQ ID NO: 45237 - DNA, 20 bp, synthetic construct
  misc_feature 1..20: note = chemically synthesized
  source 1..20: mol_type = other DNA
atcccagctgtcacagtgtg

SEQ ID NO: 45238 - DNA, 20 bp, synthetic construct
  misc_feature 1..20: note = chemically synthesized
  source 1..20: mol_type = other DNA
tgtcacagtgtgtggactat

SEQ ID NO: 45239 - DNA, 20 bp, synthetic construct
  misc_feature 1..20: note = chemically synthesized
  source 1..20: mol_type = other DNA
tggactattagtcaataaaa

SEQ ID NO: 45240 - DNA, 20 bp, synthetic construct
  misc_feature 1..20: note = chemically synthesized
  source 1..20: mol_type = other DNA
taaaacagtccctgcctctt

SEQ ID NO: 45241 - DNA, 20 bp, synthetic construct
  misc_feature 1..20: note = chemically synthesized
  source 1..20: mol_type = other DNA
aaacagtccctgcctcttaa

SEQ ID NO: 45242 - DNA, 20 bp, synthetic construct
  misc_feature 1..20: note = chemically synthesized
  source 1..20: mol_type = other DNA
caaatacatgtcttatgtct

SEQ ID NO: 45243 - DNA, 20 bp, synthetic construct
  misc_feature 1..20: note = chemically synthesized
  source 1..20: mol_type = other DNA
catgtcttatgtcttagaat

SEQ ID NO: 45244 - DNA, 20 bp, synthetic construct
  misc_feature 1..20: note = chemically synthesized
  source 1..20: mol_type = other DNA
gtcttagaataagattccct

SEQ ID NO: 45245 - DNA, 20 bp, synthetic construct
  misc_feature 1..20: note = chemically synthesized
  source 1..20: mol_type = other DNA
ttagaataagattccctaag

SEQ ID NO: 45246 - DNA, 20 bp, synthetic construct
  misc_feature 1..20: note = chemically synthesized
  source 1..20: mol_type = other DNA
gattccctaagaagtgaacc

SEQ ID NO: 45247 - DNA, 20 bp, synthetic construct
  misc_feature 1..20: note = chemically synthesized
  source 1..20: mol_type = other DNA
agtgaacctagcatttatac

SEQ ID NO: 45248 - DNA, 20 bp, synthetic construct
  misc_feature 1..20: note = chemically synthesized
  source 1..20: mol_type = other DNA
agataattaattctaatcca

SEQ ID NO: 45249 - DNA, 20 bp, synthetic construct
  misc_feature 1..20: note = chemically synthesized
  source 1..20: mol_type = other DNA
taattctaatccatagtatc

SEQ ID NO: 45250 - DNA, 20 bp, synthetic construct
  misc_feature 1..20: note = chemically synthesized
  source 1..20: mol_type = other DNA
ctaatccatagtatctggta

SEQ ID NO: 45251 - DNA, 20 bp, synthetic construct
  misc_feature 1..20: note = chemically synthesized
  source 1..20: mol_type = other DNA
aatccatagtatctggtaaa

SEQ ID NO: 45252 - DNA, 20 bp, synthetic construct
  misc_feature 1..20: note = chemically synthesized
  source 1..20: mol_type = other DNA
attctaccatcatctttacc

SEQ ID NO: 45253 - DNA, 20 bp, synthetic construct
  misc_feature 1..20: note = chemically synthesized
  source 1..20: mol_type = other DNA
accatcatctttaccgagca

SEQ ID NO: 45254 - DNA, 20 bp, synthetic construct
  misc_feature 1..20: note = chemically synthesized
  source 1..20: mol_type = other DNA
atcatctttaccgagcatag

SEQ ID NO: 45255 - DNA, 20 bp, synthetic construct
  misc_feature 1..20: note = chemically synthesized
  source 1..20: mol_type = other DNA
catctttaccgagcatagaa

SEQ ID NO: 45256 - DNA, 20 bp, synthetic construct
  misc_feature 1..20: note = chemically synthesized
  source 1..20: mol_type = other DNA
gaagagctacaccaaaaccc

SEQ ID NO: 45257 - DNA, 20 bp, synthetic construct
  misc_feature 1..20: note = chemically synthesized
  source 1..20: mol_type = other DNA
aagagctacaccaaaaccct

SEQ ID NO: 45258 - DNA, 20 bp, synthetic construct
  misc_feature 1..20: note = chemically synthesized
  source 1..20: mol_type = other DNA
acaccaaaaccctgggtcat

SEQ ID NO: 45259 - DNA, 20 bp, synthetic construct
  misc_feature 1..20: note = chemically synthesized
  source 1..20: mol_type = other DNA
caaaaccctgggtcatcagc

SEQ ID NO: 45260 - DNA, 20 bp, synthetic construct
  misc_feature 1..20: note = chemically synthesized
  source 1..20: mol_type = other DNA
agccagcacatacacttatc

SEQ ID NO: 45261 - DNA, 20 bp, synthetic construct
  misc_feature 1..20: note = chemically synthesized
  source 1..20: mol_type = other DNA
cagtgataaatacacatcat

SEQ ID NO: 45262 - DNA, 20 bp, synthetic construct
  misc_feature 1..20: note = chemically synthesized
  source 1..20: mol_type = other DNA
agtgataaatacacatcatc

SEQ ID NO: 45263 - DNA, 20 bp, synthetic construct
  misc_feature 1..20: note = chemically synthesized
  source 1..20: mol_type = other DNA
ataaaaaaaatacttttgct

SEQ ID NO: 45264 - DNA, 20 bp, synthetic construct
  misc_feature 1..20: note = chemically synthesized
  source 1..20: mol_type = other DNA
atacttttgctgagatgaaa

SEQ ID NO: 45265 - DNA, 20 bp, synthetic construct
  misc_feature 1..20: note = chemically synthesized
  source 1..20: mol_type = other DNA
tacttttgctgagatgaaac

SEQ ID NO: 45266 - DNA, 20 bp, synthetic construct
  misc_feature 1..20: note = chemically synthesized
  source 1..20: mol_type = other DNA
caggcgtgatttatttcaaa

SEQ ID NO: 45267 - DNA, 20 bp, synthetic construct
  misc_feature 1..20: note = chemically synthesized
  source 1..20: mol_type = other DNA
aggcgtgatttatttcaaat

SEQ ID NO: 45268 - DNA, 20 bp, synthetic construct
  misc_feature 1..20: note = chemically synthesized
  source 1..20: mol_type = other DNA
tgatttatttcaaataggta

SEQ ID NO: 45269 - DNA, 20 bp, synthetic construct
  misc_feature 1..20: note = chemically synthesized
  source 1..20: mol_type = other DNA
tatttcaaataggtacggat

SEQ ID NO: 45270 - DNA, 20 bp, synthetic construct
  misc_feature 1..20: note = chemically synthesized
  source 1..20: mol_type = other DNA
ttcaaataggtacggataag

SEQ ID NO: 45271 - DNA, 20 bp, synthetic construct
  misc_feature 1..20: note = chemically synthesized
  source 1..20: mol_type = other DNA
gtacggataagtagatattg

SEQ ID NO: 45272 - DNA, 20 bp, synthetic construct
  misc_feature 1..20: note = chemically synthesized
  source 1..20: mol_type = other DNA
ggataagtagatattgaagt

SEQ ID NO: 45273 - DNA, 20 bp, synthetic construct
  misc_feature 1..20: note = chemically synthesized
  source 1..20: mol_type = other DNA
gataagtagatattgaagta

SEQ ID NO: 45274 - DNA, 20 bp, synthetic construct
  misc_feature 1..20: note = chemically synthesized
  source 1..20: mol_type = other DNA
tagatattgaagtaaggatt

SEQ ID NO: 45275 - DNA, 20 bp, synthetic construct
  misc_feature 1..20: note = chemically synthesized
  source 1..20: mol_type = other DNA
gcactgaaactgttgcttta

SEQ ID NO: 45276 - DNA, 20 bp, synthetic construct
  misc_feature 1..20: note = chemically synthesized
  source 1..20: mol_type = other DNA
cactgaaactgttgctttat

SEQ ID NO: 45277 - DNA, 20 bp, synthetic construct
  misc_feature 1..20: note = chemically synthesized
  source 1..20: mol_type = other DNA
ggatttttcactacactaat

SEQ ID NO: 45278 - DNA, 20 bp, synthetic construct
  misc_feature 1..20: note = chemically synthesized
  source 1..20: mol_type = other DNA
cactacactaatgagaactt

SEQ ID NO: 45279 - DNA, 20 bp, synthetic construct
  misc_feature 1..20: note = chemically synthesized
  source 1..20: mol_type = other DNA
ctacactaatgagaacttaa

SEQ ID NO: 45280 - DNA, 20 bp, synthetic construct
  misc_feature 1..20: note = chemically synthesized
  source 1..20: mol_type = other DNA
aatgagaacttaagagataa

SEQ ID NO: 45281 - DNA, 20 bp, synthetic construct
  misc_feature 1..20: note = chemically synthesized
  source 1..20: mol_type = other DNA
gagataatggcctaaaacca

SEQ ID NO: 45282 - DNA, 20 bp, synthetic construct
  misc_feature 1..20: note = chemically synthesized
  source 1..20: mol_type = other DNA
gataatggcctaaaaccaca

SEQ ID NO: 45283 - DNA, 20 bp, synthetic construct
  misc_feature 1..20: note = chemically synthesized
  source 1..20: mol_type = other DNA
taatggcctaaaaccacaga

SEQ ID NO: 45284 - DNA, 20 bp, synthetic construct
  misc_feature 1..20: note = chemically synthesized
  source 1..20: mol_type = other DNA
aaccacagagagtatattca

SEQ ID NO: 45285 - DNA, 20 bp, synthetic construct
  misc_feature 1..20: note = chemically synthesized
  source 1..20: mol_type = other DNA
cagagagtatattcaaagat

SEQ ID NO: 45286 - DNA, 20 bp, synthetic construct
  misc_feature 1..20: note = chemically synthesized
  source 1..20: mol_type = other DNA
agtatattcaaagataagta

SEQ ID NO: 45287 - DNA, 20 bp, synthetic construct
  misc_feature 1..20: note = chemically synthesized
  source 1..20: mol_type = other DNA
taagtatagcacttcttatt

SEQ ID NO: 45288 - DNA, 20 bp, synthetic construct
  misc_feature 1..20: note = chemically synthesized
  source 1..20: mol_type = other DNA
gaaaccaatgcttactaaat

SEQ ID NO: 45289 - DNA, 20 bp, synthetic construct
  misc_feature 1..20: note = chemically synthesized
  source 1..20: mol_type = other DNA
aatgcttactaaatgagact

SEQ ID NO: 45290 - DNA, 20 bp, synthetic construct
  misc_feature 1..20: note = chemically synthesized
  source 1..20: mol_type = other DNA
acgtgtcccatcaaaaatcc

SEQ ID NO: 45291 - DNA, 20 bp, synthetic construct
  misc_feature 1..20: note = chemically synthesized
  source 1..20: mol_type = other DNA
tccctgaacttttcaaaaat

SEQ ID NO: 45292 - DNA, 20 bp, synthetic construct
  misc_feature 1..20: note = chemically synthesized
  source 1..20: mol_type = other DNA
catgctttaactttaaacta

SEQ ID NO: 45293 - DNA, 20 bp, synthetic construct
  misc_feature 1..20: note = chemically synthesized
  source 1..20: mol_type = other DNA
atgctttaactttaaactac

SEQ ID NO: 45294 - DNA, 20 bp, synthetic construct
  misc_feature 1..20: note = chemically synthesized
  source 1..20: mol_type = other DNA
ctttaaactacaggcctcac

SEQ ID NO: 45295 - DNA, 20 bp, synthetic construct
  misc_feature 1..20: note = chemically synthesized
  source 1..20: mol_type = other DNA
ttaaactacaggcctcactg

SEQ ID NO: 45296 - DNA, 20 bp, synthetic construct
  misc_feature 1..20: note = chemically synthesized
  source 1..20: mol_type = other DNA
tacaggcctcactggagcta

SEQ ID NO: 45297 - DNA, 20 bp, synthetic construct
  misc_feature 1..20: note = chemically synthesized
  source 1..20: mol_type = other DNA
gcctcactggagctacagac

SEQ ID NO: 45298 - DNA, 20 bp, synthetic construct
  misc_feature 1..20: note = chemically synthesized
  source 1..20: mol_type = other DNA
tcactggagctacagacaag

SEQ ID NO: 45299 - DNA, 20 bp, synthetic construct
  misc_feature 1..20: note = chemically synthesized
  source 1..20: mol_type = other DNA
cactggagctacagacaaga

SEQ ID NO: 45300 - DNA, 20 bp, synthetic construct
  misc_feature 1..20: note = chemically synthesized
  source 1..20: mol_type = other DNA
acagacaagaaggtgaaaaa

SEQ ID NO: 45301 - DNA, 20 bp, synthetic construct
  misc_feature 1..20: note = chemically synthesized
  source 1..20: mol_type = other DNA
aggtgaaaaacggctgacaa

SEQ ID NO: 45302 - DNA, 20 bp, synthetic construct
  misc_feature 1..20: note = chemically synthesized
  source 1..20: mol_type = other DNA
tgaaaaacggctgacaaaag

SEQ ID NO: 45303 - DNA, 20 bp, synthetic construct
  misc_feature 1..20: note = chemically synthesized
  source 1..20: mol_type = other DNA
acggctgacaaaagaagtcc

SEQ ID NO: 45304 - DNA, 20 bp, synthetic construct
  misc_feature 1..20: note = chemically synthesized
  source 1..20: mol_type = other DNA
agaagtcctggtatcttcta

SEQ ID NO: 45305 - DNA, 20 bp, synthetic construct
  misc_feature 1..20: note = chemically synthesized
  source 1..20: mol_type = other DNA
agtcctggtatcttctatgg

SEQ ID NO: 45306 - DNA, 20 bp, synthetic construct
  misc_feature 1..20: note = chemically synthesized
  source 1..20: mol_type = other DNA
gtcctggtatcttctatggt

SEQ ID NO: 45307 - DNA, 20 bp, synthetic construct
  misc_feature 1..20: note = chemically synthesized
  source 1..20: mol_type = other DNA
cctggtatcttctatggtgg

SEQ ID NO: 45308 - DNA, 20 bp, synthetic construct
  misc_feature 1..20: note = chemically synthesized
  source 1..20: mol_type = other DNA
ggtatcttctatggtgggag

SEQ ID NO: 45309 - DNA, 20 bp, synthetic construct
  misc_feature 1..20: note = chemically synthesized
  source 1..20: mol_type = other DNA
ctatggtgggagaagaaaac

SEQ ID NO: 45310 - DNA, 20 bp, synthetic construct
  misc_feature 1..20: note = chemically synthesized
  source 1..20: mol_type = other DNA
tgggagaagaaaactagcta

SEQ ID NO: 45311 - DNA, 20 bp, synthetic construct
  misc_feature 1..20: note = chemically synthesized
  source 1..20: mol_type = other DNA
gggagaagaaaactagctaa

SEQ ID NO: 45312 - DNA, 20 bp, synthetic construct
  misc_feature 1..20: note = chemically synthesized
  source 1..20: mol_type = other DNA
ggagaagaaaactagctaaa

SEQ ID NO: 45313 - DNA, 20 bp, synthetic construct
  misc_feature 1..20: note = chemically synthesized
  source 1..20: mol_type = other DNA
gaagaaaactagctaaaggg

SEQ ID NO: 45314 - DNA, 20 bp, synthetic construct
  misc_feature 1..20: note = chemically synthesized
  source 1..20: mol_type = other DNA
agctaaagggaagaataaat

SEQ ID NO: 45315 - DNA, 20 bp, synthetic construct
  misc_feature 1..20: note = chemically synthesized
  source 1..20: mol_type = other DNA
ctaaagggaagaataaatta

SEQ ID NO: 45316 - DNA, 20 bp, synthetic construct
  misc_feature 1..20: note = chemically synthesized
  source 1..20: mol_type = other DNA
agaataaattagagaaaaat

SEQ ID NO: 45317 - DNA, 20 bp, synthetic construct
  misc_feature 1..20: note = chemically synthesized
  source 1..20: mol_type = other DNA
aaaaattggaatgactgaat

SEQ ID NO: 45318 - DNA, 20 bp, synthetic construct
  misc_feature 1..20: note = chemically synthesized
  source 1..20: mol_type = other DNA
tggaatgactgaatcggaac

SEQ ID NO: 45319 - DNA, 20 bp, synthetic construct
  misc_feature 1..20: note = chemically synthesized
  source 1..20: mol_type = other DNA
ggaatgactgaatcggaaca

SEQ ID NO: 45320 - DNA, 20 bp, synthetic construct
  misc_feature 1..20: note = chemically synthesized
  source 1..20: mol_type = other DNA
gactgaatcggaacaaggca

SEQ ID NO: 45321 - DNA, 20 bp, synthetic construct
  misc_feature 1..20: note = chemically synthesized
  source 1..20: mol_type = other DNA
actgaatcggaacaaggcaa

SEQ ID NO: 45322 - DNA, 20 bp, synthetic construct
  misc_feature 1..20: note = chemically synthesized
  source 1..20: mol_type = other DNA
caaaggctataaaaaaaatt

SEQ ID NO: 45323 - DNA, 20 bp, synthetic construct
  misc_feature 1..20: note = chemically synthesized
  source 1..20: mol_type = other DNA
aggctataaaaaaaattaag

SEQ ID NO: 45324 - DNA, 20 bp, synthetic construct
  misc_feature 1..20: note = chemically synthesized
  source 1..20: mol_type = other DNA
ctataaaaaaaattaagcag

SEQ ID NO: 45325 - DNA, 20 bp, synthetic construct
  misc_feature 1..20: note = chemically synthesized
  source 1..20: mol_type = other DNA
attaagcagcagtatcctct

SEQ ID NO: 45326 - DNA, 20 bp, synthetic construct
  misc_feature 1..20: note = chemically synthesized
  source 1..20: mol_type = other DNA
ttaagcagcagtatcctctt

SEQ ID NO: 45327 - DNA, 20 bp, synthetic construct
  misc_feature 1..20: note = chemically synthesized
  source 1..20: mol_type = other DNA
taagcagcagtatcctcttg

SEQ ID NO: 45328 - DNA, 20 bp, synthetic construct
  misc_feature 1..20: note = chemically synthesized
  source 1..20: mol_type = other DNA
aagcagcagtatcctcttgg

SEQ ID NO: 45329 - DNA, 20 bp, synthetic construct
  misc_feature 1..20: note = chemically synthesized
  source 1..20: mol_type = other DNA
atgcaaatatctgtctgaaa

SEQ ID NO: 45330 - DNA, 20 bp, synthetic construct
  misc_feature 1..20: note = chemically synthesized
  source 1..20: mol_type = other DNA
tatctgtctgaaacggtccc

SEQ ID NO: 45331 - DNA, 20 bp, synthetic construct
  misc_feature 1..20: note = chemically synthesized
  source 1..20: mol_type = other DNA
ccctggctaaactccaccca

SEQ ID NO: 45332 - DNA, 20 bp, synthetic construct
  misc_feature 1..20: note = chemically synthesized
  source 1..20: mol_type = other DNA
cctggctaaactccacccat

SEQ ID NO: 45333 - DNA, 20 bp, synthetic construct
  misc_feature 1..20: note = chemically synthesized
  source 1..20: mol_type = other DNA
gctaaactccacccatgggt

SEQ ID NO: 45334 - DNA, 20 bp, synthetic construct
  misc_feature 1..20: note = chemically synthesized
  source 1..20: mol_type = other DNA
aactccacccatgggttggc

SEQ ID NO: 45335 - DNA, 20 bp, synthetic construct
  misc_feature 1..20: note = chemically synthesized
  source 1..20: mol_type = other DNA
gccagccttgccttgaccaa

SEQ ID NO: 45336 - DNA, 20 bp, synthetic construct
  misc_feature 1..20: note = chemically synthesized
  source 1..20: mol_type = other DNA
ccttgaccaatagccttgac

SEQ ID NO: 45337 - DNA, 20 bp, synthetic construct
  misc_feature 1..20: note = chemically synthesized
  source 1..20: mol_type = other DNA
cttgaccaatagccttgaca

SEQ ID NO: 45338 - DNA, 20 bp, synthetic construct
  misc_feature 1..20: note = chemically synthesized
  source 1..20: mol_type = other DNA
gacaaggcaaacttgaccaa

SEQ ID NO: 45339 - DNA, 20 bp, synthetic construct
  misc_feature 1..20: note = chemically synthesized
  source 1..20: mol_type = other DNA
gcaaacttgaccaatagtct

SEQ ID NO: 45340 - DNA, 20 bp, synthetic construct
  misc_feature 1..20: note = chemically synthesized
  source 1..20: mol_type = other DNA
aaacttgaccaatagtctta

SEQ ID NO: 45341 - DNA, 20 bp, synthetic construct
  misc_feature 1..20: note = chemically synthesized
  source 1..20: mol_type = other DNA
accaatagtcttagagtatc

SEQ ID NO: 45342 - DNA, 20 bp, synthetic construct
  misc_feature 1..20: note = chemically synthesized
  source 1..20: mol_type = other DNA
atagtcttagagtatccagt

SEQ ID NO: 45343 - DNA, 20 bp, synthetic construct
  misc_feature 1..20: note = chemically synthesized
  source 1..20: mol_type = other DNA
tagtcttagagtatccagtg

SEQ ID NO: 45344 - DNA, 20 bp, synthetic construct
  misc_feature 1..20: note = chemically synthesized
  source 1..20: mol_type = other DNA
cttagagtatccagtgaggc

SEQ ID NO: 45345 - DNA, 20 bp, synthetic construct
  misc_feature 1..20: note = chemically synthesized
  source 1..20: mol_type = other DNA
ttagagtatccagtgaggcc

SEQ ID NO: 45346 - DNA, 20 bp, synthetic construct
  misc_feature 1..20: note = chemically synthesized
  source 1..20: mol_type = other DNA
tagagtatccagtgaggcca

SEQ ID NO: 45347 - DNA, 20 bp, synthetic construct
  misc_feature 1..20: note = chemically synthesized
  source 1..20: mol_type = other DNA
agagtatccagtgaggccag

SEQ ID NO: 45348 - DNA, 20 bp, synthetic construct
  misc_feature 1..20: note = chemically synthesized
  source 1..20: mol_type = other DNA
tatccagtgaggccaggggc

SEQ ID NO: 45349 - DNA, 20 bp, synthetic construct
  misc_feature 1..20: note = chemically synthesized
  source 1..20: mol_type = other DNA
ccagtgaggccaggggccgg

SEQ ID NO: 45350 - DNA, 20 bp, synthetic construct
  misc_feature 1..20: note = chemically synthesized
  source 1..20: mol_type = other DNA
tgaggccaggggccggcggc

SEQ ID NO: 45351 - DNA, 20 bp, synthetic construct
  misc_feature 1..20: note = chemically synthesized
  source 1..20: mol_type = other DNA
gccaggggccggcggctggc

SEQ ID NO: 45352 - DNA, 20 bp, synthetic construct
  misc_feature 1..20: note = chemically synthesized
  source 1..20: mol_type = other DNA
ccaggggccggcggctggct

SEQ ID NO: 45353 - DNA, 20 bp, synthetic construct
  misc_feature 1..20: note = chemically synthesized
  source 1..20: mol_type = other DNA
caggggccggcggctggcta

SEQ ID NO: 45354 - DNA, 20 bp, synthetic construct
  misc_feature 1..20: note = chemically synthesized
  source 1..20: mol_type = other DNA
ccggcggctggctagggatg

SEQ ID NO: 45355 - DNA, 20 bp, synthetic construct
  misc_feature 1..20: note = chemically synthesized
  source 1..20: mol_type = other DNA
tggctagggatgaagaataa

SEQ ID NO: 45356 - DNA, 20 bp, synthetic construct
  misc_feature 1..20: note = chemically synthesized
  source 1..20: mol_type = other DNA
ggctagggatgaagaataaa

SEQ ID NO: 45357 - DNA, 20 bp, synthetic construct
  misc_feature 1..20: note = chemically synthesized
  source 1..20: mol_type = other DNA
tagggatgaagaataaaagg

SEQ ID NO: 45358 - DNA, 20 bp, synthetic construct
  misc_feature 1..20: note = chemically synthesized
  source 1..20: mol_type = other DNA
gaataaaaggaagcaccctt

SEQ ID NO: 45359 - DNA, 20 bp, synthetic construct
  misc_feature 1..20: note = chemically synthesized
  source 1..20: mol_type = other DNA
taaaaggaagcacccttcag

SEQ ID NO: 45360 - DNA, 20 bp, synthetic construct
  misc_feature 1..20: note = chemically synthesized
  source 1..20: mol_type = other DNA
cagttccacacactcgcttc

SEQ ID NO: 45361 - DNA, 20 bp, synthetic construct
  misc_feature 1..20: note = chemically synthesized
  source 1..20: mol_type = other DNA
cactcgcttctggaacgtct

SEQ ID NO: 45362 - DNA, 20 bp, synthetic construct
  misc_feature 1..20: note = chemically synthesized
  source 1..20: mol_type = other DNA
actcgcttctggaacgtctg

SEQ ID NO: 45363 - DNA, 20 bp, synthetic construct
  misc_feature 1..20: note = chemically synthesized
  source 1..20: mol_type = other DNA
gaacgtctgaggttatcaat

SEQ ID NO: 45364 - DNA, 20 bp, synthetic construct
  misc_feature 1..20: note = chemically synthesized
  source 1..20: mol_type = other DNA
tgaggttatcaataagctcc

SEQ ID NO: 45365 - DNA, 20 bp, synthetic construct
  misc_feature 1..20: note = chemically synthesized
  source 1..20: mol_type = other DNA
ttatcaataagctcctagtc

SEQ ID NO: 45366 - DNA, 20 bp, synthetic construct
  misc_feature 1..20: note = chemically synthesized
  source 1..20: mol_type = other DNA
agctcctagtccagacgcca

SEQ ID NO: 45367 - DNA, 20 bp, synthetic construct
  misc_feature 1..20: note = chemically synthesized
  source 1..20: mol_type = other DNA
gctcctagtccagacgccat

SEQ ID NO: 45368 - DNA, 20 bp, synthetic construct
  misc_feature 1..20: note = chemically synthesized
  source 1..20: mol_type = other DNA
agacgccatgggtcatttca

SEQ ID NO: 45369 - DNA, 20 bp, synthetic construct
  misc_feature 1..20: note = chemically synthesized
  source 1..20: mol_type = other DNA
acgccatgggtcatttcaca

SEQ ID NO: 45370 - DNA, 20 bp, synthetic construct
  misc_feature 1..20: note = chemically synthesized
  source 1..20: mol_type = other DNA
cgccatgggtcatttcacag

SEQ ID NO: 45371 - DNA, 20 bp, synthetic construct
  misc_feature 1..20: note = chemically synthesized
  source 1..20: mol_type = other DNA
ccatgggtcatttcacagag

SEQ ID NO: 45372 - DNA, 20 bp, synthetic construct
  misc_feature 1..20: note = chemically synthesized
  source 1..20: mol_type = other DNA
catgggtcatttcacagagg

SEQ ID NO: 45373 - DNA, 20 bp, synthetic construct
  misc_feature 1..20: note = chemically synthesized
  source 1..20: mol_type = other DNA
gtcatttcacagaggaggac

SEQ ID NO: 45374 - DNA, 20 bp, synthetic construct
  misc_feature 1..20: note = chemically synthesized
  source 1..20: mol_type = other DNA
tcatttcacagaggaggaca

SEQ ID NO: 45375 - DNA, 20 bp, synthetic construct
  misc_feature 1..20: note = chemically synthesized
  source 1..20: mol_type = other DNA
gaggacaaggctactatcac

SEQ ID NO: 45376 - DNA, 20 bp, synthetic construct
  misc_feature 1..20: note = chemically synthesized
  source 1..20: mol_type = other DNA
aggctactatcacaagcctg

SEQ ID NO: 45377 - DNA, 20 bp, synthetic construct
  misc_feature 1..20: note = chemically synthesized
  source 1..20: mol_type = other DNA
ggctactatcacaagcctgt

SEQ ID NO: 45378 - DNA, 20 bp, synthetic construct
  misc_feature 1..20: note = chemically synthesized
  source 1..20: mol_type = other DNA
gctactatcacaagcctgtg

SEQ ID NO: 45379 - DNA, 20 bp, synthetic construct
  misc_feature 1..20: note = chemically synthesized
  source 1..20: mol_type = other DNA
ctatcacaagcctgtggggc

SEQ ID NO: 45380 - DNA, 20 bp, synthetic construct
  misc_feature 1..20: note = chemically synthesized
  source 1..20: mol_type = other DNA
tatcacaagcctgtggggca

SEQ ID NO: 45381 - DNA, 20 bp, synthetic construct
  misc_feature 1..20: note = chemically synthesized
  source 1..20: mol_type = other DNA
cctgtggggcaaggtgaatg

SEQ ID NO: 45382 - DNA, 20 bp, synthetic construct
  misc_feature 1..20: note = chemically synthesized
  source 1..20: mol_type = other DNA
gtggggcaaggtgaatgtgg

SEQ ID NO: 45383 - DNA, 20 bp, synthetic construct
  misc_feature 1..20: note = chemically synthesized
  source 1..20: mol_type = other DNA
aaggtgaatgtggaagatgc

SEQ ID NO: 45384 - DNA, 20 bp, synthetic construct
  misc_feature 1..20: note = chemically synthesized
  source 1..20: mol_type = other DNA
ggtgaatgtggaagatgctg

SEQ ID NO: 45385 - DNA, 20 bp, synthetic construct
  misc_feature 1..20: note = chemically synthesized
  source 1..20: mol_type = other DNA
gtgaatgtggaagatgctgg

SEQ ID NO: 45386 - DNA, 20 bp, synthetic construct
  misc_feature 1..20: note = chemically synthesized
  source 1..20: mol_type = other DNA
gaatgtggaagatgctggag

SEQ ID NO: 45387 - DNA, 20 bp, synthetic construct
  misc_feature 1..20: note = chemically synthesized
  source 1..20: mol_type = other DNA
agatgctggaggagaaaccc

SEQ ID NO: 45388 - DNA, 20 bp, synthetic construct
  misc_feature 1..20: note = chemically synthesized
  source 1..20: mol_type = other DNA
gatgctggaggagaaaccct

SEQ ID NO: 45389 - DNA, 20 bp, synthetic construct
  misc_feature 1..20: note = chemically synthesized
  source 1..20: mol_type = other DNA
gctggaggagaaaccctggg

SEQ ID NO: 45390 - DNA, 20 bp, synthetic construct
  misc_feature 1..20: note = chemically synthesized
  source 1..20: mol_type = other DNA
ctggaggagaaaccctggga

SEQ ID NO: 45391 - DNA, 20 bp, synthetic construct
  misc_feature 1..20: note = chemically synthesized
  source 1..20: mol_type = other DNA
gaggagaaaccctgggaagg

SEQ ID NO: 45392 - DNA, 20 bp, synthetic construct
  misc_feature 1..20: note = chemically synthesized
  source 1..20: mol_type = other DNA
aggagaaaccctgggaaggt

SEQ ID NO: 45393 - DNA, 20 bp, synthetic construct
  misc_feature 1..20: note = chemically synthesized
  source 1..20: mol_type = other DNA
aaccctgggaaggtaggctc

SEQ ID NO: 45394 - DNA, 20 bp, synthetic construct
  misc_feature 1..20: note = chemically synthesized
  source 1..20: mol_type = other DNA
ggaaggtaggctctggtgac

SEQ ID NO: 45395 - DNA, 20 bp, synthetic construct
  misc_feature 1..20: note = chemically synthesized
  source 1..20: mol_type = other DNA
gaaggtaggctctggtgacc

SEQ ID NO: 45396 - DNA, 20 bp, synthetic construct
  misc_feature 1..20: note = chemically synthesized
  source 1..20: mol_type = other DNA
taggctctggtgaccaggac

SEQ ID NO: 45397 - DNA, 20 bp, synthetic construct
  misc_feature 1..20: note = chemically synthesized
  source 1..20: mol_type = other DNA
aggctctggtgaccaggaca

SEQ ID NO: 45398 - DNA, 20 bp, synthetic construct
  misc_feature 1..20: note = chemically synthesized
  source 1..20: mol_type = other DNA
ggctctggtgaccaggacaa

SEQ ID NO: 45399 - DNA, 20 bp, synthetic construct
  misc_feature 1..20: note = chemically synthesized
  source 1..20: mol_type = other DNA
ctctggtgaccaggacaagg

SEQ ID NO: 45400 - DNA, 20 bp, synthetic construct
  misc_feature 1..20: note = chemically synthesized
  source 1..20: mol_type = other DNA
tctggtgaccaggacaaggg

SEQ ID NO: 45401 - DNA, 20 bp, synthetic construct
  misc_feature 1..20: note = chemically synthesized
  source 1..20: mol_type = other DNA
ctggtgaccaggacaaggga

SEQ ID NO: 45402 - DNA, 20 bp, synthetic construct
  misc_feature 1..20: note = chemically synthesized
  source 1..20: mol_type = other DNA
gtgaccaggacaagggaggg

SEQ ID NO: 45403 - DNA, 20 bp, synthetic construct
  misc_feature 1..20: note = chemically synthesized
  source 1..20: mol_type = other DNA
tgaccaggacaagggaggga

SEQ ID NO: 45404 - DNA, 20 bp, synthetic construct
  misc_feature 1..20: note = chemically synthesized
  source 1..20: mol_type = other DNA
ccaggacaagggagggaagg

SEQ ID NO: 45405 - DNA, 20 bp, synthetic construct
  misc_feature 1..20: note = chemically synthesized
  source 1..20: mol_type = other DNA
caggacaagggagggaagga

SEQ ID NO: 45406 - DNA, 20 bp, synthetic construct
  misc_feature 1..20: note = chemically synthesized
  source 1..20: mol_type = other DNA
ggaaggaaggaccctgtgcc

SEQ ID NO: 45407 - DNA, 20 bp, synthetic construct
  misc_feature 1..20: note = chemically synthesized
  source 1..20: mol_type = other DNA
aaggaccctgtgcctggcaa

SEQ ID NO: 45408 - DNA, 20 bp, synthetic construct
  misc_feature 1..20: note = chemically synthesized
  source 1..20: mol_type = other DNA
ccctgtgcctggcaaaagtc

SEQ ID NO: 45409 - DNA, 20 bp, synthetic construct
  misc_feature 1..20: note = chemically synthesized
  source 1..20: mol_type = other DNA
cctgtgcctggcaaaagtcc

SEQ ID NO: 45410 - DNA, 20 bp, synthetic construct
  misc_feature 1..20: note = chemically synthesized
  source 1..20: mol_type = other DNA
caaaagtccaggtcgcttct

SEQ ID NO: 45411 - DNA, 20 bp, synthetic construct
  misc_feature 1..20: note = chemically synthesized
  source 1..20: mol_type = other DNA
aaaagtccaggtcgcttctc

SEQ ID NO: 45412 - DNA, 20 bp, synthetic construct
  misc_feature 1..20: note = chemically synthesized
  source 1..20: mol_type = other DNA
aggtcgcttctcaggatttg

SEQ ID NO: 45413 - DNA, 20 bp, synthetic construct
  misc_feature 1..20: note = chemically synthesized
  source 1..20: mol_type = other DNA
aactgttcttgtcaatctca

SEQ ID NO: 45414 - DNA, 20 bp, synthetic construct
  misc_feature 1..20: note = chemically synthesized
  source 1..20: mol_type = other DNA
actgttcttgtcaatctcac

SEQ ID NO: 45415 - DNA, 20 bp, synthetic construct
  misc_feature 1..20: note = chemically synthesized
  source 1..20: mol_type = other DNA
ttgtcaatctcacaggctcc

SEQ ID NO: 45416 - DNA, 20 bp, synthetic construct
  misc_feature 1..20: note = chemically synthesized
  source 1..20: mol_type = other DNA
ggctcctggttgtctaccca

SEQ ID NO: 45417 - DNA, 20 bp, synthetic construct
  misc_feature 1..20: note = chemically synthesized
  source 1..20: mol_type = other DNA
tggttgtctacccatggacc

SEQ ID NO: 45418 - DNA, 20 bp, synthetic construct
  misc_feature 1..20: note = chemically synthesized
  source 1..20: mol_type = other DNA
gttgtctacccatggaccca

SEQ ID NO: 45419 - DNA, 20 bp, synthetic construct
  misc_feature 1..20: note = chemically synthesized
  source 1..20: mol_type = other DNA
ttgtctacccatggacccag

SEQ ID NO: 45420 - DNA, 20 bp, synthetic construct
  misc_feature 1..20: note = chemically synthesized
  source 1..20: mol_type = other DNA
tggacccagaggttctttga

SEQ ID NO: 45421 - DNA, 20 bp, synthetic construct
  misc_feature 1..20: note = chemically synthesized
  source 1..20: mol_type = other DNA
cagaggttctttgacagctt

SEQ ID NO: 45422 - DNA, 20 bp, synthetic construct
  misc_feature 1..20: note = chemically synthesized
  source 1..20: mol_type = other DNA
gtcctctgcctctgccatca

SEQ ID NO: 45423 - DNA, 20 bp, synthetic construct
  misc_feature 1..20: note = chemically synthesized
  source 1..20: mol_type = other DNA
tcctctgcctctgccatcat

SEQ ID NO: 45424 - DNA, 20 bp, synthetic construct
  misc_feature 1..20: note = chemically synthesized
  source 1..20: mol_type = other DNA
tgccatcatgggcaacccca

SEQ ID NO: 45425 - DNA, 20 bp, synthetic construct
  misc_feature 1..20: note = chemically synthesized
  source 1..20: mol_type = other DNA
tcatgggcaaccccaaagtc

SEQ ID NO: 45426 - DNA, 20 bp, synthetic construct
  misc_feature 1..20: note = chemically synthesized
  source 1..20: mol_type = other DNA
catgggcaaccccaaagtca

SEQ ID NO: 45427 - DNA, 20 bp, synthetic construct
  misc_feature 1..20: note = chemically synthesized
  source 1..20: mol_type = other DNA
aaccccaaagtcaaggcaca

SEQ ID NO: 45428 - DNA, 20 bp, synthetic construct
  misc_feature 1..20: note = chemically synthesized
  source 1..20: mol_type = other DNA
ccaaagtcaaggcacatggc

SEQ ID NO: 45429 - DNA, 20 bp, synthetic construct
  misc_feature 1..20: note = chemically synthesized
  source 1..20: mol_type = other DNA
aagtcaaggcacatggcaag

SEQ ID NO: 45430 - DNA, 20 bp, synthetic construct
  misc_feature 1..20: note = chemically synthesized
  source 1..20: mol_type = other DNA
agtcaaggcacatggcaaga

SEQ ID NO: 45431 - DNA, 20 bp, synthetic construct
  misc_feature 1..20: note = chemically synthesized
  source 1..20: mol_type = other DNA
caagaaggtgctgacttcct

SEQ ID NO: 45432 - DNA, 20 bp, synthetic construct
  misc_feature 1..20: note = chemically synthesized
  source 1..20: mol_type = other DNA
aagaaggtgctgacttcctt

SEQ ID NO: 45433 - DNA, 20 bp, synthetic construct
  misc_feature 1..20: note = chemically synthesized
  source 1..20: mol_type = other DNA
gaaggtgctgacttccttgg

SEQ ID NO: 45434 - DNA, 20 bp, synthetic construct
  misc_feature 1..20: note = chemically synthesized
  source 1..20: mol_type = other DNA
cttccttgggagatgccata

SEQ ID NO: 45435 - DNA, 20 bp, synthetic construct
  misc_feature 1..20: note = chemically synthesized
  source 1..20: mol_type = other DNA
gggagatgccataaagcacc

SEQ ID NO: 45436 - DNA, 20 bp, synthetic construct
  misc_feature 1..20: note = chemically synthesized
  source 1..20: mol_type = other DNA
taaagcacctggatgatctc

SEQ ID NO: 45437 - DNA, 20 bp, synthetic construct
  misc_feature 1..20: note = chemically synthesized
  source 1..20: mol_type = other DNA
aaagcacctggatgatctca

SEQ ID NO: 45438 - DNA, 20 bp, synthetic construct
  misc_feature 1..20: note = chemically synthesized
  source 1..20: mol_type = other DNA
aagcacctggatgatctcaa

SEQ ID NO: 45439 - DNA, 20 bp, synthetic construct
  misc_feature 1..20: note = chemically synthesized
  source 1..20: mol_type = other DNA
atctcaagggcacctttgcc

SEQ ID NO: 45440 - DNA, 20 bp, synthetic construct
  misc_feature 1..20: note = chemically synthesized
  source 1..20: mol_type = other DNA
aagggcacctttgcccagct

SEQ ID NO: 45441 - DNA, 20 bp, synthetic construct
  misc_feature 1..20: note = chemically synthesized
  source 1..20: mol_type = other DNA
tgagtgaactgcactgtgac

SEQ ID NO: 45442 - DNA, 20 bp, synthetic construct
  misc_feature 1..20: note = chemically synthesized
  source 1..20: mol_type = other DNA
gcactgtgacaagctgcatg

SEQ ID NO: 45443 - DNA, 20 bp, synthetic construct
  misc_feature 1..20: note = chemically synthesized
  source 1..20: mol_type = other DNA
acaagctgcatgtggatcct

SEQ ID NO: 45444 - DNA, 20 bp, synthetic construct
  misc_feature 1..20: note = chemically synthesized
  source 1..20: mol_type = other DNA
atgtggatcctgagaacttc

SEQ ID NO: 45445 - DNA, 20 bp, synthetic construct
  misc_feature 1..20: note = chemically synthesized
  source 1..20: mol_type = other DNA
tgtggatcctgagaacttca

SEQ ID NO: 45446 - DNA, 20 bp, synthetic construct
  misc_feature 1..20: note = chemically synthesized
  source 1..20: mol_type = other DNA
gatcctgagaacttcaaggt

SEQ ID NO: 45447 - DNA, 20 bp, synthetic construct
  misc_feature 1..20: note = chemically synthesized
  source 1..20: mol_type = other DNA
tgagaacttcaaggtgagtc

SEQ ID NO: 45448 - DNA, 20 bp, synthetic construct
  misc_feature 1..20: note = chemically synthesized
  source 1..20: mol_type = other DNA
gagaacttcaaggtgagtcc

SEQ ID NO: 45449 - DNA, 20 bp, synthetic construct
  misc_feature 1..20: note = chemically synthesized
  source 1..20: mol_type = other DNA
gaacttcaaggtgagtccag

SEQ ID NO: 45450 - DNA, 20 bp, synthetic construct
  misc_feature 1..20: note = chemically synthesized
  source 1..20: mol_type = other DNA
ggtgagtccaggagatgttt

SEQ ID NO: 45451 - DNA, 20 bp, synthetic construct
  misc_feature 1..20: note = chemically synthesized
  source 1..20: mol_type = other DNA
tgtttcagcactgttgcctt

SEQ ID NO: 45452 - DNA, 20 bp, synthetic construct
  misc_feature 1..20: note = chemically synthesized
  source 1..20: mol_type = other DNA
gcactgttgcctttagtctc

SEQ ID NO: 45453 - DNA, 20 bp, synthetic construct
  misc_feature 1..20: note = chemically synthesized
  source 1..20: mol_type = other DNA
cactgttgcctttagtctcg

SEQ ID NO: 45454 - DNA, 20 bp, synthetic construct
  misc_feature 1..20: note = chemically synthesized
  source 1..20: mol_type = other DNA
cctttagtctcgaggcaact

SEQ ID NO: 45455 - DNA, 20 bp, synthetic construct
  misc_feature 1..20: note = chemically synthesized
  source 1..20: mol_type = other DNA
tcgaggcaacttagacaact

SEQ ID NO: 45456 - DNA, 20 bp, synthetic construct
  misc_feature 1..20: note = chemically synthesized
  source 1..20: mol_type = other DNA
agacaactgagtattgatct

SEQ ID NO: 45457 - DNA, 20 bp, synthetic construct
  misc_feature 1..20: note = chemically synthesized
  source 1..20: mol_type = other DNA
actgagtattgatctgagca

SEQ ID NO: 45458 - DNA, 20 bp, synthetic construct
  misc_feature 1..20: note = chemically synthesized
  source 1..20: mol_type = other DNA
gagtattgatctgagcacag

SEQ ID NO: 45459 - DNA, 20 bp, synthetic construct
  misc_feature 1..20: note = chemically synthesized
  source 1..20: mol_type = other DNA
agtattgatctgagcacagc

SEQ ID NO: 45460 - DNA, 20 bp, synthetic construct
  misc_feature 1..20: note = chemically synthesized
  source 1..20: mol_type = other DNA
gtattgatctgagcacagca

SEQ ID NO: 45461 - DNA, 20 bp, synthetic construct
  misc_feature 1..20: note = chemically synthesized
  source 1..20: mol_type = other DNA
atctgagcacagcagggtgt

SEQ ID NO: 45462 - DNA, 20 bp, synthetic construct
  misc_feature 1..20: note = chemically synthesized
  source 1..20: mol_type = other DNA
agcagggtgtgagctgtttg

SEQ ID NO: 45463 - DNA, 20 bp, synthetic construct
  misc_feature 1..20: note = chemically synthesized
  source 1..20: mol_type = other DNA
tgtgagctgtttgaagatac

SEQ ID NO: 45464 - DNA, 20 bp, synthetic construct
  misc_feature 1..20: note = chemically synthesized
  source 1..20: mol_type = other DNA
gtgagctgtttgaagatact

SEQ ID NO: 45465 - DNA, 20 bp, synthetic construct
  misc_feature 1..20: note = chemically synthesized
  source 1..20: mol_type = other DNA
tgagctgtttgaagatactg

SEQ ID NO: 45466 - DNA, 20 bp, synthetic construct
  misc_feature 1..20: note = chemically synthesized
  source 1..20: mol_type = other DNA
ctgtttgaagatactggggt

SEQ ID NO: 45467 - DNA, 20 bp, synthetic construct
  misc_feature 1..20: note = chemically synthesized
  source 1..20: mol_type = other DNA
tgtttgaagatactggggtt

SEQ ID NO: 45468 - DNA, 20 bp, synthetic construct
  misc_feature 1..20: note = chemically synthesized
  source 1..20: mol_type = other DNA
tttgaagatactggggttgg

SEQ ID NO: 45469 - DNA, 20 bp, synthetic construct
  misc_feature 1..20: note = chemically synthesized
  source 1..20: mol_type = other DNA
agatactggggttgggagtg

SEQ ID NO: 45470 - DNA, 20 bp, synthetic construct
  misc_feature 1..20: note = chemically synthesized
  source 1..20: mol_type = other DNA
ggttgggagtgaagaaactg

SEQ ID NO: 45471 - DNA, 20 bp, synthetic construct
  misc_feature 1..20: note = chemically synthesized
  source 1..20: mol_type = other DNA
ttgggagtgaagaaactgca

SEQ ID NO: 45472 - DNA, 20 bp, synthetic construct
  misc_feature 1..20: note = chemically synthesized
  source 1..20: mol_type = other DNA
tgggagtgaagaaactgcag

SEQ ID NO: 45473 - DNA, 20 bp, synthetic construct
  misc_feature 1..20: note = chemically synthesized
  source 1..20: mol_type = other DNA
agaaactgcagaggactaac

SEQ ID NO: 45474 - DNA, 20 bp, synthetic construct
  misc_feature 1..20: note = chemically synthesized
  source 1..20: mol_type = other DNA
gaaactgcagaggactaact

SEQ ID NO: 45475 - DNA, 20 bp, synthetic construct
  misc_feature 1..20: note = chemically synthesized
  source 1..20: mol_type = other DNA
tgcagaggactaactgggct

SEQ ID NO: 45476 - DNA, 20 bp, synthetic construct
  misc_feature 1..20: note = chemically synthesized
  source 1..20: mol_type = other DNA
ggactaactgggctgagacc

SEQ ID NO: 45477 - DNA, 20 bp, synthetic construct
  misc_feature 1..20: note = chemically synthesized
  source 1..20: mol_type = other DNA
ctaactgggctgagacccag

SEQ ID NO: 45478 - DNA, 20 bp, synthetic construct
  misc_feature 1..20: note = chemically synthesized
  source 1..20: mol_type = other DNA
gagacccagtggcaatgttt

SEQ ID NO: 45479 - DNA, 20 bp, synthetic construct
  misc_feature 1..20: note = chemically synthesized
  source 1..20: mol_type = other DNA
agacccagtggcaatgtttt

SEQ ID NO: 45480 - DNA, 20 bp, synthetic construct
  misc_feature 1..20: note = chemically synthesized
  source 1..20: mol_type = other DNA
gacccagtggcaatgtttta

SEQ ID NO: 45481 - DNA, 20 bp, synthetic construct
  misc_feature 1..20: note = chemically synthesized
  source 1..20: mol_type = other DNA
gtggcaatgttttagggcct

SEQ ID NO: 45482 - DNA, 20 bp, synthetic construct
  misc_feature 1..20: note = chemically synthesized
  source 1..20: mol_type = other DNA
tggcaatgttttagggccta

SEQ ID NO: 45483 - DNA, 20 bp, synthetic construct
  misc_feature 1..20: note = chemically synthesized
  source 1..20: mol_type = other DNA
gcaatgttttagggcctaag

SEQ ID NO: 45484 - DNA, 20 bp, synthetic construct
  misc_feature 1..20: note = chemically synthesized
  source 1..20: mol_type = other DNA
aaggagtgcctctgaaaatc

SEQ ID NO: 45485 - DNA, 20 bp, synthetic construct
  misc_feature 1..20: note = chemically synthesized
  source 1..20: mol_type = other DNA
agtgcctctgaaaatctaga

SEQ ID NO: 45486 - DNA, 20 bp, synthetic construct
  misc_feature 1..20: note = chemically synthesized
  source 1..20: mol_type = other DNA
agatggacaactttgacttt

SEQ ID NO: 45487 - DNA, 20 bp, synthetic construct
  misc_feature 1..20: note = chemically synthesized
  source 1..20: mol_type = other DNA
gacaactttgactttgagaa

SEQ ID NO: 45488 - DNA, 20 bp, synthetic construct
  misc_feature 1..20: note = chemically synthesized
  source 1..20: mol_type = other DNA
caactttgactttgagaaaa

SEQ ID NO: 45489 - DNA, 20 bp, synthetic construct
  misc_feature 1..20: note = chemically synthesized
  source 1..20: mol_type = other DNA
actttgactttgagaaaaga

SEQ ID NO: 45490 - DNA, 20 bp, synthetic construct
  misc_feature 1..20: note = chemically synthesized
  source 1..20: mol_type = other DNA
ctttgactttgagaaaagag

SEQ ID NO: 45491 - DNA, 20 bp, synthetic construct
  misc_feature 1..20: note = chemically synthesized
  source 1..20: mol_type = other DNA
tgactttgagaaaagagagg

SEQ ID NO: 45492 - DNA, 20 bp, synthetic construct
  misc_feature 1..20: note = chemically synthesized
  source 1..20: mol_type = other DNA
gagaaaagagaggtggaaat

SEQ ID NO: 45493 - DNA, 20 bp, synthetic construct
  misc_feature 1..20: note = chemically synthesized
  source 1..20: mol_type = other DNA
agaaaagagaggtggaaatg

SEQ ID NO: 45494 - DNA, 20 bp, synthetic construct
  misc_feature 1..20: note = chemically synthesized
  source 1..20: mol_type = other DNA
ggaaaatgacttttctttat

SEQ ID NO: 45495 - DNA, 20 bp, synthetic construct
  misc_feature 1..20: note = chemically synthesized
  source 1..20: mol_type = other DNA
gacttttctttattagattt

SEQ ID NO: 45496 - DNA, 20 bp, synthetic construct
  misc_feature 1..20: note = chemically synthesized
  source 1..20: mol_type = other DNA
ttttctttattagatttcgg

SEQ ID NO: 45497 - DNA, 20 bp, synthetic construct
  misc_feature 1..20: note = chemically synthesized
  source 1..20: mol_type = other DNA
ctttattagatttcggtaga

SEQ ID NO: 45498 - DNA, 20 bp, synthetic construct
  misc_feature 1..20: note = chemically synthesized
  source 1..20: mol_type = other DNA
ttcgttttaaaacatctatc

SEQ ID NO: 45499 - DNA, 20 bp, synthetic construct
  misc_feature 1..20: note = chemically synthesized
  source 1..20: mol_type = other DNA
cgttttaaaacatctatctg

SEQ ID NO: 45500 - DNA, 20 bp, synthetic construct
  misc_feature 1..20: note = chemically synthesized
  source 1..20: mol_type = other DNA
gttttaaaacatctatctgg

SEQ ID NO: 45501 - DNA, 20 bp, synthetic construct
  misc_feature 1..20: note = chemically synthesized
  source 1..20: mol_type = other DNA
ttaaaacatctatctggagg

SEQ ID NO: 45502 - DNA, 20 bp, synthetic construct
  misc_feature 1..20: note = chemically synthesized
  source 1..20: mol_type = other DNA
taaaacatctatctggaggc

SEQ ID NO: 45503 - DNA, 20 bp, synthetic construct
  misc_feature 1..20: note = chemically synthesized
  source 1..20: mol_type = other DNA
catctatctggaggcaggac

SEQ ID NO: 45504 - DNA, 20 bp, synthetic construct
  misc_feature 1..20: note = chemically synthesized
  source 1..20: mol_type = other DNA
atctggaggcaggacaagta

SEQ ID NO: 45505 - DNA, 20 bp, synthetic construct
  misc_feature 1..20: note = chemically synthesized
  source 1..20: mol_type = other DNA
ggacaagtatggtcattaaa

SEQ ID NO: 45506 - DNA, 20 bp, synthetic construct
  misc_feature 1..20: note = chemically synthesized
  source 1..20: mol_type = other DNA
gtatggtcattaaaaagatg

SEQ ID NO: 45507 - DNA, 20 bp, synthetic construct
  misc_feature 1..20: note = chemically synthesized
  source 1..20: mol_type = other DNA
tatggtcattaaaaagatgc

SEQ ID NO: 45508 - DNA, 20 bp, synthetic construct
  misc_feature 1..20: note = chemically synthesized
  source 1..20: mol_type = other DNA
ggtcattaaaaagatgcagg

SEQ ID NO: 45509 - DNA, 20 bp, synthetic construct
  misc_feature 1..20: note = chemically synthesized
  source 1..20: mol_type = other DNA
cattaaaaagatgcaggcag

SEQ ID NO: 45510 - DNA, 20 bp, synthetic construct
  misc_feature 1..20: note = chemically synthesized
  source 1..20: mol_type = other DNA
attaaaaagatgcaggcaga

SEQ ID NO: 45511 - DNA, 20 bp, synthetic construct
  misc_feature 1..20: note = chemically synthesized
  source 1..20: mol_type = other DNA
tgcaggcagaaggcatatat

SEQ ID NO: 45512 - DNA, 20 bp, synthetic construct
  misc_feature 1..20: note = chemically synthesized
  source 1..20: mol_type = other DNA
gcagaaggcatatattggct
